United States Patent Application Publication US 2024/0066150 A1 - sequence listing, part 2

SEQ ID NO: 5569 - DNA, 20 bp, synthetic construct
  misc_feature 1..20: note = Description of Artificial Sequence: Synthetic oligonucleotide
  misc_feature 1..20: note = Target: SCN10A; (+) strand; PAM type: NAAAAC; PAM sequence: TAAAAC
  source 1..20: mol_type = other DNA
ctcatatgggaagcagagct

SEQ ID NO: 5570 - DNA, 20 bp, synthetic construct
  misc_feature 1..20: note = Description of Artificial Sequence: Synthetic oligonucleotide
  misc_feature 1..20: note = Target: SCN10A; (+) strand; PAM type: NAAAAC; PAM sequence: AAAAAC
  source 1..20: mol_type = other DNA
ggcagctgataaacacaaat

SEQ ID NO: 5571 - DNA, 20 bp, synthetic construct
  misc_feature 1..20: note = Description of Artificial Sequence: Synthetic oligonucleotide
  misc_feature 1..20: note = Target: SCN10A; (+) strand; PAM type: NAAAAC; PAM sequence: AAAAAC
  source 1..20: mol_type = other DNA
ttgtttaagagttgcagtaa

SEQ ID NO: 5572 - DNA, 20 bp, synthetic construct
  misc_feature 1..20: note = Description of Artificial Sequence: Synthetic oligonucleotide
  misc_feature 1..20: note = Target: SCN10A; (+) strand; PAM type: NAAAAC; PAM sequence: AAAAAC
  source 1..20: mol_type = other DNA
gttgcagtaaaaaaacaaac

SEQ ID NO: 5573 - DNA, 20 bp, synthetic construct
  misc_feature 1..20: note = Description of Artificial Sequence: Synthetic oligonucleotide
  misc_feature 1..20: note = Target: SCN10A; (+) strand; PAM type: NAAAAC; PAM sequence: AAAAAC
  source 1..20: mol_type = other DNA
aaactatgtgcagagaataa

SEQ ID NO: 5574 - DNA, 20 bp, synthetic construct
  misc_feature 1..20: note = Description of Artificial Sequence: Synthetic oligonucleotide
  misc_feature 1..20: note = Target: SCN10A; (+) strand; PAM type: NAAAAC; PAM sequence: CAAAAC
  source 1..20: mol_type = other DNA
tccagaattgaagaaaatta

SEQ ID NO: 5575 - DNA, 20 bp, synthetic construct
  misc_feature 1..20: note = Description of Artificial Sequence: Synthetic oligonucleotide
  misc_feature 1..20: note = Target: SCN10A; (+) strand; PAM type: NAAAAC; PAM sequence: AAAAAC
  source 1..20: mol_type = other DNA
ctccccttgtgtgatgatga

SEQ ID NO: 5576 - DNA, 20 bp, synthetic construct
  misc_feature 1..20: note = Description of Artificial Sequence: Synthetic oligonucleotide
  misc_feature 1..20: note = Target: SCN10A; (+) strand; PAM type: NAAAAC; PAM sequence: TAAAAC
  source 1..20: mol_type = other DNA
gcctttcactgtttaaacct

SEQ ID NO: 5577 - DNA, 20 bp, synthetic construct
  misc_feature 1..20: note = Description of Artificial Sequence: Synthetic oligonucleotide
  misc_feature 1..20: note = Target: SCN10A; (+) strand; PAM type: NAAAAC; PAM sequence: CAAAAC
  source 1..20: mol_type = other DNA
taatcttggaaccttgatac

SEQ ID NO: 5578 - DNA, 20 bp, synthetic construct
  misc_feature 1..20: note = Description of Artificial Sequence: Synthetic oligonucleotide
  misc_feature 1..20: note = Target: SCN10A; (+) strand; PAM type: NAAAAC; PAM sequence: TAAAAC
  source 1..20: mol_type = other DNA
tgtgattatgttagaaaatt

SEQ ID NO: 5579 - DNA, 20 bp, synthetic construct
  misc_feature 1..20: note = Description of Artificial Sequence: Synthetic oligonucleotide
  misc_feature 1..20: note = Target: SCN10A; (+) strand; PAM type: NAAAAC; PAM sequence: AAAAAC
  source 1..20: mol_type = other DNA
gatcctatggagaaaattat

SEQ ID NO: 5580 - DNA, 20 bp, synthetic construct
  misc_feature 1..20: note = Description of Artificial Sequence: Synthetic oligonucleotide
  misc_feature 1..20: note = Target: SCN10A; (+) strand; PAM type: NAAAAC; PAM sequence: AAAAAC
  source 1..20: mol_type = other DNA
ttacagcagtccctaatggg

SEQ ID NO: 5581 - DNA, 20 bp, synthetic construct
  misc_feature 1..20: note = Description of Artificial Sequence: Synthetic oligonucleotide
  misc_feature 1..20: note = Target: SCN10A; (+) strand; PAM type: NAAAAC; PAM sequence: TAAAAC
  source 1..20: mol_type = other DNA
cttgtgctaggcccttggga

SEQ ID NO: 5582 - DNA, 20 bp, synthetic construct
  misc_feature 1..20: note = Description of Artificial Sequence: Synthetic oligonucleotide
  misc_feature 1..20: note = Target: SCN10A; (+) strand; PAM type: NAAAAC; PAM sequence: AAAAAC
  source 1..20: mol_type = other DNA
agtattccaggcacagcgaa

SEQ ID NO: 5583 - DNA, 20 bp, synthetic construct
  misc_feature 1..20: note = Description of Artificial Sequence: Synthetic oligonucleotide
  misc_feature 1..20: note = Target: SCN10A; (+) strand; PAM type: NAAAAC; PAM sequence: GAAAAC
  source 1..20: mol_type = other DNA
tcaatctgctccagttttct

SEQ ID NO: 5584 - DNA, 20 bp, synthetic construct
  misc_feature 1..20: note = Description of Artificial Sequence: Synthetic oligonucleotide
  misc_feature 1..20: note = Target: SCN10A; (+) strand; PAM type: NAAAAC; PAM sequence: GAAAAC
  source 1..20: mol_type = other DNA
gctccagttttctgaaaact

SEQ ID NO: 5585 - DNA, 20 bp, synthetic construct
  misc_feature 1..20: note = Description of Artificial Sequence: Synthetic oligonucleotide
  misc_feature 1..20: note = Target: SCN10A; (+) strand; PAM type: NAAAAC; PAM sequence: TAAAAC
  source 1..20: mol_type = other DNA
tgaaaataaagtctattaat

SEQ ID NO: 5586 - DNA, 20 bp, synthetic construct
  misc_feature 1..20: note = Description of Artificial Sequence: Synthetic oligonucleotide
  misc_feature 1..20: note = Target: SCN10A; (+) strand; PAM type: NAAAAC; PAM sequence: AAAAAC
  source 1..20: mol_type = other DNA
ggtgaggttttggcaaacac

SEQ ID NO: 5587 - DNA, 20 bp, synthetic construct
  misc_feature 1..20: note = Description of Artificial Sequence: Synthetic oligonucleotide
  misc_feature 1..20: note = Target: SCN10A; (+) strand; PAM type: NAAAAC; PAM sequence: TAAAAC
  source 1..20: mol_type = other DNA
caaaagtagcacatagacct

SEQ ID NO: 5588 - DNA, 20 bp, synthetic construct
  misc_feature 1..20: note = Description of Artificial Sequence: Synthetic oligonucleotide
  misc_feature 1..20: note = Target: SCN10A; (+) strand; PAM type: NAAAAC; PAM sequence: GAAAAC
  source 1..20: mol_type = other DNA
cccagcctcgtattttatta

SEQ ID NO: 5589 - DNA, 20 bp, synthetic construct
  misc_feature 1..20: note = Description of Artificial Sequence: Synthetic oligonucleotide
  misc_feature 1..20: note = Target: SCN10A; (+) strand; PAM type: NAAAAC; PAM sequence: AAAAAC
  source 1..20: mol_type = other DNA
ttggtctttagagtgttttt

SEQ ID NO: 5590 - DNA, 20 bp, synthetic construct
  misc_feature 1..20: note = Description of Artificial Sequence: Synthetic oligonucleotide
  misc_feature 1..20: note = Target: SCN10A; (+) strand; PAM type: NAAAAC; PAM sequence: AAAAAC
  source 1..20: mol_type = other DNA
cacccacccctgaggatctt

SEQ ID NO: 5591 - DNA, 20 bp, synthetic construct
  misc_feature 1..20: note = Description of Artificial Sequence: Synthetic oligonucleotide
  misc_feature 1..20: note = Target: SCN10A; (+) strand; PAM type: NAAAAC; PAM sequence: AAAAAC
  source 1..20: mol_type = other DNA
tttccccaagccatcaagag

SEQ ID NO: 5592 - DNA, 20 bp, synthetic construct
  misc_feature 1..20: note = Description of Artificial Sequence: Synthetic oligonucleotide
  misc_feature 1..20: note = Target: SCN10A; (+) strand; PAM type: NAAAAC; PAM sequence: TAAAAC
  source 1..20: mol_type = other DNA
agtcagtctggttcagtagt

SEQ ID NO: 5593 - DNA, 20 bp, synthetic construct
  misc_feature 1..20: note = Description of Artificial Sequence: Synthetic oligonucleotide
  misc_feature 1..20: note = Target: SCN10A; (+) strand; PAM type: NAAAAC; PAM sequence: GAAAAC
  source 1..20: mol_type = other DNA
tgcatccttcttatggagaa

SEQ ID NO: 5594 - DNA, 20 bp, synthetic construct
  misc_feature 1..20: note = Description of Artificial Sequence: Synthetic oligonucleotide
  misc_feature 1..20: note = Target: SCN10A; (+) strand; PAM type: NAAAAC; PAM sequence: CAAAAC
  source 1..20: mol_type = other DNA
gacctcagcctaggtgctgc

SEQ ID NO: 5595 - DNA, 20 bp, synthetic construct
  misc_feature 1..20: note = Description of Artificial Sequence: Synthetic oligonucleotide
  misc_feature 1..20: note = Target: SCN10A; (+) strand; PAM type: NAAAAC; PAM sequence: CAAAAC
  source 1..20: mol_type = other DNA
ccttcattgtacttgcctgg

SEQ ID NO: 5596 - DNA, 20 bp, synthetic construct
  misc_feature 1..20: note = Description of Artificial Sequence: Synthetic oligonucleotide
  misc_feature 1..20: note = Target: SCN10A; (+) strand; PAM type: NAAAAC; PAM sequence: AAAAAC
  source 1..20: mol_type = other DNA
ttttgaatctcatagcccta

SEQ ID NO: 5597 - DNA, 20 bp, synthetic construct
  misc_feature 1..20: note = Description of Artificial Sequence: Synthetic oligonucleotide
  misc_feature 1..20: note = Target: SCN10A; (+) strand; PAM type: NAAAAC; PAM sequence: GAAAAC
  source 1..20: mol_type = other DNA
cattgtttataataataatg

SEQ ID NO: 5598 - DNA, 20 bp, synthetic construct
  misc_feature 1..20: note = Description of Artificial Sequence: Synthetic oligonucleotide
  misc_feature 1..20: note = Target: SCN10A; (+) strand; PAM type: NAAAAC; PAM sequence: TAAAAC
  source 1..20: mol_type = other DNA
gtagtttcacttttttcact

SEQ ID NO: 5599 - DNA, 20 bp, synthetic construct
  misc_feature 1..20: note = Description of Artificial Sequence: Synthetic oligonucleotide
  misc_feature 1..20: note = Target: SCN10A; (+) strand; PAM type: NAAAAC; PAM sequence: TAAAAC
  source 1..20: mol_type = other DNA
aaagtatctacttgccagct

SEQ ID NO: 5600 - DNA, 20 bp, synthetic construct
  misc_feature 1..20: note = Description of Artificial Sequence: Synthetic oligonucleotide
  misc_feature 1..20: note = Target: SCN10A; (+) strand; PAM type: NAAAAC; PAM sequence: CAAAAC
  source 1..20: mol_type = other DNA
cattagcatgcaaatatgct

SEQ ID NO: 5601 - DNA, 20 bp, synthetic construct
  misc_feature 1..20: note = Description of Artificial Sequence: Synthetic oligonucleotide
  misc_feature 1..20: note = Target: SCN10A; (+) strand; PAM type: NAAAAC; PAM sequence: AAAAAC
  source 1..20: mol_type = other DNA
ctcaaaacaaacaaacaaac

SEQ ID NO: 5602 - DNA, 20 bp, synthetic construct
  misc_feature 1..20: note = Description of Artificial Sequence: Synthetic oligonucleotide
  misc_feature 1..20: note = Target: SCN10A; (+) strand; PAM type: NAAAAC; PAM sequence: AAAAAC
  source 1..20: mol_type = other DNA
acaaaaactcccccaaacac

SEQ ID NO: 5603 - DNA, 20 bp, synthetic construct
  misc_feature 1..20: note = Description of Artificial Sequence: Synthetic oligonucleotide
  misc_feature 1..20: note = Target: SCN10A; (+) strand; PAM type: NAAAAC; PAM sequence: GAAAAC
  source 1..20: mol_type = other DNA
gatgatgtgccctatgctca

SEQ ID NO: 5604 - DNA, 20 bp, synthetic construct
  misc_feature 1..20: note = Description of Artificial Sequence: Synthetic oligonucleotide
  misc_feature 1..20: note = Target: SCN10A; (+) strand; PAM type: NAAAAC; PAM sequence: TAAAAC
  source 1..20: mol_type = other DNA
tcctctcctcagattttctt

SEQ ID NO: 5605 - DNA, 20 bp, synthetic construct
  misc_feature 1..20: note = Description of Artificial Sequence: Synthetic oligonucleotide
  misc_feature 1..20: note = Target: SCN10A; (+) strand; PAM type: NAAAAC; PAM sequence: CAAAAC
  source 1..20: mol_type = other DNA
aatggaggtcaggctgtgag

SEQ ID NO: 5606 - DNA, 20 bp, synthetic construct
  misc_feature 1..20: note = Description of Artificial Sequence: Synthetic oligonucleotide
  misc_feature 1..20: note = Target: SCN10A; (+) strand; PAM type: NAAAAC; PAM sequence: CAAAAC
  source 1..20: mol_type = other DNA
cctgactcatttaatcctca

SEQ ID NO: 5607 - DNA, 20 bp, synthetic construct
  misc_feature 1..20: note = Description of Artificial Sequence: Synthetic oligonucleotide
  misc_feature 1..20: note = Target: SCN10A; (+) strand; PAM type: NAAAAC; PAM sequence: AAAAAC
  source 1..20: mol_type = other DNA
agttttcgagaataaatgaa

SEQ ID NO: 5608 - DNA, 20 bp, synthetic construct
  misc_feature 1..20: note = Description of Artificial Sequence: Synthetic oligonucleotide
  misc_feature 1..20: note = Target: SCN10A; (+) strand; PAM type: NAAAAC; PAM sequence: CAAAAC
  source 1..20: mol_type = other DNA
tgctgtttgatgactaatag

SEQ ID NO: 5609 - DNA, 20 bp, synthetic construct
  misc_feature 1..20: note = Description of Artificial Sequence: Synthetic oligonucleotide
  misc_feature 1..20: note = Target: SCN10A; (+) strand; PAM type: NAAAAC; PAM sequence: AAAAAC
  source 1..20: mol_type = other DNA
ttgatgactaatagcaaaac

SEQ ID NO: 5610 - DNA, 20 bp, synthetic construct
  misc_feature 1..20: note = Description of Artificial Sequence: Synthetic oligonucleotide
  misc_feature 1..20: note = Target: SCN10A; (+) strand; PAM type: NAAAAC; PAM sequence: CAAAAC
  source 1..20: mol_type = other DNA
actaatagcaaaacaaaaac

SEQ ID NO: 5611 - DNA, 20 bp, synthetic construct
  misc_feature 1..20: note = Description of Artificial Sequence: Synthetic oligonucleotide
  misc_feature 1..20: note = Target: SCN10A; (+) strand; PAM type: NAAAAC; PAM sequence: AAAAAC
  source 1..20: mol_type = other DNA
aaaaaccaaaacaaacaaac

SEQ ID NO: 5612 - DNA, 20 bp, synthetic construct
  misc_feature 1..20: note = Description of Artificial Sequence: Synthetic oligonucleotide
  misc_feature 1..20: note = Target: SCN10A; (+) strand; PAM type: NAAAAC; PAM sequence: AAAAAC
  source 1..20: mol_type = other DNA
gcctttccccagattttctt

SEQ ID NO: 5613 - DNA, 20 bp, synthetic construct
  misc_feature 1..20: note = Description of Artificial Sequence: Synthetic oligonucleotide
  misc_feature 1..20: note = Target: SCN10A; (+) strand; PAM type: NAAAAC; PAM sequence: CAAAAC
  source 1..20: mol_type = other DNA
aatggagatccagctgtgag

SEQ ID NO: 5614 - DNA, 20 bp, synthetic construct
  misc_feature 1..20: note = Description of Artificial Sequence: Synthetic oligonucleotide
  misc_feature 1..20: note = Target: SCN10A; (+) strand; PAM type: NAAAAC; PAM sequence: GAAAAC
  source 1..20: mol_type = other DNA
attcagcctagggctgggag

SEQ ID NO: 5615 - DNA, 20 bp, synthetic construct
  misc_feature 1..20: note = Description of Artificial Sequence: Synthetic oligonucleotide
  misc_feature 1..20: note = Target: SCN10A; (+) strand; PAM type: NAAAAC; PAM sequence: AAAAAC
  source 1..20: mol_type = other DNA
tttgaaaaattatgcatcta

SEQ ID NO: 5616 - DNA, 20 bp, synthetic construct
  misc_feature 1..20: note = Description of Artificial Sequence: Synthetic oligonucleotide
  misc_feature 1..20: note = Target: SCN10A; (+) strand; PAM type: NAAAAC; PAM sequence: AAAAAC
  source 1..20: mol_type = other DNA
ctagccagagagggcaaatg

SEQ ID NO: 5617 - DNA, 20 bp, synthetic construct
  misc_feature 1..20: note = Description of Artificial Sequence: Synthetic oligonucleotide
  misc_feature 1..20: note = Target: SCN10A; (+) strand; PAM type: NAAAAC; PAM sequence: AAAAAC
  source 1..20: mol_type = other DNA
actggtctgtgattttccac

SEQ ID NO: 5618 - DNA, 20 bp, synthetic construct
  misc_feature 1..20: note = Description of Artificial Sequence: Synthetic oligonucleotide
  misc_feature 1..20: note = Target: SCN10A; (+) strand; PAM type: NAAAAC; PAM sequence: AAAAAC
  source 1..20: mol_type = other DNA
gttataaaatggctttagat

SEQ ID NO: 5619 - DNA, 20 bp, synthetic construct
  misc_feature 1..20: note = Description of Artificial Sequence: Synthetic oligonucleotide
  misc_feature 1..20: note = Target: SCN10A; (+) strand; PAM type: NAAAAC; PAM sequence: CAAAAC
  source 1..20: mol_type = other DNA
gatgtttcttccctgattct

SEQ ID NO: 5620 - DNA, 20 bp, synthetic construct
  misc_feature 1..20: note = Description of Artificial Sequence: Synthetic oligonucleotide
  misc_feature 1..20: note = Target: SCN10A; (+) strand; PAM type: NAAAAC; PAM sequence: AAAAAC
  source 1..20: mol_type = other DNA
attgtgaagtgtcaattaaa

SEQ ID NO: 5621 - DNA, 20 bp, synthetic construct
  misc_feature 1..20: note = Description of Artificial Sequence: Synthetic oligonucleotide
  misc_feature 1..20: note = Target: SCN10A; (+) strand; PAM type: NAAAAC; PAM sequence: AAAAAC
  source 1..20: mol_type = other DNA
aaaaaactaagtaaaaaaat

SEQ ID NO: 5622 - DNA, 20 bp, synthetic construct
  misc_feature 1..20: note = Description of Artificial Sequence: Synthetic oligonucleotide
  misc_feature 1..20: note = Target: SCN10A; (+) strand; PAM type: NAAAAC; PAM sequence: GAAAAC
  source 1..20: mol_type = other DNA
tcacttagcttcttctttga

SEQ ID NO: 5623 - DNA, 20 bp, synthetic construct
  misc_feature 1..20: note = Description of Artificial Sequence: Synthetic oligonucleotide
  misc_feature 1..20: note = Target: SCN10A; (+) strand; PAM type: NAAAAC; PAM sequence: TAAAAC
  source 1..20: mol_type = other DNA
gtattggtttctgttatcca

SEQ ID NO: 5624 - DNA, 20 bp, synthetic construct
  misc_feature 1..20: note = Description of Artificial Sequence: Synthetic oligonucleotide
  misc_feature 1..20: note = Target: SCN10A; (+) strand; PAM type: NAAAAC; PAM sequence: TAAAAC
  source 1..20: mol_type = other DNA
cagtagcaataacgcagact

SEQ ID NO: 5625 - DNA, 20 bp, synthetic construct
  misc_feature 1..20: note = Description of Artificial Sequence: Synthetic oligonucleotide
  misc_feature 1..20: note = Target: SCN10A; (+) strand; PAM type: NAAAAC; PAM sequence: TAAAAC
  source 1..20: mol_type = other DNA
tcagaaagaagtcagttgcc

SEQ ID NO: 5626 - DNA, 20 bp, synthetic construct
  misc_feature 1..20: note = Description of Artificial Sequence: Synthetic oligonucleotide
  misc_feature 1..20: note = Target: SCN10A; (+) strand; PAM type: NAAAAC; PAM sequence: GAAAAC
  source 1..20: mol_type = other DNA
catttaagtcaaaggcaaat

SEQ ID NO: 5627 - DNA, 20 bp, synthetic construct
  misc_feature 1..20: note = Description of Artificial Sequence: Synthetic oligonucleotide
  misc_feature 1..20: note = Target: SCN10A; (+) strand; PAM type: NAAAAC; PAM sequence: TAAAAC
  source 1..20: mol_type = other DNA
ggaaatagaatacccaaaag

SEQ ID NO: 5628 - DNA, 20 bp, synthetic construct
  misc_feature 1..20: note = Description of Artificial Sequence: Synthetic oligonucleotide
  misc_feature 1..20: note = Target: SCN10A; (+) strand; PAM type: NAAAAC; PAM sequence: AAAAAC
  source 1..20: mol_type = other DNA
agttgcagccccaccaaggc

SEQ ID NO: 5629 - DNA, 20 bp, synthetic construct
  misc_feature 1..20: note = Description of Artificial Sequence: Synthetic oligonucleotide
  misc_feature 1..20: note = Target: SCN10A; (+) strand; PAM type: NAAAAC; PAM sequence: GAAAAC
  source 1..20: mol_type = other DNA
gtggagtgtgaggaaggtgg

SEQ ID NO: 5630 - DNA, 20 bp, synthetic construct
  misc_feature 1..20: note = Description of Artificial Sequence: Synthetic oligonucleotide
  misc_feature 1..20: note = Target: SCN10A; (+) strand; PAM type: NAAAAC; PAM sequence: TAAAAC
  source 1..20: mol_type = other DNA
tgggaaaaccagggaggagg

SEQ ID NO: 5631 - DNA, 20 bp, synthetic construct
  misc_feature 1..20: note = Description of Artificial Sequence: Synthetic oligonucleotide
  misc_feature 1..20: note = Target: SCN10A; (+) strand; PAM type: NAAAAC; PAM sequence: GAAAAC
  source 1..20: mol_type = other DNA
agagaagggagttaggctgt

SEQ ID NO: 5632 - DNA, 20 bp, synthetic construct
  misc_feature 1..20: note = Description of Artificial Sequence: Synthetic oligonucleotide
  misc_feature 1..20: note = Target: SCN10A; (+) strand; PAM type: NAAAAC; PAM sequence: AAAAAC
  source 1..20: mol_type = other DNA
tcaccatttgtttgtctgaa

SEQ ID NO: 5633 - DNA, 20 bp, synthetic construct
  misc_feature 1..20: note = Description of Artificial Sequence: Synthetic oligonucleotide
  misc_feature 1..20: note = Target: SCN10A; (+) strand; PAM type: NAAAAC; PAM sequence: AAAAAC
  source 1..20: mol_type = other DNA
ctgctctgactgctccaaga

SEQ ID NO: 5634 - DNA, 20 bp, synthetic construct
  misc_feature 1..20: note = Description of Artificial Sequence: Synthetic oligonucleotide
  misc_feature 1..20: note = Target: SCN10A; (+) strand; PAM type: NAAAAC; PAM sequence: AAAAAC
  source 1..20: mol_type = other DNA
aagaagctggaggctcatct

SEQ ID NO: 5635 - DNA, 20 bp, synthetic construct
  misc_feature 1..20: note = Description of Artificial Sequence: Synthetic oligonucleotide
  misc_feature 1..20: note = Target: SCN10A; (+) strand; PAM type: NAAAAC; PAM sequence: GAAAAC
  source 1..20: mol_type = other DNA
agagcagacctaagaaagct

SEQ ID NO: 5636 - DNA, 20 bp, synthetic construct
  misc_feature 1..20: note = Description of Artificial Sequence: Synthetic oligonucleotide
  misc_feature 1..20: note = Target: SCN10A; (+) strand; PAM type: NAAAAC; PAM sequence: TAAAAC
  source 1..20: mol_type = other DNA
cagaagaagagttagagaaa

SEQ ID NO: 5637 - DNA, 20 bp, synthetic construct
  misc_feature 1..20: note = Description of Artificial Sequence: Synthetic oligonucleotide
  misc_feature 1..20: note = Target: SCN10A; (+) strand; PAM type: NAAAAC; PAM sequence: CAAAAC
  source 1..20: mol_type = other DNA
acagagcaagacttcgtctc

SEQ ID NO: 5638 - DNA, 20 bp, synthetic construct
  misc_feature 1..20: note = Description of Artificial Sequence: Synthetic oligonucleotide
  misc_feature 1..20: note = Target: SCN10A; (+) strand; PAM type: NAAAAC; PAM sequence: AAAAAC
  source 1..20: mol_type = other DNA
acagcaacaacaacaacaac

SEQ ID NO: 5639 - DNA, 20 bp, synthetic construct
  misc_feature 1..20: note = Description of Artificial Sequence: Synthetic oligonucleotide
  misc_feature 1..20: note = Target: SCN10A; (+) strand; PAM type: NAAAAC; PAM sequence: AAAAAC
  source 1..20: mol_type = other DNA
acaacaacaacaacaaaaac

SEQ ID NO: 5640 - DNA, 20 bp, synthetic construct
  misc_feature 1..20: note = Description of Artificial Sequence: Synthetic oligonucleotide
  misc_feature 1..20: note = Target: SCN10A; (+) strand; PAM type: NAAAAC; PAM sequence: AAAAAC
  source 1..20: mol_type = other DNA
aaaaacaaaaacaaaaaaaa

SEQ ID NO: 5641 - DNA, 20 bp, synthetic construct
  misc_feature 1..20: note = Description of Artificial Sequence: Synthetic oligonucleotide
  misc_feature 1..20: note = Target: SCN10A; (+) strand; PAM type: NAAAAC; PAM sequence: GAAAAC
  source 1..20: mol_type = other DNA
caaagacaaaatggaatttt

SEQ ID NO: 5642 - DNA, 20 bp, synthetic construct
  misc_feature 1..20: note = Description of Artificial Sequence: Synthetic oligonucleotide
  misc_feature 1..20: note = Target: SCN10A; (+) strand; PAM type: NAAAAC; PAM sequence: TAAAAC
  source 1..20: mol_type = other DNA
caaaaatatgatagcaaaag

SEQ ID NO: 5643 - DNA, 20 bp, synthetic construct
  misc_feature 1..20: note = Description of Artificial Sequence: Synthetic oligonucleotide
  misc_feature 1..20: note = Target: SCN10A; (+) strand; PAM type: NAAAAC; PAM sequence: GAAAAC
  source 1..20: mol_type = other DNA
tgaagaagaaaaaatctcta

SEQ ID NO: 5644 - DNA, 20 bp, synthetic construct
  misc_feature 1..20: note = Description of Artificial Sequence: Synthetic oligonucleotide
  misc_feature 1..20: note = Target: SCN10A; (+) strand; PAM type: NAAAAC; PAM sequence: GAAAAC
  source 1..20: mol_type = other DNA
acagctgtgcatcaggccta

SEQ ID NO: 5645 - DNA, 20 bp, synthetic construct
  misc_feature 1..20: note = Description of Artificial Sequence: Synthetic oligonucleotide
  misc_feature 1..20: note = Target: SCN10A; (+) strand; PAM type: NAAAAC; PAM sequence: GAAAAC
  source 1..20: mol_type = other DNA
gaacaaattagggataaata

SEQ ID NO: 5646 - DNA, 20 bp, synthetic construct
  misc_feature 1..20: note = Description of Artificial Sequence: Synthetic oligonucleotide
  misc_feature 1..20: note = Target: SCN10A; (+) strand; PAM type: NAAAAC; PAM sequence: AAAAAC
  source 1..20: mol_type = other DNA
ttattaactccaaggaaagc

SEQ ID NO: 5647 - DNA, 20 bp, synthetic construct
  misc_feature 1..20: note = Description of Artificial Sequence: Synthetic oligonucleotide
  misc_feature 1..20: note = Target: SCN10A; (+) strand; PAM type: NAAAAC; PAM sequence: TAAAAC
  source 1..20: mol_type = other DNA
tttttttgtcagaatcttta

SEQ ID NO: 5648 - DNA, 20 bp, synthetic construct
  misc_feature 1..20: note = Description of Artificial Sequence: Synthetic oligonucleotide
  misc_feature 1..20: note = Target: SCN10A; (+) strand; PAM type: NAAAAC; PAM sequence: GAAAAC
  source 1..20: mol_type = other DNA
aatcccgatattcaggctct

SEQ ID NO: 5649 - DNA, 20 bp, synthetic construct
  misc_feature 1..20: note = Description of Artificial Sequence: Synthetic oligonucleotide
  misc_feature 1..20: note = Target: SCN10A; (+) strand; PAM type: NAAAAC; PAM sequence: TAAAAC
  source 1..20: mol_type = other DNA
tattcataaaaatggtaatt

SEQ ID NO: 5650 - DNA, 20 bp, synthetic construct
  misc_feature 1..20: note = Description of Artificial Sequence: Synthetic oligonucleotide
  misc_feature 1..20: note = Target: SCN10A; (+) strand; PAM type: NAAAAC; PAM sequence: TAAAAC
  source 1..20: mol_type = other DNA
aacatttcattccttatttt

SEQ ID NO: 5651 - DNA, 20 bp, synthetic construct
  misc_feature 1..20: note = Description of Artificial Sequence: Synthetic oligonucleotide
  misc_feature 1..20: note = Target: SCN10A; (+) strand; PAM type: NAAAAC; PAM sequence: TAAAAC
  source 1..20: mol_type = other DNA
atcagaatctcattcatttt

SEQ ID NO: 5652 - DNA, 20 bp, synthetic construct
  misc_feature 1..20: note = Description of Artificial Sequence: Synthetic oligonucleotide
  misc_feature 1..20: note = Target: SCN10A; (+) strand; PAM type: NAAAAC; PAM sequence: AAAAAC
  source 1..20: mol_type = other DNA
gctttatatcattacttgac

SEQ ID NO: 5653 - DNA, 20 bp, synthetic construct
  misc_feature 1..20: note = Description of Artificial Sequence: Synthetic oligonucleotide
  misc_feature 1..20: note = Target: SCN10A; (+) strand; PAM type: NAAAAC; PAM sequence: GAAAAC
  source 1..20: mol_type = other DNA
atcattattgttatgcttca

SEQ ID NO: 5654 - DNA, 20 bp, synthetic construct
  misc_feature 1..20: note = Description of Artificial Sequence: Synthetic oligonucleotide
  misc_feature 1..20: note = Target: SCN10A; (+) strand; PAM type: NAAAAC; PAM sequence: GAAAAC
  source 1..20: mol_type = other DNA
gaagcacatacactgttttt

SEQ ID NO: 5655 - DNA, 20 bp, synthetic construct
  misc_feature 1..20: note = Description of Artificial Sequence: Synthetic oligonucleotide
  misc_feature 1..20: note = Target: SCN10A; (+) strand; PAM type: NAAAAC; PAM sequence: GAAAAC
  source 1..20: mol_type = other DNA
aaatacctaaatgtagaaag

SEQ ID NO: 5656 - DNA, 20 bp, synthetic construct
  misc_feature 1..20: note = Description of Artificial Sequence: Synthetic oligonucleotide
  misc_feature 1..20: note = Target: SCN10A; (+) strand; PAM type: NAAAAC; PAM sequence: GAAAAC
  source 1..20: mol_type = other DNA
gaaaactgtaactttgagga

SEQ ID NO: 5657 - DNA, 20 bp, synthetic construct
  misc_feature 1..20: note = Description of Artificial Sequence: Synthetic oligonucleotide
  misc_feature 1..20: note = Target: SCN10A; (+) strand; PAM type: NAAAAC; PAM sequence: AAAAAC
  source 1..20: mol_type = other DNA
tatccatttgggcaaatccc

SEQ ID NO: 5658 - DNA, 20 bp, synthetic construct
  misc_feature 1..20: note = Description of Artificial Sequence: Synthetic oligonucleotide
  misc_feature 1..20: note = Target: SCN10A; (+) strand; PAM type: NAAAAC; PAM sequence: TAAAAC
  source 1..20: mol_type = other DNA
aaatcccaaaaacataattt

SEQ ID NO: 5659 - DNA, 20 bp, synthetic construct
  misc_feature 1..20: note = Description of Artificial Sequence: Synthetic oligonucleotide
  misc_feature 1..20: note = Target: SCN10A; (+) strand; PAM type: NAAAAC; PAM sequence: GAAAAC
  source 1..20: mol_type = other DNA
acatgttctttgccaggtga

SEQ ID NO: 5660 - DNA, 20 bp, synthetic construct
  misc_feature 1..20: note = Description of Artificial Sequence: Synthetic oligonucleotide
  misc_feature 1..20: note = Target: SCN10A; (+) strand; PAM type: NAAAAC; PAM sequence: TAAAAC
  source 1..20: mol_type = other DNA
atctgttcagctaatttcta

SEQ ID NO: 5661 - DNA, 20 bp, synthetic construct
  misc_feature 1..20: note = Description of Artificial Sequence: Synthetic oligonucleotide
  misc_feature 1..20: note = Target: SCN10A; (+) strand; PAM type: NAAAAC; PAM sequence: CAAAAC
  source 1..20: mol_type = other DNA
agaagctccaaagcacttcc

SEQ ID NO: 5662 - DNA, 20 bp, synthetic construct
  misc_feature 1..20: note = Description of Artificial Sequence: Synthetic oligonucleotide
  misc_feature 1..20: note = Target: SCN10A; (+) strand; PAM type: NAAAAC; PAM sequence: GAAAAC
  source 1..20: mol_type = other DNA
gcaaatcgatgagatgcaca

SEQ ID NO: 5663 - DNA, 20 bp, synthetic construct
  misc_feature 1..20: note = Description of Artificial Sequence: Synthetic oligonucleotide
  misc_feature 1..20: note = Target: SCN10A; (+) strand; PAM type: NAAAAC; PAM sequence: AAAAAC
  source 1..20: mol_type = other DNA
tagtggttgtctttataagt

SEQ ID NO: 5664 - DNA, 20 bp, synthetic construct
  misc_feature 1..20: note = Description of Artificial Sequence: Synthetic oligonucleotide
  misc_feature 1..20: note = Target: SCN10A; (+) strand; PAM type: NAAAAC; PAM sequence: TAAAAC
  source 1..20: mol_type = other DNA
tataaatttataattataat

SEQ ID NO: 5665 - DNA, 20 bp, synthetic construct
  misc_feature 1..20: note = Description of Artificial Sequence: Synthetic oligonucleotide
  misc_feature 1..20: note = Target: SCN10A; (+) strand; PAM type: NAAAAC; PAM sequence: TAAAAC
  source 1..20: mol_type = other DNA
ggcattttgagagggtgggg

SEQ ID NO: 5666 - DNA, 20 bp, synthetic construct
  misc_feature 1..20: note = Description of Artificial Sequence: Synthetic oligonucleotide
  misc_feature 1..20: note = Target: SCN10A; (+) strand; PAM type: NAAAAC; PAM sequence: TAAAAC
  source 1..20: mol_type = other DNA
tgcaaaaaaatgttttacat

SEQ ID NO: 5667 - DNA, 20 bp, synthetic construct
  misc_feature 1..20: note = Description of Artificial Sequence: Synthetic oligonucleotide
  misc_feature 1..20: note = Target: SCN10A; (+) strand; PAM type: NAAAAC; PAM sequence: TAAAAC
  source 1..20: mol_type = other DNA
atgcataataaaaatgtaca

SEQ ID NO: 5668 - DNA, 20 bp, synthetic construct
  misc_feature 1..20: note = Description of Artificial Sequence: Synthetic oligonucleotide
  misc_feature 1..20: note = Target: SCN10A; (+) strand; PAM type: NAAAAC; PAM sequence: TAAAAC
  source 1..20: mol_type = other DNA
aaaacataaattaattattt

SEQ ID NO: 5669 - DNA, 20 bp, synthetic construct
  misc_feature 1..20: note = Description of Artificial Sequence: Synthetic oligonucleotide
  misc_feature 1..20: note = Target: SCN10A; (+) strand; PAM type: NAAAAC; PAM sequence: AAAAAC
  source 1..20: mol_type = other DNA
acacaaacagaaccaatgac

SEQ ID NO: 5670 - DNA, 20 bp, synthetic construct
  misc_feature 1..20: note = Description of Artificial Sequence: Synthetic oligonucleotide
  misc_feature 1..20: note = Target: SCN10A; (+) strand; PAM type: NAAAAC; PAM sequence: AAAAAC
  source 1..20: mol_type = other DNA
caatatcatactgaatgggc

SEQ ID NO: 5671 - DNA, 20 bp, synthetic construct
  misc_feature 1..20: note = Description of Artificial Sequence: Synthetic oligonucleotide
  misc_feature 1..20: note = Target: SCN10A; (+) strand; PAM type: NAAAAC; PAM sequence: GAAAAC
  source 1..20: mol_type = other DNA
aaactggaagcatttccttt

SEQ ID NO: 5672 - DNA, 20 bp, synthetic construct
  misc_feature 1..20: note = Description of Artificial Sequence: Synthetic oligonucleotide
  misc_feature 1..20: note = Target: SCN10A; (+) strand; PAM type: NAAAAC; PAM sequence: GAAAAC
  source 1..20: mol_type = other DNA
atgacatgactgtatattta

SEQ ID NO: 5673 - DNA, 20 bp, synthetic construct
  misc_feature 1..20: note = Description of Artificial Sequence: Synthetic oligonucleotide
  misc_feature 1..20: note = Target: SCN10A; (+) strand; PAM type: NAAAAC; PAM sequence: AAAAAC
  source 1..20: mol_type = other DNA
gagaggacacaaataaatgg

SEQ ID NO: 5674 - DNA, 20 bp, synthetic construct
  misc_feature 1..20: note = Description of Artificial Sequence: Synthetic oligonucleotide
  misc_feature 1..20: note = Target: SCN10A; (+) strand; PAM type: NAAAAC; PAM sequence: CAAAAC
  source 1..20: mol_type = other DNA
tactacaaagctacagtaac

SEQ ID NO: 5675 - DNA, 20 bp, synthetic construct
  misc_feature 1..20: note = Description of Artificial Sequence: Synthetic oligonucleotide
  misc_feature 1..20: note = Target: SCN10A; (+) strand; PAM type: NAAAAC; PAM sequence: CAAAAC
  source 1..20: mol_type = other DNA
aaacagcgaggtactggtac

SEQ ID NO: 5676 - DNA, 20 bp, synthetic construct
  misc_feature 1..20: note = Description of Artificial Sequence: Synthetic oligonucleotide
  misc_feature 1..20: note = Target: SCN10A; (+) strand; PAM type: NAAAAC; PAM sequence: GAAAAC
  source 1..20: mol_type = other DNA
tatttaataaatggtgtggg

SEQ ID NO: 5677 - DNA, 20 bp, synthetic construct
  misc_feature 1..20: note = Description of Artificial Sequence: Synthetic oligonucleotide
  misc_feature 1..20: note = Target: SCN10A; (+) strand; PAM type: NAAAAC; PAM sequence: TAAAAC
  source 1..20: mol_type = other DNA
aaagacttaaacataagacc

SEQ ID NO: 5678 - DNA, 20 bp, synthetic construct
  misc_feature 1..20: note = Description of Artificial Sequence: Synthetic oligonucleotide
  misc_feature 1..20: note = Target: SCN10A; (+) strand; PAM type: NAAAAC; PAM sequence: AAAAAC
  source 1..20: mol_type = other DNA
aacataagacctaaaaccat

SEQ ID NO: 5679 - DNA, 20 bp, synthetic construct
  misc_feature 1..20: note = Description of Artificial Sequence: Synthetic oligonucleotide
  misc_feature 1..20: note = Target: SCN10A; (+) strand; PAM type: NAAAAC; PAM sequence: GAAAAC
  source 1..20: mol_type = other DNA
aaaccataaaaaccctagaa

SEQ ID NO: 5680 - DNA, 20 bp, synthetic construct
  misc_feature 1..20: note = Description of Artificial Sequence: Synthetic oligonucleotide
  misc_feature 1..20: note = Target: SCN10A; (+) strand; PAM type: NAAAAC; PAM sequence: AAAAAC
  source 1..20: mol_type = other DNA
gctaatatccagaatctaca

SEQ ID NO: 5681 - DNA, 20 bp, synthetic construct
  misc_feature 1..20: note = Description of Artificial Sequence: Synthetic oligonucleotide
  misc_feature 1..20: note = Target: SCN10A; (+) strand; PAM type: NAAAAC; PAM sequence: AAAAAC
  source 1..20: mol_type = other DNA
acttaaacaaatttacaaga

SEQ ID NO: 5682 - DNA, 20 bp, synthetic construct
  misc_feature 1..20: note = Description of Artificial Sequence: Synthetic oligonucleotide
  misc_feature 1..20: note = Target: SCN10A; (+) strand; PAM type: NAAAAC; PAM sequence: CAAAAC
  source 1..20: mol_type = other DNA
gtcattagagaaatgccagt

SEQ ID NO: 5683 - DNA, 20 bp, synthetic construct
  misc_feature 1..20: note = Description of Artificial Sequence: Synthetic oligonucleotide
  misc_feature 1..20: note = Target: SCN10A; (+) strand; PAM type: NAAAAC; PAM sequence: GAAAAC
  source 1..20: mol_type = other DNA
agcaaactgacataagaaca

SEQ ID NO: 5684 - DNA, 20 bp, synthetic construct
  misc_feature 1..20: note = Description of Artificial Sequence: Synthetic oligonucleotide
  misc_feature 1..20: note = Target: SCN10A; (+) strand; PAM type: NAAAAC; PAM sequence: AAAAAC
  source 1..20: mol_type = other DNA
ccactgatttggttttcttt

SEQ ID NO: 5685 - DNA, 20 bp, synthetic construct
  misc_feature 1..20: note = Description of Artificial Sequence: Synthetic oligonucleotide
  misc_feature 1..20: note = Target: SCN10A; (+) strand; PAM type: NAAAAC; PAM sequence: AAAAAC
  source 1..20: mol_type = other DNA
ccagtgtaaatggtattttt

SEQ ID NO: 5686 - DNA, 20 bp, synthetic construct
  misc_feature 1..20: note = Description of Artificial Sequence: Synthetic oligonucleotide
  misc_feature 1..20: note = Target: SCN10A; (+) strand; PAM type: NAAAAC; PAM sequence: TAAAAC
  source 1..20: mol_type = other DNA
aagtatgacgcttgatactt

SEQ ID NO: 5687 - DNA, 20 bp, synthetic construct
  misc_feature 1..20: note = Description of Artificial Sequence: Synthetic oligonucleotide
  misc_feature 1..20: note = Target: SCN10A; (+) strand; PAM type: NAAAAC; PAM sequence: GAAAAC
  source 1..20: mol_type = other DNA
gtggatatggaatgtttttg

SEQ ID NO: 5688 - DNA, 20 bp, synthetic construct
  misc_feature 1..20: note = Description of Artificial Sequence: Synthetic oligonucleotide
  misc_feature 1..20: note = Target: SCN10A; (+) strand; PAM type: NAAAAC; PAM sequence: GAAAAC
  source 1..20: mol_type = other DNA
atgaaatactggctcaggaa

SEQ ID NO: 5689 - DNA, 20 bp, synthetic construct
  misc_feature 1..20: note = Description of Artificial Sequence: Synthetic oligonucleotide
  misc_feature 1..20: note = Target: SCN10A; (+) strand; PAM type: NAAAAC; PAM sequence: TAAAAC
  source 1..20: mol_type = other DNA
cagtgcttcctaaggaaaaa

SEQ ID NO: 5690 - DNA, 20 bp, synthetic construct
  misc_feature 1..20: note = Description of Artificial Sequence: Synthetic oligonucleotide
  misc_feature 1..20: note = Target: SCN10A; (+) strand; PAM type: NAAAAC; PAM sequence: GAAAAC
  source 1..20: mol_type = other DNA
ttatgtataatattagttat

SEQ ID NO: 5691 - DNA, 20 bp, synthetic construct
  misc_feature 1..20: note = Description of Artificial Sequence: Synthetic oligonucleotide
  misc_feature 1..20: note = Target: SCN10A; (+) strand; PAM type: NAAAAC; PAM sequence: GAAAAC
  source 1..20: mol_type = other DNA
aaaattcaagattcagctca

SEQ ID NO: 5692 - DNA, 20 bp, synthetic construct
  misc_feature 1..20: note = Description of Artificial Sequence: Synthetic oligonucleotide
  misc_feature 1..20: note = Target: SCN10A; (+) strand; PAM type: NAAAAC; PAM sequence: GAAAAC
  source 1..20: mol_type = other DNA
aagaaaaaaatgtaaaaaga

SEQ ID NO: 5693 - DNA, 20 bp, synthetic construct
  misc_feature 1..20: note = Description of Artificial Sequence: Synthetic oligonucleotide
  misc_feature 1..20: note = Target: SCN10A; (+) strand; PAM type: NAAAAC; PAM sequence: TAAAAC
  source 1..20: mol_type = other DNA
aagcagcttctgacattacc

SEQ ID NO: 5694 - DNA, 20 bp, synthetic construct
  misc_feature 1..20: note = Description of Artificial Sequence: Synthetic oligonucleotide
  misc_feature 1..20: note = Target: SCN10A; (+) strand; PAM type: NAAAAC; PAM sequence: CAAAAC
  source 1..20: mol_type = other DNA
agcaccataaatgtctgaaa

SEQ ID NO: 5695 - DNA, 20 bp, synthetic construct
  misc_feature 1..20: note = Description of Artificial Sequence: Synthetic oligonucleotide
  misc_feature 1..20: note = Target: SCN10A; (+) strand; PAM type: NAAAAC; PAM sequence: CAAAAC
  source 1..20: mol_type = other DNA
cataaatgtctgaaacaaaa

SEQ ID NO: 5696 - DNA, 20 bp, synthetic construct
  misc_feature 1..20: note = Description of Artificial Sequence: Synthetic oligonucleotide
  misc_feature 1..20: note = Target: SCN10A; (+) strand; PAM type: NAAAAC; PAM sequence: CAAAAC
  source 1..20: mol_type = other DNA
tatatctcatattagaaatt

SEQ ID NO: 5697 - DNA, 20 bp, synthetic construct
  misc_feature 1..20: note = Description of Artificial Sequence: Synthetic oligonucleotide
  misc_feature 1..20: note = Target: SCN10A; (+) strand; PAM type: NAAAAC; PAM sequence: TAAAAC
  source 1..20: mol_type = other DNA
attcaaaactcaggaaattt

SEQ ID NO: 5698 - DNA, 20 bp, synthetic construct
  misc_feature 1..20: note = Description of Artificial Sequence: Synthetic oligonucleotide
  misc_feature 1..20: note = Target: SCN10A; (+) strand; PAM type: NAAAAC; PAM sequence: TAAAAC
  source 1..20: mol_type = other DNA
ttttcattttataaacccac

SEQ ID NO: 5699 - DNA, 20 bp, synthetic construct
  misc_feature 1..20: note = Description of Artificial Sequence: Synthetic oligonucleotide
  misc_feature 1..20: note = Target: SCN10A; (+) strand; PAM type: NAAAAC; PAM sequence: AAAAAC
  source 1..20: mol_type = other DNA
atatttcctagttcatggag

SEQ ID NO: 5700 - DNA, 20 bp, synthetic construct
  misc_feature 1..20: note = Description of Artificial Sequence: Synthetic oligonucleotide
  misc_feature 1..20: note = Target: SCN10A; (+) strand; PAM type: NAAAAC; PAM sequence: AAAAAC
  source 1..20: mol_type = other DNA
cttaactttcctccaacttt

SEQ ID NO: 5701 - DNA, 20 bp, synthetic construct
  misc_feature 1..20: note = Description of Artificial Sequence: Synthetic oligonucleotide
  misc_feature 1..20: note = Target: SCN10A; (+) strand; PAM type: NAAAAC; PAM sequence: AAAAAC
  source 1..20: mol_type = other DNA
atggcgaaacttaatagctg

SEQ ID NO: 5702 - DNA, 20 bp, synthetic construct
  misc_feature 1..20: note = Description of Artificial Sequence: Synthetic oligonucleotide
  misc_feature 1..20: note = Target: SCN10A; (+) strand; PAM type: NAAAAC; PAM sequence: GAAAAC
  source 1..20: mol_type = other DNA
gtctttacatgacattctga

SEQ ID NO: 5703 - DNA, 20 bp, synthetic construct
  misc_feature 1..20: note = Description of Artificial Sequence: Synthetic oligonucleotide
  misc_feature 1..20: note = Target: SCN10A; (-) strand; PAM type: NNAGAAW; PAM sequence: ATAGAAT
  source 1..20: mol_type = other DNA
aatagtccgtatgcctggcc

SEQ ID NO: 5704 - DNA, 20 bp, synthetic construct
  misc_feature 1..20: note = Description of Artificial Sequence: Synthetic oligonucleotide
  misc_feature 1..20: note = Target: SCN10A; (-) strand; PAM type: NNAGAAW; PAM sequence: ACAGAAA
  source 1..20: mol_type = other DNA
aattcaaataaattctgttt

SEQ ID NO: 5705 - DNA, 20 bp, synthetic construct
  misc_feature 1..20: note = Description of Artificial Sequence: Synthetic oligonucleotide
  misc_feature 1..20: note = Target: SCN10A; (-) strand; PAM type: NNAGAAW; PAM sequence: ATAGAAA
  source 1..20: mol_type = other DNA
atacagaataaaagaaacaa

SEQ ID NO: 5706 - DNA, 20 bp, synthetic construct
  misc_feature 1..20: note = Description of Artificial Sequence: Synthetic oligonucleotide
  misc_feature 1..20: note = Target: SCN10A; (-) strand; PAM type: NNAGAAW; PAM sequence: AAAGAAA
  source 1..20: mol_type = other DNA
atatagagacatacagaata

SEQ ID NO: 5707 - DNA, 20 bp, synthetic construct
  misc_feature 1..20: note = Description of Artificial Sequence: Synthetic oligonucleotide
  misc_feature 1..20: note = Target: SCN10A; (-) strand; PAM type: NNAGAAW; PAM sequence: ACAGAAT
  source 1..20: mol_type = other DNA
aacccgggatatagagacat

SEQ ID NO: 5708 - DNA, 20 bp, synthetic construct
  misc_feature 1..20: note = Description of Artificial Sequence: Synthetic oligonucleotide
  misc_feature 1..20: note = Target: SCN10A; (-) strand; PAM type: NNAGAAW; PAM sequence: TAAGAAA
  source 1..20: mol_type = other DNA
ccaacagtgatagactggat

SEQ ID NO: 5709 - DNA, 20 bp, synthetic construct
  misc_feature 1..20: note = Description of Artificial Sequence: Synthetic oligonucleotide
  misc_feature 1..20: note = Target: SCN10A; (-) strand; PAM type: NNAGAAW; PAM sequence: CCAGAAA
  source 1..20: mol_type = other DNA
aattcctcagggatctagaa

SEQ ID NO: 5710 - DNA, 20 bp, synthetic construct
  misc_feature 1..20: note = Description of Artificial Sequence: Synthetic oligonucleotide
  misc_feature 1..20: note = Target: SCN10A; (-) strand; PAM type: NNAGAAW; PAM sequence: GGAGAAA
  source 1..20: mol_type = other DNA
acaggtgctggagaggatgt

SEQ ID NO: 5711 - DNA, 20 bp, synthetic construct
  misc_feature 1..20: note = Description of Artificial Sequence: Synthetic oligonucleotide
  misc_feature 1..20: note = Target: SCN10A; (-) strand; PAM type: NNAGAAW; PAM sequence: TTAGAAT
  source 1..20: mol_type = other DNA
gagataccatctcacaccag

SEQ ID NO: 5712 - DNA, 20 bp, synthetic construct
  misc_feature 1..20: note = Description of Artificial Sequence: Synthetic oligonucleotide
  misc_feature 1..20: note = Target: SCN10A; (-) strand; PAM type: NNAGAAW; PAM sequence: AGAGAAA
  source 1..20: mol_type = other DNA
gctcatcatcactggccatc

SEQ ID NO: 5713 - DNA, 20 bp, synthetic construct
  misc_feature 1..20: note = Description of Artificial Sequence: Synthetic oligonucleotide
  misc_feature 1..20: note = Target: SCN10A; (-) strand; PAM type: NNAGAAW; PAM sequence: CCAGAAT
  source 1..20: mol_type = other DNA
atctgacgaagggctaatat

SEQ ID NO: 5714 - DNA, 20 bp, synthetic construct
  misc_feature 1..20: note = Description of Artificial Sequence: Synthetic oligonucleotide
  misc_feature 1..20: note = Target: SCN10A; (-) strand; PAM type: NNAGAAW; PAM sequence: GGAGAAA
  source 1..20: mol_type = other DNA
gaacagaaacctacaggatg

SEQ ID NO: 5715 - DNA, 20 bp, synthetic construct
  misc_feature 1..20: note = Description of Artificial Sequence: Synthetic oligonucleotide
  misc_feature 1..20: note = Target: SCN10A; (-) strand; PAM type: NNAGAAW; PAM sequence: ACAGAAA
  source 1..20: mol_type = other DNA
agaaaccaccatcagagtga

SEQ ID NO: 5716 - DNA, 20 bp, synthetic construct
  misc_feature 1..20: note = Description of Artificial Sequence: Synthetic oligonucleotide
  misc_feature 1..20: note = Target: SCN10A; (-) strand; PAM type: NNAGAAW; PAM sequence: AAAGAAA
  source 1..20: mol_type = other DNA
taaagagcttctgagcagca

SEQ ID NO: 5717 - DNA, 20 bp, synthetic construct
  misc_feature 1..20: note = Description of Artificial Sequence: Synthetic oligonucleotide
  misc_feature 1..20: note = Target: SCN10A; (-) strand; PAM type: NNAGAAW; PAM sequence: GGAGAAA
  source 1..20: mol_type = other DNA
ggaaaactggctagccatat

SEQ ID NO: 5718 - DNA, 20 bp, synthetic construct
  misc_feature 1..20: note = Description of Artificial Sequence: Synthetic oligonucleotide
  misc_feature 1..20: note = Target: SCN10A; (-) strand; PAM type: NNAGAAW; PAM sequence: CAAGAAA
  source 1..20: mol_type = other DNA
tttgacaaacctgacaaaaa

SEQ ID NO: 5719 - DNA, 20 bp, synthetic construct
  misc_feature 1..20: note = Description of Artificial Sequence: Synthetic oligonucleotide
  misc_feature 1..20: note = Target: SCN10A; (-) strand; PAM type: NNAGAAW; PAM sequence: TCAGAAA
  source 1..20: mol_type = other DNA
aatggaacagaacagagccc

SEQ ID NO: 5720 - DNA, 20 bp, synthetic construct
  misc_feature 1..20: note = Description of Artificial Sequence: Synthetic oligonucleotide
  misc_feature 1..20: note = Target: SCN10A; (-) strand; PAM type: NNAGAAW; PAM sequence: GAAGAAA
  source 1..20: mol_type = other DNA
gtagttttttccaattctga

SEQ ID NO: 5721 - DNA, 20 bp, synthetic construct
  misc_feature 1..20: note = Description of Artificial Sequence: Synthetic oligonucleotide
  misc_feature 1..20: note = Target: SCN10A; (-) strand; PAM type: NNAGAAW; PAM sequence: TAAGAAA
  source 1..20: mol_type = other DNA
aggacaagggggaactatgc

SEQ ID NO: 5722 - DNA, 20 bp, synthetic construct
  misc_feature 1..20: note = Description of Artificial Sequence: Synthetic oligonucleotide
  misc_feature 1..20: note = Target: SCN10A; (-) strand; PAM type: NNAGAAW; PAM sequence: TCAGAAA
  source 1..20: mol_type = other DNA
ttagggttgccagtaacaaa

SEQ ID NO: 5723 - DNA, 20 bp, synthetic construct
  misc_feature 1..20: note = Description of Artificial Sequence: Synthetic oligonucleotide
  misc_feature 1..20: note = Target: SCN10A; (-) strand; PAM type: NNAGAAW; PAM sequence: TAAGAAT
  source 1..20: mol_type = other DNA
tatcattagactgtgtaact

SEQ ID NO: 5724 - DNA, 20 bp, synthetic construct
  misc_feature 1..20: note = Description of Artificial Sequence: Synthetic oligonucleotide
  misc_feature 1..20: note = Target: SCN10A; (-) strand; PAM type: NNAGAAW; PAM sequence: ACAGAAT
  source 1..20: mol_type = other DNA
attcagaacatccacttaac

SEQ ID NO: 5725 - DNA, 20 bp, synthetic construct
  misc_feature 1..20: note = Description of Artificial Sequence: Synthetic oligonucleotide
  misc_feature 1..20: note = Target: SCN10A; (-) strand; PAM type: NNAGAAW; PAM sequence: CCAGAAT
  source 1..20: mol_type = other DNA
aaaactagaatctctctggc

SEQ ID NO: 5726 - DNA, 20 bp, synthetic construct
  misc_feature 1..20: note = Description of Artificial Sequence: Synthetic oligonucleotide
  misc_feature 1..20: note = Target: SCN10A; (-) strand; PAM type: NNAGAAW; PAM sequence: CTAGAAT
  source 1..20: mol_type = other DNA
cccacccacaagaggtaaaa

SEQ ID NO: 5727 - DNA, 20 bp, synthetic construct
  misc_feature 1..20: note = Description of Artificial Sequence: Synthetic oligonucleotide
  misc_feature 1..20: note = Target: SCN10A; (-) strand; PAM type: NNAGAAW; PAM sequence: GTAGAAA
  source 1..20: mol_type = other DNA
cctggtggtacaattacaag

SEQ ID NO: 5728 - DNA, 20 bp, synthetic construct
  misc_feature 1..20: note = Description of Artificial Sequence: Synthetic oligonucleotide
  misc_feature 1..20: note = Target: SCN10A; (-) strand; PAM type: NNAGAAW; PAM sequence: AGAGAAT
  source 1..20: mol_type = other DNA
catctagcctcagaagtgta

SEQ ID NO: 5729 - DNA, 20 bp, synthetic construct
  misc_feature 1..20: note = Description of Artificial Sequence: Synthetic oligonucleotide
  misc_feature 1..20: note = Target: SCN10A; (-) strand; PAM type: NNAGAAW; PAM sequence: GAAGAAA
  source 1..20: mol_type = other DNA
acagctgtatggagacacag

SEQ ID NO: 5730 - DNA, 20 bp, synthetic construct
  misc_feature 1..20: note = Description of Artificial Sequence: Synthetic oligonucleotide
  misc_feature 1..20: note = Target: SCN10A; (-) strand; PAM type: NNAGAAW; PAM sequence: AAAGAAA
  source 1..20: mol_type = other DNA
atgcagaaaaaaacacacac

SEQ ID NO: 5731 - DNA, 20 bp, synthetic construct
  misc_feature 1..20: note = Description of Artificial Sequence: Synthetic oligonucleotide
  misc_feature 1..20: note = Target: SCN10A; (-) strand; PAM type: NNAGAAW; PAM sequence: GCAGAAA
  source 1..20: mol_type = other DNA
ggagaataccatgggaagat

SEQ ID NO: 5732 - DNA, 20 bp, synthetic construct
  misc_feature 1..20: note = Description of Artificial Sequence: Synthetic oligonucleotide
  misc_feature 1..20: note = Target: SCN10A; (-) strand; PAM type: NNAGAAW; PAM sequence: GGAGAAT
  source 1..20: mol_type = other DNA
tgaacagagacacacagaga

SEQ ID NO: 5733 - DNA, 20 bp, synthetic construct
  misc_feature 1..20: note = Description of Artificial Sequence: Synthetic oligonucleotide
  misc_feature 1..20: note = Target: SCN10A; (-) strand; PAM type: NNAGAAW; PAM sequence: AAAGAAT
  source 1..20: mol_type = other DNA
tatttttacaatgatatgtg

SEQ ID NO: 5734 - DNA, 20 bp, synthetic construct
  misc_feature 1..20: note = Description of Artificial Sequence: Synthetic oligonucleotide
  misc_feature 1..20: note = Target: SCN10A; (-) strand; PAM type: NNAGAAW; PAM sequence: CAAGAAT
  source 1..20: mol_type = other DNA
ctgatacatctcacatgcct

SEQ ID NO: 5735 - DNA, 20 bp, synthetic construct
  misc_feature 1..20: note = Description of Artificial Sequence: Synthetic oligonucleotide
  misc_feature 1..20: note = Target: SCN10A; (-) strand; PAM type: NNAGAAW; PAM sequence: GAAGAAA
  source 1..20: mol_type = other DNA
catgttgcagattttgagat

SEQ ID NO: 5736 - DNA, 20 bp, synthetic construct
  misc_feature 1..20: note = Description of Artificial Sequence: Synthetic oligonucleotide
  misc_feature 1..20: note = Target: SCN10A; (-) strand; PAM type: NNAGAAW; PAM sequence: TAAGAAT
  source 1..20: mol_type = other DNA
attgtatgaactgaatggag

SEQ ID NO: 5737 - DNA, 20 bp, synthetic construct
  misc_feature 1..20: note = Description of Artificial Sequence: Synthetic oligonucleotide
  misc_feature 1..20: note = Target: SCN10A; (-) strand; PAM type: NNAGAAW; PAM sequence: TGAGAAT
  source 1..20: mol_type = other DNA
cagaagaaaaagtataatca

SEQ ID NO: 5738 - DNA, 20 bp, synthetic construct
  misc_feature 1..20: note = Description of Artificial Sequence: Synthetic oligonucleotide
  misc_feature 1..20: note = Target: SCN10A; (-) strand; PAM type: NNAGAAW; PAM sequence: GAAGAAA
  source 1..20: mol_type = other DNA
ctccatagttaatataatca

SEQ ID NO: 5739 - DNA, 20 bp, synthetic construct
  misc_feature 1..20: note = Description of Artificial Sequence: Synthetic oligonucleotide
  misc_feature 1..20: note = Target: SCN10A; (-) strand; PAM type: NNAGAAW; PAM sequence: GAAGAAA
  source 1..20: mol_type = other DNA
ttgtaaaattggtgggaagg

SEQ ID NO: 5740 - DNA, 20 bp, synthetic construct
  misc_feature 1..20: note = Description of Artificial Sequence: Synthetic oligonucleotide
  misc_feature 1..20: note = Target: SCN10A; (-) strand; PAM type: NNAGAAW; PAM sequence: CCAGAAA
  source 1..20: mol_type = other DNA
atcatgggttctcttactct

SEQ ID NO: 5741 - DNA, 20 bp, synthetic construct
  misc_feature 1..20: note = Description of Artificial Sequence: Synthetic oligonucleotide
  misc_feature 1..20: note = Target: SCN10A; (-) strand; PAM type: NNAGAAW; PAM sequence: GGAGAAT
  source 1..20: mol_type = other DNA
ctttcaccaagaatgtccta

SEQ ID NO: 5742 - DNA, 20 bp, synthetic construct
  misc_feature 1..20: note = Description of Artificial Sequence: Synthetic oligonucleotide
  misc_feature 1..20: note = Target: SCN10A; (-) strand; PAM type: NNAGAAW; PAM sequence: CAAGAAT
  source 1..20: mol_type = other DNA
gacatcctttttgctttcac

SEQ ID NO: 5743 - DNA, 20 bp, synthetic construct
  misc_feature 1..20: note = Description of Artificial Sequence: Synthetic oligonucleotide
  misc_feature 1..20: note = Target: SCN10A; (-) strand; PAM type: NNAGAAW; PAM sequence: TGAGAAT
  source 1..20: mol_type = other DNA
agacactctctctggtcccc

SEQ ID NO: 5744 - DNA, 20 bp, synthetic construct
  misc_feature 1..20: note = Description of Artificial Sequence: Synthetic oligonucleotide
  misc_feature 1..20: note = Target: SCN10A; (-) strand; PAM type: NNAGAAW; PAM sequence: CCAGAAA
  source 1..20: mol_type = other DNA
attagccacaggaccgggtg

SEQ ID NO: 5745 - DNA, 20 bp, synthetic construct
  misc_feature 1..20: note = Description of Artificial Sequence: Synthetic oligonucleotide
  misc_feature 1..20: note = Target: SCN10A; (-) strand; PAM type: NNAGAAW; PAM sequence: GCAGAAA
  source 1..20: mol_type = other DNA
tgctgtagaccagttgtctg

SEQ ID NO: 5746 - DNA, 20 bp, synthetic construct
  misc_feature 1..20: note = Description of Artificial Sequence: Synthetic oligonucleotide
  misc_feature 1..20: note = Target: SCN10A; (-) strand; PAM type: NNAGAAW; PAM sequence: GCAGAAA
  source 1..20: mol_type = other DNA
cttatagagctggaaaataa

SEQ ID NO: 5747 - DNA, 20 bp, synthetic construct
  misc_feature 1..20: note = Description of Artificial Sequence: Synthetic oligonucleotide
  misc_feature 1..20: note = Target: SCN10A; (-) strand; PAM type: NNAGAAW; PAM sequence: ATAGAAA
  source 1..20: mol_type = other DNA
cttgtttgtgtatcagtaat

SEQ ID NO: 5748 - DNA, 20 bp, synthetic construct
  misc_feature 1..20: note = Description of Artificial Sequence: Synthetic oligonucleotide
  misc_feature 1..20: note = Target: SCN10A; (-) strand; PAM type: NNAGAAW; PAM sequence: CCAGAAA
  source 1..20: mol_type = other DNA
aaccatcaccaccatcaatg

SEQ ID NO: 5749 - DNA, 20 bp, synthetic construct
  misc_feature 1..20: note = Description of Artificial Sequence: Synthetic oligonucleotide
  misc_feature 1..20: note = Target: SCN10A; (-) strand; PAM type: NNAGAAW; PAM sequence: CAAGAAT
  source 1..20: mol_type = other DNA
taaaattgagactcagagat

SEQ ID NO: 5750 - DNA, 20 bp, synthetic construct
  misc_feature 1..20: note = Description of Artificial Sequence: Synthetic oligonucleotide
  misc_feature 1..20: note = Target: SCN10A; (-) strand; PAM type: NNAGAAW; PAM sequence: AGAGAAA
  source 1..20: mol_type = other DNA
ttttgggtccagtggtgttc

SEQ ID NO: 5751 - DNA, 20 bp, synthetic construct
  misc_feature 1..20: note = Description of Artificial Sequence: Synthetic oligonucleotide
  misc_feature 1..20: note = Target: SCN10A; (-) strand; PAM type: NNAGAAW; PAM sequence: CAAGAAA
  source 1..20: mol_type = other DNA
aaaagtcaagatatcaatgc

SEQ ID NO: 5752 - DNA, 20 bp, synthetic construct
  misc_feature 1..20: note = Description of Artificial Sequence: Synthetic oligonucleotide
  misc_feature 1..20: note = Target: SCN10A; (-) strand; PAM type: NNAGAAW; PAM sequence: ATAGAAA
  source 1..20: mol_type = other DNA
tctattagggaacatgagtg

SEQ ID NO: 5753 - DNA, 20 bp, synthetic construct
  misc_feature 1..20: note = Description of Artificial Sequence: Synthetic oligonucleotide
  misc_feature 1..20: note = Target: SCN10A; (-) strand; PAM type: NNAGAAW; PAM sequence: GAAGAAA
  source 1..20: mol_type = other DNA
tggagactgatgaccaaagt

SEQ ID NO: 5754 - DNA, 20 bp, synthetic construct
  misc_feature 1..20: note = Description of Artificial Sequence: Synthetic oligonucleotide
  misc_feature 1..20: note = Target: SCN10A; (-) strand; PAM type: NNAGAAW; PAM sequence: CAAGAAT
  source 1..20: mol_type = other DNA
aggaacagagggaacatttc

SEQ ID NO: 5755 - DNA, 20 bp, synthetic construct
  misc_feature 1..20: note = Description of Artificial Sequence: Synthetic oligonucleotide
  misc_feature 1..20: note = Target: SCN10A; (-) strand; PAM type: NNAGAAW; PAM sequence: GGAGAAT
  source 1..20: mol_type = other DNA
cctgaggtacatggggtagg

SEQ ID NO: 5756 - DNA, 20 bp, synthetic construct
  misc_feature 1..20: note = Description of Artificial Sequence: Synthetic oligonucleotide
  misc_feature 1..20: note = Target: SCN10A; (-) strand; PAM type: NNAGAAW; PAM sequence: GGAGAAA
  source 1..20: mol_type = other DNA
aaatattctgctttaagtta

SEQ ID NO: 5757 - DNA, 20 bp, synthetic construct
  misc_feature 1..20: note = Description of Artificial Sequence: Synthetic oligonucleotide
  misc_feature 1..20: note = Target: SCN10A; (-) strand; PAM type: NNAGAAW; PAM sequence: CAAGAAA
  source 1..20: mol_type = other DNA
ctgattgtacacaactcttt

SEQ ID NO: 5758 - DNA, 20 bp, synthetic construct
  misc_feature 1..20: note = Description of Artificial Sequence: Synthetic oligonucleotide
  misc_feature 1..20: note = Target: SCN10A; (-) strand; PAM type: NNAGAAW; PAM sequence: CAAGAAA
  source 1..20: mol_type = other DNA
atgtaaggcatggtggagac

SEQ ID NO: 5759 - DNA, 20 bp, synthetic construct
  misc_feature 1..20: note = Description of Artificial Sequence: Synthetic oligonucleotide
  misc_feature 1..20: note = Target: SCN10A; (-) strand; PAM type: NNAGAAW; PAM sequence: GCAGAAA
  source 1..20: mol_type = other DNA
cacaaatggcaagaaaagaa

SEQ ID NO: 5760 - DNA, 20 bp, synthetic construct
  misc_feature 1..20: note = Description of Artificial Sequence: Synthetic oligonucleotide
  misc_feature 1..20: note = Target: SCN10A; (-) strand; PAM type: NNAGAAW; PAM sequence: CAAGAAA
  source 1..20: mol_type = other DNA
taaaagagcatcacaaatgg

SEQ ID NO: 5761 - DNA, 20 bp, synthetic construct
  misc_feature 1..20: note = Description of Artificial Sequence: Synthetic oligonucleotide
  misc_feature 1..20: note = Target: SCN10A; (-) strand; PAM type: NNAGAAW; PAM sequence: GGAGAAA
  source 1..20: mol_type = other DNA
tggctggataaattgtcaag

SEQ ID NO: 5762 - DNA, 20 bp, synthetic construct
  misc_feature 1..20: note = Description of Artificial Sequence: Synthetic oligonucleotide
  misc_feature 1..20: note = Target: SCN10A; (-) strand; PAM type: NNAGAAW; PAM sequence: ACAGAAT
  source 1..20: mol_type = other DNA
attcagtatgtacccttggt

SEQ ID NO: 5763 - DNA, 20 bp, synthetic construct
  misc_feature 1..20: note = Description of Artificial Sequence: Synthetic oligonucleotide
  misc_feature 1..20: note = Target: SCN10A; (-) strand; PAM type: NNAGAAW; PAM sequence: TCAGAAT
  source 1..20: mol_type = other DNA
agctactccattccctaaag

SEQ ID NO: 5764 - DNA, 20 bp, synthetic construct
  misc_feature 1..20: note = Description of Artificial Sequence: Synthetic oligonucleotide
  misc_feature 1..20: note = Target: SCN10A; (-) strand; PAM type: NNAGAAW; PAM sequence: AGAGAAT
  source 1..20: mol_type = other DNA
atagaaatataataggctct

SEQ ID NO: 5765 - DNA, 20 bp, synthetic construct
  misc_feature 1..20: note = Description of Artificial Sequence: Synthetic oligonucleotide
  misc_feature 1..20: note = Target: SCN10A; (-) strand; PAM type: NNAGAAW; PAM sequence: ATAGAAA
  source 1..20: mol_type = other DNA
gctctcacatactccacttt

SEQ ID NO: 5766 - DNA, 20 bp, synthetic construct
  misc_feature 1..20: note = Description of Artificial Sequence: Synthetic oligonucleotide
  misc_feature 1..20: note = Target: SCN10A; (-) strand; PAM type: NNAGAAW; PAM sequence: ACAGAAA
  source 1..20: mol_type = other DNA
attctttaacattccctgct

SEQ ID NO: 5767 - DNA, 20 bp, synthetic construct
  misc_feature 1..20: note = Description of Artificial Sequence: Synthetic oligonucleotide
  misc_feature 1..20: note = Target: SCN10A; (-) strand; PAM type: NNAGAAW; PAM sequence: AAAGAAA
  source 1..20: mol_type = other DNA
cttcaaagtctagaaccaag

SEQ ID NO: 5768 - DNA, 20 bp, synthetic construct
  misc_feature 1..20: note = Description of Artificial Sequence: Synthetic oligonucleotide
  misc_feature 1..20: note = Target: SCN10A; (-) strand; PAM type: NNAGAAW; PAM sequence: CAAGAAA
  source 1..20: mol_type = other DNA
ccctcttcaaagtctagaac

SEQ ID NO: 5769 - DNA, 20 bp, synthetic construct
  misc_feature 1..20: note = Description of Artificial Sequence: Synthetic oligonucleotide
  misc_feature 1..20: note = Target: SCN10A; (-) strand; PAM type: NNAGAAW; PAM sequence: AGAGAAA
  source 1..20: mol_type = other DNA
gaagtggcagggatgccaac

SEQ ID NO: 5770 - DNA, 20 bp, synthetic construct
  misc_feature 1..20: note = Description of Artificial Sequence: Synthetic oligonucleotide
  misc_feature 1..20: note = Target: SCN10A; (-) strand; PAM type: NNAGAAW; PAM sequence: AAAGAAA
  source 1..20: mol_type = other DNA
acccaaccccataggctgcc

SEQ ID NO: 5771 - DNA, 20 bp, synthetic construct
  misc_feature 1..20: note = Description of Artificial Sequence: Synthetic oligonucleotide
  misc_feature 1..20: note = Target: SCN10A; (-) strand; PAM type: NNAGAAW; PAM sequence: AGAGAAA
  source 1..20: mol_type = other DNA
caaagtgaaaaacatttaca

SEQ ID NO: 5772 - DNA, 20 bp, synthetic construct
  misc_feature 1..20: note = Description of Artificial Sequence: Synthetic oligonucleotide
  misc_feature 1..20: note = Target: SCN10A; (-) strand; PAM type: NNAGAAW; PAM sequence: GAAGAAA
  source 1..20: mol_type = other DNA
ggctaagatgcagcattagt

SEQ ID NO: 5773 - DNA, 20 bp, synthetic construct
  misc_feature 1..20: note = Description of Artificial Sequence: Synthetic oligonucleotide
  misc_feature 1..20: note = Target: SCN10A; (-) strand; PAM type: NNAGAAW; PAM sequence: AAAGAAT
  source 1..20: mol_type = other DNA
aattattgttgatcgtcttc

SEQ ID NO: 5774 - DNA, 20 bp, synthetic construct
  misc_feature 1..20: note = Description of Artificial Sequence: Synthetic oligonucleotide
  misc_feature 1..20: note = Target: SCN10A; (-) strand; PAM type: NNAGAAW; PAM sequence: TCAGAAA
  source 1..20: mol_type = other DNA
ggggtgaagatgttgatgtg

SEQ ID NO: 5775 - DNA, 20 bp, synthetic construct
  misc_feature 1..20: note = Description of Artificial Sequence: Synthetic oligonucleotide
  misc_feature 1..20: note = Target: SCN10A; (-) strand; PAM type: NNAGAAW; PAM sequence: ATAGAAA
  source 1..20: mol_type = other DNA
tctcagtcttctgccagaag

SEQ ID NO: 5776 - DNA, 20 bp, synthetic construct
  misc_feature 1..20: note = Description of Artificial Sequence: Synthetic oligonucleotide
  misc_feature 1..20: note = Target: SCN10A; (-) strand; PAM type: NNAGAAW; PAM sequence: GAAGAAA
  source 1..20: mol_type = other DNA
atcttcatgacagaggagca

SEQ ID NO: 5777 - DNA, 20 bp, synthetic construct
  misc_feature 1..20: note = Description of Artificial Sequence: Synthetic oligonucleotide
  misc_feature 1..20: note = Target: SCN10A; (-) strand; PAM type: NNAGAAW; PAM sequence: ACAGAAA
  source 1..20: mol_type = other DNA
catctctggatccctggaga

SEQ ID NO: 5778 - DNA, 20 bp, synthetic construct
  misc_feature 1..20: note = Description of Artificial Sequence: Synthetic oligonucleotide
  misc_feature 1..20: note = Target: SCN10A; (-) strand; PAM type: NNAGAAW; PAM sequence: AAAGAAT
  source 1..20: mol_type = other DNA
gactgtgactctagaagccc

SEQ ID NO: 5779 - DNA, 20 bp, synthetic construct
  misc_feature 1..20: note = Description of Artificial Sequence: Synthetic oligonucleotide
  misc_feature 1..20: note = Target: SCN10A; (-) strand; PAM type: NNAGAAW; PAM sequence: CCAGAAA
  source 1..20: mol_type = other DNA
ttgtcctcatctcctcctct

SEQ ID NO: 5780 - DNA, 20 bp, synthetic construct
  misc_feature 1..20: note = Description of Artificial Sequence: Synthetic oligonucleotide
  misc_feature 1..20: note = Target: SCN10A; (-) strand; PAM type: NNAGAAW; PAM sequence: AAAGAAA
  source 1..20: mol_type = other DNA
agaaaatccaaagggcccct

SEQ ID NO: 5781 - DNA, 20 bp, synthetic construct
  misc_feature 1..20: note = Description of Artificial Sequence: Synthetic oligonucleotide
  misc_feature 1..20: note = Target: SCN10A; (-) strand; PAM type: NNAGAAW; PAM sequence: GAAGAAA
  source 1..20: mol_type = other DNA
ctaaaggtgagagtttgaat

SEQ ID NO: 5782 - DNA, 20 bp, synthetic construct
  misc_feature 1..20: note = Description of Artificial Sequence: Synthetic oligonucleotide
  misc_feature 1..20: note = Target: SCN10A; (-) strand; PAM type: NNAGAAW; PAM sequence: TGAGAAA
  source 1..20: mol_type = other DNA
agtgaccaggctggggtcac

SEQ ID NO: 5783 - DNA, 20 bp, synthetic construct
  misc_feature 1..20: note = Description of Artificial Sequence: Synthetic oligonucleotide
  misc_feature 1..20: note = Target: SCN10A; (-) strand; PAM type: NNAGAAW; PAM sequence: CAAGAAA
  source 1..20: mol_type = other DNA
acagatgagaaaactgaggt

SEQ ID NO: 5784 - DNA, 20 bp, synthetic construct
  misc_feature 1..20: note = Description of Artificial Sequence: Synthetic oligonucleotide
  misc_feature 1..20: note = Target: SCN10A; (-) strand; PAM type: NNAGAAW; PAM sequence: TGAGAAA
  source 1..20: mol_type = other DNA
catttctctcattttacaga

SEQ ID NO: 5785 - DNA, 20 bp, synthetic construct
  misc_feature 1..20: note = Description of Artificial Sequence: Synthetic oligonucleotide
  misc_feature 1..20: note = Target: SCN10A; (-) strand; PAM type: NNAGAAW; PAM sequence: AGAGAAA
  source 1..20: mol_type = other DNA
tttgcgtaactgagatcccg

SEQ ID NO: 5786 - DNA, 20 bp, synthetic construct
  misc_feature 1..20: note = Description of Artificial Sequence: Synthetic oligonucleotide
  misc_feature 1..20: note = Target: SCN10A; (-) strand; PAM type: NNAGAAW; PAM sequence: TAAGAAA
  source 1..20: mol_type = other DNA
cagataacctctcatgttta

SEQ ID NO: 5787 - DNA, 20 bp, synthetic construct
  misc_feature 1..20: note = Description of Artificial Sequence: Synthetic oligonucleotide
  misc_feature 1..20: note = Target: SCN10A; (-) strand; PAM type: NNAGAAW; PAM sequence: GCAGAAT
  source 1..20: mol_type = other DNA
aaggccatggcccagcactg

SEQ ID NO: 5788 - DNA, 20 bp, synthetic construct
  misc_feature 1..20: note = Description of Artificial Sequence: Synthetic oligonucleotide
  misc_feature 1..20: note = Target: SCN10A; (-) strand; PAM type: NNAGAAW; PAM sequence: AAAGAAA
  source 1..20: mol_type = other DNA
ctgggagaatacaagcaggg

SEQ ID NO: 5789 - DNA, 20 bp, synthetic construct
  misc_feature 1..20: note = Description of Artificial Sequence: Synthetic oligonucleotide
  misc_feature 1..20: note = Target: SCN10A; (-) strand; PAM type: NNAGAAW; PAM sequence: GGAGAAT
  source 1..20: mol_type = other DNA
tgtgttccaagtgagccctg

SEQ ID NO: 5790 - DNA, 20 bp, synthetic construct
  misc_feature 1..20: note = Description of Artificial Sequence: Synthetic oligonucleotide
  misc_feature 1..20: note = Target: SCN10A; (-) strand; PAM type: NNAGAAW; PAM sequence: ACAGAAA
  source 1..20: mol_type = other DNA
ataattgacaacttcaatca

SEQ ID NO: 5791 - DNA, 20 bp, synthetic construct
  misc_feature 1..20: note = Description of Artificial Sequence: Synthetic oligonucleotide
  misc_feature 1..20: note = Target: SCN10A; (-) strand; PAM type: NNAGAAW; PAM sequence: AAAGAAA
  source 1..20: mol_type = other DNA
tctcaaaaaaaaagaaaaga

SEQ ID NO: 5792 - DNA, 20 bp, synthetic construct
  misc_feature 1..20: note = Description of Artificial Sequence: Synthetic oligonucleotide
  misc_feature 1..20: note = Target: SCN10A; (-) strand; PAM type: NNAGAAW; PAM sequence: AAAGAAA
  source 1..20: mol_type = other DNA
ctcaatctcaaaaaaaaaga

SEQ ID NO: 5793 - DNA, 20 bp, synthetic construct
  misc_feature 1..20: note = Description of Artificial Sequence: Synthetic oligonucleotide
  misc_feature 1..20: note = Target: SCN10A; (-) strand; PAM type: NNAGAAW; PAM sequence: AAAGAAA
  source 1..20: mol_type = other DNA
cgagactcaatctcaaaaaa

SEQ ID NO: 5794 - DNA, 20 bp, synthetic construct
  misc_feature 1..20: note = Description of Artificial Sequence: Synthetic oligonucleotide
  misc_feature 1..20: note = Target: SCN10A; (-) strand; PAM type: NNAGAAW; PAM sequence: GGAGAAT
  source 1..20: mol_type = other DNA
ctgctcgggagactgagaca

SEQ ID NO: 5795 - DNA, 20 bp, synthetic construct
  misc_feature 1..20: note = Description of Artificial Sequence: Synthetic oligonucleotide
  misc_feature 1..20: note = Target: SCN10A; (-) strand; PAM type: NNAGAAW; PAM sequence: AAAGAAA
  source 1..20: mol_type = other DNA
cccatctctactaaaatatg

SEQ ID NO: 5796 - DNA, 20 bp, synthetic construct
  misc_feature 1..20: note = Description of Artificial Sequence: Synthetic oligonucleotide
  misc_feature 1..20: note = Target: SCN10A; (-) strand; PAM type: NNAGAAW; PAM sequence: GTAGAAT
  source 1..20: mol_type = other DNA
ggtgcatagggaggaatgag

SEQ ID NO: 5797 - DNA, 20 bp, synthetic construct
  misc_feature 1..20: note = Description of Artificial Sequence: Synthetic oligonucleotide
  misc_feature 1..20: note = Target: SCN10A; (-) strand; PAM type: NNAGAAW; PAM sequence: TGAGAAA
  source 1..20: mol_type = other DNA
gcataaggtgggaaagtggc

SEQ ID NO: 5798 - DNA, 20 bp, synthetic construct
  misc_feature 1..20: note = Description of Artificial Sequence: Synthetic oligonucleotide
  misc_feature 1..20: note = Target: SCN10A; (-) strand; PAM type: NNAGAAW; PAM sequence: CAAGAAT
  source 1..20: mol_type = other DNA
cacacccagtttctagacct

SEQ ID NO: 5799 - DNA, 20 bp, synthetic construct
  misc_feature 1..20: note = Description of Artificial Sequence: Synthetic oligonucleotide
  misc_feature 1..20: note = Target: SCN10A; (-) strand; PAM type: NNAGAAW; PAM sequence: TGAGAAA
  source 1..20: mol_type = other DNA
gcttggacactgatgctgta

SEQ ID NO: 5800 - DNA, 20 bp, synthetic construct
  misc_feature 1..20: note = Description of Artificial Sequence: Synthetic oligonucleotide
  misc_feature 1..20: note = Target: SCN10A; (-) strand; PAM type: NNAGAAW; PAM sequence: GTAGAAT
  source 1..20: mol_type = other DNA
aattacacaagtgtgggcta

SEQ ID NO: 5801 - DNA, 20 bp, synthetic construct
  misc_feature 1..20: note = Description of Artificial Sequence: Synthetic oligonucleotide
  misc_feature 1..20: note = Target: SCN10A; (-) strand; PAM type: NNAGAAW; PAM sequence: ATAGAAT
  source 1..20: mol_type = other DNA
ctgaatgagtatagaaagag

SEQ ID NO: 5802 - DNA, 20 bp, synthetic construct
  misc_feature 1..20: note = Description of Artificial Sequence: Synthetic oligonucleotide
  misc_feature 1..20: note = Target: SCN10A; (-) strand; PAM type: NNAGAAW; PAM sequence: ATAGAAA
  source 1..20: mol_type = other DNA
atgaagcagcctgaatgagt

SEQ ID NO: 5803 - DNA, 20 bp, synthetic construct
  misc_feature 1..20: note = Description of Artificial Sequence: Synthetic oligonucleotide
  misc_feature 1..20: note = Target: SCN10A; (-) strand; PAM type: NNAGAAW; PAM sequence: GGAGAAT
  source 1..20: mol_type = other DNA
gttttatgtatggtatttaa

SEQ ID NO: 5804 - DNA, 20 bp, synthetic construct
  misc_feature 1..20: note = Description of Artificial Sequence: Synthetic oligonucleotide
  misc_feature 1..20: note = Target: SCN10A; (-) strand; PAM type: NNAGAAW; PAM sequence: GCAGAAA
  source 1..20: mol_type = other DNA
taattacaaatggctcccca

SEQ ID NO: 5805 - DNA, 20 bp, synthetic construct
  misc_feature 1..20: note = Description of Artificial Sequence: Synthetic oligonucleotide
  misc_feature 1..20: note = Target: SCN10A; (-) strand; PAM type: NNAGAAW; PAM sequence: ACAGAAT
  source 1..20: mol_type = other DNA
ccctaactgcctccgtcagg

SEQ ID NO: 5806 - DNA, 20 bp, synthetic construct
  misc_feature 1..20: note = Description of Artificial Sequence: Synthetic oligonucleotide
  misc_feature 1..20: note = Target: SCN10A; (-) strand; PAM type: NNAGAAW; PAM sequence: TCAGAAT
  source 1..20: mol_type = other DNA
aattcagattactatattcc

SEQ ID NO: 5807 - DNA, 20 bp, synthetic construct
  misc_feature 1..20: note = Description of Artificial Sequence: Synthetic oligonucleotide
  misc_feature 1..20: note = Target: SCN10A; (-) strand; PAM type: NNAGAAW; PAM sequence: CCAGAAA
  source 1..20: mol_type = other DNA
ctagatctcatggacccata

SEQ ID NO: 5808 - DNA, 20 bp, synthetic construct
  misc_feature 1..20: note = Description of Artificial Sequence: Synthetic oligonucleotide
  misc_feature 1..20: note = Target: SCN10A; (-) strand; PAM type: NNAGAAW; PAM sequence: AAAGAAA
  source 1..20: mol_type = other DNA
cagtctttggaccaccactt

SEQ ID NO: 5809 - DNA, 20 bp, synthetic construct
  misc_feature 1..20: note = Description of Artificial Sequence: Synthetic oligonucleotide
  misc_feature 1..20: note = Target: SCN10A; (-) strand; PAM type: NNAGAAW; PAM sequence: AAAGAAT
  source 1..20: mol_type = other DNA
gtgcaataagccactcatcc

SEQ ID NO: 5810 - DNA, 20 bp, synthetic construct
  misc_feature 1..20: note = Description of Artificial Sequence: Synthetic oligonucleotide
  misc_feature 1..20: note = Target: SCN10A; (-) strand; PAM type: NNAGAAW; PAM sequence: GGAGAAT
  source 1..20: mol_type = other DNA
atcataatcagatttgcagt

SEQ ID NO: 5811 - DNA, 20 bp, synthetic construct
  misc_feature 1..20: note = Description of Artificial Sequence: Synthetic oligonucleotide
  misc_feature 1..20: note = Target: SCN10A; (-) strand; PAM type: NNAGAAW; PAM sequence: AGAGAAA
  source 1..20: mol_type = other DNA
accagtgatgtttgggagta

SEQ ID NO: 5812 - DNA, 20 bp, synthetic construct
  misc_feature 1..20: note = Description of Artificial Sequence: Synthetic oligonucleotide
  misc_feature 1..20: note = Target: SCN10A; (-) strand; PAM type: NNAGAAW; PAM sequence: GTAGAAT
  source 1..20: mol_type = other DNA
cagggaacaatttgatttgg

SEQ ID NO: 5813 - DNA, 20 bp, synthetic construct
  misc_feature 1..20: note = Description of Artificial Sequence: Synthetic oligonucleotide
  misc_feature 1..20: note = Target: SCN10A; (-) strand; PAM type: NNAGAAW; PAM sequence: ATAGAAA
  source 1..20: mol_type = other DNA
ggtggcattagatgtggggc

SEQ ID NO: 5814 - DNA, 20 bp, synthetic construct
  misc_feature 1..20: note = Description of Artificial Sequence: Synthetic oligonucleotide
  misc_feature 1..20: note = Target: SCN10A; (-) strand; PAM type: NNAGAAW; PAM sequence: TGAGAAT
  source 1..20: mol_type = other DNA
cactcttggggtggggtggt

SEQ ID NO: 5815 - DNA, 20 bp, synthetic construct
  misc_feature 1..20: note = Description of Artificial Sequence: Synthetic oligonucleotide
  misc_feature 1..20: note = Target: SCN10A; (-) strand; PAM type: NNAGAAW; PAM sequence: ACAGAAT
  source 1..20: mol_type = other DNA
gctttgtaagaaacagaagc

SEQ ID NO: 5816 - DNA, 20 bp, synthetic construct
  misc_feature 1..20: note = Description of Artificial Sequence: Synthetic oligonucleotide
  misc_feature 1..20: note = Target: SCN10A; (-) strand; PAM type: NNAGAAW; PAM sequence: TAAGAAA
  source 1..20: mol_type = other DNA
ttgtcttatgaagtgctttg

SEQ ID NO: 5817 - DNA, 20 bp, synthetic construct
  misc_feature 1..20: note = Description of Artificial Sequence: Synthetic oligonucleotide
  misc_feature 1..20: note = Target: SCN10A; (-) strand; PAM type: NNAGAAW; PAM sequence: AAAGAAA
  source 1..20: mol_type = other DNA
ctaagactgggcaatttata

SEQ ID NO: 5818 - DNA, 20 bp, synthetic construct
  misc_feature 1..20: note = Description of Artificial Sequence: Synthetic oligonucleotide
  misc_feature 1..20: note = Target: SCN10A; (-) strand; PAM type: NNAGAAW; PAM sequence: AGAGAAT
  source 1..20: mol_type = other DNA
tggccagtaatccctgcatt

SEQ ID NO: 5819 - DNA, 20 bp, synthetic construct
  misc_feature 1..20: note = Description of Artificial Sequence: Synthetic oligonucleotide
  misc_feature 1..20: note = Target: SCN10A; (-) strand; PAM type: NNAGAAW; PAM sequence: TGAGAAT
  source 1..20: mol_type = other DNA
tcctcacacctggctgcact

SEQ ID NO: 5820 - DNA, 20 bp, synthetic construct
  misc_feature 1..20: note = Description of Artificial Sequence: Synthetic oligonucleotide
  misc_feature 1..20: note = Target: SCN10A; (-) strand; PAM type: NNAGAAW; PAM sequence: AGAGAAT
  source 1..20: mol_type = other DNA
gagccatgaactgtgagcac

SEQ ID NO: 5821 - DNA, 20 bp, synthetic construct
  misc_feature 1..20: note = Description of Artificial Sequence: Synthetic oligonucleotide
  misc_feature 1..20: note = Target: SCN10A; (-) strand; PAM type: NNAGAAW; PAM sequence: TCAGAAA
  source 1..20: mol_type = other DNA
gtgagttattaggtctccat

SEQ ID NO: 5822 - DNA, 20 bp, synthetic construct
  misc_feature 1..20: note = Description of Artificial Sequence: Synthetic oligonucleotide
  misc_feature 1..20: note = Target: SCN10A; (-) strand; PAM type: NNAGAAW; PAM sequence: TGAGAAT
  source 1..20: mol_type = other DNA
tgagcatttagtgaggagtc

SEQ ID NO: 5823 - DNA, 20 bp, synthetic construct
  misc_feature 1..20: note = Description of Artificial Sequence: Synthetic oligonucleotide
  misc_feature 1..20: note = Target: SCN10A; (-) strand; PAM type: NNAGAAW; PAM sequence: AAAGAAA
  source 1..20: mol_type = other DNA
tggccctcaagggctactcc

SEQ ID NO: 5824 - DNA, 20 bp, synthetic construct
  misc_feature 1..20: note = Description of Artificial Sequence: Synthetic oligonucleotide
  misc_feature 1..20: note = Target: SCN10A; (-) strand; PAM type: NNAGAAW; PAM sequence: AAAGAAA
  source 1..20: mol_type = other DNA
ccatctccaccagtctgata

SEQ ID NO: 5825 - DNA, 20 bp, synthetic construct
  misc_feature 1..20: note = Description of Artificial Sequence: Synthetic oligonucleotide
  misc_feature 1..20: note = Target: SCN10A; (-) strand; PAM type: NNAGAAW; PAM sequence: GGAGAAT
  source 1..20: mol_type = other DNA
ctacttgggaggctgaggca

SEQ ID NO: 5826 - DNA, 20 bp, synthetic construct
  misc_feature 1..20: note = Description of Artificial Sequence: Synthetic oligonucleotide
  misc_feature 1..20: note = Target: SCN10A; (-) strand; PAM type: NNAGAAW; PAM sequence: TGAGAAA
  source 1..20: mol_type = other DNA
ctagacacagaatcggaagc

SEQ ID NO: 5827 - DNA, 20 bp, synthetic construct
  misc_feature 1..20: note = Description of Artificial Sequence: Synthetic oligonucleotide
  misc_feature 1..20: note = Target: SCN10A; (-) strand; PAM type: NNAGAAW; PAM sequence: ACAGAAT
  source 1..20: mol_type = other DNA
tcttagtcctcgtcctagac

SEQ ID NO: 5828 - DNA, 20 bp, synthetic construct
  misc_feature 1..20: note = Description of Artificial Sequence: Synthetic oligonucleotide
  misc_feature 1..20: note = Target: SCN10A; (-) strand; PAM type: NNAGAAW; PAM sequence: AGAGAAA
  source 1..20: mol_type = other DNA
tccatttccctatcactcaa

SEQ ID NO: 5829 - DNA, 20 bp, synthetic construct
  misc_feature 1..20: note = Description of Artificial Sequence: Synthetic oligonucleotide
  misc_feature 1..20: note = Target: SCN10A; (-) strand; PAM type: NNAGAAW; PAM sequence: AAAGAAA
  source 1..20: mol_type = other DNA
tggaaattatagaaaaaggt

SEQ ID NO: 5830 - DNA, 20 bp, synthetic construct
  misc_feature 1..20: note = Description of Artificial Sequence: Synthetic oligonucleotide
  misc_feature 1..20: note = Target: SCN10A; (-) strand; PAM type: NNAGAAW; PAM sequence: ATAGAAA
  source 1..20: mol_type = other DNA
caaaaaaatacttggaaatt

SEQ ID NO: 5831 - DNA, 20 bp, synthetic construct
  misc_feature 1..20: note = Description of Artificial Sequence: Synthetic oligonucleotide
  misc_feature 1..20: note = Target: SCN10A; (-) strand; PAM type: NNAGAAW; PAM sequence: TGAGAAT
  source 1..20: mol_type = other DNA
cataaatctgtggcagggcc

SEQ ID NO: 5832 - DNA, 20 bp, synthetic construct
  misc_feature 1..20: note = Description of Artificial Sequence: Synthetic oligonucleotide
  misc_feature 1..20: note = Target: SCN10A; (-) strand; PAM type: NNAGAAW; PAM sequence: ACAGAAA
  source 1..20: mol_type = other DNA
taattactcctttaaagctc

SEQ ID NO: 5833 - DNA, 20 bp, synthetic construct
  misc_feature 1..20: note = Description of Artificial Sequence: Synthetic oligonucleotide
  misc_feature 1..20: note = Target: SCN10A; (-) strand; PAM type: NNAGAAW; PAM sequence: GCAGAAA
  source 1..20: mol_type = other DNA
atggtttctctgcagcagga

SEQ ID NO: 5834 - DNA, 20 bp, synthetic construct
  misc_feature 1..20: note = Description of Artificial Sequence: Synthetic oligonucleotide
  misc_feature 1..20: note = Target: SCN10A; (-) strand; PAM type: NNAGAAW; PAM sequence: GCAGAAT
  source 1..20: mol_type = other DNA
catgacaagtgggtttccta

SEQ ID NO: 5835 - DNA, 20 bp, synthetic construct
  misc_feature 1..20: note = Description of Artificial Sequence: Synthetic oligonucleotide
  misc_feature 1..20: note = Target: SCN10A; (-) strand; PAM type: NNAGAAW; PAM sequence: AAAGAAT
  source 1..20: mol_type = other DNA
ctcttcacccatattccagg

SEQ ID NO: 5836 - DNA, 20 bp, synthetic construct
  misc_feature 1..20: note = Description of Artificial Sequence: Synthetic oligonucleotide
  misc_feature 1..20: note = Target: SCN10A; (-) strand; PAM type: NNAGAAW; PAM sequence: AAAGAAA
  source 1..20: mol_type = other DNA
tcaatgctttctaaaaatac

SEQ ID NO: 5837 - DNA, 20 bp, synthetic construct
  misc_feature 1..20: note = Description of Artificial Sequence: Synthetic oligonucleotide
  misc_feature 1..20: note = Target: SCN10A; (-) strand; PAM type: NNAGAAW; PAM sequence: CCAGAAT
  source 1..20: mol_type = other DNA
cacactgatgttaattaggg

SEQ ID NO: 5838 - DNA, 20 bp, synthetic construct
  misc_feature 1..20: note = Description of Artificial Sequence: Synthetic oligonucleotide
  misc_feature 1..20: note = Target: SCN10A; (-) strand; PAM type: NNAGAAW; PAM sequence: GAAGAAT
  source 1..20: mol_type = other DNA
gttatcaagcccttcagctt

SEQ ID NO: 5839 - DNA, 20 bp, synthetic construct
  misc_feature 1..20: note = Description of Artificial Sequence: Synthetic oligonucleotide
  misc_feature 1..20: note = Target: SCN10A; (-) strand; PAM type: NNAGAAW; PAM sequence: CAAGAAT
  source 1..20: mol_type = other DNA
taataacactgccttcaatt

SEQ ID NO: 5840 - DNA, 20 bp, synthetic construct
  misc_feature 1..20: note = Description of Artificial Sequence: Synthetic oligonucleotide
  misc_feature 1..20: note = Target: SCN10A; (-) strand; PAM type: NNAGAAW; PAM sequence: AAAGAAA
  source 1..20: mol_type = other DNA
ggaaacgaaagacaacgcac

SEQ ID NO: 5841 - DNA, 20 bp, synthetic construct
  misc_feature 1..20: note = Description of Artificial Sequence: Synthetic oligonucleotide
  misc_feature 1..20: note = Target: SCN10A; (-) strand; PAM type: NNAGAAW; PAM sequence: CAAGAAA
  source 1..20: mol_type = other DNA
agtgcccaggaaatgacagc

SEQ ID NO: 5842 - DNA, 20 bp, synthetic construct
  misc_feature 1..20: note = Description of Artificial Sequence: Synthetic oligonucleotide
  misc_feature 1..20: note = Target: SCN10A; (-) strand; PAM type: NNAGAAW; PAM sequence: AAAGAAA
  source 1..20: mol_type = other DNA
cagggtggttctaggtatag

SEQ ID NO: 5843 - DNA, 20 bp, synthetic construct
  misc_feature 1..20: note = Description of Artificial Sequence: Synthetic oligonucleotide
  misc_feature 1..20: note = Target: SCN10A; (-) strand; PAM type: NNAGAAW; PAM sequence: ATAGAAA
  source 1..20: mol_type = other DNA
actccagggtggttctaggt

SEQ ID NO: 5844 - DNA, 20 bp, synthetic construct
  misc_feature 1..20: note = Description of Artificial Sequence: Synthetic oligonucleotide
  misc_feature 1..20: note = Target: SCN10A; (-) strand; PAM type: NNAGAAW; PAM sequence: CCAGAAA
  source 1..20: mol_type = other DNA
tggccaggttactaagtggt

SEQ ID NO: 5845 - DNA, 20 bp, synthetic construct
  misc_feature 1..20: note = Description of Artificial Sequence: Synthetic oligonucleotide
  misc_feature 1..20: note = Target: SCN10A; (-) strand; PAM type: NNAGAAW; PAM sequence: TCAGAAT
  source 1..20: mol_type = other DNA
gcagggcctggaagaaaaag

SEQ ID NO: 5846 - DNA, 20 bp, synthetic construct
  misc_feature 1..20: note = Description of Artificial Sequence: Synthetic oligonucleotide
  misc_feature 1..20: note = Target: SCN10A; (-) strand; PAM type: NNAGAAW; PAM sequence: GAAGAAA
  source 1..20: mol_type = other DNA
tggcgtttgagcagggcctg

SEQ ID NO: 5847 - DNA, 20 bp, synthetic construct
  misc_feature 1..20: note = Description of Artificial Sequence: Synthetic oligonucleotide
  misc_feature 1..20: note = Target: SCN10A; (-) strand; PAM type: NNAGAAW; PAM sequence: TCAGAAA
  source 1..20: mol_type = other DNA
aaactttccctcaactgctc

SEQ ID NO: 5848 - DNA, 20 bp, synthetic construct
  misc_feature 1..20: note = Description of Artificial Sequence: Synthetic oligonucleotide
  misc_feature 1..20: note = Target: SCN10A; (-) strand; PAM type: NNAGAAW; PAM sequence: CCAGAAA
  source 1..20: mol_type = other DNA
gggatgcctctgcctgcatc

SEQ ID NO: 5849 - DNA, 20 bp, synthetic construct
  misc_feature 1..20: note = Description of Artificial Sequence: Synthetic oligonucleotide
  misc_feature 1..20: note = Target: SCN10A; (-) strand; PAM type: NNAGAAW; PAM sequence: CAAGAAA
  source 1..20: mol_type = other DNA
tagacagaagaaagctaaac

SEQ ID NO: 5850 - DNA, 20 bp, synthetic construct
  misc_feature 1..20: note = Description of Artificial Sequence: Synthetic oligonucleotide
  misc_feature 1..20: note = Target: SCN10A; (-) strand; PAM type: NNAGAAW; PAM sequence: GAAGAAA
  source 1..20: mol_type = other DNA
cctcatgagttttatagaca

SEQ ID NO: 5851 - DNA, 20 bp, synthetic construct
  misc_feature 1..20: note = Description of Artificial Sequence: Synthetic oligonucleotide
  misc_feature 1..20: note = Target: SCN10A; (-) strand; PAM type: NNAGAAW; PAM sequence: ACAGAAA
  source 1..20: mol_type = other DNA
cacggacaacatccaaggcc

SEQ ID NO: 5852 - DNA, 20 bp, synthetic construct
  misc_feature 1..20: note = Description of Artificial Sequence: Synthetic oligonucleotide
  misc_feature 1..20: note = Target: SCN10A; (-) strand; PAM type: NNAGAAW; PAM sequence: TCAGAAA
  source 1..20: mol_type = other DNA
cttccccaatctgagggggc

SEQ ID NO: 5853 - DNA, 20 bp, synthetic construct
  misc_feature 1..20: note = Description of Artificial Sequence: Synthetic oligonucleotide
  misc_feature 1..20: note = Target: SCN10A; (-) strand; PAM type: NNAGAAW; PAM sequence: GGAGAAT
  source 1..20: mol_type = other DNA
gcttactcatgggtttactg

SEQ ID NO: 5854 - DNA, 20 bp, synthetic construct
  misc_feature 1..20: note = Description of Artificial Sequence: Synthetic oligonucleotide
  misc_feature 1..20: note = Target: SCN10A; (-) strand; PAM type: NNAGAAW; PAM sequence: CAAGAAA
  source 1..20: mol_type = other DNA
agatctaatttccttaaaat

SEQ ID NO: 5855 - DNA, 20 bp, synthetic construct
  misc_feature 1..20: note = Description of Artificial Sequence: Synthetic oligonucleotide
  misc_feature 1..20: note = Target: SCN10A; (-) strand; PAM type: NNAGAAW; PAM sequence: GTAGAAT
  source 1..20: mol_type = other DNA
ttagaaaagaaagacctggt

SEQ ID NO: 5856 - DNA, 20 bp, synthetic construct
  misc_feature 1..20: note = Description of Artificial Sequence: Synthetic oligonucleotide
  misc_feature 1..20: note = Target: SCN10A; (-) strand; PAM type: NNAGAAW; PAM sequence: AAAGAAA
  source 1..20: mol_type = other DNA
aatgagaacatatgattaga

SEQ ID NO: 5857 - DNA, 20 bp, synthetic construct
  misc_feature 1..20: note = Description of Artificial Sequence: Synthetic oligonucleotide
  misc_feature 1..20: note = Target: SCN10A; (-) strand; PAM type: NNAGAAW; PAM sequence: TTAGAAA
  source 1..20: mol_type = other DNA
gcaggaatgagaacatatga

SEQ ID NO: 5858 - DNA, 20 bp, synthetic construct
  misc_feature 1..20: note = Description of Artificial Sequence: Synthetic oligonucleotide
  misc_feature 1..20: note = Target: SCN10A; (-) strand; PAM type: NNAGAAW; PAM sequence: CCAGAAA
  source 1..20: mol_type = other DNA
aaggtctccaaaagcagtgt

SEQ ID NO: 5859 - DNA, 20 bp, synthetic construct
  misc_feature 1..20: note = Description of Artificial Sequence: Synthetic oligonucleotide
  misc_feature 1..20: note = Target: SCN10A; (-) strand; PAM type: NNAGAAW; PAM sequence: GAAGAAA
  source 1..20: mol_type = other DNA
ttgagtaatttatagcatag

SEQ ID NO: 5860 - DNA, 20 bp, synthetic construct
  misc_feature 1..20: note = Description of Artificial Sequence: Synthetic oligonucleotide
  misc_feature 1..20: note = Target: SCN10A; (-) strand; PAM type: NNAGAAW; PAM sequence: TGAGAAA
  source 1..20: mol_type = other DNA
tgttgtccactgccccaaga

SEQ ID NO: 5861 - DNA, 20 bp, synthetic construct
  misc_feature 1..20: note = Description of Artificial Sequence: Synthetic oligonucleotide
  misc_feature 1..20: note = Target: SCN10A; (-) strand; PAM type: NNAGAAW; PAM sequence: GGAGAAA
  source 1..20: mol_type = other DNA
gggatctagtcttaaagcag

SEQ ID NO: 5862 - DNA, 20 bp, synthetic construct
  misc_feature 1..20: note = Description of Artificial Sequence: Synthetic oligonucleotide
  misc_feature 1..20: note = Target: SCN10A; (-) strand; PAM type: NNAGAAW; PAM sequence: GTAGAAT
  source 1..20: mol_type = other DNA
ttaattctgcagagcacttt

SEQ ID NO: 5863 - DNA, 20 bp, synthetic construct
  misc_feature 1..20: note = Description of Artificial Sequence: Synthetic oligonucleotide
  misc_feature 1..20: note = Target: SCN10A; (-) strand; PAM type: NNAGAAW; PAM sequence: GAAGAAA
  source 1..20: mol_type = other DNA
gactaataattctatcatct

SEQ ID NO: 5864 - DNA, 20 bp, synthetic construct
  misc_feature 1..20: note = Description of Artificial Sequence: Synthetic oligonucleotide
  misc_feature 1..20: note = Target: SCN10A; (-) strand; PAM type: NNAGAAW; PAM sequence: TTAGAAT
  source 1..20: mol_type = other DNA
atctacctgaagtacctcct

SEQ ID NO: 5865 - DNA, 20 bp, synthetic construct
  misc_feature 1..20: note = Description of Artificial Sequence: Synthetic oligonucleotide
  misc_feature 1..20: note = Target: SCN10A; (-) strand; PAM type: NNAGAAW; PAM sequence: CAAGAAT
  source 1..20: mol_type = other DNA
tatctgctatcctaaaaact

SEQ ID NO: 5866 - DNA, 20 bp, synthetic construct
  misc_feature 1..20: note = Description of Artificial Sequence: Synthetic oligonucleotide
  misc_feature 1..20: note = Target: SCN10A; (-) strand; PAM type: NNAGAAW; PAM sequence: TTAGAAA
  source 1..20: mol_type = other DNA
tcttcaaggcagtattttta

SEQ ID NO: 5867 - DNA, 20 bp, synthetic construct
  misc_feature 1..20: note = Description of Artificial Sequence: Synthetic oligonucleotide
  misc_feature 1..20: note = Target: SCN10A; (-) strand; PAM type: NNAGAAW; PAM sequence: AAAGAAA
  source 1..20: mol_type = other DNA
aggacaccaggcttttgaga

SEQ ID NO: 5868 - DNA, 20 bp, synthetic construct
  misc_feature 1..20: note = Description of Artificial Sequence: Synthetic oligonucleotide
  misc_feature 1..20: note = Target: SCN10A; (-) strand; PAM type: NNAGAAW; PAM sequence: TGAGAAA
  source 1..20: mol_type = other DNA
agacgaggacaccaggcttt

SEQ ID NO: 5869 - DNA, 20 bp, synthetic construct
  misc_feature 1..20: note = Description of Artificial Sequence: Synthetic oligonucleotide
  misc_feature 1..20: note = Target: SCN10A; (-) strand; PAM type: NNAGAAW; PAM sequence: GGAGAAA
  source 1..20: mol_type = other DNA
gtcttccgttgtgtctggga

SEQ ID NO: 5870 - DNA, 20 bp, synthetic construct
  misc_feature 1..20: note = Description of Artificial Sequence: Synthetic oligonucleotide
  misc_feature 1..20: note = Target: SCN10A; (-) strand; PAM type: NNAGAAW; PAM sequence: AAAGAAA
  source 1..20: mol_type = other DNA
ttatggtgaacatgaaaggg

SEQ ID NO: 5871 - DNA, 20 bp, synthetic construct
  misc_feature 1..20: note = Description of Artificial Sequence: Synthetic oligonucleotide
  misc_feature 1..20: note = Target: SCN10A; (-) strand; PAM type: NNAGAAW; PAM sequence: CAAGAAA
  source 1..20: mol_type = other DNA
ccccatgcctttctcttgca

SEQ ID NO: 5872 - DNA, 20 bp, synthetic construct
  misc_feature 1..20: note = Description of Artificial Sequence: Synthetic oligonucleotide
  misc_feature 1..20: note = Target: SCN10A; (-) strand; PAM type: NNAGAAW; PAM sequence: GCAGAAA
  source 1..20: mol_type = other DNA
gagcccaggaggtcgtggct

SEQ ID NO: 5873 - DNA, 20 bp, synthetic construct
  misc_feature 1..20: note = Description of Artificial Sequence: Synthetic oligonucleotide
  misc_feature 1..20: note = Target: SCN10A; (-) strand; PAM type: NNAGAAW; PAM sequence: AAAGAAA
  source 1..20: mol_type = other DNA
taaatttaaaaaagaaaagg

SEQ ID NO: 5874 - DNA, 20 bp, synthetic construct
  misc_feature 1..20: note = Description of Artificial Sequence: Synthetic oligonucleotide
  misc_feature 1..20: note = Target: SCN10A; (-) strand; PAM type: NNAGAAW; PAM sequence: AAAGAAA
  source 1..20: mol_type = other DNA
aaataaattttaaatttaaa

SEQ ID NO: 5875 - DNA, 20 bp, synthetic construct
  misc_feature 1..20: note = Description of Artificial Sequence: Synthetic oligonucleotide
  misc_feature 1..20: note = Target: SCN10A; (-) strand; PAM type: NNAGAAW; PAM sequence: GGAGAAT
  source 1..20: mol_type = other DNA
ctacttgggaggctgaggga

SEQ ID NO: 5876 - DNA, 20 bp, synthetic construct
  misc_feature 1..20: note = Description of Artificial Sequence: Synthetic oligonucleotide
  misc_feature 1..20: note = Target: SCN10A; (-) strand; PAM type: NNAGAAW; PAM sequence: TGAGAAT
  source 1..20: mol_type = other DNA
ctactcaggagggtgaggca

SEQ ID NO: 5877 - DNA, 20 bp, synthetic construct
  misc_feature 1..20: note = Description of Artificial Sequence: Synthetic oligonucleotide
  misc_feature 1..20: note = Target: SCN10A; (-) strand; PAM type: NNAGAAW; PAM sequence: GGAGAAA
  source 1..20: mol_type = other DNA
ggagaccagcctggccaaca

SEQ ID NO: 5878 - DNA, 20 bp, synthetic construct
  misc_feature 1..20: note = Description of Artificial Sequence: Synthetic oligonucleotide
  misc_feature 1..20: note = Target: SCN10A; (-) strand; PAM type: NNAGAAW; PAM sequence: CCAGAAT
  source 1..20: mol_type = other DNA
ggtggctcacgcctgtaatc

SEQ ID NO: 5879 - DNA, 20 bp, synthetic construct
  misc_feature 1..20: note = Description of Artificial Sequence: Synthetic oligonucleotide
  misc_feature 1..20: note = Target: SCN10A; (-) strand; PAM type: NNAGAAW; PAM sequence: CAAGAAT
  source 1..20: mol_type = other DNA
ttcaggaagttctcttttat

SEQ ID NO: 5880 - DNA, 20 bp, synthetic construct
  misc_feature 1..20: note = Description of Artificial Sequence: Synthetic oligonucleotide
  misc_feature 1..20: note = Target: SCN10A; (-) strand; PAM type: NNAGAAW; PAM sequence: TAAGAAA
  source 1..20: mol_type = other DNA
tggcaggctttttttaaaga

SEQ ID NO: 5881 - DNA, 20 bp, synthetic construct
  misc_feature 1..20: note = Description of Artificial Sequence: Synthetic oligonucleotide
  misc_feature 1..20: note = Target: SCN10A; (-) strand; PAM type: NNAGAAW; PAM sequence: AAAGAAT
  source 1..20: mol_type = other DNA
tatcaattttctgatcccaa

SEQ ID NO: 5882 - DNA, 20 bp, synthetic construct
  misc_feature 1..20: note = Description of Artificial Sequence: Synthetic oligonucleotide
  misc_feature 1..20: note = Target: SCN10A; (-) strand; PAM type: NNAGAAW; PAM sequence: CTAGAAA
  source 1..20: mol_type = other DNA
gatatttaacatttttgtat

SEQ ID NO: 5883 - DNA, 20 bp, synthetic construct
  misc_feature 1..20: note = Description of Artificial Sequence: Synthetic oligonucleotide
  misc_feature 1..20: note = Target: SCN10A; (-) strand; PAM type: NNAGAAW; PAM sequence: TTAGAAT
  source 1..20: mol_type = other DNA
tgcacactttcatattcact

SEQ ID NO: 5884 - DNA, 20 bp, synthetic construct
  misc_feature 1..20: note = Description of Artificial Sequence: Synthetic oligonucleotide
  misc_feature 1..20: note = Target: SCN10A; (-) strand; PAM type: NNAGAAW; PAM sequence: CAAGAAT
  source 1..20: mol_type = other DNA
gtaatccacctaatttactt

SEQ ID NO: 5885 - DNA, 20 bp, synthetic construct
  misc_feature 1..20: note = Description of Artificial Sequence: Synthetic oligonucleotide
  misc_feature 1..20: note = Target: SCN10A; (-) strand; PAM type: NNAGAAW; PAM sequence: GAAGAAA
  source 1..20: mol_type = other DNA
aggaaggtggagggaaaaag

SEQ ID NO: 5886 - DNA, 20 bp, synthetic construct
  misc_feature 1..20: note = Description of Artificial Sequence: Synthetic oligonucleotide
  misc_feature 1..20: note = Target: SCN10A; (-) strand; PAM type: NNAGAAW; PAM sequence: AAAGAAA
  source 1..20: mol_type = other DNA
gttgattgattgaaggaagg

SEQ ID NO: 5887 - DNA, 20 bp, synthetic construct
  misc_feature 1..20: note = Description of Artificial Sequence: Synthetic oligonucleotide
  misc_feature 1..20: note = Target: SCN10A; (-) strand; PAM type: NNAGAAW; PAM sequence: TGAGAAT
  source 1..20: mol_type = other DNA
tcactggtttcccattgctc

SEQ ID NO: 5888 - DNA, 20 bp, synthetic construct
  misc_feature 1..20: note = Description of Artificial Sequence: Synthetic oligonucleotide
  misc_feature 1..20: note = Target: SCN10A; (-) strand; PAM type: NNAGAAW; PAM sequence: ACAGAAA
  source 1..20: mol_type = other DNA
agaaaactggagcagattga

SEQ ID NO: 5889 - DNA, 20 bp, synthetic construct
  misc_feature 1..20: note = Description of Artificial Sequence: Synthetic oligonucleotide
  misc_feature 1..20: note = Target: SCN10A; (-) strand; PAM type: NNAGAAW; PAM sequence: TCAGAAA
  source 1..20: mol_type = other DNA
ttcaggacagttttcagttt

SEQ ID NO: 5890 - DNA, 20 bp, synthetic construct
  misc_feature 1..20: note = Description of Artificial Sequence: Synthetic oligonucleotide
  misc_feature 1..20: note = Target: SCN10A; (-) strand; PAM type: NNAGAAW; PAM sequence: GGAGAAA
  source 1..20: mol_type = other DNA
cctgagctgtgagaaatgct

SEQ ID NO: 5891 - DNA, 20 bp, synthetic construct
  misc_feature 1..20: note = Description of Artificial Sequence: Synthetic oligonucleotide
  misc_feature 1..20: note = Target: SCN10A; (-) strand; PAM type: NNAGAAW; PAM sequence: TGAGAAA
  source 1..20: mol_type = other DNA
ccttgtctgcacctgagctg

SEQ ID NO: 5892 - DNA, 20 bp, synthetic construct
  misc_feature 1..20: note = Description of Artificial Sequence: Synthetic oligonucleotide
  misc_feature 1..20: note = Target: SCN10A; (-) strand; PAM type: NNAGAAW; PAM sequence: GGAGAAT
  source 1..20: mol_type = other DNA
ctactcgggaggctgaggca

SEQ ID NO: 5893 - DNA, 20 bp, synthetic construct
  misc_feature 1..20: note = Description of Artificial Sequence: Synthetic oligonucleotide
  misc_feature 1..20: note = Target: SCN10A; (-) strand; PAM type: NNAGAAW; PAM sequence: CTAGAAA
  source 1..20: mol_type = other DNA
ggacagatttctctaggtat

SEQ ID NO: 5894 - DNA, 20 bp, synthetic construct
  misc_feature 1..20: note = Description of Artificial Sequence: Synthetic oligonucleotide
  misc_feature 1..20: note = Target: SCN10A; (-) strand; PAM type: NNAGAAW; PAM sequence: TCAGAAT
  source 1..20: mol_type = other DNA
aacttgaaaatcttacaagg

SEQ ID NO: 5895 - DNA, 20 bp, synthetic construct
  misc_feature 1..20: note = Description of Artificial Sequence: Synthetic oligonucleotide
  misc_feature 1..20: note = Target: SCN10A; (-) strand; PAM type: NNAGAAW; PAM sequence: TCAGAAA
  source 1..20: mol_type = other DNA
ttactaattttccaaaaaag

SEQ ID NO: 5896 - DNA, 20 bp, synthetic construct
  misc_feature 1..20: note = Description of Artificial Sequence: Synthetic oligonucleotide
  misc_feature 1..20: note = Target: SCN10A; (-) strand; PAM type: NNAGAAW; PAM sequence: AAAGAAA
  source 1..20: mol_type = other DNA
aaagaaagaaagaaagaaag

SEQ ID NO: 5897 - DNA, 20 bp, synthetic construct
  misc_feature 1..20: note = Description of Artificial Sequence: Synthetic oligonucleotide
  misc_feature 1..20: note = Target: SCN10A; (-) strand; PAM type: NNAGAAW; PAM sequence: AAAGAAA
  source 1..20: mol_type = other DNA
aaagaaagaaagaaagaaag

SEQ ID NO: 5898 - DNA, 20 bp, synthetic construct
  misc_feature 1..20: note = Description of Artificial Sequence: Synthetic oligonucleotide
  misc_feature 1..20: note = Target: SCN10A; (-) strand; PAM type: NNAGAAW; PAM sequence: AAAGAAA
  source 1..20: mol_type = other DNA
agagaaagaaagaaagaaag

SEQ ID NO: 5899 - DNA, 20 bp, synthetic construct
  misc_feature 1..20: note = Description of Artificial Sequence: Synthetic oligonucleotide
  misc_feature 1..20: note = Target: SCN10A; (-) strand; PAM type: NNAGAAW; PAM sequence: AAAGAAA
  source 1..20: mol_type = other DNA
agaaagagaaagaaagaaag

SEQ ID NO: 5900 - DNA, 20 bp, synthetic construct
  misc_feature 1..20: note = Description of Artificial Sequence: Synthetic oligonucleotide
  misc_feature 1..20: note = Target: SCN10A; (-) strand; PAM type: NNAGAAW; PAM sequence: AAAGAAA
  source 1..20: mol_type = other DNA
aagaagaaagagaaagaaag

SEQ ID NO: 5901 - DNA, 20 bp, synthetic construct
  misc_feature 1..20: note = Description of Artificial Sequence: Synthetic oligonucleotide
  misc_feature 1..20: note = Target: SCN10A; (-) strand; PAM type: NNAGAAW; PAM sequence: AAAGAAA
  source 1..20: mol_type = other DNA
aagaaagaagaaagagaaag

SEQ ID NO: 5902 - DNA, 20 bp, synthetic construct
  misc_feature 1..20: note = Description of Artificial Sequence: Synthetic oligonucleotide
  misc_feature 1..20: note = Target: SCN10A; (-) strand; PAM type: NNAGAAW; PAM sequence: AAAGAAA
  source 1..20: mol_type = other DNA
aagaaagaaagaagaaagag

SEQ ID NO: 5903 - DNA, 20 bp, synthetic construct
  misc_feature 1..20: note = Description of Artificial Sequence: Synthetic oligonucleotide
  misc_feature 1..20: note = Target: SCN10A; (-) strand; PAM type: NNAGAAW; PAM sequence: AGAGAAA
  source 1..20: mol_type = other DNA
gagaaagaaagaaagaagaa

SEQ ID NO: 5904 - DNA, 20 bp, synthetic construct
  misc_feature 1..20: note = Description of Artificial Sequence: Synthetic oligonucleotide
  misc_feature 1..20: note = Target: SCN10A; (-) strand; PAM type: NNAGAAW; PAM sequence: GAAGAAA
  source 1..20: mol_type = other DNA
gaaaaagagaaagaaagaaa

SEQ ID NO: 5905 - DNA, 20 bp, synthetic construct
  misc_feature 1..20: note = Description of Artificial Sequence: Synthetic oligonucleotide
  misc_feature 1..20: note = Target: SCN10A; (-) strand; PAM type: NNAGAAW; PAM sequence: AAAGAAA
  source 1..20: mol_type = other DNA
agagaaagaaaaagagaaag

SEQ ID NO: 5906 - DNA, 20 bp, synthetic construct
  misc_feature 1..20: note = Description of Artificial Sequence: Synthetic oligonucleotide
  misc_feature 1..20: note = Target: SCN10A; (-) strand; PAM type: NNAGAAW; PAM sequence: AAAGAAA
  source 1..20: mol_type = other DNA
ggagagagaaagaaaaagag

SEQ ID NO: 5907 - DNA, 20 bp, synthetic construct
  misc_feature 1..20: note = Description of Artificial Sequence: Synthetic oligonucleotide
  misc_feature 1..20: note = Target: SCN10A; (-) strand; PAM type: NNAGAAW; PAM sequence: AGAGAAA
  source 1..20: mol_type = other DNA
agagggagagagaaagaaaa

SEQ ID NO: 5908 - DNA, 20 bp, synthetic construct
  misc_feature 1..20: note = Description of Artificial Sequence: Synthetic oligonucleotide
  misc_feature 1..20: note = Target: SCN10A; (-) strand; PAM type: NNAGAAW; PAM sequence: AAAGAAA
  source 1..20: mol_type = other DNA
agagagcaagagggagagag

SEQ ID NO: 5909 - DNA, 20 bp, synthetic construct
  misc_feature 1..20: note = Description of Artificial Sequence: Synthetic oligonucleotide
  misc_feature 1..20: note = Target: SCN10A; (-) strand; PAM type: NNAGAAW; PAM sequence: AGAGAAA
  source 1..20: mol_type = other DNA
agagagagagcaagagggag

SEQ ID NO: 5910 - DNA, 20 bp, synthetic construct
  misc_feature 1..20: note = Description of Artificial Sequence: Synthetic oligonucleotide
  misc_feature 1..20: note = Target: SCN10A; (-) strand; PAM type: NNAGAAW; PAM sequence: AAAGAAA
  source 1..20: mol_type = other DNA
aagcgagagaaagacagatg

SEQ ID NO: 5911 - DNA, 20 bp, synthetic construct
  misc_feature 1..20: note = Description of Artificial Sequence: Synthetic oligonucleotide
  misc_feature 1..20: note = Target: SCN10A; (-) strand; PAM type: NNAGAAW; PAM sequence: AGAGAAA
  source 1..20: mol_type = other DNA
gaataaagatagaaaaagcg

SEQ ID NO: 5912 - DNA, 20 bp, synthetic construct
  misc_feature 1..20: note = Description of Artificial Sequence: Synthetic oligonucleotide
  misc_feature 1..20: note = Target: SCN10A; (-) strand; PAM type: NNAGAAW; PAM sequence: ATAGAAA
  source 1..20: mol_type = other DNA
acagagagagaggaataaag

SEQ ID NO: 5913 - DNA, 20 bp, synthetic construct
  misc_feature 1..20: note = Description of Artificial Sequence: Synthetic oligonucleotide
  misc_feature 1..20: note = Target: SCN10A; (-) strand; PAM type: NNAGAAW; PAM sequence: AAAGAAA
  source 1..20: mol_type = other DNA
gagtaagaacctgtctcaaa

SEQ ID NO: 5914 - DNA, 20 bp, synthetic construct
  misc_feature 1..20: note = Description of Artificial Sequence: Synthetic oligonucleotide
  misc_feature 1..20: note = Target: SCN10A; (-) strand; PAM type: NNAGAAW; PAM sequence: ATAGAAA
  source 1..20: mol_type = other DNA
ctcctgggagggatgtttac

SEQ ID NO: 5915 - DNA, 20 bp, synthetic construct
  misc_feature 1..20: note = Description of Artificial Sequence: Synthetic oligonucleotide
  misc_feature 1..20: note = Target: SCN10A; (-) strand; PAM type: NNAGAAW; PAM sequence: GAAGAAA
  source 1..20: mol_type = other DNA
tgggaataggaaagaggcct

SEQ ID NO: 5916 - DNA, 20 bp, synthetic construct
  misc_feature 1..20: note = Description of Artificial Sequence: Synthetic oligonucleotide
  misc_feature 1..20: note = Target: SCN10A; (-) strand; PAM type: NNAGAAW; PAM sequence: AAAGAAT
  source 1..20: mol_type = other DNA
cctcaggggtgggtgaggaa

SEQ ID NO: 5917 - DNA, 20 bp, synthetic construct
  misc_feature 1..20: note = Description of Artificial Sequence: Synthetic oligonucleotide
  misc_feature 1..20: note = Target: SCN10A; (-) strand; PAM type: NNAGAAW; PAM sequence: GCAGAAA
  source 1..20: mol_type = other DNA
gcacagcccctgagaatggt

SEQ ID NO: 5918 - DNA, 20 bp, synthetic construct
  misc_feature 1..20: note = Description of Artificial Sequence: Synthetic oligonucleotide
  misc_feature 1..20: note = Target: SCN10A; (-) strand; PAM type: NNAGAAW; PAM sequence: TGAGAAT
  source 1..20: mol_type = other DNA
actgcagcatgcacagcccc

SEQ ID NO: 5919 - DNA, 20 bp, synthetic construct
  misc_feature 1..20: note = Description of Artificial Sequence: Synthetic oligonucleotide
  misc_feature 1..20: note = Target: SCN10A; (-) strand; PAM type: NNAGAAW; PAM sequence: AAAGAAT
  source 1..20: mol_type = other DNA
ttagagacacacagagccta

SEQ ID NO: 5920 - DNA, 20 bp, synthetic construct
  misc_feature 1..20: note = Description of Artificial Sequence: Synthetic oligonucleotide
  misc_feature 1..20: note = Target: SCN10A; (-) strand; PAM type: NNAGAAW; PAM sequence: TCAGAAT
  source 1..20: mol_type = other DNA
ggttctgacctctctcagtg

SEQ ID NO: 5921 - DNA, 20 bp, synthetic construct
  misc_feature 1..20: note = Description of Artificial Sequence: Synthetic oligonucleotide
  misc_feature 1..20: note = Target: SCN10A; (-) strand; PAM type: NNAGAAW; PAM sequence: TGAGAAA
  source 1..20: mol_type = other DNA
tttgaatcagtcttgtggca

SEQ ID NO: 5922 - DNA, 20 bp, synthetic construct
  misc_feature 1..20: note = Description of Artificial Sequence: Synthetic oligonucleotide
  misc_feature 1..20: note = Target: SCN10A; (-) strand; PAM type: NNAGAAW; PAM sequence: CAAGAAA
  source 1..20: mol_type = other DNA
aaagtgccacttttttaaag

SEQ ID NO: 5923 - DNA, 20 bp, synthetic construct
  misc_feature 1..20: note = Description of Artificial Sequence: Synthetic oligonucleotide
  misc_feature 1..20: note = Target: SCN10A; (-) strand; PAM type: NNAGAAW; PAM sequence: AGAGAAA
  source 1..20: mol_type = other DNA
tagaaaagtggaagcaagag

SEQ ID NO: 5924 - DNA, 20 bp, synthetic construct
  misc_feature 1..20: note = Description of Artificial Sequence: Synthetic oligonucleotide
  misc_feature 1..20: note = Target: SCN10A; (-) strand; PAM type: NNAGAAW; PAM sequence: TTAGAAA
  source 1..20: mol_type = other DNA
cccacaccctcattctacag

SEQ ID NO: 5925 - DNA, 20 bp, synthetic construct
  misc_feature 1..20: note = Description of Artificial Sequence: Synthetic oligonucleotide
  misc_feature 1..20: note = Target: SCN10A; (-) strand; PAM type: NNAGAAW; PAM sequence: AGAGAAT
  source 1..20: mol_type = other DNA
aaaggaaaaatggaaagaga

SEQ ID NO: 5926 - DNA, 20 bp, synthetic construct
  misc_feature 1..20: note = Description of Artificial Sequence: Synthetic oligonucleotide
  misc_feature 1..20: note = Target: SCN10A; (-) strand; PAM type: NNAGAAW; PAM sequence: CTAGAAA
  source 1..20: mol_type = other DNA
ggaaatgtgactacttgtcc

SEQ ID NO: 5927 - DNA, 20 bp, synthetic construct
  misc_feature 1..20: note = Description of Artificial Sequence: Synthetic oligonucleotide
  misc_feature 1..20: note = Target: SCN10A; (-) strand; PAM type: NNAGAAW; PAM sequence: CTAGAAA
  source 1..20: mol_type = other DNA
gcacacatgataggcagaag

SEQ ID NO: 5928 - DNA, 20 bp, synthetic construct
  misc_feature 1..20: note = Description of Artificial Sequence: Synthetic oligonucleotide
  misc_feature 1..20: note = Target: SCN10A; (-) strand; PAM type: NNAGAAW; PAM sequence: TCAGAAT
  source 1..20: mol_type = other DNA
agttgagtttagtggccaca

SEQ ID NO: 5929 - DNA, 20 bp, synthetic construct
  misc_feature 1..20: note = Description of Artificial Sequence: Synthetic oligonucleotide
  misc_feature 1..20: note = Target: SCN10A; (-) strand; PAM type: NNAGAAW; PAM sequence: GGAGAAA
  source 1..20: mol_type = other DNA
ttttcaatgttgtcacttaa

SEQ ID NO: 5930 - DNA, 20 bp, synthetic construct
  misc_feature 1..20: note = Description of Artificial Sequence: Synthetic oligonucleotide
  misc_feature 1..20: note = Target: SCN10A; (-) strand; PAM type: NNAGAAW; PAM sequence: GCAGAAT
  source 1..20: mol_type = other DNA
acaaggtctagaggatgacc

SEQ ID NO: 5931 - DNA, 20 bp, synthetic construct
  misc_feature 1..20: note = Description of Artificial Sequence: Synthetic oligonucleotide
  misc_feature 1..20: note = Target: SCN10A; (-) strand; PAM type: NNAGAAW; PAM sequence: ATAGAAA
  source 1..20: mol_type = other DNA
atgaaggaatggaatataat

SEQ ID NO: 5932 - DNA, 20 bp, synthetic construct
  misc_feature 1..20: note = Description of Artificial Sequence: Synthetic oligonucleotide
  misc_feature 1..20: note = Target: SCN10A; (-) strand; PAM type: NNAGAAW; PAM sequence: GAAGAAT
  source 1..20: mol_type = other DNA
aagtgagaaacagtcatctg

SEQ ID NO: 5933 - DNA, 20 bp, synthetic construct
  misc_feature 1..20: note = Description of Artificial Sequence: Synthetic oligonucleotide
  misc_feature 1..20: note = Target: SCN10A; (-) strand; PAM type: NNAGAAW; PAM sequence: TGAGAAA
  source 1..20: mol_type = other DNA
ttagacgggggaagaggaag

SEQ ID NO: 5934 - DNA, 20 bp, synthetic construct
  misc_feature 1..20: note = Description of Artificial Sequence: Synthetic oligonucleotide
  misc_feature 1..20: note = Target: SCN10A; (-) strand; PAM type: NNAGAAW; PAM sequence: GTAGAAA
  source 1..20: mol_type = other DNA
agctcatcaacagagagtaa

SEQ ID NO: 5935 - DNA, 20 bp, synthetic construct
  misc_feature 1..20: note = Description of Artificial Sequence: Synthetic oligonucleotide
  misc_feature 1..20: note = Target: SCN10A; (-) strand; PAM type: NNAGAAW; PAM sequence: ACAGAAT
  source 1..20: mol_type = other DNA
gcactgtgtggggcacgaag

SEQ ID NO: 5936 - DNA, 20 bp, synthetic construct
  misc_feature 1..20: note = Description of Artificial Sequence: Synthetic oligonucleotide
  misc_feature 1..20: note = Target: SCN10A; (-) strand; PAM type: NNAGAAW; PAM sequence: GTAGAAA
  source 1..20: mol_type = other DNA
ggagctgtagaaggttaagt

SEQ ID NO: 5937 - DNA, 20 bp, synthetic construct
  misc_feature 1..20: note = Description of Artificial Sequence: Synthetic oligonucleotide
  misc_feature 1..20: note = Target: SCN10A; (-) strand; PAM type: NNAGAAW; PAM sequence: AGAGAAA
  source 1..20: mol_type = other DNA
agtcagattccaggggctgc

SEQ ID NO: 5938 - DNA, 20 bp, synthetic construct
  misc_feature 1..20: note = Description of Artificial Sequence: Synthetic oligonucleotide
  misc_feature 1..20: note = Target: SCN10A; (-) strand; PAM type: NNAGAAW; PAM sequence: GGAGAAA
  source 1..20: mol_type = other DNA
aaaagaagtggagaaatatg

SEQ ID NO: 5939 - DNA, 20 bp, synthetic construct
  misc_feature 1..20: note = Description of Artificial Sequence: Synthetic oligonucleotide
  misc_feature 1..20: note = Target: SCN10A; (-) strand; PAM type: NNAGAAW; PAM sequence: GGAGAAA
  source 1..20: mol_type = other DNA
aacagaaagtgaaaagaagt

SEQ ID NO: 5940 - DNA, 20 bp, synthetic construct
  misc_feature 1..20: note = Description of Artificial Sequence: Synthetic oligonucleotide
  misc_feature 1..20: note = Target: SCN10A; (-) strand; PAM type: NNAGAAW; PAM sequence: ACAGAAA
  source 1..20: mol_type = other DNA
aaaggaaaagggagacaaaa

SEQ ID NO: 5941 - DNA, 20 bp, synthetic construct
  misc_feature 1..20: note = Description of Artificial Sequence: Synthetic oligonucleotide
  misc_feature 1..20: note = Target: SCN10A; (-) strand; PAM type: NNAGAAW; PAM sequence: TGAGAAT
  source 1..20: mol_type = other DNA
aaaacacagagaagctaagg

SEQ ID NO: 5942 - DNA, 20 bp, synthetic construct
  misc_feature 1..20: note = Description of Artificial Sequence: Synthetic oligonucleotide
  misc_feature 1..20: note = Target: SCN10A; (-) strand; PAM type: NNAGAAW; PAM sequence: TCAGAAA
  source 1..20: mol_type = other DNA
gcctagtgttcaggaaggga

SEQ ID NO: 5943 - DNA, 20 bp, synthetic construct
  misc_feature 1..20: note = Description of Artificial Sequence: Synthetic oligonucleotide
  misc_feature 1..20: note = Target: SCN10A; (-) strand; PAM type: NNAGAAW; PAM sequence: TAAGAAA
  source 1..20: mol_type = other DNA
tttatagataaacctaaagc

SEQ ID NO: 5944 - DNA, 20 bp, synthetic construct
  misc_feature 1..20: note = Description of Artificial Sequence: Synthetic oligonucleotide
  misc_feature 1..20: note = Target: SCN10A; (-) strand; PAM type: NNAGAAW; PAM sequence: AAAGAAA
  source 1..20: mol_type = other DNA
aatgaagaaaattgaaaaaa

SEQ ID NO: 5945 - DNA, 20 bp, synthetic construct
  misc_feature 1..20: note = Description of Artificial Sequence: Synthetic oligonucleotide
  misc_feature 1..20: note = Target: SCN10A; (-) strand; PAM type: NNAGAAW; PAM sequence: GAAGAAA
  source 1..20: mol_type = other DNA
aaaatttaaaataaaaaaat

SEQ ID NO: 5946 - DNA, 20 bp, synthetic construct
  misc_feature 1..20: note = Description of Artificial Sequence: Synthetic oligonucleotide
  misc_feature 1..20: note = Target: SCN10A; (-) strand; PAM type: NNAGAAW; PAM sequence: AAAGAAA
  source 1..20: mol_type = other DNA
acttaaagtataatttaaaa

SEQ ID NO: 5947 - DNA, 20 bp, synthetic construct
  misc_feature 1..20: note = Description of Artificial Sequence: Synthetic oligonucleotide
  misc_feature 1..20: note = Target: SCN10A; (-) strand; PAM type: NNAGAAW; PAM sequence: TGAGAAA
  source 1..20: mol_type = other DNA
gtattttccaagccttgtag

SEQ ID NO: 5948 - DNA, 20 bp, synthetic construct
  misc_feature 1..20: note = Description of Artificial Sequence: Synthetic oligonucleotide
  misc_feature 1..20: note = Target: SCN10A; (-) strand; PAM type: NNAGAAW; PAM sequence: AAAGAAA
  source 1..20: mol_type = other DNA
aaaaagtgaaactacaaaag

SEQ ID NO: 5949 - DNA, 20 bp, synthetic construct
  misc_feature 1..20: note = Description of Artificial Sequence: Synthetic oligonucleotide
  misc_feature 1..20: note = Target: SCN10A; (-) strand; PAM type: NNAGAAW; PAM sequence: AAAGAAA
  source 1..20: mol_type = other DNA
gtgaaaaaagtgaaactaca

SEQ ID NO: 5950 - DNA, 20 bp, synthetic construct
  misc_feature 1..20: note = Description of Artificial Sequence: Synthetic oligonucleotide
  misc_feature 1..20: note = Target: SCN10A; (-) strand; PAM type: NNAGAAW; PAM sequence: AGAGAAA
  source 1..20: mol_type = other DNA
taaatagtctgatctgtgga

SEQ ID NO: 5951 - DNA, 20 bp, synthetic construct
  misc_feature 1..20: note = Description of Artificial Sequence: Synthetic oligonucleotide
  misc_feature 1..20: note = Target: SCN10A; (-) strand; PAM type: NNAGAAW; PAM sequence: AGAGAAT
  source 1..20: mol_type = other DNA
cagactcctgcagtggcagg

SEQ ID NO: 5952 - DNA, 20 bp, synthetic construct
  misc_feature 1..20: note = Description of Artificial Sequence: Synthetic oligonucleotide
  misc_feature 1..20: note = Target: SCN10A; (-) strand; PAM type: NNAGAAW; PAM sequence: GAAGAAA
  source 1..20: mol_type = other DNA
agagagactgaagattaagg

SEQ ID NO: 5953 - DNA, 20 bp, synthetic construct
  misc_feature 1..20: note = Description of Artificial Sequence: Synthetic oligonucleotide
  misc_feature 1..20: note = Target: SCN10A; (-) strand; PAM type: NNAGAAW; PAM sequence: GGAGAAT
  source 1..20: mol_type = other DNA
atgctaatgggaaggatctg

SEQ ID NO: 5954 - DNA, 20 bp, synthetic construct
  misc_feature 1..20: note = Description of Artificial Sequence: Synthetic oligonucleotide
  misc_feature 1..20: note = Target: SCN10A; (-) strand; PAM type: NNAGAAW; PAM sequence: GGAGAAT
  source 1..20: mol_type = other DNA
aagatggcactagggagtag

SEQ ID NO: 5955 - DNA, 20 bp, synthetic construct
  misc_feature 1..20: note = Description of Artificial Sequence: Synthetic oligonucleotide
  misc_feature 1..20: note = Target: SCN10A; (-) strand; PAM type: NNAGAAW; PAM sequence: GAAGAAA
  source 1..20: mol_type = other DNA
ttaaagagcgggtgagaggt

SEQ ID NO: 5956 - DNA, 20 bp, synthetic construct
  misc_feature 1..20: note = Description of Artificial Sequence: Synthetic oligonucleotide
  misc_feature 1..20: note = Target: SCN10A; (-) strand; PAM type: NNAGAAW; PAM sequence: ATAGAAA
  source 1..20: mol_type = other DNA
taaaaatttcttcagaaaga

SEQ ID NO: 5957 - DNA, 20 bp, synthetic construct
  misc_feature 1..20: note = Description of Artificial Sequence: Synthetic oligonucleotide
  misc_feature 1..20: note = Target: SCN10A; (-) strand; PAM type: NNAGAAW; PAM sequence: AAAGAAT
  source 1..20: mol_type = other DNA
aagagtaaaaatttcttcag

SEQ ID NO: 5958 - DNA, 20 bp, synthetic construct
  misc_feature 1..20: note = Description of Artificial Sequence: Synthetic oligonucleotide
  misc_feature 1..20: note = Target: SCN10A; (-) strand; PAM type: NNAGAAW; PAM sequence: TCAGAAA
  source 1..20: mol_type = other DNA
agccaagagtaaaaatttct

SEQ ID NO: 5959 - DNA, 20 bp, synthetic construct
  misc_feature 1..20: note = Description of Artificial Sequence: Synthetic oligonucleotide
  misc_feature 1..20: note = Target: SCN10A; (-) strand; PAM type: NNAGAAW; PAM sequence: GAAGAAT
  source 1..20: mol_type = other DNA
cagaaataggaaaagatcta

SEQ ID NO: 5960 - DNA, 20 bp, synthetic construct
  misc_feature 1..20: note = Description of Artificial Sequence: Synthetic oligonucleotide
  misc_feature 1..20: note = Target: SCN10A; (-) strand; PAM type: NNAGAAW; PAM sequence: ACAGAAA
  source 1..20: mol_type = other DNA
aggagactgaaaaggaaggt

SEQ ID NO: 5961 - DNA, 20 bp, synthetic construct
  misc_feature 1..20: note = Description of Artificial Sequence: Synthetic oligonucleotide
  misc_feature 1..20: note = Target: SCN10A; (-) strand; PAM type: NNAGAAW; PAM sequence: CAAGAAA
  source 1..20: mol_type = other DNA
gatgagttggggccagatcc

SEQ ID NO: 5962 - DNA, 20 bp, synthetic construct
  misc_feature 1..20: note = Description of Artificial Sequence: Synthetic oligonucleotide
  misc_feature 1..20: note = Target: SCN10A; (-) strand; PAM type: NNAGAAW; PAM sequence: AGAGAAT
  source 1..20: mol_type = other DNA
aaaggactgcaaagcagaag

SEQ ID NO: 5963 - DNA, 20 bp, synthetic construct
  misc_feature 1..20: note = Description of Artificial Sequence: Synthetic oligonucleotide
  misc_feature 1..20: note = Target: SCN10A; (-) strand; PAM type: NNAGAAW; PAM sequence: CCAGAAT
  source 1..20: mol_type = other DNA
agatttcactgttgtccaag

SEQ ID NO: 5964 - DNA, 20 bp, synthetic construct
  misc_feature 1..20: note = Description of Artificial Sequence: Synthetic oligonucleotide
  misc_feature 1..20: note = Target: SCN10A; (-) strand; PAM type: NNAGAAW; PAM sequence: TAAGAAA
  source 1..20: mol_type = other DNA
tctttaagagggattatgct

SEQ ID NO: 5965 - DNA, 20 bp, synthetic construct
  misc_feature 1..20: note = Description of Artificial Sequence: Synthetic oligonucleotide
  misc_feature 1..20: note = Target: SCN10A; (-) strand; PAM type: NNAGAAW; PAM sequence: AAAGAAA
  source 1..20: mol_type = other DNA
cagagaaacaatgatgtttt

SEQ ID NO: 5966 - DNA, 20 bp, synthetic construct
  misc_feature 1..20: note = Description of Artificial Sequence: Synthetic oligonucleotide
  misc_feature 1..20: note = Target: SCN10A; (-) strand; PAM type: NNAGAAW; PAM sequence: AGAGAAA
  source 1..20: mol_type = other DNA
acagtagagtaagaaaggcc

SEQ ID NO: 5967 - DNA, 20 bp, synthetic construct
  misc_feature 1..20: note = Description of Artificial Sequence: Synthetic oligonucleotide
  misc_feature 1..20: note = Target: SCN10A; (-) strand; PAM type: NNAGAAW; PAM sequence: TAAGAAA
  source 1..20: mol_type = other DNA
aagatgctgtgacagtagag

SEQ ID NO: 5968 - DNA, 20 bp, synthetic construct
  misc_feature 1..20: note = Description of Artificial Sequence: Synthetic oligonucleotide
  misc_feature 1..20: note = Target: SCN10A; (-) strand; PAM type: NNAGAAW; PAM sequence: GAAGAAA
  source 1..20: mol_type = other DNA
cagtgtgaactgataaaaag

SEQ ID NO: 5969 - DNA, 20 bp, synthetic construct
  misc_feature 1..20: note = Description of Artificial Sequence: Synthetic oligonucleotide
  misc_feature 1..20: note = Target: SCN10A; (-) strand; PAM type: NNAGAAW; PAM sequence: TGAGAAT
  source 1..20: mol_type = other DNA
atttttagcctgtaaagtag

SEQ ID NO: 5970 - DNA, 20 bp, synthetic construct
  misc_feature 1..20: note = Description of Artificial Sequence: Synthetic oligonucleotide
  misc_feature 1..20: note = Target: SCN10A; (-) strand; PAM type: NNAGAAW; PAM sequence: CAAGAAT
  source 1..20: mol_type = other DNA
agcaagtacaatgcattctg

SEQ ID NO: 5971 - DNA, 20 bp, synthetic construct
  misc_feature 1..20: note = Description of Artificial Sequence: Synthetic oligonucleotide
  misc_feature 1..20: note = Target: SCN10A; (-) strand; PAM type: NNAGAAW; PAM sequence: GGAGAAA
  source 1..20: mol_type = other DNA
tcagctatgtaagaagctga

SEQ ID NO: 5972 - DNA, 20 bp, synthetic construct
  misc_feature 1..20: note = Description of Artificial Sequence: Synthetic oligonucleotide
  misc_feature 1..20: note = Target: SCN10A; (-) strand; PAM type: NNAGAAW; PAM sequence: ACAGAAA
  source 1..20: mol_type = other DNA
gaaaattctctccaagaaga

SEQ ID NO: 5973 - DNA, 20 bp, synthetic construct
  misc_feature 1..20: note = Description of Artificial Sequence: Synthetic oligonucleotide
  misc_feature 1..20: note = Target: SCN10A; (-) strand; PAM type: NNAGAAW; PAM sequence: GGAGAAA
  source 1..20: mol_type = other DNA
atattcagatataagaagta

SEQ ID NO: 5974 - DNA, 20 bp, synthetic construct
  misc_feature 1..20: note = Description of Artificial Sequence: Synthetic oligonucleotide
  misc_feature 1..20: note = Target: SCN10A; (-) strand; PAM type: NNAGAAW; PAM sequence: ATAGAAT
  source 1..20: mol_type = other DNA
cttctaacatttttcatggc

SEQ ID NO: 5975 - DNA, 20 bp, synthetic construct
  misc_feature 1..20: note = Description of Artificial Sequence: Synthetic oligonucleotide
  misc_feature 1..20: note = Target: SCN10A; (-) strand; PAM type: NNAGAAW; PAM sequence: TGAGAAA
  source 1..20: mol_type = other DNA
gcatacctgagtttgtgctt

SEQ ID NO: 5976 - DNA, 20 bp, synthetic construct
  misc_feature 1..20: note = Description of Artificial Sequence: Synthetic oligonucleotide
  misc_feature 1..20: note = Target: SCN10A; (-) strand; PAM type: NNAGAAW; PAM sequence: CCAGAAT
  source 1..20: mol_type = other DNA
tcagagagagccctgtggct

SEQ ID NO: 5977 - DNA, 20 bp, synthetic construct
  misc_feature 1..20: note = Description of Artificial Sequence: Synthetic oligonucleotide
  misc_feature 1..20: note = Target: SCN10A; (-) strand; PAM type: NNAGAAW; PAM sequence: TAAGAAA
  source 1..20: mol_type = other DNA
aggagaaacaaagacgtttt

SEQ ID NO: 5978 - DNA, 20 bp, synthetic construct
  misc_feature 1..20: note = Description of Artificial Sequence: Synthetic oligonucleotide
  misc_feature 1..20: note = Target: SCN10A; (-) strand; PAM type: NNAGAAW; PAM sequence: GGAGAAA
  source 1..20: mol_type = other DNA
agagtagagtaagaaaggca

SEQ ID NO: 5979 - DNA, 20 bp, synthetic construct
  misc_feature 1..20: note = Description of Artificial Sequence: Synthetic oligonucleotide
  misc_feature 1..20: note = Target: SCN10A; (-) strand; PAM type: NNAGAAW; PAM sequence: TAAGAAA
  source 1..20: mol_type = other DNA
aagatactgtgagagtagag

SEQ ID NO: 5980 - DNA, 20 bp, synthetic construct
  misc_feature 1..20: note = Description of Artificial Sequence: Synthetic oligonucleotide
  misc_feature 1..20: note = Target: SCN10A; (-) strand; PAM type: NNAGAAW; PAM sequence: GAAGAAA
  source 1..20: mol_type = other DNA
tggtgtaaactgataaaaag

SEQ ID NO: 5981 - DNA, 20 bp, synthetic construct
  misc_feature 1..20: note = Description of Artificial Sequence: Synthetic oligonucleotide
  misc_feature 1..20: note = Target: SCN10A; (-) strand; PAM type: NNAGAAW; PAM sequence: ACAGAAA
  source 1..20: mol_type = other DNA
ttagagagagattcacatgc

SEQ ID NO: 5982 - DNA, 20 bp, synthetic construct
  misc_feature 1..20: note = Description of Artificial Sequence: Synthetic oligonucleotide
  misc_feature 1..20: note = Target: SCN10A; (-) strand; PAM type: NNAGAAW; PAM sequence: ATAGAAA
  source 1..20: mol_type = other DNA
aggggaagaagtggtgagca

SEQ ID NO: 5983 - DNA, 20 bp, synthetic construct
  misc_feature 1..20: note = Description of Artificial Sequence: Synthetic oligonucleotide
  misc_feature 1..20: note = Target: SCN10A; (-) strand; PAM type: NNAGAAW; PAM sequence: GGAGAAT
  source 1..20: mol_type = other DNA
ctttttttgccttagggtat

SEQ ID NO: 5984 - DNA, 20 bp, synthetic construct
  misc_feature 1..20: note = Description of Artificial Sequence: Synthetic oligonucleotide
  misc_feature 1..20: note = Target: SCN10A; (-) strand; PAM type: NNAGAAW; PAM sequence: TTAGAAT
  source 1..20: mol_type = other DNA
ttaactaagtccttgttaat

SEQ ID NO: 5985 - DNA, 20 bp, synthetic construct
  misc_feature 1..20: note = Description of Artificial Sequence: Synthetic oligonucleotide
  misc_feature 1..20: note = Target: SCN10A; (-) strand; PAM type: NNAGAAW; PAM sequence: CAAGAAA
  source 1..20: mol_type = other DNA
caggccagctctccggtgta

SEQ ID NO: 5986 - DNA, 20 bp, synthetic construct
  misc_feature 1..20: note = Description of Artificial Sequence: Synthetic oligonucleotide
  misc_feature 1..20: note = Target: SCN10A; (-) strand; PAM type: NNAGAAW; PAM sequence: AGAGAAT
  source 1..20: mol_type = other DNA
aaagtgatctggcaggcatc

SEQ ID NO: 5987 - DNA, 20 bp, synthetic construct
  misc_feature 1..20: note = Description of Artificial Sequence: Synthetic oligonucleotide
  misc_feature 1..20: note = Target: SCN10A; (-) strand; PAM type: NNAGAAW; PAM sequence: GCAGAAT
  source 1..20: mol_type = other DNA
aaaagaagactttcttgtca

SEQ ID NO: 5988 - DNA, 20 bp, synthetic construct
  misc_feature 1..20: note = Description of Artificial Sequence: Synthetic oligonucleotide
  misc_feature 1..20: note = Target: SCN10A; (-) strand; PAM type: NNAGAAW; PAM sequence: ACAGAAT
  source 1..20: mol_type = other DNA
aaatacaatgtaggatattc

SEQ ID NO: 5989 - DNA, 20 bp, synthetic construct
  misc_feature 1..20: note = Description of Artificial Sequence: Synthetic oligonucleotide
  misc_feature 1..20: note = Target: SCN10A; (-) strand; PAM type: NNAGAAW; PAM sequence: CTAGAAA
  source 1..20: mol_type = other DNA
gctgggagtgcattagcact

SEQ ID NO: 5990 - DNA, 20 bp, synthetic construct
  misc_feature 1..20: note = Description of Artificial Sequence: Synthetic oligonucleotide
  misc_feature 1..20: note = Target: SCN10A; (-) strand; PAM type: NNAGAAW; PAM sequence: CCAGAAT
  source 1..20: mol_type = other DNA
tgaagggatgaaggaaagga

SEQ ID NO: 5991 - DNA, 20 bp, synthetic construct
  misc_feature 1..20: note = Description of Artificial Sequence: Synthetic oligonucleotide
  misc_feature 1..20: note = Target: SCN10A; (-) strand; PAM type: NNAGAAW; PAM sequence: CTAGAAA
  source 1..20: mol_type = other DNA
aataagggacagtgaggcac

SEQ ID NO: 5992 - DNA, 20 bp, synthetic construct
  misc_feature 1..20: note = Description of Artificial Sequence: Synthetic oligonucleotide
  misc_feature 1..20: note = Target: SCN10A; (-) strand; PAM type: NNAGAAW; PAM sequence: CAAGAAA
  source 1..20: mol_type = other DNA
catgtgattcagggtcccag

SEQ ID NO: 5993 - DNA, 20 bp, synthetic construct
  misc_feature 1..20: note = Description of Artificial Sequence: Synthetic oligonucleotide
  misc_feature 1..20: note = Target: SCN10A; (-) strand; PAM type: NNAGAAW; PAM sequence: ACAGAAT
  source 1..20: mol_type = other DNA
gggatacagcgcaattgcag

SEQ ID NO: 5994 - DNA, 20 bp, synthetic construct
  misc_feature 1..20: note = Description of Artificial Sequence: Synthetic oligonucleotide
  misc_feature 1..20: note = Target: SCN10A; (-) strand; PAM type: NNAGAAW; PAM sequence: ATAGAAT
  source 1..20: mol_type = other DNA
taactggccagcactcttta

SEQ ID NO: 5995 - DNA, 20 bp, synthetic construct
  misc_feature 1..20: note = Description of Artificial Sequence: Synthetic oligonucleotide
  misc_feature 1..20: note = Target: SCN10A; (-) strand; PAM type: NNAGAAW; PAM sequence: GAAGAAA
  source 1..20: mol_type = other DNA
tattccttgctttactcaca

SEQ ID NO: 5996 - DNA, 20 bp, synthetic construct
  misc_feature 1..20: note = Description of Artificial Sequence: Synthetic oligonucleotide
  misc_feature 1..20: note = Target: SCN10A; (-) strand; PAM type: NNAGAAW; PAM sequence: AGAGAAA
  source 1..20: mol_type = other DNA
aggctgggcaaatggcaccc

SEQ ID NO: 5997 - DNA, 20 bp, synthetic construct
  misc_feature 1..20: note = Description of Artificial Sequence: Synthetic oligonucleotide
  misc_feature 1..20: note = Target: SCN10A; (-) strand; PAM type: NNAGAAW; PAM sequence: TGAGAAA
  source 1..20: mol_type = other DNA
gctttcttgttggacaggta

SEQ ID NO: 5998 - DNA, 20 bp, synthetic construct
  misc_feature 1..20: note = Description of Artificial Sequence: Synthetic oligonucleotide
  misc_feature 1..20: note = Target: SCN10A; (-) strand; PAM type: NNAGAAW; PAM sequence: CTAGAAT
  source 1..20: mol_type = other DNA
tttttccccaccatgcatac

SEQ ID NO: 5999 - DNA, 20 bp, synthetic construct
  misc_feature 1..20: note = Description of Artificial Sequence: Synthetic oligonucleotide
  misc_feature 1..20: note = Target: SCN10A; (-) strand; PAM type: NNAGAAW; PAM sequence: CTAGAAA
  source 1..20: mol_type = other DNA
tgttcaagcctcgagggatc

SEQ ID NO: 6000 - DNA, 20 bp, synthetic construct
  misc_feature 1..20: note = Description of Artificial Sequence: Synthetic oligonucleotide
  misc_feature 1..20: note = Target: SCN10A; (-) strand; PAM type: NNAGAAW; PAM sequence: ATAGAAA
  source 1..20: mol_type = other DNA
ctaaagccattttataacca

SEQ ID NO: 6001 - DNA, 20 bp, synthetic construct
  misc_feature 1..20: note = Description of Artificial Sequence: Synthetic oligonucleotide
  misc_feature 1..20: note = Target: SCN10A; (-) strand; PAM type: NNAGAAW; PAM sequence: GCAGAAA
  source 1..20: mol_type = other DNA
tggggaggagtattttcctg

SEQ ID NO: 6002 - DNA, 20 bp, synthetic construct
  misc_feature 1..20: note = Description of Artificial Sequence: Synthetic oligonucleotide
  misc_feature 1..20: note = Target: SCN10A; (-) strand; PAM type: NNAGAAW; PAM sequence: TCAGAAA
  source 1..20: mol_type = other DNA
cttatggggctggataggta

SEQ ID NO: 6003 - DNA, 20 bp, synthetic construct
  misc_feature 1..20: note = Description of Artificial Sequence: Synthetic oligonucleotide
  misc_feature 1..20: note = Target: SCN10A; (-) strand; PAM type: NNAGAAW; PAM sequence: GAAGAAA
  source 1..20: mol_type = other DNA
atggtgttttgagaatcagg

SEQ ID NO: 6004 - DNA, 20 bp, synthetic construct
  misc_feature 1..20: note = Description of Artificial Sequence: Synthetic oligonucleotide
  misc_feature 1..20: note = Target: SCN10A; (-) strand; PAM type: NNAGAAW; PAM sequence: TGAGAAT
  source 1..20: mol_type = other DNA
gagacacatacatggtgttt

SEQ ID NO: 6005 - DNA, 20 bp, synthetic construct
  misc_feature 1..20: note = Description of Artificial Sequence: Synthetic oligonucleotide
  misc_feature 1..20: note = Target: SCN10A; (-) strand; PAM type: NNAGAAW; PAM sequence: TCAGAAA
  source 1..20: mol_type = other DNA
caagctgtcacctgttgtta

SEQ ID NO: 6006 - DNA, 20 bp, synthetic construct
  misc_feature 1..20: note = Description of Artificial Sequence: Synthetic oligonucleotide
  misc_feature 1..20: note = Target: SCN10A; (-) strand; PAM type: NNAGAAW; PAM sequence: AGAGAAA
  source 1..20: mol_type = other DNA
agtgggaagaggtgtgtggc

SEQ ID NO: 6007 - DNA, 20 bp, synthetic construct
  misc_feature 1..20: note = Description of Artificial Sequence: Synthetic oligonucleotide
  misc_feature 1..20: note = Target: SCN10A; (-) strand; PAM type: NNAGAAW; PAM sequence: ATAGAAT
  source 1..20: mol_type = other DNA
aaatgccagtgagagaaggc

SEQ ID NO: 6008 - DNA, 20 bp, synthetic construct
  misc_feature 1..20: note = Description of Artificial Sequence: Synthetic oligonucleotide
  misc_feature 1..20: note = Target: SCN10A; (-) strand; PAM type: NNAGAAW; PAM sequence: GTAGAAT
  source 1..20: mol_type = other DNA
agccaaaagagacttttttt

SEQ ID NO: 6009 - DNA, 20 bp, synthetic construct
  misc_feature 1..20: note = Description of Artificial Sequence: Synthetic oligonucleotide
  misc_feature 1..20: note = Target: SCN10A; (-) strand; PAM type: NNAGAAW; PAM sequence: ACAGAAT
  source 1..20: mol_type = other DNA
gagaaagcgaatgaagcaaa

SEQ ID NO: 6010 - DNA, 20 bp, synthetic construct
  misc_feature 1..20: note = Description of Artificial Sequence: Synthetic oligonucleotide
  misc_feature 1..20: note = Target: SCN10A; (-) strand; PAM type: NNAGAAW; PAM sequence: GGAGAAA
  source 1..20: mol_type = other DNA
ctattgagggagtgctctca

SEQ ID NO: 6011 - DNA, 20 bp, synthetic construct
  misc_feature 1..20: note = Description of Artificial Sequence: Synthetic oligonucleotide
  misc_feature 1..20: note = Target: SCN10A; (-) strand; PAM type: NNAGAAW; PAM sequence: ACAGAAA
  source 1..20: mol_type = other DNA
gcgtccccgttttatggata

SEQ ID NO: 6012 - DNA, 20 bp, synthetic construct
  misc_feature 1..20: note = Description of Artificial Sequence: Synthetic oligonucleotide
  misc_feature 1..20: note = Target: SCN10A; (-) strand; PAM type: NNAGAAW; PAM sequence: ACAGAAA
  source 1..20: mol_type = other DNA
ttaaagggagagagaagaac

SEQ ID NO: 6013 - DNA, 20 bp, synthetic construct
  misc_feature 1..20: note = Description of Artificial Sequence: Synthetic oligonucleotide
  misc_feature 1..20: note = Target: SCN10A; (-) strand; PAM type: NNAGAAW; PAM sequence: AAAGAAA
  source 1..20: mol_type = other DNA
cccccagattccttatctgt

SEQ ID NO: 6014 - DNA, 20 bp, synthetic construct
  misc_feature 1..20: note = Description of Artificial Sequence: Synthetic oligonucleotide
  misc_feature 1..20: note = Target: SCN10A; (-) strand; PAM type: NNAGAAW; PAM sequence: AAAGAAA
  source 1..20: mol_type = other DNA
aggtaaataaaacaggagaa

SEQ ID NO: 6015 - DNA, 20 bp, synthetic construct
  misc_feature 1..20: note = Description of Artificial Sequence: Synthetic oligonucleotide
  misc_feature 1..20: note = Target: SCN10A; (-) strand; PAM type: NNAGAAW; PAM sequence: GGAGAAA
  source 1..20: mol_type = other DNA
gaatgcaggtaaataaaaca

SEQ ID NO: 6016 - DNA, 20 bp, synthetic construct
  misc_feature 1..20: note = Description of Artificial Sequence: Synthetic oligonucleotide
  misc_feature 1..20: note = Target: SCN10A; (-) strand; PAM type: NNAGAAW; PAM sequence: AAAGAAT
  source 1..20: mol_type = other DNA
atggagaaatcctgggagta

SEQ ID NO: 6017 - DNA, 20 bp, synthetic construct
  misc_feature 1..20: note = Description of Artificial Sequence: Synthetic oligonucleotide
  misc_feature 1..20: note = Target: SCN10A; (-) strand; PAM type: NNAGAAW; PAM sequence: GGAGAAA
  source 1..20: mol_type = other DNA
ccccagaggttggagttcat

SEQ ID NO: 6018 - DNA, 20 bp, synthetic construct
  misc_feature 1..20: note = Description of Artificial Sequence: Synthetic oligonucleotide
  misc_feature 1..20: note = Target: SCN10A; (-) strand; PAM type: NNAGAAW; PAM sequence: TTAGAAT
  source 1..20: mol_type = other DNA
ggagatagacttggaactga

SEQ ID NO: 6019 - DNA, 20 bp, synthetic construct
  misc_feature 1..20: note = Description of Artificial Sequence: Synthetic oligonucleotide
  misc_feature 1..20: note = Target: SCN10A; (-) strand; PAM type: NNAGAAW; PAM sequence: TAAGAAA
  source 1..20: mol_type = other DNA
aggctgccctcagagttaat

SEQ ID NO: 6020 - DNA, 20 bp, synthetic construct
  misc_feature 1..20: note = Description of Artificial Sequence: Synthetic oligonucleotide
  misc_feature 1..20: note = Target: SCN10A; (-) strand; PAM type: NNAGAAW; PAM sequence: ATAGAAA
  source 1..20: mol_type = other DNA
ggtggatttctacagaagac

SEQ ID NO: 6021 - DNA, 20 bp, synthetic construct
  misc_feature 1..20: note = Description of Artificial Sequence: Synthetic oligonucleotide
  misc_feature 1..20: note = Target: SCN10A; (-) strand; PAM type: NNAGAAW; PAM sequence: CCAGAAA
  source 1..20: mol_type = other DNA
ctcaaggcagaaaatggata

SEQ ID NO: 6022 - DNA, 20 bp, synthetic construct
  misc_feature 1..20: note = Description of Artificial Sequence: Synthetic oligonucleotide
  misc_feature 1..20: note = Target: SCN10A; (-) strand; PAM type: NNAGAAW; PAM sequence: GCAGAAA
  source 1..20: mol_type = other DNA
ggaaggtcaggggtctcaag

SEQ ID NO: 6023 - DNA, 20 bp, synthetic construct
  misc_feature 1..20: note = Description of Artificial Sequence: Synthetic oligonucleotide
  misc_feature 1..20: note = Target: SCN10A; (-) strand; PAM type: NNAGAAW; PAM sequence: GCAGAAA
  source 1..20: mol_type = other DNA
gccactggaggaaggcatga

SEQ ID NO: 6024 - DNA, 20 bp, synthetic construct
  misc_feature 1..20: note = Description of Artificial Sequence: Synthetic oligonucleotide
  misc_feature 1..20: note = Target: SCN10A; (-) strand; PAM type: NNAGAAW; PAM sequence: ACAGAAT
  source 1..20: mol_type = other DNA
agaccattccaggtggcaga

SEQ ID NO: 6025 - DNA, 20 bp, synthetic construct
  misc_feature 1..20: note = Description of Artificial Sequence: Synthetic oligonucleotide
  misc_feature 1..20: note = Target: SCN10A; (-) strand; PAM type: NNAGAAW; PAM sequence: AGAGAAA
  source 1..20: mol_type = other DNA
aggtggcggtgtgaggcaag

SEQ ID NO: 6026 - DNA, 20 bp, synthetic construct
  misc_feature 1..20: note = Description of Artificial Sequence: Synthetic oligonucleotide
  misc_feature 1..20: note = Target: SCN10A; (-) strand; PAM type: NNAGAAW; PAM sequence: CAAGAAT
  source 1..20: mol_type = other DNA
agggtgtggatacatagaga

SEQ ID NO: 6027 - DNA, 20 bp, synthetic construct
  misc_feature 1..20: note = Description of Artificial Sequence: Synthetic oligonucleotide
  misc_feature 1..20: note = Target: SCN10A; (-) strand; PAM type: NNAGAAW; PAM sequence: AGAGAAA
  source 1..20: mol_type = other DNA
ccagtagagatccaagagac

SEQ ID NO: 6028 - DNA, 20 bp, synthetic construct
  misc_feature 1..20: note = Description of Artificial Sequence: Synthetic oligonucleotide
  misc_feature 1..20: note = Target: SCN10A; (-) strand; PAM type: NNAGAAW; PAM sequence: CCAGAAA
  source 1..20: mol_type = other DNA
ctgttctcatggcagtgttc

SEQ ID NO: 6029 - DNA, 20 bp, synthetic construct
  misc_feature 1..20: note = Description of Artificial Sequence: Synthetic oligonucleotide
  misc_feature 1..20: note = Target: SCN10A; (-) strand; PAM type: NNAGAAW; PAM sequence: ACAGAAA
  source 1..20: mol_type = other DNA
gacaaccaactactcatctc

SEQ ID NO: 6030 - DNA, 20 bp, synthetic construct
  misc_feature 1..20: note = Description of Artificial Sequence: Synthetic oligonucleotide
  misc_feature 1..20: note = Target: SCN10A; (-) strand; PAM type: NNAGAAW; PAM sequence: CAAGAAT
  source 1..20: mol_type = other DNA
aacctcaaaaataaatgtgt

SEQ ID NO: 6031 - DNA, 20 bp, synthetic construct
  misc_feature 1..20: note = Description of Artificial Sequence: Synthetic oligonucleotide
  misc_feature 1..20: note = Target: SCN10A; (-) strand; PAM type: NNAGAAW; PAM sequence: GAAGAAA
  source 1..20: mol_type = other DNA
ggggccctgattcactcagt

SEQ ID NO: 6032 - DNA, 20 bp, synthetic construct
  misc_feature 1..20: note = Description of Artificial Sequence: Synthetic oligonucleotide
  misc_feature 1..20: note = Target: SCN10A; (-) strand; PAM type: NNAGAAW; PAM sequence: TGAGAAA
  source 1..20: mol_type = other DNA
gagtaaatgcaagcttcgga

SEQ ID NO: 6033 - DNA, 20 bp, synthetic construct
  misc_feature 1..20: note = Description of Artificial Sequence: Synthetic oligonucleotide
  misc_feature 1..20: note = Target: SCN10A; (-) strand; PAM type: NNAGAAW; PAM sequence: TGAGAAT
  source 1..20: mol_type = other DNA
cagttgcatcgtctttataa

SEQ ID NO: 6034 - DNA, 20 bp, synthetic construct
  misc_feature 1..20: note = Description of Artificial Sequence: Synthetic oligonucleotide
  misc_feature 1..20: note = Target: SCN10A; (-) strand; PAM type: NNAGAAW; PAM sequence: GCAGAAA
  source 1..20: mol_type = other DNA
aagctgcctcccagatgcat

SEQ ID NO: 6035 - DNA, 20 bp, synthetic construct
  misc_feature 1..20: note = Description of Artificial Sequence: Synthetic oligonucleotide
  misc_feature 1..20: note = Target: SCN10A; (-) strand; PAM type: NNAGAAW; PAM sequence: ACAGAAA
  source 1..20: mol_type = other DNA
attcgttctcttatctgtaa

SEQ ID NO: 6036 - DNA, 20 bp, synthetic construct
  misc_feature 1..20: note = Description of Artificial Sequence: Synthetic oligonucleotide
  misc_feature 1..20: note = Target: SCN10A; (-) strand; PAM type: NNAGAAW; PAM sequence: CAAGAAT
  source 1..20: mol_type = other DNA
taggttctctcctctcaccc

SEQ ID NO: 6037 - DNA, 20 bp, synthetic construct
  misc_feature 1..20: note = Description of Artificial Sequence: Synthetic oligonucleotide
  misc_feature 1..20: note = Target: SCN10A; (-) strand; PAM type: NNAGAAW; PAM sequence: TCAGAAA
  source 1..20: mol_type = other DNA
aattcttgattactgagaat

SEQ ID NO: 6038 - DNA, 20 bp, synthetic construct
  misc_feature 1..20: note = Description of Artificial Sequence: Synthetic oligonucleotide
  misc_feature 1..20: note = Target: SCN10A; (-) strand; PAM type: NNAGAAW; PAM sequence: TGAGAAT
  source 1..20: mol_type = other DNA
attaggcaattcttgattac

SEQ ID NO: 6039 - DNA, 20 bp, synthetic construct
  misc_feature 1..20: note = Description of Artificial Sequence: Synthetic oligonucleotide
  misc_feature 1..20: note = Target: SCN10A; (-) strand; PAM type: NNAGAAW; PAM sequence: AAAGAAT
  source 1..20: mol_type = other DNA
ctttagacacccagaggaaa

SEQ ID NO: 6040 - DNA, 20 bp, synthetic construct
  misc_feature 1..20: note = Description of Artificial Sequence: Synthetic oligonucleotide
  misc_feature 1..20: note = Target: SCN10A; (-) strand; PAM type: NNAGAAW; PAM sequence: GGAGAAA
  source 1..20: mol_type = other DNA
acttggaaatggggaggaag

SEQ ID NO: 6041 - DNA, 20 bp, synthetic construct
  misc_feature 1..20: note = Description of Artificial Sequence: Synthetic oligonucleotide
  misc_feature 1..20: note = Target: SCN10A; (-) strand; PAM type: NNAGAAW; PAM sequence: TGAGAAA
  source 1..20: mol_type = other DNA
ctgacatggcggtctccttc

SEQ ID NO: 6042 - DNA, 20 bp, synthetic construct
  misc_feature 1..20: note = Description of Artificial Sequence: Synthetic oligonucleotide
  misc_feature 1..20: note = Target: SCN10A; (-) strand; PAM type: NNAGAAW; PAM sequence: TCAGAAA
  source 1..20: mol_type = other DNA
agttagcctgtcacagtgga

SEQ ID NO: 6043 - DNA, 20 bp, synthetic construct
  misc_feature 1..20: note = Description of Artificial Sequence: Synthetic oligonucleotide
  misc_feature 1..20: note = Target: SCN10A; (-) strand; PAM type: NNAGAAW; PAM sequence: AAAGAAT
  source 1..20: mol_type = other DNA
aaatctcagaaatcagcgtt

SEQ ID NO: 6044 - DNA, 20 bp, synthetic construct
  misc_feature 1..20: note = Description of Artificial Sequence: Synthetic oligonucleotide
  misc_feature 1..20: note = Target: SCN10A; (-) strand; PAM type: NNAGAAW; PAM sequence: TCAGAAA
  source 1..20: mol_type = other DNA
ggtgatggtgcaccaaaatc

SEQ ID NO: 6045 - DNA, 20 bp, synthetic construct
  misc_feature 1..20: note = Description of Artificial Sequence: Synthetic oligonucleotide
  misc_feature 1..20: note = Target: SCN10A; (-) strand; PAM type: NNAGAAW; PAM sequence: ATAGAAA
  source 1..20: mol_type = other DNA
ctaaatgaagtaactcagga

SEQ ID NO: 6046 - DNA, 20 bp, synthetic construct
  misc_feature 1..20: note = Description of Artificial Sequence: Synthetic oligonucleotide
  misc_feature 1..20: note = Target: SCN10A; (-) strand; PAM type: NNAGAAW; PAM sequence: AAAGAAA
  source 1..20: mol_type = other DNA
ccatcaaccaacaagtgcat

SEQ ID NO: 6047 - DNA, 20 bp, synthetic construct
  misc_feature 1..20: note = Description of Artificial Sequence: Synthetic oligonucleotide
  misc_feature 1..20: note = Target: SCN10A; (-) strand; PAM type: NNAGAAW; PAM sequence: CAAGAAT
  source 1..20: mol_type = other DNA
gagataccaccttactcctg

SEQ ID NO: 6048 - DNA, 20 bp, synthetic construct
  misc_feature 1..20: note = Description of Artificial Sequence: Synthetic oligonucleotide
  misc_feature 1..20: note = Target: SCN10A; (-) strand; PAM type: NNAGAAW; PAM sequence: CAAGAAT
  source 1..20: mol_type = other DNA
atccaaaagtgggcaaagga

SEQ ID NO: 6049 - DNA, 20 bp, synthetic construct
  misc_feature 1..20: note = Description of Artificial Sequence: Synthetic oligonucleotide
  misc_feature 1..20: note = Target: SCN10A; (-) strand; PAM type: NNAGAAW; PAM sequence: CAAGAAA
  source 1..20: mol_type = other DNA
aagaaacacaaataaatcag

SEQ ID NO: 6050 - DNA, 20 bp, synthetic construct
  misc_feature 1..20: note = Description of Artificial Sequence: Synthetic oligonucleotide
  misc_feature 1..20: note = Target: SCN10A; (-) strand; PAM type: NNAGAAW; PAM sequence: TAAGAAA
  source 1..20: mol_type = other DNA
agactaatatccagcatcta

SEQ ID NO: 6051 - DNA, 20 bp, synthetic construct
  misc_feature 1..20: note = Description of Artificial Sequence: Synthetic oligonucleotide
  misc_feature 1..20: note = Target: SCN10A; (-) strand; PAM type: NNAGAAW; PAM sequence: AGAGAAA
  source 1..20: mol_type = other DNA
aacagacaacccataggatg

SEQ ID NO: 6052 - DNA, 20 bp, synthetic construct
  misc_feature 1..20: note = Description of Artificial Sequence: Synthetic oligonucleotide
  misc_feature 1..20: note = Target: SCN10A; (-) strand; PAM type: NNAGAAW; PAM sequence: AGAGAAA
  source 1..20: mol_type = other DNA
taaaaagctgttgcacagca

SEQ ID NO: 6053 - DNA, 20 bp, synthetic construct
  misc_feature 1..20: note = Description of Artificial Sequence: Synthetic oligonucleotide
  misc_feature 1..20: note = Target: SCN10A; (-) strand; PAM type: NNAGAAW; PAM sequence: AAAGAAA
  source 1..20: mol_type = other DNA
tagcaagccacatgtggaag

SEQ ID NO: 6054 - DNA, 20 bp, synthetic construct
  misc_feature 1..20: note = Description of Artificial Sequence: Synthetic oligonucleotide
  misc_feature 1..20: note = Target: SCN10A; (-) strand; PAM type: NNAGAAW; PAM sequence: GAAGAAA
  source 1..20: mol_type = other DNA
taattagcaagccacatgtg

SEQ ID NO: 6055 - DNA, 20 bp, synthetic construct
  misc_feature 1..20: note = Description of Artificial Sequence: Synthetic oligonucleotide
  misc_feature 1..20: note = Target: SCN10A; (-) strand; PAM type: NNAGAAW; PAM sequence: TCAGAAA
  source 1..20: mol_type = other DNA
aatggaaaagaatagagaac

SEQ ID NO: 6056 - DNA, 20 bp, synthetic construct
  misc_feature 1..20: note = Description of Artificial Sequence: Synthetic oligonucleotide
  misc_feature 1..20: note = Target: SCN10A; (-) strand; PAM type: NNAGAAW; PAM sequence: AAAGAAT
  source 1..20: mol_type = other DNA
taagcacatagaccaatgga

SEQ ID NO: 6057 - DNA, 20 bp, synthetic construct
  misc_feature 1..20: note = Description of Artificial Sequence: Synthetic oligonucleotide
  misc_feature 1..20: note = Target: SCN10A; (-) strand; PAM type: NNAGAAW; PAM sequence: CAAGAAT
  source 1..20: mol_type = other DNA
atagccaaagcaagactaag

SEQ ID NO: 6058 - DNA, 20 bp, synthetic construct
  misc_feature 1..20: note = Description of Artificial Sequence: Synthetic oligonucleotide
  misc_feature 1..20: note = Target: SCN10A; (-) strand; PAM type: NNAGAAW; PAM sequence: ATAGAAA
  source 1..20: mol_type = other DNA
ccacatcattcttcacagaa

SEQ ID NO: 6059 - DNA, 20 bp, synthetic construct
  misc_feature 1..20: note = Description of Artificial Sequence: Synthetic oligonucleotide
  misc_feature 1..20: note = Target: SCN10A; (-) strand; PAM type: NNAGAAW; PAM sequence: ACAGAAA
  source 1..20: mol_type = other DNA
gaagtaccacatcattcttc

SEQ ID NO: 6060 - DNA, 20 bp, synthetic construct
  misc_feature 1..20: note = Description of Artificial Sequence: Synthetic oligonucleotide
  misc_feature 1..20: note = Target: SCN10A; (-) strand; PAM type: NNAGAAW; PAM sequence: CCAGAAA
  source 1..20: mol_type = other DNA
agcagcactactgtacacca

SEQ ID NO: 6061 - DNA, 20 bp, synthetic construct
  misc_feature 1..20: note = Description of Artificial Sequence: Synthetic oligonucleotide
  misc_feature 1..20: note = Target: SCN10A; (-) strand; PAM type: NNAGAAW; PAM sequence: AGAGAAA
  source 1..20: mol_type = other DNA
ctagccagagcaatcagaca

SEQ ID NO: 6062 - DNA, 20 bp, synthetic construct
  misc_feature 1..20: note = Description of Artificial Sequence: Synthetic oligonucleotide
  misc_feature 1..20: note = Target: SCN10A; (-) strand; PAM type: NNAGAAW; PAM sequence: ACAGAAT
  source 1..20: mol_type = other DNA
aaatgctgcacgtcacataa

SEQ ID NO: 6063 - DNA, 20 bp, synthetic construct
  misc_feature 1..20: note = Description of Artificial Sequence: Synthetic oligonucleotide
  misc_feature 1..20: note = Target: SCN10A; (-) strand; PAM type: NNAGAAW; PAM sequence: CCAGAAA
  source 1..20: mol_type = other DNA
gtatcaccctaataccaaaa

SEQ ID NO: 6064 - DNA, 20 bp, synthetic construct
  misc_feature 1..20: note = Description of Artificial Sequence: Synthetic oligonucleotide
  misc_feature 1..20: note = Target: SCN10A; (-) strand; PAM type: NNAGAAW; PAM sequence: GCAGAAA
  source 1..20: mol_type = other DNA
ttgaaactattccaaaagat

SEQ ID NO: 6065 - DNA, 20 bp, synthetic construct
  misc_feature 1..20: note = Description of Artificial Sequence: Synthetic oligonucleotide
  misc_feature 1..20: note = Target: SCN10A; (-) strand; PAM type: NNAGAAW; PAM sequence: GAAGAAT
  source 1..20: mol_type = other DNA
aattctatcagacattcaaa

SEQ ID NO: 6066 - DNA, 20 bp, synthetic construct
  misc_feature 1..20: note = Description of Artificial Sequence: Synthetic oligonucleotide
  misc_feature 1..20: note = Target: SCN10A; (-) strand; PAM type: NNAGAAW; PAM sequence: ATAGAAA
  source 1..20: mol_type = other DNA
ttagattaaatcagaaagta

SEQ ID NO: 6067 - DNA, 20 bp, synthetic construct
  misc_feature 1..20: note = Description of Artificial Sequence: Synthetic oligonucleotide
  misc_feature 1..20: note = Target: SCN10A; (-) strand; PAM type: NNAGAAW; PAM sequence: TCAGAAA
  source 1..20: mol_type = other DNA
tacaactgtcttagattaaa

SEQ ID NO: 6068 - DNA, 20 bp, synthetic construct
  misc_feature 1..20: note = Description of Artificial Sequence: Synthetic oligonucleotide
  misc_feature 1..20: note = Target: SCN10A; (-) strand; PAM type: NNAGAAW; PAM sequence: CTAGAAA
  source 1..20: mol_type = other DNA
aacacctttatttgcacaaa

SEQ ID NO: 6069 - DNA, 20 bp, synthetic construct
  misc_feature 1..20: note = Description of Artificial Sequence: Synthetic oligonucleotide
  misc_feature 1..20: note = Target: SCN10A; (-) strand; PAM type: NNAGAAW; PAM sequence: ACAGAAA
  source 1..20: mol_type = other DNA
gagatattacaactgatacc

SEQ ID NO: 6070 - DNA, 20 bp, synthetic construct
  misc_feature 1..20: note = Description of Artificial Sequence: Synthetic oligonucleotide
  misc_feature 1..20: note = Target: SCN10A; (-) strand; PAM type: NNAGAAW; PAM sequence: TTAGAAA
  source 1..20: mol_type = other DNA
gaagatccaaataagctcaa

SEQ ID NO: 6071 - DNA, 20 bp, synthetic construct
  misc_feature 1..20: note = Description of Artificial Sequence: Synthetic oligonucleotide
  misc_feature 1..20: note = Target: SCN10A; (-) strand; PAM type: NNAGAAW; PAM sequence: CAAGAAA
  source 1..20: mol_type = other DNA
tgaccattggcaagattaac

SEQ ID NO: 6072 - DNA, 20 bp, synthetic construct
  misc_feature 1..20: note = Description of Artificial Sequence: Synthetic oligonucleotide
  misc_feature 1..20: note = Target: SCN10A; (-) strand; PAM type: NNAGAAW; PAM sequence: ATAGAAA
  source 1..20: mol_type = other DNA
agcgggttctttaaaaagat

SEQ ID NO: 6073 - DNA, 20 bp, synthetic construct
  misc_feature 1..20: note = Description of Artificial Sequence: Synthetic oligonucleotide
  misc_feature 1..20: note = Target: SCN10A; (-) strand; PAM type: NNAGAAW; PAM sequence: GAAGAAA
  source 1..20: mol_type = other DNA
aaacagacccaaaccaagca

SEQ ID NO: 6074 - DNA, 20 bp, synthetic construct
  misc_feature 1..20: note = Description of Artificial Sequence: Synthetic oligonucleotide
  misc_feature 1..20: note = Target: SCN10A; (-) strand; PAM type: NNAGAAW; PAM sequence: AGAGAAA
  source 1..20: mol_type = other DNA
aggtcacacctcaaggaatt

SEQ ID NO: 6075 - DNA, 20 bp, synthetic construct
  misc_feature 1..20: note = Description of Artificial Sequence: Synthetic oligonucleotide
  misc_feature 1..20: note = Target: SCN10A; (-) strand; PAM type: NNAGAAW; PAM sequence: AAAGAAA
  source 1..20: mol_type = other DNA
aaacctcggagttaactcca

SEQ ID NO: 6076 - DNA, 20 bp, synthetic construct
  misc_feature 1..20: note = Description of Artificial Sequence: Synthetic oligonucleotide
  misc_feature 1..20: note = Target: SCN10A; (-) strand; PAM type: NNAGAAW; PAM sequence: ATAGAAA
  source 1..20: mol_type = other DNA
atctcaataaatttaagaaa

SEQ ID NO: 6077 - DNA, 20 bp, synthetic construct
  misc_feature 1..20: note = Description of Artificial Sequence: Synthetic oligonucleotide
  misc_feature 1..20: note = Target: SCN10A; (-) strand; PAM type: NNAGAAW; PAM sequence: TAAGAAA
  source 1..20: mol_type = other DNA
ataacaaatctcaataaatt

SEQ ID NO: 6078 - DNA, 20 bp, synthetic construct
  misc_feature 1..20: note = Description of Artificial Sequence: Synthetic oligonucleotide
  misc_feature 1..20: note = Target: SCN10A; (-) strand; PAM type: NNAGAAW; PAM sequence: GCAGAAT
  source 1..20: mol_type = other DNA
aaacattctaccaaacaact

SEQ ID NO: 6079 - DNA, 20 bp, synthetic construct
  misc_feature 1..20: note = Description of Artificial Sequence: Synthetic oligonucleotide
  misc_feature 1..20: note = Target: SCN10A; (-) strand; PAM type: NNAGAAW; PAM sequence: AAAGAAA
  source 1..20: mol_type = other DNA
catcaagacagaaagtcaac

SEQ ID NO: 6080 - DNA, 20 bp, synthetic construct
  misc_feature 1..20: note = Description of Artificial Sequence: Synthetic oligonucleotide
  misc_feature 1..20: note = Target: SCN10A; (-) strand; PAM type: NNAGAAW; PAM sequence: ACAGAAA
  source 1..20: mol_type = other DNA
gcactagacaggtcatcaag

SEQ ID NO: 6081 - DNA, 20 bp, synthetic construct
  misc_feature 1..20: note = Description of Artificial Sequence: Synthetic oligonucleotide
  misc_feature 1..20: note = Target: SCN10A; (-) strand; PAM type: NNAGAAW; PAM sequence: TAAGAAA
  source 1..20: mol_type = other DNA
aaaacaattactactagacc

SEQ ID NO: 6082 - DNA, 20 bp, synthetic construct
  misc_feature 1..20: note = Description of Artificial Sequence: Synthetic oligonucleotide
  misc_feature 1..20: note = Target: SCN10A; (-) strand; PAM type: NNAGAAW; PAM sequence: AGAGAAA
  source 1..20: mol_type = other DNA
ggagtagctattcttatatc

SEQ ID NO: 6083 - DNA, 20 bp, synthetic construct
  misc_feature 1..20: note = Description of Artificial Sequence: Synthetic oligonucleotide
  misc_feature 1..20: note = Target: SCN10A; (-) strand; PAM type: NNAGAAW; PAM sequence: GCAGAAA
  source 1..20: mol_type = other DNA
cacttaaaatatacagaagg

SEQ ID NO: 6084 - DNA, 20 bp, synthetic construct
  misc_feature 1..20: note = Description of Artificial Sequence: Synthetic oligonucleotide
  misc_feature 1..20: note = Target: SCN10A; (-) strand; PAM type: NNAGAAW; PAM sequence: CAAGAAA
  source 1..20: mol_type = other DNA
ccactaccaagccagcacta

SEQ ID NO: 6085 - DNA, 20 bp, synthetic construct
  misc_feature 1..20: note = Description of Artificial Sequence: Synthetic oligonucleotide
  misc_feature 1..20: note = Target: SCN10A; (-) strand; PAM type: NNAGAAW; PAM sequence: AGAGAAT
  source 1..20: mol_type = other DNA
tttcagacaaacaaatggtg

SEQ ID NO: 6086 - DNA, 20 bp, synthetic construct
  misc_feature 1..20: note = Description of Artificial Sequence: Synthetic oligonucleotide
  misc_feature 1..20: note = Target: SCN10A; (-) strand; PAM type: NNAGAAW; PAM sequence: AGAGAAA
  source 1..20: mol_type = other DNA
cagccaagaatattgtatga

SEQ ID NO: 6087 - DNA, 20 bp, synthetic construct
  misc_feature 1..20: note = Description of Artificial Sequence: Synthetic oligonucleotide
  misc_feature 1..20: note = Target: SCN10A; (-) strand; PAM type: NNAGAAW; PAM sequence: CAAGAAT
  source 1..20: mol_type = other DNA
gaaacaaaataattgccagc

SEQ ID NO: 6088 - DNA, 20 bp, synthetic construct
  misc_feature 1..20: note = Description of Artificial Sequence: Synthetic oligonucleotide
  misc_feature 1..20: note = Target: SCN10A; (-) strand; PAM type: NNAGAAW; PAM sequence: AAAGAAT
  source 1..20: mol_type = other DNA
atctaaagtcaagacaaaga

SEQ ID NO: 6089 - DNA, 20 bp, synthetic construct
  misc_feature 1..20: note = Description of Artificial Sequence: Synthetic oligonucleotide
  misc_feature 1..20: note = Target: SCN10A; (-) strand; PAM type: NNAGAAW; PAM sequence: AAAGAAA
  source 1..20: mol_type = other DNA
aggttatctaaagtcaagac

SEQ ID NO: 6090 - DNA, 20 bp, synthetic construct
  misc_feature 1..20: note = Description of Artificial Sequence: Synthetic oligonucleotide
  misc_feature 1..20: note = Target: SCN10A; (-) strand; PAM type: NNAGAAW; PAM sequence: AAAGAAT
  source 1..20: mol_type = other DNA
tatccaaatacaagaagctc

SEQ ID NO: 6091 - DNA, 20 bp, synthetic construct
  misc_feature 1..20: note = Description of Artificial Sequence: Synthetic oligonucleotide
  misc_feature 1..20: note = Target: SCN10A; (-) strand; PAM type: NNAGAAW; PAM sequence: TTAGAAA
  source 1..20: mol_type = other DNA
ggaaaacttccctggccttg

SEQ ID NO: 6092 - DNA, 20 bp, synthetic construct
  misc_feature 1..20: note = Description of Artificial Sequence: Synthetic oligonucleotide
  misc_feature 1..20: note = Target: SCN10A; (-) strand; PAM type: NNAGAAW; PAM sequence: ATAGAAA
  source 1..20: mol_type = other DNA
atgggtgttcccaaggaaga

SEQ ID NO: 6093 - DNA, 20 bp, synthetic construct
  misc_feature 1..20: note = Description of Artificial Sequence: Synthetic oligonucleotide
  misc_feature 1..20: note = Target: SCN10A; (-) strand; PAM type: NNAGAAW; PAM sequence: GAAGAAT
  source 1..20: mol_type = other DNA
gaataatgggtgttcccaag

SEQ ID NO: 6094 - DNA, 20 bp, synthetic construct
  misc_feature 1..20: note = Description of Artificial Sequence: Synthetic oligonucleotide
  misc_feature 1..20: note = Target: SCN10A; (-) strand; PAM type: NNAGAAW; PAM sequence: TAAGAAT
  source 1..20: mol_type = other DNA
tcatgtgaaacaaccaaacc

SEQ ID NO: 6095 - DNA, 20 bp, synthetic construct
  misc_feature 1..20: note = Description of Artificial Sequence: Synthetic oligonucleotide
  misc_feature 1..20: note = Target: SCN10A; (-) strand; PAM type: NNAGAAW; PAM sequence: AAAGAAT
  source 1..20: mol_type = other DNA
aaactaagacacacaaaaag

SEQ ID NO: 6096 - DNA, 20 bp, synthetic construct
  misc_feature 1..20: note = Description of Artificial Sequence: Synthetic oligonucleotide
  misc_feature 1..20: note = Target: SCN10A; (-) strand; PAM type: NNAGAAW; PAM sequence: AAAGAAA
  source 1..20: mol_type = other DNA
acccaaactaagacacacaa

SEQ ID NO: 6097 - DNA, 20 bp, synthetic construct
  misc_feature 1..20: note = Description of Artificial Sequence: Synthetic oligonucleotide
  misc_feature 1..20: note = Target: SCN10A; (-) strand; PAM type: NNAGAAW; PAM sequence: GAAGAAA
  source 1..20: mol_type = other DNA
acaatagactagaacaagta

SEQ ID NO: 6098 - DNA, 20 bp, synthetic construct
  misc_feature 1..20: note = Description of Artificial Sequence: Synthetic oligonucleotide
  misc_feature 1..20: note = Target: SCN10A; (-) strand; PAM type: NNAGAAW; PAM sequence: AGAGAAA
  source 1..20: mol_type = other DNA
tggaaatggaagactcactt

SEQ ID NO: 6099 - DNA, 20 bp, synthetic construct
  misc_feature 1..20: note = Description of Artificial Sequence: Synthetic oligonucleotide
  misc_feature 1..20: note = Target: SCN10A; (-) strand; PAM type: NNAGAAW; PAM sequence: AAAGAAA
  source 1..20: mol_type = other DNA
ttctccagagaaatagatat

SEQ ID NO: 6100 - DNA, 20 bp, synthetic construct
  misc_feature 1..20: note = Description of Artificial Sequence: Synthetic oligonucleotide
  misc_feature 1..20: note = Target: SCN10A; (-) strand; PAM type: NNAGAAW; PAM sequence: AGAGAAA
  source 1..20: mol_type = other DNA
atatggatggaaaattctcc

SEQ ID NO: 6101 - DNA, 20 bp, synthetic construct
  misc_feature 1..20: note = Description of Artificial Sequence: Synthetic oligonucleotide
  misc_feature 1..20: note = Target: SCN10A; (-) strand; PAM type: NNAGAAW; PAM sequence: AAAGAAA
  source 1..20: mol_type = other DNA
agaaagataaaaaccaactt

SEQ ID NO: 6102 - DNA, 20 bp, synthetic construct
  misc_feature 1..20: note = Description of Artificial Sequence: Synthetic oligonucleotide
  misc_feature 1..20: note = Target: SCN10A; (-) strand; PAM type: NNAGAAW; PAM sequence: AGAGAAA
  source 1..20: mol_type = other DNA
aagtgattcaaggagacacc

SEQ ID NO: 6103 - DNA, 20 bp, synthetic construct
  misc_feature 1..20: note = Description of Artificial Sequence: Synthetic oligonucleotide
  misc_feature 1..20: note = Target: SCN10A; (-) strand; PAM type: NNAGAAW; PAM sequence: AAAGAAT
  source 1..20: mol_type = other DNA
ccatctcaaaaaaaaaaaaa

SEQ ID NO: 6104 - DNA, 20 bp, synthetic construct
  misc_feature 1..20: note = Description of Artificial Sequence: Synthetic oligonucleotide
  misc_feature 1..20: note = Target: SCN10A; (-) strand; PAM type: NNAGAAW; PAM sequence: GGAGAAT
  source 1..20: mol_type = other DNA
ctactcaggagactgaggca

SEQ ID NO: 6105 - DNA, 20 bp, synthetic construct
  misc_feature 1..20: note = Description of Artificial Sequence: Synthetic oligonucleotide
  misc_feature 1..20: note = Target: SCN10A; (-) strand; PAM type: NNAGAAW; PAM sequence: GGAGAAA
  source 1..20: mol_type = other DNA
gaccagcctgaagccaacat

SEQ ID NO: 6106 - DNA, 20 bp, synthetic construct
  misc_feature 1..20: note = Description of Artificial Sequence: Synthetic oligonucleotide
  misc_feature 1..20: note = Target: SCN10A; (-) strand; PAM type: NNAGAAW; PAM sequence: AAAGAAT
  source 1..20: mol_type = other DNA
aaatctctgaattgccagat

SEQ ID NO: 6107 - DNA, 20 bp, synthetic construct
  misc_feature 1..20: note = Description of Artificial Sequence: Synthetic oligonucleotide
  misc_feature 1..20: note = Target: SCN10A; (-) strand; PAM type: NNAGAAW; PAM sequence: GAAGAAA
  source 1..20: mol_type = other DNA
caacaatggatccaaactaa

SEQ ID NO: 6108 - DNA, 20 bp, synthetic construct
  misc_feature 1..20: note = Description of Artificial Sequence: Synthetic oligonucleotide
  misc_feature 1..20: note = Target: SCN10A; (-) strand; PAM type: NNAGAAW; PAM sequence: CCAGAAA
  source 1..20: mol_type = other DNA
tctactcaaatgagaaggaa

SEQ ID NO: 6109 - DNA, 20 bp, synthetic construct
  misc_feature 1..20: note = Description of Artificial Sequence: Synthetic oligonucleotide
  misc_feature 1..20: note = Target: SCN10A; (-) strand; PAM type: NNAGAAW; PAM sequence: AAAGAAT
  source 1..20: mol_type = other DNA
aagagatcacccatgaaaca

SEQ ID NO: 6110 - DNA, 20 bp, synthetic construct
  misc_feature 1..20: note = Description of Artificial Sequence: Synthetic oligonucleotide
  misc_feature 1..20: note = Target: SCN10A; (-) strand; PAM type: NNAGAAW; PAM sequence: CAAGAAA
  source 1..20: mol_type = other DNA
ctgctaacataactagcatt

SEQ ID NO: 6111 - DNA, 20 bp, synthetic construct
  misc_feature 1..20: note = Description of Artificial Sequence: Synthetic oligonucleotide
  misc_feature 1..20: note = Target: SCN10A; (-) strand; PAM type: NNAGAAW; PAM sequence: AAAGAAA
  source 1..20: mol_type = other DNA
aataactttgatcccaggaa

SEQ ID NO: 6112 - DNA, 20 bp, synthetic construct
  misc_feature 1..20: note = Description of Artificial Sequence: Synthetic oligonucleotide
  misc_feature 1..20: note = Target: SCN10A; (-) strand; PAM type: NNAGAAW; PAM sequence: ACAGAAT
  source 1..20: mol_type = other DNA
ggccattaaagcaactcatg

SEQ ID NO: 6113 - DNA, 20 bp, synthetic construct
  misc_feature 1..20: note = Description of Artificial Sequence: Synthetic oligonucleotide
  misc_feature 1..20: note = Target: SCN10A; (-) strand; PAM type: NNAGAAW; PAM sequence: TAAGAAA
  source 1..20: mol_type = other DNA
ttatggccctgctcatcacc

SEQ ID NO: 6114 - DNA, 20 bp, synthetic construct
  misc_feature 1..20: note = Description of Artificial Sequence: Synthetic oligonucleotide
  misc_feature 1..20: note = Target: SCN10A; (-) strand; PAM type: NNAGAAW; PAM sequence: CCAGAAA
  source 1..20: mol_type = other DNA
ttggtagctgaacacaaaac

SEQ ID NO: 6115 - DNA, 20 bp, synthetic construct
  misc_feature 1..20: note = Description of Artificial Sequence: Synthetic oligonucleotide
  misc_feature 1..20: note = Target: SCN10A; (-) strand; PAM type: NNAGAAW; PAM sequence: GCAGAAT
  source 1..20: mol_type = other DNA
ctgggcacaaattttcttga

SEQ ID NO: 6116 - DNA, 20 bp, synthetic construct
  misc_feature 1..20: note = Description of Artificial Sequence: Synthetic oligonucleotide
  misc_feature 1..20: note = Target: SCN10A; (-) strand; PAM type: NNAGAAW; PAM sequence: GTAGAAA
  source 1..20: mol_type = other DNA
aagccacacaaaatataaaa

SEQ ID NO: 6117 - DNA, 20 bp, synthetic construct
  misc_feature 1..20: note = Description of Artificial Sequence: Synthetic oligonucleotide
  misc_feature 1..20: note = Target: SCN10A; (-) strand; PAM type: NNAGAAW; PAM sequence: GAAGAAT
  source 1..20: mol_type = other DNA
tgaaaatccagatcacagga

SEQ ID NO: 6118 - DNA, 20 bp, synthetic construct
  misc_feature 1..20: note = Description of Artificial Sequence: Synthetic oligonucleotide
  misc_feature 1..20: note = Target: SCN10A; (-) strand; PAM type: NNAGAAW; PAM sequence: AAAGAAT
  source 1..20: mol_type = other DNA
ggaatataccaggagaactg

SEQ ID NO: 6119 - DNA, 20 bp, synthetic construct
  misc_feature 1..20: note = Description of Artificial Sequence: Synthetic oligonucleotide
  misc_feature 1..20: note = Target: SCN10A; (-) strand; PAM type: NNAGAAW; PAM sequence: GGAGAAT
  source 1..20: mol_type = other DNA
ggccctggcagacataaaca

SEQ ID NO: 6120 - DNA, 20 bp, synthetic construct
  misc_feature 1..20: note = Description of Artificial Sequence: Synthetic oligonucleotide
  misc_feature 1..20: note = Target: SCN10A; (-) strand; PAM type: NNAGAAW; PAM sequence: CTAGAAA
  source 1..20: mol_type = other DNA
tggatggcataaagcagcat

SEQ ID NO: 6121 - DNA, 20 bp, synthetic construct
  misc_feature 1..20: note = Description of Artificial Sequence: Synthetic oligonucleotide
  misc_feature 1..20: note = Target: SCN10A; (-) strand; PAM type: NNAGAAW; PAM sequence: GCAGAAA
  source 1..20: mol_type = other DNA
gcatccaatccatttctgga

SEQ ID NO: 6122 - DNA, 20 bp, synthetic construct
  misc_feature 1..20: note = Description of Artificial Sequence: Synthetic oligonucleotide
  misc_feature 1..20: note = Target: SCN10A; (-) strand; PAM type: NNAGAAW; PAM sequence: TAAGAAA
  source 1..20: mol_type = other DNA
tttccctcttcttcaactct

SEQ ID NO: 6123 - DNA, 20 bp, synthetic construct
  misc_feature 1..20: note = Description of Artificial Sequence: Synthetic oligonucleotide
  misc_feature 1..20: note = Target: SCN10A; (-) strand; PAM type: NNAGAAW; PAM sequence: TTAGAAA
  source 1..20: mol_type = other DNA
gctagggaaagacttctgta

SEQ ID NO: 6124 - DNA, 20 bp, synthetic construct
  misc_feature 1..20: note = Description of Artificial Sequence: Synthetic oligonucleotide
  misc_feature 1..20: note = Target: SCN10A; (-) strand; PAM type: NNAGAAW; PAM sequence: TGAGAAA
  source 1..20: mol_type = other DNA
tatttattggcttcctatta

SEQ ID NO: 6125 - DNA, 20 bp, synthetic construct
  misc_feature 1..20: note = Description of Artificial Sequence: Synthetic oligonucleotide
  misc_feature 1..20: note = Target: SCN10A; (-) strand; PAM type: NNAGAAW; PAM sequence: TTAGAAA
  source 1..20: mol_type = other DNA
ctgagttaagattttctaat

SEQ ID NO: 6126 - DNA, 20 bp, synthetic construct
  misc_feature 1..20: note = Description of Artificial Sequence: Synthetic oligonucleotide
  misc_feature 1..20: note = Target: SCN10A; (-) strand; PAM type: NNAGAAW; PAM sequence: CCAGAAA
  source 1..20: mol_type = other DNA
tctgtgtttgatttgacaaa

SEQ ID NO: 6127 - DNA, 20 bp, synthetic construct
  misc_feature 1..20: note = Description of Artificial Sequence: Synthetic oligonucleotide
  misc_feature 1..20: note = Target: SCN10A; (-) strand; PAM type: NNAGAAW; PAM sequence: CAAGAAA
  source 1..20: mol_type = other DNA
tgaatgctgcaacccaacat

SEQ ID NO: 6128 - DNA, 20 bp, synthetic construct
  misc_feature 1..20: note = Description of Artificial Sequence: Synthetic oligonucleotide
  misc_feature 1..20: note = Target: SCN10A; (-) strand; PAM type: NNAGAAW; PAM sequence: CCAGAAA
  source 1..20: mol_type = other DNA
ccaatgattttcttcattca

SEQ ID NO: 6129 - DNA, 20 bp, synthetic construct
  misc_feature 1..20: note = Description of Artificial Sequence: Synthetic oligonucleotide
  misc_feature 1..20: note = Target: SCN10A; (-) strand; PAM type: NNAGAAW; PAM sequence: TCAGAAT
  source 1..20: mol_type = other DNA
tgggtatctcagtgatccat

SEQ ID NO: 6130 - DNA, 20 bp, synthetic construct
  misc_feature 1..20: note = Description of Artificial Sequence: Synthetic oligonucleotide
  misc_feature 1..20: note = Target: SCN10A; (-) strand; PAM type: NNAGAAW; PAM sequence: GAAGAAA
  source 1..20: mol_type = other DNA
aaaggtgttaaattgccatt

SEQ ID NO: 6131 - DNA, 20 bp, synthetic construct
  misc_feature 1..20: note = Description of Artificial Sequence: Synthetic oligonucleotide
  misc_feature 1..20: note = Target: SCN10A; (-) strand; PAM type: NNAGAAW; PAM sequence: GTAGAAT
  source 1..20: mol_type = other DNA
caaattcatggagacagaaa

SEQ ID NO: 6132 - DNA, 20 bp, synthetic construct
  misc_feature 1..20: note = Description of Artificial Sequence: Synthetic oligonucleotide
  misc_feature 1..20: note = Target: SCN10A; (-) strand; PAM type: NNAGAAW; PAM sequence: ACAGAAA
  source 1..20: mol_type = other DNA
gaacaggcaaattcatggag

SEQ ID NO: 6133 - DNA, 20 bp, synthetic construct
  misc_feature 1..20: note = Description of Artificial Sequence: Synthetic oligonucleotide
  misc_feature 1..20: note = Target: SCN10A; (-) strand; PAM type: NNAGAAW; PAM sequence: CAAGAAA
  source 1..20: mol_type = other DNA
tattgtggttggagaagaaa

SEQ ID NO: 6134 - DNA, 20 bp, synthetic construct
  misc_feature 1..20: note = Description of Artificial Sequence: Synthetic oligonucleotide
  misc_feature 1..20: note = Target: SCN10A; (-) strand; PAM type: NNAGAAW; PAM sequence: GAAGAAA
  source 1..20: mol_type = other DNA
ttacaaatattgtggttgga

SEQ ID NO: 6135 - DNA, 20 bp, synthetic construct
  misc_feature 1..20: note = Description of Artificial Sequence: Synthetic oligonucleotide
  misc_feature 1..20: note = Target: SCN10A; (-) strand; PAM type: NNAGAAW; PAM sequence: TAAGAAA
  source 1..20: mol_type = other DNA
caaaaccagacaaaaatata

SEQ ID NO: 6136 - DNA, 20 bp, synthetic construct
  misc_feature 1..20: note = Description of Artificial Sequence: Synthetic oligonucleotide
  misc_feature 1..20: note = Target: SCN10A; (-) strand; PAM type: NNAGAAW; PAM sequence: ATAGAAA
  source 1..20: mol_type = other DNA
gcataacaataatgataaaa

SEQ ID NO: 6137 - DNA, 20 bp, synthetic construct
  misc_feature 1..20: note = Description of Artificial Sequence: Synthetic oligonucleotide
  misc_feature 1..20: note = Target: SCN10A; (-) strand; PAM type: NNAGAAW; PAM sequence: ATAGAAT
  source 1..20: mol_type = other DNA
taagattaattattatattc

SEQ ID NO: 6138 - DNA, 20 bp, synthetic construct
  misc_feature 1..20: note = Description of Artificial Sequence: Synthetic oligonucleotide
  misc_feature 1..20: note = Target: SCN10A; (-) strand; PAM type: NNAGAAW; PAM sequence: GAAGAAT
  source 1..20: mol_type = other DNA
gaattgatttatcaccacag

SEQ ID NO: 6139 - DNA, 20 bp, synthetic construct
  misc_feature 1..20: note = Description of Artificial Sequence: Synthetic oligonucleotide
  misc_feature 1..20: note = Target: SCN10A; (-) strand; PAM type: NNAGAAW; PAM sequence: CTAGAAT
  source 1..20: mol_type = other DNA
catttaggtatttcaatctc

SEQ ID NO: 6140 - DNA, 20 bp, synthetic construct
  misc_feature 1..20: note = Description of Artificial Sequence: Synthetic oligonucleotide
  misc_feature 1..20: note = Target: SCN10A; (-) strand; PAM type: NNAGAAW; PAM sequence: AGAGAAT
  source 1..20: mol_type = other DNA
tctccccatgccctggtttc

SEQ ID NO: 6141 - DNA, 20 bp, synthetic construct
  misc_feature 1..20: note = Description of Artificial Sequence: Synthetic oligonucleotide
  misc_feature 1..20: note = Target: SCN10A; (-) strand; PAM type: NNAGAAW; PAM sequence: GAAGAAA
  source 1..20: mol_type = other DNA
taatcccctcttttgcttgg

SEQ ID NO: 6142 - DNA, 20 bp, synthetic construct
  misc_feature 1..20: note = Description of Artificial Sequence: Synthetic oligonucleotide
  misc_feature 1..20: note = Target: SCN10A; (-) strand; PAM type: NNAGAAW; PAM sequence: TCAGAAA
  source 1..20: mol_type = other DNA
aaattgtagccagtgaggaa

SEQ ID NO: 6143 - DNA, 20 bp, synthetic construct
  misc_feature 1..20: note = Description of Artificial Sequence: Synthetic oligonucleotide
  misc_feature 1..20: note = Target: SCN10A; (-) strand; PAM type: NNAGAAW; PAM sequence: GTAGAAT
  source 1..20: mol_type = other DNA
ttaaggatgaatttctagaa

SEQ ID NO: 6144 - DNA, 20 bp, synthetic construct
  misc_feature 1..20: note = Description of Artificial Sequence: Synthetic oligonucleotide
  misc_feature 1..20: note = Target: SCN10A; (-) strand; PAM type: NNAGAAW; PAM sequence: ATAGAAA
  source 1..20: mol_type = other DNA
atcccagcagcagctgtttt

SEQ ID NO: 6145 - DNA, 20 bp, synthetic construct
  misc_feature 1..20: note = Description of Artificial Sequence: Synthetic oligonucleotide
  misc_feature 1..20: note = Target: SCN10A; (-) strand; PAM type: NNAGAAW; PAM sequence: TTAGAAT
  source 1..20: mol_type = other DNA
gattagaagattcataattg

SEQ ID NO: 6146 - DNA, 20 bp, synthetic construct
  misc_feature 1..20: note = Description of Artificial Sequence: Synthetic oligonucleotide
  misc_feature 1..20: note = Target: SCN10A; (-) strand; PAM type: NNAGAAW; PAM sequence: AGAGAAA
  source 1..20: mol_type = other DNA
aaaataatacagcattattg

SEQ ID NO: 6147 - DNA, 20 bp, synthetic construct
  misc_feature 1..20: note = Description of Artificial Sequence: Synthetic oligonucleotide
  misc_feature 1..20: note = Target: SCN10A; (-) strand; PAM type: NNAGAAW; PAM sequence: ATAGAAA
  source 1..20: mol_type = other DNA
aaaaagcaataaattacaaa

SEQ ID NO: 6148 - DNA, 20 bp, synthetic construct
  misc_feature 1..20: note = Description of Artificial Sequence: Synthetic oligonucleotide
  misc_feature 1..20: note = Target: SCN10A; (-) strand; PAM type: NNAGAAW; PAM sequence: AAAGAAA
  source 1..20: mol_type = other DNA
tagaaaaaggataacaaatg

SEQ ID NO: 6149 - DNA, 20 bp, synthetic construct
  misc_feature 1..20: note = Description of Artificial Sequence: Synthetic oligonucleotide
  misc_feature 1..20: note = Target: SCN10A; (-) strand; PAM type: NNAGAAW; PAM sequence: CTAGAAA
  source 1..20: mol_type = other DNA
tatttaaagacctaacaaaa

SEQ ID NO: 6150 - DNA, 20 bp, synthetic construct
  misc_feature 1..20: note = Description of Artificial Sequence: Synthetic oligonucleotide
  misc_feature 1..20: note = Target: SCN10A; (-) strand; PAM type: NNAGAAW; PAM sequence: AAAGAAA
  source 1..20: mol_type = other DNA
tttatatcagtaaaagctga

SEQ ID NO: 6151 - DNA, 20 bp, synthetic construct
  misc_feature 1..20: note = Description of Artificial Sequence: Synthetic oligonucleotide
  misc_feature 1..20: note = Target: SCN10A; (-) strand; PAM type: NNAGAAW; PAM sequence: ATAGAAT
  source 1..20: mol_type = other DNA
ataagtcacagcatggaagc

SEQ ID NO: 6152 - DNA, 20 bp, synthetic construct
  misc_feature 1..20: note = Description of Artificial Sequence: Synthetic oligonucleotide
  misc_feature 1..20: note = Target: SCN10A; (-) strand; PAM type: NNAGAAW; PAM sequence: AAAGAAT
  source 1..20: mol_type = other DNA
aatttttaaaaatctctctt

SEQ ID NO: 6153 - DNA, 20 bp, synthetic construct
  misc_feature 1..20: note = Description of Artificial Sequence: Synthetic oligonucleotide
  misc_feature 1..20: note = Target: SCN10A; (-) strand; PAM type: NNAGAAW; PAM sequence: ATAGAAA
  source 1..20: mol_type = other DNA
ctccagaaagtggaaataat

SEQ ID NO: 6154 - DNA, 20 bp, synthetic construct
  misc_feature 1..20: note = Description of Artificial Sequence: Synthetic oligonucleotide
  misc_feature 1..20: note = Target: SCN10A; (-) strand; PAM type: NNAGAAW; PAM sequence: CCAGAAA
  source 1..20: mol_type = other DNA
gacaaaaacctcaataagct

SEQ ID NO: 6155 - DNA, 20 bp, synthetic construct
  misc_feature 1..20: note = Description of Artificial Sequence: Synthetic oligonucleotide
  misc_feature 1..20: note = Target: SCN10A; (-) strand; PAM type: NNAGAAW; PAM sequence: ATAGAAA
  source 1..20: mol_type = other DNA
gcaaactaccttccctaaca

SEQ ID NO: 6156 - DNA, 20 bp, synthetic construct
  misc_feature 1..20: note = Description of Artificial Sequence: Synthetic oligonucleotide
  misc_feature 1..20: note = Target: SCN10A; (-) strand; PAM type: NNAGAAW; PAM sequence: ATAGAAA
  source 1..20: mol_type = other DNA
taaataaaaacattgtagga

SEQ ID NO: 6157 - DNA, 20 bp, synthetic construct
  misc_feature 1..20: note = Description of Artificial Sequence: Synthetic oligonucleotide
  misc_feature 1..20: note = Target: SCN10A; (-) strand; PAM type: NNAGAAW; PAM sequence: TCAGAAA
  source 1..20: mol_type = other DNA
atggcaacaatatttataaa

SEQ ID NO: 6158 - DNA, 20 bp, synthetic construct
  misc_feature 1..20: note = Description of Artificial Sequence: Synthetic oligonucleotide
  misc_feature 1..20: note = Target: SCN10A; (-) strand; PAM type: NNAGAAW; PAM sequence: AGAGAAA
  source 1..20: mol_type = other DNA
ggatccatgattttaatatc

SEQ ID NO: 6159 - DNA, 20 bp, synthetic construct
  misc_feature 1..20: note = Description of Artificial Sequence: Synthetic oligonucleotide
  misc_feature 1..20: note = Target: SCN10A; (-) strand; PAM type: NNAGAAW; PAM sequence: AAAGAAA
  source 1..20: mol_type = other DNA
agacataagcaaaggcaaac

SEQ ID NO: 6160 - DNA, 20 bp, synthetic construct
  misc_feature 1..20: note = Description of Artificial Sequence: Synthetic oligonucleotide
  misc_feature 1..20: note = Target: SCN10A; (-) strand; PAM type: NNAGAAW; PAM sequence: ATAGAAT
  source 1..20: mol_type = other DNA
gatacagaaaggctaaaatt

SEQ ID NO: 6161 - DNA, 20 bp, synthetic construct
  misc_feature 1..20: note = Description of Artificial Sequence: Synthetic oligonucleotide
  misc_feature 1..20: note = Target: SCN10A; (-) strand; PAM type: NNAGAAW; PAM sequence: ACAGAAA
  source 1..20: mol_type = other DNA
aaaatactcctcacggtgat

SEQ ID NO: 6162 - DNA, 20 bp, synthetic construct
  misc_feature 1..20: note = Description of Artificial Sequence: Synthetic oligonucleotide
  misc_feature 1..20: note = Target: SCN10A; (-) strand; PAM type: NNAGAAW; PAM sequence: TAAGAAT
  source 1..20: mol_type = other DNA
ataacatggtcacatttatt

SEQ ID NO: 6163 - DNA, 20 bp, synthetic construct
  misc_feature 1..20: note = Description of Artificial Sequence: Synthetic oligonucleotide
  misc_feature 1..20: note = Target: SCN10A; (-) strand; PAM type: NNAGAAW; PAM sequence: TGAGAAA
  source 1..20: mol_type = other DNA
gtcattagcaaaaaaaaaag

SEQ ID NO: 6164 - DNA, 20 bp, synthetic construct
  misc_feature 1..20: note = Description of Artificial Sequence: Synthetic oligonucleotide
  misc_feature 1..20: note = Target: SCN10A; (-) strand; PAM type: NNAGAAW; PAM sequence: TAAGAAA
  source 1..20: mol_type = other DNA
caacccattttgaactcaaa

SEQ ID NO: 6165 - DNA, 20 bp, synthetic construct
  misc_feature 1..20: note = Description of Artificial Sequence: Synthetic oligonucleotide
  misc_feature 1..20: note = Target: SCN10A; (-) strand; PAM type: NNAGAAW; PAM sequence: GTAGAAT
  source 1..20: mol_type = other DNA
gcttcaactgccgaatgacc

SEQ ID NO: 6166 - DNA, 20 bp, synthetic construct
  misc_feature 1..20: note = Description of Artificial Sequence: Synthetic oligonucleotide
  misc_feature 1..20: note = Target: SCN10A; (-) strand; PAM type: NNAGAAW; PAM sequence: ATAGAAT
  source 1..20: mol_type = other DNA
aaatagttcatttttgttgc

SEQ ID NO: 6167 - DNA, 20 bp, synthetic construct
  misc_feature 1..20: note = Description of Artificial Sequence: Synthetic oligonucleotide
  misc_feature 1..20: note = Target: SCN10A; (-) strand; PAM type: NNAGAAW; PAM sequence: TAAGAAA
  source 1..20: mol_type = other DNA
atcgcacatcacaatctgat

SEQ ID NO: 6168 - DNA, 20 bp, synthetic construct
  misc_feature 1..20: note = Description of Artificial Sequence: Synthetic oligonucleotide
  misc_feature 1..20: note = Target: SCN10A; (-) strand; PAM type: NNAGAAW; PAM sequence: TCAGAAA
  source 1..20: mol_type = other DNA
tgtaatggctttgctgggat

SEQ ID NO: 6169 - DNA, 20 bp, synthetic construct
  misc_feature 1..20: note = Description of Artificial Sequence: Synthetic oligonucleotide
  misc_feature 1..20: note = Target: SCN10A; (-) strand; PAM type: NNAGAAW; PAM sequence: GAAGAAT
  source 1..20: mol_type = other DNA
atgcagtcggttgttgtgga

SEQ ID NO: 6170 - DNA, 20 bp, synthetic construct
  misc_feature 1..20: note = Description of Artificial Sequence: Synthetic oligonucleotide
  misc_feature 1..20: note = Target: SCN10A; (-) strand; PAM type: NNAGAAW; PAM sequence: TGAGAAA
  source 1..20: mol_type = other DNA
aatcaacacatttttgccaa

SEQ ID NO: 6171 - DNA, 20 bp, synthetic construct
  misc_feature 1..20: note = Description of Artificial Sequence: Synthetic oligonucleotide
  misc_feature 1..20: note = Target: SCN10A; (-) strand; PAM type: NNAGAAW; PAM sequence: GAAGAAT
  source 1..20: mol_type = other DNA
atgacaaactctaaatactg

SEQ ID NO: 6172 - DNA, 20 bp, synthetic construct
  misc_feature 1..20: note = Description of Artificial Sequence: Synthetic oligonucleotide
  misc_feature 1..20: note = Target: SCN10A; (-) strand; PAM type: NNAGAAW; PAM sequence: AAAGAAA
  source 1..20: mol_type = other DNA
ggaaatgagagattttgatt

SEQ ID NO: 6173 - DNA, 20 bp, synthetic construct
  misc_feature 1..20: note = Description of Artificial Sequence: Synthetic oligonucleotide
  misc_feature 1..20: note = Target: SCN10A; (-) strand; PAM type: NNAGAAW; PAM sequence: AAAGAAA
  source 1..20: mol_type = other DNA
attatttaaagttgacaaat

SEQ ID NO: 6174 - DNA, 20 bp, synthetic construct
  misc_feature 1..20: note = Description of Artificial Sequence: Synthetic oligonucleotide
  misc_feature 1..20: note = Target: SCN10A; (-) strand; PAM type: NNAGAAW; PAM sequence: GCAGAAA
  source 1..20: mol_type = other DNA
acaaatagcaagaaatggaa

SEQ ID NO: 6175 - DNA, 20 bp, synthetic construct
  misc_feature 1..20: note = Description of Artificial Sequence: Synthetic oligonucleotide
  misc_feature 1..20: note = Target: SCN10A; (-) strand; PAM type: NNAGAAW; PAM sequence: CAAGAAA
  source 1..20: mol_type = other DNA
tgttgacatgatacaaatag

SEQ ID NO: 6176 - DNA, 20 bp, synthetic construct
  misc_feature 1..20: note = Description of Artificial Sequence: Synthetic oligonucleotide
  misc_feature 1..20: note = Target: SCN10A; (-) strand; PAM type: NNAGAAW; PAM sequence: TGAGAAT
  source 1..20: mol_type = other DNA
cctccagagggggataaaaa

SEQ ID NO: 6177 - DNA, 20 bp, synthetic construct
  misc_feature 1..20: note = Description of Artificial Sequence: Synthetic oligonucleotide
  misc_feature 1..20: note = Target: SCN10A; (-) strand; PAM type: NNAGAAW; PAM sequence: AGAGAAT
  source 1..20: mol_type = other DNA
atatacaagaacaaagagaa

SEQ ID NO: 6178 - DNA, 20 bp, synthetic construct
  misc_feature 1..20: note = Description of Artificial Sequence: Synthetic oligonucleotide
  misc_feature 1..20: note = Target: SCN10A; (-) strand; PAM type: NNAGAAW; PAM sequence: AGAGAAA
  source 1..20: mol_type = other DNA
gtataaatatacaagaacaa

SEQ ID NO: 6179 - DNA, 20 bp, synthetic construct
  misc_feature 1..20: note = Description of Artificial Sequence: Synthetic oligonucleotide
  misc_feature 1..20: note = Target: SCN10A; (-) strand; PAM type: NNAGAAW; PAM sequence: ATAGAAT
  source 1..20: mol_type = other DNA
cccaccctctcaaaatgcca

SEQ ID NO: 6180 - DNA, 20 bp, synthetic construct
  misc_feature 1..20: note = Description of Artificial Sequence: Synthetic oligonucleotide
  misc_feature 1..20: note = Target: SCN10A; (-) strand; PAM type: NNAGAAW; PAM sequence: ATAGAAT
  source 1..20: mol_type = other DNA
attgtggttaaatatggaag

SEQ ID NO: 6181 - DNA, 20 bp, synthetic construct
  misc_feature 1..20: note = Description of Artificial Sequence: Synthetic oligonucleotide
  misc_feature 1..20: note = Target: SCN10A; (-) strand; PAM type: NNAGAAW; PAM sequence: AGAGAAA
  source 1..20: mol_type = other DNA
tcagaagatggttactaagt

SEQ ID NO: 6182 - DNA, 20 bp, synthetic construct
  misc_feature 1..20: note = Description of Artificial Sequence: Synthetic oligonucleotide
  misc_feature 1..20: note = Target: SCN10A; (-) strand; PAM type: NNAGAAW; PAM sequence: TGAGAAA
  source 1..20: mol_type = other DNA
ggcttcaacctccagatttg

SEQ ID NO: 6183 - DNA, 20 bp, synthetic construct
  misc_feature 1..20: note = Description of Artificial Sequence: Synthetic oligonucleotide
  misc_feature 1..20: note = Target: SCN10A; (-) strand; PAM type: NNAGAAW; PAM sequence: CTAGAAA
  source 1..20: mol_type = other DNA
acaaggtagacatctataag

SEQ ID NO: 6184 - DNA, 20 bp, synthetic construct
  misc_feature 1..20: note = Description of Artificial Sequence: Synthetic oligonucleotide
  misc_feature 1..20: note = Target: SCN10A; (-) strand; PAM type: NNAGAAW; PAM sequence: AGAGAAA
  source 1..20: mol_type = other DNA
gtagaactggtgtccttata

SEQ ID NO: 6185 - DNA, 20 bp, synthetic construct
  misc_feature 1..20: note = Description of Artificial Sequence: Synthetic oligonucleotide
  misc_feature 1..20: note = Target: SCN10A; (-) strand; PAM type: NNAGAAW; PAM sequence: GGAGAAT
  source 1..20: mol_type = other DNA
agaaaaagtaccaaaaatta

SEQ ID NO: 6186 - DNA, 20 bp, synthetic construct
  misc_feature 1..20: note = Description of Artificial Sequence: Synthetic oligonucleotide
  misc_feature 1..20: note = Target: SCN10A; (-) strand; PAM type: NNAGAAW; PAM sequence: CAAGAAA
  source 1..20: mol_type = other DNA
aaagcatcaataaagtaagg

SEQ ID NO: 6187 - DNA, 20 bp, synthetic construct
  misc_feature 1..20: note = Description of Artificial Sequence: Synthetic oligonucleotide
  misc_feature 1..20: note = Target: SCN10A; (-) strand; PAM type: NNAGAAW; PAM sequence: TAAGAAA
  source 1..20: mol_type = other DNA
acaacaataaggatgagtct

SEQ ID NO: 6188 - DNA, 20 bp, synthetic construct
  misc_feature 1..20: note = Description of Artificial Sequence: Synthetic oligonucleotide
  misc_feature 1..20: note = Target: SCN10A; (-) strand; PAM type: NNAGAAW; PAM sequence: TGAGAAA
  source 1..20: mol_type = other DNA
atttctgttatattctaaaa

SEQ ID NO: 6189 - DNA, 20 bp, synthetic construct
  misc_feature 1..20: note = Description of Artificial Sequence: Synthetic oligonucleotide
  misc_feature 1..20: note = Target: SCN10A; (-) strand; PAM type: NNAGAAW; PAM sequence: CAAGAAA
  source 1..20: mol_type = other DNA
tggacaccagattacagcta

SEQ ID NO: 6190 - DNA, 20 bp, synthetic construct
  misc_feature 1..20: note = Description of Artificial Sequence: Synthetic oligonucleotide
  misc_feature 1..20: note = Target: SCN10A; (-) strand; PAM type: NNAGAAW; PAM sequence: ACAGAAA
  source 1..20: mol_type = other DNA
cccttaggtacctatgttta

SEQ ID NO: 6191 - DNA, 20 bp, synthetic construct
  misc_feature 1..20: note = Description of Artificial Sequence: Synthetic oligonucleotide
  misc_feature 1..20: note = Target: SCN10A; (-) strand; PAM type: NNAGAAW; PAM sequence: ACAGAAA
  source 1..20: mol_type = other DNA
attgggaatgacatggagca

SEQ ID NO: 6192 - DNA, 20 bp, synthetic construct
  misc_feature 1..20: note = Description of Artificial Sequence: Synthetic oligonucleotide
  misc_feature 1..20: note = Target: SCN10A; (-) strand; PAM type: NNAGAAW; PAM sequence: TTAGAAA
  source 1..20: mol_type = other DNA
taatgaactctacaaatcaa

SEQ ID NO: 6193 - DNA, 20 bp, synthetic construct
  misc_feature 1..20: note = Description of Artificial Sequence: Synthetic oligonucleotide
  misc_feature 1..20: note = Target: SCN10A; (-) strand; PAM type: NNAGAAW; PAM sequence: TAAGAAT
  source 1..20: mol_type = other DNA
acattttagtatactataat

SEQ ID NO: 6194 - DNA, 20 bp, synthetic construct
  misc_feature 1..20: note = Description of Artificial Sequence: Synthetic oligonucleotide
  misc_feature 1..20: note = Target: SCN10A; (-) strand; PAM type: NNAGAAW; PAM sequence: TAAGAAA
  source 1..20: mol_type = other DNA
atatctttatgacctcagac

SEQ ID NO: 6195 - DNA, 20 bp, synthetic construct
  misc_feature 1..20: note = Description of Artificial Sequence: Synthetic oligonucleotide
  misc_feature 1..20: note = Target: SCN10A; (-) strand; PAM type: NNAGAAW; PAM sequence: GAAGAAA
  source 1..20: mol_type = other DNA
gtagatttttctaattctgt

SEQ ID NO: 6196 - DNA, 20 bp, synthetic construct
  misc_feature 1..20: note = Description of Artificial Sequence: Synthetic oligonucleotide
  misc_feature 1..20: note = Target: SCN10A; (-) strand; PAM type: NNAGAAW; PAM sequence: TTAGAAT
  source 1..20: mol_type = other DNA
tccaactttcttctttttgc

SEQ ID NO: 6197 - DNA, 20 bp, synthetic construct
  misc_feature 1..20: note = Description of Artificial Sequence: Synthetic oligonucleotide
  misc_feature 1..20: note = Target: SCN10A; (-) strand; PAM type: NNAGAAW; PAM sequence: GTAGAAT
  source 1..20: mol_type = other DNA
cgcatgcttgtatctttata

SEQ ID NO: 6198 - DNA, 20 bp, synthetic construct
  misc_feature 1..20: note = Description of Artificial Sequence: Synthetic oligonucleotide
  misc_feature 1..20: note = Target: SCN10A; (-) strand; PAM type: NNAGAAW; PAM sequence: TGAGAAT
  source 1..20: mol_type = other DNA
ctgttcttatgtcagtttgc

SEQ ID NO: 6199 - DNA, 20 bp, synthetic construct
  misc_feature 1..20: note = Description of Artificial Sequence: Synthetic oligonucleotide
  misc_feature 1..20: note = Target: SCN10A; (-) strand; PAM type: NNAGAAW; PAM sequence: GCAGAAA
  source 1..20: mol_type = other DNA
ttaagttctggggtacatgt

SEQ ID NO: 6200 - DNA, 20 bp, synthetic construct
  misc_feature 1..20: note = Description of Artificial Sequence: Synthetic oligonucleotide
  misc_feature 1..20: note = Target: SCN10A; (-) strand; PAM type: NNAGAAW; PAM sequence: CAAGAAT
  source 1..20: mol_type = other DNA
atccaactttgcaccacaca

SEQ ID NO: 6201 - DNA, 20 bp, synthetic construct
  misc_feature 1..20: note = Description of Artificial Sequence: Synthetic oligonucleotide
  misc_feature 1..20: note = Target: SCN10A; (-) strand; PAM type: NNAGAAW; PAM sequence: GAAGAAT
  source 1..20: mol_type = other DNA
ggtcttcaaaaaatgatgct

SEQ ID NO: 6202 - DNA, 20 bp, synthetic construct
  misc_feature 1..20: note = Description of Artificial Sequence: Synthetic oligonucleotide
  misc_feature 1..20: note = Target: SCN10A; (-) strand; PAM type: NNAGAAW; PAM sequence: TCAGAAT
  source 1..20: mol_type = other DNA
tgccattggtgtaagattgg

SEQ ID NO: 6203 - DNA, 20 bp, synthetic construct
  misc_feature 1..20: note = Description of Artificial Sequence: Synthetic oligonucleotide
  misc_feature 1..20: note = Target: SCN10A; (-) strand; PAM type: NNAGAAW; PAM sequence: GAAGAAA
  source 1..20: mol_type = other DNA
atagccaagaaacttttgag

SEQ ID NO: 6204 - DNA, 20 bp, synthetic construct
  misc_feature 1..20: note = Description of Artificial Sequence: Synthetic oligonucleotide
  misc_feature 1..20: note = Target: SCN10A; (-) strand; PAM type: NNAGAAW; PAM sequence: CAAGAAA
  source 1..20: mol_type = other DNA
tttaaagagcaaattatagc

SEQ ID NO: 6205 - DNA, 20 bp, synthetic construct
  misc_feature 1..20: note = Description of Artificial Sequence: Synthetic oligonucleotide
  misc_feature 1..20: note = Target: SCN10A; (-) strand; PAM type: NNAGAAW; PAM sequence: AAAGAAA
  source 1..20: mol_type = other DNA
aagtattgtgtaaagttttt

SEQ ID NO: 6206 - DNA, 20 bp, synthetic construct
  misc_feature 1..20: note = Description of Artificial Sequence: Synthetic oligonucleotide
  misc_feature 1..20: note = Target: SCN10A; (-) strand; PAM type: NNAGAAW; PAM sequence: ACAGAAA
  source 1..20: mol_type = other DNA
tgtatagacactagcaacaa

SEQ ID NO: 6207 - DNA, 20 bp, synthetic construct
  misc_feature 1..20: note = Description of Artificial Sequence: Synthetic oligonucleotide
  misc_feature 1..20: note = Target: SCN10A; (-) strand; PAM type: NNAGAAW; PAM sequence: TAAGAAT
  source 1..20: mol_type = other DNA
cataacctagagataaacag

SEQ ID NO: 6208 - DNA, 20 bp, synthetic construct
  misc_feature 1..20: note = Description of Artificial Sequence: Synthetic oligonucleotide
  misc_feature 1..20: note = Target: SCN10A; (-) strand; PAM type: NNAGAAW; PAM sequence: GAAGAAA
  source 1..20: mol_type = other DNA
caaagaaaaaaaaagtgcaa

SEQ ID NO: 6209 - DNA, 20 bp, synthetic construct
  misc_feature 1..20: note = Description of Artificial Sequence: Synthetic oligonucleotide
  misc_feature 1..20: note = Target: SCN10A; (-) strand; PAM type: NNAGAAW; PAM sequence: AAAGAAA
  source 1..20: mol_type = other DNA
ctcagccagcatagtaaagc

SEQ ID NO: 6210 - DNA, 20 bp, synthetic construct
  misc_feature 1..20: note = Description of Artificial Sequence: Synthetic oligonucleotide
  misc_feature 1..20: note = Target: SCN10A; (-) strand; PAM type: NNAGAAW; PAM sequence: AAAGAAA
  source 1..20: mol_type = other DNA
aagctttccctttgagatca

SEQ ID NO: 6211 - DNA, 20 bp, synthetic construct
  misc_feature 1..20: note = Description of Artificial Sequence: Synthetic oligonucleotide
  misc_feature 1..20: note = Target: SCN10A; (-) strand; PAM type: NNAGAAW; PAM sequence: GGAGAAA
  source 1..20: mol_type = other DNA
ctaggggagggatagcatta

SEQ ID NO: 6212 - DNA, 20 bp, synthetic construct
  misc_feature 1..20: note = Description of Artificial Sequence: Synthetic oligonucleotide
  misc_feature 1..20: note = Target: SCN10A; (-) strand; PAM type: NNAGAAW; PAM sequence: ACAGAAA
  source 1..20: mol_type = other DNA
ctcagcaaactaacacaaga

SEQ ID NO: 6213 - DNA, 20 bp, synthetic construct
  misc_feature 1..20: note = Description of Artificial Sequence: Synthetic oligonucleotide
  misc_feature 1..20: note = Target: SCN10A; (-) strand; PAM type: NNAGAAW; PAM sequence: TTAGAAA
  source 1..20: mol_type = other DNA
ccatttataattttaaattc

SEQ ID NO: 6214 - DNA, 20 bp, synthetic construct
  misc_feature 1..20: note = Description of Artificial Sequence: Synthetic oligonucleotide
  misc_feature 1..20: note = Target: SCN10A; (-) strand; PAM type: NNAGAAW; PAM sequence: ACAGAAA
  source 1..20: mol_type = other DNA
taacagtaatgcatgccaca

SEQ ID NO: 6215 - DNA, 20 bp, synthetic construct
  misc_feature 1..20: note = Description of Artificial Sequence: Synthetic oligonucleotide
  misc_feature 1..20: note = Target: SCN10A; (-) strand; PAM type: NNAGAAW; PAM sequence: TCAGAAT
  source 1..20: mol_type = other DNA
tgggtgaaacccctatagtt

SEQ ID NO: 6216 - DNA, 20 bp, synthetic construct
  misc_feature 1..20: note = Description of Artificial Sequence: Synthetic oligonucleotide
  misc_feature 1..20: note = Target: SCN10A; (-) strand; PAM type: NNAGAAW; PAM sequence: TTAGAAA
  source 1..20: mol_type = other DNA
caaatggctctggagtatat

SEQ ID NO: 6217 - DNA, 20 bp, synthetic construct
  misc_feature 1..20: note = Description of Artificial Sequence: Synthetic oligonucleotide
  misc_feature 1..20: note = Target: SCN10A; (-) strand; PAM type: NNAGAAW; PAM sequence: CCAGAAA
  source 1..20: mol_type = other DNA
taaatgcctgagtcccagcc

SEQ ID NO: 6218 - DNA, 20 bp, synthetic construct
  misc_feature 1..20: note = Description of Artificial Sequence: Synthetic oligonucleotide
  misc_feature 1..20: note = Target: SCN10A; (-) strand; PAM type: NNAGAAW; PAM sequence: AGAGAAA
  source 1..20: mol_type = other DNA
atgacccgaactgaccttcc

SEQ ID NO: 6219 - DNA, 20 bp, synthetic construct
  misc_feature 1..20: note = Description of Artificial Sequence: Synthetic oligonucleotide
  misc_feature 1..20: note = Target: SCN10A; (-) strand; PAM type: NNAGAAW; PAM sequence: TGAGAAA
  source 1..20: mol_type = other DNA
ggttgactagctgcatgacc

SEQ ID NO: 6220 - DNA, 20 bp, synthetic construct
  misc_feature 1..20: note = Description of Artificial Sequence: Synthetic oligonucleotide
  misc_feature 1..20: note = Target: SCN10A; (-) strand; PAM type: NNAGAAW; PAM sequence: TTAGAAT
  source 1..20: mol_type = other DNA
ttctaacttttctttgtctt

SEQ ID NO: 6221 - DNA, 20 bp, synthetic construct
  misc_feature 1..20: note = Description of Artificial Sequence: Synthetic oligonucleotide
  misc_feature 1..20: note = Target: SCN10A; (-) strand; PAM type: NNAGAAW; PAM sequence: TAAGAAA
  source 1..20: mol_type = other DNA
gttgggagcccagctattcc

SEQ ID NO: 6222 - DNA, 20 bp, synthetic construct
  misc_feature 1..20: note = Description of Artificial Sequence: Synthetic oligonucleotide
  misc_feature 1..20: note = Target: SCN10A; (-) strand; PAM type: NNAGAAW; PAM sequence: ACAGAAA
  source 1..20: mol_type = other DNA
ctagacacatcaaggcattt

SEQ ID NO: 6223 - DNA, 20 bp, synthetic construct
  misc_feature 1..20: note = Description of Artificial Sequence: Synthetic oligonucleotide
  misc_feature 1..20: note = Target: SCN10A; (-) strand; PAM type: NNAGAAW; PAM sequence: ATAGAAT
  source 1..20: mol_type = other DNA
aggaaaatgtggtttaatta

SEQ ID NO: 6224 - DNA, 20 bp, synthetic construct
  misc_feature 1..20: note = Description of Artificial Sequence: Synthetic oligonucleotide
  misc_feature 1..20: note = Target: SCN10A; (-) strand; PAM type: NNAGAAW; PAM sequence: GTAGAAT
  source 1..20: mol_type = other DNA
tatattacttttaaatattt

SEQ ID NO: 6225 - DNA, 20 bp, synthetic construct
  misc_feature 1..20: note = Description of Artificial Sequence: Synthetic oligonucleotide
  misc_feature 1..20: note = Target: SCN10A; (-) strand; PAM type: NNAGAAW; PAM sequence: CTAGAAT
  source 1..20: mol_type = other DNA
aactccagccccaaaagata

SEQ ID NO: 6226 - DNA, 20 bp, synthetic construct
  misc_feature 1..20: note = Description of Artificial Sequence: Synthetic oligonucleotide
  misc_feature 1..20: note = Target: SCN10A; (-) strand; PAM type: NNAGAAW; PAM sequence: ACAGAAA
  source 1..20: mol_type = other DNA
cttggtagagtcacagctgg

SEQ ID NO: 6227 - DNA, 20 bp, synthetic construct
  misc_feature 1..20: note = Description of Artificial Sequence: Synthetic oligonucleotide
  misc_feature 1..20: note = Target: SCN10A; (-) strand; PAM type: NNAGAAW; PAM sequence: TTAGAAA
  source 1..20: mol_type = other DNA
gataagtaagaaacagctaa

SEQ ID NO: 6228 - DNA, 20 bp, synthetic construct
  misc_feature 1..20: note = Description of Artificial Sequence: Synthetic oligonucleotide
  misc_feature 1..20: note = Target: SCN10A; (-) strand; PAM type: NNAGAAW; PAM sequence: TAAGAAA
  source 1..20: mol_type = other DNA
ttgaattacatctggataag

SEQ ID NO: 6229 - DNA, 20 bp, synthetic construct
  misc_feature 1..20: note = Description of Artificial Sequence: Synthetic oligonucleotide
  misc_feature 1..20: note = Target: SCN10A; (-) strand; PAM type: NNAGAAW; PAM sequence: AGAGAAA
  source 1..20: mol_type = other DNA
tacatggaaattacaaataa

SEQ ID NO: 6230 - DNA, 20 bp, synthetic construct
  misc_feature 1..20: note = Description of Artificial Sequence: Synthetic oligonucleotide
  misc_feature 1..20: note = Target: SCN10A; (-) strand; PAM type: NNAGAAW; PAM sequence: CAAGAAT
  source 1..20: mol_type = other DNA
ttttctttctggctggccag

SEQ ID NO: 6231 - DNA, 20 bp, synthetic construct
  misc_feature 1..20: note = Description of Artificial Sequence: Synthetic oligonucleotide
  misc_feature 1..20: note = Target: SCN10A; (-) strand; PAM type: NNAGAAW; PAM sequence: CAAGAAT
  source 1..20: mol_type = other DNA
gcttgcaggaggttgatgta

SEQ ID NO: 6232 - DNA, 20 bp, synthetic construct
  misc_feature 1..20: note = Description of Artificial Sequence: Synthetic oligonucleotide
  misc_feature 1..20: note = Target: SCN10A; (-) strand; PAM type: NNAGAAW; PAM sequence: GTAGAAA
  source 1..20: mol_type = other DNA
ttgcaaggcaagccaaacta

SEQ ID NO: 6233 - DNA, 20 bp, synthetic construct
  misc_feature 1..20: note = Description of Artificial Sequence: Synthetic oligonucleotide
  misc_feature 1..20: note = Target: SCN10A; (-) strand; PAM type: NNAGAAW; PAM sequence: AGAGAAA
  source 1..20: mol_type = other DNA
aggatggttctcttgtcaga

SEQ ID NO: 6234 - DNA, 20 bp, synthetic construct
  misc_feature 1..20: note = Description of Artificial Sequence: Synthetic oligonucleotide
  misc_feature 1..20: note = Target: SCN10A; (-) strand; PAM type: NNAGAAW; PAM sequence: GAAGAAA
  source 1..20: mol_type = other DNA
agatgtagaaggtggagaca

SEQ ID NO: 6235 - DNA, 20 bp, synthetic construct
  misc_feature 1..20: note = Description of Artificial Sequence: Synthetic oligonucleotide
  misc_feature 1..20: note = Target: SCN10A; (-) strand; PAM type: NNAGAAW; PAM sequence: GGAGAAA
  source 1..20: mol_type = other DNA
atcctcctaaatcctcagag

SEQ ID NO: 6236 - DNA, 20 bp, synthetic construct
  misc_feature 1..20: note = Description of Artificial Sequence: Synthetic oligonucleotide
  misc_feature 1..20: note = Target: SCN10A; (-) strand; PAM type: NNAGAAW; PAM sequence: TGAGAAT
  source 1..20: mol_type = other DNA
atccctgaaatcaaaaagtt

SEQ ID NO: 6237 - DNA, 20 bp, synthetic construct
  misc_feature 1..20: note = Description of Artificial Sequence: Synthetic oligonucleotide
  misc_feature 1..20: note = Target: SCN10A; (-) strand; PAM type: NNAGAAW; PAM sequence: ACAGAAA
  source 1..20: mol_type = other DNA
ggaggagcatggcggtgagg

SEQ ID NO: 6238 - DNA, 20 bp, synthetic construct
  misc_feature 1..20: note = Description of Artificial Sequence: Synthetic oligonucleotide
  misc_feature 1..20: note = Target: SCN10A; (-) strand; PAM type: NNAGAAW; PAM sequence: ATAGAAA
  source 1..20: mol_type = other DNA
gaatttttatgacatttatg

SEQ ID NO: 6239 - DNA, 20 bp, synthetic construct
  misc_feature 1..20: note = Description of Artificial Sequence: Synthetic oligonucleotide
  misc_feature 1..20: note = Target: SCN10A; (-) strand; PAM type: NNAGAAW; PAM sequence: CCAGAAA
  source 1..20: mol_type = other DNA
aagtctcggtcccacccagc

SEQ ID NO: 6240 - DNA, 20 bp, synthetic construct
  misc_feature 1..20: note = Description of Artificial Sequence: Synthetic oligonucleotide
  misc_feature 1..20: note = Target: SCN10A; (-) strand; PAM type: NNAGAAW; PAM sequence: AAAGAAA
  source 1..20: mol_type = other DNA
attgctgccaagcagggaac

SEQ ID NO: 6241 - DNA, 20 bp, synthetic construct
  misc_feature 1..20: note = Description of Artificial Sequence: Synthetic oligonucleotide
  misc_feature 1..20: note = Target: SCN10A; (-) strand; PAM type: NNAGAAW; PAM sequence: GAAGAAT
  source 1..20: mol_type = other DNA
gagtataaatacttcctgaa

SEQ ID NO: 6242 - DNA, 20 bp, synthetic construct
  misc_feature 1..20: note = Description of Artificial Sequence: Synthetic oligonucleotide
  misc_feature 1..20: note = Target: SCN10A; (-) strand; PAM type: NNAGAAW; PAM sequence: TAAGAAA
  source 1..20: mol_type = other DNA
caataaataaaagattgtga

SEQ ID NO: 6243 - DNA, 20 bp, synthetic construct
  misc_feature 1..20: note = Description of Artificial Sequence: Synthetic oligonucleotide
  misc_feature 1..20: note = Target: SCN10A; (-) strand; PAM type: NNAGAAW; PAM sequence: GGAGAAA
  source 1..20: mol_type = other DNA
caaatgaaattcaaacaggt

SEQ ID NO: 6244 - DNA, 20 bp, synthetic construct
  misc_feature 1..20: note = Description of Artificial Sequence: Synthetic oligonucleotide
  misc_feature 1..20: note = Target: SCN10A; (-) strand; PAM type: NNAGAAW; PAM sequence: AGAGAAA
  source 1..20: mol_type = other DNA
agactgaacctggaggtccc

SEQ ID NO: 6245 - DNA, 20 bp, synthetic construct
  misc_feature 1..20: note = Description of Artificial Sequence: Synthetic oligonucleotide
  misc_feature 1..20: note = Target: SCN10A; (-) strand; PAM type: NNAGAAW; PAM sequence: GAAGAAA
  source 1..20: mol_type = other DNA
gtatttgaaacctcagacta

SEQ ID NO: 6246 - DNA, 20 bp, synthetic construct
  misc_feature 1..20: note = Description of Artificial Sequence: Synthetic oligonucleotide
  misc_feature 1..20: note = Target: SCN10A; (-) strand; PAM type: NNAGAAW; PAM sequence: TGAGAAA
  source 1..20: mol_type = other DNA
caagggaagacagggaatag

SEQ ID NO: 6247 - DNA, 20 bp, synthetic construct
  misc_feature 1..20: note = Description of Artificial Sequence: Synthetic oligonucleotide
  misc_feature 1..20: note = Target: SCN10A; (-) strand; PAM type: NNAGAAW; PAM sequence: TTAGAAT
  source 1..20: mol_type = other DNA
cagagggaaaggaatggtcc

SEQ ID NO: 6248 - DNA, 20 bp, synthetic construct
  misc_feature 1..20: note = Description of Artificial Sequence: Synthetic oligonucleotide
  misc_feature 1..20: note = Target: SCN10A; (-) strand; PAM type: NNAGAAW; PAM sequence: AGAGAAA
  source 1..20: mol_type = other DNA
aagagctggcagacaaggag

SEQ ID NO: 6249 - DNA, 20 bp, synthetic construct
  misc_feature 1..20: note = Description of Artificial Sequence: Synthetic oligonucleotide
  misc_feature 1..20: note = Target: SCN10A; (-) strand; PAM type: NNAGAAW; PAM sequence: AAAGAAA
  source 1..20: mol_type = other DNA
aaaaaaaaaaagaaaaagaa

SEQ ID NO: 6250 - DNA, 20 bp, synthetic construct
  misc_feature 1..20: note = Description of Artificial Sequence: Synthetic oligonucleotide
  misc_feature 1..20: note = Target: SCN10A; (-) strand; PAM type: NNAGAAW; PAM sequence: AAAGAAA
  source 1..20: mol_type = other DNA
tctcaaaaaaaaaaaaagaa

SEQ ID NO: 6251 - DNA, 20 bp, synthetic construct
  misc_feature 1..20: note = Description of Artificial Sequence: Synthetic oligonucleotide
  misc_feature 1..20: note = Target: SCN10A; (-) strand; PAM type: NNAGAAW; PAM sequence: AAAGAAA
  source 1..20: mol_type = other DNA
accctgtctcaaaaaaaaaa

SEQ ID NO: 6252 - DNA, 20 bp, synthetic construct
  misc_feature 1..20: note = Description of Artificial Sequence: Synthetic oligonucleotide
  misc_feature 1..20: note = Target: SCN10A; (-) strand; PAM type: NNAGAAW; PAM sequence: GGAGAAT
  source 1..20: mol_type = other DNA
ctattcgggaggctgaggtg

SEQ ID NO: 6253 - DNA, 20 bp, synthetic construct
  misc_feature 1..20: note = Description of Artificial Sequence: Synthetic oligonucleotide
  misc_feature 1..20: note = Target: SCN10A; (-) strand; PAM type: NNAGAAW; PAM sequence: AGAGAAA
  source 1..20: mol_type = other DNA
gagagactgagaaggagaag

SEQ ID NO: 6254 - DNA, 20 bp, synthetic construct
  misc_feature 1..20: note = Description of Artificial Sequence: Synthetic oligonucleotide
  misc_feature 1..20: note = Target: SCN10A; (-) strand; PAM type: NNAGAAW; PAM sequence: TGAGAAA
  source 1..20: mol_type = other DNA
caatcatgtatgggaaaagc

SEQ ID NO: 6255 - DNA, 20 bp, synthetic construct
  misc_feature 1..20: note = Description of Artificial Sequence: Synthetic oligonucleotide
  misc_feature 1..20: note = Target: SCN10A; (-) strand; PAM type: NNAGAAW; PAM sequence: TTAGAAA
  source 1..20: mol_type = other DNA
acatagaagagaggcaggta

SEQ ID NO: 6256 - DNA, 20 bp, synthetic construct
  misc_feature 1..20: note = Description of Artificial Sequence: Synthetic oligonucleotide
  misc_feature 1..20: note = Target: SCN10A; (-) strand; PAM type: NNAGAAW; PAM sequence: ACAGAAA
  source 1..20: mol_type = other DNA
tacccaggttgtggacagac

SEQ ID NO: 6257 - DNA, 20 bp, synthetic construct
  misc_feature 1..20: note = Description of Artificial Sequence: Synthetic oligonucleotide
  misc_feature 1..20: note = Target: SCN10A; (-) strand; PAM type: NNAGAAW; PAM sequence: ATAGAAA
  source 1..20: mol_type = other DNA
ttgattgtatgtggaatgaa

SEQ ID NO: 6258 - DNA, 20 bp, synthetic construct
  misc_feature 1..20: note = Description of Artificial Sequence: Synthetic oligonucleotide
  misc_feature 1..20: note = Target: SCN10A; (-) strand; PAM type: NNAGAAW; PAM sequence: TTAGAAA
  source 1..20: mol_type = other DNA
ggccactgttggagaatagg

SEQ ID NO: 6259 - DNA, 20 bp, synthetic construct
  misc_feature 1..20: note = Description of Artificial Sequence: Synthetic oligonucleotide
  misc_feature 1..20: note = Target: SCN10A; (-) strand; PAM type: NNAGAAW; PAM sequence: GGAGAAT
  source 1..20: mol_type = other DNA
aatatcatttggccactgtt

SEQ ID NO: 6260 - DNA, 20 bp, synthetic construct
  misc_feature 1..20: note = Description of Artificial Sequence: Synthetic oligonucleotide
  misc_feature 1..20: note = Target: SCN10A; (-) strand; PAM type: NNAGAAW; PAM sequence: TTAGAAA
  source 1..20: mol_type = other DNA
cacataaccagattttcatt

SEQ ID NO: 6261 - DNA, 20 bp, synthetic construct
  misc_feature 1..20: note = Description of Artificial Sequence: Synthetic oligonucleotide
  misc_feature 1..20: note = Target: SCN10A; (-) strand; PAM type: NNAGAAW; PAM sequence: TTAGAAT
  source 1..20: mol_type = other DNA
cttgagtgctatggagagct

SEQ ID NO: 6262 - DNA, 20 bp, synthetic construct
  misc_feature 1..20: note = Description of Artificial Sequence: Synthetic oligonucleotide
  misc_feature 1..20: note = Target: SCN10A; (-) strand; PAM type: NNAGAAW; PAM sequence: AAAGAAT
  source 1..20: mol_type = other DNA
tggaaaagccttaacataaa

SEQ ID NO: 6263 - DNA, 20 bp, synthetic construct
  misc_feature 1..20: note = Description of Artificial Sequence: Synthetic oligonucleotide
  misc_feature 1..20: note = Target: SCN10A; (-) strand; PAM type: NNAGAAW; PAM sequence: CAAGAAT
  source 1..20: mol_type = other DNA
ttgtctcaaagccaagagta

SEQ ID NO: 6264 - DNA, 20 bp, synthetic construct
  misc_feature 1..20: note = Description of Artificial Sequence: Synthetic oligonucleotide
  misc_feature 1..20: note = Target: SCN10A; (-) strand; PAM type: NNAGAAW; PAM sequence: GAAGAAA
  source 1..20: mol_type = other DNA
cttcatataggtcagaaatg

SEQ ID NO: 6265 - DNA, 20 bp, synthetic construct
  misc_feature 1..20: note = Description of Artificial Sequence: Synthetic oligonucleotide
  misc_feature 1..20: note = Target: SCN10A; (-) strand; PAM type: NNAGAAW; PAM sequence: TCAGAAA
  source 1..20: mol_type = other DNA
taacatagacttcatatagg

SEQ ID NO: 6266 - DNA, 20 bp, synthetic construct
  misc_feature 1..20: note = Description of Artificial Sequence: Synthetic oligonucleotide
  misc_feature 1..20: note = Target: SCN10A; (-) strand; PAM type: NNAGAAW; PAM sequence: AGAGAAA
  source 1..20: mol_type = other DNA
attacaaatcagatgtttat

SEQ ID NO: 6267 - DNA, 20 bp, synthetic construct
  misc_feature 1..20: note = Description of Artificial Sequence: Synthetic oligonucleotide
  misc_feature 1..20: note = Target: SCN10A; (-) strand; PAM type: NNAGAAW; PAM sequence: ACAGAAA
  source 1..20: mol_type = other DNA
tagaaacaatagaaaggcaa

SEQ ID NO: 6268 - DNA, 20 bp, synthetic construct
  misc_feature 1..20: note = Description of Artificial Sequence: Synthetic oligonucleotide
  misc_feature 1..20: note = Target: SCN10A; (-) strand; PAM type: NNAGAAW; PAM sequence: ATAGAAA
  source 1..20: mol_type = other DNA
cttacaatttggtagaaaca

SEQ ID NO: 6269 - DNA, 20 bp, synthetic construct
  misc_feature 1..20: note = Description of Artificial Sequence: Synthetic oligonucleotide
  misc_feature 1..20: note = Target: SCN10A; (-) strand; PAM type: NNAGAAW; PAM sequence: GTAGAAA
  source 1..20: mol_type = other DNA
ctcactgagcttacaatttg

SEQ ID NO: 6270 - DNA, 20 bp, synthetic construct
  misc_feature 1..20: note = Description of Artificial Sequence: Synthetic oligonucleotide
  misc_feature 1..20: note = Target: SCN10A; (-) strand; PAM type: NNAGAAW; PAM sequence: CAAGAAA
  source 1..20: mol_type = other DNA
tatcacagaggtattggatt

SEQ ID NO: 6271 - DNA, 20 bp, synthetic construct
  misc_feature 1..20: note = Description of Artificial Sequence: Synthetic oligonucleotide
  misc_feature 1..20: note = Target: SCN10A; (-) strand; PAM type: NNAGAAW; PAM sequence: GAAGAAA
  source 1..20: mol_type = other DNA
agggtgagggaaagctctca

SEQ ID NO: 6272 - DNA, 20 bp, synthetic construct
  misc_feature 1..20: note = Description of Artificial Sequence: Synthetic oligonucleotide
  misc_feature 1..20: note = Target: SCN10A; (-) strand; PAM type: NNAGAAW; PAM sequence: TAAGAAA
  source 1..20: mol_type = other DNA
gttgactttgaaaagttccg

SEQ ID NO: 6273 - DNA, 20 bp, synthetic construct
  misc_feature 1..20: note = Description of Artificial Sequence: Synthetic oligonucleotide
  misc_feature 1..20: note = Target: SCN10A; (-) strand; PAM type: NNAGAAW; PAM sequence: GAAGAAA
  source 1..20: mol_type = other DNA
cacatagaacttctaagtta

SEQ ID NO: 6274 - DNA, 20 bp, synthetic construct
  misc_feature 1..20: note = Description of Artificial Sequence: Synthetic oligonucleotide
  misc_feature 1..20: note = Target: SCN10A; (-) strand; PAM type: NNAGAAW; PAM sequence: TCAGAAT
  source 1..20: mol_type = other DNA
gcataaatacaccatgttaa

SEQ ID NO: 6275 - DNA, 20 bp, synthetic construct
  misc_feature 1..20: note = Description of Artificial Sequence: Synthetic oligonucleotide
  misc_feature 1..20: note = Target: SCN10A; (-) strand; PAM type: NNAGAAW; PAM sequence: GAAGAAT
  source 1..20: mol_type = other DNA
aatctttgtttctcagaagg

SEQ ID NO: 6276 - DNA, 20 bp, synthetic construct
  misc_feature 1..20: note = Description of Artificial Sequence: Synthetic oligonucleotide
  misc_feature 1..20: note = Target: SCN10A; (-) strand; PAM type: NNAGAAW; PAM sequence: AGAGAAA
  source 1..20: mol_type = other DNA
tcttctcccctagacaagga

SEQ ID NO: 6277 - DNA, 20 bp, synthetic construct
  misc_feature 1..20: note = Description of Artificial Sequence: Synthetic oligonucleotide
  misc_feature 1..20: note = Target: SCN10A; (-) strand; PAM type: NNAGAAW; PAM sequence: AGAGAAT
  source 1..20: mol_type = other DNA
attgcattccagtgtcactg

SEQ ID NO: 6278 - DNA, 20 bp, synthetic construct
  misc_feature 1..20: note = Description of Artificial Sequence: Synthetic oligonucleotide
  misc_feature 1..20: note = Target: SCN10A; (-) strand; PAM type: NNAGAAW; PAM sequence: CCAGAAT
  source 1..20: mol_type = other DNA
ctggagggatttatggtagc

SEQ ID NO: 6279 - DNA, 20 bp, synthetic construct
  misc_feature 1..20: note = Description of Artificial Sequence: Synthetic oligonucleotide
  misc_feature 1..20: note = Target: SCN10A; (-) strand; PAM type: NNAGAAW; PAM sequence: TCAGAAT
  source 1..20: mol_type = other DNA
cttgcaccccaatagttttc

SEQ ID NO: 6280 - DNA, 20 bp, synthetic construct
  misc_feature 1..20: note = Description of Artificial Sequence: Synthetic oligonucleotide
  misc_feature 1..20: note = Target: SCN10A; (-) strand; PAM type: NNAGAAW; PAM sequence: CTAGAAA
  source 1..20: mol_type = other DNA
tcctctcttctatgacattc

SEQ ID NO: 6281 - DNA, 20 bp, synthetic construct
  misc_feature 1..20: note = Description of Artificial Sequence: Synthetic oligonucleotide
  misc_feature 1..20: note = Target: SCN10A; (-) strand; PAM type: NNAGAAW; PAM sequence: CTAGAAT
  source 1..20: mol_type = other DNA
gggccgagcttggagctaaa

SEQ ID NO: 6282 - DNA, 20 bp, synthetic construct
  misc_feature 1..20: note = Description of Artificial Sequence: Synthetic oligonucleotide
  misc_feature 1..20: note = Target: SCN10A; (-) strand; PAM type: NNAGAAW; PAM sequence: ATAGAAA
  source 1..20: mol_type = other DNA
gagggctgaatgcccaccga

SEQ ID NO: 6283 - DNA, 20 bp, synthetic construct
  misc_feature 1..20: note = Description of Artificial Sequence: Synthetic oligonucleotide
  misc_feature 1..20: note = Target: SCN10A; (+) strand; PAM type: NNAGAAW; PAM sequence: ACAGAAT
  source 1..20: mol_type = other DNA
ttttgtgtggctttctgtaa

SEQ ID NO: 6284 - DNA, 20 bp, synthetic construct
  misc_feature 1..20: note = Description of Artificial Sequence: Synthetic oligonucleotide
  misc_feature 1..20: note = Target: SCN10A; (+) strand; PAM type: NNAGAAW; PAM sequence: TGAGAAT
  source 1..20: mol_type = other DNA
ttgtccttgcgatagtttgc

SEQ ID NO: 6285 - DNA, 20 bp, synthetic construct
  misc_feature 1..20: note = Description of Artificial Sequence: Synthetic oligonucleotide
  misc_feature 1..20: note = Target: SCN10A; (+) strand; PAM type: NNAGAAW; PAM sequence: AGAGAAT
  source 1..20: mol_type = other DNA
cccattcacaattgcttcaa

SEQ ID NO: 6286 - DNA, 20 bp, synthetic construct
  misc_feature 1..20: note = Description of Artificial Sequence: Synthetic oligonucleotide
  misc_feature 1..20: note = Target: SCN10A; (+) strand; PAM type: NNAGAAW; PAM sequence: GAAGAAT
  source 1..20: mol_type = other DNA
aaagaggatacaaacaaatg

SEQ ID NO: 6287 - DNA, 20 bp, synthetic construct
  misc_feature 1..20: note = Description of Artificial Sequence: Synthetic oligonucleotide
  misc_feature 1..20: note = Target: SCN10A; (+) strand; PAM type: NNAGAAW; PAM sequence: GAAGAAT
  source 1..20: mol_type = other DNA
tactccatgctcatgggtag

SEQ ID NO: 6288 - DNA, 20 bp, synthetic construct
  misc_feature 1..20: note = Description of Artificial Sequence: Synthetic oligonucleotide
  misc_feature 1..20: note = Target: SCN10A; (+) strand; PAM type: NNAGAAW; PAM sequence: TCAGAAT
  source 1..20: mol_type = other DNA
agctaccaatgactttcttc

SEQ ID NO: 6289 - DNA, 20 bp, synthetic construct
  misc_feature 1..20: note = Description of Artificial Sequence: Synthetic oligonucleotide
  misc_feature 1..20: note = Target: SCN10A; (+) strand; PAM type: NNAGAAW; PAM sequence: GGAGAAA
  source 1..20: mol_type = other DNA
ttttttactttttagcatta

SEQ ID NO: 6290 - DNA, 20 bp, synthetic construct
  misc_feature 1..20: note = Description of Artificial Sequence: Synthetic oligonucleotide
  misc_feature 1..20: note = Target: SCN10A; (+) strand; PAM type: NNAGAAW; PAM sequence: CTAGAAT
  source 1..20: mol_type = other DNA
gtacattgtgcacatgtacc

SEQ ID NO: 6291 - DNA, 20 bp, synthetic construct
  misc_feature 1..20: note = Description of Artificial Sequence: Synthetic oligonucleotide
  misc_feature 1..20: note = Target: SCN10A; (+) strand; PAM type: NNAGAAW; PAM sequence: AAAGAAA
  source 1..20: mol_type = other DNA
tttaaagtataattttaaaa

SEQ ID NO: 6292 - DNA, 20 bp, synthetic construct
  misc_feature 1..20: note = Description of Artificial Sequence: Synthetic oligonucleotide
  misc_feature 1..20: note = Target: SCN10A; (+) strand; PAM type: NNAGAAW; PAM sequence: GCAGAAA
  source 1..20: mol_type = other DNA
aatttaggaaatgcatttgt

SEQ ID NO: 6293 - DNA, 20 bp, synthetic construct
  misc_feature 1..20: note = Description of Artificial Sequence: Synthetic oligonucleotide
  misc_feature 1..20: note = Target: SCN10A; (+) strand; PAM type: NNAGAAW; PAM sequence: TGAGAAA
  source 1..20: mol_type = other DNA
atgcatttgtgcagaaaaaa

SEQ ID NO: 6294 - DNA, 20 bp, synthetic construct
  misc_feature 1..20: note = Description of Artificial Sequence: Synthetic oligonucleotide
  misc_feature 1..20: note = Target: SCN10A; (+) strand; PAM type: NNAGAAW; PAM sequence: CCAGAAA
  source 1..20: mol_type = other DNA
tgggatgctgtaacaaatta

SEQ ID NO: 6295 - DNA, 20 bp, synthetic construct
  misc_feature 1..20: note = Description of Artificial Sequence: Synthetic oligonucleotide
  misc_feature 1..20: note = Target: SCN10A; (+) strand; PAM type: NNAGAAW; PAM sequence: ATAGAAA
  source 1..20: mol_type = other DNA
aaactaggtagatgacaata

SEQ ID NO: 6296 - DNA, 20 bp, synthetic construct
  misc_feature 1..20: note = Description of Artificial Sequence: Synthetic oligonucleotide
  misc_feature 1..20: note = Target: SCN10A; (+) strand; PAM type: NNAGAAW; PAM sequence: TGAGAAT
  source 1..20: mol_type = other DNA
actcaaagtaaaaatacttt

SEQ ID NO: 6297 - DNA, 20 bp, synthetic construct
  misc_feature 1..20: note = Description of Artificial Sequence: Synthetic oligonucleotide
  misc_feature 1..20: note = Target: SCN10A; (+) strand; PAM type: NNAGAAW; PAM sequence: TTAGAAT
  source 1..20: mol_type = other DNA
tatttggttgaactcatctt

SEQ ID NO: 6298 - DNA, 20 bp, synthetic construct
  misc_feature 1..20: note = Description of Artificial Sequence: Synthetic oligonucleotide
  misc_feature 1..20: note = Target: SCN10A; (+) strand; PAM type: NNAGAAW; PAM sequence: AGAGAAT
  source 1..20: mol_type = other DNA
ttagaataaatcaggcattc

SEQ ID NO: 6299 - DNA, 20 bp, synthetic construct
  misc_feature 1..20: note = Description of Artificial Sequence: Synthetic oligonucleotide
  misc_feature 1..20: note = Target: SCN10A; (+) strand; PAM type: NNAGAAW; PAM sequence: ACAGAAA
  source 1..20: mol_type = other DNA
cttcttatgggctaatagtg

SEQ ID NO: 6300 - DNA, 20 bp, synthetic construct
  misc_feature 1..20: note = Description of Artificial Sequence: Synthetic oligonucleotide
  misc_feature 1..20: note = Target: SCN10A; (+) strand; PAM type: NNAGAAW; PAM sequence: AAAGAAA
  source 1..20: mol_type = other DNA
taacatttgcaggatgaatg

SEQ ID NO: 6301 - DNA, 20 bp, synthetic construct
  misc_feature 1..20: note = Description of Artificial Sequence: Synthetic oligonucleotide
  misc_feature 1..20: note = Target: SCN10A; (+) strand; PAM type: NNAGAAW; PAM sequence: ACAGAAA
  source 1..20: mol_type = other DNA
gctgcctctttagctacaca

SEQ ID NO: 6302 - DNA, 20 bp, synthetic construct
  misc_feature 1..20: note = Description of Artificial Sequence: Synthetic oligonucleotide
  misc_feature 1..20: note = Target: SCN10A; (+) strand; PAM type: NNAGAAW; PAM sequence: TCAGAAA
  source 1..20: mol_type = other DNA
aaggtccagccatttcagcc

SEQ ID NO: 6303 - DNA, 20 bp, synthetic construct
  misc_feature 1..20: note = Description of Artificial Sequence: Synthetic oligonucleotide
  misc_feature 1..20: note = Target: SCN10A; (+) strand; PAM type: NNAGAAW; PAM sequence: ATAGAAA
  source 1..20: mol_type = other DNA
cagcacgagatgcgaagtct

SEQ ID NO: 6304 - DNA, 20 bp, synthetic construct
  misc_feature 1..20: note = Description of Artificial Sequence: Synthetic oligonucleotide
  misc_feature 1..20: note = Target: SCN10A; (+) strand; PAM type: NNAGAAW; PAM sequence: CCAGAAA
  source 1..20: mol_type = other DNA
aactgaaaaatatcaggatc

SEQ ID NO: 6305 - DNA, 20 bp, synthetic construct
  misc_feature 1..20: note = Description of Artificial Sequence: Synthetic oligonucleotide
  misc_feature 1..20: note = Target: SCN10A; (+) strand; PAM type: NNAGAAW; PAM sequence: ACAGAAA
  source 1..20: mol_type = other DNA
tcatgatacaggtcagcatc

SEQ ID NO: 6306 - DNA, 20 bp, synthetic construct
  misc_feature 1..20: note = Description of Artificial Sequence: Synthetic oligonucleotide
  misc_feature 1..20: note = Target: SCN10A; (+) strand; PAM type: NNAGAAW; PAM sequence: AGAGAAA
  source 1..20: mol_type = other DNA
aggtcagcatcacagaaata

SEQ ID NO: 6307 - DNA, 20 bp, synthetic construct
  misc_feature 1..20: note = Description of Artificial Sequence: Synthetic oligonucleotide
  misc_feature 1..20: note = Target: SCN10A; (+) strand; PAM type: NNAGAAW; PAM sequence: AGAGAAT
  source 1..20: mol_type = other DNA
tctcctccatatttgccttc

SEQ ID NO: 6308 - DNA, 20 bp, synthetic construct
  misc_feature 1..20: note = Description of Artificial Sequence: Synthetic oligonucleotide
  misc_feature 1..20: note = Target: SCN10A; (+) strand; PAM type: NNAGAAW; PAM sequence: GCAGAAA
  source 1..20: mol_type = other DNA
tgtctgcaaagtccgagaga

SEQ ID NO: 6309 - DNA, 20 bp, synthetic construct
  misc_feature 1..20: note = Description of Artificial Sequence: Synthetic oligonucleotide
  misc_feature 1..20: note = Target: SCN10A; (+) strand; PAM type: NNAGAAW; PAM sequence: CCAGAAT
  source 1..20: mol_type = other DNA
cgtggccacattgaagttct

SEQ ID NO: 6310 - DNA, 20 bp, synthetic construct
  misc_feature 1..20: note = Description of Artificial Sequence: Synthetic oligonucleotide
  misc_feature 1..20: note = Target: SCN10A; (+) strand; PAM type: NNAGAAW; PAM sequence: TAAGAAT
  source 1..20: mol_type = other DNA
gaagtaactttgaagtgact

SEQ ID NO: 6311 - DNA, 20 bp, synthetic construct
  misc_feature 1..20: note = Description of Artificial Sequence: Synthetic oligonucleotide
  misc_feature 1..20: note = Target: SCN10A; (+) strand; PAM type: NNAGAAW; PAM sequence: GCAGAAA
  source 1..20: mol_type = other DNA
tttgaagtgacttaagaatt

SEQ ID NO: 6312 - DNA, 20 bp, synthetic construct
  misc_feature 1..20: note = Description of Artificial Sequence: Synthetic oligonucleotide
  misc_feature 1..20: note = Target: SCN10A; (+) strand; PAM type: NNAGAAW; PAM sequence: GAAGAAA
  source 1..20: mol_type = other DNA
aatcaggcctttaaaagaag

SEQ ID NO: 6313 - DNA, 20 bp, synthetic construct
  misc_feature 1..20: note = Description of Artificial Sequence: Synthetic oligonucleotide
  misc_feature 1..20: note = Target: SCN10A; (+) strand; PAM type: NNAGAAW; PAM sequence: CTAGAAT
  source 1..20: mol_type = other DNA
catgttatctttgcctccgc

SEQ ID NO: 6314 - DNA, 20 bp, synthetic construct
  misc_feature 1..20: note = Description of Artificial Sequence: Synthetic oligonucleotide
  misc_feature 1..20: note = Target: SCN10A; (+) strand; PAM type: NNAGAAW; PAM sequence: AAAGAAT
  source 1..20: mol_type = other DNA
atgaacaaagttggaaatat

SEQ ID NO: 6315 - DNA, 20 bp, synthetic construct
  misc_feature 1..20: note = Description of Artificial Sequence: Synthetic oligonucleotide
  misc_feature 1..20: note = Target: SCN10A; (+) strand; PAM type: NNAGAAW; PAM sequence: GAAGAAA
  source 1..20: mol_type = other DNA
caatattgtgttggaaagag

SEQ ID NO: 6316 - DNA, 20 bp, synthetic construct
  misc_feature 1..20: note = Description of Artificial Sequence: Synthetic oligonucleotide
  misc_feature 1..20: note = Target: SCN10A; (+) strand; PAM type: NNAGAAW; PAM sequence: GGAGAAT
  source 1..20: mol_type = other DNA
ctccaggatcttattttaag

SEQ ID NO: 6317 - DNA, 20 bp, synthetic construct
  misc_feature 1..20: note = Description of Artificial Sequence: Synthetic oligonucleotide
  misc_feature 1..20: note = Target: SCN10A; (+) strand; PAM type: NNAGAAW; PAM sequence: GAAGAAA
  source 1..20: mol_type = other DNA
cacctcttgttggtgggaaa

SEQ ID NO: 6318 - DNA, 20 bp, synthetic construct
  misc_feature 1..20: note = Description of Artificial Sequence: Synthetic oligonucleotide
  misc_feature 1..20: note = Target: SCN10A; (+) strand; PAM type: NNAGAAW; PAM sequence: GTAGAAA
  source 1..20: mol_type = other DNA
aagggaggtaaggagagagg

SEQ ID NO: 6319 - DNA, 20 bp, synthetic construct
  misc_feature 1..20: note = Description of Artificial Sequence: Synthetic oligonucleotide
  misc_feature 1..20: note = Target: SCN10A; (+) strand; PAM type: NNAGAAW; PAM sequence: AGAGAAT
  source 1..20: mol_type = other DNA
atagtcaaactcatgggagc

SEQ ID NO: 6320 - DNA, 20 bp, synthetic construct
  misc_feature 1..20: note = Description of Artificial Sequence: Synthetic oligonucleotide
  misc_feature 1..20: note = Target: SCN10A; (+) strand; PAM type: NNAGAAW; PAM sequence: ATAGAAT
  source 1..20: mol_type = other DNA
caaactcatgggagcagaga

SEQ ID NO: 6321 - DNA, 20 bp, synthetic construct
  misc_feature 1..20: note = Description of Artificial Sequence: Synthetic oligonucleotide
  misc_feature 1..20: note = Target: SCN10A; (+) strand; PAM type: NNAGAAW; PAM sequence: AGAGAAT
  source 1..20: mol_type = other DNA
gtctacctaaaaatttgcca

SEQ ID NO: 6322 - DNA, 20 bp, synthetic construct
  misc_feature 1..20: note = Description of Artificial Sequence: Synthetic oligonucleotide
  misc_feature 1..20: note = Target: SCN10A; (+) strand; PAM type: NNAGAAW; PAM sequence: TGAGAAT
  source 1..20: mol_type = other DNA
ttaattccagaccctagact

SEQ ID NO: 6323 - DNA, 20 bp, synthetic construct
  misc_feature 1..20: note = Description of Artificial Sequence: Synthetic oligonucleotide
  misc_feature 1..20: note = Target: SCN10A; (+) strand; PAM type: NNAGAAW; PAM sequence: CCAGAAT
  source 1..20: mol_type = other DNA
aaagaactggttgattttgc

SEQ ID NO: 6324 - DNA, 20 bp, synthetic construct
  misc_feature 1..20: note = Description of Artificial Sequence: Synthetic oligonucleotide
  misc_feature 1..20: note = Target: SCN10A; (+) strand; PAM type: NNAGAAW; PAM sequence: TGAGAAA
  source 1..20: mol_type = other DNA
caaaaccctggaacttgttc

SEQ ID NO: 6325 - DNA, 20 bp, synthetic construct
  misc_feature 1..20: note = Description of Artificial Sequence: Synthetic oligonucleotide
  misc_feature 1..20: note = Target: SCN10A; (+) strand; PAM type: NNAGAAW; PAM sequence: GCAGAAT
  source 1..20: mol_type = other DNA
ctagtttctcctaacttaaa

SEQ ID NO: 6326 - DNA, 20 bp, synthetic construct
  misc_feature 1..20: note = Description of Artificial Sequence: Synthetic oligonucleotide
  misc_feature 1..20: note = Target: SCN10A; (+) strand; PAM type: NNAGAAW; PAM sequence: TCAGAAA
  source 1..20: mol_type = other DNA
ctaacttaaagcagaatatt

SEQ ID NO: 6327 - DNA, 20 bp, synthetic construct
  misc_feature 1..20: note = Description of Artificial Sequence: Synthetic oligonucleotide
  misc_feature 1..20: note = Target: SCN10A; (+) strand; PAM type: NNAGAAW; PAM sequence: ACAGAAT
  source 1..20: mol_type = other DNA
aatttgtaaatgaatggaag

SEQ ID NO: 6328 - DNA, 20 bp, synthetic construct
  misc_feature 1..20: note = Description of Artificial Sequence: Synthetic oligonucleotide
  misc_feature 1..20: note = Target: SCN10A; (+) strand; PAM type: NNAGAAW; PAM sequence: AAAGAAT
  source 1..20: mol_type = other DNA
ctatcctgttgggttagagc

SEQ ID NO: 6329 - DNA, 20 bp, synthetic construct
  misc_feature 1..20: note = Description of Artificial Sequence: Synthetic oligonucleotide
  misc_feature 1..20: note = Target: SCN10A; (+) strand; PAM type: NNAGAAW; PAM sequence: AAAGAAT
  source 1..20: mol_type = other DNA
tttctgtagcagggaatgtt

SEQ ID NO: 6330 - DNA, 20 bp, synthetic construct
  misc_feature 1..20: note = Description of Artificial Sequence: Synthetic oligonucleotide
  misc_feature 1..20: note = Target: SCN10A; (+) strand; PAM type: NNAGAAW; PAM sequence: GAAGAAA
  source 1..20: mol_type = other DNA
aatccttaacttttcctatg

SEQ ID NO: 6331 - DNA, 20 bp, synthetic construct
  misc_feature 1..20: note = Description of Artificial Sequence: Synthetic oligonucleotide
  misc_feature 1..20: note = Target: SCN10A; (+) strand; PAM type: NNAGAAW; PAM sequence: GCAGAAA
  source 1..20: mol_type = other DNA
ggcacccatgcactgatggg

SEQ ID NO: 6332 - DNA, 20 bp, synthetic construct
  misc_feature 1..20: note = Description of Artificial Sequence: Synthetic oligonucleotide
  misc_feature 1..20: note = Target: SCN10A; (+) strand; PAM type: NNAGAAW; PAM sequence: CCAGAAT
  source 1..20: mol_type = other DNA
gagtgtttaccttgcttggg

SEQ ID NO: 6333 - DNA, 20 bp, synthetic construct
  misc_feature 1..20: note = Description of Artificial Sequence: Synthetic oligonucleotide
  misc_feature 1..20: note = Target: SCN10A; (+) strand; PAM type: NNAGAAW; PAM sequence: GGAGAAT
  source 1..20: mol_type = other DNA
tcttcttccattcaaaggat

SEQ ID NO: 6334 - DNA, 20 bp, synthetic construct
  misc_feature 1..20: note = Description of Artificial Sequence: Synthetic oligonucleotide
  misc_feature 1..20: note = Target: SCN10A; (+) strand; PAM type: NNAGAAW; PAM sequence: ACAGAAT
  source 1..20: mol_type = other DNA
aaggatggagaatctcagga

SEQ ID NO: 6335 - DNA, 20 bp, synthetic construct
  misc_feature 1..20: note = Description of Artificial Sequence: Synthetic oligonucleotide
  misc_feature 1..20: note = Target: SCN10A; (+) strand; PAM type: NNAGAAW; PAM sequence: GGAGAAA
  source 1..20: mol_type = other DNA
tcttagttgcagcttaatta

SEQ ID NO: 6336 - DNA, 20 bp, synthetic construct
  misc_feature 1..20: note = Description of Artificial Sequence: Synthetic oligonucleotide
  misc_feature 1..20: note = Target: SCN10A; (+) strand; PAM type: NNAGAAW; PAM sequence: TAAGAAT
  source 1..20: mol_type = other DNA
aaatatgatttatcttgtcc

SEQ ID NO: 6337 - DNA, 20 bp, synthetic construct
  misc_feature 1..20: note = Description of Artificial Sequence: Synthetic oligonucleotide
  misc_feature 1..20: note = Target: SCN10A; (+) strand; PAM type: NNAGAAW; PAM sequence: GAAGAAA
  source 1..20: mol_type = other DNA
tgattgtatgggtgatttag

SEQ ID NO: 6338 - DNA, 20 bp, synthetic construct
  misc_feature 1..20: note = Description of Artificial Sequence: Synthetic oligonucleotide
  misc_feature 1..20: note = Target: SCN10A; (+) strand; PAM type: NNAGAAW; PAM sequence: TCAGAAT
  source 1..20: mol_type = other DNA
ccccattgtaatacttctta

SEQ ID NO: 6339 - DNA, 20 bp, synthetic construct
  misc_feature 1..20: note = Description of Artificial Sequence: Synthetic oligonucleotide
  misc_feature 1..20: note = Target: SCN10A; (+) strand; PAM type: NNAGAAW; PAM sequence: ACAGAAT
  source 1..20: mol_type = other DNA
aaaatctaatagcttggcta

SEQ ID NO: 6340 - DNA, 20 bp, synthetic construct
  misc_feature 1..20: note = Description of Artificial Sequence: Synthetic oligonucleotide
  misc_feature 1..20: note = Target: SCN10A; (+) strand; PAM type: NNAGAAW; PAM sequence: ACAGAAA
  source 1..20: mol_type = other DNA
actaatgctgcatcttagcc

SEQ ID NO: 6341 - DNA, 20 bp, synthetic construct
  misc_feature 1..20: note = Description of Artificial Sequence: Synthetic oligonucleotide
  misc_feature 1..20: note = Target: SCN10A; (+) strand; PAM type: NNAGAAW; PAM sequence: TCAGAAA
  source 1..20: mol_type = other DNA
cattcactggagtggatggc

SEQ ID NO: 6342 - DNA, 20 bp, synthetic construct
  misc_feature 1..20: note = Description of Artificial Sequence: Synthetic oligonucleotide
  misc_feature 1..20: note = Target: SCN10A; (+) strand; PAM type: NNAGAAW; PAM sequence: GTAGAAT
  source 1..20: mol_type = other DNA
tctatacctgtaggcgtggg

SEQ ID NO: 6343 - DNA, 20 bp, synthetic construct
  misc_feature 1..20: note = Description of Artificial Sequence: Synthetic oligonucleotide
  misc_feature 1..20: note = Target: SCN10A; (+) strand; PAM type: NNAGAAW; PAM sequence: GGAGAAA
  source 1..20: mol_type = other DNA
acttgaactctaaaactgtt

SEQ ID NO: 6344 - DNA, 20 bp, synthetic construct
  misc_feature 1..20: note = Description of Artificial Sequence: Synthetic oligonucleotide
  misc_feature 1..20: note = Target: SCN10A; (+) strand; PAM type: NNAGAAW; PAM sequence: AGAGAAA
  source 1..20: mol_type = other DNA
ccaaaatcagaacaggcagg

SEQ ID NO: 6345 - DNA, 20 bp, synthetic construct
  misc_feature 1..20: note = Description of Artificial Sequence: Synthetic oligonucleotide
  misc_feature 1..20: note = Target: SCN10A; (+) strand; PAM type: NNAGAAW; PAM sequence: CCAGAAA
  source 1..20: mol_type = other DNA
tgccctctgctgttacagtg

SEQ ID NO: 6346 - DNA, 20 bp, synthetic construct
  misc_feature 1..20: note = Description of Artificial Sequence: Synthetic oligonucleotide
  misc_feature 1..20: note = Target: SCN10A; (+) strand; PAM type: NNAGAAW; PAM sequence: AGAGAAA
  source 1..20: mol_type = other DNA
gttttctcatctgtaaaatg

SEQ ID NO: 6347 - DNA, 20 bp, synthetic construct
  misc_feature 1..20: note = Description of Artificial Sequence: Synthetic oligonucleotide
  misc_feature 1..20: note = Target: SCN10A; (+) strand; PAM type: NNAGAAW; PAM sequence: CCAGAAA
  source 1..20: mol_type = other DNA
tcccctctgctgttacagtg

SEQ ID NO: 6348 - DNA, 20 bp, synthetic construct
  misc_feature 1..20: note = Description of Artificial Sequence: Synthetic oligonucleotide
  misc_feature 1..20: note = Target: SCN10A; (+) strand; PAM type: NNAGAAW; PAM sequence: TGAGAAA
  source 1..20: mol_type = other DNA
tattagccccattgaatgaa

SEQ ID NO: 6349 - DNA, 20 bp, synthetic construct
  misc_feature 1..20: note = Description of Artificial Sequence: Synthetic oligonucleotide
  misc_feature 1..20: note = Target: SCN10A; (+) strand; PAM type: NNAGAAW; PAM sequence: AGAGAAA
  source 1..20: mol_type = other DNA
tagtggggcattgctgacag

SEQ ID NO: 6350 - DNA, 20 bp, synthetic construct
  misc_feature 1..20: note = Description of Artificial Sequence: Synthetic oligonucleotide
  misc_feature 1..20: note = Target: SCN10A; (+) strand; PAM type: NNAGAAW; PAM sequence: GCAGAAA
  source 1..20: mol_type = other DNA
atataaggcttaccactaca

SEQ ID NO: 6351 - DNA, 20 bp, synthetic construct
  misc_feature 1..20: note = Description of Artificial Sequence: Synthetic oligonucleotide
  misc_feature 1..20: note = Target: SCN10A; (+) strand; PAM type: NNAGAAW; PAM sequence: CCAGAAA
  source 1..20: mol_type = other DNA
gcttaccactacagcagaaa

SEQ ID NO: 6352 - DNA, 20 bp, synthetic construct
  misc_feature 1..20: note = Description of Artificial Sequence: Synthetic oligonucleotide
  misc_feature 1..20: note = Target: SCN10A; (+) strand; PAM type: NNAGAAW; PAM sequence: GAAGAAT
  source 1..20: mol_type = other DNA
agcaggaatgagggagtggg

SEQ ID NO: 6353 - DNA, 20 bp, synthetic construct
  misc_feature 1..20: note = Description of Artificial Sequence: Synthetic oligonucleotide
  misc_feature 1..20: note = Target: SCN10A; (+) strand; PAM type: NNAGAAW; PAM sequence: AGAGAAT
  source 1..20: mol_type = other DNA
aagccctggagtctttatac

SEQ ID NO: 6354 - DNA, 20 bp, synthetic construct
  misc_feature 1..20: note = Description of Artificial Sequence: Synthetic oligonucleotide
  misc_feature 1..20: note = Target: SCN10A; (+) strand; PAM type: NNAGAAW; PAM sequence: GTAGAAT
  source 1..20: mol_type = other DNA
tcaaatgcagactgatatgg

SEQ ID NO: 6355 - DNA, 20 bp, synthetic construct
  misc_feature 1..20: note = Description of Artificial Sequence: Synthetic oligonucleotide
  misc_feature 1..20: note = Target: SCN10A; (+) strand; PAM type: NNAGAAW; PAM sequence: GCAGAAA
  source 1..20: mol_type = other DNA
ctgtgttggaaagggcttgt

SEQ ID NO: 6356 - DNA, 20 bp, synthetic construct
  misc_feature 1..20: note = Description of Artificial Sequence: Synthetic oligonucleotide
  misc_feature 1..20: note = Target: SCN10A; (+) strand; PAM type: NNAGAAW; PAM sequence: AAAGAAT
  source 1..20: mol_type = other DNA
gttggaaagggcttgtgcag

SEQ ID NO: 6357 - DNA, 20 bp, synthetic construct
  misc_feature 1..20: note = Description of Artificial Sequence: Synthetic oligonucleotide
  misc_feature 1..20: note = Target: SCN10A; (+) strand; PAM type: NNAGAAW; PAM sequence: TAAGAAT
  source 1..20: mol_type = other DNA
taatcccacatgtggctgtt

SEQ ID NO: 6358 - DNA, 20 bp, synthetic construct
  misc_feature 1..20: note = Description of Artificial Sequence: Synthetic oligonucleotide
  misc_feature 1..20: note = Target: SCN10A; (+) strand; PAM type: NNAGAAW; PAM sequence: TCAGAAT
  source 1..20: mol_type = other DNA
cattaaagacacagagcctt

SEQ ID NO: 6359 - DNA, 20 bp, synthetic construct
  misc_feature 1..20: note = Description of Artificial Sequence: Synthetic oligonucleotide
  misc_feature 1..20: note = Target: SCN10A; (+) strand; PAM type: NNAGAAW; PAM sequence: TAAGAAT
  source 1..20: mol_type = other DNA
cccaccttatgcacatgatg

SEQ ID NO: 6360 - DNA, 20 bp, synthetic construct
  misc_feature 1..20: note = Description of Artificial Sequence: Synthetic oligonucleotide
  misc_feature 1..20: note = Target: SCN10A; (+) strand; PAM type: NNAGAAW; PAM sequence: TGAGAAT
  source 1..20: mol_type = other DNA
tatcttccagatggagaagt

SEQ ID NO: 6361 - DNA, 20 bp, synthetic construct
  misc_feature 1..20: note = Description of Artificial Sequence: Synthetic oligonucleotide
  misc_feature 1..20: note = Target: SCN10A; (+) strand; PAM type: NNAGAAW; PAM sequence: CTAGAAA
  source 1..20: mol_type = other DNA
agctttagcattcttgaggt

SEQ ID NO: 6362 - DNA, 20 bp, synthetic construct
  misc_feature 1..20: note = Description of Artificial Sequence: Synthetic oligonucleotide
  misc_feature 1..20: note = Target: SCN10A; (+) strand; PAM type: NNAGAAW; PAM sequence: CAAGAAA
  source 1..20: mol_type = other DNA
aatgaacaggtagatgaagg

SEQ ID NO: 6363 - DNA, 20 bp, synthetic construct
  misc_feature 1..20: note = Description of Artificial Sequence: Synthetic oligonucleotide
  misc_feature 1..20: note = Target: SCN10A; (+) strand; PAM type: NNAGAAW; PAM sequence: AAAGAAA
  source 1..20: mol_type = other DNA
gagtgattgactggatgatg

SEQ ID NO: 6364 - DNA, 20 bp, synthetic construct
  misc_feature 1..20: note = Description of Artificial Sequence: Synthetic oligonucleotide
  misc_feature 1..20: note = Target: SCN10A; (+) strand; PAM type: NNAGAAW; PAM sequence: AAAGAAA
  source 1..20: mol_type = other DNA
gattgactggatgatgaaag

SEQ ID NO: 6365 - DNA, 20 bp, synthetic construct
  misc_feature 1..20: note = Description of Artificial Sequence: Synthetic oligonucleotide
  misc_feature 1..20: note = Target: SCN10A; (+) strand; PAM type: NNAGAAW; PAM sequence: AGAGAAT
  source 1..20: mol_type = other DNA
atggtgtagtctgtaggaat

SEQ ID NO: 6366 - DNA, 20 bp, synthetic construct
  misc_feature 1..20: note = Description of Artificial Sequence: Synthetic oligonucleotide
  misc_feature 1..20: note = Target: SCN10A; (+) strand; PAM type: NNAGAAW; PAM sequence: AGAGAAA
  source 1..20: mol_type = other DNA
accaccacctggtgggagat

SEQ ID NO: 6367 - DNA, 20 bp, synthetic construct
  misc_feature 1..20: note = Description of Artificial Sequence: Synthetic oligonucleotide
  misc_feature 1..20: note = Target: SCN10A; (+) strand; PAM type: NNAGAAW; PAM sequence: TGAGAAT
  source 1..20: mol_type = other DNA
cttatttgtaaataagcaaa

SEQ ID NO: 6368 - DNA, 20 bp, synthetic construct
  misc_feature 1..20: note = Description of Artificial Sequence: Synthetic oligonucleotide
  misc_feature 1..20: note = Target: SCN10A; (+) strand; PAM type: NNAGAAW; PAM sequence: ATAGAAT
  source 1..20: mol_type = other DNA
gagaatctattagatacaaa

SEQ ID NO: 6369 - DNA, 20 bp, synthetic construct
  misc_feature 1..20: note = Description of Artificial Sequence: Synthetic oligonucleotide
  misc_feature 1..20: note = Target: SCN10A; (+) strand; PAM type: NNAGAAW; PAM sequence: CGAGAAA
  source 1..20: mol_type = other DNA
ttacccgcatgccttcaaat

SEQ ID NO: 6370 - DNA, 20 bp, synthetic construct
  misc_feature 1..20: note = Description of Artificial Sequence: Synthetic oligonucleotide
  misc_feature 1..20: note = Target: SCN10A; (+) strand; PAM type: NNAGAAW; PAM sequence: TCAGAAT
  source 1..20: mol_type = other DNA
gggctttgatgggagccact

SEQ ID NO: 6371 - DNA, 20 bp, synthetic construct
  misc_feature 1..20: note = Description of Artificial Sequence: Synthetic oligonucleotide
  misc_feature 1..20: note = Target: SCN10A; (+) strand; PAM type: NNAGAAW; PAM sequence: CCAGAAT
  source 1..20: mol_type = other DNA
gggagccacttcagaatatt

SEQ ID NO: 6372 - DNA, 20 bp, synthetic construct
  misc_feature 1..20: note = Description of Artificial Sequence: Synthetic oligonucleotide
  misc_feature 1..20: note = Target: SCN10A; (+) strand; PAM type: NNAGAAW; PAM sequence: GCAGAAA
  source 1..20: mol_type = other DNA
agatctgagtgcaggagagg

SEQ ID NO: 6373 - DNA, 20 bp, synthetic construct
  misc_feature 1..20: note = Description of Artificial Sequence: Synthetic oligonucleotide
  misc_feature 1..20: note = Target: SCN10A; (+) strand; PAM type: NNAGAAW; PAM sequence: CCAGAAA
  source 1..20: mol_type = other DNA
agaaacatcactctaggttt

SEQ ID NO: 6374 - DNA, 20 bp, synthetic construct
  misc_feature 1..20: note = Description of Artificial Sequence: Synthetic oligonucleotide
  misc_feature 1..20: note = Target: SCN10A; (+) strand; PAM type: NNAGAAW; PAM sequence: CTAGAAA
  source 1..20: mol_type = other DNA
tcggaactccaatgagaggt

SEQ ID NO: 6375 - DNA, 20 bp, synthetic construct
  misc_feature 1..20: note = Description of Artificial Sequence: Synthetic oligonucleotide
  misc_feature 1..20: note = Target: SCN10A; (+) strand; PAM type: NNAGAAW; PAM sequence: CAAGAAA
  source 1..20: mol_type = other DNA
actctcttaaacaatctggg

SEQ ID NO: 6376 - DNA, 20 bp, synthetic construct
  misc_feature 1..20: note = Description of Artificial Sequence: Synthetic oligonucleotide
  misc_feature 1..20: note = Target: SCN10A; (+) strand; PAM type: NNAGAAW; PAM sequence: AAAGAAT
  source 1..20: mol_type = other DNA
tgctcagagaagtggggtgg

SEQ ID NO: 6377 - DNA, 20 bp, synthetic construct
  misc_feature 1..20: note = Description of Artificial Sequence: Synthetic oligonucleotide
  misc_feature 1..20: note = Target: SCN10A; (+) strand; PAM type: NNAGAAW; PAM sequence: AGAGAAT
  source 1..20: mol_type = other DNA
aaaatgaaaaagtcagacta

SEQ ID NO: 6378 - DNA, 20 bp, synthetic construct
  misc_feature 1..20: note = Description of Artificial Sequence: Synthetic oligonucleotide
  misc_feature 1..20: note = Target: SCN10A; (+) strand; PAM type: NNAGAAW; PAM sequence: ACAGAAA
  source 1..20: mol_type = other DNA
tggtccaaagactgcaaagg

SEQ ID NO: 6379 - DNA, 20 bp, synthetic construct
  misc_feature 1..20: note = Description of Artificial Sequence: Synthetic oligonucleotide
  misc_feature 1..20: note = Target: SCN10A; (+) strand; PAM type: NNAGAAW; PAM sequence: TCAGAAA
  source 1..20: mol_type = other DNA
gtgggatgcacacaggagct

SEQ ID NO: 6380 - DNA, 20 bp, synthetic construct
  misc_feature 1..20: note = Description of Artificial Sequence: Synthetic oligonucleotide
  misc_feature 1..20: note = Target: SCN10A; (+) strand; PAM type: NNAGAAW; PAM sequence: GAAGAAT
  source 1..20: mol_type = other DNA
tctaatgccacctcccatag

SEQ ID NO: 6381 - DNA, 20 bp, synthetic construct
  misc_feature 1..20: note = Description of Artificial Sequence: Synthetic oligonucleotide
  misc_feature 1..20: note = Target: SCN10A; (+) strand; PAM type: NNAGAAW; PAM sequence: GAAGAAA
  source 1..20: mol_type = other DNA
agttagatgtatagcaaatg

SEQ ID NO: 6382 - DNA, 20 bp, synthetic construct
  misc_feature 1..20: note = Description of Artificial Sequence: Synthetic oligonucleotide
  misc_feature 1..20: note = Target: SCN10A; (+) strand; PAM type: NNAGAAW; PAM sequence: AAAGAAA
  source 1..20: mol_type = other DNA
tcattgggatggctagaagg

SEQ ID NO: 6383 - DNA, 20 bp, synthetic construct
  misc_feature 1..20: note = Description of Artificial Sequence: Synthetic oligonucleotide
  misc_feature 1..20: note = Target: SCN10A; (+) strand; PAM type: NNAGAAW; PAM sequence: AAAGAAA
  source 1..20: mol_type = other DNA
tgggatggctagaaggaaag

SEQ ID NO: 6384 - DNA, 20 bp, synthetic construct
  misc_feature 1..20: note = Description of Artificial Sequence: Synthetic oligonucleotide
  misc_feature 1..20: note = Target: SCN10A; (+) strand; PAM type: NNAGAAW; PAM sequence: GGAGAAA
  source 1..20: mol_type = other DNA
tagctgctcttgccacaggg

SEQ ID NO: 6385 - DNA, 20 bp, synthetic construct
  misc_feature 1..20: note = Description of Artificial Sequence: Synthetic oligonucleotide
  misc_feature 1..20: note = Target: SCN10A; (+) strand; PAM type: NNAGAAW; PAM sequence: GGAGAAA
  source 1..20: mol_type = other DNA
gatagttgaatggaaggatg

SEQ ID NO: 6386 - DNA, 20 bp, synthetic construct
  misc_feature 1..20: note = Description of Artificial Sequence: Synthetic oligonucleotide
  misc_feature 1..20: note = Target: SCN10A; (+) strand; PAM type: NNAGAAW; PAM sequence: CAAGAAA
  source 1..20: mol_type = other DNA
ggaaggatgggagaaacaaa

SEQ ID NO: 6387 - DNA, 20 bp, synthetic construct
  misc_feature 1..20: note = Description of Artificial Sequence: Synthetic oligonucleotide
  misc_feature 1..20: note = Target: SCN10A; (+) strand; PAM type: NNAGAAW; PAM sequence: ACAGAAT
  source 1..20: mol_type = other DNA
atggaaagatggggagctgg

SEQ ID NO: 6388 - DNA, 20 bp, synthetic construct
  misc_feature 1..20: note = Description of Artificial Sequence: Synthetic oligonucleotide
  misc_feature 1..20: note = Target: SCN10A; (+) strand; PAM type: NNAGAAW; PAM sequence: GAAGAAA
  source 1..20: mol_type = other DNA
gatgaatgaacagataagtg

SEQ ID NO: 6389 - DNA, 20 bp, synthetic construct
  misc_feature 1..20: note = Description of Artificial Sequence: Synthetic oligonucleotide
  misc_feature 1..20: note = Target: SCN10A; (+) strand; PAM type: NNAGAAW; PAM sequence: GAAGAAT
  source 1..20: mol_type = other DNA
aacagataagtggaagaaag

SEQ ID NO: 6390 - DNA, 20 bp, synthetic construct
  misc_feature 1..20: note = Description of Artificial Sequence: Synthetic oligonucleotide
  misc_feature 1..20: note = Target: SCN10A; (+) strand; PAM type: NNAGAAW; PAM sequence: CAAGAAT
  source 1..20: mol_type = other DNA
aatagatggataggttgaaa

SEQ ID NO: 6391 - DNA, 20 bp, synthetic construct
  misc_feature 1..20: note = Description of Artificial Sequence: Synthetic oligonucleotide
  misc_feature 1..20: note = Target: SCN10A; (+) strand; PAM type: NNAGAAW; PAM sequence: GAAGAAT
  source 1..20: mol_type = other DNA
gaaacaagaatggaaagata

SEQ ID NO: 6392 - DNA, 20 bp, synthetic construct
  misc_feature 1..20: note = Description of Artificial Sequence: Synthetic oligonucleotide
  misc_feature 1..20: note = Target: SCN10A; (+) strand; PAM type: NNAGAAW; PAM sequence: ACAGAAT
  source 1..20: mol_type = other DNA
gaagatgcgtgaatgagtga

SEQ ID NO: 6393 - DNA, 20 bp, synthetic construct
  misc_feature 1..20: note = Description of Artificial Sequence: Synthetic oligonucleotide
  misc_feature 1..20: note = Target: SCN10A; (+) strand; PAM type: NNAGAAW; PAM sequence: GAAGAAT
  source 1..20: mol_type = other DNA
gatgattggacagttggata

SEQ ID NO: 6394 - DNA, 20 bp, synthetic construct
  misc_feature 1..20: note = Description of Artificial Sequence: Synthetic oligonucleotide
  misc_feature 1..20: note = Target: SCN10A; (+) strand; PAM type: NNAGAAW; PAM sequence: ATAGAAA
  source 1..20: mol_type = other DNA
atagaagaatgaatcaaaag

SEQ ID NO: 6395 - DNA, 20 bp, synthetic construct
  misc_feature 1..20: note = Description of Artificial Sequence: Synthetic oligonucleotide
  misc_feature 1..20: note = Target: SCN10A; (+) strand; PAM type: NNAGAAW; PAM sequence: TTAGAAT
  source 1..20: mol_type = other DNA
atgaatagatggaaggaagt

SEQ ID NO: 6396 - DNA, 20 bp, synthetic construct
  misc_feature 1..20: note = Description of Artificial Sequence: Synthetic oligonucleotide
  misc_feature 1..20: note = Target: SCN10A; (+) strand; PAM type: NNAGAAW; PAM sequence: GAAGAAT
  source 1..20: mol_type = other DNA
ggcagaagagaagagggaaa

SEQ ID NO: 6397 - DNA, 20 bp, synthetic construct
  misc_feature 1..20: note = Description of Artificial Sequence: Synthetic oligonucleotide
  misc_feature 1..20: note = Target: SCN10A; (+) strand; PAM type: NNAGAAW; PAM sequence: GAAGAAA
  source 1..20: mol_type = other DNA
ctgatgaagatgtacagctg

SEQ ID NO: 6398 - DNA, 20 bp, synthetic construct
  misc_feature 1..20: note = Description of Artificial Sequence: Synthetic oligonucleotide
  misc_feature 1..20: note = Target: SCN10A; (+) strand; PAM type: NNAGAAW; PAM sequence: GAAGAAT
  source 1..20: mol_type = other DNA
gaaggatggatggttggaag

SEQ ID NO: 6399 - DNA, 20 bp, synthetic construct
  misc_feature 1..20: note = Description of Artificial Sequence: Synthetic oligonucleotide
  misc_feature 1..20: note = Target: SCN10A; (+) strand; PAM type: NNAGAAW; PAM sequence: ACAGAAT
  source 1..20: mol_type = other DNA
tgaataattatttcatatgc

SEQ ID NO: 6400 - DNA, 20 bp, synthetic construct
  misc_feature 1..20: note = Description of Artificial Sequence: Synthetic oligonucleotide
  misc_feature 1..20: note = Target: SCN10A; (+) strand; PAM type: NNAGAAW; PAM sequence: AGAGAAT
  source 1..20: mol_type = other DNA
tgcattggcatcagggaaga

SEQ ID NO: 6401 - DNA, 20 bp, synthetic construct
  misc_feature 1..20: note = Description of Artificial Sequence: Synthetic oligonucleotide
  misc_feature 1..20: note = Target: SCN10A; (+) strand; PAM type: NNAGAAW; PAM sequence: ACAGAAT
  source 1..20: mol_type = other DNA
ctgccagcacaggaggctgg

SEQ ID NO: 6402 - DNA, 20 bp, synthetic construct
  misc_feature 1..20: note = Description of Artificial Sequence: Synthetic oligonucleotide
  misc_feature 1..20: note = Target: SCN10A; (+) strand; PAM type: NNAGAAW; PAM sequence: GCAGAAA
  source 1..20: mol_type = other DNA
gcacatgcctcaccctgctt

SEQ ID NO: 6403 - DNA, 20 bp, synthetic construct
  misc_feature 1..20: note = Description of Artificial Sequence: Synthetic oligonucleotide
  misc_feature 1..20: note = Target: SCN10A; (+) strand; PAM type: NNAGAAW; PAM sequence: TCAGAAT
  source 1..20: mol_type = other DNA
accacccaagaccaataaga

SEQ ID NO: 6404 - DNA, 20 bp, synthetic construct
  misc_feature 1..20: note = Description of Artificial Sequence: Synthetic oligonucleotide
  misc_feature 1..20: note = Target: SCN10A; (+) strand; PAM type: NNAGAAW; PAM sequence: GAAGAAA
  source 1..20: mol_type = other DNA
agtcttcaaaggcctggaag

SEQ ID NO: 6405 - DNA, 20 bp, synthetic construct
  misc_feature 1..20: note = Description of Artificial Sequence: Synthetic oligonucleotide
  misc_feature 1..20: note = Target: SCN10A; (+) strand; PAM type: NNAGAAW; PAM sequence: GCAGAAT
  source 1..20: mol_type = other DNA
gcctggaaggaagaaaggat

SEQ ID NO: 6406 - DNA, 20 bp, synthetic construct
  misc_feature 1..20: note = Description of Artificial Sequence: Synthetic oligonucleotide
  misc_feature 1..20: note = Target: SCN10A; (+) strand; PAM type: NNAGAAW; PAM sequence: GGAGAAA
  source 1..20: mol_type = other DNA
gcagggatgctgaatgcaag

SEQ ID NO: 6407 - DNA, 20 bp, synthetic construct
  misc_feature 1..20: note = Description of Artificial Sequence: Synthetic oligonucleotide
  misc_feature 1..20: note = Target: SCN10A; (+) strand; PAM type: NNAGAAW; PAM sequence: AAAGAAA
  source 1..20: mol_type = other DNA
ggatgctgaatgcaagggag

SEQ ID NO: 6408 - DNA, 20 bp, synthetic construct
  misc_feature 1..20: note = Description of Artificial Sequence: Synthetic oligonucleotide
  misc_feature 1..20: note = Target: SCN10A; (+) strand; PAM type: NNAGAAW; PAM sequence: TAAGAAT
  source 1..20: mol_type = other DNA
gcagtttacaaaaatgaaag

SEQ ID NO: 6409 - DNA, 20 bp, synthetic construct
  misc_feature 1..20: note = Description of Artificial Sequence: Synthetic oligonucleotide
  misc_feature 1..20: note = Target: SCN10A; (+) strand; PAM type: NNAGAAW; PAM sequence: AAAGAAT
  source 1..20: mol_type = other DNA
atcgccaacacacctctgaa

SEQ ID NO: 6410 - DNA, 20 bp, synthetic construct
  misc_feature 1..20: note = Description of Artificial Sequence: Synthetic oligonucleotide
  misc_feature 1..20: note = Target: SCN10A; (+) strand; PAM type: NNAGAAW; PAM sequence: AAAGAAT
  source 1..20: mol_type = other DNA
atcagactggtggagatgga

SEQ ID NO: 6411 - DNA, 20 bp, synthetic construct
  misc_feature 1..20: note = Description of Artificial Sequence: Synthetic oligonucleotide
  misc_feature 1..20: note = Target: SCN10A; (+) strand; PAM type: NNAGAAW; PAM sequence: TGAGAAA
  source 1..20: mol_type = other DNA
gataatatgagactatttac

SEQ ID NO: 6412 - DNA, 20 bp, synthetic construct
  misc_feature 1..20: note = Description of Artificial Sequence: Synthetic oligonucleotide
  misc_feature 1..20: note = Target: SCN10A; (+) strand; PAM type: NNAGAAW; PAM sequence: ATAGAAT
  source 1..20: mol_type = other DNA
gagaaaaatgtactgaggtt

SEQ ID NO: 6413 - DNA, 20 bp, synthetic construct
  misc_feature 1..20: note = Description of Artificial Sequence: Synthetic oligonucleotide
  misc_feature 1..20: note = Target: SCN10A; (+) strand; PAM type: NNAGAAW; PAM sequence: TGAGAAA
  source 1..20: mol_type = other DNA
tattttatgcataagcaaga

SEQ ID NO: 6414 - DNA, 20 bp, synthetic construct
  misc_feature 1..20: note = Description of Artificial Sequence: Synthetic oligonucleotide
  misc_feature 1..20: note = Target: SCN10A; (+) strand; PAM type: NNAGAAW; PAM sequence: GGAGAAA
  source 1..20: mol_type = other DNA
aaggagaagagcataggtgt

SEQ ID NO: 6415 - DNA, 20 bp, synthetic construct
  misc_feature 1..20: note = Description of Artificial Sequence: Synthetic oligonucleotide
  misc_feature 1..20: note = Target: SCN10A; (+) strand; PAM type: NNAGAAW; PAM sequence: TTAGAAA
  source 1..20: mol_type = other DNA
ttgggctttgacttcctcat

SEQ ID NO: 6416 - DNA, 20 bp, synthetic construct
  misc_feature 1..20: note = Description of Artificial Sequence: Synthetic oligonucleotide
  misc_feature 1..20: note = Target: SCN10A; (+) strand; PAM type: NNAGAAW; PAM sequence: TTAGAAA
  source 1..20: mol_type = other DNA
aagcatcacctgggagcttg

SEQ ID NO: 6417 - DNA, 20 bp, synthetic construct
  misc_feature 1..20: note = Description of Artificial Sequence: Synthetic oligonucleotide
  misc_feature 1..20: note = Target: SCN10A; (+) strand; PAM type: NNAGAAW; PAM sequence: TGAGAAT
  source 1..20: mol_type = other DNA
cctgccacagatttatggaa

SEQ ID NO: 6418 - DNA, 20 bp, synthetic construct
  misc_feature 1..20: note = Description of Artificial Sequence: Synthetic oligonucleotide
  misc_feature 1..20: note = Target: SCN10A; (+) strand; PAM type: NNAGAAW; PAM sequence: AGAGAAA
  source 1..20: mol_type = other DNA
ataatttctgctcctgctgc

SEQ ID NO: 6419 - DNA, 20 bp, synthetic construct
  misc_feature 1..20: note = Description of Artificial Sequence: Synthetic oligonucleotide
  misc_feature 1..20: note = Target: SCN10A; (+) strand; PAM type: NNAGAAW; PAM sequence: TTAGAAA
  source 1..20: mol_type = other DNA
aaaaatttttctttgtattt

SEQ ID NO: 6420 - DNA, 20 bp, synthetic construct
  misc_feature 1..20: note = Description of Artificial Sequence: Synthetic oligonucleotide
  misc_feature 1..20: note = Target: SCN10A; (+) strand; PAM type: NNAGAAW; PAM sequence: ATAGAAT
  source 1..20: mol_type = other DNA
ttgaggccacaattcccttt

SEQ ID NO: 6421 - DNA, 20 bp, synthetic construct
  misc_feature 1..20: note = Description of Artificial Sequence: Synthetic oligonucleotide
  misc_feature 1..20: note = Target: SCN10A; (+) strand; PAM type: NNAGAAW; PAM sequence: TGAGAAT
  source 1..20: mol_type = other DNA
ttcattgcacaaatatttat

SEQ ID NO: 6422 - DNA, 20 bp, synthetic construct
  misc_feature 1..20: note = Description of Artificial Sequence: Synthetic oligonucleotide
  misc_feature 1..20: note = Target: SCN10A; (+) strand; PAM type: NNAGAAW; PAM sequence: CAAGAAA
  source 1..20: mol_type = other DNA
tgcctagccggggtcatgga

SEQ ID NO: 6423 - DNA, 20 bp, synthetic construct
  misc_feature 1..20: note = Description of Artificial Sequence: Synthetic oligonucleotide
  misc_feature 1..20: note = Target: SCN10A; (+) strand; PAM type: NNAGAAW; PAM sequence: GCAGAAT
  source 1..20: mol_type = other DNA
aagaagcatgacatccacgt

SEQ ID NO: 6424 - DNA, 20 bp, synthetic construct
  misc_feature 1..20: note = Description of Artificial Sequence: Synthetic oligonucleotide
  misc_feature 1..20: note = Target: SCN10A; (+) strand; PAM type: NNAGAAW; PAM sequence: AGAGAAA
  source 1..20: mol_type = other DNA
gccccaggctacttttgcct

SEQ ID NO: 6425 - DNA, 20 bp, synthetic construct
  misc_feature 1..20: note = Description of Artificial Sequence: Synthetic oligonucleotide
  misc_feature 1..20: note = Target: SCN10A; (+) strand; PAM type: NNAGAAW; PAM sequence: AAAGAAA
  source 1..20: mol_type = other DNA
tagagaaaatgatgtggaca

SEQ ID NO: 6426 - DNA, 20 bp, synthetic construct
  misc_feature 1..20: note = Description of Artificial Sequence: Synthetic oligonucleotide
  misc_feature 1..20: note = Target: SCN10A; (+) strand; PAM type: NNAGAAW; PAM sequence: GGAGAAT
  source 1..20: mol_type = other DNA
tgtggacaaaagaaagtggg

SEQ ID NO: 6427 - DNA, 20 bp, synthetic construct
  misc_feature 1..20: note = Description of Artificial Sequence: Synthetic oligonucleotide
  misc_feature 1..20: note = Target: SCN10A; (+) strand; PAM type: NNAGAAW; PAM sequence: TAAGAAA
  source 1..20: mol_type = other DNA
gactttaaaaattcccagga

SEQ ID NO: 6428 - DNA, 20 bp, synthetic construct
  misc_feature 1..20: note = Description of Artificial Sequence: Synthetic oligonucleotide
  misc_feature 1..20: note = Target: SCN10A; (+) strand; PAM type: NNAGAAW; PAM sequence: TAAGAAT
  source 1..20: mol_type = other DNA
agctggctaaatgagtcaca

SEQ ID NO: 6429 - DNA, 20 bp, synthetic construct
  misc_feature 1..20: note = Description of Artificial Sequence: Synthetic oligonucleotide
  misc_feature 1..20: note = Target: SCN10A; (+) strand; PAM type: NNAGAAW; PAM sequence: AGAGAAA
  source 1..20: mol_type = other DNA
ttggacaacatcctgttctt

SEQ ID NO: 6430 - DNA, 20 bp, synthetic construct
  misc_feature 1..20: note = Description of Artificial Sequence: Synthetic oligonucleotide
  misc_feature 1..20: note = Target: SCN10A; (+) strand; PAM type: NNAGAAW; PAM sequence: TGAGAAA
  source 1..20: mol_type = other DNA
gttgtgaagacaaaatgata

SEQ ID NO: 6431 - DNA, 20 bp, synthetic construct
  misc_feature 1..20: note = Description of Artificial Sequence: Synthetic oligonucleotide
  misc_feature 1..20: note = Target: SCN10A; (+) strand; PAM type: NNAGAAW; PAM sequence: TAAGAAA
  source 1..20: mol_type = other DNA
ttggttgatgtccagggcaa

SEQ ID NO: 6432 - DNA, 20 bp, synthetic construct
  misc_feature 1..20: note = Description of Artificial Sequence: Synthetic oligonucleotide
  misc_feature 1..20: note = Target: SCN10A; (+) strand; PAM type: NNAGAAW; PAM sequence: GGAGAAA
  source 1..20: mol_type = other DNA
agctaggacctgtgcagctt

SEQ ID NO: 6433 - DNA, 20 bp, synthetic construct
  misc_feature 1..20: note = Description of Artificial Sequence: Synthetic oligonucleotide
  misc_feature 1..20: note = Target: SCN10A; (+) strand; PAM type: NNAGAAW; PAM sequence: CAAGAAA
  source 1..20: mol_type = other DNA
ttccctagcaccatcaccgt

SEQ ID NO: 6434 - DNA, 20 bp, synthetic construct
  misc_feature 1..20: note = Description of Artificial Sequence: Synthetic oligonucleotide
  misc_feature 1..20: note = Target: SCN10A; (+) strand; PAM type: NNAGAAW; PAM sequence: AGAGAAA
  source 1..20: mol_type = other DNA
gcttgaatacgcgcagctgc

SEQ ID NO: 6435 - DNA, 20 bp, synthetic construct
  misc_feature 1..20: note = Description of Artificial Sequence: Synthetic oligonucleotide
  misc_feature 1..20: note = Target: SCN10A; (+) strand; PAM type: NNAGAAW; PAM sequence: TGAGAAA
  source 1..20: mol_type = other DNA
ggaaccaatggtttagttac

SEQ ID NO: 6436 - DNA, 20 bp, synthetic construct
  misc_feature 1..20: note = Description of Artificial Sequence: Synthetic oligonucleotide
  misc_feature 1..20: note = Target: SCN10A; (+) strand; PAM type: NNAGAAW; PAM sequence: GGAGAAT
  source 1..20: mol_type = other DNA
atgaaccacaaacaatccca

SEQ ID NO: 6437 - DNA, 20 bp, synthetic construct
  misc_feature 1..20: note = Description of Artificial Sequence: Synthetic oligonucleotide
  misc_feature 1..20: note = Target: SCN10A; (+) strand; PAM type: NNAGAAW; PAM sequence: TGAGAAT
  source 1..20: mol_type = other DNA
actacctaggtattttaagt

SEQ ID NO: 6438 - DNA, 20 bp, synthetic construct
  misc_feature 1..20: note = Description of Artificial Sequence: Synthetic oligonucleotide
  misc_feature 1..20: note = Target: SCN10A; (+) strand; PAM type: NNAGAAW; PAM sequence: GCAGAAT
  source 1..20: mol_type = other DNA
gcaattctacaaagtgctct

SEQ ID NO: 6439 - DNA, 20 bp, synthetic construct
  misc_feature 1..20: note = Description of Artificial Sequence: Synthetic oligonucleotide
  misc_feature 1..20: note = Target: SCN10A; (+) strand; PAM type: NNAGAAW; PAM sequence: GAAGAAA
  source 1..20: mol_type = other DNA
tcaagagtgaatgagatctt

SEQ ID NO: 6440 - DNA, 20 bp, synthetic construct
  misc_feature 1..20: note = Description of Artificial Sequence: Synthetic oligonucleotide
  misc_feature 1..20: note = Target: SCN10A; (+) strand; PAM type: NNAGAAW; PAM sequence: ATAGAAT
  source 1..20: mol_type = other DNA
tcattccatttcttcagatg

SEQ ID NO: 6441 - DNA, 20 bp, synthetic construct
  misc_feature 1..20: note = Description of Artificial Sequence: Synthetic oligonucleotide
  misc_feature 1..20: note = Target: SCN10A; (+) strand; PAM type: NNAGAAW; PAM sequence: AAAGAAA
  source 1..20: mol_type = other DNA
ataattagatataatatgtt

SEQ ID NO: 6442 - DNA, 20 bp, synthetic construct
  misc_feature 1..20: note = Description of Artificial Sequence: Synthetic oligonucleotide
  misc_feature 1..20: note = Target: SCN10A; (+) strand; PAM type: NNAGAAW; PAM sequence: AGAGAAT
  source 1..20: mol_type = other DNA
aataacttgaaactatgtgc

SEQ ID NO: 6443 - DNA, 20 bp, synthetic construct
  misc_feature 1..20: note = Description of Artificial Sequence: Synthetic oligonucleotide
  misc_feature 1..20: note = Target: SCN10A; (+) strand; PAM type: NNAGAAW; PAM sequence: TTAGAAA
  source 1..20: mol_type = other DNA
aagttgtgaaaaatacactc

SEQ ID NO: 6444 - DNA, 20 bp, synthetic construct
  misc_feature 1..20: note = Description of Artificial Sequence: Synthetic oligonucleotide
  misc_feature 1..20: note = Target: SCN10A; (+) strand; PAM type: NNAGAAW; PAM sequence: AGAGAAT
  source 1..20: mol_type = other DNA
cagatttgacacagtttggg

SEQ ID NO: 6445 - DNA, 20 bp, synthetic construct
  misc_feature 1..20: note = Description of Artificial Sequence: Synthetic oligonucleotide
  misc_feature 1..20: note = Target: SCN10A; (+) strand; PAM type: NNAGAAW; PAM sequence: TCAGAAT
  source 1..20: mol_type = other DNA
attagtgaactgaggatata

SEQ ID NO: 6446 - DNA, 20 bp, synthetic construct
  misc_feature 1..20: note = Description of Artificial Sequence: Synthetic oligonucleotide
  misc_feature 1..20: note = Target: SCN10A; (+) strand; PAM type: NNAGAAW; PAM sequence: TCAGAAT
  source 1..20: mol_type = other DNA
gatatatcagaataaattat

SEQ ID NO: 6447 - DNA, 20 bp, synthetic construct
  misc_feature 1..20: note = Description of Artificial Sequence: Synthetic oligonucleotide
  misc_feature 1..20: note = Target: SCN10A; (+) strand; PAM type: NNAGAAW; PAM sequence: ATAGAAT
  source 1..20: mol_type = other DNA
tagtgtaagagacatagagg

SEQ ID NO: 6448 - DNA, 20 bp, synthetic construct
  misc_feature 1..20: note = Description of Artificial Sequence: Synthetic oligonucleotide
  misc_feature 1..20: note = Target: SCN10A; (+) strand; PAM type: NNAGAAW; PAM sequence: GGAGAAA
  source 1..20: mol_type = other DNA
tatctaaccaaagtccagaa

SEQ ID NO: 6449 - DNA, 20 bp, synthetic construct
  misc_feature 1..20: note = Description of Artificial Sequence: Synthetic oligonucleotide
  misc_feature 1..20: note = Target: SCN10A; (+) strand; PAM type: NNAGAAW; PAM sequence: ATAGAAT
  source 1..20: mol_type = other DNA
aaagtccagaaggagaaaaa

SEQ ID NO: 6450 - DNA, 20 bp, synthetic construct
  misc_feature 1..20: note = Description of Artificial Sequence: Synthetic oligonucleotide
  misc_feature 1..20: note = Target: SCN10A; (+) strand; PAM type: NNAGAAW; PAM sequence: CCAGAAT
  source 1..20: mol_type = other DNA
acatcatgtctgggaacttt

SEQ ID NO: 6451 - DNA, 20 bp, synthetic construct
  misc_feature 1..20: note = Description of Artificial Sequence: Synthetic oligonucleotide
  misc_feature 1..20: note = Target: SCN10A; (+) strand; PAM type: NNAGAAW; PAM sequence: GAAGAAA
  source 1..20: mol_type = other DNA
tctgggaactttccagaatt

SEQ ID NO: 6452 - DNA, 20 bp, synthetic construct
  misc_feature 1..20: note = Description of Artificial Sequence: Synthetic oligonucleotide
  misc_feature 1..20: note = Target: SCN10A; (+) strand; PAM type: NNAGAAW; PAM sequence: CCAGAAA
  source 1..20: mol_type = other DNA
atagaagatttaaaaagcat

SEQ ID NO: 6453 - DNA, 20 bp, synthetic construct
  misc_feature 1..20: note = Description of Artificial Sequence: Synthetic oligonucleotide
  misc_feature 1..20: note = Target: SCN10A; (+) strand; PAM type: NNAGAAW; PAM sequence: CTAGAAT
  source 1..20: mol_type = other DNA
gaaggaagataaagtatcaa

SEQ ID NO: 6454 - DNA, 20 bp, synthetic construct
  misc_feature 1..20: note = Description of Artificial Sequence: Synthetic oligonucleotide
  misc_feature 1..20: note = Target: SCN10A; (+) strand; PAM type: NNAGAAW; PAM sequence: TAAGAAA
  source 1..20: mol_type = other DNA
caactagaattttacattca

SEQ ID NO: 6455 - DNA, 20 bp, synthetic construct
  misc_feature 1..20: note = Description of Artificial Sequence: Synthetic oligonucleotide
  misc_feature 1..20: note = Target: SCN10A; (+) strand; PAM type: NNAGAAW; PAM sequence: AAAGAAA
  source 1..20: mol_type = other DNA
tggccagaaggcacttacta

SEQ ID NO: 6456 - DNA, 20 bp, synthetic construct
  misc_feature 1..20: note = Description of Artificial Sequence: Synthetic oligonucleotide
  misc_feature 1..20: note = Target: SCN10A; (+) strand; PAM type: NNAGAAW; PAM sequence: ATAGAAA
  source 1..20: mol_type = other DNA
aaaggaggtacttcaggtag

SEQ ID NO: 6457 - DNA, 20 bp, synthetic construct
  misc_feature 1..20: note = Description of Artificial Sequence: Synthetic oligonucleotide
  misc_feature 1..20: note = Target: SCN10A; (+) strand; PAM type: NNAGAAW; PAM sequence: CAAGAAT
  source 1..20: mol_type = other DNA
aatatgtaatgtgtaatata

SEQ ID NO: 6458 - DNA, 20 bp, synthetic construct
  misc_feature 1..20: note = Description of Artificial Sequence: Synthetic oligonucleotide
  misc_feature 1..20: note = Target: SCN10A; (+) strand; PAM type: NNAGAAW; PAM sequence: GAAGAAA
  source 1..20: mol_type = other DNA
aaactgtgctccaaagggtt

SEQ ID NO: 6459 - DNA, 20 bp, synthetic construct
  misc_feature 1..20: note = Description of Artificial Sequence: Synthetic oligonucleotide
  misc_feature 1..20: note = Target: SCN10A; (+) strand; PAM type: NNAGAAW; PAM sequence: TAAGAAA
  source 1..20: mol_type = other DNA
taggcttacaggataccaga

SEQ ID NO: 6460 - DNA, 20 bp, synthetic construct
  misc_feature 1..20: note = Description of Artificial Sequence: Synthetic oligonucleotide
  misc_feature 1..20: note = Target: SCN10A; (+) strand; PAM type: NNAGAAW; PAM sequence: TAAGAAA
  source 1..20: mol_type = other DNA
tcaaactgtgttccaaagag

SEQ ID NO: 6461 - DNA, 20 bp, synthetic construct
  misc_feature 1..20: note = Description of Artificial Sequence: Synthetic oligonucleotide
  misc_feature 1..20: note = Target: SCN10A; (+) strand; PAM type: NNAGAAW; PAM sequence: AAAGAAA
  source 1..20: mol_type = other DNA
ttttaggatagcagataggt

SEQ ID NO: 6462 - DNA, 20 bp, synthetic construct
  misc_feature 1..20: note = Description of Artificial Sequence: Synthetic oligonucleotide
  misc_feature 1..20: note = Target: SCN10A; (+) strand; PAM type: NNAGAAW; PAM sequence: GCAGAAT
  source 1..20: mol_type = other DNA
gatggccgactggagtttgt

SEQ ID NO: 6463 - DNA, 20 bp, synthetic construct
  misc_feature 1..20: note = Description of Artificial Sequence: Synthetic oligonucleotide
  misc_feature 1..20: note = Target: SCN10A; (+) strand; PAM type: NNAGAAW; PAM sequence: CAAGAAA
  source 1..20: mol_type = other DNA
tataacaaaggtataaagag

SEQ ID NO: 6464 - DNA, 20 bp, synthetic construct
  misc_feature 1..20: note = Description of Artificial Sequence: Synthetic oligonucleotide
  misc_feature 1..20: note = Target: SCN10A; (+) strand; PAM type: NNAGAAW; PAM sequence: GGAGAAA
  source 1..20: mol_type = other DNA
ttgtacttatcttgagtaat

SEQ ID NO: 6465 - DNA, 20 bp, synthetic construct
  misc_feature 1..20: note = Description of Artificial Sequence: Synthetic oligonucleotide
  misc_feature 1..20: note = Target: SCN10A; (+) strand; PAM type: NNAGAAW; PAM sequence: CAAGAAA
  source 1..20: mol_type = other DNA
ctatgttggtcaagacagta

SEQ ID NO: 6466 - DNA, 20 bp, synthetic construct
  misc_feature 1..20: note = Description of Artificial Sequence: Synthetic oligonucleotide
  misc_feature 1..20: note = Target: SCN10A; (+) strand; PAM type: NNAGAAW; PAM sequence: TAAGAAT
  source 1..20: mol_type = other DNA
ggaaagatttagctggttta

SEQ ID NO: 6467 - DNA, 20 bp, synthetic construct
  misc_feature 1..20: note = Description of Artificial Sequence: Synthetic oligonucleotide
  misc_feature 1..20: note = Target: SCN10A; (+) strand; PAM type: NNAGAAW; PAM sequence: AAAGAAA
  source 1..20: mol_type = other DNA
ttagctggtttataagaata

SEQ ID NO: 6468 - DNA, 20 bp, synthetic construct
  misc_feature 1..20: note = Description of Artificial Sequence: Synthetic oligonucleotide
  misc_feature 1..20: note = Target: SCN10A; (+) strand; PAM type: NNAGAAW; PAM sequence: AGAGAAA
  source 1..20: mol_type = other DNA
tagccactgtttcttgtgca

SEQ ID NO: 6469 - DNA, 20 bp, synthetic construct
  misc_feature 1..20: note = Description of Artificial Sequence: Synthetic oligonucleotide
  misc_feature 1..20: note = Target: SCN10A; (+) strand; PAM type: NNAGAAW; PAM sequence: AAAGAAA
  source 1..20: mol_type = other DNA
aggcatggggaaaggaaagc

SEQ ID NO: 6470 - DNA, 20 bp, synthetic construct
  misc_feature 1..20: note = Description of Artificial Sequence: Synthetic oligonucleotide
  misc_feature 1..20: note = Target: SCN10A; (+) strand; PAM type: NNAGAAW; PAM sequence: AAAGAAA
  source 1..20: mol_type = other DNA
gaacaattgagaactttgtc

SEQ ID NO: 6471 - DNA, 20 bp, synthetic construct
  misc_feature 1..20: note = Description of Artificial Sequence: Synthetic oligonucleotide
  misc_feature 1..20: note = Target: SCN10A; (+) strand; PAM type: NNAGAAW; PAM sequence: TGAGAAA
  source 1..20: mol_type = other DNA
gcattaggctatgatacgag

SEQ ID NO: 6472 - DNA, 20 bp, synthetic construct
  misc_feature 1..20: note = Description of Artificial Sequence: Synthetic oligonucleotide
  misc_feature 1..20: note = Target: SCN10A; (+) strand; PAM type: NNAGAAW; PAM sequence: TTAGAAA
  source 1..20: mol_type = other DNA
aatgtaaagttgatttaaca

SEQ ID NO: 6473 - DNA, 20 bp, synthetic construct
  misc_feature 1..20: note = Description of Artificial Sequence: Synthetic oligonucleotide
  misc_feature 1..20: note = Target: SCN10A; (+) strand; PAM type: NNAGAAW; PAM sequence: GGAGAAA
  source 1..20: mol_type = other DNA
caccactttaacagattgaa

SEQ ID NO: 6474 - DNA, 20 bp, synthetic construct
  misc_feature 1..20: note = Description of Artificial Sequence: Synthetic oligonucleotide
  misc_feature 1..20: note = Target: SCN10A; (+) strand; PAM type: NNAGAAW; PAM sequence: GTAGAAT
  source 1..20: mol_type = other DNA
acatgattatctcaatacat

SEQ ID NO: 6475 - DNA, 20 bp, synthetic construct
  misc_feature 1..20: note = Description of Artificial Sequence: Synthetic oligonucleotide
  misc_feature 1..20: note = Target: SCN10A; (+) strand; PAM type: NNAGAAW; PAM sequence: TCAGAAA
  source 1..20: mol_type = other DNA
tgaaaggattctttttggga

SEQ ID NO: 6476 - DNA, 20 bp, synthetic construct
  misc_feature 1..20: note = Description of Artificial Sequence: Synthetic oligonucleotide
  misc_feature 1..20: note = Target: SCN10A; (+) strand; PAM type: NNAGAAW; PAM sequence: TTAGAAA
  source 1..20: mol_type = other DNA
agaacctaatggcataagga

SEQ ID NO: 6477 - DNA, 20 bp, synthetic construct
  misc_feature 1..20: note = Description of Artificial Sequence: Synthetic oligonucleotide
  misc_feature 1..20: note = Target: SCN10A; (+) strand; PAM type: NNAGAAW; PAM sequence: GAAGAAA
  source 1..20: mol_type = other DNA
atggcataaggattagaaaa

SEQ ID NO: 6478 - DNA, 20 bp, synthetic construct
  misc_feature 1..20: note = Description of Artificial Sequence: Synthetic oligonucleotide
  misc_feature 1..20: note = Target: SCN10A; (+) strand; PAM type: NNAGAAW; PAM sequence: AAAGAAT
  source 1..20: mol_type = other DNA
cccgtctctactaaaaatac

SEQ ID NO: 6479 - DNA, 20 bp, synthetic construct
  misc_feature 1..20: note = Description of Artificial Sequence: Synthetic oligonucleotide
  misc_feature 1..20: note = Target: SCN10A; (+) strand; PAM type: NNAGAAW; PAM sequence: GGAGAAT
  source 1..20: mol_type = other DNA
ctactcaggaggctgaggca

SEQ ID NO: 6480 - DNA, 20 bp, synthetic construct
  misc_feature 1..20: note = Description of Artificial Sequence: Synthetic oligonucleotide
  misc_feature 1..20: note = Target: SCN10A; (+) strand; PAM type: NNAGAAW; PAM sequence: AAAGAAA
  source 1..20: mol_type = other DNA
ctcaaaaaaaaaaaaaaaaa

SEQ ID NO: 6481 - DNA, 20 bp, synthetic construct
  misc_feature 1..20: note = Description of Artificial Sequence: Synthetic oligonucleotide
  misc_feature 1..20: note = Target: SCN10A; (+) strand; PAM type: NNAGAAW; PAM sequence: AAAGAAA
  source 1..20: mol_type = other DNA
aaaaaaaaaaaaaaaaaaag

SEQ ID NO: 6482 - DNA, 20 bp, synthetic construct
  misc_feature 1..20: note = Description of Artificial Sequence: Synthetic oligonucleotide
  misc_feature 1..20: note = Target: SCN10A; (+) strand; PAM type: NNAGAAW; PAM sequence: GAAGAAA
  source 1..20: mol_type = other DNA
aaaaaaaaaaagaaagaaaa

SEQ ID NO: 6483 - DNA, 20 bp, synthetic construct
  misc_feature 1..20: note = Description of Artificial Sequence: Synthetic oligonucleotide
  misc_feature 1..20: note = Target: SCN10A; (+) strand; PAM type: NNAGAAW; PAM sequence: TTAGAAA
  source 1..20: mol_type = other DNA
tttcacatgatgtgattatg

SEQ ID NO: 6484 - DNA, 20 bp, synthetic construct
  misc_feature 1..20: note = Description of Artificial Sequence: Synthetic oligonucleotide
  misc_feature 1..20: note = Target: SCN10A; (+) strand; PAM type: NNAGAAW; PAM sequence: TTAGAAT
  source 1..20: mol_type = other DNA
aacattgtatagataaatta

SEQ ID NO: 6485 - DNA, 20 bp, synthetic construct
  misc_feature 1..20: note = Description of Artificial Sequence: Synthetic oligonucleotide
  misc_feature 1..20: note = Target: SCN10A; (+) strand; PAM type: NNAGAAW; PAM sequence: CCAGAAA
  source 1..20: mol_type = other DNA
caaaatgctagccaaaaatg

SEQ ID NO: 6486 - DNA, 20 bp, synthetic construct
  misc_feature 1..20: note = Description of Artificial Sequence: Synthetic oligonucleotide
  misc_feature 1..20: note = Target: SCN10A; (+) strand; PAM type: NNAGAAW; PAM sequence: GGAGAAA
  source 1..20: mol_type = other DNA
gaagatatgcaagatcctat

SEQ ID NO: 6487 - DNA, 20 bp, synthetic construct
  misc_feature 1..20: note = Description of Artificial Sequence: Synthetic oligonucleotide
  misc_feature 1..20: note = Target: SCN10A; (+) strand; PAM type: NNAGAAW; PAM sequence: CAAGAAA
  source 1..20: mol_type = other DNA
ccttgggataaaacggtaga

SEQ ID NO: 6488 - DNA, 20 bp, synthetic construct
  misc_feature 1..20: note = Description of Artificial Sequence: Synthetic oligonucleotide
  misc_feature 1..20: note = Target: SCN10A; (+) strand; PAM type: NNAGAAW; PAM sequence: TGAGAAT
  source 1..20: mol_type = other DNA
agtgcattgaacacagagtt

SEQ ID NO: 6489 - DNA, 20 bp, synthetic construct
  misc_feature 1..20: note = Description of Artificial Sequence: Synthetic oligonucleotide
  misc_feature 1..20: note = Target: SCN10A; (+) strand; PAM type: NNAGAAW; PAM sequence: AGAGAAA
  source 1..20: mol_type = other DNA
ctcaggtgcagacaaggtgg

SEQ ID NO: 6490 - DNA, 20 bp, synthetic construct
  misc_feature 1..20: note = Description of Artificial Sequence: Synthetic oligonucleotide
  misc_feature 1..20: note = Target: SCN10A; (+) strand; PAM type: NNAGAAW; PAM sequence: CAAGAAA
  source 1..20: mol_type = other DNA
gagggaagtggaatagatcc

SEQ ID NO: 6491 - DNA, 20 bp, synthetic construct
  misc_feature 1..20: note = Description of Artificial Sequence: Synthetic oligonucleotide
  misc_feature 1..20: note = Target: SCN10A; (+) strand; PAM type: NNAGAAW; PAM sequence: GCAGAAT
  source 1..20: mol_type = other DNA
ggacagggtagcattcccct

SEQ ID NO: 6492 - DNA, 20 bp, synthetic construct
  misc_feature 1..20: note = Description of Artificial Sequence: Synthetic oligonucleotide
  misc_feature 1..20: note = Target: SCN10A; (+) strand; PAM type: NNAGAAW; PAM sequence: GCAGAAA
  source 1..20: mol_type = other DNA
cttctgcttccccaagtgta

SEQ ID NO: 6493 - DNA, 20 bp, synthetic construct
  misc_feature 1..20: note = Description of Artificial Sequence: Synthetic oligonucleotide
  misc_feature 1..20: note = Target: SCN10A; (+) strand; PAM type: NNAGAAW; PAM sequence: TTAGAAA
  source 1..20: mol_type = other DNA
gcgcccagcctcgtatttta

SEQ ID NO: 6494 - DNA, 20 bp, synthetic construct
  misc_feature 1..20: note = Description of Artificial Sequence: Synthetic oligonucleotide
  misc_feature 1..20: note = Target: SCN10A; (+) strand; PAM type: NNAGAAW; PAM sequence: AGAGAAA
  source 1..20: mol_type = other DNA
acatcaatttctagatacct

SEQ ID NO: 6495 - DNA, 20 bp, synthetic construct
  misc_feature 1..20: note = Description of Artificial Sequence: Synthetic oligonucleotide
  misc_feature 1..20: note = Target: SCN10A; (+) strand; PAM type: NNAGAAW; PAM sequence: AGAGAAT
  source 1..20: mol_type = other DNA
atttcgggcacaagggaatc

SEQ ID NO: 6496 - DNA, 20 bp, synthetic construct
  misc_feature 1..20: note = Description of Artificial Sequence: Synthetic oligonucleotide
  misc_feature 1..20: note = Target: SCN10A; (+) strand; PAM type: NNAGAAW; PAM sequence: CCAGAAA
  source 1..20: mol_type = other DNA
gcagataagggagccaaggc

SEQ ID NO: 6497 - DNA, 20 bp, synthetic construct
  misc_feature 1..20: note = Description of Artificial Sequence: Synthetic oligonucleotide
  misc_feature 1..20: note = Target: SCN10A; (+) strand; PAM type: NNAGAAW; PAM sequence: AGAGAAA
  source 1..20: mol_type = other DNA
ggagtttccccaagccatca

SEQ ID NO: 6498 - DNA, 20 bp, synthetic construct
  misc_feature 1..20: note = Description of Artificial Sequence: Synthetic oligonucleotide
  misc_feature 1..20: note = Target: SCN10A; (+) strand; PAM type: NNAGAAW; PAM sequence: CAAGAAA
  source 1..20: mol_type = other DNA
ggcaatgataaaaatggcag

SEQ ID NO: 6499 - DNA, 20 bp, synthetic construct
  misc_feature 1..20: note = Description of Artificial Sequence: Synthetic oligonucleotide
  misc_feature 1..20: note = Target: SCN10A; (+) strand; PAM type: NNAGAAW; PAM sequence: ATAGAAA
  source 1..20: mol_type = other DNA
gaaaatgtcttatttacaaa

SEQ ID NO: 6500 - DNA, 20 bp, synthetic construct
  misc_feature 1..20: note = Description of Artificial Sequence: Synthetic oligonucleotide
  misc_feature 1..20: note = Target: SCN10A; (+) strand; PAM type: NNAGAAW; PAM sequence: ACAGAAT
  source 1..20: mol_type = other DNA
ccagggtaacagtcaacgtg

SEQ ID NO: 6501 - DNA, 20 bp, synthetic construct
  misc_feature 1..20: note = Description of Artificial Sequence: Synthetic oligonucleotide
  misc_feature 1..20: note = Target: SCN10A; (+) strand; PAM type: NNAGAAW; PAM sequence: ACAGAAT
  source 1..20: mol_type = other DNA
ctctaattgtcttaaatagg

SEQ ID NO: 6502 - DNA, 20 bp, synthetic construct
  misc_feature 1..20: note = Description of Artificial Sequence: Synthetic oligonucleotide
  misc_feature 1..20: note = Target: SCN10A; (+) strand; PAM type: NNAGAAW; PAM sequence: TGAGAAA
  source 1..20: mol_type = other DNA
atctgagcccctcaccagcc

SEQ ID NO: 6503 - DNA, 20 bp, synthetic construct
  misc_feature 1..20: note = Description of Artificial Sequence: Synthetic oligonucleotide
  misc_feature 1..20: note = Target: SCN10A; (+) strand; PAM type: NNAGAAW; PAM sequence: GAAGAAA
  source 1..20: mol_type = other DNA
caatgcatccttcttatgga

SEQ ID NO: 6504 - DNA, 20 bp, synthetic construct
  misc_feature 1..20: note = Description of Artificial Sequence: Synthetic oligonucleotide
  misc_feature 1..20: note = Target: SCN10A; (+) strand; PAM type: NNAGAAW; PAM sequence: GTAGAAT
  source 1..20: mol_type = other DNA
ttgcttccacttttctaact

SEQ ID NO: 6505 - DNA, 20 bp, synthetic construct
  misc_feature 1..20: note = Description of Artificial Sequence: Synthetic oligonucleotide
  misc_feature 1..20: note = Target: SCN10A; (+) strand; PAM type: NNAGAAW; PAM sequence: TAAGAAA
  source 1..20: mol_type = other DNA
aggtggcttaattcaggggt

SEQ ID NO: 6506 - DNA, 20 bp, synthetic construct
  misc_feature 1..20: note = Description of Artificial Sequence: Synthetic oligonucleotide
  misc_feature 1..20: note = Target: SCN10A; (+) strand; PAM type: NNAGAAW; PAM sequence: AAAGAAA
  source 1..20: mol_type = other DNA
tgatgtctaaactagatgcc

SEQ ID NO: 6507 - DNA, 20 bp, synthetic construct
  misc_feature 1..20: note = Description of Artificial Sequence: Synthetic oligonucleotide
  misc_feature 1..20: note = Target: SCN10A; (+) strand; PAM type: NNAGAAW; PAM sequence: CCAGAAA
  source 1..20: mol_type = other DNA
aaggtagaggcaactgagat

SEQ ID NO: 6508 - DNA, 20 bp, synthetic construct
  misc_feature 1..20: note = Description of Artificial Sequence: Synthetic oligonucleotide
  misc_feature 1..20: note = Target: SCN10A; (+) strand; PAM type: NNAGAAW; PAM sequence: AGAGAAT
  source 1..20: mol_type = other DNA
gggatccgtcacaagcccaa

SEQ ID NO: 6509 - DNA, 20 bp, synthetic construct
  misc_feature 1..20: note = Description of Artificial Sequence: Synthetic oligonucleotide
  misc_feature 1..20: note = Target: SCN10A; (+) strand; PAM type: NNAGAAW; PAM sequence: CCAGAAA
  source 1..20: mol_type = other DNA
gagccccagccttgccctgc

SEQ ID NO: 6510 - DNA, 20 bp, synthetic construct
  misc_feature 1..20: note = Description of Artificial Sequence: Synthetic oligonucleotide
  misc_feature 1..20: note = Target: SCN10A; (+) strand; PAM type: NNAGAAW; PAM sequence: TCAGAAT
  source 1..20: mol_type = other DNA
tgagctcccttttatttcac

SEQ ID NO: 6511 - DNA, 20 bp, synthetic construct
  misc_feature 1..20: note = Description of Artificial Sequence: Synthetic oligonucleotide
  misc_feature 1..20: note = Target: SCN10A; (+) strand; PAM type: NNAGAAW; PAM sequence: ACAGAAT
  source 1..20: mol_type = other DNA
tcttacccttataacatttg

SEQ ID NO: 6512 - DNA, 20 bp, synthetic construct
  misc_feature 1..20: note = Description of Artificial Sequence: Synthetic oligonucleotide
  misc_feature 1..20: note = Target: SCN10A; (+) strand; PAM type: NNAGAAW; PAM sequence: AAAGAAA
  source 1..20: mol_type = other DNA
agatatcagcctatgtgggc

SEQ ID NO: 6513 - DNA, 20 bp, synthetic construct
  misc_feature 1..20: note = Description of Artificial Sequence: Synthetic oligonucleotide
  misc_feature 1..20: note = Target: SCN10A; (+) strand; PAM type: NNAGAAW; PAM sequence: AAAGAAT
  source 1..20: mol_type = other DNA
aaagcataatacattgtgaa

SEQ ID NO: 6514 - DNA, 20 bp, synthetic construct
  misc_feature 1..20: note = Description of Artificial Sequence: Synthetic oligonucleotide
  misc_feature 1..20: note = Target: SCN10A; (+) strand; PAM type: NNAGAAW; PAM sequence: GTAGAAA
  source 1..20: mol_type = other DNA
gcagatttatttgtggtgat

SEQ ID NO: 6515 - DNA, 20 bp, synthetic construct
  misc_feature 1..20: note = Description of Artificial Sequence: Synthetic oligonucleotide
  misc_feature 1..20: note = Target: SCN10A; (+) strand; PAM type: NNAGAAW; PAM sequence: GAAGAAT
  source 1..20: mol_type = other DNA
atatgcatagaacattgctt

SEQ ID NO: 6516 - DNA, 20 bp, synthetic construct
  misc_feature 1..20: note = Description of Artificial Sequence: Synthetic oligonucleotide
  misc_feature 1..20: note = Target: SCN10A; (+) strand; PAM type: NNAGAAW; PAM sequence: AGAGAAA
  source 1..20: mol_type = other DNA
tgcacttgaaaaatcagttt

SEQ ID NO: 6517 - DNA, 20 bp, synthetic construct
  misc_feature 1..20: note = Description of Artificial Sequence: Synthetic oligonucleotide
  misc_feature 1..20: note = Target: SCN10A; (+) strand; PAM type: NNAGAAW; PAM sequence: TTAGAAA
  source 1..20: mol_type = other DNA
ttttaatcactgactggatt

SEQ ID NO: 6518 - DNA, 20 bp, synthetic construct
  misc_feature 1..20: note = Description of Artificial Sequence: Synthetic oligonucleotide
  misc_feature 1..20: note = Target: SCN10A; (+) strand; PAM type: NNAGAAW; PAM sequence: GAAGAAA
  source 1..20: mol_type = other DNA
ttggcctttctattctttct

SEQ ID NO: 6519 - DNA, 20 bp, synthetic construct
  misc_feature 1..20: note = Description of Artificial Sequence: Synthetic oligonucleotide
  misc_feature 1..20: note = Target: SCN10A; (+) strand; PAM type: NNAGAAW; PAM sequence: TCAGAAA
  source 1..20: mol_type = other DNA
gaagatgatgtgccctatgc

SEQ ID NO: 6520 - DNA, 20 bp, synthetic construct
  misc_feature 1..20: note = Description of Artificial Sequence: Synthetic oligonucleotide
  misc_feature 1..20: note = Target: SCN10A; (+) strand; PAM type: NNAGAAW; PAM sequence: ACAGAAA
  source 1..20: mol_type = other DNA
acaggctaaaaatctgaggc

SEQ ID NO: 6521 - DNA, 20 bp, synthetic construct
  misc_feature 1..20: note = Description of Artificial Sequence: Synthetic oligonucleotide
  misc_feature 1..20: note = Target: SCN10A; (+) strand; PAM type: NNAGAAW; PAM sequence: GCAGAAT
  source 1..20: mol_type = other DNA
cttgttgctatctcattctt

SEQ ID NO: 6522 - DNA, 20 bp, synthetic construct
  misc_feature 1..20: note = Description of Artificial Sequence: Synthetic oligonucleotide
  misc_feature 1..20: note = Target: SCN10A; (+) strand; PAM type: NNAGAAW; PAM sequence: AGAGAAT
  source 1..20: mol_type = other DNA
caaatttctgttcttcttgg

SEQ ID NO: 6523 - DNA, 20 bp, synthetic construct
  misc_feature 1..20: note = Description of Artificial Sequence: Synthetic oligonucleotide
  misc_feature 1..20: note = Target: SCN10A; (+) strand; PAM type: NNAGAAW; PAM sequence: AGAGAAT
  source 1..20: mol_type = other DNA
tcaacaaatgcttgttgata

SEQ ID NO: 6524 - DNA, 20 bp, synthetic construct
  misc_feature 1..20: note = Description of Artificial Sequence: Synthetic oligonucleotide
  misc_feature 1..20: note = Target: SCN10A; (+) strand; PAM type: NNAGAAW; PAM sequence: CGAGAAT
  source 1..20: mol_type = other DNA
ggaggaagcttaacagtttt

SEQ ID NO: 6525 - DNA, 20 bp, synthetic construct
  misc_feature 1..20: note = Description of Artificial Sequence: Synthetic oligonucleotide
  misc_feature 1..20: note = Target: SCN10A; (+) strand; PAM type: NNAGAAW; PAM sequence: CAAGAAA
  source 1..20: mol_type = other DNA
caaaacaaacaaacaaaaac

SEQ ID NO: 6526 - DNA, 20 bp, synthetic construct
  misc_feature 1..20: note = Description of Artificial Sequence: Synthetic oligonucleotide
  misc_feature 1..20: note = Target: SCN10A; (+) strand; PAM type: NNAGAAW; PAM sequence: CAAGAAA
  source 1..20: mol_type = other DNA
aaccaagaaacctatctggc

SEQ ID NO: 6527 - DNA, 20 bp, synthetic construct
  misc_feature 1..20: note = Description of Artificial Sequence: Synthetic oligonucleotide
  misc_feature 1..20: note = Target: SCN10A; (+) strand; PAM type: NNAGAAW; PAM sequence: AAAGAAA
  source 1..20: mol_type = other DNA
aagaaacctatctggccaag

SEQ ID NO: 6528 - DNA, 20 bp, synthetic construct
  misc_feature 1..20: note = Description of Artificial Sequence: Synthetic oligonucleotide
  misc_feature 1..20: note = Target: SCN10A; (+) strand; PAM type: NNAGAAW; PAM sequence: TGAGAAA
  source 1..20: mol_type = other DNA
tgatattaaataattatcaa

SEQ ID NO: 6529 - DNA, 20 bp, synthetic construct
  misc_feature 1..20: note = Description of Artificial Sequence: Synthetic oligonucleotide
  misc_feature 1..20: note = Target: SCN10A; (+) strand; PAM type: NNAGAAW; PAM sequence: TGAGAAA
  source 1..20: mol_type = other DNA
gagtctgtacacgttgttgt

SEQ ID NO: 6530 - DNA, 20 bp, synthetic construct
  misc_feature 1..20: note = Description of Artificial Sequence: Synthetic oligonucleotide
  misc_feature 1..20: note = Target: SCN10A; (+) strand; PAM type: NNAGAAW; PAM sequence: CAAGAAA
  source 1..20: mol_type = other DNA
aaagcacaaactcaggtatg

SEQ ID NO: 6531 - DNA, 20 bp, synthetic construct
  misc_feature 1..20: note = Description of Artificial Sequence: Synthetic oligonucleotide
  misc_feature 1..20: note = Target: SCN10A; (+) strand; PAM type: NNAGAAW; PAM sequence: CTAGAAA
  source 1..20: mol_type = other DNA
cttgccacctctggctttac

SEQ ID NO: 6532 - DNA, 20 bp, synthetic construct
  misc_feature 1..20: note = Description of Artificial Sequence: Synthetic oligonucleotide
  misc_feature 1..20: note = Target: SCN10A; (+) strand; PAM type: NNAGAAW; PAM sequence: GTAGAAT
  source 1..20: mol_type = other DNA
agtggattcccacttgattg

SEQ ID NO: 6533 - DNA, 20 bp, synthetic construct
  misc_feature 1..20: note = Description of Artificial Sequence: Synthetic oligonucleotide
  misc_feature 1..20: note = Target: SCN10A; (+) strand; PAM type: NNAGAAW; PAM sequence: CAAGAAA
  source 1..20: mol_type = other DNA
cagcataatgtgggcttgaa

SEQ ID NO: 6534 - DNA, 20 bp, synthetic construct
  misc_feature 1..20: note = Description of Artificial Sequence: Synthetic oligonucleotide
  misc_feature 1..20: note = Target: SCN10A; (+) strand; PAM type: NNAGAAW; PAM sequence: TAAGAAT
  source 1..20: mol_type = other DNA
agatggtggggcctaagaca

SEQ ID NO: 6535 - DNA, 20 bp, synthetic construct
  misc_feature 1..20: note = Description of Artificial Sequence: Synthetic oligonucleotide
  misc_feature 1..20: note = Target: SCN10A; (+) strand; PAM type: NNAGAAW; PAM sequence: CAAGAAA
  source 1..20: mol_type = other DNA
tcatctaagtattctgctga

SEQ ID NO: 6536 - DNA, 20 bp, synthetic construct
  misc_feature 1..20: note = Description of Artificial Sequence: Synthetic oligonucleotide
  misc_feature 1..20: note = Target: SCN10A; (+) strand; PAM type: NNAGAAW; PAM sequence: AAAGAAA
  source 1..20: mol_type = other DNA
tataaacagttaataaacat

SEQ ID NO: 6537 - DNA, 20 bp, synthetic construct
  misc_feature 1..20: note = Description of Artificial Sequence: Synthetic oligonucleotide
  misc_feature 1..20: note = Target: SCN10A; (+) strand; PAM type: NNAGAAW; PAM sequence: TTAGAAA
  source 1..20: mol_type = other DNA
tcatttaaccctccagctat

SEQ ID NO: 6538 - DNA, 20 bp, synthetic construct
  misc_feature 1..20: note = Description of Artificial Sequence: Synthetic oligonucleotide
  misc_feature 1..20: note = Target: SCN10A; (+) strand; PAM type: NNAGAAW; PAM sequence: CTAGAAT
  source 1..20: mol_type = other DNA
tcactagcctggtaatttaa

SEQ ID NO: 6539 - DNA, 20 bp, synthetic construct
  misc_feature 1..20: note = Description of Artificial Sequence: Synthetic oligonucleotide
  misc_feature 1..20: note = Target: SCN10A; (+) strand; PAM type: NNAGAAW; PAM sequence: TCAGAAT
  source 1..20: mol_type = other DNA
ttaactagaatgaatcaagg

SEQ ID NO: 6540 - DNA, 20 bp, synthetic construct
  misc_feature 1..20: note = Description of Artificial Sequence: Synthetic oligonucleotide
  misc_feature 1..20: note = Target: SCN10A; (+) strand; PAM type: NNAGAAW; PAM sequence: AGAGAAA
  source 1..20: mol_type = other DNA
cacatgataatctcaggaac

SEQ ID NO: 6541 - DNA, 20 bp, synthetic construct
  misc_feature 1..20: note = Description of Artificial Sequence: Synthetic oligonucleotide
  misc_feature 1..20: note = Target: SCN10A; (+) strand; PAM type: NNAGAAW; PAM sequence: CTAGAAA
  source 1..20: mol_type = other DNA
gagagggcaaatgaaaaaca

SEQ ID NO: 6542 - DNA, 20 bp, synthetic construct
  misc_feature 1..20: note = Description of Artificial Sequence: Synthetic oligonucleotide
  misc_feature 1..20: note = Target: SCN10A; (+) strand; PAM type: NNAGAAW; PAM sequence: TAAGAAA
  source 1..20: mol_type = other DNA
gcttctattcagatctgtcc

SEQ ID NO: 6543 - DNA, 20 bp, synthetic construct
  misc_feature 1..20: note = Description of Artificial Sequence: Synthetic oligonucleotide
  misc_feature 1..20: note = Target: SCN10A; (+) strand; PAM type: NNAGAAW; PAM sequence: CAAGAAA
  source 1..20: mol_type = other DNA
tttttctcatacctgtccaa

SEQ ID NO: 6544 - DNA, 20 bp, synthetic construct
  misc_feature 1..20: note = Description of Artificial Sequence: Synthetic oligonucleotide
  misc_feature 1..20: note = Target: SCN10A; (+) strand; PAM type: NNAGAAW; PAM sequence: TAAGAAA
  source 1..20: mol_type = other DNA
tggggacagagaagcactga

SEQ ID NO: 6545 - DNA, 20 bp, synthetic construct
  misc_feature 1..20: note = Description of Artificial Sequence: Synthetic oligonucleotide
  misc_feature 1..20: note = Target: SCN10A; (+) strand; PAM type: NNAGAAW; PAM sequence: GCAGAAT
  source 1..20: mol_type = other DNA
atataatttgcatcactact

SEQ ID NO: 6546 - DNA, 20 bp, synthetic construct
  misc_feature 1..20: note = Description of Artificial Sequence: Synthetic oligonucleotide
  misc_feature 1..20: note = Target: SCN10A; (+) strand; PAM type: NNAGAAW; PAM sequence: GTAGAAT
  source 1..20: mol_type = other DNA
tctatgtctgtaaaaaagga

SEQ ID NO: 6547 - DNA, 20 bp, synthetic construct
  misc_feature 1..20: note = Description of Artificial Sequence: Synthetic oligonucleotide
  misc_feature 1..20: note = Target: SCN10A; (+) strand; PAM type: NNAGAAW; PAM sequence: CTAGAAA
  source 1..20: mol_type = other DNA
gcgttttccagaggcgaggc

SEQ ID NO: 6548 - DNA, 20 bp, synthetic construct
  misc_feature 1..20: note = Description of Artificial Sequence: Synthetic oligonucleotide
  misc_feature 1..20: note = Target: SCN10A; (+) strand; PAM type: NNAGAAW; PAM sequence: AAAGAAA
  source 1..20: mol_type = other DNA
taggtatgcatggtggggaa

SEQ ID NO: 6549 - DNA, 20 bp, synthetic construct
  misc_feature 1..20: note = Description of Artificial Sequence: Synthetic oligonucleotide
  misc_feature 1..20: note = Target: SCN10A; (+) strand; PAM type: NNAGAAW; PAM sequence: GAAGAAT
  source 1..20: mol_type = other DNA
ggttgcagcctaatttcctg

SEQ ID NO: 6550 - DNA, 20 bp, synthetic construct
  misc_feature 1..20: note = Description of Artificial Sequence: Synthetic oligonucleotide
  misc_feature 1..20: note = Target: SCN10A; (+) strand; PAM type: NNAGAAW; PAM sequence: AGAGAAA
  source 1..20: mol_type = other DNA
ctgtgtggcttaaagttgcc

SEQ ID NO: 6551 - DNA, 20 bp, synthetic construct
  misc_feature 1..20: note = Description of Artificial Sequence: Synthetic oligonucleotide
  misc_feature 1..20: note = Target: SCN10A; (+) strand; PAM type: NNAGAAW; PAM sequence: AGAGAAT
  source 1..20: mol_type = other DNA
ttcataaacccagagccctc

SEQ ID NO: 6552 - DNA, 20 bp, synthetic construct
  misc_feature 1..20: note = Description of Artificial Sequence: Synthetic oligonucleotide
  misc_feature 1..20: note = Target: SCN10A; (+) strand; PAM type: NNAGAAW; PAM sequence: GGAGAAT
  source 1..20: mol_type = other DNA
tattactaagctactaaagt

SEQ ID NO: 6553 - DNA, 20 bp, synthetic construct
  misc_feature 1..20: note = Description of Artificial Sequence: Synthetic oligonucleotide
  misc_feature 1..20: note = Target: SCN10A; (+) strand; PAM type: NNAGAAW; PAM sequence: TGAGAAA
  source 1..20: mol_type = other DNA
cttccaatttttgaagcaaa

SEQ ID NO: 6554 - DNA, 20 bp, synthetic construct
  misc_feature 1..20: note = Description of Artificial Sequence: Synthetic oligonucleotide
  misc_feature 1..20: note = Target: SCN10A; (+) strand; PAM type: NNAGAAW; PAM sequence: GAAGAAA
  source 1..20: mol_type = other DNA
tgagcaccaagcaaaccaat

SEQ ID NO: 6555 - DNA, 20 bp, synthetic construct
  misc_feature 1..20: note = Description of Artificial Sequence: Synthetic oligonucleotide
  misc_feature 1..20: note = Target: SCN10A; (+) strand; PAM type: NNAGAAW; PAM sequence: GAAGAAA
  source 1..20: mol_type = other DNA
caaaccaatgaagaaactga

SEQ ID NO: 6556 - DNA, 20 bp, synthetic construct
  misc_feature 1..20: note = Description of Artificial Sequence: Synthetic oligonucleotide
  misc_feature 1..20: note = Target: SCN10A; (+) strand; PAM type: NNAGAAW; PAM sequence: TTAGAAT
  source 1..20: mol_type = other DNA
ctccttggccacgagttatt

SEQ ID NO: 6557 - DNA, 20 bp, synthetic construct
  misc_feature 1..20: note = Description of Artificial Sequence: Synthetic oligonucleotide
  misc_feature 1..20: note = Target: SCN10A; (+) strand; PAM type: NNAGAAW; PAM sequence: TTAGAAT
  source 1..20: mol_type = other DNA
atgtcttctgagtataagca

SEQ ID NO: 6558 - DNA, 20 bp, synthetic construct
  misc_feature 1..20: note = Description of Artificial Sequence: Synthetic oligonucleotide
  misc_feature 1..20: note = Target: SCN10A; (+) strand; PAM type: NNAGAAW; PAM sequence: ACAGAAT
  source 1..20: mol_type = other DNA
tgctaatctgtgtggggctg

SEQ ID NO: 6559 - DNA, 20 bp, synthetic construct
  misc_feature 1..20: note = Description of Artificial Sequence: Synthetic oligonucleotide
  misc_feature 1..20: note = Target: SCN10A; (+) strand; PAM type: NNAGAAW; PAM sequence: CAAGAAA
  source 1..20: mol_type = other DNA
gctgctcaaaaggggcaaag

SEQ ID NO: 6560 - DNA, 20 bp, synthetic construct
  misc_feature 1..20: note = Description of Artificial Sequence: Synthetic oligonucleotide
  misc_feature 1..20: note = Target: SCN10A; (+) strand; PAM type: NNAGAAW; PAM sequence: ATAGAAA
  source 1..20: mol_type = other DNA
agatattatctgtcagacct

SEQ ID NO: 6561 - DNA, 20 bp, synthetic construct
  misc_feature 1..20: note = Description of Artificial Sequence: Synthetic oligonucleotide
  misc_feature 1..20: note = Target: SCN10A; (+) strand; PAM type: NNAGAAW; PAM sequence: GCAGAAA
  source 1..20: mol_type = other DNA
tgcaaattttagagtgggag

SEQ ID NO: 6562 - DNA, 20 bp, synthetic construct
  misc_feature 1..20: note = Description of Artificial Sequence: Synthetic oligonucleotide
  misc_feature 1..20: note = Target: SCN10A; (+) strand; PAM type: NNAGAAW; PAM sequence: AAAGAAT
  source 1..20: mol_type = other DNA
agaaagttattatgggggga

SEQ ID NO: 6563 - DNA, 20 bp, synthetic construct
  misc_feature 1..20: note = Description of Artificial Sequence: Synthetic oligonucleotide
  misc_feature 1..20: note = Target: SCN10A; (+) strand; PAM type: NNAGAAW; PAM sequence: TCAGAAA
  source 1..20: mol_type = other DNA
gcaggaccttaggaaggagg

SEQ ID NO: 6564 - DNA, 20 bp, synthetic construct
  misc_feature 1..20: note = Description of Artificial Sequence: Synthetic oligonucleotide
  misc_feature 1..20: note = Target: SCN10A; (+) strand; PAM type: NNAGAAW; PAM sequence: TCAGAAA
  source 1..20: mol_type = other DNA
ataaaaaccacctcgacgca

SEQ ID NO: 6565 - DNA, 20 bp, synthetic construct
  misc_feature 1..20: note = Description of Artificial Sequence: Synthetic oligonucleotide
  misc_feature 1..20: note = Target: SCN10A; (+) strand; PAM type: NNAGAAW; PAM sequence: CAAGAAT
  source 1..20: mol_type = other DNA
ccctcaataggtcacttgca

SEQ ID NO: 6566 - DNA, 20 bp, synthetic construct
  misc_feature 1..20: note = Description of Artificial Sequence: Synthetic oligonucleotide
  misc_feature 1..20: note = Target: SCN10A; (+) strand; PAM type: NNAGAAW; PAM sequence: TGAGAAA
  source 1..20: mol_type = other DNA
tcctcacttagcttcttctt

SEQ ID NO: 6567 - DNA, 20 bp, synthetic construct
  misc_feature 1..20: note = Description of Artificial Sequence: Synthetic oligonucleotide
  misc_feature 1..20: note = Target: SCN10A; (+) strand; PAM type: NNAGAAW; PAM sequence: CAAGAAT
  source 1..20: mol_type = other DNA
ggctagtccagaacagtatc

SEQ ID NO: 6568 - DNA, 20 bp, synthetic construct
  misc_feature 1..20: note = Description of Artificial Sequence: Synthetic oligonucleotide
  misc_feature 1..20: note = Target: SCN10A; (+) strand; PAM type: NNAGAAW; PAM sequence: GTAGAAA
  source 1..20: mol_type = other DNA
gccaagatcaagttgaccag

SEQ ID NO: 6569 - DNA, 20 bp, synthetic construct
  misc_feature 1..20: note = Description of Artificial Sequence: Synthetic oligonucleotide
  misc_feature 1..20: note = Target: SCN10A; (+) strand; PAM type: NNAGAAW; PAM sequence: AGAGAAA
  source 1..20: mol_type = other DNA
ctgcaggttcaagggaaaga

SEQ ID NO: 6570 - DNA, 20 bp, synthetic construct
  misc_feature 1..20: note = Description of Artificial Sequence: Synthetic oligonucleotide
  misc_feature 1..20: note = Target: SCN10A; (+) strand; PAM type: NNAGAAW; PAM sequence: TCAGAAT
  source 1..20: mol_type = other DNA
gggacgctaatactttcacg

SEQ ID NO: 6571 - DNA, 20 bp, synthetic construct
  misc_feature 1..20: note = Description of Artificial Sequence: Synthetic oligonucleotide
  misc_feature 1..20: note = Target: SCN10A; (+) strand; PAM type: NNAGAAW; PAM sequence: TCAGAAA
  source 1..20: mol_type = other DNA
acagataaggaatctggggg

SEQ ID NO: 6572 - DNA, 20 bp, synthetic construct
  misc_feature 1..20: note = Description of Artificial Sequence: Synthetic oligonucleotide
  misc_feature 1..20: note = Target: SCN10A; (+) strand; PAM type: NNAGAAW; PAM sequence: GGAGAAA
  source 1..20: mol_type = other DNA
tgtcaatatatttattaaaa

SEQ ID NO: 6573 - DNA, 20 bp, synthetic construct
  misc_feature 1..20: note = Description of Artificial Sequence: Synthetic oligonucleotide
  misc_feature 1..20: note = Target: SCN10A; (+) strand; PAM type: NNAGAAW; PAM sequence: CCAGAAT
  source 1..20: mol_type = other DNA
agcaatgcctcgtttgaagt

SEQ ID NO: 6574 - DNA, 20 bp, synthetic construct
  misc_feature 1..20: note = Description of Artificial Sequence: Synthetic oligonucleotide
  misc_feature 1..20: note = Target: SCN10A; (+) strand; PAM type: NNAGAAW; PAM sequence: GTAGAAA
  source 1..20: mol_type = other DNA
gccttgtttctatgtcttct

SEQ ID NO: 6575 - DNA, 20 bp, synthetic construct
  misc_feature 1..20: note = Description of Artificial Sequence: Synthetic oligonucleotide
  misc_feature 1..20: note = Target: SCN10A; (+) strand; PAM type: NNAGAAW; PAM sequence: TGAGAAA
  source 1..20: mol_type = other DNA
ctgctctggagccattgcct

SEQ ID NO: 6576 - DNA, 20 bp, synthetic construct
  misc_feature 1..20: note = Description of Artificial Sequence: Synthetic oligonucleotide
  misc_feature 1..20: note = Target: SCN10A; (+) strand; PAM type: NNAGAAW; PAM sequence: TGAGAAA
  source 1..20: mol_type = other DNA
agcatctttatgtctatgaa

SEQ ID NO: 6577 - DNA, 20 bp, synthetic construct
  misc_feature 1..20: note = Description of Artificial Sequence: Synthetic oligonucleotide
  misc_feature 1..20: note = Target: SCN10A; (+) strand; PAM type: NNAGAAW; PAM sequence: ACAGAAA
  source 1..20: mol_type = other DNA
ttataggctggatttggccc

SEQ ID NO: 6578 - DNA, 20 bp, synthetic construct
  misc_feature 1..20: note = Description of Artificial Sequence: Synthetic oligonucleotide
  misc_feature 1..20: note = Target: SCN10A; (+) strand; PAM type: NNAGAAW; PAM sequence: TAAGAAT
  source 1..20: mol_type = other DNA
tgttatgaatctggcctctg

SEQ ID NO: 6579 - DNA, 20 bp, synthetic construct
  misc_feature 1..20: note = Description of Artificial Sequence: Synthetic oligonucleotide
  misc_feature 1..20: note = Target: SCN10A; (+) strand; PAM type: NNAGAAW; PAM sequence: ATAGAAT
  source 1..20: mol_type = other DNA
cttgtgagggtaatgtggct

SEQ ID NO: 6580 - DNA, 20 bp, synthetic construct
  misc_feature 1..20: note = Description of Artificial Sequence: Synthetic oligonucleotide
  misc_feature 1..20: note = Target: SCN10A; (+) strand; PAM type: NNAGAAW; PAM sequence: CAAGAAT
  source 1..20: mol_type = other DNA
ggactgcaacttgctttagt

SEQ ID NO: 6581 - DNA, 20 bp, synthetic construct
  misc_feature 1..20: note = Description of Artificial Sequence: Synthetic oligonucleotide
  misc_feature 1..20: note = Target: SCN10A; (+) strand; PAM type: NNAGAAW; PAM sequence: TCAGAAT
  source 1..20: mol_type = other DNA
ttgctttagtcaagaatgta

SEQ ID NO: 6582 - DNA, 20 bp, synthetic construct
  misc_feature 1..20: note = Description of Artificial Sequence: Synthetic oligonucleotide
  misc_feature 1..20: note = Target: SCN10A; (+) strand; PAM type: NNAGAAW; PAM sequence: ACAGAAT
  source 1..20: mol_type = other DNA
ccagtccaaaatgctgatgc

SEQ ID NO: 6583 - DNA, 20 bp, synthetic construct
  misc_feature 1..20: note = Description of Artificial Sequence: Synthetic oligonucleotide
  misc_feature 1..20: note = Target: SCN10A; (+) strand; PAM type: NNAGAAW; PAM sequence: GAAGAAA
  source 1..20: mol_type = other DNA
tatttatgtagatatctgct

SEQ ID NO: 6584 - DNA, 20 bp, synthetic construct
  misc_feature 1..20: note = Description of Artificial Sequence: Synthetic oligonucleotide
  misc_feature 1..20: note = Target: SCN10A; (+) strand; PAM type: NNAGAAW; PAM sequence: GAAGAAA
  source 1..20: mol_type = other DNA
tagatatctgctgaagaaag

SEQ ID NO: 6585 - DNA, 20 bp, synthetic construct
  misc_feature 1..20: note = Description of Artificial Sequence: Synthetic oligonucleotide
  misc_feature 1..20: note = Target: SCN10A; (+) strand; PAM type: NNAGAAW; PAM sequence: AAAGAAA
  source 1..20: mol_type = other DNA
atctgctgaagaaaggaaga

SEQ ID NO: 6586 - DNA, 20 bp, synthetic construct
  misc_feature 1..20: note = Description of Artificial Sequence: Synthetic oligonucleotide
  misc_feature 1..20: note = Target: SCN10A; (+) strand; PAM type: NNAGAAW; PAM sequence: GTAGAAT
  source 1..20: mol_type = other DNA
ctcaatctcccccagcagag

SEQ ID NO: 6587 - DNA, 20 bp, synthetic construct
  misc_feature 1..20: note = Description of Artificial Sequence: Synthetic oligonucleotide
  misc_feature 1..20: note = Target: SCN10A; (+) strand; PAM type: NNAGAAW; PAM sequence: ATAGAAT
  source 1..20: mol_type = other DNA
gggatgctgagcaacaggaa

SEQ ID NO: 6588 - DNA, 20 bp, synthetic construct
  misc_feature 1..20: note = Description of Artificial Sequence: Synthetic oligonucleotide
  misc_feature 1..20: note = Target: SCN10A; (+) strand; PAM type: NNAGAAW; PAM sequence: AGAGAAA
  source 1..20: mol_type = other DNA
agagagagagagagagagag

SEQ ID NO: 6589 - DNA, 20 bp, synthetic construct
  misc_feature 1..20: note = Description of Artificial Sequence: Synthetic oligonucleotide
  misc_feature 1..20: note = Target: SCN10A; (+) strand; PAM type: NNAGAAW; PAM sequence: AGAGAAA
  source 1..20: mol_type = other DNA
agtgaaacaaaaatagacca

SEQ ID NO: 6590 - DNA, 20 bp, synthetic construct
  misc_feature 1..20: note = Description of Artificial Sequence: Synthetic oligonucleotide
  misc_feature 1..20: note = Target: SCN10A; (+) strand; PAM type: NNAGAAW; PAM sequence: AAAGAAA
  source 1..20: mol_type = other DNA
aaacaaaaatagaccaagag

SEQ ID NO: 6591 - DNA, 20 bp, synthetic construct
  misc_feature 1..20: note = Description of Artificial Sequence: Synthetic oligonucleotide
  misc_feature 1..20: note = Target: SCN10A; (+) strand; PAM type: NNAGAAW; PAM sequence: AAAGAAA
  source 1..20: mol_type = other DNA
aaatagaccaagagaaagaa

SEQ ID NO: 6592 - DNA, 20 bp, synthetic construct
  misc_feature 1..20: note = Description of Artificial Sequence: Synthetic oligonucleotide
  misc_feature 1..20: note = Target: SCN10A; (+) strand; PAM type: NNAGAAW; PAM sequence: AGAGAAA
  source 1..20: mol_type = other DNA
aaagaaaaagaaagagacac

SEQ ID NO: 6593 - DNA, 20 bp, synthetic construct
  misc_feature 1..20: note = Description of Artificial Sequence: Synthetic oligonucleotide
  misc_feature 1..20: note = Target: SCN10A; (+) strand; PAM type: NNAGAAW; PAM sequence: ATAGAAA
  source 1..20: mol_type = other DNA
acagagaggtgagtttagca

SEQ ID NO: 6594 - DNA, 20 bp, synthetic construct
  misc_feature 1..20: note = Description of Artificial Sequence: Synthetic oligonucleotide
  misc_feature 1..20: note = Target: SCN10A; (+) strand; PAM type: NNAGAAW; PAM sequence: TAAGAAA
  source 1..20: mol_type = other DNA
ttagcaatagaaagagacta

SEQ ID NO: 6595 - DNA, 20 bp, synthetic construct
  misc_feature 1..20: note = Description of Artificial Sequence: Synthetic oligonucleotide
  misc_feature 1..20: note = Target: SCN10A; (+) strand; PAM type: NNAGAAW; PAM sequence: GCAGAAA
  source 1..20: mol_type = other DNA
ggagagcagcttcgcaggta

SEQ ID NO: 6596 - DNA, 20 bp, synthetic construct
  misc_feature 1..20: note = Description of Artificial Sequence: Synthetic oligonucleotide
  misc_feature 1..20: note = Target: SCN10A; (+) strand; PAM type: NNAGAAW; PAM sequence: CAAGAAA
  source 1..20: mol_type = other DNA
tctttccctgcagagccaga

SEQ ID NO: 6597 - DNA, 20 bp, synthetic construct
  misc_feature 1..20: note = Description of Artificial Sequence: Synthetic oligonucleotide
  misc_feature 1..20: note = Target: SCN10A; (+) strand; PAM type: NNAGAAW; PAM sequence: GTAGAAA
  source 1..20: mol_type = other DNA
gcagagccagacaagaaatg

SEQ ID NO: 6598 - DNA, 20 bp, synthetic construct
  misc_feature 1..20: note = Description of Artificial Sequence: Synthetic oligonucleotide
  misc_feature 1..20: note = Target: SCN10A; (+) strand; PAM type: NNAGAAW; PAM sequence: CTAGAAT
  source 1..20: mol_type = other DNA
tggtagaaaagacttccact

SEQ ID NO: 6599 - DNA, 20 bp, synthetic construct
  misc_feature 1..20: note = Description of Artificial Sequence: Synthetic oligonucleotide
  misc_feature 1..20: note = Target: SCN10A; (+) strand; PAM type: NNAGAAW; PAM sequence: TCAGAAA
  source 1..20: mol_type = other DNA
gggaagcatcaagtcccatt

SEQ ID NO: 6600 - DNA, 20 bp, synthetic construct
  misc_feature 1..20: note = Description of Artificial Sequence: Synthetic oligonucleotide
  misc_feature 1..20: note = Target: SCN10A; (+) strand; PAM type: NNAGAAW; PAM sequence: CAAGAAT
  source 1..20: mol_type = other DNA
gtttctgaattctcagtaat

SEQ ID NO: 6601 - DNA, 20 bp, synthetic construct
  misc_feature 1..20: note = Description of Artificial Sequence: Synthetic oligonucleotide
  misc_feature 1..20: note = Target: SCN10A; (+) strand; PAM type: NNAGAAW; PAM sequence: ACAGAAA
  source 1..20: mol_type = other DNA
gcctgaatcccacaaccaga

SEQ ID NO: 6602 - DNA, 20 bp, synthetic construct
  misc_feature 1..20: note = Description of Artificial Sequence: Synthetic oligonucleotide
  misc_feature 1..20: note = Target: SCN10A; (+) strand; PAM type: NNAGAAW; PAM sequence: ACAGAAA
  source 1..20: mol_type = other DNA
ataaatgctcacctgggatc

SEQ ID NO: 6603 - DNA, 20 bp, synthetic construct
  misc_feature 1..20: note = Description of Artificial Sequence: Synthetic oligonucleotide
  misc_feature 1..20: note = Target: SCN10A; (+) strand; PAM type: NNAGAAW; PAM sequence: CTAGAAA
  source 1..20: mol_type = other DNA
taacctggggtatcattagc

SEQ ID NO: 6604 - DNA, 20 bp, synthetic construct
  misc_feature 1..20: note = Description of Artificial Sequence: Synthetic oligonucleotide
  misc_feature 1..20: note = Target: SCN10A; (+) strand; PAM type: NNAGAAW; PAM sequence: GCAGAAT
  source 1..20: mol_type = other DNA
atcattagcctagaaaggat

SEQ ID NO: 6605 - DNA, 20 bp, synthetic construct
  misc_feature 1..20: note = Description of Artificial Sequence: Synthetic oligonucleotide
  misc_feature 1..20: note = Target: SCN10A; (+) strand; PAM type: NNAGAAW; PAM sequence: TTAGAAT
  source 1..20: mol_type = other DNA
aaaggatgcagaatggacac

SEQ ID NO: 6606 - DNA, 20 bp, synthetic construct
  misc_feature 1..20: note = Description of Artificial Sequence: Synthetic oligonucleotide
  misc_feature 1..20: note = Target: SCN10A; (+) strand; PAM type: NNAGAAW; PAM sequence: ACAGAAA
  source 1..20: mol_type = other DNA
aacaggtggtgttgggttgc

SEQ ID NO: 6607 - DNA, 20 bp, synthetic construct
  misc_feature 1..20: note = Description of Artificial Sequence: Synthetic oligonucleotide
  misc_feature 1..20: note = Target: SCN10A; (+) strand; PAM type: NNAGAAW; PAM sequence: TTAGAAT
  source 1..20: mol_type = other DNA
ctattcctgagttacttcat

SEQ ID NO: 6608 - DNA, 20 bp, synthetic construct
  misc_feature 1..20: note = Description of Artificial Sequence: Synthetic oligonucleotide
  misc_feature 1..20: note = Target: SCN10A; (+) strand; PAM type: NNAGAAW; PAM sequence: TGAGAAT
  source 1..20: mol_type = other DNA
gccatttatatatcttcttt

SEQ ID NO: 6609 - DNA, 20 bp, synthetic construct
  misc_feature 1..20: note = Description of Artificial Sequence: Synthetic oligonucleotide
  misc_feature 1..20: note = Target: SCN10A; (+) strand; PAM type: NNAGAAW; PAM sequence: CTAGAAT
  source 1..20: mol_type = other DNA
agtttttccaatgttatctt

SEQ ID NO: 6610 - DNA, 20 bp, synthetic construct
  misc_feature 1..20: note = Description of Artificial Sequence: Synthetic oligonucleotide
  misc_feature 1..20: note = Target: SCN10A; (+) strand; PAM type: NNAGAAW; PAM sequence: GAAGAAT
  source 1..20: mol_type = other DNA
gttgttatttctatttctgt

SEQ ID NO: 6611 - DNA, 20 bp, synthetic construct
  misc_feature 1..20: note = Description of Artificial Sequence: Synthetic oligonucleotide
  misc_feature 1..20: note = Target: SCN10A; (+) strand; PAM type: NNAGAAW; PAM sequence: GTAGAAA
  source 1..20: mol_type = other DNA
agtgttttgtagttttcctt

SEQ ID NO: 6612 - DNA, 20 bp, synthetic construct
  misc_feature 1..20: note = Description of Artificial Sequence: Synthetic oligonucleotide
  misc_feature 1..20: note = Target: SCN10A; (+) strand; PAM type: NNAGAAW; PAM sequence: ATAGAAA
  source 1..20: mol_type = other DNA
gacttccagtactatgttgg

SEQ ID NO: 6613 - DNA, 20 bp, synthetic construct
  misc_feature 1..20: note = Description of Artificial Sequence: Synthetic oligonucleotide
  misc_feature 1..20: note = Target: SCN10A; (+) strand; PAM type: NNAGAAW; PAM sequence: ATAGAAT
  source 1..20: mol_type = other DNA
aattcttctttgaatgtctg

SEQ ID NO: 6614 - DNA, 20 bp, synthetic construct
  misc_feature 1..20: note = Description of Artificial Sequence: Synthetic oligonucleotide
  misc_feature 1..20: note = Target: SCN10A; (+) strand; PAM type: NNAGAAW; PAM sequence: AGAGAAT
  source 1..20: mol_type = other DNA
tctatcacgtggtctatctt

SEQ ID NO: 6615 - DNA, 20 bp, synthetic construct
  misc_feature 1..20: note = Description of Artificial Sequence: Synthetic oligonucleotide
  misc_feature 1..20: note = Target: SCN10A; (+) strand; PAM type: NNAGAAW; PAM sequence: AAAGAAT
  source 1..20: mol_type = other DNA
aatattccatgtgctgatga

SEQ ID NO: 6616 - DNA, 20 bp, synthetic construct
  misc_feature 1..20: note = Description of Artificial Sequence: Synthetic oligonucleotide
  misc_feature 1..20: note = Target: SCN10A; (+) strand; PAM type: NNAGAAW; PAM sequence: GTAGAAT
  source 1..20: mol_type = other DNA
gtatattctgcagttgtttg

SEQ ID NO: 6617 - DNA, 20 bp, synthetic construct
  misc_feature 1..20: note = Description of Artificial Sequence: Synthetic oligonucleotide
  misc_feature 1..20: note = Target: SCN10A; (+) strand; PAM type: NNAGAAW; PAM sequence: TAAGAAT
  source 1..20: mol_type = other DNA
aaggtctgttttctctgata

SEQ ID NO: 6618 - DNA, 20 bp, synthetic construct
  misc_feature 1..20: note = Description of Artificial Sequence: Synthetic oligonucleotide
  misc_feature 1..20: note = Target: SCN10A; (+) strand; PAM type: NNAGAAW; PAM sequence: TTAGAAT
  source 1..20: mol_type = other DNA
ttaaggttttatttcaagat

SEQ ID NO: 6619 - DNA, 20 bp, synthetic construct
  misc_feature 1..20: note = Description of Artificial Sequence: Synthetic oligonucleotide
  misc_feature 1..20: note = Target: SCN10A; (+) strand; PAM type: NNAGAAW; PAM sequence: TGAGAAA
  source 1..20: mol_type = other DNA
ctggcttgcaaggtttcagt

SEQ ID NO: 6620 - DNA, 20 bp, synthetic construct
  misc_feature 1..20: note = Description of Artificial Sequence: Synthetic oligonucleotide
  misc_feature 1..20: note = Target: SCN10A; (+) strand; PAM type: NNAGAAW; PAM sequence: GGAGAAT
  source 1..20: mol_type = other DNA
ttctttatatctatttctct

SEQ ID NO: 6621 - DNA, 20 bp, synthetic construct
  misc_feature 1..20: note = Description of Artificial Sequence: Synthetic oligonucleotide
  misc_feature 1..20: note = Target: SCN10A; (+) strand; PAM type: NNAGAAW; PAM sequence: CCAGAAT
  source 1..20: mol_type = other DNA
aaccctcttttgtcatatta

SEQ ID NO: 6622 - DNA, 20 bp, synthetic construct
  misc_feature 1..20: note = Description of Artificial Sequence: Synthetic oligonucleotide
  misc_feature 1..20: note = Target: SCN10A; (+) strand; PAM type: NNAGAAW; PAM sequence: AGAGAAA
  source 1..20: mol_type = other DNA
tcatttgagtagactatttc

SEQ ID NO: 6623 - DNA, 20 bp, synthetic construct
  misc_feature 1..20: note = Description of Artificial Sequence: Synthetic oligonucleotide
  misc_feature 1..20: note = Target: SCN10A; (+) strand; PAM type: NNAGAAW; PAM sequence: TGAGAAA
  source 1..20: mol_type = other DNA
caggctgtgagcttccccac

SEQ ID NO: 6624 - DNA, 20 bp, synthetic construct
  misc_feature 1..20: note = Description of Artificial Sequence: Synthetic oligonucleotide
  misc_feature 1..20: note = Target: SCN10A; (+) strand; PAM type: NNAGAAW; PAM sequence: AAAGAAA
  source 1..20: mol_type = other DNA
ctgtgagcttccccactgag

SEQ ID NO: 6625 - DNA, 20 bp, synthetic construct
  misc_feature 1..20: note = Description of Artificial Sequence: Synthetic oligonucleotide
  misc_feature 1..20: note = Target: SCN10A; (+) strand; PAM type: NNAGAAW; PAM sequence: CAAGAAA
  source 1..20: mol_type = other DNA
tttgccccctggattctgct

SEQ ID NO: 6626 - DNA, 20 bp, synthetic construct
  misc_feature 1..20: note = Description of Artificial Sequence: Synthetic oligonucleotide
  misc_feature 1..20: note = Target: SCN10A; (+) strand; PAM type: NNAGAAW; PAM sequence: GCAGAAT
  source 1..20: mol_type = other DNA
cacagtttttcacctgtctt

SEQ ID NO: 6627 - DNA, 20 bp, synthetic construct
  misc_feature 1..20: note = Description of Artificial Sequence: Synthetic oligonucleotide
  misc_feature 1..20: note = Target: SCN10A; (+) strand; PAM type: NNAGAAW; PAM sequence: GTAGAAA
  source 1..20: mol_type = other DNA
agacatatctgggaaggagg

SEQ ID NO: 6628 - DNA, 20 bp, synthetic construct
  misc_feature 1..20: note = Description of Artificial Sequence: Synthetic oligonucleotide
  misc_feature 1..20: note = Target: SCN10A; (+) strand; PAM type: NNAGAAW; PAM sequence: CAAGAAA
  source 1..20: mol_type = other DNA
atgacctgctctgactgctc

SEQ ID NO: 6629 - DNA, 20 bp, synthetic construct
  misc_feature 1..20: note = Description of Artificial Sequence: Synthetic oligonucleotide
  misc_feature 1..20: note = Target: SCN10A; (+) strand; PAM type: NNAGAAW; PAM sequence: AAAGAAT
  source 1..20: mol_type = other DNA
tgctccaagaaaaaacatgc

SEQ ID NO: 6630 - DNA, 20 bp, synthetic construct
  misc_feature 1..20: note = Description of Artificial Sequence: Synthetic oligonucleotide
  misc_feature 1..20: note = Target: SCN10A; (+) strand; PAM type: NNAGAAW; PAM sequence: TTAGAAA
  source 1..20: mol_type = other DNA
catctaaaaactcccagttt

SEQ ID NO: 6631 - DNA, 20 bp, synthetic construct
  misc_feature 1..20: note = Description of Artificial Sequence: Synthetic oligonucleotide
  misc_feature 1..20: note = Target: SCN10A; (+) strand; PAM type: NNAGAAW; PAM sequence: TAAGAAA
  source 1..20: mol_type = other DNA
ggtaactgacagagcagacc

SEQ ID NO: 6632 - DNA, 20 bp, synthetic construct
  misc_feature 1..20: note = Description of Artificial Sequence: Synthetic oligonucleotide
  misc_feature 1..20: note = Target: SCN10A; (+) strand; PAM type: NNAGAAW; PAM sequence: AAAGAAT
  source 1..20: mol_type = other DNA
gagggtgataagtagggctg

SEQ ID NO: 6633 - DNA, 20 bp, synthetic construct
  misc_feature 1..20: note = Description of Artificial Sequence: Synthetic oligonucleotide
  misc_feature 1..20: note = Target: SCN10A; (+) strand; PAM type: NNAGAAW; PAM sequence: TGAGAAA
  source 1..20: mol_type = other DNA
gctttatgccatccattcaa

SEQ ID NO: 6634 - DNA, 20 bp, synthetic construct
  misc_feature 1..20: note = Description of Artificial Sequence: Synthetic oligonucleotide
  misc_feature 1..20: note = Target: SCN10A; (+) strand; PAM type: NNAGAAW; PAM sequence: CCAGAAA
  source 1..20: mol_type = other DNA
aatgagaaactgtttctgct

SEQ ID NO: 6635 - DNA, 20 bp, synthetic construct
  misc_feature 1..20: note = Description of Artificial Sequence: Synthetic oligonucleotide
  misc_feature 1..20: note = Target: SCN10A; (+) strand; PAM type: NNAGAAW; PAM sequence: AAAGAAA
  source 1..20: mol_type = other DNA
gcatactgaaaaatgcatat

SEQ ID NO: 6636 - DNA, 20 bp, synthetic construct
  misc_feature 1..20: note = Description of Artificial Sequence: Synthetic oligonucleotide
  misc_feature 1..20: note = Target: SCN10A; (+) strand; PAM type: NNAGAAW; PAM sequence: CCAGAAA
  source 1..20: mol_type = other DNA
tttgaaggatgcttctaaca

SEQ ID NO: 6637 - DNA, 20 bp, synthetic construct
  misc_feature 1..20: note = Description of Artificial Sequence: Synthetic oligonucleotide
  misc_feature 1..20: note = Target: SCN10A; (+) strand; PAM type: NNAGAAW; PAM sequence: AAAGAAA
  source 1..20: mol_type = other DNA
acaactgaaaaaaaaaaaaa

SEQ ID NO: 6638 - DNA, 20 bp, synthetic construct
  misc_feature 1..20: note = Description of Artificial Sequence: Synthetic oligonucleotide
  misc_feature 1..20: note = Target: SCN10A; (+) strand; PAM type: NNAGAAW; PAM sequence: AAAGAAA
  source 1..20: mol_type = other DNA
tgaaaaaaaaaaaaaaaaga

SEQ ID NO: 6639 - DNA, 20 bp, synthetic construct
  misc_feature 1..20: note = Description of Artificial Sequence: Synthetic oligonucleotide
  misc_feature 1..20: note = Target: SCN10A; (+) strand; PAM type: NNAGAAW; PAM sequence: AAAGAAA
  source 1..20: mol_type = other DNA
aaaaaaaaaaaaagaaaaga

SEQ ID NO: 6640 - DNA, 20 bp, synthetic construct
  misc_feature 1..20: note = Description of Artificial Sequence: Synthetic oligonucleotide
  misc_feature 1..20: note = Target: SCN10A; (+) strand; PAM type: NNAGAAW; PAM sequence: AAAGAAA
  source 1..20: mol_type = other DNA
aaaaaaaagaaaagaaaaga

SEQ ID NO: 6641 - DNA, 20 bp, synthetic construct
  misc_feature 1..20: note = Description of Artificial Sequence: Synthetic oligonucleotide
  misc_feature 1..20: note = Target: SCN10A; (+) strand; PAM type: NNAGAAW; PAM sequence: AGAGAAA
  source 1..20: mol_type = other DNA
aagagggcagaagaagagtt

SEQ ID NO: 6642 - DNA, 20 bp, synthetic construct
  misc_feature 1..20: note = Description of Artificial Sequence: Synthetic oligonucleotide
  misc_feature 1..20: note = Target: SCN10A; (+) strand; PAM type: NNAGAAW; PAM sequence: GGAGAAT
  source 1..20: mol_type = other DNA
ctactccggaggctgaggcg

SEQ ID NO: 6643 - DNA, 20 bp, synthetic construct
  misc_feature 1..20: note = Description of Artificial Sequence: Synthetic oligonucleotide
  misc_feature 1..20: note = Target: SCN10A; (+) strand; PAM type: NNAGAAW; PAM sequence: GCAGAAA
  source 1..20: mol_type = other DNA
acaggaagtggaacaaaaaa

SEQ ID NO: 6644 - DNA, 20 bp, synthetic construct
  misc_feature 1..20: note = Description of Artificial Sequence: Synthetic oligonucleotide
  misc_feature 1..20: note = Target: SCN10A; (+) strand; PAM type: NNAGAAW; PAM sequence: AGAGAAT
  source 1..20: mol_type = other DNA
tgataaaaagtttgaaaatt

SEQ ID NO: 6645 - DNA, 20 bp, synthetic construct
  misc_feature 1..20: note = Description of Artificial Sequence: Synthetic oligonucleotide
  misc_feature 1..20: note = Target: SCN10A; (+) strand; PAM type: NNAGAAW; PAM sequence: CTAGAAA
  source 1..20: mol_type = other DNA
ttgtttgactaataggaggt

SEQ ID NO: 6646 - DNA, 20 bp, synthetic construct
  misc_feature 1..20: note = Description of Artificial Sequence: Synthetic oligonucleotide
  misc_feature 1..20: note = Target: SCN10A; (+) strand; PAM type: NNAGAAW; PAM sequence: AAAGAAA
  source 1..20: mol_type = other DNA
ttgactaataggaggtctag

SEQ ID NO: 6647 - DNA, 20 bp, synthetic construct
  misc_feature 1..20: note = Description of Artificial Sequence: Synthetic oligonucleotide
  misc_feature 1..20: note = Target: SCN10A; (+) strand; PAM type: NNAGAAW; PAM sequence: GTAGAAT
  source 1..20: mol_type = other DNA
tagccaaactgtcaaagaag

SEQ ID NO: 6648 - DNA, 20 bp, synthetic construct
  misc_feature 1..20: note = Description of Artificial Sequence: Synthetic oligonucleotide
  misc_feature 1..20: note = Target: SCN10A; (+) strand; PAM type: NNAGAAW; PAM sequence: CAAGAAA
  source 1..20: mol_type = other DNA
gaggatatgctccattcaaa

SEQ ID NO: 6649 - DNA, 20 bp, synthetic construct
  misc_feature 1..20: note = Description of Artificial Sequence: Synthetic oligonucleotide
  misc_feature 1..20: note = Target: SCN10A; (+) strand; PAM type: NNAGAAW; PAM sequence: AAAGAAT
  source 1..20: mol_type = other DNA
gaggcaaaaggaatccaaaa

SEQ ID NO: 6650 - DNA, 20 bp, synthetic construct
  misc_feature 1..20: note = Description of Artificial Sequence: Synthetic oligonucleotide
  misc_feature 1..20: note = Target: SCN10A; (+) strand; PAM type: NNAGAAW; PAM sequence: GAAGAAA
  source 1..20: mol_type = other DNA
gaatccaaaaaaagaatgaa

SEQ ID NO: 6651 - DNA, 20 bp, synthetic construct
  misc_feature 1..20: note = Description of Artificial Sequence: Synthetic oligonucleotide
  misc_feature 1..20: note = Target: SCN10A; (+) strand; PAM type: NNAGAAW; PAM sequence: CTAGAAA
  source 1..20: mol_type = other DNA
gaatgaagaagaaaaaatct

SEQ ID NO: 6652 - DNA, 20 bp, synthetic construct
  misc_feature 1..20: note = Description of Artificial Sequence: Synthetic oligonucleotide
  misc_feature 1..20: note = Target: SCN10A; (+) strand; PAM type: NNAGAAW; PAM sequence: CTAGAAA
  source 1..20: mol_type = other DNA
aaaacagctgtgcatcaggc

SEQ ID NO: 6653 - DNA, 20 bp, synthetic construct
  misc_feature 1..20: note = Description of Artificial Sequence: Synthetic oligonucleotide
  misc_feature 1..20: note = Target: SCN10A; (+) strand; PAM type: NNAGAAW; PAM sequence: TCAGAAT
  source 1..20: mol_type = other DNA
aggcctagaaaacatctagg

SEQ ID NO: 6654 - DNA, 20 bp, synthetic construct
  misc_feature 1..20: note = Description of Artificial Sequence: Synthetic oligonucleotide
  misc_feature 1..20: note = Target: SCN10A; (+) strand; PAM type: NNAGAAW; PAM sequence: ATAGAAA
  source 1..20: mol_type = other DNA
tgggaacaaattagggataa

SEQ ID NO: 6655 - DNA, 20 bp, synthetic construct
  misc_feature 1..20: note = Description of Artificial Sequence: Synthetic oligonucleotide
  misc_feature 1..20: note = Target: SCN10A; (+) strand; PAM type: NNAGAAW; PAM sequence: TCAGAAA
  source 1..20: mol_type = other DNA
taggaagccaataaataaca

SEQ ID NO: 6656 - DNA, 20 bp, synthetic construct
  misc_feature 1..20: note = Description of Artificial Sequence: Synthetic oligonucleotide
  misc_feature 1..20: note = Target: SCN10A; (+) strand; PAM type: NNAGAAW; PAM sequence: TGAGAAA
  source 1..20: mol_type = other DNA
tggcctctggaaagaagaga

SEQ ID NO: 6657 - DNA, 20 bp, synthetic construct
  misc_feature 1..20: note = Description of Artificial Sequence: Synthetic oligonucleotide
  misc_feature 1..20: note = Target: SCN10A; (+) strand; PAM type: NNAGAAW; PAM sequence: TCAGAAT
  source 1..20: mol_type = other DNA
tgaaattgctgttttttttg

SEQ ID NO: 6658 - DNA, 20 bp, synthetic construct
  misc_feature 1..20: note = Description of Artificial Sequence: Synthetic oligonucleotide
  misc_feature 1..20: note = Target: SCN10A; (+) strand; PAM type: NNAGAAW; PAM sequence: GGAGAAA
  source 1..20: mol_type = other DNA
tttttttcacatctgtgaga

SEQ ID NO: 6659 - DNA, 20 bp, synthetic construct
  misc_feature 1..20: note = Description of Artificial Sequence: Synthetic oligonucleotide
  misc_feature 1..20: note = Target: SCN10A; (+) strand; PAM type: NNAGAAW; PAM sequence: TTAGAAA
  source 1..20: mol_type = other DNA
cactctttatgttttctaaa

SEQ ID NO: 6660 - DNA, 20 bp, synthetic construct
  misc_feature 1..20: note = Description of Artificial Sequence: Synthetic oligonucleotide
  misc_feature 1..20: note = Target: SCN10A; (+) strand; PAM type: NNAGAAW; PAM sequence: TCAGAAT
  source 1..20: mol_type = other DNA
ctaaattagaaaatcttaac

SEQ ID NO: 6661 - DNA, 20 bp, synthetic construct
  misc_feature 1..20: note = Description of Artificial Sequence: Synthetic oligonucleotide
  misc_feature 1..20: note = Target: SCN10A; (+) strand; PAM type: NNAGAAW; PAM sequence: CCAGAAA
  source 1..20: mol_type = other DNA
ttgtcaaatcaaacacagac

SEQ ID NO: 6662 - DNA, 20 bp, synthetic construct
  misc_feature 1..20: note = Description of Artificial Sequence: Synthetic oligonucleotide
  misc_feature 1..20: note = Target: SCN10A; (+) strand; PAM type: NNAGAAW; PAM sequence: GAAGAAA
  source 1..20: mol_type = other DNA
aagtgctttttctggtgaat

SEQ ID NO: 6663 - DNA, 20 bp, synthetic construct
  misc_feature 1..20: note = Description of Artificial Sequence: Synthetic oligonucleotide
  misc_feature 1..20: note = Target: SCN10A; (+) strand; PAM type: NNAGAAW; PAM sequence: TCAGAAT
  source 1..20: mol_type = other DNA
ctgtgtacctcaacagcaaa

SEQ ID NO: 6664 - DNA, 20 bp, synthetic construct
  misc_feature 1..20: note = Description of Artificial Sequence: Synthetic oligonucleotide
  misc_feature 1..20: note = Target: SCN10A; (+) strand; PAM type: NNAGAAW; PAM sequence: ACAGAAA
  source 1..20: mol_type = other DNA
aaacttttttataatcccga

SEQ ID NO: 6665 - DNA, 20 bp, synthetic construct
  misc_feature 1..20: note = Description of Artificial Sequence: Synthetic oligonucleotide
  misc_feature 1..20: note = Target: SCN10A; (+) strand; PAM type: NNAGAAW; PAM sequence: TCAGAAT
  source 1..20: mol_type = other DNA
tgtcaatgttgtggcatgta

SEQ ID NO: 6666 - DNA, 20 bp, synthetic construct
  misc_feature 1..20: note = Description of Artificial Sequence: Synthetic oligonucleotide
  misc_feature 1..20: note = Target: SCN10A; (+) strand; PAM type: NNAGAAW; PAM sequence: TCAGAAA
  source 1..20: mol_type = other DNA
tttatcattattgttatgct

SEQ ID NO: 6667 - DNA, 20 bp, synthetic construct
  misc_feature 1..20: note = Description of Artificial Sequence: Synthetic oligonucleotide
  misc_feature 1..20: note = Target: SCN10A; (+) strand; PAM type: NNAGAAW; PAM sequence: TTAGAAA
  source 1..20: mol_type = other DNA
gtttttgaaaacataaaaag

SEQ ID NO: 6668 - DNA, 20 bp, synthetic construct
  misc_feature 1..20: note = Description of Artificial Sequence: Synthetic oligonucleotide
  misc_feature 1..20: note = Target: SCN10A; (+) strand; PAM type: NNAGAAW; PAM sequence: TGAGAAA
  source 1..20: mol_type = other DNA
gagatccttagatcacttgt

SEQ ID NO: 6669 - DNA, 20 bp, synthetic construct
  misc_feature 1..20: note = Description of Artificial Sequence: Synthetic oligonucleotide
  misc_feature 1..20: note = Target: SCN10A; (+) strand; PAM type: NNAGAAW; PAM sequence: TAAGAAT
  source 1..20: mol_type = other DNA
aattgctctgctaaacaaag

SEQ ID NO: 6670 - DNA, 20 bp, synthetic construct
  misc_feature 1..20: note = Description of Artificial Sequence: Synthetic oligonucleotide
  misc_feature 1..20: note = Target: SCN10A; (+) strand; PAM type: NNAGAAW; PAM sequence: CAAGAAA
  source 1..20: mol_type = other DNA
atgatgaaagtctcaacaaa

SEQ ID NO: 6671 - DNA, 20 bp, synthetic construct
  misc_feature 1..20: note = Description of Artificial Sequence: Synthetic oligonucleotide
  misc_feature 1..20: note = Target: SCN10A; (+) strand; PAM type: NNAGAAW; PAM sequence: TAAGAAT
  source 1..20: mol_type = other DNA
ggaaaaataaaaaagtggta

SEQ ID NO: 6672 - DNA, 20 bp, synthetic construct
  misc_feature 1..20: note = Description of Artificial Sequence: Synthetic oligonucleotide
  misc_feature 1..20: note = Target: SCN10A; (+) strand; PAM type: NNAGAAW; PAM sequence: GAAGAAA
  source 1..20: mol_type = other DNA
gtggtataagaatcataaag

SEQ ID NO: 6673 - DNA, 20 bp, synthetic construct
  misc_feature 1..20: note = Description of Artificial Sequence: Synthetic oligonucleotide
  misc_feature 1..20: note = Target: SCN10A; (+) strand; PAM type: NNAGAAW; PAM sequence: ACAGAAA
  source 1..20: mol_type = other DNA
taggaagtccaagggaatct

SEQ ID NO: 6674 - DNA, 20 bp, synthetic construct
  misc_feature 1..20: note = Description of Artificial Sequence: Synthetic oligonucleotide
  misc_feature 1..20: note = Target: SCN10A; (+) strand; PAM type: NNAGAAW; PAM sequence: ATAGAAA
  source 1..20: mol_type = other DNA
gctggatgcaaaatcactat

SEQ ID NO: 6675 - DNA, 20 bp, synthetic construct
  misc_feature 1..20: note = Description of Artificial Sequence: Synthetic oligonucleotide
  misc_feature 1..20: note = Target: SCN10A; (+) strand; PAM type: NNAGAAW; PAM sequence: GTAGAAA
  source 1..20: mol_type = other DNA
ggaaaaagacattataaaat

SEQ ID NO: 6676 - DNA, 20 bp, synthetic construct
  misc_feature 1..20: note = Description of Artificial Sequence: Synthetic oligonucleotide
  misc_feature 1..20: note = Target: SCN10A; (+) strand; PAM type: NNAGAAW; PAM sequence: TAAGAAA
  source 1..20: mol_type = other DNA
acaaagtttccacagagttg

SEQ ID NO: 6677 - DNA, 20 bp, synthetic construct
  misc_feature 1..20: note = Description of Artificial Sequence: Synthetic oligonucleotide
  misc_feature 1..20: note = Target: SCN10A; (+) strand; PAM type: NNAGAAW; PAM sequence: AAAGAAA
  source 1..20: mol_type = other DNA
ttaaactgatatggaaaagt

SEQ ID NO: 6678 - DNA, 20 bp, synthetic construct
  misc_feature 1..20: note = Description of Artificial Sequence: Synthetic oligonucleotide
  misc_feature 1..20: note = Target: SCN10A; (+) strand; PAM type: NNAGAAW; PAM sequence: GGAGAAA
  source 1..20: mol_type = other DNA
atgtgacaatgagattactg

SEQ ID NO: 6679 - DNA, 20 bp, synthetic construct
  misc_feature 1..20: note = Description of Artificial Sequence: Synthetic oligonucleotide
  misc_feature 1..20: note = Target: SCN10A; (+) strand; PAM type: NNAGAAW; PAM sequence: GTAGAAA
  source 1..20: mol_type = other DNA
ggagattgaaatacctaaat

SEQ ID NO: 6680 - DNA, 20 bp, synthetic construct
  misc_feature 1..20: note = Description of Artificial Sequence: Synthetic oligonucleotide
  misc_feature 1..20: note = Target: SCN10A; (+) strand; PAM type: NNAGAAW; PAM sequence: GGAGAAA
  source 1..20: mol_type = other DNA
aaggaaaactgtaactttga

SEQ ID NO: 6681 - DNA, 20 bp, synthetic construct
  misc_feature 1..20: note = Description of Artificial Sequence: Synthetic oligonucleotide
  misc_feature 1..20: note = Target: SCN10A; (+) strand; PAM type: NNAGAAW; PAM sequence: TGAGAAA
  source 1..20: mol_type = other DNA
ttcacatgttctttgccagg

SEQ ID NO: 6682 - DNA, 20 bp, synthetic construct
  misc_feature 1..20: note = Description of Artificial Sequence: Synthetic oligonucleotide
  misc_feature 1..20: note = Target: SCN10A; (+) strand; PAM type: NNAGAAW; PAM sequence: CCAGAAT
  source 1..20: mol_type = other DNA
tataatttgtcaaaggtttt

SEQ ID NO: 6683 - DNA, 20 bp, synthetic construct
  misc_feature 1..20: note = Description of Artificial Sequence: Synthetic oligonucleotide
  misc_feature 1..20: note = Target: SCN10A; (+) strand; PAM type: NNAGAAW; PAM sequence: TTAGAAA
  source 1..20: mol_type = other DNA
ttcccaagcaaaagagggga

SEQ ID NO: 6684 - DNA, 20 bp, synthetic construct
  misc_feature 1..20: note = Description of Artificial Sequence: Synthetic oligonucleotide
  misc_feature 1..20: note = Target: SCN10A; (+) strand; PAM type: NNAGAAW; PAM sequence: GCAGAAA
  source 1..20: mol_type = other DNA
gcagacagataggcaggcac

SEQ ID NO: 6685 - DNA, 20 bp, synthetic construct
  misc_feature 1..20: note = Description of Artificial Sequence: Synthetic oligonucleotide
  misc_feature 1..20: note = Target: SCN10A; (+) strand; PAM type: NNAGAAW; PAM sequence: AAAGAAA
  source 1..20: mol_type = other DNA
attatcaatttgcatttcaa

SEQ ID NO: 6686 - DNA, 20 bp, synthetic construct
  misc_feature 1..20: note = Description of Artificial Sequence: Synthetic oligonucleotide
  misc_feature 1..20: note = Target: SCN10A; (+) strand; PAM type: NNAGAAW; PAM sequence: AAAGAAT
  source 1..20: mol_type = other DNA
cagttaatacaaaatctcct

SEQ ID NO: 6687 - DNA, 20 bp, synthetic construct
  misc_feature 1..20: note = Description of Artificial Sequence: Synthetic oligonucleotide
  misc_feature 1..20: note = Target: SCN10A; (+) strand; PAM type: NNAGAAW; PAM sequence: CTAGAAA
  source 1..20: mol_type = other DNA
ttgacctggcaattctactt

SEQ ID NO: 6688 - DNA, 20 bp, synthetic construct
  misc_feature 1..20: note = Description of Artificial Sequence: Synthetic oligonucleotide
  misc_feature 1..20: note = Target: SCN10A; (+) strand; PAM type: NNAGAAW; PAM sequence: CAAGAAT
  source 1..20: mol_type = other DNA
tttatagtttgtcttttgtc

SEQ ID NO: 6689 - DNA, 20 bp, synthetic construct
  misc_feature 1..20: note = Description of Artificial Sequence: Synthetic oligonucleotide
  misc_feature 1..20: note = Target: SCN10A; (+) strand; PAM type: NNAGAAW; PAM sequence: AGAGAAT
  source 1..20: mol_type = other DNA
aactctatttcattatgatc

SEQ ID NO: 6690 - DNA, 20 bp, synthetic construct
  misc_feature 1..20: note = Description of Artificial Sequence: Synthetic oligonucleotide
  misc_feature 1..20: note = Target: SCN10A; (+) strand; PAM type: NNAGAAW; PAM sequence: TGAGAAA
  source 1..20: mol_type = other DNA
cccagcaaagccattacatc

SEQ ID NO: 6691 - DNA, 20 bp, synthetic construct
  misc_feature 1..20: note = Description of Artificial Sequence: Synthetic oligonucleotide
  misc_feature 1..20: note = Target: SCN10A; (+) strand; PAM type: NNAGAAW; PAM sequence: ACAGAAA
  source 1..20: mol_type = other DNA
tcagcaaatcgatgagatgc

SEQ ID NO: 6692 - DNA, 20 bp, synthetic construct
  misc_feature 1..20: note = Description of Artificial Sequence: Synthetic oligonucleotide
  misc_feature 1..20: note = Target: SCN10A; (+) strand; PAM type: NNAGAAW; PAM sequence: ACAGAAA
  source 1..20: mol_type = other DNA
cctgcagctggcattggtca

SEQ ID NO: 6693 - DNA, 20 bp, synthetic construct
  misc_feature 1..20: note = Description of Artificial Sequence: Synthetic oligonucleotide
  misc_feature 1..20: note = Target: SCN10A; (+) strand; PAM type: NNAGAAW; PAM sequence: GCAGAAA
  source 1..20: mol_type = other DNA
acttccataaccagcgggat

SEQ ID NO: 6694 - DNA, 20 bp, synthetic construct
  misc_feature 1..20: note = Description of Artificial Sequence: Synthetic oligonucleotide
  misc_feature 1..20: note = Target: SCN10A; (+) strand; PAM type: NNAGAAW; PAM sequence: ACAGAAA
  source 1..20: mol_type = other DNA
tagactgggtggcttatgca

SEQ ID NO: 6695 - DNA, 20 bp, synthetic construct
  misc_feature 1..20: note = Description of Artificial Sequence: Synthetic oligonucleotide
  misc_feature 1..20: note = Target: SCN10A; (+) strand; PAM type: NNAGAAW; PAM sequence: GGAGAAA
  source 1..20: mol_type = other DNA
cttgtgttctcacacaaagg

SEQ ID NO: 6696 - DNA, 20 bp, synthetic construct
  misc_feature 1..20: note = Description of Artificial Sequence: Synthetic oligonucleotide
  misc_feature 1..20: note = Target: SCN10A; (+) strand; PAM type: NNAGAAW; PAM sequence: TTAGAAT
  source 1..20: mol_type = other DNA
ttgctgtaagttttctcatt

SEQ ID NO: 6697 - DNA, 20 bp, synthetic construct
  misc_feature 1..20: note = Description of Artificial Sequence: Synthetic oligonucleotide
  misc_feature 1..20: note = Target: SCN10A; (+) strand; PAM type: NNAGAAW; PAM sequence: ACAGAAA
  source 1..20: mol_type = other DNA
ttttctcattttagaatata

SEQ ID NO: 6698 - DNA, 20 bp, synthetic construct
  misc_feature 1..20: note = Description of Artificial Sequence: Synthetic oligonucleotide
  misc_feature 1..20: note = Target: SCN10A; (+) strand; PAM type: NNAGAAW; PAM sequence: GAAGAAT
  source 1..20: mol_type = other DNA
aggtacctaagggtgtaata

SEQ ID NO: 6699 - DNA, 20 bp, synthetic construct
  misc_feature 1..20: note = Description of Artificial Sequence: Synthetic oligonucleotide
  misc_feature 1..20: note = Target: SCN10A; (+) strand; PAM type: NNAGAAW; PAM sequence: TAAGAAT
  source 1..20: mol_type = other DNA
tctttgatttaaaaaaaggt

SEQ ID NO: 6700 - DNA, 20 bp, synthetic construct
  misc_feature 1..20: note = Description of Artificial Sequence: Synthetic oligonucleotide
  misc_feature 1..20: note = Target: SCN10A; (+) strand; PAM type: NNAGAAW; PAM sequence: GCAGAAA
  source 1..20: mol_type = other DNA
acgtgattatctcaatagat

SEQ ID NO: 6701 - DNA, 20 bp, synthetic construct
  misc_feature 1..20: note = Description of Artificial Sequence: Synthetic oligonucleotide
  misc_feature 1..20: note = Target: SCN10A; (+) strand; PAM type: NNAGAAW; PAM sequence: CAAGAAT
  source 1..20: mol_type = other DNA
ctttgaaaaccagcacaaga

SEQ ID NO: 6702 - DNA, 20 bp, synthetic construct
  misc_feature 1..20: note = Description of Artificial Sequence: Synthetic oligonucleotide
  misc_feature 1..20: note = Target: SCN10A; (+) strand; PAM type: NNAGAAW; PAM sequence: AGAGAAA
  source 1..20: mol_type = other DNA
ctggccagggcgatcaggca

SEQ ID NO: 6703 - DNA, 20 bp, synthetic construct
  misc_feature 1..20: note = Description of Artificial Sequence: Synthetic oligonucleotide
  misc_feature 1..20: note = Target: SCN10A; (+) strand; PAM type: NNAGAAW; PAM sequence: AAAGAAA
  source 1..20: mol_type = other DNA
ccagggcgatcaggcaagag

SEQ ID NO: 6704 - DNA, 20 bp, synthetic construct
  misc_feature 1..20: note = Description of Artificial Sequence: Synthetic oligonucleotide
  misc_feature 1..20: note = Target: SCN10A; (+) strand; PAM type: NNAGAAW; PAM sequence: TTAGAAA
  source 1..20: mol_type = other DNA
cagatgacatgactgtatat

SEQ ID NO: 6705 - DNA, 20 bp, synthetic construct
  misc_feature 1..20: note = Description of Artificial Sequence: Synthetic oligonucleotide
  misc_feature 1..20: note = Target: SCN10A; (+) strand; PAM type: NNAGAAW; PAM sequence: AGAGAAT
  source 1..20: mol_type = other DNA
cccattcacaattgcaacaa

SEQ ID NO: 6706 - DNA, 20 bp, synthetic construct
  misc_feature 1..20: note = Description of Artificial Sequence: Synthetic oligonucleotide
  misc_feature 1..20: note = Target: SCN10A; (+) strand; PAM type: NNAGAAW; PAM sequence: CTAGAAA
  source 1..20: mol_type = other DNA
caacaaagagaataaaatat

SEQ ID NO: 6707 - DNA, 20 bp, synthetic construct
  misc_feature 1..20: note = Description of Artificial Sequence: Synthetic oligonucleotide
  misc_feature 1..20: note = Target: SCN10A; (+) strand; PAM type: NNAGAAW; PAM sequence: ACAGAAT
  source 1..20: mol_type = other DNA
agctaccactgactttcttc

SEQ ID NO: 6708 - DNA, 20 bp, synthetic construct
  misc_feature 1..20: note = Description of Artificial Sequence: Synthetic oligonucleotide
  misc_feature 1..20: note = Target: SCN10A; (+) strand; PAM type: NNAGAAW; PAM sequence: TTAGAAA
  source 1..20: mol_type = other DNA
cactgactttcttcacagaa

SEQ ID NO: 6709 - DNA, 20 bp, synthetic construct
  misc_feature 1..20: note = Description of Artificial Sequence: Synthetic oligonucleotide
  misc_feature 1..20: note = Target: SCN10A; (+) strand; PAM type: NNAGAAW; PAM sequence: GAAGAAA
  source 1..20: mol_type = other DNA
aagacaattctaagcaaaaa

SEQ ID NO: 6710 - DNA, 20 bp, synthetic construct
  misc_feature 1..20: note = Description of Artificial Sequence: Synthetic oligonucleotide
  misc_feature 1..20: note = Target: SCN10A; (+) strand; PAM type: NNAGAAW; PAM sequence: GCAGAAA
  source 1..20: mol_type = other DNA
ggaaaactggctagccttag

SEQ ID NO: 6711 - DNA, 20 bp, synthetic construct
  misc_feature 1..20: note = Description of Artificial Sequence: Synthetic oligonucleotide
  misc_feature 1..20: note = Target: SCN10A; (+) strand; PAM type: NNAGAAW; PAM sequence: GAAGAAA
  source 1..20: mol_type = other DNA
ctaaaaccataaaaacccta

SEQ ID NO: 6712 - DNA, 20 bp, synthetic construct
  misc_feature 1..20: note = Description of Artificial Sequence: Synthetic oligonucleotide
  misc_feature 1..20: note = Target: SCN10A; (+) strand; PAM type: NNAGAAW; PAM sequence: AAAGAAA
  source 1..20: mol_type = other DNA
taaagagcttctgcacagca

SEQ ID NO: 6713 - DNA, 20 bp, synthetic construct
  misc_feature 1..20: note = Description of Artificial Sequence: Synthetic oligonucleotide
  misc_feature 1..20: note = Target: SCN10A; (+) strand; PAM type: NNAGAAW; PAM sequence: ACAGAAT
  source 1..20: mol_type = other DNA
tcagagtgaataggtaacct

SEQ ID NO: 6714 - DNA, 20 bp, synthetic construct
  misc_feature 1..20: note = Description of Artificial Sequence: Synthetic oligonucleotide
  misc_feature 1..20: note = Target: SCN10A; (+) strand; PAM type: NNAGAAW; PAM sequence: GGAGAAA
  source 1..20: mol_type = other DNA
aataggtaacctacagaatg

SEQ ID NO: 6715 - DNA, 20 bp, synthetic construct
  misc_feature 1..20: note = Description of Artificial Sequence: Synthetic oligonucleotide
  misc_feature 1..20: note = Target: SCN10A; (+) strand; PAM type: NNAGAAW; PAM sequence: CCAGAAT
  source 1..20: mol_type = other DNA
atctgacaaagggctaatat

SEQ ID NO: 6716 - DNA, 20 bp, synthetic construct
  misc_feature 1..20: note = Description of Artificial Sequence: Synthetic oligonucleotide
  misc_feature 1..20: note = Target: SCN10A; (+) strand; PAM type: NNAGAAW; PAM sequence: CAAGAAA
  source 1..20: mol_type = other DNA
aaaaaacttaaacaaattta

SEQ ID NO: 6717 - DNA, 20 bp, synthetic construct
  misc_feature 1..20: note = Description of Artificial Sequence: Synthetic oligonucleotide
  misc_feature 1..20: note = Target: SCN10A; (+) strand; PAM type: NNAGAAW; PAM sequence: AGAGAAA
  source 1..20: mol_type = other DNA
gctcatcatcactggtcatt

SEQ ID NO: 6718 - DNA, 20 bp, synthetic construct
  misc_feature 1..20: note = Description of Artificial Sequence: Synthetic oligonucleotide
  misc_feature 1..20: note = Target: SCN10A; (+) strand; PAM type: NNAGAAW; PAM sequence: TTAGAAT
  source 1..20: mol_type = other DNA
gagatggagtctcataccag

SEQ ID NO: 6719 - DNA, 20 bp, synthetic construct
  misc_feature 1..20: note = Description of Artificial Sequence: Synthetic oligonucleotide
  misc_feature 1..20: note = Target: SCN10A; (+) strand; PAM type: NNAGAAW; PAM sequence: CCAGAAA
  source 1..20: mol_type = other DNA
gattcctcaaggatctagaa

SEQ ID NO: 6720 - DNA, 20 bp, synthetic construct
  misc_feature 1..20: note = Description of Artificial Sequence: Synthetic oligonucleotide
  misc_feature 1..20: note = Target: SCN10A; (+) strand; PAM type: NNAGAAW; PAM sequence: AAAGAAA
  source 1..20: mol_type = other DNA
ccatcagtgatagactggat

SEQ ID NO: 6721 - DNA, 20 bp, synthetic construct
  misc_feature 1..20: note = Description of Artificial Sequence: Synthetic oligonucleotide
  misc_feature 1..20: note = Target: SCN10A; (+) strand; PAM type: NNAGAAW; PAM sequence: ACAGAAA
  source 1..20: mol_type = other DNA
ctcagcaaactgacataaga

SEQ ID NO: 6722 - DNA, 20 bp, synthetic construct
  misc_feature 1..20: note = Description of Artificial Sequence: Synthetic oligonucleotide
  misc_feature 1..20: note = Target: SCN10A; (+) strand; PAM type: NNAGAAW; PAM sequence: GGAGAAA
  source 1..20: mol_type = other DNA
ctaggggagggatagcatta

SEQ ID NO: 6723 - DNA, 20 bp, synthetic construct
  misc_feature 1..20: note = Description of Artificial Sequence: Synthetic oligonucleotide
  misc_feature 1..20: note = Target: SCN10A; (+) strand; PAM type: NNAGAAW; PAM sequence: CTAGAAT
  source 1..20: mol_type = other DNA
caagtgaggtgttgatccac

SEQ ID NO: 6724 - DNA, 20 bp, synthetic construct
  misc_feature 1..20: note = Description of Artificial Sequence: Synthetic oligonucleotide
  misc_feature 1..20: note = Target: SCN10A; (+) strand; PAM type: NNAGAAW; PAM sequence: GTAGAAT
  source 1..20: mol_type = other DNA
atagtaaatctcgacatcca

SEQ ID NO: 6725 - DNA, 20 bp, synthetic construct
  misc_feature 1..20: note = Description of Artificial Sequence: Synthetic oligonucleotide
  misc_feature 1..20: note = Target: SCN10A; (+) strand; PAM type: NNAGAAW; PAM sequence: GAAGAAA
  source 1..20: mol_type = other DNA
atttcatgtaaacttttgag

SEQ ID NO: 6726 - DNA, 20 bp, synthetic construct
  misc_feature 1..20: note = Description of Artificial Sequence: Synthetic oligonucleotide
  misc_feature 1..20: note = Target: SCN10A; (+) strand; PAM type: NNAGAAW; PAM sequence: TGAGAAT
  source 1..20: mol_type = other DNA
ctgttcttgtgttagtttgc

SEQ ID NO: 6727 - DNA, 20 bp, synthetic construct
  misc_feature 1..20: note = Description of Artificial Sequence: Synthetic oligonucleotide
  misc_feature 1..20: note = Target: SCN10A; (+) strand; PAM type: NNAGAAW; PAM sequence: TAAGAAT
  source 1..20: mol_type = other DNA
cccttctatttcaacttttc

SEQ ID NO: 6728 - DNA, 20 bp, synthetic construct
  misc_feature 1..20: note = Description of Artificial Sequence: Synthetic oligonucleotide
  misc_feature 1..20: note = Target: SCN10A; (+) strand; PAM type: NNAGAAW; PAM sequence: AAAGAAA
  source 1..20: mol_type = other DNA
aaaaaaaaaaaaaaaaaaaa

SEQ ID NO: 6729 - DNA, 20 bp, synthetic construct
  misc_feature 1..20: note = Description of Artificial Sequence: Synthetic oligonucleotide
  misc_feature 1..20: note = Target: SCN10A; (+) strand; PAM type: NNAGAAW; PAM sequence: ATAGAAT
  source 1..20: mol_type = other DNA
tcacccactaacctagggaa

SEQ ID NO: 6730 - DNA, 20 bp, synthetic construct
  misc_feature 1..20: note = Description of Artificial Sequence: Synthetic oligonucleotide
  misc_feature 1..20: note = Target: SCN10A; (+) strand; PAM type: NNAGAAW; PAM sequence: GAAGAAA
  source 1..20: mol_type = other DNA
acaaagactgccaagtgaag

SEQ ID NO: 6731 - DNA, 20 bp, synthetic construct
  misc_feature 1..20: note = Description of Artificial Sequence: Synthetic oligonucleotide
  misc_feature 1..20: note = Target: SCN10A; (+) strand; PAM type: NNAGAAW; PAM sequence: AAAGAAA
  source 1..20: mol_type = other DNA
gactgccaagtgaaggaaga

SEQ ID NO: 6732 - DNA, 20 bp, synthetic construct
  misc_feature 1..20: note = Description of Artificial Sequence: Synthetic oligonucleotide
  misc_feature 1..20: note = Target: SCN10A; (+) strand; PAM type: NNAGAAW; PAM sequence: TGAGAAA
  source 1..20: mol_type = other DNA
aaatatctacattttgaagc

SEQ ID NO: 6733 - DNA, 20 bp, synthetic construct
  misc_feature 1..20: note = Description of Artificial Sequence: Synthetic oligonucleotide
  misc_feature 1..20: note = Target: SCN10A; (+) strand; PAM type: NNAGAAW; PAM sequence: AAAGAAA
  source 1..20: mol_type = other DNA
tcttttttattctaaaagac

SEQ ID NO: 6734 - DNA, 20 bp, synthetic construct
  misc_feature 1..20: note = Description of Artificial Sequence: Synthetic oligonucleotide
  misc_feature 1..20: note = Target: SCN10A; (+) strand; PAM type: NNAGAAW; PAM sequence: TTAGAAA
  source 1..20: mol_type = other DNA
ttctaaaagacaaagaaaag

SEQ ID NO: 6735 - DNA, 20 bp, synthetic construct
  misc_feature 1..20: note = Description of Artificial Sequence: Synthetic oligonucleotide
  misc_feature 1..20: note = Target: SCN10A; (+) strand; PAM type: NNAGAAW; PAM sequence: GAAGAAA
  source 1..20: mol_type = other DNA
gaaatgaaatactggctcag

SEQ ID NO: 6736 - DNA, 20 bp, synthetic construct
  misc_feature 1..20: note = Description of Artificial Sequence: Synthetic oligonucleotide
  misc_feature 1..20: note = Target: SCN10A; (+) strand; PAM type: NNAGAAW; PAM sequence: GGAGAAT
  source 1..20: mol_type = other DNA
gaactctgaatagctagagt

SEQ ID NO: 6737 - DNA, 20 bp, synthetic construct
  misc_feature 1..20: note = Description of Artificial Sequence: Synthetic oligonucleotide
  misc_feature 1..20: note = Target: SCN10A; (+) strand; PAM type: NNAGAAW; PAM sequence: GAAGAAA
  source 1..20: mol_type = other DNA
tggaaggggaaaatagaagg

SEQ ID NO: 6738 - DNA, 20 bp, synthetic construct
  misc_feature 1..20: note = Description of Artificial Sequence: Synthetic oligonucleotide
  misc_feature 1..20: note = Target: SCN10A; (+) strand; PAM type: NNAGAAW; PAM sequence: GGAGAAT
  source 1..20: mol_type = other DNA
aagggaagaaatgttggtgg

SEQ ID NO: 6739 - DNA, 20 bp, synthetic construct
  misc_feature 1..20: note = Description of Artificial Sequence: Synthetic oligonucleotide
  misc_feature 1..20: note = Target: SCN10A; (+) strand; PAM type: NNAGAAW; PAM sequence: TAAGAAA
  source 1..20: mol_type = other DNA
ctgctgacttacaattaaat

SEQ ID NO: 6740 - DNA, 20 bp, synthetic construct
  misc_feature 1..20: note = Description of Artificial Sequence: Synthetic oligonucleotide
  misc_feature 1..20: note = Target: SCN10A; (+) strand; PAM type: NNAGAAW; PAM sequence: TTAGAAT
  source 1..20: mol_type = other DNA
aacattcatagcaaatgtga

SEQ ID NO: 6741 - DNA, 20 bp, synthetic construct
  misc_feature 1..20: note = Description of Artificial Sequence: Synthetic oligonucleotide
  misc_feature 1..20: note = Target: SCN10A; (+) strand; PAM type: NNAGAAW; PAM sequence: TGAGAAT
  source 1..20: mol_type = other DNA
aaatattaataatagggccc

SEQ ID NO: 6742 - DNA, 20 bp, synthetic construct
  misc_feature 1..20: note = Description of Artificial Sequence: Synthetic oligonucleotide
  misc_feature 1..20: note = Target: SCN10A; (+) strand; PAM type: NNAGAAW; PAM sequence: AGAGAAT
  source 1..20: mol_type = other DNA
ctcatcaaatctcaagatga

SEQ ID NO: 6743 - DNA, 20 bp, synthetic construct
  misc_feature 1..20: note = Description of Artificial Sequence: Synthetic oligonucleotide
  misc_feature 1..20: note = Target: SCN10A; (+) strand; PAM type: NNAGAAW; PAM sequence: CCAGAAT
  source 1..20: mol_type = other DNA
cttatccagatgtaattcaa

SEQ ID NO: 6744 - DNA, 20 bp, synthetic construct
  misc_feature 1..20: note = Description of Artificial Sequence: Synthetic oligonucleotide
  misc_feature 1..20: note = Target: SCN10A; (+) strand; PAM type: NNAGAAW; PAM sequence: AGAGAAT
  source 1..20: mol_type = other DNA
caagcagagacgacacattg

SEQ ID NO: 6745 - DNA, 20 bp, synthetic construct
  misc_feature 1..20: note = Description of Artificial Sequence: Synthetic oligonucleotide
  misc_feature 1..20: note = Target: SCN10A; (+) strand; PAM type: NNAGAAW; PAM sequence: GTAGAAT
  source 1..20: mol_type = other DNA
ttgtcattaaatatccttct

SEQ ID NO: 6746 - DNA, 20 bp, synthetic construct
  misc_feature 1..20: note = Description of Artificial Sequence: Synthetic oligonucleotide
  misc_feature 1..20: note = Target: SCN10A; (+) strand; PAM type: NNAGAAW; PAM sequence: TCAGAAA
  source 1..20: mol_type = other DNA
ctgaaaattcaagattcagc

SEQ ID NO: 6747 - DNA, 20 bp, synthetic construct
  misc_feature 1..20: note = Description of Artificial Sequence: Synthetic oligonucleotide
  misc_feature 1..20: note = Target: SCN10A; (+) strand; PAM type: NNAGAAW; PAM sequence: CCAGAAA
  source 1..20: mol_type = other DNA
acgtaattcttgctggccag

SEQ ID NO: 6748 - DNA, 20 bp, synthetic construct
  misc_feature 1..20: note = Description of Artificial Sequence: Synthetic oligonucleotide
  misc_feature 1..20: note = Target: SCN10A; (+) strand; PAM type: NNAGAAW; PAM sequence: AAAGAAA
  source 1..20: mol_type = other DNA
aattcttgctggccagccag

SEQ ID NO: 6749 - DNA, 20 bp, synthetic construct
  misc_feature 1..20: note = Description of Artificial Sequence: Synthetic oligonucleotide
  misc_feature 1..20: note = Target: SCN10A; (+) strand; PAM type: NNAGAAW; PAM sequence: AGAGAAA
  source 1..20: mol_type = other DNA
agaaagaaaaaaatgtaaaa

SEQ ID NO: 6750 - DNA, 20 bp, synthetic construct
  misc_feature 1..20: note = Description of Artificial Sequence: Synthetic oligonucleotide
  misc_feature 1..20: note = Target: SCN10A; (+) strand; PAM type: NNAGAAW; PAM sequence: CCAGAAA
  source 1..20: mol_type = other DNA
accagctcaatgacaactgt

SEQ ID NO: 6751 - DNA, 20 bp, synthetic construct
  misc_feature 1..20: note = Description of Artificial Sequence: Synthetic oligonucleotide
  misc_feature 1..20: note = Target: SCN10A; (+) strand; PAM type: NNAGAAW; PAM sequence: TAAGAAA
  source 1..20: mol_type = other DNA
tcttttttactgaagccttc

SEQ ID NO: 6752 - DNA, 20 bp, synthetic construct
  misc_feature 1..20: note = Description of Artificial Sequence: Synthetic oligonucleotide
  misc_feature 1..20: note = Target: SCN10A; (+) strand; PAM type: NNAGAAW; PAM sequence: TGAGAAT
  source 1..20: mol_type = other DNA
aagcggaccacacaccgtgg

SEQ ID NO: 6753 - DNA, 20 bp, synthetic construct
  misc_feature 1..20: note = Description of Artificial Sequence: Synthetic oligonucleotide
  misc_feature 1..20: note = Target: SCN10A; (+) strand; PAM type: NNAGAAW; PAM sequence: ACAGAAA
  source 1..20: mol_type = other DNA
aatgtctgaaacaaaacaaa

SEQ ID NO: 6754 - DNA, 20 bp, synthetic construct
  misc_feature 1..20: note = Description of Artificial Sequence: Synthetic oligonucleotide
  misc_feature 1..20: note = Target: SCN10A; (+) strand; PAM type: NNAGAAW; PAM sequence: TGAGAAA
  source 1..20: mol_type = other DNA
aacagaaagtggacctccaa

SEQ ID NO: 6755 - DNA, 20 bp, synthetic construct
  misc_feature 1..20: note = Description of Artificial Sequence: Synthetic oligonucleotide
  misc_feature 1..20: note = Target: SCN10A; (+) strand; PAM type: NNAGAAW; PAM sequence: GAAGAAA
  source 1..20: mol_type = other DNA
ctcttggcatgggagaggag

SEQ ID NO: 6756 - DNA, 20 bp, synthetic construct
  misc_feature 1..20: note = Description of Artificial Sequence: Synthetic oligonucleotide
  misc_feature 1..20: note = Target: SCN10A; (+) strand; PAM type: NNAGAAW; PAM sequence: TTAGAAA
  source 1..20: mol_type = other DNA
ccagatatatgtatatcata

SEQ ID NO: 6757 - DNA, 20 bp, synthetic construct
  misc_feature 1..20: note = Description of Artificial Sequence: Synthetic oligonucleotide
  misc_feature 1..20: note = Target: SCN10A; (+) strand; PAM type: NNAGAAW; PAM sequence: TTAGAAA
  source 1..20: mol_type = other DNA
gtgtgtatatatatctcata

SEQ ID NO: 6758 - DNA, 20 bp, synthetic construct
  misc_feature 1..20: note = Description of Artificial Sequence: Synthetic oligonucleotide
  misc_feature 1..20: note = Target: SCN10A; (+) strand; PAM type: NNAGAAW; PAM sequence: AGAGAAA
  source 1..20: mol_type = other DNA
ttcaccaatgtatgatcata

SEQ ID NO: 6759 - DNA, 20 bp, synthetic construct
  misc_feature 1..20: note = Description of Artificial Sequence: Synthetic oligonucleotide
  misc_feature 1..20: note = Target: SCN10A; (+) strand; PAM type: NNAGAAW; PAM sequence: GGAGAAT
  source 1..20: mol_type = other DNA
ctggagaactccagattatt

SEQ ID NO: 6760 - DNA, 20 bp, synthetic construct
  misc_feature 1..20: note = Description of Artificial Sequence: Synthetic oligonucleotide
  misc_feature 1..20: note = Target: SCN10A; (+) strand; PAM type: NNAGAAW; PAM sequence: GGAGAAA
  source 1..20: mol_type = other DNA
gaccatatttcctagttcat

SEQ ID NO: 6761 - DNA, 20 bp, synthetic construct
  misc_feature 1..20: note = Description of Artificial Sequence: Synthetic oligonucleotide
  misc_feature 1..20: note = Target: SCN10A; (+) strand; PAM type: NNAGAAW; PAM sequence: TCAGAAT
  source 1..20: mol_type = other DNA
tggcactctatcttttgttt

SEQ ID NO: 6762 - DNA, 20 bp, synthetic construct
  misc_feature 1..20: note = Description of Artificial Sequence: Synthetic oligonucleotide
  misc_feature 1..20: note = Target: SCN10A; (+) strand; PAM type: NNAGAAW; PAM sequence: ACAGAAT
  source 1..20: mol_type = other DNA
gtgcctggaactaactagat

SEQ ID NO: 6763 - DNA, 20 bp, synthetic construct
  misc_feature 1..20: note = Description of Artificial Sequence: Synthetic oligonucleotide
  misc_feature 1..20: note = Target: SCN10A; (+) strand; PAM type: NNAGAAW; PAM sequence: TCAGAAA
  source 1..20: mol_type = other DNA
aaaactaaagaacattttgt

SEQ ID NO: 6764 - DNA, 20 bp, synthetic construct
  misc_feature 1..20: note = Description of Artificial Sequence: Synthetic oligonucleotide
  misc_feature 1..20: note = Target: SCN10A; (+) strand; PAM type: NNAGAAW; PAM sequence: TGAGAAA
  source 1..20: mol_type = other DNA
tgtctttaattcttcccttc

SEQ ID NO: 6765 - DNA, 20 bp, synthetic construct
  misc_feature 1..20: note = Description of Artificial Sequence: Synthetic oligonucleotide
  misc_feature 1..20: note = Target: SCN10A; (+) strand; PAM type: NNAGAAW; PAM sequence: CAAGAAT
  source 1..20: mol_type = other DNA
tcagttgtttagtaacaatg

SEQ ID NO: 6766 - DNA, 20 bp, synthetic construct
  misc_feature 1..20: note = Description of Artificial Sequence: Synthetic oligonucleotide
  misc_feature 1..20: note = Target: SCN10A; (+) strand; PAM type: NNAGAAW; PAM sequence: CCAGAAT
  source 1..20: mol_type = other DNA
ggattgagaacaggactaag

SEQ ID NO: 6767 - DNA, 20 bp, synthetic construct
  misc_feature 1..20: note = Description of Artificial Sequence: Synthetic oligonucleotide
  misc_feature 1..20: note = Target: SCN10A; (+) strand; PAM type: NNAGAAW; PAM sequence: TGAGAAA
  source 1..20: mol_type = other DNA
agtgtctttacatgacattc

SEQ ID NO: 6768 - DNA, 20 bp, synthetic construct
  misc_feature 1..20: note = Description of Artificial Sequence: Synthetic oligonucleotide
  misc_feature 1..20: note = Target: SCN10A; (+) strand; PAM type: NNAGAAW; PAM sequence: GAAGAAA
  source 1..20: mol_type = other DNA
gaggaaaagtaacataagaa

SEQ ID NO: 6769 - DNA, 20 bp, synthetic construct
  misc_feature 1..20: note = Description of Artificial Sequence: Synthetic oligonucleotide
  misc_feature 1..20: note = Target: SCN10A; (+) strand; PAM type: NNAGAAW; PAM sequence: TCAGAAT
  source 1..20: mol_type = other DNA
ctcttatgggcaaactgggc

SEQ ID NO: 6770 - DNA, 20 bp, synthetic construct
  misc_feature 1..20: note = Description of Artificial Sequence: Synthetic oligonucleotide
  misc_feature 1..20: note = Target: SCN10A; (+) strand; PAM type: NNAGAAW; PAM sequence: AGAGAAA
  source 1..20: mol_type = other DNA
cagaacttacttcagtggcc

SEQ ID NO: 6771 - DNA, 20 bp, synthetic construct
  misc_feature 1..20: note = Description of Artificial Sequence: Synthetic oligonucleotide
  misc_feature 1..20: note = Target: SCN10A; (+) strand; PAM type: NNAGAAW; PAM sequence: CAAGAAA
  source 1..20: mol_type = other DNA
tggctgaggaggagacaatc

SEQ ID NO: 6772 - DNA, 20 bp, synthetic construct
  misc_feature 1..20: note = Description of Artificial Sequence: Synthetic oligonucleotide
  misc_feature 1..20: note = Target: SCN10A; (-) strand; PAM type: NNGRRT; PAM sequence: TAGAAT
  source 1..20: mol_type = other DNA
atagtccgtatgcctggcca

SEQ ID NO: 6773 - DNA, 20 bp, synthetic construct
  misc_feature 1..20: note = Description of Artificial Sequence: Synthetic oligonucleotide
  misc_feature 1..20: note = Target: SCN10A; (-) strand; PAM type: NNGRRT; PAM sequence: AAGGGT
  source 1..20: mol_type = other DNA
acaaaacctaaggttaccaa

SEQ ID NO: 6774 - DNA, 20 bp, synthetic construct
  misc_feature 1..20: note = Description of Artificial Sequence: Synthetic oligonucleotide
  misc_feature 1..20: note = Target: SCN10A; (-) strand; PAM type: NNGRRT; PAM sequence: AAGAGT
  source 1..20: mol_type = other DNA
tttaaatggactctgggaaa

SEQ ID NO: 6775 - DNA, 20 bp, synthetic construct
  misc_feature 1..20: note = Description of Artificial Sequence: Synthetic oligonucleotide
  misc_feature 1..20: note = Target: SCN10A; (-) strand; PAM type: NNGRRT; PAM sequence: CAGAGT
  source 1..20: mol_type = other DNA
aaagaaacaaatagaaaaga

SEQ ID NO: 6776 - DNA, 20 bp, synthetic construct
  misc_feature 1..20: note = Description of Artificial Sequence: Synthetic oligonucleotide
  misc_feature 1..20: note = Target: SCN10A; (-) strand; PAM type: NNGRRT; PAM sequence: CAGAAT
  source 1..20: mol_type = other DNA
acccgggatatagagacata

SEQ ID NO: 6777 - DNA, 20 bp, synthetic construct
  misc_feature 1..20: note = Description of Artificial Sequence: Synthetic oligonucleotide
  misc_feature 1..20: note = Target: SCN10A; (-) strand; PAM type: NNGRRT; PAM sequence: CGGGAT
  source 1..20: mol_type = other DNA
taataataattaaaaaaacc

SEQ ID NO: 6778 - DNA, 20 bp, synthetic construct
  misc_feature 1..20: note = Description of Artificial Sequence: Synthetic oligonucleotide
  misc_feature 1..20: note = Target: SCN10A; (-) strand; PAM type: NNGRRT; PAM sequence: ATGGGT
  source 1..20: mol_type = other DNA
ctaatgtaaatgacaagtta

SEQ ID NO: 6779 - DNA, 20 bp, synthetic construct
  misc_feature 1..20: note = Description of Artificial Sequence: Synthetic oligonucleotide
  misc_feature 1..20: note = Target: SCN10A; (-) strand; PAM type: NNGRRT; PAM sequence: AGGGAT
  source 1..20: mol_type = other DNA
gtggggtggagggagggggg

SEQ ID NO: 6780 - DNA, 20 bp, synthetic construct
  misc_feature 1..20: note = Description of Artificial Sequence: Synthetic oligonucleotide
  misc_feature 1..20: note = Target: SCN10A; (-) strand; PAM type: NNGRRT; PAM sequence: TGGGGT
  source 1..20: mol_type = other DNA
tcacacaccggggacagttg

SEQ ID NO: 6781 - DNA, 20 bp, synthetic construct
  misc_feature 1..20: note = Description of Artificial Sequence: Synthetic oligonucleotide
  misc_feature 1..20: note = Target: SCN10A; (-) strand; PAM type: NNGRRT; PAM sequence: GGGAAT
  source 1..20: mol_type = other DNA
gcatgttctcactcataggt

SEQ ID NO: 6782 - DNA, 20 bp, synthetic construct
  misc_feature 1..20: note = Description of Artificial Sequence: Synthetic oligonucleotide
  misc_feature 1..20: note = Target: SCN10A; (-) strand; PAM type: NNGRRT; PAM sequence: ATGGAT
  source 1..20: mol_type = other DNA
ttcatgtcctttgcagggac

SEQ ID NO: 6783 - DNA, 20 bp, synthetic construct
  misc_feature 1..20: note = Description of Artificial Sequence: Synthetic oligonucleotide
  misc_feature 1..20: note = Target: SCN10A; (-) strand; PAM type: NNGRRT; PAM sequence: ATGAGT
  source 1..20: mol_type = other DNA
ctatgcagccataaaaaatg

SEQ ID NO: 6784 - DNA, 20 bp, synthetic construct
  misc_feature 1..20: note = Description of Artificial Sequence: Synthetic oligonucleotide
  misc_feature 1..20: note = Target: SCN10A; (-) strand; PAM type: NNGRRT; PAM sequence: TGGAAT
  source 1..20: mol_type = other DNA
aatgtggcacatatacacca

SEQ ID NO: 6785 - DNA, 20 bp, synthetic construct
  misc_feature 1..20: note = Description of Artificial Sequence: Synthetic oligonucleotide
  misc_feature 1..20: note = Target: SCN10A; (-) strand; PAM type: NNGRRT; PAM sequence: CTGGAT
  source 1..20: mol_type = other DNA
aaatgtccaacagtgataga

SEQ ID NO: 6786 - DNA, 20 bp, synthetic construct
  misc_feature 1..20: note = Description of Artificial Sequence: Synthetic oligonucleotide
  misc_feature 1..20: note = Target: SCN10A; (-) strand; PAM type: NNGRRT; PAM sequence: AAGGAT
  source 1..20: mol_type = other DNA
cattactgggtatataccca

SEQ ID NO: 6787 - DNA, 20 bp, synthetic construct
  misc_feature 1..20: note = Description of Artificial Sequence: Synthetic oligonucleotide
  misc_feature 1..20: note = Target: SCN10A; (-) strand; PAM type: NNGRRT; PAM sequence: CTGGGT
  source 1..20: mol_type = other DNA
ttgacccagccatcccatta

SEQ ID NO: 6788 - DNA, 20 bp, synthetic construct
  misc_feature 1..20: note = Description of Artificial Sequence: Synthetic oligonucleotide
  misc_feature 1..20: note = Target: SCN10A; (-) strand; PAM type: NNGRRT; PAM sequence: AGGGAT
  source 1..20: mol_type = other DNA
agtcggtgtggcaattcctc

SEQ ID NO: 6789 - DNA, 20 bp, synthetic construct
  misc_feature 1..20: note = Description of Artificial Sequence: Synthetic oligonucleotide
  misc_feature 1..20: note = Target: SCN10A; (-) strand; PAM type: NNGRRT; PAM sequence: GTGGGT
  source 1..20: mol_type = other DNA
ggaacacttttacactgttg

SEQ ID NO: 6790 - DNA, 20 bp, synthetic construct
  misc_feature 1..20: note = Description of Artificial Sequence: Synthetic oligonucleotide
  misc_feature 1..20: note = Target: SCN10A; (-) strand; PAM type: NNGRRT; PAM sequence: GAGGAT
  source 1..20: mol_type = other DNA
aggaaacaacaggtgctgga

SEQ ID NO: 6791 - DNA, 20 bp, synthetic construct
  misc_feature 1..20: note = Description of Artificial Sequence: Synthetic oligonucleotide
  misc_feature 1..20: note = Target: SCN10A; (-) strand; PAM type: NNGRRT; PAM sequence: TAGAAT
  source 1..20: mol_type = other DNA
agataccatctcacaccagt

SEQ ID NO: 6792 - DNA, 20 bp, synthetic construct
  misc_feature 1..20: note = Description of Artificial Sequence: Synthetic oligonucleotide
  misc_feature 1..20: note = Target: SCN10A; (-) strand; PAM type: NNGRRT; PAM sequence: AAGGAT
  source 1..20: mol_type = other DNA
atcccatcaaaaagtgggcg

SEQ ID NO: 6793 - DNA, 20 bp, synthetic construct
  misc_feature 1..20: note = Description of Artificial Sequence: Synthetic oligonucleotide
  misc_feature 1..20: note = Target: SCN10A; (-) strand; PAM type: NNGRRT; PAM sequence: CAGAAT
  source 1..20: mol_type = other DNA
tctgacgaagggctaatatc

SEQ ID NO: 6794 - DNA, 20 bp, synthetic construct
  misc_feature 1..20: note = Description of Artificial Sequence: Synthetic oligonucleotide
  misc_feature 1..20: note = Target: SCN10A; (-) strand; PAM type: NNGRRT; PAM sequence: CAGGAT
  source 1..20: mol_type = other DNA
tcagagtgaacagaaaccta

SEQ ID NO: 6795 - DNA, 20 bp, synthetic construct
  misc_feature 1..20: note = Description of Artificial Sequence: Synthetic oligonucleotide
  misc_feature 1..20: note = Target: SCN10A; (-) strand; PAM type: NNGRRT; PAM sequence: CAGAGT
  source 1..20: mol_type = other DNA
gcagcaaaagaaaccaccat

SEQ ID NO: 6796 - DNA, 20 bp, synthetic construct
  misc_feature 1..20: note = Description of Artificial Sequence: Synthetic oligonucleotide
  misc_feature 1..20: note = Target: SCN10A; (-) strand; PAM type: NNGRRT; PAM sequence: TGGGAT
  source 1..20: mol_type = other DNA
caaaagtcaaaattgacaaa

SEQ ID NO: 6797 - DNA, 20 bp, synthetic construct
  misc_feature 1..20: note = Description of Artificial Sequence: Synthetic oligonucleotide
  misc_feature 1..20: note = Target: SCN10A; (-) strand; PAM type: NNGRRT; PAM sequence: ATGGAT
  source 1..20: mol_type = other DNA
tatacaaaaattaattcaag

SEQ ID NO: 6798 - DNA, 20 bp, synthetic construct
  misc_feature 1..20: note = Description of Artificial Sequence: Synthetic oligonucleotide
  misc_feature 1..20: note = Target: SCN10A; (-) strand; PAM type: NNGRRT; PAM sequence: CTGGAT
  source 1..20: mol_type = other DNA
ccatatggagaaagctgaaa

SEQ ID NO: 6799 - DNA, 20 bp, synthetic construct
  misc_feature 1..20: note = Description of Artificial Sequence: Synthetic oligonucleotide
  misc_feature 1..20: note = Target: SCN10A; (-) strand; PAM type: NNGRRT; PAM sequence: AAGGAT
  source 1..20: mol_type = other DNA
acaaaaacaagaaatgggga

SEQ ID NO: 6800 - DNA, 20 bp, synthetic construct
  misc_feature 1..20: note = Description of Artificial Sequence: Synthetic oligonucleotide
  misc_feature 1..20: note = Target: SCN10A; (-) strand; PAM type: NNGRRT; PAM sequence: GGGAGT
  source 1..20: mol_type = other DNA
tctttgaagcaattgtgaat

SEQ ID NO: 6801 - DNA, 20 bp, synthetic construct
  misc_feature 1..20: note = Description of Artificial Sequence: Synthetic oligonucleotide
  misc_feature 1..20: note = Target: SCN10A; (-) strand; PAM type: NNGRRT; PAM sequence: GTGAAT
  source 1..20: mol_type = other DNA
ttattctctttgaagcaatt

SEQ ID NO: 6802 - DNA, 20 bp, synthetic construct
  misc_feature 1..20: note = Description of Artificial Sequence: Synthetic oligonucleotide
  misc_feature 1..20: note = Target: SCN10A; (-) strand; PAM type: NNGRRT; PAM sequence: TGGAGT
  source 1..20: mol_type = other DNA
attcttcctacccatgagca

SEQ ID NO: 6803 - DNA, 20 bp, synthetic construct
  misc_feature 1..20: note = Description of Artificial Sequence: Synthetic oligonucleotide
  misc_feature 1..20: note = Target: SCN10A; (-) strand; PAM type: NNGRRT; PAM sequence: TTGAAT
  source 1..20: mol_type = other DNA
gtagcttgatggggatggca

SEQ ID NO: 6804 - DNA, 20 bp, synthetic construct
  misc_feature 1..20: note = Description of Artificial Sequence: Synthetic oligonucleotide
  misc_feature 1..20: note = Target: SCN10A; (-) strand; PAM type: NNGRRT; PAM sequence: GGGGAT
  source 1..20: mol_type = other DNA
aaagtcattggtagcttgat

SEQ ID NO: 6805 - DNA, 20 bp, synthetic construct
  misc_feature 1..20: note = Description of Artificial Sequence: Synthetic oligonucleotide
  misc_feature 1..20: note = Target: SCN10A; (-) strand; PAM type: NNGRRT; PAM sequence: TAGGAT
  source 1..20: mol_type = other DNA
ggttaaaaaaaaaacaggat

SEQ ID NO: 6806 - DNA, 20 bp, synthetic construct
  misc_feature 1..20: note = Description of Artificial Sequence: Synthetic oligonucleotide
  misc_feature 1..20: note = Target: SCN10A; (-) strand; PAM type: NNGRRT; PAM sequence: CAGGAT
  source 1..20: mol_type = other DNA
aagtaaggttaaaaaaaaaa

SEQ ID NO: 6807 - DNA, 20 bp, synthetic construct
  misc_feature 1..20: note = Description of Artificial Sequence: Synthetic oligonucleotide
  misc_feature 1..20: note = Target: SCN10A; (-) strand; PAM type: NNGRRT; PAM sequence: TAGAGT
  source 1..20: mol_type = other DNA
tgccagtaacaaatcagaaa

SEQ ID NO: 6808 - DNA, 20 bp, synthetic construct
  misc_feature 1..20: note = Description of Artificial Sequence: Synthetic oligonucleotide
  misc_feature 1..20: note = Target: SCN10A; (-) strand; PAM type: NNGRRT; PAM sequence: TAGGGT
  source 1..20: mol_type = other DNA
agaatgaatgacttaattat

SEQ ID NO: 6809 - DNA, 20 bp, synthetic construct
  misc_feature 1..20: note = Description of Artificial Sequence: Synthetic oligonucleotide
  misc_feature 1..20: note = Target: SCN10A; (-) strand; PAM type: NNGRRT; PAM sequence: ATGAAT
  source 1..20: mol_type = other DNA
ttagactgtgtaacttaaga

SEQ ID NO: 6810 - DNA, 20 bp, synthetic construct
  misc_feature 1..20: note = Description of Artificial Sequence: Synthetic oligonucleotide
  misc_feature 1..20: note = Target: SCN10A; (-) strand; PAM type: NNGRRT; PAM sequence: AAGAAT
  source 1..20: mol_type = other DNA
atcattagactgtgtaactt

SEQ ID NO: 6811 - DNA, 20 bp, synthetic construct
  misc_feature 1..20: note = Description of Artificial Sequence: Synthetic oligonucleotide
  misc_feature 1..20: note = Target: SCN10A; (-) strand; PAM type: NNGRRT; PAM sequence: TAGGGT
  source 1..20: mol_type = other DNA
taaaattatactttaaattc

SEQ ID NO: 6812 - DNA, 20 bp, synthetic construct
  misc_feature 1..20: note = Description of Artificial Sequence: Synthetic oligonucleotide
  misc_feature 1..20: note = Target: SCN10A; (-) strand; PAM type: NNGRRT; PAM sequence: AGGGAT
  source 1..20: mol_type = other DNA
aagtcactttcctaagtgtt

SEQ ID NO: 6813 - DNA, 20 bp, synthetic construct
  misc_feature 1..20: note = Description of Artificial Sequence: Synthetic oligonucleotide
  misc_feature 1..20: note = Target: SCN10A; (-) strand; PAM type: NNGRRT; PAM sequence: CAGAAT
  source 1..20: mol_type = other DNA
ttcagaacatccacttaaca

SEQ ID NO: 6814 - DNA, 20 bp, synthetic construct
  misc_feature 1..20: note = Description of Artificial Sequence: Synthetic oligonucleotide
  misc_feature 1..20: note = Target: SCN10A; (-) strand; PAM type: NNGRRT; PAM sequence: CAGGAT
  source 1..20: mol_type = other DNA
cactgaagggagataagaga

SEQ ID NO: 6815 - DNA, 20 bp, synthetic construct
  misc_feature 1..20: note = Description of Artificial Sequence: Synthetic oligonucleotide
  misc_feature 1..20: note = Target: SCN10A; (-) strand; PAM type: NNGRRT; PAM sequence: GAGGAT
  source 1..20: mol_type = other DNA
atctctctggcccagaatgt

SEQ ID NO: 6816 - DNA, 20 bp, synthetic construct
  misc_feature 1..20: note = Description of Artificial Sequence: Synthetic oligonucleotide
  misc_feature 1..20: note = Target: SCN10A; (-) strand; PAM type: NNGRRT; PAM sequence: CAGAAT
  source 1..20: mol_type = other DNA
aaactagaatctctctggcc

SEQ ID NO: 6817 - DNA, 20 bp, synthetic construct
  misc_feature 1..20: note = Description of Artificial Sequence: Synthetic oligonucleotide
  misc_feature 1..20: note = Target: SCN10A; (-) strand; PAM type: NNGRRT; PAM sequence: TAGAAT
  source 1..20: mol_type = other DNA
ccacccacaagaggtaaaac

SEQ ID NO: 6818 - DNA, 20 bp, synthetic construct
  misc_feature 1..20: note = Description of Artificial Sequence: Synthetic oligonucleotide
  misc_feature 1..20: note = Target: SCN10A; (-) strand; PAM type: NNGRRT; PAM sequence: CGGAGT
  source 1..20: mol_type = other DNA
tatacacatcttgcatgaca

SEQ ID NO: 6819 - DNA, 20 bp, synthetic construct
  misc_feature 1..20: note = Description of Artificial Sequence: Synthetic oligonucleotide
  misc_feature 1..20: note = Target: SCN10A; (-) strand; PAM type: NNGRRT; PAM sequence: AGGGAT
  source 1..20: mol_type = other DNA
gtaatgggaaacattggaaa

SEQ ID NO: 6820 - DNA, 20 bp, synthetic construct
  misc_feature 1..20: note = Description of Artificial Sequence: Synthetic oligonucleotide
  misc_feature 1..20: note = Target: SCN10A; (-) strand; PAM type: NNGRRT; PAM sequence: GAGAAT
  source 1..20: mol_type = other DNA
atctagcctcagaagtgtaa

SEQ ID NO: 6821 - DNA, 20 bp, synthetic construct
  misc_feature 1..20: note = Description of Artificial Sequence: Synthetic oligonucleotide
  misc_feature 1..20: note = Target: SCN10A; (-) strand; PAM type: NNGRRT; PAM sequence: AGGAAT
  source 1..20: mol_type = other DNA
agagatacatgtgcaggcca

SEQ ID NO: 6822 - DNA, 20 bp, synthetic construct
  misc_feature 1..20: note = Description of Artificial Sequence: Synthetic oligonucleotide
  misc_feature 1..20: note = Target: SCN10A; (-) strand; PAM type: NNGRRT; PAM sequence: GAGAAT
  source 1..20: mol_type = other DNA
gaacagagacacacagagag

SEQ ID NO: 6823 - DNA, 20 bp, synthetic construct
  misc_feature 1..20: note = Description of Artificial Sequence: Synthetic oligonucleotide
  misc_feature 1..20: note = Target: SCN10A; (-) strand; PAM type: NNGRRT; PAM sequence: GGGAAT
  source 1..20: mol_type = other DNA
tggtgttgctaaaatatgag

SEQ ID NO: 6824 - DNA, 20 bp, synthetic construct
  misc_feature 1..20: note = Description of Artificial Sequence: Synthetic oligonucleotide
  misc_feature 1..20: note = Target: SCN10A; (-) strand; PAM type: NNGRRT; PAM sequence: AAGGGT
  source 1..20: mol_type = other DNA
ggttgaataatgttccctaa

SEQ ID NO: 6825 - DNA, 20 bp, synthetic construct
  misc_feature 1..20: note = Description of Artificial Sequence: Synthetic oligonucleotide
  misc_feature 1..20: note = Target: SCN10A; (-) strand; PAM type: NNGRRT; PAM sequence: TTGAAT
  source 1..20: mol_type = other DNA
atgttgaattatgctttggg

SEQ ID NO: 6826 - DNA, 20 bp, synthetic construct
  misc_feature 1..20: note = Description of Artificial Sequence: Synthetic oligonucleotide
  misc_feature 1..20: note = Target: SCN10A; (-) strand; PAM type: NNGRRT; PAM sequence: TTGGGT
  source 1..20: mol_type = other DNA
actttatgttgaattatgct

SEQ ID NO: 6827 - DNA, 20 bp, synthetic construct
  misc_feature 1..20: note = Description of Artificial Sequence: Synthetic oligonucleotide
  misc_feature 1..20: note = Target: SCN10A; (-) strand; PAM type: NNGRRT; PAM sequence: TTGAAT
  source 1..20: mol_type = other DNA
gaacataattcaactttatg

SEQ ID NO: 6828 - DNA, 20 bp, synthetic construct
  misc_feature 1..20: note = Description of Artificial Sequence: Synthetic oligonucleotide
  misc_feature 1..20: note = Target: SCN10A; (-) strand; PAM type: NNGRRT; PAM sequence: TTGAAT
  source 1..20: mol_type = other DNA
aaaagtatttttactttgag

SEQ ID NO: 6829 - DNA, 20 bp, synthetic construct
  misc_feature 1..20: note = Description of Artificial Sequence: Synthetic oligonucleotide
  misc_feature 1..20: note = Target: SCN10A; (-) strand; PAM type: NNGRRT; PAM sequence: TTGAGT
  source 1..20: mol_type = other DNA
ttctcaaaagtatttttact

SEQ ID NO: 6830 - DNA, 20 bp, synthetic construct
  misc_feature 1..20: note = Description of Artificial Sequence: Synthetic oligonucleotide
  misc_feature 1..20: note = Target: SCN10A; (-) strand; PAM type: NNGRRT; PAM sequence: AAGAAT
  source 1..20: mol_type = other DNA
atttttacaatgatatgtga

SEQ ID NO: 6831 - DNA, 20 bp, synthetic construct
  misc_feature 1..20: note = Description of Artificial Sequence: Synthetic oligonucleotide
  misc_feature 1..20: note = Target: SCN10A; (-) strand; PAM type: NNGRRT; PAM sequence: GAGAGT
  source 1..20: mol_type = other DNA
ataagacagctaagtggaca

SEQ ID NO: 6832 - DNA, 20 bp, synthetic construct
  misc_feature 1..20: note = Description of Artificial Sequence: Synthetic oligonucleotide
  misc_feature 1..20: note = Target: SCN10A; (-) strand; PAM type: NNGRRT; PAM sequence: GTGGAT
  source 1..20: mol_type = other DNA
cttcaacgtctaaatcccat

SEQ ID NO: 6833 - DNA, 20 bp, synthetic construct
  misc_feature 1..20: note = Description of Artificial Sequence: Synthetic oligonucleotide
  misc_feature 1..20: note = Target: SCN10A; (-) strand; PAM type: NNGRRT; PAM sequence: ATGAGT
  source 1..20: mol_type = other DNA
tgcctgatttattctaaaag

SEQ ID NO: 6834 - DNA, 20 bp, synthetic construct
  misc_feature 1..20: note = Description of Artificial Sequence: Synthetic oligonucleotide
  misc_feature 1..20: note = Target: SCN10A; (-) strand; PAM type: NNGRRT; PAM sequence: CTGAAT
  source 1..20: mol_type = other DNA
catctcaaatcagctattct

SEQ ID NO: 6835 - DNA, 20 bp, synthetic construct
  misc_feature 1..20: note = Description of Artificial Sequence: Synthetic oligonucleotide
  misc_feature 1..20: note = Target: SCN10A; (-) strand; PAM type: NNGRRT; PAM sequence: TGGGAT
  source 1..20: mol_type = other DNA
gcaggttaataagatgatga

SEQ ID NO: 6836 - DNA, 20 bp, synthetic construct
  misc_feature 1..20: note = Description of Artificial Sequence: Synthetic oligonucleotide
  misc_feature 1..20: note = Target: SCN10A; (-) strand; PAM type: NNGRRT; PAM sequence: GGGAGT
  source 1..20: mol_type = other DNA
aggctctcaagatgcttact

SEQ ID NO: 6837 - DNA, 20 bp, synthetic construct
  misc_feature 1..20: note = Description of Artificial Sequence: Synthetic oligonucleotide
  misc_feature 1..20: note = Target: SCN10A; (-) strand; PAM type: NNGRRT; PAM sequence: AAGAAT
  source 1..20: mol_type = other DNA
tgatacatctcacatgcctc

SEQ ID NO: 6838 - DNA, 20 bp, synthetic construct
  misc_feature 1..20: note = Description of Artificial Sequence: Synthetic oligonucleotide
  misc_feature 1..20: note = Target: SCN10A; (-) strand; PAM type: NNGRRT; PAM sequence: AGGGAT
  source 1..20: mol_type = other DNA
cctataacaacataggacat

SEQ ID NO: 6839 - DNA, 20 bp, synthetic construct
  misc_feature 1..20: note = Description of Artificial Sequence: Synthetic oligonucleotide
  misc_feature 1..20: note = Target: SCN10A; (-) strand; PAM type: NNGRRT; PAM sequence: AGGAGT
  source 1..20: mol_type = other DNA
aatggagtaagaattgtcag

SEQ ID NO: 6840 - DNA, 20 bp, synthetic construct
  misc_feature 1..20: note = Description of Artificial Sequence: Synthetic oligonucleotide
  misc_feature 1..20: note = Target: SCN10A; (-) strand; PAM type: NNGRRT; PAM sequence: AAGAAT
  source 1..20: mol_type = other DNA
ttgtatgaactgaatggagt

SEQ ID NO: 6841 - DNA, 20 bp, synthetic construct
  misc_feature 1..20: note = Description of Artificial Sequence: Synthetic oligonucleotide
  misc_feature 1..20: note = Target: SCN10A; (-) strand; PAM type: NNGRRT; PAM sequence: TGGAGT
  source 1..20: mol_type = other DNA
gattaattgtatgaactgaa

SEQ ID NO: 6842 - DNA, 20 bp, synthetic construct
  misc_feature 1..20: note = Description of Artificial Sequence: Synthetic oligonucleotide
  misc_feature 1..20: note = Target: SCN10A; (-) strand; PAM type: NNGRRT; PAM sequence: CTGAAT
  source 1..20: mol_type = other DNA
caaaagattaattgtatgaa

SEQ ID NO: 6843 - DNA, 20 bp, synthetic construct
  misc_feature 1..20: note = Description of Artificial Sequence: Synthetic oligonucleotide
  misc_feature 1..20: note = Target: SCN10A; (-) strand; PAM type: NNGRRT; PAM sequence: AGGAAT
  source 1..20: mol_type = other DNA
ccaagaacaagagataaaat

SEQ ID NO: 6844 - DNA, 20 bp, synthetic construct
  misc_feature 1..20: note = Description of Artificial Sequence: Synthetic oligonucleotide
  misc_feature 1..20: note = Target: SCN10A; (-) strand; PAM type: NNGRRT; PAM sequence: GAGAAT
  source 1..20: mol_type = other DNA
agaagaaaaagtataatcat

SEQ ID NO: 6845 - DNA, 20 bp, synthetic construct
  misc_feature 1..20: note = Description of Artificial Sequence: Synthetic oligonucleotide
  misc_feature 1..20: note = Target: SCN10A; (-) strand; PAM type: NNGRRT; PAM sequence: GAGAGT
  source 1..20: mol_type = other DNA
cataatcagacattaaggag

SEQ ID NO: 6846 - DNA, 20 bp, synthetic construct
  misc_feature 1..20: note = Description of Artificial Sequence: Synthetic oligonucleotide
  misc_feature 1..20: note = Target: SCN10A; (-) strand; PAM type: NNGRRT; PAM sequence: CAGAGT
  source 1..20: mol_type = other DNA
ggcagcttttgaatacattc

SEQ ID NO: 6847 - DNA, 20 bp, synthetic construct
  misc_feature 1..20: note = Description of Artificial Sequence: Synthetic oligonucleotide
  misc_feature 1..20: note = Target: SCN10A; (-) strand; PAM type: NNGRRT; PAM sequence: TTGAAT
  source 1..20: mol_type = other DNA
tgtagctaaagaggcagctt

SEQ ID NO: 6848 - DNA, 20 bp, synthetic construct
  misc_feature 1..20: note = Description of Artificial Sequence: Synthetic oligonucleotide
  misc_feature 1..20: note = Target: SCN10A; (-) strand; PAM type: NNGRRT; PAM sequence: ATGAAT
  source 1..20: mol_type = other DNA
attggtgggaagggaagaaa

SEQ ID NO: 6849 - DNA, 20 bp, synthetic construct
  misc_feature 1..20: note = Description of Artificial Sequence: Synthetic oligonucleotide
  misc_feature 1..20: note = Target: SCN10A; (-) strand; PAM type: NNGRRT; PAM sequence: TGGAAT
  source 1..20: mol_type = other DNA
tgggatctggaaatgccagt

SEQ ID NO: 6850 - DNA, 20 bp, synthetic construct
  misc_feature 1..20: note = Description of Artificial Sequence: Synthetic oligonucleotide
  misc_feature 1..20: note = Target: SCN10A; (-) strand; PAM type: NNGRRT; PAM sequence: TGGGAT
  source 1..20: mol_type = other DNA
agcaggaaagagcactgtcc

SEQ ID NO: 6851 - DNA, 20 bp, synthetic construct
  misc_feature 1..20: note = Description of Artificial Sequence: Synthetic oligonucleotide
  misc_feature 1..20: note = Target: SCN10A; (-) strand; PAM type: NNGRRT; PAM sequence: CTGGGT
  source 1..20: mol_type = other DNA
ttttcagtttgagattgagg

SEQ ID NO: 6852 - DNA, 20 bp, synthetic construct
  misc_feature 1..20: note = Description of Artificial Sequence: Synthetic oligonucleotide
  misc_feature 1..20: note = Target: SCN10A; (-) strand; PAM type: NNGRRT; PAM sequence: TGGGAT
  source 1..20: mol_type = other DNA
gtcacttacccctcactttc

SEQ ID NO: 6853 - DNA, 20 bp, synthetic construct
  misc_feature 1..20: note = Description of Artificial Sequence: Synthetic oligonucleotide
  misc_feature 1..20: note = Target: SCN10A; (-) strand; PAM type: NNGRRT; PAM sequence: ATGAGT
  source 1..20: mol_type = other DNA
ctgtgatgctgacctgtatc

SEQ ID NO: 6854 - DNA, 20 bp, synthetic construct
  misc_feature 1..20: note = Description of Artificial Sequence: Synthetic oligonucleotide
  misc_feature 1..20: note = Target: SCN10A; (-) strand; PAM type: NNGRRT; PAM sequence: CAGGGT
  source 1..20: mol_type = other DNA
gtcggacaactgctctgacc

SEQ ID NO: 6855 - DNA, 20 bp, synthetic construct
  misc_feature 1..20: note = Description of Artificial Sequence: Synthetic oligonucleotide
  misc_feature 1..20: note = Target: SCN10A; (-) strand; PAM type: NNGRRT; PAM sequence: TAGGAT
  source 1..20: mol_type = other DNA
cagagattggcaatattatt

SEQ ID NO: 6856 - DNA, 20 bp, synthetic construct
  misc_feature 1..20: note = Description of Artificial Sequence: Synthetic oligonucleotide
  misc_feature 1..20: note = Target: SCN10A; (-) strand; PAM type: NNGRRT; PAM sequence: ATGGGT
  source 1..20: mol_type = other DNA
ctgaatttcaatatcagatc

SEQ ID NO: 6857 - DNA, 20 bp, synthetic construct
  misc_feature 1..20: note = Description of Artificial Sequence: Synthetic oligonucleotide
  misc_feature 1..20: note = Target: SCN10A; (-) strand; PAM type: NNGRRT; PAM sequence: CTGAAT
  source 1..20: mol_type = other DNA
cttccactgtgatttccctt

SEQ ID NO: 6858 - DNA, 20 bp, synthetic construct
  misc_feature 1..20: note = Description of Artificial Sequence: Synthetic oligonucleotide
  misc_feature 1..20: note = Target: SCN10A; (-) strand; PAM type: NNGRRT; PAM sequence: AGGAGT
  source 1..20: mol_type = other DNA
aaaaaccatcatacacaaat

SEQ ID NO: 6859 - DNA, 20 bp, synthetic construct
  misc_feature 1..20: note = Description of Artificial Sequence: Synthetic oligonucleotide
  misc_feature 1..20: note = Target: SCN10A; (-) strand; PAM type: NNGRRT; PAM sequence: GGGAAT
  source 1..20: mol_type = other DNA
cacaatgtcagaactgggca

SEQ ID NO: 6860 - DNA, 20 bp, synthetic construct
  misc_feature 1..20: note = Description of Artificial Sequence: Synthetic oligonucleotide
  misc_feature 1..20: note = Target: SCN10A; (-) strand; PAM type: NNGRRT; PAM sequence: CTGGAT
  source 1..20: mol_type = other DNA
cctagtgagaacactccagc

SEQ ID NO: 6861 - DNA, 20 bp, synthetic construct
  misc_feature 1..20: note = Description of Artificial Sequence: Synthetic oligonucleotide
  misc_feature 1..20: note = Target: SCN10A; (-) strand; PAM type: NNGRRT; PAM sequence: TAGAGT
  source 1..20: mol_type = other DNA
gtcactagaggccttagtga

SEQ ID NO: 6862 - DNA, 20 bp, synthetic construct
  misc_feature 1..20: note = Description of Artificial Sequence: Synthetic oligonucleotide
  misc_feature 1..20: note = Target: SCN10A; (-) strand; PAM type: NNGRRT; PAM sequence: GAGAGT
  source 1..20: mol_type = other DNA
catcattcccaccgtcctat

SEQ ID NO: 6863 - DNA, 20 bp, synthetic construct
  misc_feature 1..20: note = Description of Artificial Sequence: Synthetic oligonucleotide
  misc_feature 1..20: note = Target: SCN10A; (-) strand; PAM type: NNGRRT; PAM sequence: TTGGAT
  source 1..20: mol_type = other DNA
tcctaggagaatccggggag

SEQ ID NO: 6864 - DNA, 20 bp, synthetic construct
  misc_feature 1..20: note = Description of Artificial Sequence: Synthetic oligonucleotide
  misc_feature 1..20: note = Target: SCN10A; (-) strand; PAM type: NNGRRT; PAM sequence: GGGAGT
  source 1..20: mol_type = other DNA
gaatgtcctaggagaatccg

SEQ ID NO: 6865 - DNA, 20 bp, synthetic construct
  misc_feature 1..20: note = Description of Artificial Sequence: Synthetic oligonucleotide
  misc_feature 1..20: note = Target: SCN10A; (-) strand; PAM type: NNGRRT; PAM sequence: GAGAAT
  source 1..20: mol_type = other DNA
tttcaccaagaatgtcctag

SEQ ID NO: 6866 - DNA, 20 bp, synthetic construct
  misc_feature 1..20: note = Description of Artificial Sequence: Synthetic oligonucleotide
  misc_feature 1..20: note = Target: SCN10A; (-) strand; PAM type: NNGRRT; PAM sequence: AAGAAT
  source 1..20: mol_type = other DNA
acatcctttttgctttcacc

SEQ ID NO: 6867 - DNA, 20 bp, synthetic construct
  misc_feature 1..20: note = Description of Artificial Sequence: Synthetic oligonucleotide
  misc_feature 1..20: note = Target: SCN10A; (-) strand; PAM type: NNGRRT; PAM sequence: GAGAAT
  source 1..20: mol_type = other DNA
gacactctctctggtcccct

SEQ ID NO: 6868 - DNA, 20 bp, synthetic construct
  misc_feature 1..20: note = Description of Artificial Sequence: Synthetic oligonucleotide
  misc_feature 1..20: note = Target: SCN10A; (-) strand; PAM type: NNGRRT; PAM sequence: CTGAGT
  source 1..20: mol_type = other DNA
cggaggagagcactgagccc

SEQ ID NO: 6869 - DNA, 20 bp, synthetic construct
  misc_feature 1..20: note = Description of Artificial Sequence: Synthetic oligonucleotide
  misc_feature 1..20: note = Target: SCN10A; (-) strand; PAM type: NNGRRT; PAM sequence: TGGGAT
  source 1..20: mol_type = other DNA
agattaccacgtcggccggc

SEQ ID NO: 6870 - DNA, 20 bp, synthetic construct
  misc_feature 1..20: note = Description of Artificial Sequence: Synthetic oligonucleotide
  misc_feature 1..20: note = Target: SCN10A; (-) strand; PAM type: NNGRRT; PAM sequence: GGGGAT
  source 1..20: mol_type = other DNA
agactgatccgagcggccaa

SEQ ID NO: 6871 - DNA, 20 bp, synthetic construct
  misc_feature 1..20: note = Description of Artificial Sequence: Synthetic oligonucleotide
  misc_feature 1..20: note = Target: SCN10A; (-) strand; PAM type: NNGRRT; PAM sequence: CCGAAT
  source 1..20: mol_type = other DNA
ttcagagtcatccgcctggc

SEQ ID NO: 6872 - DNA, 20 bp, synthetic construct
  misc_feature 1..20: note = Description of Artificial Sequence: Synthetic oligonucleotide
  misc_feature 1..20: note = Target: SCN10A; (-) strand; PAM type: NNGRRT; PAM sequence: CAGAGT
  source 1..20: mol_type = other DNA
tacttctccccaacgctctt

SEQ ID NO: 6873 - DNA, 20 bp, synthetic construct
  misc_feature 1..20: note = Description of Artificial Sequence: Synthetic oligonucleotide
  misc_feature 1..20: note = Target: SCN10A; (-) strand; PAM type: NNGRRT; PAM sequence: CAGAGT
  source 1..20: mol_type = other DNA
gcagtctataccaagcaaag

SEQ ID NO: 6874 - DNA, 20 bp, synthetic construct
  misc_feature 1..20: note = Description of Artificial Sequence: Synthetic oligonucleotide
  misc_feature 1..20: note = Target: SCN10A; (-) strand; PAM type: NNGRRT; PAM sequence: GTGGAT
  source 1..20: mol_type = other DNA
agggcccagagtcctcaaat

SEQ ID NO: 6875 - DNA, 20 bp, synthetic construct
  misc_feature 1..20: note = Description of Artificial Sequence: Synthetic oligonucleotide
  misc_feature 1..20: note = Target: SCN10A; (-) strand; PAM type: NNGRRT; PAM sequence: CAGAGT
  source 1..20: mol_type = other DNA
catgccaggctctgagggcc

SEQ ID NO: 6876 - DNA, 20 bp, synthetic construct
  misc_feature 1..20: note = Description of Artificial Sequence: Synthetic oligonucleotide
  misc_feature 1..20: note = Target: SCN10A; (-) strand; PAM type: NNGRRT; PAM sequence: AAGGGT
  source 1..20: mol_type = other DNA
ggcaaagataacatggtagg

SEQ ID NO: 6877 - DNA, 20 bp, synthetic construct
  misc_feature 1..20: note = Description of Artificial Sequence: Synthetic oligonucleotide
  misc_feature 1..20: note = Target: SCN10A; (-) strand; PAM type: NNGRRT; PAM sequence: GAGGAT
  source 1..20: mol_type = other DNA
tgactgtggaggttgaccaa

SEQ ID NO: 6878 - DNA, 20 bp, synthetic construct
  misc_feature 1..20: note = Description of Artificial Sequence: Synthetic oligonucleotide
  misc_feature 1..20: note = Target: SCN10A; (-) strand; PAM type: NNGRRT; PAM sequence: TGGAAT
  source 1..20: mol_type = other DNA
ggccaaagactgtgagcctg

SEQ ID NO: 6879 - DNA, 20 bp, synthetic construct
  misc_feature 1..20: note = Description of Artificial Sequence: Synthetic oligonucleotide
  misc_feature 1..20: note = Target: SCN10A; (-) strand; PAM type: NNGRRT; PAM sequence: CAGGGT
  source 1..20: mol_type = other DNA
gctgcagtatcagggaggag

SEQ ID NO: 6880 - DNA, 20 bp, synthetic construct
  misc_feature 1..20: note = Description of Artificial Sequence: Synthetic oligonucleotide
  misc_feature 1..20: note = Target: SCN10A; (-) strand; PAM type: NNGRRT; PAM sequence: CAGGGT
  source 1..20: mol_type = other DNA
gccttcacagagcacaggac

SEQ ID NO: 6881 - DNA, 20 bp, synthetic construct
  misc_feature 1..20: note = Description of Artificial Sequence: Synthetic oligonucleotide
  misc_feature 1..20: note = Target: SCN10A; (-) strand; PAM type: NNGRRT; PAM sequence: AGGGGT
  source 1..20: mol_type = other DNA
aggtagggagaggaatcata

SEQ ID NO: 6882 - DNA, 20 bp, synthetic construct
  misc_feature 1..20: note = Description of Artificial Sequence: Synthetic oligonucleotide
  misc_feature 1..20: note = Target: SCN10A; (-) strand; PAM type: NNGRRT; PAM sequence: AGGAAT
  source 1..20: mol_type = other DNA
tcacagtaggaggtagggag

SEQ ID NO: 6883 - DNA, 20 bp, synthetic construct
  misc_feature 1..20: note = Description of Artificial Sequence: Synthetic oligonucleotide
  misc_feature 1..20: note = Target: SCN10A; (-) strand; PAM type: NNGRRT; PAM sequence: CAGAGT
  source 1..20: mol_type = other DNA
acaggaccgggtgccagaaa

SEQ ID NO: 6884 - DNA, 20 bp, synthetic construct
  misc_feature 1..20: note = Description of Artificial Sequence: Synthetic oligonucleotide
  misc_feature 1..20: note = Target: SCN10A; (-) strand; PAM type: NNGRRT; PAM sequence: CCGGGT
  source 1..20: mol_type = other DNA
ccgtacaattagccacagga

SEQ ID NO: 6885 - DNA, 20 bp, synthetic construct
  misc_feature 1..20: note = Description of Artificial Sequence: Synthetic oligonucleotide
  misc_feature 1..20: note = Target: SCN10A; (-) strand; PAM type: NNGRRT; PAM sequence: CCGAAT
  source 1..20: mol_type = other DNA
tttagctgtcagccagttgc

SEQ ID NO: 6886 - DNA, 20 bp, synthetic construct
  misc_feature 1..20: note = Description of Artificial Sequence: Synthetic oligonucleotide
  misc_feature 1..20: note = Target: SCN10A; (-) strand; PAM type: NNGRRT; PAM sequence: TGGAGT
  source 1..20: mol_type = other DNA
tttccaactttgttcatagt

SEQ ID NO: 6887 - DNA, 20 bp, synthetic construct
  misc_feature 1..20: note = Description of Artificial Sequence: Synthetic oligonucleotide
  misc_feature 1..20: note = Target: SCN10A; (-) strand; PAM type: NNGRRT; PAM sequence: CAGAGT
  source 1..20: mol_type = other DNA
tgtctggcagaaaattttac

SEQ ID NO: 6888 - DNA, 20 bp, synthetic construct
  misc_feature 1..20: note = Description of Artificial Sequence: Synthetic oligonucleotide
  misc_feature 1..20: note = Target: SCN10A; (-) strand; PAM type: NNGRRT; PAM sequence: TTGAGT
  source 1..20: mol_type = other DNA
ttcccaccaacaagaggtga

SEQ ID NO: 6889 - DNA, 20 bp, synthetic construct
  misc_feature 1..20: note = Description of Artificial Sequence: Synthetic oligonucleotide
  misc_feature 1..20: note = Target: SCN10A; (-) strand; PAM type: NNGRRT; PAM sequence: AGGAAT
  source 1..20: mol_type = other DNA
gtagcaccatccgctggggc

SEQ ID NO: 6890 - DNA, 20 bp, synthetic construct
  misc_feature 1..20: note = Description of Artificial Sequence: Synthetic oligonucleotide
  misc_feature 1..20: note = Target: SCN10A; (-) strand; PAM type: NNGRRT; PAM sequence: CAGGGT
  source 1..20: mol_type = other DNA
ctaccagttcctgtggctta

SEQ ID NO: 6891 - DNA, 20 bp, synthetic construct
  misc_feature 1..20: note = Description of Artificial Sequence: Synthetic oligonucleotide
  misc_feature 1..20: note = Target: SCN10A; (-) strand; PAM type: NNGRRT; PAM sequence: GGGGAT
  source 1..20: mol_type = other DNA
caagtacttagttctatgat

SEQ ID NO: 6892 - DNA, 20 bp, synthetic construct
  misc_feature 1..20: note = Description of Artificial Sequence: Synthetic oligonucleotide
  misc_feature 1..20: note = Target: SCN10A; (-) strand; PAM type: NNGRRT; PAM sequence: AGGAGT
  source 1..20: mol_type = other DNA
cttatctcacttagcataat

SEQ ID NO: 6893 - DNA, 20 bp, synthetic construct
  misc_feature 1..20: note = Description of Artificial Sequence: Synthetic oligonucleotide
  misc_feature 1..20: note = Target: SCN10A; (-) strand; PAM type: NNGRRT; PAM sequence: ATGAGT
  source 1..20: mol_type = other DNA
ccattctattctctgctccc

SEQ ID NO: 6894 - DNA, 20 bp, synthetic construct
  misc_feature 1..20: note = Description of Artificial Sequence: Synthetic oligonucleotide
  misc_feature 1..20: note = Target: SCN10A; (-) strand; PAM type: NNGRRT; PAM sequence: TAGGAT
  source 1..20: mol_type = other DNA
ctatgctataagtagagctc

SEQ ID NO: 6895 - DNA, 20 bp, synthetic construct
  misc_feature 1..20: note = Description of Artificial Sequence: Synthetic oligonucleotide
  misc_feature 1..20: note = Target: SCN10A; (-) strand; PAM type: NNGRRT; PAM sequence: TTGGGT
  source 1..20: mol_type = other DNA
cctgcctatttatttattta

SEQ ID NO: 6896 - DNA, 20 bp, synthetic construct
  misc_feature 1..20: note = Description of Artificial Sequence: Synthetic oligonucleotide
  misc_feature 1..20: note = Target: SCN10A; (-) strand; PAM type: NNGRRT; PAM sequence: ATGAGT
  source 1..20: mol_type = other DNA
tgtttaatgtacacaacttt

SEQ ID NO: 6897 - DNA, 20 bp, synthetic construct
  misc_feature 1..20: note = Description of Artificial Sequence: Synthetic oligonucleotide
  misc_feature 1..20: note = Target: SCN10A; (-) strand; PAM type: NNGRRT; PAM sequence: GGGGAT
  source 1..20: mol_type = other DNA
cttgggttgcgtgtatttcc

SEQ ID NO: 6898 - DNA, 20 bp, synthetic construct
  misc_feature 1..20: note = Description of Artificial Sequence: Synthetic oligonucleotide
  misc_feature 1..20: note = Target: SCN10A; (-) strand; PAM type: NNGRRT; PAM sequence: TTGGGT
  source 1..20: mol_type = other DNA
cttggtgctgaaacacagcc

SEQ ID NO: 6899 - DNA, 20 bp, synthetic construct
  misc_feature 1..20: note = Description of Artificial Sequence: Synthetic oligonucleotide
  misc_feature 1..20: note = Target: SCN10A; (-) strand; PAM type: NNGRRT; PAM sequence: GAGAGT
  source 1..20: mol_type = other DNA
ctgatttagtaacaagagct

SEQ ID NO: 6900 - DNA, 20 bp, synthetic construct
  misc_feature 1..20: note = Description of Artificial Sequence: Synthetic oligonucleotide
  misc_feature 1..20: note = Target: SCN10A; (-) strand; PAM type: NNGRRT; PAM sequence: CGGGGT
  source 1..20: mol_type = other DNA
gacctgcttacttttcatgt

SEQ ID NO: 6901 - DNA, 20 bp, synthetic construct
  misc_feature 1..20: note = Description of Artificial Sequence: Synthetic oligonucleotide
  misc_feature 1..20: note = Target: SCN10A; (-) strand; PAM type: NNGRRT; PAM sequence: ATGGGT
  source 1..20: mol_type = other DNA
aagagactgtccctgggctt

SEQ ID NO: 6902 - DNA, 20 bp, synthetic construct
  misc_feature 1..20: note = Description of Artificial Sequence: Synthetic oligonucleotide
  misc_feature 1..20: note = Target: SCN10A; (-) strand; PAM type: NNGRRT; PAM sequence: CTGAGT
  source 1..20: mol_type = other DNA
agagtttccaagggttgaag

SEQ ID NO: 6903 - DNA, 20 bp, synthetic construct
  misc_feature 1..20: note = Description of Artificial Sequence: Synthetic oligonucleotide
  misc_feature 1..20: note = Target: SCN10A; (-) strand; PAM type: NNGRRT; PAM sequence: AAGGGT
  source 1..20: mol_type = other DNA
tgcagggtcacagagtttcc

SEQ ID NO: 6904 - DNA, 20 bp, synthetic construct
  misc_feature 1..20: note = Description of Artificial Sequence: Synthetic oligonucleotide
  misc_feature 1..20: note = Target: SCN10A; (-) strand; PAM type: NNGRRT; PAM sequence: CAGAGT
  source 1..20: mol_type = other DNA
aagaatattatgcagggtca

SEQ ID NO: 6905 - DNA, 20 bp, synthetic construct
  misc_feature 1..20: note = Description of Artificial Sequence: Synthetic oligonucleotide
  misc_feature 1..20: note = Target: SCN10A; (-) strand; PAM type: NNGRRT; PAM sequence: CAGGGT
  source 1..20: mol_type = other DNA
cagagatcaagaatattatg

SEQ ID NO: 6906 - DNA, 20 bp, synthetic construct
  misc_feature 1..20: note = Description of Artificial Sequence: Synthetic oligonucleotide
  misc_feature 1..20: note = Target: SCN10A; (-) strand; PAM type: NNGRRT; PAM sequence: AAGAAT
  source 1..20: mol_type = other DNA
aaaattgagactcagagatc

SEQ ID NO: 6907 - DNA, 20 bp, synthetic construct
  misc_feature 1..20: note = Description of Artificial Sequence: Synthetic oligonucleotide
  misc_feature 1..20: note = Target: SCN10A; (-) strand; PAM type: NNGRRT; PAM sequence: ATGAAT
  source 1..20: mol_type = other DNA
tgagcactgagctgggctcc

SEQ ID NO: 6908 - DNA, 20 bp, synthetic construct
  misc_feature 1..20: note = Description of Artificial Sequence: Synthetic oligonucleotide
  misc_feature 1..20: note = Target: SCN10A; (-) strand; PAM type: NNGRRT; PAM sequence: CTGAAT
  source 1..20: mol_type = other DNA
gggaaatggagctgccttga

SEQ ID NO: 6909 - DNA, 20 bp, synthetic construct
  misc_feature 1..20: note = Description of Artificial Sequence: Synthetic oligonucleotide
  misc_feature 1..20: note = Target: SCN10A; (-) strand; PAM type: NNGRRT; PAM sequence: TAGAGT
  source 1..20: mol_type = other DNA
tggtgttcagagaaaattac

SEQ ID NO: 6910 - DNA, 20 bp, synthetic construct
  misc_feature 1..20: note = Description of Artificial Sequence: Synthetic oligonucleotide
  misc_feature 1..20: note = Target: SCN10A; (-) strand; PAM type: NNGRRT; PAM sequence: TTGGGT
  source 1..20: mol_type = other DNA
tgaatgacaggcccagtatt

SEQ ID NO: 6911 - DNA, 20 bp, synthetic construct
  misc_feature 1..20: note = Description of Artificial Sequence: Synthetic oligonucleotide
  misc_feature 1..20: note = Target: SCN10A; (-) strand; PAM type: NNGRRT; PAM sequence: TTGAAT
  source 1..20: mol_type = other DNA
aaggcccagtctgggtgttg

SEQ ID NO: 6912 - DNA, 20 bp, synthetic construct
  misc_feature 1..20: note = Description of Artificial Sequence: Synthetic oligonucleotide
  misc_feature 1..20: note = Target: SCN10A; (-) strand; PAM type: NNGRRT; PAM sequence: CTGGGT
  source 1..20: mol_type = other DNA
taatactgttaaggcccagt

SEQ ID NO: 6913 - DNA, 20 bp, synthetic construct
  misc_feature 1..20: note = Description of Artificial Sequence: Synthetic oligonucleotide
  misc_feature 1..20: note = Target: SCN10A; (-) strand; PAM type: NNGRRT; PAM sequence: ATGAGT
  source 1..20: mol_type = other DNA
caactgttctattagggaac

SEQ ID NO: 6914 - DNA, 20 bp, synthetic construct
  misc_feature 1..20: note = Description of Artificial Sequence: Synthetic oligonucleotide
  misc_feature 1..20: note = Target: SCN10A; (-) strand; PAM type: NNGRRT; PAM sequence: TGGAAT
  source 1..20: mol_type = other DNA
agattctcaagtctagggtc

SEQ ID NO: 6915 - DNA, 20 bp, synthetic construct
  misc_feature 1..20: note = Description of Artificial Sequence: Synthetic oligonucleotide
  misc_feature 1..20: note = Target: SCN10A; (-) strand; PAM type: NNGRRT; PAM sequence: TAGGGT
  source 1..20: mol_type = other DNA
tcaaaggagattctcaagtc

SEQ ID NO: 6916 - DNA, 20 bp, synthetic construct
  misc_feature 1..20: note = Description of Artificial Sequence: Synthetic oligonucleotide
  misc_feature 1..20: note = Target: SCN10A; (-) strand; PAM type: NNGRRT; PAM sequence: ATGGAT
  source 1..20: mol_type = other DNA
aatctgttctggaaaaggag

SEQ ID NO: 6917 - DNA, 20 bp, synthetic construct
  misc_feature 1..20: note = Description of Artificial Sequence: Synthetic oligonucleotide
  misc_feature 1..20: note = Target: SCN10A; (-) strand; PAM type: NNGRRT; PAM sequence: ATGAGT
  source 1..20: mol_type = other DNA
ggcaggtggtgtaatgtgag

SEQ ID NO: 6918 - DNA, 20 bp, synthetic construct
  misc_feature 1..20: note = Description of Artificial Sequence: Synthetic oligonucleotide
  misc_feature 1..20: note = Target: SCN10A; (-) strand; PAM type: NNGRRT; PAM sequence: TGGAGT
  source 1..20: mol_type = other DNA
aacctcagaccgtaagatga

SEQ ID NO: 6919 - DNA, 20 bp, synthetic construct
  misc_feature 1..20: note = Description of Artificial Sequence: Synthetic oligonucleotide
  misc_feature 1..20: note = Target: SCN10A; (-) strand; PAM type: NNGRRT; PAM sequence: GGGAAT
  source 1..20: mol_type = other DNA
tagaacctcaggggctgaca

SEQ ID NO: 6920 - DNA, 20 bp, synthetic construct
  misc_feature 1..20: note = Description of Artificial Sequence: Synthetic oligonucleotide
  misc_feature 1..20: note = Target: SCN10A; (-) strand; PAM type: NNGRRT; PAM sequence: AAGAGT
  source 1..20: mol_type = other DNA
ccctgtatttgcagctttcc

SEQ ID NO: 6921 - DNA, 20 bp, synthetic construct
  misc_feature 1..20: note = Description of Artificial Sequence: Synthetic oligonucleotide
  misc_feature 1..20: note = Target: SCN10A; (-) strand; PAM type: NNGRRT; PAM sequence: TGGGAT
  source 1..20: mol_type = other DNA
cacctctgtttgggggtctt

SEQ ID NO: 6922 - DNA, 20 bp, synthetic construct
  misc_feature 1..20: note = Description of Artificial Sequence: Synthetic oligonucleotide
  misc_feature 1..20: note = Target: SCN10A; (-) strand; PAM type: NNGRRT; PAM sequence: GGGGGT
  source 1..20: mol_type = other DNA
gggaagccccacctctgttt

SEQ ID NO: 6923 - DNA, 20 bp, synthetic construct
  misc_feature 1..20: note = Description of Artificial Sequence: Synthetic oligonucleotide
  misc_feature 1..20: note = Target: SCN10A; (-) strand; PAM type: NNGRRT; PAM sequence: GCGAGT
  source 1..20: mol_type = other DNA
ttgtggtggttctctccatt

SEQ ID NO: 6924 - DNA, 20 bp, synthetic construct
  misc_feature 1..20: note = Description of Artificial Sequence: Synthetic oligonucleotide
  misc_feature 1..20: note = Target: SCN10A; (-) strand; PAM type: NNGRRT; PAM sequence: TGGAAT
  source 1..20: mol_type = other DNA
agtactacttcacaaatggc

SEQ ID NO: 6925 - DNA, 20 bp, synthetic construct
  misc_feature 1..20: note = Description of Artificial Sequence: Synthetic oligonucleotide
  misc_feature 1..20: note = Target: SCN10A; (-) strand; PAM type: NNGRRT; PAM sequence: GCGAAT
  source 1..20: mol_type = other DNA
ctttgtggccgtcttcacag

SEQ ID NO: 6926 - DNA, 20 bp, synthetic construct
  misc_feature 1..20: note = Description of Artificial Sequence: Synthetic oligonucleotide
  misc_feature 1..20: note = Target: SCN10A; (-) strand; PAM type: NNGRRT; PAM sequence: CAGGGT
  source 1..20: mol_type = other DNA
tgttttctcagaacaagttc

SEQ ID NO: 6927 - DNA, 20 bp, synthetic construct
  misc_feature 1..20: note = Description of Artificial Sequence: Synthetic oligonucleotide
  misc_feature 1..20: note = Target: SCN10A; (-) strand; PAM type: NNGRRT; PAM sequence: TGGAGT
  source 1..20: mol_type = other DNA
atttcgcttctgttaagatg

SEQ ID NO: 6928 - DNA, 20 bp, synthetic construct
  misc_feature 1..20: note = Description of Artificial Sequence: Synthetic oligonucleotide
  misc_feature 1..20: note = Target: SCN10A; (-) strand; PAM type: NNGRRT; PAM sequence: AAGGAT
  source 1..20: mol_type = other DNA
agtgaaattttggaagaggt

SEQ ID NO: 6929 - DNA, 20 bp, synthetic construct
  misc_feature 1..20: note = Description of Artificial Sequence: Synthetic oligonucleotide
  misc_feature 1..20: note = Target: SCN10A; (-) strand; PAM type: NNGRRT; PAM sequence: TAGAGT
  source 1..20: mol_type = other DNA
cttgaactggggcaatgagg

SEQ ID NO: 6930 - DNA, 20 bp, synthetic construct
  misc_feature 1..20: note = Description of Artificial Sequence: Synthetic oligonucleotide
  misc_feature 1..20: note = Target: SCN10A; (-) strand; PAM type: NNGRRT; PAM sequence: GTGAAT
  source 1..20: mol_type = other DNA
agaggagataggagggcatt

SEQ ID NO: 6931 - DNA, 20 bp, synthetic construct
  misc_feature 1..20: note = Description of Artificial Sequence: Synthetic oligonucleotide
  misc_feature 1..20: note = Target: SCN10A; (-) strand; PAM type: NNGRRT; PAM sequence: TGGAAT
  source 1..20: mol_type = other DNA
gatggattactcaagactgt

SEQ ID NO: 6932 - DNA, 20 bp, synthetic construct
  misc_feature 1..20: note = Description of Artificial Sequence: Synthetic oligonucleotide
  misc_feature 1..20: note = Target: SCN10A; (-) strand; PAM type: NNGRRT; PAM sequence: ATGGAT
  source 1..20: mol_type = other DNA
gtaagtggagcttaaaagag

SEQ ID NO: 6933 - DNA, 20 bp, synthetic construct
  misc_feature 1..20: note = Description of Artificial Sequence: Synthetic oligonucleotide
  misc_feature 1..20: note = Target: SCN10A; (-) strand; PAM type: NNGRRT; PAM sequence: CAGGGT
  source 1..20: mol_type = other DNA
aagtgggatccccaaaggga

SEQ ID NO: 6934 - DNA, 20 bp, synthetic construct
  misc_feature 1..20: note = Description of Artificial Sequence: Synthetic oligonucleotide
  misc_feature 1..20: note = Target: SCN10A; (-) strand; PAM type: NNGRRT; PAM sequence: TGGGAT
  source 1..20: mol_type = other DNA
actcgaggctgactgaaaag

SEQ ID NO: 6935 - DNA, 20 bp, synthetic construct
  misc_feature 1..20: note = Description of Artificial Sequence: Synthetic oligonucleotide
  misc_feature 1..20: note = Target: SCN10A; (-) strand; PAM type: NNGRRT; PAM sequence: AAGAAT
  source 1..20: mol_type = other DNA
ggaacagagggaacatttcc

SEQ ID NO: 6936 - DNA, 20 bp, synthetic construct
  misc_feature 1..20: note = Description of Artificial Sequence: Synthetic oligonucleotide
  misc_feature 1..20: note = Target: SCN10A; (-) strand; PAM type: NNGRRT; PAM sequence: TGGGAT
  source 1..20: mol_type = other DNA
caaagcgtggggaatggggt

SEQ ID NO: 6937 - DNA, 20 bp, synthetic construct
  misc_feature 1..20: note = Description of Artificial Sequence: Synthetic oligonucleotide
  misc_feature 1..20: note = Target: SCN10A; (-) strand; PAM type: NNGRRT; PAM sequence: TGGGGT
  source 1..20: mol_type = other DNA
gaaggtcaaagcgtggggaa

SEQ ID NO: 6938 - DNA, 20 bp, synthetic construct
  misc_feature 1..20: note = Description of Artificial Sequence: Synthetic oligonucleotide
  misc_feature 1..20: note = Target: SCN10A; (-) strand; PAM type: NNGRRT; PAM sequence: GGGAAT
  source 1..20: mol_type = other DNA
tgggagaaggtcaaagcgtg

SEQ ID NO: 6939 - DNA, 20 bp, synthetic construct
  misc_feature 1..20: note = Description of Artificial Sequence: Synthetic oligonucleotide
  misc_feature 1..20: note = Target: SCN10A; (-) strand; PAM type: NNGRRT; PAM sequence: TTGAAT
  source 1..20: mol_type = other DNA
gtaggggagaatggcagcct

SEQ ID NO: 6940 - DNA, 20 bp, synthetic construct
  misc_feature 1..20: note = Description of Artificial Sequence: Synthetic oligonucleotide
  misc_feature 1..20: note = Target: SCN10A; (-) strand; PAM type: NNGRRT; PAM sequence: GAGAAT
  source 1..20: mol_type = other DNA
ctgaggtacatggggtaggg

SEQ ID NO: 6941 - DNA, 20 bp, synthetic construct
  misc_feature 1..20: note = Description of Artificial Sequence: Synthetic oligonucleotide
  misc_feature 1..20: note = Target: SCN10A; (-) strand; PAM type: NNGRRT; PAM sequence: TGGGGT
  source 1..20: mol_type = other DNA
ggcctaacccctgaggtaca

SEQ ID NO: 6942 - DNA, 20 bp, synthetic construct
  misc_feature 1..20: note = Description of Artificial Sequence: Synthetic oligonucleotide
  misc_feature 1..20: note = Target: SCN10A; (-) strand; PAM type: NNGRRT; PAM sequence: AAGGGT
  source 1..20: mol_type = other DNA
caggaagagcagtggtgtgg

SEQ ID NO: 6943 - DNA, 20 bp, synthetic construct
  misc_feature 1..20: note = Description of Artificial Sequence: Synthetic oligonucleotide
  misc_feature 1..20: note = Target: SCN10A; (-) strand; PAM type: NNGRRT; PAM sequence: AGGGGT
  source 1..20: mol_type = other DNA
ggcaaagcttcaaagcaaga

SEQ ID NO: 6944 - DNA, 20 bp, synthetic construct
  misc_feature 1..20: note = Description of Artificial Sequence: Synthetic oligonucleotide
  misc_feature 1..20: note = Target: SCN10A; (-) strand; PAM type: NNGRRT; PAM sequence: AAGAGT
  source 1..20: mol_type = other DNA
attactgaggcagagggacc

SEQ ID NO: 6945 - DNA, 20 bp, synthetic construct
  misc_feature 1..20: note = Description of Artificial Sequence: Synthetic oligonucleotide
  misc_feature 1..20: note = Target: SCN10A; (-) strand; PAM type: NNGRRT; PAM sequence: AAGAGT
  source 1..20: mol_type = other DNA
tgttgcctaggataatagcc

SEQ ID NO: 6946 - DNA, 20 bp, synthetic construct
  misc_feature 1..20: note = Description of Artificial Sequence: Synthetic oligonucleotide
  misc_feature 1..20: note = Target: SCN10A; (-) strand; PAM type: NNGRRT; PAM sequence: TAGGAT
  source 1..20: mol_type = other DNA
acatggacattaatgttgcc

SEQ ID NO: 6947 - DNA, 20 bp, synthetic construct
  misc_feature 1..20: note = Description of Artificial Sequence: Synthetic oligonucleotide
  misc_feature 1..20: note = Target: SCN10A; (-) strand; PAM type: NNGRRT; PAM sequence: AAGAGT
  source 1..20: mol_type = other DNA
gtgcaataaaccaagagaca

SEQ ID NO: 6948 - DNA, 20 bp, synthetic construct
  misc_feature 1..20: note = Description of Artificial Sequence: Synthetic oligonucleotide
  misc_feature 1..20: note = Target: SCN10A; (-) strand; PAM type: NNGRRT; PAM sequence: GTGAAT
  source 1..20: mol_type = other DNA
ctgttgatgtgggctgagga

SEQ ID NO: 6949 - DNA, 20 bp, synthetic construct
  misc_feature 1..20: note = Description of Artificial Sequence: Synthetic oligonucleotide
  misc_feature 1..20: note = Target: SCN10A; (-) strand; PAM type: NNGRRT; PAM sequence: AGGAGT
  source 1..20: mol_type = other DNA
agctctgttgatgtgggctg

SEQ ID NO: 6950 - DNA, 20 bp, synthetic construct
  misc_feature 1..20: note = Description of Artificial Sequence: Synthetic oligonucleotide
  misc_feature 1..20: note = Target: SCN10A; (-) strand; PAM type: NNGRRT; PAM sequence: CAGGAT
  source 1..20: mol_type = other DNA
ttagtgagaacaatctctgt

SEQ ID NO: 6951 - DNA, 20 bp, synthetic construct
  misc_feature 1..20: note = Description of Artificial Sequence: Synthetic oligonucleotide
  misc_feature 1..20: note = Target: SCN10A; (-) strand; PAM type: NNGRRT; PAM sequence: TTGGAT
  source 1..20: mol_type = other DNA
gcaatatcagacaagcgtcc

SEQ ID NO: 6952 - DNA, 20 bp, synthetic construct
  misc_feature 1..20: note = Description of Artificial Sequence: Synthetic oligonucleotide
  misc_feature 1..20: note = Target: SCN10A; (-) strand; PAM type: NNGRRT; PAM sequence: AAGGGT
  source 1..20: mol_type = other DNA
aaagcaacatttcaaggtag

SEQ ID NO: 6953 - DNA, 20 bp, synthetic construct
  misc_feature 1..20: note = Description of Artificial Sequence: Synthetic oligonucleotide
  misc_feature 1..20: note = Target: SCN10A; (-) strand; PAM type: NNGRRT; PAM sequence: TTGGGT
  source 1..20: mol_type = other DNA
agaactctgatgtctaaaag

SEQ ID NO: 6954 - DNA, 20 bp, synthetic construct
  misc_feature 1..20: note = Description of Artificial Sequence: Synthetic oligonucleotide
  misc_feature 1..20: note = Target: SCN10A; (-) strand; PAM type: NNGRRT; PAM sequence: AAGGAT
  source 1..20: mol_type = other DNA
aaaaaatggggtgaagagca

SEQ ID NO: 6955 - DNA, 20 bp, synthetic construct
  misc_feature 1..20: note = Description of Artificial Sequence: Synthetic oligonucleotide
  misc_feature 1..20: note = Target: SCN10A; (-) strand; PAM type: NNGRRT; PAM sequence: TGGGGT
  source 1..20: mol_type = other DNA
aattgtcaagggagaaaaaa

SEQ ID NO: 6956 - DNA, 20 bp, synthetic construct
  misc_feature 1..20: note = Description of Artificial Sequence: Synthetic oligonucleotide
  misc_feature 1..20: note = Target: SCN10A; (-) strand; PAM type: NNGRRT; PAM sequence: CTGGAT
  source 1..20: mol_type = other DNA
acatatatgttaattcctgg

SEQ ID NO: 6957 - DNA, 20 bp, synthetic construct
  misc_feature 1..20: note = Description of Artificial Sequence: Synthetic oligonucleotide
  misc_feature 1..20: note = Target: SCN10A; (-) strand; PAM type: NNGRRT; PAM sequence: CAGGGT
  source 1..20: mol_type = other DNA
gccaggcactatgcagacac

SEQ ID NO: 6958 - DNA, 20 bp, synthetic construct
  misc_feature 1..20: note = Description of Artificial Sequence: Synthetic oligonucleotide
  misc_feature 1..20: note = Target: SCN10A; (-) strand; PAM type: NNGRRT; PAM sequence: AAGGGT
  source 1..20: mol_type = other DNA
gaattgaatttagtcaaata

SEQ ID NO: 6959 - DNA, 20 bp, synthetic construct
  misc_feature 1..20: note = Description of Artificial Sequence: Synthetic oligonucleotide
  misc_feature 1..20: note = Target: SCN10A; (-) strand; PAM type: NNGRRT; PAM sequence: TTGAAT
  source 1..20: mol_type = other DNA
tatgtacccttggtacagaa

SEQ ID NO: 6960 - DNA, 20 bp, synthetic construct
  misc_feature 1..20: note = Description of Artificial Sequence: Synthetic oligonucleotide
  misc_feature 1..20: note = Target: SCN10A; (-) strand; PAM type: NNGRRT; PAM sequence: CAGAAT
  source 1..20: mol_type = other DNA
ttcagtatgtacccttggta

SEQ ID NO: 6961 - DNA, 20 bp, synthetic construct
  misc_feature 1..20: note = Description of Artificial Sequence: Synthetic oligonucleotide
  misc_feature 1..20: note = Target: SCN10A; (-) strand; PAM type: NNGRRT; PAM sequence: AGGGAT
  source 1..20: mol_type = other DNA
gctcccgtgggctccctgga

SEQ ID NO: 6962 - DNA, 20 bp, synthetic construct
  misc_feature 1..20: note = Description of Artificial Sequence: Synthetic oligonucleotide
  misc_feature 1..20: note = Target: SCN10A; (-) strand; PAM type: NNGRRT; PAM sequence: AAGGAT
  source 1..20: mol_type = other DNA
cccaccatgaagcagaaggc

SEQ ID NO: 6963 - DNA, 20 bp, synthetic construct
  misc_feature 1..20: note = Description of Artificial Sequence: Synthetic oligonucleotide
  misc_feature 1..20: note = Target: SCN10A; (-) strand; PAM type: NNGRRT; PAM sequence: CAGGAT
  source 1..20: mol_type = other DNA
gattctttgctctaacccaa

SEQ ID NO: 6964 - DNA, 20 bp, synthetic construct
  misc_feature 1..20: note = Description of Artificial Sequence: Synthetic oligonucleotide
  misc_feature 1..20: note = Target: SCN10A; (-) strand; PAM type: NNGRRT; PAM sequence: AGGGAT
  source 1..20: mol_type = other DNA
attttcagtgatgaaatgga

SEQ ID NO: 6965 - DNA, 20 bp, synthetic construct
  misc_feature 1..20: note = Description of Artificial Sequence: Synthetic oligonucleotide
  misc_feature 1..20: note = Target: SCN10A; (-) strand; PAM type: NNGRRT; PAM sequence: ATGAAT
  source 1..20: mol_type = other DNA
taattagaagtcatgtgacc

SEQ ID NO: 6966 - DNA, 20 bp, synthetic construct
  misc_feature 1..20: note = Description of Artificial Sequence: Synthetic oligonucleotide
  misc_feature 1..20: note = Target: SCN10A; (-) strand; PAM type: NNGRRT; PAM sequence: CAGAAT
  source 1..20: mol_type = other DNA
gctactccattccctaaagt

SEQ ID NO: 6967 - DNA, 20 bp, synthetic construct
  misc_feature 1..20: note = Description of Artificial Sequence: Synthetic oligonucleotide
  misc_feature 1..20: note = Target: SCN10A; (-) strand; PAM type: NNGRRT; PAM sequence: AAGGGT
  source 1..20: mol_type = other DNA
tcatcgtctctgagagcacc

SEQ ID NO: 6968 - DNA, 20 bp, synthetic construct
  misc_feature 1..20: note = Description of Artificial Sequence: Synthetic oligonucleotide
  misc_feature 1..20: note = Target: SCN10A; (-) strand; PAM type: NNGRRT; PAM sequence: GAGAAT
  source 1..20: mol_type = other DNA
tagaaatataataggctcta

SEQ ID NO: 6969 - DNA, 20 bp, synthetic construct
  misc_feature 1..20: note = Description of Artificial Sequence: Synthetic oligonucleotide
  misc_feature 1..20: note = Target: SCN10A; (-) strand; PAM type: NNGRRT; PAM sequence: AAGGAT
  source 1..20: mol_type = other DNA
tttcttccataggaaaagtt

SEQ ID NO: 6970 - DNA, 20 bp, synthetic construct
  misc_feature 1..20: note = Description of Artificial Sequence: Synthetic oligonucleotide
  misc_feature 1..20: note = Target: SCN10A; (-) strand; PAM type: NNGRRT; PAM sequence: ATGGGT
  source 1..20: mol_type = other DNA
gatttctgccccatcagtgc

SEQ ID NO: 6971 - DNA, 20 bp, synthetic construct
  misc_feature 1..20: note = Description of Artificial Sequence: Synthetic oligonucleotide
  misc_feature 1..20: note = Target: SCN10A; (-) strand; PAM type: NNGRRT; PAM sequence: CAGGAT
  source 1..20: mol_type = other DNA
ataccagcaaagcactgaca

SEQ ID NO: 6972 - DNA, 20 bp, synthetic construct
  misc_feature 1..20: note = Description of Artificial Sequence: Synthetic oligonucleotide
  misc_feature 1..20: note = Target: SCN10A; (-) strand; PAM type: NNGRRT; PAM sequence: TGGAAT
  source 1..20: mol_type = other DNA
tttggccagattattggccc

SEQ ID NO: 6973 - DNA, 20 bp, synthetic construct
  misc_feature 1..20: note = Description of Artificial Sequence: Synthetic oligonucleotide
  misc_feature 1..20: note = Target: SCN10A; (-) strand; PAM type: NNGRRT; PAM sequence: CCGGAT
  source 1..20: mol_type = other DNA
cacatgcccagtggcacaag

SEQ ID NO: 6974 - DNA, 20 bp, synthetic construct
  misc_feature 1..20: note = Description of Artificial Sequence: Synthetic oligonucleotide
  misc_feature 1..20: note = Target: SCN10A; (-) strand; PAM type: NNGRRT; PAM sequence: CAGAGT
  source 1..20: mol_type = other DNA
acagagaaatcagcacaaag

SEQ ID NO: 6975 - DNA, 20 bp, synthetic construct
  misc_feature 1..20: note = Description of Artificial Sequence: Synthetic oligonucleotide
  misc_feature 1..20: note = Target: SCN10A; (-) strand; PAM type: NNGRRT; PAM sequence: AGGGAT
  source 1..20: mol_type = other DNA
aaacaaaactttgaagtggc

SEQ ID NO: 6976 - DNA, 20 bp, synthetic construct
  misc_feature 1..20: note = Description of Artificial Sequence: Synthetic oligonucleotide
  misc_feature 1..20: note = Target: SCN10A; (-) strand; PAM type: NNGRRT; PAM sequence: GTGGAT
  source 1..20: mol_type = other DNA
atcctttgaatggaagaaga

SEQ ID NO: 6977 - DNA, 20 bp, synthetic construct
  misc_feature 1..20: note = Description of Artificial Sequence: Synthetic oligonucleotide
  misc_feature 1..20: note = Target: SCN10A; (-) strand; PAM type: NNGRRT; PAM sequence: AAGAGT
  source 1..20: mol_type = other DNA
ctccatcctttgaatggaag

SEQ ID NO: 6978 - DNA, 20 bp, synthetic construct
  misc_feature 1..20: note = Description of Artificial Sequence: Synthetic oligonucleotide
  misc_feature 1..20: note = Target: SCN10A; (-) strand; PAM type: NNGRRT; PAM sequence: TTGAAT
  source 1..20: mol_type = other DNA
ttcctgagattctccatcct

SEQ ID NO: 6979 - DNA, 20 bp, synthetic construct
  misc_feature 1..20: note = Description of Artificial Sequence: Synthetic oligonucleotide
  misc_feature 1..20: note = Target: SCN10A; (-) strand; PAM type: NNGRRT; PAM sequence: GAGGAT
  source 1..20: mol_type = other DNA
agctgcaactaagatcctcc

SEQ ID NO: 6980 - DNA, 20 bp, synthetic construct
  misc_feature 1..20: note = Description of Artificial Sequence: Synthetic oligonucleotide
  misc_feature 1..20: note = Target: SCN10A; (-) strand; PAM type: NNGRRT; PAM sequence: CGGAGT
  source 1..20: mol_type = other DNA
cagtaaataggagtgggaga

SEQ ID NO: 6981 - DNA, 20 bp, synthetic construct
  misc_feature 1..20: note = Description of Artificial Sequence: Synthetic oligonucleotide
  misc_feature 1..20: note = Target: SCN10A; (-) strand; PAM type: NNGRRT; PAM sequence: AGGAGT
  source 1..20: mol_type = other DNA
tgaaattccaggcagtaaat

SEQ ID NO: 6982 - DNA, 20 bp, synthetic construct
  misc_feature 1..20: note = Description of Artificial Sequence: Synthetic oligonucleotide
  misc_feature 1..20: note = Target: SCN10A; (-) strand; PAM type: NNGRRT; PAM sequence: TTGAAT
  source 1..20: mol_type = other DNA
tacttgtggctggagtaaga

SEQ ID NO: 6983 - DNA, 20 bp, synthetic construct
  misc_feature 1..20: note = Description of Artificial Sequence: Synthetic oligonucleotide
  misc_feature 1..20: note = Target: SCN10A; (-) strand; PAM type: NNGRRT; PAM sequence: TGGAGT
  source 1..20: mol_type = other DNA
cactggcctttacttgtggc

SEQ ID NO: 6984 - DNA, 20 bp, synthetic construct
  misc_feature 1..20: note = Description of Artificial Sequence: Synthetic oligonucleotide
  misc_feature 1..20: note = Target: SCN10A; (-) strand; PAM type: NNGRRT; PAM sequence: CTGAGT
  source 1..20: mol_type = other DNA
acttactgagaagcaagcag

SEQ ID NO: 6985 - DNA, 20 bp, synthetic construct
  misc_feature 1..20: note = Description of Artificial Sequence: Synthetic oligonucleotide
  misc_feature 1..20: note = Target: SCN10A; (-) strand; PAM type: NNGRRT; PAM sequence: ATGGGT
  source 1..20: mol_type = other DNA
gtcccaaccacattcaagtc

SEQ ID NO: 6986 - DNA, 20 bp, synthetic construct
  misc_feature 1..20: note = Description of Artificial Sequence: Synthetic oligonucleotide
  misc_feature 1..20: note = Target: SCN10A; (-) strand; PAM type: NNGRRT; PAM sequence: CTGAGT
  source 1..20: mol_type = other DNA
aattaaaattaggtgaaagg

SEQ ID NO: 6987 - DNA, 20 bp, synthetic construct
  misc_feature 1..20: note = Description of Artificial Sequence: Synthetic oligonucleotide
  misc_feature 1..20: note = Target: SCN10A; (-) strand; PAM type: NNGRRT; PAM sequence: TTGAGT
  source 1..20: mol_type = other DNA
agcaaaagtccttaggctca

SEQ ID NO: 6988 - DNA, 20 bp, synthetic construct
  misc_feature 1..20: note = Description of Artificial Sequence: Synthetic oligonucleotide
  misc_feature 1..20: note = Target: SCN10A; (-) strand; PAM type: NNGRRT; PAM sequence: TTGAGT
  source 1..20: mol_type = other DNA
tacaatcaagataactggat

SEQ ID NO: 6989 - DNA, 20 bp, synthetic construct
  misc_feature 1..20: note = Description of Artificial Sequence: Synthetic oligonucleotide
  misc_feature 1..20: note = Target: SCN10A; (-) strand; PAM type: NNGRRT; PAM sequence: CTGGAT
  source 1..20: mol_type = other DNA
cacccatacaatcaagataa

SEQ ID NO: 6990 - DNA, 20 bp, synthetic construct
  misc_feature 1..20: note = Description of Artificial Sequence: Synthetic oligonucleotide
  misc_feature 1..20: note = Target: SCN10A; (-) strand; PAM type: NNGRRT; PAM sequence: GGGAGT
  source 1..20: mol_type = other DNA
aagtattacaatggggagtg

SEQ ID NO: 6991 - DNA, 20 bp, synthetic construct
  misc_feature 1..20: note = Description of Artificial Sequence: Synthetic oligonucleotide
  misc_feature 1..20: note = Target: SCN10A; (-) strand; PAM type: NNGRRT; PAM sequence: GGGAGT
  source 1..20: mol_type = other DNA
tgataagaagtattacaatg

SEQ ID NO: 6992 - DNA, 20 bp, synthetic construct
  misc_feature 1..20: note = Description of Artificial Sequence: Synthetic oligonucleotide
  misc_feature 1..20: note = Target: SCN10A; (-) strand; PAM type: NNGRRT; PAM sequence: ATGAAT
  source 1..20: mol_type = other DNA
tgtattttgaaatagtggtc

SEQ ID NO: 6993 - DNA, 20 bp, synthetic construct
  misc_feature 1..20: note = Description of Artificial Sequence: Synthetic oligonucleotide
  misc_feature 1..20: note = Target: SCN10A; (-) strand; PAM type: NNGRRT; PAM sequence: TAGGAT
  source 1..20: mol_type = other DNA
gatttttttaaatcaaggta

SEQ ID NO: 6994 - DNA, 20 bp, synthetic construct
  misc_feature 1..20: note = Description of Artificial Sequence: Synthetic oligonucleotide
  misc_feature 1..20: note = Target: SCN10A; (-) strand; PAM type: NNGRRT; PAM sequence: ATGAAT
  source 1..20: mol_type = other DNA
aggaacaagcctttccctaa

SEQ ID NO: 6995 - DNA, 20 bp, synthetic construct
  misc_feature 1..20: note = Description of Artificial Sequence: Synthetic oligonucleotide
  misc_feature 1..20: note = Target: SCN10A; (-) strand; PAM type: NNGRRT; PAM sequence: TGGAAT
  source 1..20: mol_type = other DNA
gagccatccactccagtgaa

SEQ ID NO: 6996 - DNA, 20 bp, synthetic construct
  misc_feature 1..20: note = Description of Artificial Sequence: Synthetic oligonucleotide
  misc_feature 1..20: note = Target: SCN10A; (-) strand; PAM type: NNGRRT; PAM sequence: GTGAAT
  source 1..20: mol_type = other DNA
tttctgagccatccactcca

SEQ ID NO: 6997 - DNA, 20 bp, synthetic construct
  misc_feature 1..20: note = Description of Artificial Sequence: Synthetic oligonucleotide
  misc_feature 1..20: note = Target: SCN10A; (-) strand; PAM type: NNGRRT; PAM sequence: AAGAAT
  source 1..20: mol_type = other DNA
attattgttgatcgtcttca

SEQ ID NO: 6998 - DNA, 20 bp, synthetic construct
  misc_feature 1..20: note = Description of Artificial Sequence: Synthetic oligonucleotide
  misc_feature 1..20: note = Target: SCN10A; (-) strand; PAM type: NNGRRT; PAM sequence: GGGGGT
  source 1..20: mol_type = other DNA
gggaatggatgaacaggttt

SEQ ID NO: 6999 - DNA, 20 bp, synthetic construct
  misc_feature 1..20: note = Description of Artificial Sequence: Synthetic oligonucleotide
  misc_feature 1..20: note = Target: SCN10A; (-) strand; PAM type: NNGRRT; PAM sequence: ATGGAT
  source 1..20: mol_type = other DNA
aagatagcacttttttggga

SEQ ID NO: 7000 - DNA, 20 bp, synthetic construct
  misc_feature 1..20: note = Description of Artificial Sequence: Synthetic oligonucleotide
  misc_feature 1..20: note = Target: SCN10A; (-) strand; PAM type: NNGRRT; PAM sequence: GGGAAT
  source 1..20: mol_type = other DNA
ccctaagatagcactttttt

SEQ ID NO: 7001 - DNA, 20 bp, synthetic construct
  misc_feature 1..20: note = Description of Artificial Sequence: Synthetic oligonucleotide
  misc_feature 1..20: note = Target: SCN10A; (-) strand; PAM type: NNGRRT; PAM sequence: TCGAGT
  source 1..20: mol_type = other DNA
ggaaccaaaagttatcccac

SEQ ID NO: 7002 - DNA, 20 bp, synthetic construct
  misc_feature 1..20: note = Description of Artificial Sequence: Synthetic oligonucleotide
  misc_feature 1..20: note = Target: SCN10A; (-) strand; PAM type: NNGRRT; PAM sequence: CAGGAT
  source 1..20: mol_type = other DNA
caacaacccaactcccctgt

SEQ ID NO: 7003 - DNA, 20 bp, synthetic construct
  misc_feature 1..20: note = Description of Artificial Sequence: Synthetic oligonucleotide
  misc_feature 1..20: note = Target: SCN10A; (-) strand; PAM type: NNGRRT; PAM sequence: AGGGAT
  source 1..20: mol_type = other DNA
agtaagggtagttagaaccc

SEQ ID NO: 7004 - DNA, 20 bp, synthetic construct
  misc_feature 1..20: note = Description of Artificial Sequence: Synthetic oligonucleotide
  misc_feature 1..20: note = Target: SCN10A; (-) strand; PAM type: NNGRRT; PAM sequence: AAGGGT
  source 1..20: mol_type = other DNA
aggttaagctaagtgacagt

SEQ ID NO: 7005 - DNA, 20 bp, synthetic construct
  misc_feature 1..20: note = Description of Artificial Sequence: Synthetic oligonucleotide
  misc_feature 1..20: note = Target: SCN10A; (-) strand; PAM type: NNGRRT; PAM sequence: CAGGAT
  source 1..20: mol_type = other DNA
acagttttagagttcaagta

SEQ ID NO: 7006 - DNA, 20 bp, synthetic construct
  misc_feature 1..20: note = Description of Artificial Sequence: Synthetic oligonucleotide
  misc_feature 1..20: note = Target: SCN10A; (-) strand; PAM type: NNGRRT; PAM sequence: TAGAGT
  source 1..20: mol_type = other DNA
ctgagtttctccaacagttt

SEQ ID NO: 7007 - DNA, 20 bp, synthetic construct
  misc_feature 1..20: note = Description of Artificial Sequence: Synthetic oligonucleotide
  misc_feature 1..20: note = Target: SCN10A; (-) strand; PAM type: NNGRRT; PAM sequence: CTGAGT
  source 1..20: mol_type = other DNA
tgaatctgttgggggaagca

SEQ ID NO: 7008 - DNA, 20 bp, synthetic construct
  misc_feature 1..20: note = Description of Artificial Sequence: Synthetic oligonucleotide
  misc_feature 1..20: note = Target: SCN10A; (-) strand; PAM type: NNGRRT; PAM sequence: ATGAAT
  source 1..20: mol_type = other DNA
accttttacagctatttgaa

SEQ ID NO: 7009 - DNA, 20 bp, synthetic construct
  misc_feature 1..20: note = Description of Artificial Sequence: Synthetic oligonucleotide
  misc_feature 1..20: note = Target: SCN10A; (-) strand; PAM type: NNGRRT; PAM sequence: TGGAGT
  source 1..20: mol_type = other DNA
aagaagcaactctggtcttc

SEQ ID NO: 7010 - DNA, 20 bp, synthetic construct
  misc_feature 1..20: note = Description of Artificial Sequence: Synthetic oligonucleotide
  misc_feature 1..20: note = Target: SCN10A; (-) strand; PAM type: NNGRRT; PAM sequence: AGGAAT
  source 1..20: mol_type = other DNA
gatgagggttcctaggccca

SEQ ID NO: 7011 - DNA, 20 bp, synthetic construct
  misc_feature 1..20: note = Description of Artificial Sequence: Synthetic oligonucleotide
  misc_feature 1..20: note = Target: SCN10A; (-) strand; PAM type: NNGRRT; PAM sequence: GAGGGT
  source 1..20: mol_type = other DNA
gacgttgggatgagggtgat

SEQ ID NO: 7012 - DNA, 20 bp, synthetic construct
  misc_feature 1..20: note = Description of Artificial Sequence: Synthetic oligonucleotide
  misc_feature 1..20: note = Target: SCN10A; (-) strand; PAM type: NNGRRT; PAM sequence: GAGGGT
  source 1..20: mol_type = other DNA
atctgggttgacgttgggat

SEQ ID NO: 7013 - DNA, 20 bp, synthetic construct
  misc_feature 1..20: note = Description of Artificial Sequence: Synthetic oligonucleotide
  misc_feature 1..20: note = Target: SCN10A; (-) strand; PAM type: NNGRRT; PAM sequence: TGGGAT
  source 1..20: mol_type = other DNA
gagaagatctgggttgacgt

SEQ ID NO: 7014 - DNA, 20 bp, synthetic construct
  misc_feature 1..20: note = Description of Artificial Sequence: Synthetic oligonucleotide
  misc_feature 1..20: note = Target: SCN10A; (-) strand; PAM type: NNGRRT; PAM sequence: CTGGGT
  source 1..20: mol_type = other DNA
ctgtttatggaagagaagat

SEQ ID NO: 7015 - DNA, 20 bp, synthetic construct
  misc_feature 1..20: note = Description of Artificial Sequence: Synthetic oligonucleotide
  misc_feature 1..20: note = Target: SCN10A; (-) strand; PAM type: NNGRRT; PAM sequence: GGGAGT
  source 1..20: mol_type = other DNA
tgtgtcaggcaggggcctga

SEQ ID NO: 7016 - DNA, 20 bp, synthetic construct
  misc_feature 1..20: note = Description of Artificial Sequence: Synthetic oligonucleotide
  misc_feature 1..20: note = Target: SCN10A; (-) strand; PAM type: NNGRRT; PAM sequence: GTGAAT
  source 1..20: mol_type = other DNA
tcctctagcacagcctgtct

SEQ ID NO: 7017 - DNA, 20 bp, synthetic construct
  misc_feature 1..20: note = Description of Artificial Sequence: Synthetic oligonucleotide
  misc_feature 1..20: note = Target: SCN10A; (-) strand; PAM type: NNGRRT; PAM sequence: GGGGGT
  source 1..20: mol_type = other DNA
ttctgattttggtatccgta

SEQ ID NO: 7018 - DNA, 20 bp, synthetic construct
  misc_feature 1..20: note = Description of Artificial Sequence: Synthetic oligonucleotide
  misc_feature 1..20: note = Target: SCN10A; (-) strand; PAM type: NNGRRT; PAM sequence: CTGGAT
  source 1..20: mol_type = other DNA
tcagtcccaccgttccgaca

SEQ ID NO: 7019 - DNA, 20 bp, synthetic construct
  misc_feature 1..20: note = Description of Artificial Sequence: Synthetic oligonucleotide
  misc_feature 1..20: note = Target: SCN10A; (-) strand; PAM type: NNGRRT; PAM sequence: GGGAGT
  source 1..20: mol_type = other DNA
ttgctttagagacccaggca

SEQ ID NO: 7020 - DNA, 20 bp, synthetic construct
  misc_feature 1..20: note = Description of Artificial Sequence: Synthetic oligonucleotide
  misc_feature 1..20: note = Target: SCN10A; (-) strand; PAM type: NNGRRT; PAM sequence: CTGGAT
  source 1..20: mol_type = other DNA
ccaccctttatccagcatct

SEQ ID NO: 7021 - DNA, 20 bp, synthetic construct
  misc_feature 1..20: note = Description of Artificial Sequence: Synthetic oligonucleotide
  misc_feature 1..20: note = Target: SCN10A; (-) strand; PAM type: NNGRRT; PAM sequence: TTGAGT
  source 1..20: mol_type = other DNA
aaccaacatgtaccttctcc

SEQ ID NO: 7022 - DNA, 20 bp, synthetic construct
  misc_feature 1..20: note = Description of Artificial Sequence: Synthetic oligonucleotide
  misc_feature 1..20: note = Target: SCN10A; (-) strand; PAM type: NNGRRT; PAM sequence: TGGAAT
  source 1..20: mol_type = other DNA
agaagcccaaagaattttac

SEQ ID NO: 7023 - DNA, 20 bp, synthetic construct
  misc_feature 1..20: note = Description of Artificial Sequence: Synthetic oligonucleotide
  misc_feature 1..20: note = Target: SCN10A; (-) strand; PAM type: NNGRRT; PAM sequence: AAGAAT
  source 1..20: mol_type = other DNA
actgtgactctagaagccca

SEQ ID NO: 7024 - DNA, 20 bp, synthetic construct
  misc_feature 1..20: note = Description of Artificial Sequence: Synthetic oligonucleotide
  misc_feature 1..20: note = Target: SCN10A; (-) strand; PAM type: NNGRRT; PAM sequence: CAGAGT
  source 1..20: mol_type = other DNA
ttgagggcttctgtccctcc

SEQ ID NO: 7025 - DNA, 20 bp, synthetic construct
  misc_feature 1..20: note = Description of Artificial Sequence: Synthetic oligonucleotide
  misc_feature 1..20: note = Target: SCN10A; (-) strand; PAM type: NNGRRT; PAM sequence: AAGGAT
  source 1..20: mol_type = other DNA
ccctctgagaccaaggaccc

SEQ ID NO: 7026 - DNA, 20 bp, synthetic construct
  misc_feature 1..20: note = Description of Artificial Sequence: Synthetic oligonucleotide
  misc_feature 1..20: note = Target: SCN10A; (-) strand; PAM type: NNGRRT; PAM sequence: TTGAAT
  source 1..20: mol_type = other DNA
aggaagctaaaggtgagagt

SEQ ID NO: 7027 - DNA, 20 bp, synthetic construct
  misc_feature 1..20: note = Description of Artificial Sequence: Synthetic oligonucleotide
  misc_feature 1..20: note = Target: SCN10A; (-) strand; PAM type: NNGRRT; PAM sequence: GAGAGT
  source 1..20: mol_type = other DNA
tatgtcaggaagctaaaggt

SEQ ID NO: 7028 - DNA, 20 bp, synthetic construct
  misc_feature 1..20: note = Description of Artificial Sequence: Synthetic oligonucleotide
  misc_feature 1..20: note = Target: SCN10A; (-) strand; PAM type: NNGRRT; PAM sequence: CAGAGT
  source 1..20: mol_type = other DNA
gcatctactgaatccttggt

SEQ ID NO: 7029 - DNA, 20 bp, synthetic construct
  misc_feature 1..20: note = Description of Artificial Sequence: Synthetic oligonucleotide
  misc_feature 1..20: note = Target: SCN10A; (-) strand; PAM type: NNGRRT; PAM sequence: CTGAAT
  source 1..20: mol_type = other DNA
tcactgagaaactgcatcta

SEQ ID NO: 7030 - DNA, 20 bp, synthetic construct
  misc_feature 1..20: note = Description of Artificial Sequence: Synthetic oligonucleotide
  misc_feature 1..20: note = Target: SCN10A; (-) strand; PAM type: NNGRRT; PAM sequence: TGGGGT
  source 1..20: mol_type = other DNA
agatgagctagtgaccaggc

SEQ ID NO: 7031 - DNA, 20 bp, synthetic construct
  misc_feature 1..20: note = Description of Artificial Sequence: Synthetic oligonucleotide
  misc_feature 1..20: note = Target: SCN10A; (-) strand; PAM type: NNGRRT; PAM sequence: CAGGAT
  source 1..20: mol_type = other DNA
ttctgagcataagaagagga

SEQ ID NO: 7032 - DNA, 20 bp, synthetic construct
  misc_feature 1..20: note = Description of Artificial Sequence: Synthetic oligonucleotide
  misc_feature 1..20: note = Target: SCN10A; (-) strand; PAM type: NNGRRT; PAM sequence: CAGGGT
  source 1..20: mol_type = other DNA
acttacaggaaatccttgcc

SEQ ID NO: 7033 - DNA, 20 bp, synthetic construct
  misc_feature 1..20: note = Description of Artificial Sequence: Synthetic oligonucleotide
  misc_feature 1..20: note = Target: SCN10A; (-) strand; PAM type: NNGRRT; PAM sequence: GGGAGT
  source 1..20: mol_type = other DNA
ctggcactgtaacagcagag

SEQ ID NO: 7034 - DNA, 20 bp, synthetic construct
  misc_feature 1..20: note = Description of Artificial Sequence: Synthetic oligonucleotide
  misc_feature 1..20: note = Target: SCN10A; (-) strand; PAM type: NNGRRT; PAM sequence: AGGGGT
  source 1..20: mol_type = other DNA
ctactctctggattgtggtg

SEQ ID NO: 7035 - DNA, 20 bp, synthetic construct
  misc_feature 1..20: note = Description of Artificial Sequence: Synthetic oligonucleotide
  misc_feature 1..20: note = Target: SCN10A; (-) strand; PAM type: NNGRRT; PAM sequence: CTGGAT
  source 1..20: mol_type = other DNA
gggctaataatacctactct

SEQ ID NO: 7036 - DNA, 20 bp, synthetic construct
  misc_feature 1..20: note = Description of Artificial Sequence: Synthetic oligonucleotide
  misc_feature 1..20: note = Target: SCN10A; (-) strand; PAM type: NNGRRT; PAM sequence: CTGAGT
  source 1..20: mol_type = other DNA
tggcaatattttaaacccct

SEQ ID NO: 7037 - DNA, 20 bp, synthetic construct
  misc_feature 1..20: note = Description of Artificial Sequence: Synthetic oligonucleotide
  misc_feature 1..20: note = Target: SCN10A; (-) strand; PAM type: NNGRRT; PAM sequence: GTGGAT
  source 1..20: mol_type = other DNA
cattcctgactcaactactt

SEQ ID NO: 7038 - DNA, 20 bp, synthetic construct
  misc_feature 1..20: note = Description of Artificial Sequence: Synthetic oligonucleotide
  misc_feature 1..20: note = Target: SCN10A; (-) strand; PAM type: NNGRRT; PAM sequence: CTGGGT
  source 1..20: mol_type = other DNA
gtcacagagtacatgcaaac

SEQ ID NO: 7039 - DNA, 20 bp, synthetic construct
  misc_feature 1..20: note = Description of Artificial Sequence: Synthetic oligonucleotide
  misc_feature 1..20: note = Target: SCN10A; (-) strand; PAM type: NNGRRT; PAM sequence: CAGAGT
  source 1..20: mol_type = other DNA
ggggctacatggataagtca

SEQ ID NO: 7040 - DNA, 20 bp, synthetic construct
  misc_feature 1..20: note = Description of Artificial Sequence: Synthetic oligonucleotide
  misc_feature 1..20: note = Target: SCN10A; (-) strand; PAM type: NNGRRT; PAM sequence: ATGGAT
  source 1..20: mol_type = other DNA
cccgagagaaaaggggctac

SEQ ID NO: 7041 - DNA, 20 bp, synthetic construct
  misc_feature 1..20: note = Description of Artificial Sequence: Synthetic oligonucleotide
  misc_feature 1..20: note = Target: SCN10A; (-) strand; PAM type: NNGRRT; PAM sequence: TCGAAT
  source 1..20: mol_type = other DNA
ccgactctgattaataggaa

SEQ ID NO: 7042 - DNA, 20 bp, synthetic construct
  misc_feature 1..20: note = Description of Artificial Sequence: Synthetic oligonucleotide
  misc_feature 1..20: note = Target: SCN10A; (-) strand; PAM type: NNGRRT; PAM sequence: AGGAAT
  source 1..20: mol_type = other DNA
gggtgccgactctgattaat

SEQ ID NO: 7043 - DNA, 20 bp, synthetic construct
  misc_feature 1..20: note = Description of Artificial Sequence: Synthetic oligonucleotide
  misc_feature 1..20: note = Target: SCN10A; (-) strand; PAM type: NNGRRT; PAM sequence: AAGGGT
  source 1..20: mol_type = other DNA
ggaggaaggcttgtgcctcc

SEQ ID NO: 7044 - DNA, 20 bp, synthetic construct
  misc_feature 1..20: note = Description of Artificial Sequence: Synthetic oligonucleotide
  misc_feature 1..20: note = Target: SCN10A; (-) strand; PAM type: NNGRRT; PAM sequence: TGGGAT
  source 1..20: mol_type = other DNA
ggcagaatcccaaccctcct

SEQ ID NO: 7045 - DNA, 20 bp, synthetic construct
  misc_feature 1..20: note = Description of Artificial Sequence: Synthetic oligonucleotide
  misc_feature 1..20: note = Target: SCN10A; (-) strand; PAM type: NNGRRT; PAM sequence: CAGAAT
  source 1..20: mol_type = other DNA
aggccatggcccagcactgg

SEQ ID NO: 7046 - DNA, 20 bp, synthetic construct
  misc_feature 1..20: note = Description of Artificial Sequence: Synthetic oligonucleotide
  misc_feature 1..20: note = Target: SCN10A; (-) strand; PAM type: NNGRRT; PAM sequence: CTGAGT
  source 1..20: mol_type = other DNA
gatatgatccccacaaagga

SEQ ID NO: 7047 - DNA, 20 bp, synthetic construct
  misc_feature 1..20: note = Description of Artificial Sequence: Synthetic oligonucleotide
  misc_feature 1..20: note = Target: SCN10A; (-) strand; PAM type: NNGRRT; PAM sequence: GGGGAT
  source 1..20: mol_type = other DNA
tagaacttgctgacctgttg

SEQ ID NO: 7048 - DNA, 20 bp, synthetic construct
  misc_feature 1..20: note = Description of Artificial Sequence: Synthetic oligonucleotide
  misc_feature 1..20: note = Target: SCN10A; (-) strand; PAM type: NNGRRT; PAM sequence: AGGGAT
  source 1..20: mol_type = other DNA
gaatacaagcagggaaagaa

SEQ ID NO: 7049 - DNA, 20 bp, synthetic construct
  misc_feature 1..20: note = Description of Artificial Sequence: Synthetic oligonucleotide
  misc_feature 1..20: note = Target: SCN10A; (-) strand; PAM type: NNGRRT; PAM sequence: GAGAAT
  source 1..20: mol_type = other DNA
gtgttccaagtgagccctgg

SEQ ID NO: 7050 - DNA, 20 bp, synthetic construct
  misc_feature 1..20: note = Description of Artificial Sequence: Synthetic oligonucleotide
  misc_feature 1..20: note = Target: SCN10A; (-) strand; PAM type: NNGRRT; PAM sequence: AGGGAT
  source 1..20: mol_type = other DNA
actcaggattcacatctcaa

SEQ ID NO: 7051 - DNA, 20 bp, synthetic construct
  misc_feature 1..20: note = Description of Artificial Sequence: Synthetic oligonucleotide
  misc_feature 1..20: note = Target: SCN10A; (-) strand; PAM type: NNGRRT; PAM sequence: CAGGAT
  source 1..20: mol_type = other DNA
gccccactaacatcctcact

SEQ ID NO: 7052 - DNA, 20 bp, synthetic construct
  misc_feature 1..20: note = Description of Artificial Sequence: Synthetic oligonucleotide
  misc_feature 1..20: note = Target: SCN10A; (-) strand; PAM type: NNGRRT; PAM sequence: AAGAGT
  source 1..20: mol_type = other DNA
cctgtgattgctgttgcagg

SEQ ID NO: 7053 - DNA, 20 bp, synthetic construct
  misc_feature 1..20: note = Description of Artificial Sequence: Synthetic oligonucleotide
  misc_feature 1..20: note = Target: SCN10A; (-) strand; PAM type: NNGRRT; PAM sequence: AGGAGT
  source 1..20: mol_type = other DNA
aaaaaagataagtggtgctc

SEQ ID NO: 7054 - DNA, 20 bp, synthetic construct
  misc_feature 1..20: note = Description of Artificial Sequence: Synthetic oligonucleotide
  misc_feature 1..20: note = Target: SCN10A; (-) strand; PAM type: NNGRRT; PAM sequence: TGGGGT
  source 1..20: mol_type = other DNA
ttcacactgaatctctttgt

SEQ ID NO: 7055 - DNA, 20 bp, synthetic construct
  misc_feature 1..20: note = Description of Artificial Sequence: Synthetic oligonucleotide
  misc_feature 1..20: note = Target: SCN10A; (-) strand; PAM type: NNGRRT; PAM sequence: CTGAAT
  source 1..20: mol_type = other DNA
tttttggaggcttcttcaca

SEQ ID NO: 7056 - DNA, 20 bp, synthetic construct
  misc_feature 1..20: note = Description of Artificial Sequence: Synthetic oligonucleotide
  misc_feature 1..20: note = Target: SCN10A; (-) strand; PAM type: NNGRRT; PAM sequence: CAGAGT
  source 1..20: mol_type = other DNA
catgtcttaggcttggcttt

SEQ ID NO: 7057 - DNA, 20 bp, synthetic construct
  misc_feature 1..20: note = Description of Artificial Sequence: Synthetic oligonucleotide
  misc_feature 1..20: note = Target: SCN10A; (-) strand; PAM type: NNGRRT; PAM sequence: TTGGAT
  source 1..20: mol_type = other DNA
actccctcattcctgcttcc

SEQ ID NO: 7058 - DNA, 20 bp, synthetic construct
  misc_feature 1..20: note = Description of Artificial Sequence: Synthetic oligonucleotide
  misc_feature 1..20: note = Target: SCN10A; (-) strand; PAM type: NNGRRT; PAM sequence: TAGGAT
  source 1..20: mol_type = other DNA
agttactcagaggaccccag

SEQ ID NO: 7059 - DNA, 20 bp, synthetic construct
  misc_feature 1..20: note = Description of Artificial Sequence: Synthetic oligonucleotide
  misc_feature 1..20: note = Target: SCN10A; (-) strand; PAM type: NNGRRT; PAM sequence: GAGGAT
  source 1..20: mol_type = other DNA
ccaataagttttgggagtct

SEQ ID NO: 7060 - DNA, 20 bp, synthetic construct
  misc_feature 1..20: note = Description of Artificial Sequence: Synthetic oligonucleotide
  misc_feature 1..20: note = Target: SCN10A; (-) strand; PAM type: NNGRRT; PAM sequence: GGGAGT
  source 1..20: mol_type = other DNA
aacccttaccaataagtttt

SEQ ID NO: 7061 - DNA, 20 bp, synthetic construct
  misc_feature 1..20: note = Description of Artificial Sequence: Synthetic oligonucleotide
  misc_feature 1..20: note = Target: SCN10A; (-) strand; PAM type: NNGRRT; PAM sequence: AGGGAT
  source 1..20: mol_type = other DNA
caacttctcccccaagtacc

SEQ ID NO: 7062 - DNA, 20 bp, synthetic construct
  misc_feature 1..20: note = Description of Artificial Sequence: Synthetic oligonucleotide
  misc_feature 1..20: note = Target: SCN10A; (-) strand; PAM type: NNGRRT; PAM sequence: GGGAAT
  source 1..20: mol_type = other DNA
aggctggggagacactattg

SEQ ID NO: 7063 - DNA, 20 bp, synthetic construct
  misc_feature 1..20: note = Description of Artificial Sequence: Synthetic oligonucleotide
  misc_feature 1..20: note = Target: SCN10A; (-) strand; PAM type: NNGRRT; PAM sequence: GAGAAT
  source 1..20: mol_type = other DNA
tgctcgggagactgagacag

SEQ ID NO: 7064 - DNA, 20 bp, synthetic construct
  misc_feature 1..20: note = Description of Artificial Sequence: Synthetic oligonucleotide
  misc_feature 1..20: note = Target: SCN10A; (-) strand; PAM type: NNGRRT; PAM sequence: CAGGAT
  source 1..20: mol_type = other DNA
tcaggaactatcataaaacc

SEQ ID NO: 7065 - DNA, 20 bp, synthetic construct
  misc_feature 1..20: note = Description of Artificial Sequence: Synthetic oligonucleotide
  misc_feature 1..20: note = Target: SCN10A; (-) strand; PAM type: NNGRRT; PAM sequence: TAGAAT
  source 1..20: mol_type = other DNA
gtgcatagggaggaatgagg

SEQ ID NO: 7066 - DNA, 20 bp, synthetic construct
  misc_feature 1..20: note = Description of Artificial Sequence: Synthetic oligonucleotide
  misc_feature 1..20: note = Target: SCN10A; (-) strand; PAM type: NNGRRT; PAM sequence: AGGAAT
  source 1..20: mol_type = other DNA
ctaaatcaaggtgcataggg

SEQ ID NO: 7067 - DNA, 20 bp, synthetic construct
  misc_feature 1..20: note = Description of Artificial Sequence: Synthetic oligonucleotide
  misc_feature 1..20: note = Target: SCN10A; (-) strand; PAM type: NNGRRT; PAM sequence: AAGGGT
  source 1..20: mol_type = other DNA
gacaagggtgggagcaaagc

SEQ ID NO: 7068 - DNA, 20 bp, synthetic construct
  misc_feature 1..20: note = Description of Artificial Sequence: Synthetic oligonucleotide
  misc_feature 1..20: note = Target: SCN10A; (-) strand; PAM type: NNGRRT; PAM sequence: AAGGGT
  source 1..20: mol_type = other DNA
atgtgagccactccctggac

SEQ ID NO: 7069 - DNA, 20 bp, synthetic construct
  misc_feature 1..20: note = Description of Artificial Sequence: Synthetic oligonucleotide
  misc_feature 1..20: note = Target: SCN10A; (-) strand; PAM type: NNGRRT; PAM sequence: TTGAGT
  source 1..20: mol_type = other DNA
agtgtccagctggctctctg

SEQ ID NO: 7070 - DNA, 20 bp, synthetic construct
  misc_feature 1..20: note = Description of Artificial Sequence: Synthetic oligonucleotide
  misc_feature 1..20: note = Target: SCN10A; (-) strand; PAM type: NNGRRT; PAM sequence: GTGAGT
  source 1..20: mol_type = other DNA
cagctgttgattcccgggag

SEQ ID NO: 7071 - DNA, 20 bp, synthetic construct
  misc_feature 1..20: note = Description of Artificial Sequence: Synthetic oligonucleotide
  misc_feature 1..20: note = Target: SCN10A; (-) strand; PAM type: NNGRRT; PAM sequence: CTGGAT
  source 1..20: mol_type = other DNA
ctccaggcaacctttaaagg

SEQ ID NO: 7072 - DNA, 20 bp, synthetic construct
  misc_feature 1..20: note = Description of Artificial Sequence: Synthetic oligonucleotide
  misc_feature 1..20: note = Target: SCN10A; (-) strand; PAM type: NNGRRT; PAM sequence: CTGAGT
  source 1..20: mol_type = other DNA
tatagatggatgggcagaca

SEQ ID NO: 7073 - DNA, 20 bp, synthetic construct
  misc_feature 1..20: note = Description of Artificial Sequence: Synthetic oligonucleotide
  misc_feature 1..20: note = Target: SCN10A; (-) strand; PAM type: NNGRRT; PAM sequence: ATGGAT
  source 1..20: mol_type = other DNA
ttgggaagggtccagtatag

SEQ ID NO: 7074 - DNA, 20 bp, synthetic construct
  misc_feature 1..20: note = Description of Artificial Sequence: Synthetic oligonucleotide
  misc_feature 1..20: note = Target: SCN10A; (-) strand; PAM type: NNGRRT; PAM sequence: AAGGGT
  source 1..20: mol_type = other DNA
ctgggccaccatggcttggg

SEQ ID NO: 7075 - DNA, 20 bp, synthetic construct
  misc_feature 1..20: note = Description of Artificial Sequence: Synthetic oligonucleotide
  misc_feature 1..20: note = Target: SCN10A; (-) strand; PAM type: NNGRRT; PAM sequence: TGGGAT
  source 1..20: mol_type = other DNA
tattcttaaacagccacatg

SEQ ID NO: 7076 - DNA, 20 bp, synthetic construct
  misc_feature 1..20: note = Description of Artificial Sequence: Synthetic oligonucleotide
  misc_feature 1..20: note = Target: SCN10A; (-) strand; PAM type: NNGRRT; PAM sequence: AAGAAT
  source 1..20: mol_type = other DNA
acacccagtttctagacctc

SEQ ID NO: 7077 - DNA, 20 bp, synthetic construct
  misc_feature 1..20: note = Description of Artificial Sequence: Synthetic oligonucleotide
  misc_feature 1..20: note = Target: SCN10A; (-) strand; PAM type: NNGRRT; PAM sequence: AGGAGT
  source 1..20: mol_type = other DNA
ttaagtgctgtaacaggcct

SEQ ID NO: 7078 - DNA, 20 bp, synthetic construct
  misc_feature 1..20: note = Description of Artificial Sequence: Synthetic oligonucleotide
  misc_feature 1..20: note = Target: SCN10A; (-) strand; PAM type: NNGRRT; PAM sequence: GTGAAT
  source 1..20: mol_type = other DNA
tatgagaaacagactaatag

SEQ ID NO: 7079 - DNA, 20 bp, synthetic construct
  misc_feature 1..20: note = Description of Artificial Sequence: Synthetic oligonucleotide
  misc_feature 1..20: note = Target: SCN10A; (-) strand; PAM type: NNGRRT; PAM sequence: CTGAGT
  source 1..20: mol_type = other DNA
atttattcaacaaataatct

SEQ ID NO: 7080 - DNA, 20 bp, synthetic construct
  misc_feature 1..20: note = Description of Artificial Sequence: Synthetic oligonucleotide
  misc_feature 1..20: note = Target: SCN10A; (-) strand; PAM type: NNGRRT; PAM sequence: TTGAGT
  source 1..20: mol_type = other DNA
catttgtcatgcagttactc

SEQ ID NO: 7081 - DNA, 20 bp, synthetic construct
  misc_feature 1..20: note = Description of Artificial Sequence: Synthetic oligonucleotide
  misc_feature 1..20: note = Target: SCN10A; (-) strand; PAM type: NNGRRT; PAM sequence: GTGAGT
  source 1..20: mol_type = other DNA
tgccatgggattatcaggtg

SEQ ID NO: 7082 - DNA, 20 bp, synthetic construct
  misc_feature 1..20: note = Description of Artificial Sequence: Synthetic oligonucleotide
  misc_feature 1..20: note = Target: SCN10A; (-) strand; PAM type: NNGRRT; PAM sequence: TGGGAT
  source 1..20: mol_type = other DNA
ataaagggatgggcctgcca

SEQ ID NO: 7083 - DNA, 20 bp, synthetic construct
  misc_feature 1..20: note = Description of Artificial Sequence: Synthetic oligonucleotide
  misc_feature 1..20: note = Target: SCN10A; (-) strand; PAM type: NNGRRT; PAM sequence: AGGGAT
  source 1..20: mol_type = other DNA
gggctagtagaatagcataa

SEQ ID NO: 7084 - DNA, 20 bp, synthetic construct
  misc_feature 1..20: note = Description of Artificial Sequence: Synthetic oligonucleotide
  misc_feature 1..20: note = Target: SCN10A; (-) strand; PAM type: NNGRRT; PAM sequence: TAGAAT
  source 1..20: mol_type = other DNA
attacacaagtgtgggctag

SEQ ID NO: 7085 - DNA, 20 bp, synthetic construct
  misc_feature 1..20: note = Description of Artificial Sequence: Synthetic oligonucleotide
  misc_feature 1..20: note = Target: SCN10A; (-) strand; PAM type: NNGRRT; PAM sequence: GTGAAT
  source 1..20: mol_type = other DNA
gaggctagagggccttccta

SEQ ID NO: 7086 - DNA, 20 bp, synthetic construct
  misc_feature 1..20: note = Description of Artificial Sequence: Synthetic oligonucleotide
  misc_feature 1..20: note = Target: SCN10A; (-) strand; PAM type: NNGRRT; PAM sequence: AGGAGT
  source 1..20: mol_type = other DNA
tgctatgtggggactttgca

SEQ ID NO: 7087 - DNA, 20 bp, synthetic construct
  misc_feature 1..20: note = Description of Artificial Sequence: Synthetic oligonucleotide
  misc_feature 1..20: note = Target: SCN10A; (-) strand; PAM type: NNGRRT; PAM sequence: GAGAGT
  source 1..20: mol_type = other DNA
tttggccgctcaataaaatg

SEQ ID NO: 7088 - DNA, 20 bp, synthetic construct
  misc_feature 1..20: note = Description of Artificial Sequence: Synthetic oligonucleotide
  misc_feature 1..20: note = Target: SCN10A; (-) strand; PAM type: NNGRRT; PAM sequence: GTGAGT
  source 1..20: mol_type = other DNA
accttgcacttctgcaggtg

SEQ ID NO: 7089 - DNA, 20 bp, synthetic construct
  misc_feature 1..20: note = Description of Artificial Sequence: Synthetic oligonucleotide
  misc_feature 1..20: note = Target: SCN10A; (-) strand; PAM type: NNGRRT; PAM sequence: ATGGGT
  source 1..20: mol_type = other DNA
tcaactttgataatgttgca

SEQ ID NO: 7090 - DNA, 20 bp, synthetic construct
  misc_feature 1..20: note = Description of Artificial Sequence: Synthetic oligonucleotide
  misc_feature 1..20: note = Target: SCN10A; (-) strand; PAM type: NNGRRT; PAM sequence: CTGGGT
  source 1..20: mol_type = other DNA
aactccactggcagcttctt

SEQ ID NO: 7091 - DNA, 20 bp, synthetic construct
  misc_feature 1..20: note = Description of Artificial Sequence: Synthetic oligonucleotide
  misc_feature 1..20: note = Target: SCN10A; (-) strand; PAM type: NNGRRT; PAM sequence: GTGAAT
  source 1..20: mol_type = other DNA
cccttgtacctttgtcgatt

SEQ ID NO: 7092 - DNA, 20 bp, synthetic construct
  misc_feature 1..20: note = Description of Artificial Sequence: Synthetic oligonucleotide
  misc_feature 1..20: note = Target: SCN10A; (-) strand; PAM type: NNGRRT; PAM sequence: GAGAGT
  source 1..20: mol_type = other DNA
gtgcatcaactataccgatg

SEQ ID NO: 7093 - DNA, 20 bp, synthetic construct
  misc_feature 1..20: note = Description of Artificial Sequence: Synthetic oligonucleotide
  misc_feature 1..20: note = Target: SCN10A; (-) strand; PAM type: NNGRRT; PAM sequence: ATGGGT
  source 1..20: mol_type = other DNA
tctggctcatcttcagcatc

SEQ ID NO: 7094 - DNA, 20 bp, synthetic construct
  misc_feature 1..20: note = Description of Artificial Sequence: Synthetic oligonucleotide
  misc_feature 1..20: note = Target: SCN10A; (-) strand; PAM type: NNGRRT; PAM sequence: ATGAAT
  source 1..20: mol_type = other DNA
tgggcgccatcccatccatc

SEQ ID NO: 7095 - DNA, 20 bp, synthetic construct
  misc_feature 1..20: note = Description of Artificial Sequence: Synthetic oligonucleotide
  misc_feature 1..20: note = Target: SCN10A; (-) strand; PAM type: NNGRRT; PAM sequence: GTGGAT
  source 1..20: mol_type = other DNA
ctatctcccaccaggtggtg

SEQ ID NO: 7096 - DNA, 20 bp, synthetic construct
  misc_feature 1..20: note = Description of Artificial Sequence: Synthetic oligonucleotide
  misc_feature 1..20: note = Target: SCN10A; (-) strand; PAM type: NNGRRT; PAM sequence: GGGGGT
  source 1..20: mol_type = other DNA
aagagatagaatccagcaga

SEQ ID NO: 7097 - DNA, 20 bp, synthetic construct
  misc_feature 1..20: note = Description of Artificial Sequence: Synthetic oligonucleotide
  misc_feature 1..20: note = Target: SCN10A; (-) strand; PAM type: NNGRRT; PAM sequence: TAGAAT
  source 1..20: mol_type = other DNA
tgaatgagtatagaaagaga

SEQ ID NO: 7098 - DNA, 20 bp, synthetic construct
  misc_feature 1..20: note = Description of Artificial Sequence: Synthetic oligonucleotide
  misc_feature 1..20: note = Target: SCN10A; (-) strand; PAM type: NNGRRT; PAM sequence: ATGAGT
  source 1..20: mol_type = other DNA
tggctcatgaagcagcctga

SEQ ID NO: 7099 - DNA, 20 bp, synthetic construct
  misc_feature 1..20: note = Description of Artificial Sequence: Synthetic oligonucleotide
  misc_feature 1..20: note = Target: SCN10A; (-) strand; PAM type: NNGRRT; PAM sequence: CTGAAT
  source 1..20: mol_type = other DNA
ccactggctcatgaagcagc

SEQ ID NO: 7100 - DNA, 20 bp, synthetic construct
  misc_feature 1..20: note = Description of Artificial Sequence: Synthetic oligonucleotide
  misc_feature 1..20: note = Target: SCN10A; (-) strand; PAM type: NNGRRT; PAM sequence: CTGAAT
  source 1..20: mol_type = other DNA
tgtctctcagtcttctgagt

SEQ ID NO: 7101 - DNA, 20 bp, synthetic construct
  misc_feature 1..20: note = Description of Artificial Sequence: Synthetic oligonucleotide
  misc_feature 1..20: note = Target: SCN10A; (-) strand; PAM type: NNGRRT; PAM sequence: CTGAGT
  source 1..20: mol_type = other DNA
gcccaatgtctctcagtctt

SEQ ID NO: 7102 - DNA, 20 bp, synthetic construct
  misc_feature 1..20: note = Description of Artificial Sequence: Synthetic oligonucleotide
  misc_feature 1..20: note = Target: SCN10A; (-) strand; PAM type: NNGRRT; PAM sequence: CTGAAT
  source 1..20: mol_type = other DNA
tcttctcactgcaacccacc

SEQ ID NO: 7103 - DNA, 20 bp, synthetic construct
  misc_feature 1..20: note = Description of Artificial Sequence: Synthetic oligonucleotide
  misc_feature 1..20: note = Target: SCN10A; (-) strand; PAM type: NNGRRT; PAM sequence: ATGAGT
  source 1..20: mol_type = other DNA
acacacactcacacttctaa

SEQ ID NO: 7104 - DNA, 20 bp, synthetic construct
  misc_feature 1..20: note = Description of Artificial Sequence: Synthetic oligonucleotide
  misc_feature 1..20: note = Target: SCN10A; (-) strand; PAM type: NNGRRT; PAM sequence: GAGAAT
  source 1..20: mol_type = other DNA
ttttatgtatggtatttaag

SEQ ID NO: 7105 - DNA, 20 bp, synthetic construct
  misc_feature 1..20: note = Description of Artificial Sequence: Synthetic oligonucleotide
  misc_feature 1..20: note = Target: SCN10A; (-) strand; PAM type: NNGRRT; PAM sequence: ATGGAT
  source 1..20: mol_type = other DNA
aaataagctattttgtgaat

SEQ ID NO: 7106 - DNA, 20 bp, synthetic construct
  misc_feature 1..20: note = Description of Artificial Sequence: Synthetic oligonucleotide
  misc_feature 1..20: note = Target: SCN10A; (-) strand; PAM type: NNGRRT; PAM sequence: GTGAAT
  source 1..20: mol_type = other DNA
atttacaaataagctatttt

SEQ ID NO: 7107 - DNA, 20 bp, synthetic construct
  misc_feature 1..20: note = Description of Artificial Sequence: Synthetic oligonucleotide
  misc_feature 1..20: note = Target: SCN10A; (-) strand; PAM type: NNGRRT; PAM sequence: CAGAAT
  source 1..20: mol_type = other DNA
cctaactgcctccgtcagga

SEQ ID NO: 7108 - DNA, 20 bp, synthetic construct
  misc_feature 1..20: note = Description of Artificial Sequence: Synthetic oligonucleotide
  misc_feature 1..20: note = Target: SCN10A; (-) strand; PAM type: NNGRRT; PAM sequence: TGGAAT
  source 1..20: mol_type = other DNA
ttacctcagctgccacccac

SEQ ID NO: 7109 - DNA, 20 bp, synthetic construct
  misc_feature 1..20: note = Description of Artificial Sequence: Synthetic oligonucleotide
  misc_feature 1..20: note = Target: SCN10A; (-) strand; PAM type: NNGRRT; PAM sequence: ATGAGT
  source 1..20: mol_type = other DNA
agtctttcctctaatactcc

SEQ ID NO: 7110 - DNA, 20 bp, synthetic construct
  misc_feature 1..20: note = Description of Artificial Sequence: Synthetic oligonucleotide
  misc_feature 1..20: note = Target: SCN10A; (-) strand; PAM type: NNGRRT; PAM sequence: ATGAGT
  source 1..20: mol_type = other DNA
tctctgtctttccatgacaa

SEQ ID NO: 7111 - DNA, 20 bp, synthetic construct
  misc_feature 1..20: note = Description of Artificial Sequence: Synthetic oligonucleotide
  misc_feature 1..20: note = Target: SCN10A; (-) strand; PAM type: NNGRRT; PAM sequence: CTGAAT
  source 1..20: mol_type = other DNA
ttgctcttagtgaagtaatc

SEQ ID NO: 7112 - DNA, 20 bp, synthetic construct
  misc_feature 1..20: note = Description of Artificial Sequence: Synthetic oligonucleotide
  misc_feature 1..20: note = Target: SCN10A; (-) strand; PAM type: NNGRRT; PAM sequence: CTGAGT
  source 1..20: mol_type = other DNA
cccacctccaaaggtaggct

SEQ ID NO: 7113 - DNA, 20 bp, synthetic construct
  misc_feature 1..20: note = Description of Artificial Sequence: Synthetic oligonucleotide
  misc_feature 1..20: note = Target: SCN10A; (-) strand; PAM type: NNGRRT; PAM sequence: CTGGGT
  source 1..20: mol_type = other DNA
ttgtgccattatactccagc

SEQ ID NO: 7114 - DNA, 20 bp, synthetic construct
  misc_feature 1..20: note = Description of Artificial Sequence: Synthetic oligonucleotide
  misc_feature 1..20: note = Target: SCN10A; (-) strand; PAM type: NNGRRT; PAM sequence: AGGAGT
  source 1..20: mol_type = other DNA
cgggcggatcacctgaggtt

SEQ ID NO: 7115 - DNA, 20 bp, synthetic construct
  misc_feature 1..20: note = Description of Artificial Sequence: Synthetic oligonucleotide
  misc_feature 1..20: note = Target: SCN10A; (-) strand; PAM type: NNGRRT; PAM sequence: GCGGAT
  source 1..20: mol_type = other DNA
actttgggaggctgaggcgg

SEQ ID NO: 7116 - DNA, 20 bp, synthetic construct
  misc_feature 1..20: note = Description of Artificial Sequence: Synthetic oligonucleotide
  misc_feature 1..20: note = Target: SCN10A; (-) strand; PAM type: NNGRRT; PAM sequence: GCGGGT
  source 1..20: mol_type = other DNA
ctttctcgatttgaaggcat

SEQ ID NO: 7117 - DNA, 20 bp, synthetic construct
  misc_feature 1..20: note = Description of Artificial Sequence: Synthetic oligonucleotide
  misc_feature 1..20: note = Target: SCN10A; (-) strand; PAM type: NNGRRT; PAM sequence: TGGAAT
  source 1..20: mol_type = other DNA
aagtctcacagcgaagattc

SEQ ID NO: 7118 - DNA, 20 bp, synthetic construct
  misc_feature 1..20: note = Description of Artificial Sequence: Synthetic oligonucleotide
  misc_feature 1..20: note = Target: SCN10A; (-) strand; PAM type: NNGRRT; PAM sequence: TAGAGT
  source 1..20: mol_type = other DNA
ggactgcctttctggaaacc

SEQ ID NO: 7119 - DNA, 20 bp, synthetic construct
  misc_feature 1..20: note = Description of Artificial Sequence: Synthetic oligonucleotide
  misc_feature 1..20: note = Target: SCN10A; (-) strand; PAM type: NNGRRT; PAM sequence: GGGAGT
  source 1..20: mol_type = other DNA
taggaatgggaggctgggca

SEQ ID NO: 7120 - DNA, 20 bp, synthetic construct
  misc_feature 1..20: note = Description of Artificial Sequence: Synthetic oligonucleotide
  misc_feature 1..20: note = Target: SCN10A; (-) strand; PAM type: NNGRRT; PAM sequence: AGGAAT
  source 1..20: mol_type = other DNA
ggatgatggcttagacgtgt

SEQ ID NO: 7121 - DNA, 20 bp, synthetic construct
  misc_feature 1..20: note = Description of Artificial Sequence: Synthetic oligonucleotide
  misc_feature 1..20: note = Target: SCN10A; (-) strand; PAM type: NNGRRT; PAM sequence: TAGGAT
  source 1..20: mol_type = other DNA
gttccgaataaggtgggagc

SEQ ID NO: 7122 - DNA, 20 bp, synthetic construct
  misc_feature 1..20: note = Description of Artificial Sequence: Synthetic oligonucleotide
  misc_feature 1..20: note = Target: SCN10A; (-) strand; PAM type: NNGRRT; PAM sequence: CCGAAT
  source 1..20: mol_type = other DNA
ctagacctctcattggagtt

SEQ ID NO: 7123 - DNA, 20 bp, synthetic construct
  misc_feature 1..20: note = Description of Artificial Sequence: Synthetic oligonucleotide
  misc_feature 1..20: note = Target: SCN10A; (-) strand; PAM type: NNGRRT; PAM sequence: TGGAGT
  source 1..20: mol_type = other DNA
actctttctagacctctcat

SEQ ID NO: 7124 - DNA, 20 bp, synthetic construct
  misc_feature 1..20: note = Description of Artificial Sequence: Synthetic oligonucleotide
  misc_feature 1..20: note = Target: SCN10A; (-) strand; PAM type: NNGRRT; PAM sequence: GTGAAT
  source 1..20: mol_type = other DNA
ccagattgtttaagagagtg

SEQ ID NO: 7125 - DNA, 20 bp, synthetic construct
  misc_feature 1..20: note = Description of Artificial Sequence: Synthetic oligonucleotide
  misc_feature 1..20: note = Target: SCN10A; (-) strand; PAM type: NNGRRT; PAM sequence: GAGAGT
  source 1..20: mol_type = other DNA
ttcttgcccagattgtttaa

SEQ ID NO: 7126 - DNA, 20 bp, synthetic construct
  misc_feature 1..20: note = Description of Artificial Sequence: Synthetic oligonucleotide
  misc_feature 1..20: note = Target: SCN10A; (-) strand; PAM type: NNGRRT; PAM sequence: CTGAGT
  source 1..20: mol_type = other DNA
gaggttggtgatgttagaga

SEQ ID NO: 7127 - DNA, 20 bp, synthetic construct
  misc_feature 1..20: note = Description of Artificial Sequence: Synthetic oligonucleotide
  misc_feature 1..20: note = Target: SCN10A; (-) strand; PAM type: NNGRRT; PAM sequence: AAGAGT
  source 1..20: mol_type = other DNA
ctgcccctagaaggaaaagg

SEQ ID NO: 7128 - DNA, 20 bp, synthetic construct
  misc_feature 1..20: note = Description of Artificial Sequence: Synthetic oligonucleotide
  misc_feature 1..20: note = Target: SCN10A; (-) strand; PAM type: NNGRRT; PAM sequence: CAGAAT
  source 1..20: mol_type = other DNA
attcagattactatattcct

SEQ ID NO: 7129 - DNA, 20 bp, synthetic construct
  misc_feature 1..20: note = Description of Artificial Sequence: Synthetic oligonucleotide
  misc_feature 1..20: note = Target: SCN10A; (-) strand; PAM type: NNGRRT; PAM sequence: GGGAAT
  source 1..20: mol_type = other DNA
caaaaaatcagggttcaaat

SEQ ID NO: 7130 - DNA, 20 bp, synthetic construct
  misc_feature 1..20: note = Description of Artificial Sequence: Synthetic oligonucleotide
  misc_feature 1..20: note = Target: SCN10A; (-) strand; PAM type: NNGRRT; PAM sequence: CAGGGT
  source 1..20: mol_type = other DNA
aacccaagctcacaaaaaat

SEQ ID NO: 7131 - DNA, 20 bp, synthetic construct
  misc_feature 1..20: note = Description of Artificial Sequence: Synthetic oligonucleotide
  misc_feature 1..20: note = Target: SCN10A; (-) strand; PAM type: NNGRRT; PAM sequence: AAGGGT
  source 1..20: mol_type = other DNA
tctgactttttcattttaca

SEQ ID NO: 7132 - DNA, 20 bp, synthetic construct
  misc_feature 1..20: note = Description of Artificial Sequence: Synthetic oligonucleotide
  misc_feature 1..20: note = Target: SCN10A; (-) strand; PAM type: NNGRRT; PAM sequence: TGGAAT
  source 1..20: mol_type = other DNA
ctgcagagctatcagaactt

SEQ ID NO: 7133 - DNA, 20 bp, synthetic construct
  misc_feature 1..20: note = Description of Artificial Sequence: Synthetic oligonucleotide
  misc_feature 1..20: note = Target: SCN10A; (-) strand; PAM type: NNGRRT; PAM sequence: CAGGGT
  source 1..20: mol_type = other DNA
gtggctaagatctcacagga

SEQ ID NO: 7134 - DNA, 20 bp, synthetic construct
  misc_feature 1..20: note = Description of Artificial Sequence: Synthetic oligonucleotide
  misc_feature 1..20: note = Target: SCN10A; (-) strand; PAM type: NNGRRT; PAM sequence: CTGAAT
  source 1..20: mol_type = other DNA
actgccaggataagctgagc

SEQ ID NO: 7135 - DNA, 20 bp, synthetic construct
  misc_feature 1..20: note = Description of Artificial Sequence: Synthetic oligonucleotide
  misc_feature 1..20: note = Target: SCN10A; (-) strand; PAM type: NNGRRT; PAM sequence: CAGGAT
  source 1..20: mol_type = other DNA
tgtgcatcccacctaactgc

SEQ ID NO: 7136 - DNA, 20 bp, synthetic construct
  misc_feature 1..20: note = Description of Artificial Sequence: Synthetic oligonucleotide
  misc_feature 1..20: note = Target: SCN10A; (-) strand; PAM type: NNGRRT; PAM sequence: AAGAAT
  source 1..20: mol_type = other DNA
tgcaataagccactcatcca

SEQ ID NO: 7137 - DNA, 20 bp, synthetic construct
  misc_feature 1..20: note = Description of Artificial Sequence: Synthetic oligonucleotide
  misc_feature 1..20: note = Target: SCN10A; (-) strand; PAM type: NNGRRT; PAM sequence: GAGGGT
  source 1..20: mol_type = other DNA
gccttgcatgaatgaaggaa

SEQ ID NO: 7138 - DNA, 20 bp, synthetic construct
  misc_feature 1..20: note = Description of Artificial Sequence: Synthetic oligonucleotide
  misc_feature 1..20: note = Target: SCN10A; (-) strand; PAM type: NNGRRT; PAM sequence: ATGAAT
  source 1..20: mol_type = other DNA
gctgatgtctggagccttgc

SEQ ID NO: 7139 - DNA, 20 bp, synthetic construct
  misc_feature 1..20: note = Description of Artificial Sequence: Synthetic oligonucleotide
  misc_feature 1..20: note = Target: SCN10A; (-) strand; PAM type: NNGRRT; PAM sequence: CTGGGT
  source 1..20: mol_type = other DNA
accctcatgcacccaggcag

SEQ ID NO: 7140 - DNA, 20 bp, synthetic construct
  misc_feature 1..20: note = Description of Artificial Sequence: Synthetic oligonucleotide
  misc_feature 1..20: note = Target: SCN10A; (-) strand; PAM type: NNGRRT; PAM sequence: TAGGGT
  source 1..20: mol_type = other DNA
gggctgagcaaaagactgaa

SEQ ID NO: 7141 - DNA, 20 bp, synthetic construct
  misc_feature 1..20: note = Description of Artificial Sequence: Synthetic oligonucleotide
  misc_feature 1..20: note = Target: SCN10A; (-) strand; PAM type: NNGRRT; PAM sequence: CTGAAT
  source 1..20: mol_type = other DNA
ccagggggctgagcaaaaga

SEQ ID NO: 7142 - DNA, 20 bp, synthetic construct
  misc_feature 1..20: note = Description of Artificial Sequence: Synthetic oligonucleotide
  misc_feature 1..20: note = Target: SCN10A; (-) strand; PAM type: NNGRRT; PAM sequence: TTGGGT
  source 1..20: mol_type = other DNA
cagtgggaatggaggtgggc

SEQ ID NO: 7143 - DNA, 20 bp, synthetic construct
  misc_feature 1..20: note = Description of Artificial Sequence: Synthetic oligonucleotide
  misc_feature 1..20: note = Target: SCN10A; (-) strand; PAM type: NNGRRT; PAM sequence: GGGAAT
  source 1..20: mol_type = other DNA
aggctagtgggctgagcagt

SEQ ID NO: 7144 - DNA, 20 bp, synthetic construct
  misc_feature 1..20: note = Description of Artificial Sequence: Synthetic oligonucleotide
  misc_feature 1..20: note = Target: SCN10A; (-) strand; PAM type: NNGRRT; PAM sequence: GAGAAT
  source 1..20: mol_type = other DNA
tcataatcagatttgcagtg

SEQ ID NO: 7145 - DNA, 20 bp, synthetic construct
  misc_feature 1..20: note = Description of Artificial Sequence: Synthetic oligonucleotide
  misc_feature 1..20: note = Target: SCN10A; (-) strand; PAM type: NNGRRT; PAM sequence: GGGAGT
  source 1..20: mol_type = other DNA
ataaagtaccagtgatgttt

SEQ ID NO: 7146 - DNA, 20 bp, synthetic construct
  misc_feature 1..20: note = Description of Artificial Sequence: Synthetic oligonucleotide
  misc_feature 1..20: note = Target: SCN10A; (-) strand; PAM type: NNGRRT; PAM sequence: GAGGGT
  source 1..20: mol_type = other DNA
cagagtatggagtttatcct

SEQ ID NO: 7147 - DNA, 20 bp, synthetic construct
  misc_feature 1..20: note = Description of Artificial Sequence: Synthetic oligonucleotide
  misc_feature 1..20: note = Target: SCN10A; (-) strand; PAM type: NNGRRT; PAM sequence: TGGAGT
  source 1..20: mol_type = other DNA
atgacacaggctacagagta

SEQ ID NO: 7148 - DNA, 20 bp, synthetic construct
  misc_feature 1..20: note = Description of Artificial Sequence: Synthetic oligonucleotide
  misc_feature 1..20: note = Target: SCN10A; (-) strand; PAM type: NNGRRT; PAM sequence: CAGAGT
  source 1..20: mol_type = other DNA
tgaccatatgacacaggcta

SEQ ID NO: 7149 - DNA, 20 bp, synthetic construct
  misc_feature 1..20: note = Description of Artificial Sequence: Synthetic oligonucleotide
  misc_feature 1..20: note = Target: SCN10A; (-) strand; PAM type: NNGRRT; PAM sequence: GTGGGT
  source 1..20: mol_type = other DNA
atttgatttgggtagaatgt

SEQ ID NO: 7150 - DNA, 20 bp, synthetic construct
  misc_feature 1..20: note = Description of Artificial Sequence: Synthetic oligonucleotide
  misc_feature 1..20: note = Target: SCN10A; (-) strand; PAM type: NNGRRT; PAM sequence: TAGAAT
  source 1..20: mol_type = other DNA
agggaacaatttgatttggg

SEQ ID NO: 7151 - DNA, 20 bp, synthetic construct
  misc_feature 1..20: note = Description of Artificial Sequence: Synthetic oligonucleotide
  misc_feature 1..20: note = Target: SCN10A; (-) strand; PAM type: NNGRRT; PAM sequence: TTGGGT
  source 1..20: mol_type = other DNA
tgctcagggaacaatttgat

SEQ ID NO: 7152 - DNA, 20 bp, synthetic construct
  misc_feature 1..20: note = Description of Artificial Sequence: Synthetic oligonucleotide
  misc_feature 1..20: note = Target: SCN10A; (-) strand; PAM type: NNGRRT; PAM sequence: GAGAAT
  source 1..20: mol_type = other DNA
actcttggggtggggtggtt

SEQ ID NO: 7153 - DNA, 20 bp, synthetic construct
  misc_feature 1..20: note = Description of Artificial Sequence: Synthetic oligonucleotide
  misc_feature 1..20: note = Target: SCN10A; (-) strand; PAM type: NNGRRT; PAM sequence: TGGGGT
  source 1..20: mol_type = other DNA
gccttcttccactcttgggg

SEQ ID NO: 7154 - DNA, 20 bp, synthetic construct
  misc_feature 1..20: note = Description of Artificial Sequence: Synthetic oligonucleotide
  misc_feature 1..20: note = Target: SCN10A; (-) strand; PAM type: NNGRRT; PAM sequence: TGGGGT
  source 1..20: mol_type = other DNA
catgagccttcttccactct

SEQ ID NO: 7155 - DNA, 20 bp, synthetic construct
  misc_feature 1..20: note = Description of Artificial Sequence: Synthetic oligonucleotide
  misc_feature 1..20: note = Target: SCN10A; (-) strand; PAM type: NNGRRT; PAM sequence: GTGAAT
  source 1..20: mol_type = other DNA
gaaataaatgtattataagg

SEQ ID NO: 7156 - DNA, 20 bp, synthetic construct
  misc_feature 1..20: note = Description of Artificial Sequence: Synthetic oligonucleotide
  misc_feature 1..20: note = Target: SCN10A; (-) strand; PAM type: NNGRRT; PAM sequence: AAGGGT
  source 1..20: mol_type = other DNA
catggaaataaatgtattat

SEQ ID NO: 7157 - DNA, 20 bp, synthetic construct
  misc_feature 1..20: note = Description of Artificial Sequence: Synthetic oligonucleotide
  misc_feature 1..20: note = Target: SCN10A; (-) strand; PAM type: NNGRRT; PAM sequence: CAGGAT
  source 1..20: mol_type = other DNA
gaataaatactcactatctc

SEQ ID NO: 7158 - DNA, 20 bp, synthetic construct
  misc_feature 1..20: note = Description of Artificial Sequence: Synthetic oligonucleotide
  misc_feature 1..20: note = Target: SCN10A; (-) strand; PAM type: NNGRRT; PAM sequence: CAGAAT
  source 1..20: mol_type = other DNA
ctttgtaagaaacagaagca

SEQ ID NO: 7159 - DNA, 20 bp, synthetic construct
  misc_feature 1..20: note = Description of Artificial Sequence: Synthetic oligonucleotide
  misc_feature 1..20: note = Target: SCN10A; (-) strand; PAM type: NNGRRT; PAM sequence: CAGGAT
  source 1..20: mol_type = other DNA
atacatctaactattgaata

SEQ ID NO: 7160 - DNA, 20 bp, synthetic construct
  misc_feature 1..20: note = Description of Artificial Sequence: Synthetic oligonucleotide
  misc_feature 1..20: note = Target: SCN10A; (-) strand; PAM type: NNGRRT; PAM sequence: TTGAAT
  source 1..20: mol_type = other DNA
atttgctatacatctaacta

SEQ ID NO: 7161 - DNA, 20 bp, synthetic construct
  misc_feature 1..20: note = Description of Artificial Sequence: Synthetic oligonucleotide
  misc_feature 1..20: note = Target: SCN10A; (-) strand; PAM type: NNGRRT; PAM sequence: AGGGAT
  source 1..20: mol_type = other DNA
ccaaaccatatcaattttta

SEQ ID NO: 7162 - DNA, 20 bp, synthetic construct
  misc_feature 1..20: note = Description of Artificial Sequence: Synthetic oligonucleotide
  misc_feature 1..20: note = Target: SCN10A; (-) strand; PAM type: NNGRRT; PAM sequence: TTGGGT
  source 1..20: mol_type = other DNA
atgggaattcaagataagat

SEQ ID NO: 7163 - DNA, 20 bp, synthetic construct
  misc_feature 1..20: note = Description of Artificial Sequence: Synthetic oligonucleotide
  misc_feature 1..20: note = Target: SCN10A; (-) strand; PAM type: NNGRRT; PAM sequence: GGGAAT
  source 1..20: mol_type = other DNA
cctcccctcccacaacacat

SEQ ID NO: 7164 - DNA, 20 bp, synthetic construct
  misc_feature 1..20: note = Description of Artificial Sequence: Synthetic oligonucleotide
  misc_feature 1..20: note = Target: SCN10A; (-) strand; PAM type: NNGRRT; PAM sequence: CAGGGT
  source 1..20: mol_type = other DNA
catgattcacttacctccca

SEQ ID NO: 7165 - DNA, 20 bp, synthetic construct
  misc_feature 1..20: note = Description of Artificial Sequence: Synthetic oligonucleotide
  misc_feature 1..20: note = Target: SCN10A; (-) strand; PAM type: NNGRRT; PAM sequence: GTGGAT
  source 1..20: mol_type = other DNA
aggtgcgagtcacgtcttat

SEQ ID NO: 7166 - DNA, 20 bp, synthetic construct
  misc_feature 1..20: note = Description of Artificial Sequence: Synthetic oligonucleotide
  misc_feature 1..20: note = Target: SCN10A; (-) strand; PAM type: NNGRRT; PAM sequence: GCGAGT
  source 1..20: mol_type = other DNA
atggcaaaaggaaaggaggt

SEQ ID NO: 7167 - DNA, 20 bp, synthetic construct
  misc_feature 1..20: note = Description of Artificial Sequence: Synthetic oligonucleotide
  misc_feature 1..20: note = Target: SCN10A; (-) strand; PAM type: NNGRRT; PAM sequence: ATGGGT
  source 1..20: mol_type = other DNA
tgaggcctgaaatctgagtc

SEQ ID NO: 7168 - DNA, 20 bp, synthetic construct
  misc_feature 1..20: note = Description of Artificial Sequence: Synthetic oligonucleotide
  misc_feature 1..20: note = Target: SCN10A; (-) strand; PAM type: NNGRRT; PAM sequence: CTGAGT
  source 1..20: mol_type = other DNA
ttagctgtgaggcctgaaat

SEQ ID NO: 7169 - DNA, 20 bp, synthetic construct
  misc_feature 1..20: note = Description of Artificial Sequence: Synthetic oligonucleotide
  misc_feature 1..20: note = Target: SCN10A; (-) strand; PAM type: NNGRRT; PAM sequence: AAGGAT
  source 1..20: mol_type = other DNA
gcttcaggccactgtaccac

SEQ ID NO: 7170 - DNA, 20 bp, synthetic construct
  misc_feature 1..20: note = Description of Artificial Sequence: Synthetic oligonucleotide
  misc_feature 1..20: note = Target: SCN10A; (-) strand; PAM type: NNGRRT; PAM sequence: CTGGAT
  source 1..20: mol_type = other DNA
ttggtgcttgcctcctgaag

SEQ ID NO: 7171 - DNA, 20 bp, synthetic construct
  misc_feature 1..20: note = Description of Artificial Sequence: Synthetic oligonucleotide
  misc_feature 1..20: note = Target: SCN10A; (-) strand; PAM type: NNGRRT; PAM sequence: CAGGGT
  source 1..20: mol_type = other DNA
tagctgagggtttctgcaag

SEQ ID NO: 7172 - DNA, 20 bp, synthetic construct
  misc_feature 1..20: note = Description of Artificial Sequence: Synthetic oligonucleotide
  misc_feature 1..20: note = Target: SCN10A; (-) strand; PAM type: NNGRRT; PAM sequence: GAGGGT
  source 1..20: mol_type = other DNA
ctgttcactgccgcatagct

SEQ ID NO: 7173 - DNA, 20 bp, synthetic construct
  misc_feature 1..20: note = Description of Artificial Sequence: Synthetic oligonucleotide
  misc_feature 1..20: note = Target: SCN10A; (-) strand; PAM type: NNGRRT; PAM sequence: CTGAGT
  source 1..20: mol_type = other DNA
ttgctttgcagcatggttaa

SEQ ID NO: 7174 - DNA, 20 bp, synthetic construct
  misc_feature 1..20: note = Description of Artificial Sequence: Synthetic oligonucleotide
  misc_feature 1..20: note = Target: SCN10A; (-) strand; PAM type: NNGRRT; PAM sequence: GAGAAT
  source 1..20: mol_type = other DNA
ggccagtaatccctgcatta

SEQ ID NO: 7175 - DNA, 20 bp, synthetic construct
  misc_feature 1..20: note = Description of Artificial Sequence: Synthetic oligonucleotide
  misc_feature 1..20: note = Target: SCN10A; (-) strand; PAM type: NNGRRT; PAM sequence: TGGAGT
  source 1..20: mol_type = other DNA
catttggagaggtaatgagc

SEQ ID NO: 7176 - DNA, 20 bp, synthetic construct
  misc_feature 1..20: note = Description of Artificial Sequence: Synthetic oligonucleotide
  misc_feature 1..20: note = Target: SCN10A; (-) strand; PAM type: NNGRRT; PAM sequence: TTGGGT
  source 1..20: mol_type = other DNA
agattctgatcttattggtc

SEQ ID NO: 7177 - DNA, 20 bp, synthetic construct
  misc_feature 1..20: note = Description of Artificial Sequence: Synthetic oligonucleotide
  misc_feature 1..20: note = Target: SCN10A; (-) strand; PAM type: NNGRRT; PAM sequence: GAGAAT
  source 1..20: mol_type = other DNA
cctcacacctggctgcactt

SEQ ID NO: 7178 - DNA, 20 bp, synthetic construct
  misc_feature 1..20: note = Description of Artificial Sequence: Synthetic oligonucleotide
  misc_feature 1..20: note = Target: SCN10A; (-) strand; PAM type: NNGRRT; PAM sequence: GAGAAT
  source 1..20: mol_type = other DNA
agccatgaactgtgagcaca

SEQ ID NO: 7179 - DNA, 20 bp, synthetic construct
  misc_feature 1..20: note = Description of Artificial Sequence: Synthetic oligonucleotide
  misc_feature 1..20: note = Target: SCN10A; (-) strand; PAM type: NNGRRT; PAM sequence: ATGGGT
  source 1..20: mol_type = other DNA
ttatggccctgcatccatag

SEQ ID NO: 7180 - DNA, 20 bp, synthetic construct
  misc_feature 1..20: note = Description of Artificial Sequence: Synthetic oligonucleotide
  misc_feature 1..20: note = Target: SCN10A; (-) strand; PAM type: NNGRRT; PAM sequence: GTGAGT
  source 1..20: mol_type = other DNA
gacacaatagtgactgttag

SEQ ID NO: 7181 - DNA, 20 bp, synthetic construct
  misc_feature 1..20: note = Description of Artificial Sequence: Synthetic oligonucleotide
  misc_feature 1..20: note = Target: SCN10A; (-) strand; PAM type: NNGRRT; PAM sequence: ATGAGT
  source 1..20: mol_type = other DNA
tgagaatagccctgacaccc

SEQ ID NO: 7182 - DNA, 20 bp, synthetic construct
  misc_feature 1..20: note = Description of Artificial Sequence: Synthetic oligonucleotide
  misc_feature 1..20: note = Target: SCN10A; (-) strand; PAM type: NNGRRT; PAM sequence: GAGAAT
  source 1..20: mol_type = other DNA
gagcatttagtgaggagtct

SEQ ID NO: 7183 - DNA, 20 bp, synthetic construct
  misc_feature 1..20: note = Description of Artificial Sequence: Synthetic oligonucleotide
  misc_feature 1..20: note = Target: SCN10A; (-) strand; PAM type: NNGRRT; PAM sequence: AGGAGT
  source 1..20: mol_type = other DNA
aaagttttgagcatttagtg

SEQ ID NO: 7184 - DNA, 20 bp, synthetic construct
  misc_feature 1..20: note = Description of Artificial Sequence: Synthetic oligonucleotide
  misc_feature 1..20: note = Target: SCN10A; (-) strand; PAM type: NNGRRT; PAM sequence: TGGGGT
  source 1..20: mol_type = other DNA
cagtgggaacacgtggggtt

SEQ ID NO: 7185 - DNA, 20 bp, synthetic construct
  misc_feature 1..20: note = Description of Artificial Sequence: Synthetic oligonucleotide
  misc_feature 1..20: note = Target: SCN10A; (-) strand; PAM type: NNGRRT; PAM sequence: TGGGGT
  source 1..20: mol_type = other DNA
agtggctcagtgggaacacg

SEQ ID NO: 7186 - DNA, 20 bp, synthetic construct
  misc_feature 1..20: note = Description of Artificial Sequence: Synthetic oligonucleotide
  misc_feature 1..20: note = Target: SCN10A; (-) strand; PAM type: NNGRRT; PAM sequence: GTGAGT
  source 1..20: mol_type = other DNA
tggacttcctcattgtgaat

SEQ ID NO: 7187 - DNA, 20 bp, synthetic construct
  misc_feature 1..20: note = Description of Artificial Sequence: Synthetic oligonucleotide
  misc_feature 1..20: note = Target: SCN10A; (-) strand; PAM type: NNGRRT; PAM sequence: GTGAAT
  source 1..20: mol_type = other DNA
gctggctggacttcctcatt

SEQ ID NO: 7188 - DNA, 20 bp, synthetic construct
  misc_feature 1..20: note = Description of Artificial Sequence: Synthetic oligonucleotide
  misc_feature 1..20: note = Target: SCN10A; (-) strand; PAM type: NNGRRT; PAM sequence: GTGGGT
  source 1..20: mol_type = other DNA
gtgttcgagatgctgcttaa

SEQ ID NO: 7189 - DNA, 20 bp, synthetic construct
  misc_feature 1..20: note = Description of Artificial Sequence: Synthetic oligonucleotide
  misc_feature 1..20: note = Target: SCN10A; (-) strand; PAM type: NNGRRT; PAM sequence: CAGGGT
  source 1..20: mol_type = other DNA
gctttgctggagtacactga

SEQ ID NO: 7190 - DNA, 20 bp, synthetic construct
  misc_feature 1..20: note = Description of Artificial Sequence: Synthetic oligonucleotide
  misc_feature 1..20: note = Target: SCN10A; (-) strand; PAM type: NNGRRT; PAM sequence: TGGAGT
  source 1..20: mol_type = other DNA
gcccacggtgaaagctttgc

SEQ ID NO: 7191 - DNA, 20 bp, synthetic construct
  misc_feature 1..20: note = Description of Artificial Sequence: Synthetic oligonucleotide
  misc_feature 1..20: note = Target: SCN10A; (-) strand; PAM type: NNGRRT; PAM sequence: GTGGGT
  source 1..20: mol_type = other DNA
tcagtctgggccccagtgct

SEQ ID NO: 7192 - DNA, 20 bp, synthetic construct
  misc_feature 1..20: note = Description of Artificial Sequence: Synthetic oligonucleotide
  misc_feature 1..20: note = Target: SCN10A; (-) strand; PAM type: NNGRRT; PAM sequence: CTGGGT
  source 1..20: mol_type = other DNA
gggactgtggtcagggctgg

SEQ ID NO: 7193 - DNA, 20 bp, synthetic construct
  misc_feature 1..20: note = Description of Artificial Sequence: Synthetic oligonucleotide
  misc_feature 1..20: note = Target: SCN10A; (-) strand; PAM type: NNGRRT; PAM sequence: TTGGAT
  source 1..20: mol_type = other DNA
ggccctgaagaagtcatgct

SEQ ID NO: 7194 - DNA, 20 bp, synthetic construct
  misc_feature 1..20: note = Description of Artificial Sequence: Synthetic oligonucleotide
  misc_feature 1..20: note = Target: SCN10A; (-) strand; PAM type: NNGRRT; PAM sequence: TTGAAT
  source 1..20: mol_type = other DNA
aaacagcatcttcttttaat

SEQ ID NO: 7195 - DNA, 20 bp, synthetic construct
  misc_feature 1..20: note = Description of Artificial Sequence: Synthetic oligonucleotide
  misc_feature 1..20: note = Target: SCN10A; (-) strand; PAM type: NNGRRT; PAM sequence: TAGGGT
  source 1..20: mol_type = other DNA
cccccacagccacagcatcc

SEQ ID NO: 7196 - DNA, 20 bp, synthetic construct
  misc_feature 1..20: note = Description of Artificial Sequence: Synthetic oligonucleotide
  misc_feature 1..20: note = Target: SCN10A; (-) strand; PAM type: NNGRRT; PAM sequence: AAGAGT
  source 1..20: mol_type = other DNA
aaaaaaaaaaaaaaaaaaaa

SEQ ID NO: 7197 - DNA, 20 bp, synthetic construct
  misc_feature 1..20: note = Description of Artificial Sequence: Synthetic oligonucleotide
  misc_feature 1..20: note = Target: SCN10A; (-) strand; PAM type: NNGRRT; PAM sequence: GAGAAT
  source 1..20: mol_type = other DNA
tacttgggaggctgaggcag

SEQ ID NO: 7198 - DNA, 20 bp, synthetic construct
  misc_feature 1..20: note = Description of Artificial Sequence: Synthetic oligonucleotide
  misc_feature 1..20: note = Target: SCN10A; (-) strand; PAM type: NNGRRT; PAM sequence: GCGGAT
  source 1..20: mol_type = other DNA
actttgggaggctgaggcgg

SEQ ID NO: 7199 - DNA, 20 bp, synthetic construct
  misc_feature 1..20: note = Description of Artificial Sequence: Synthetic oligonucleotide
  misc_feature 1..20: note = Target: SCN10A; (-) strand; PAM type: NNGRRT; PAM sequence: AAGAGT
  source 1..20: mol_type = other DNA
cactcctgccagtcacttgt

SEQ ID NO: 7200 - DNA, 20 bp, synthetic construct
  misc_feature 1..20: note = Description of Artificial Sequence: Synthetic oligonucleotide
  misc_feature 1..20: note = Target: SCN10A; (-) strand; PAM type: NNGRRT; PAM sequence: CTGAGT
  source 1..20: mol_type = other DNA
ttgctaggttcctgaaacct

SEQ ID NO: 7201 - DNA, 20 bp, synthetic construct
  misc_feature 1..20: note = Description of Artificial Sequence: Synthetic oligonucleotide
  misc_feature 1..20: note = Target: SCN10A; (-) strand; PAM type: NNGRRT; PAM sequence: AGGAAT
  source 1..20: mol_type = other DNA
ttaggattagtgcttgaagg

SEQ ID NO: 7202 - DNA, 20 bp, synthetic construct
  misc_feature 1..20: note = Description of Artificial Sequence: Synthetic oligonucleotide
  misc_feature 1..20: note = Target: SCN10A; (-) strand; PAM type: NNGRRT; PAM sequence: TAGGAT
  source 1..20: mol_type = other DNA
ccaacagcctccagtgtcct

SEQ ID NO: 7203 - DNA, 20 bp, synthetic construct
  misc_feature 1..20: note = Description of Artificial Sequence: Synthetic oligonucleotide
  misc_feature 1..20: note = Target: SCN10A; (-) strand; PAM type: NNGRRT; PAM sequence: CTGAGT
  source 1..20: mol_type = other DNA
actggccccttaaagaggac

SEQ ID NO: 7204 - DNA, 20 bp, synthetic construct
  misc_feature 1..20: note = Description of Artificial Sequence: Synthetic oligonucleotide
  misc_feature 1..20: note = Target: SCN10A; (-) strand; PAM type: NNGRRT; PAM sequence: AAGGAT
  source 1..20: mol_type = other DNA
gccgacactcccagcagatg

SEQ ID NO: 7205 - DNA, 20 bp, synthetic construct
  misc_feature 1..20: note = Description of Artificial Sequence: Synthetic oligonucleotide
  misc_feature 1..20: note = Target: SCN10A; (-) strand; PAM type: NNGRRT; PAM sequence: GGGGGT
  source 1..20: mol_type = other DNA
cccagcgaagccatcaggaa

SEQ ID NO: 7206 - DNA, 20 bp, synthetic construct
  misc_feature 1..20: note = Description of Artificial Sequence: Synthetic oligonucleotide
  misc_feature 1..20: note = Target: SCN10A; (-) strand; PAM type: NNGRRT; PAM sequence: GAGGAT
  source 1..20: mol_type = other DNA
ctgagggctgccccagcggg

SEQ ID NO: 7207 - DNA, 20 bp, synthetic construct
  misc_feature 1..20: note = Description of Artificial Sequence: Synthetic oligonucleotide
  misc_feature 1..20: note = Target: SCN10A; (-) strand; PAM type: NNGRRT; PAM sequence: GTGGGT
  source 1..20: mol_type = other DNA
atcggaagctgagaaaagat

SEQ ID NO: 7208 - DNA, 20 bp, synthetic construct
  misc_feature 1..20: note = Description of Artificial Sequence: Synthetic oligonucleotide
  misc_feature 1..20: note = Target: SCN10A; (-) strand; PAM type: NNGRRT; PAM sequence: CAGAAT
  source 1..20: mol_type = other DNA
cttagtcctcgtcctagaca

SEQ ID NO: 7209 - DNA, 20 bp, synthetic construct
  misc_feature 1..20: note = Description of Artificial Sequence: Synthetic oligonucleotide
  misc_feature 1..20: note = Target: SCN10A; (-) strand; PAM type: NNGRRT; PAM sequence: TTGGAT
  source 1..20: mol_type = other DNA
tgtgtactcccttagagacg

SEQ ID NO: 7210 - DNA, 20 bp, synthetic construct
  misc_feature 1..20: note = Description of Artificial Sequence: Synthetic oligonucleotide
  misc_feature 1..20: note = Target: SCN10A; (-) strand; PAM type: NNGRRT; PAM sequence: TTGAAT
  source 1..20: mol_type = other DNA
atgtttacttctaatacaca

SEQ ID NO: 7211 - DNA, 20 bp, synthetic construct
  misc_feature 1..20: note = Description of Artificial Sequence: Synthetic oligonucleotide
  misc_feature 1..20: note = Target: SCN10A; (-) strand; PAM type: NNGRRT; PAM sequence: TTGAGT
  source 1..20: mol_type = other DNA
gccttctttaggctttcact

SEQ ID NO: 7212 - DNA, 20 bp, synthetic construct
  misc_feature 1..20: note = Description of Artificial Sequence: Synthetic oligonucleotide
  misc_feature 1..20: note = Target: SCN10A; (-) strand; PAM type: NNGRRT; PAM sequence: CTGGAT
  source 1..20: mol_type = other DNA
ctcttctccttccagtcctg

SEQ ID NO: 7213 - DNA, 20 bp, synthetic construct
  misc_feature 1..20: note = Description of Artificial Sequence: Synthetic oligonucleotide
  misc_feature 1..20: note = Target: SCN10A; (-) strand; PAM type: NNGRRT; PAM sequence: CTGGGT
  source 1..20: mol_type = other DNA
gcagggactggtctgccatc

SEQ ID NO: 7214 - DNA, 20 bp, synthetic construct
  misc_feature 1..20: note = Description of Artificial Sequence: Synthetic oligonucleotide
  misc_feature 1..20: note = Target: SCN10A; (-) strand; PAM type: NNGRRT; PAM sequence: GAGAGT
  source 1..20: mol_type = other DNA
gacgcaaagccaagggagaa

SEQ ID NO: 7215 - DNA, 20 bp, synthetic construct
  misc_feature 1..20: note = Description of Artificial Sequence: Synthetic oligonucleotide
  misc_feature 1..20: note = Target: SCN10A; (-) strand; PAM type: NNGRRT; PAM sequence: TAGGGT
  source 1..20: mol_type = other DNA
ctgagaggtgggaggaaaac

SEQ ID NO: 7216 - DNA, 20 bp, synthetic construct
  misc_feature 1..20: note = Description of Artificial Sequence: Synthetic oligonucleotide
  misc_feature 1..20: note = Target: SCN10A; (-) strand; PAM type: NNGRRT; PAM sequence: CAGGAT
  source 1..20: mol_type = other DNA
agcacaggtgcgggacgagg

SEQ ID NO: 7217 - DNA, 20 bp, synthetic construct
  misc_feature 1..20: note = Description of Artificial Sequence: Synthetic oligonucleotide
  misc_feature 1..20: note = Target: SCN10A; (-) strand; PAM type: NNGRRT; PAM sequence: AAGGGT
  source 1..20: mol_type = other DNA
taaatgccagattgtccagg

SEQ ID NO: 7218 - DNA, 20 bp, synthetic construct
  misc_feature 1..20: note = Description of Artificial Sequence: Synthetic oligonucleotide
  misc_feature 1..20: note = Target: SCN10A; (-) strand; PAM type: NNGRRT; PAM sequence: CAGGGT
  source 1..20: mol_type = other DNA
agggctgggaatagagagtt

SEQ ID NO: 7219 - DNA, 20 bp, synthetic construct
  misc_feature 1..20: note = Description of Artificial Sequence: Synthetic oligonucleotide
  misc_feature 1..20: note = Target: SCN10A; (-) strand; PAM type: NNGRRT; PAM sequence: GAGAGT
  source 1..20: mol_type = other DNA
tagttgaagggctgggaata

SEQ ID NO: 7220 - DNA, 20 bp, synthetic construct
  misc_feature 1..20: note = Description of Artificial Sequence: Synthetic oligonucleotide
  misc_feature 1..20: note = Target: SCN10A; (-) strand; PAM type: NNGRRT; PAM sequence: GGGAAT
  source 1..20: mol_type = other DNA
aggtaattagttgaagggct

SEQ ID NO: 7221 - DNA, 20 bp, synthetic construct
  misc_feature 1..20: note = Description of Artificial Sequence: Synthetic oligonucleotide
  misc_feature 1..20: note = Target: SCN10A; (-) strand; PAM type: NNGRRT; PAM sequence: CTGAAT
  source 1..20: mol_type = other DNA
agacatctctaaggccctgg

SEQ ID NO: 7222 - DNA, 20 bp, synthetic construct
  misc_feature 1..20: note = Description of Artificial Sequence: Synthetic oligonucleotide
  misc_feature 1..20: note = Target: SCN10A; (-) strand; PAM type: NNGRRT; PAM sequence: CAGAGT
  source 1..20: mol_type = other DNA
gccttatgggaatagagatt

SEQ ID NO: 7223 - DNA, 20 bp, synthetic construct
  misc_feature 1..20: note = Description of Artificial Sequence: Synthetic oligonucleotide
  misc_feature 1..20: note = Target: SCN10A; (-) strand; PAM type: NNGRRT; PAM sequence: GGGAAT
  source 1..20: mol_type = other DNA
tttgaataacaaggccttat

SEQ ID NO: 7224 - DNA, 20 bp, synthetic construct
  misc_feature 1..20: note = Description of Artificial Sequence: Synthetic oligonucleotide
  misc_feature 1..20: note = Target: SCN10A; (-) strand; PAM type: NNGRRT; PAM sequence: TTGAAT
  source 1..20: mol_type = other DNA
tgccctcagtgacccacact

SEQ ID NO: 7225 - DNA, 20 bp, synthetic construct
  misc_feature 1..20: note = Description of Artificial Sequence: Synthetic oligonucleotide
  misc_feature 1..20: note = Target: SCN10A; (-) strand; PAM type: NNGRRT; PAM sequence: GAGAAT
  source 1..20: mol_type = other DNA
ataaatctgtggcagggcct

SEQ ID NO: 7226 - DNA, 20 bp, synthetic construct
  misc_feature 1..20: note = Description of Artificial Sequence: Synthetic oligonucleotide
  misc_feature 1..20: note = Target: SCN10A; (-) strand; PAM type: NNGRRT; PAM sequence: GTGAGT
  source 1..20: mol_type = other DNA
ggctgcaagcatttgagtga

SEQ ID NO: 7227 - DNA, 20 bp, synthetic construct
  misc_feature 1..20: note = Description of Artificial Sequence: Synthetic oligonucleotide
  misc_feature 1..20: note = Target: SCN10A; (-) strand; PAM type: NNGRRT; PAM sequence: GTGAGT
  source 1..20: mol_type = other DNA
acctggctgcaagcatttga

SEQ ID NO: 7228 - DNA, 20 bp, synthetic construct
  misc_feature 1..20: note = Description of Artificial Sequence: Synthetic oligonucleotide
  misc_feature 1..20: note = Target: SCN10A; (-) strand; PAM type: NNGRRT; PAM sequence: TTGAGT
  source 1..20: mol_type = other DNA
ccaaacctggctgcaagcat

SEQ ID NO: 7229 - DNA, 20 bp, synthetic construct
  misc_feature 1..20: note = Description of Artificial Sequence: Synthetic oligonucleotide
  misc_feature 1..20: note = Target: SCN10A; (-) strand; PAM type: NNGRRT; PAM sequence: GTGGGT
  source 1..20: mol_type = other DNA
aaggccctggagctgcatca

SEQ ID NO: 7230 - DNA, 20 bp, synthetic construct
  misc_feature 1..20: note = Description of Artificial Sequence: Synthetic oligonucleotide
  misc_feature 1..20: note = Target: SCN10A; (-) strand; PAM type: NNGRRT; PAM sequence: AGGAAT
  source 1..20: mol_type = other DNA
tgcccccaaatcctccagat

SEQ ID NO: 7231 - DNA, 20 bp, synthetic construct
  misc_feature 1..20: note = Description of Artificial Sequence: Synthetic oligonucleotide
  misc_feature 1..20: note = Target: SCN10A; (-) strand; PAM type: NNGRRT; PAM sequence: GTGGAT
  source 1..20: mol_type = other DNA
cttcatgatcctgctcagca

SEQ ID NO: 7232 - DNA, 20 bp, synthetic construct
  misc_feature 1..20: note = Description of Artificial Sequence: Synthetic oligonucleotide
  misc_feature 1..20: note = Target: SCN10A; (-) strand; PAM type: NNGRRT; PAM sequence: TGGGAT
  source 1..20: mol_type = other DNA
tggataccaccaagagtcca

SEQ ID NO: 7233 - DNA, 20 bp, synthetic construct
  misc_feature 1..20: note = Description of Artificial Sequence: Synthetic oligonucleotide
  misc_feature 1..20: note = Target: SCN10A; (-) strand; PAM type: NNGRRT; PAM sequence: AAGAGT
  source 1..20: mol_type = other DNA
gctgcaaactggataccacc

SEQ ID NO: 7234 - DNA, 20 bp, synthetic construct
  misc_feature 1..20: note = Description of Artificial Sequence: Synthetic oligonucleotide
  misc_feature 1..20: note = Target: SCN10A; (-) strand; PAM type: NNGRRT; PAM sequence: CTGGAT
  source 1..20: mol_type = other DNA
gccactgtccctgctgcaaa

SEQ ID NO: 7235 - DNA, 20 bp, synthetic construct
  misc_feature 1..20: note = Description of Artificial Sequence: Synthetic oligonucleotide
  misc_feature 1..20: note = Target: SCN10A; (-) strand; PAM type: NNGRRT; PAM sequence: CAGGAT
  source 1..20: mol_type = other DNA
ccatcagtcacctctcccca

SEQ ID NO: 7236 - DNA, 20 bp, synthetic construct
  misc_feature 1..20: note = Description of Artificial Sequence: Synthetic oligonucleotide
  misc_feature 1..20: note = Target: SCN10A; (-) strand; PAM type: NNGRRT; PAM sequence: CAGAAT
  source 1..20: mol_type = other DNA
atgacaagtgggtttcctag

SEQ ID NO: 7237 - DNA, 20 bp, synthetic construct
  misc_feature 1..20: note = Description of Artificial Sequence: Synthetic oligonucleotide
  misc_feature 1..20: note = Target: SCN10A; (-) strand; PAM type: NNGRRT; PAM sequence: GTGGGT
  source 1..20: mol_type = other DNA
tttttccaagggcatgacaa

SEQ ID NO: 7238 - DNA, 20 bp, synthetic construct
  misc_feature 1..20: note = Description of Artificial Sequence: Synthetic oligonucleotide
  misc_feature 1..20: note = Target: SCN10A; (-) strand; PAM type: NNGRRT; PAM sequence: AAGAAT
  source 1..20: mol_type = other DNA
tcttcacccatattccagga

SEQ ID NO: 7239 - DNA, 20 bp, synthetic construct
  misc_feature 1..20: note = Description of Artificial Sequence: Synthetic oligonucleotide
  misc_feature 1..20: note = Target: SCN10A; (-) strand; PAM type: NNGRRT; PAM sequence: CTGGAT
  source 1..20: mol_type = other DNA
ggagaggaacacctgttggt

SEQ ID NO: 7240 - DNA, 20 bp, synthetic construct
  misc_feature 1..20: note = Description of Artificial Sequence: Synthetic oligonucleotide
  misc_feature 1..20: note = Target: SCN10A; (-) strand; PAM type: NNGRRT; PAM sequence: CAGAGT
  source 1..20: mol_type = other DNA
gatatggctaggaaaaacat

SEQ ID NO: 7241 - DNA, 20 bp, synthetic construct
  misc_feature 1..20: note = Description of Artificial Sequence: Synthetic oligonucleotide
  misc_feature 1..20: note = Target: SCN10A; (-) strand; PAM type: NNGRRT; PAM sequence: AAGGAT
  source 1..20: mol_type = other DNA
ccactggtgtcatctgtaag

SEQ ID NO: 7242 - DNA, 20 bp, synthetic construct
  misc_feature 1..20: note = Description of Artificial Sequence: Synthetic oligonucleotide
  misc_feature 1..20: note = Target: SCN10A; (-) strand; PAM type: NNGRRT; PAM sequence: TTGAGT
  source 1..20: mol_type = other DNA
aagaaaaattttttaaatac

SEQ ID NO: 7243 - DNA, 20 bp, synthetic construct
  misc_feature 1..20: note = Description of Artificial Sequence: Synthetic oligonucleotide
  misc_feature 1..20: note = Target: SCN10A; (-) strand; PAM type: NNGRRT; PAM sequence: GGGAAT
  source 1..20: mol_type = other DNA
tcaagagtccattctataaa

SEQ ID NO: 7244 - DNA, 20 bp, synthetic construct
  misc_feature 1..20: note = Description of Artificial Sequence: Synthetic oligonucleotide
  misc_feature 1..20: note = Target: SCN10A; (-) strand; PAM type: NNGRRT; PAM sequence: AAGAGT
  source 1..20: mol_type = other DNA
atttgtgcaatgaatgaatc

SEQ ID NO: 7245 - DNA, 20 bp, synthetic construct
  misc_feature 1..20: note = Description of Artificial Sequence: Synthetic oligonucleotide
  misc_feature 1..20: note = Target: SCN10A; (-) strand; PAM type: NNGRRT; PAM sequence: ATGAAT
  source 1..20: mol_type = other DNA
aataaatatttgtgcaatga

SEQ ID NO: 7246 - DNA, 20 bp, synthetic construct
  misc_feature 1..20: note = Description of Artificial Sequence: Synthetic oligonucleotide
  misc_feature 1..20: note = Target: SCN10A; (-) strand; PAM type: NNGRRT; PAM sequence: ATGAAT
  source 1..20: mol_type = other DNA
tctcaataaatatttgtgca

SEQ ID NO: 7247 - DNA, 20 bp, synthetic construct
  misc_feature 1..20: note = Description of Artificial Sequence: Synthetic oligonucleotide
  misc_feature 1..20: note = Target: SCN10A; (-) strand; PAM type: NNGRRT; PAM sequence: TTGAGT
  source 1..20: mol_type = other DNA
tgagttctaaaccagccctc

SEQ ID NO: 7248 - DNA, 20 bp, synthetic construct
  misc_feature 1..20: note = Description of Artificial Sequence: Synthetic oligonucleotide
  misc_feature 1..20: note = Target: SCN10A; (-) strand; PAM type: NNGRRT; PAM sequence: GTGAGT
  source 1..20: mol_type = other DNA
ttaccctcaaaaacccctcc

SEQ ID NO: 7249 - DNA, 20 bp, synthetic construct
  misc_feature 1..20: note = Description of Artificial Sequence: Synthetic oligonucleotide
  misc_feature 1..20: note = Target: SCN10A; (-) strand; PAM type: NNGRRT; PAM sequence: TGGGAT
  source 1..20: mol_type = other DNA
cagttgagcgaacactcacc

SEQ ID NO: 7250 - DNA, 20 bp, synthetic construct
  misc_feature 1..20: note = Description of Artificial Sequence: Synthetic oligonucleotide
  misc_feature 1..20: note = Target: SCN10A; (-) strand; PAM type: NNGRRT; PAM sequence: CAGAAT
  source 1..20: mol_type = other DNA
acactgatgttaattagggc

SEQ ID NO: 7251 - DNA, 20 bp, synthetic construct
  misc_feature 1..20: note = Description of Artificial Sequence: Synthetic oligonucleotide
  misc_feature 1..20: note = Target: SCN10A; (-) strand; PAM type: NNGRRT; PAM sequence: GGGAGT
  source 1..20: mol_type = other DNA
ccctgggcttctcccctgca

SEQ ID NO: 7252 - DNA, 20 bp, synthetic construct
  misc_feature 1..20: note = Description of Artificial Sequence: Synthetic oligonucleotide
  misc_feature 1..20: note = Target: SCN10A; (-) strand; PAM type: NNGRRT; PAM sequence: ACGAGT
  source 1..20: mol_type = other DNA
tccccgggccccgcggagag

SEQ ID NO: 7253 - DNA, 20 bp, synthetic construct
  misc_feature 1..20: note = Description of Artificial Sequence: Synthetic oligonucleotide
  misc_feature 1..20: note = Target: SCN10A; (-) strand; PAM type: NNGRRT; PAM sequence: ATGGGT
  source 1..20: mol_type = other DNA
cagctggcgaggcaccaaac

SEQ ID NO: 7254 - DNA, 20 bp, synthetic construct
  misc_feature 1..20: note = Description of Artificial Sequence: Synthetic oligonucleotide
  misc_feature 1..20: note = Target: SCN10A; (-) strand; PAM type: NNGRRT; PAM sequence: ATGGGT
  source 1..20: mol_type = other DNA
agtgaatgctgagagtcgtt

SEQ ID NO: 7255 - DNA, 20 bp, synthetic construct
  misc_feature 1..20: note = Description of Artificial Sequence: Synthetic oligonucleotide
  misc_feature 1..20: note = Target: SCN10A; (-) strand; PAM type: NNGRRT; PAM sequence: GAGAGT
  source 1..20: mol_type = other DNA
attcaagcccagtgaatgct

SEQ ID NO: 7256 - DNA, 20 bp, synthetic construct
  misc_feature 1..20: note = Description of Artificial Sequence: Synthetic oligonucleotide
  misc_feature 1..20: note = Target: SCN10A; (-) strand; PAM type: NNGRRT; PAM sequence: GTGAAT
  source 1..20: mol_type = other DNA
tgattaaatattcaagccca

SEQ ID NO: 7257 - DNA, 20 bp, synthetic construct
  misc_feature 1..20: note = Description of Artificial Sequence: Synthetic oligonucleotide
  misc_feature 1..20: note = Target: SCN10A; (-) strand; PAM type: NNGRRT; PAM sequence: TTGAAT
  source 1..20: mol_type = other DNA
agagcaacttcaacccctaa

SEQ ID NO: 7258 - DNA, 20 bp, synthetic construct
  misc_feature 1..20: note = Description of Artificial Sequence: Synthetic oligonucleotide
  misc_feature 1..20: note = Target: SCN10A; (-) strand; PAM type: NNGRRT; PAM sequence: TTGGGT
  source 1..20: mol_type = other DNA
atggggacccgccccaccat

SEQ ID NO: 7259 - DNA, 20 bp, synthetic construct
  misc_feature 1..20: note = Description of Artificial Sequence: Synthetic oligonucleotide
  misc_feature 1..20: note = Target: SCN10A; (-) strand; PAM type: NNGRRT; PAM sequence: CTGGGT
  source 1..20: mol_type = other DNA
atgttttcagtacacaactt

SEQ ID NO: 7260 - DNA, 20 bp, synthetic construct
  misc_feature 1..20: note = Description of Artificial Sequence: Synthetic oligonucleotide
  misc_feature 1..20: note = Target: SCN10A; (-) strand; PAM type: NNGRRT; PAM sequence: GTGGAT
  source 1..20: mol_type = other DNA
agggctgtcacattctgcac

SEQ ID NO: 7261 - DNA, 20 bp, synthetic construct
  misc_feature 1..20: note = Description of Artificial Sequence: Synthetic oligonucleotide
  misc_feature 1..20: note = Target: SCN10A; (-) strand; PAM type: NNGRRT; PAM sequence: CTGGGT
  source 1..20: mol_type = other DNA
cagaagccgcttggttccca

SEQ ID NO: 7262 - DNA, 20 bp, synthetic construct
  misc_feature 1..20: note = Description of Artificial Sequence: Synthetic oligonucleotide
  misc_feature 1..20: note = Target: SCN10A; (-) strand; PAM type: NNGRRT; PAM sequence: GTGGGT
  source 1..20: mol_type = other DNA
tgggacgggatttgggggct

SEQ ID NO: 7263 - DNA, 20 bp, synthetic construct
  misc_feature 1..20: note = Description of Artificial Sequence: Synthetic oligonucleotide
  misc_feature 1..20: note = Target: SCN10A; (-) strand; PAM type: NNGRRT; PAM sequence: CGGGAT
  source 1..20: mol_type = other DNA
gataagagggagggctggga

SEQ ID NO: 7264 - DNA, 20 bp, synthetic construct
  misc_feature 1..20: note = Description of Artificial Sequence: Synthetic oligonucleotide
  misc_feature 1..20: note = Target: SCN10A; (-) strand; PAM type: NNGRRT; PAM sequence: CAGGGT
  source 1..20: mol_type = other DNA
ctaggcaaggctgaccacag

SEQ ID NO: 7265 - DNA, 20 bp, synthetic construct
  misc_feature 1..20: note = Description of Artificial Sequence: Synthetic oligonucleotide
  misc_feature 1..20: note = Target: SCN10A; (-) strand; PAM type: NNGRRT; PAM sequence: AAGAAT
  source 1..20: mol_type = other DNA
ttatcaagcccttcagcttg

SEQ ID NO: 7266 - DNA, 20 bp, synthetic construct
  misc_feature 1..20: note = Description of Artificial Sequence: Synthetic oligonucleotide
  misc_feature 1..20: note = Target: SCN10A; (-) strand; PAM type: NNGRRT; PAM sequence: CTGAGT
  source 1..20: mol_type = other DNA
tttaatttgacacctagcca

SEQ ID NO: 7267 - DNA, 20 bp, synthetic construct
  misc_feature 1..20: note = Description of Artificial Sequence: Synthetic oligonucleotide
  misc_feature 1..20: note = Target: SCN10A; (-) strand; PAM type: NNGRRT; PAM sequence: AAGAAT
  source 1..20: mol_type = other DNA
aataacactgccttcaattc

SEQ ID NO: 7268 - DNA, 20 bp, synthetic construct
  misc_feature 1..20: note = Description of Artificial Sequence: Synthetic oligonucleotide
  misc_feature 1..20: note = Target: SCN10A; (-) strand; PAM type: NNGRRT; PAM sequence: TAGGAT
  source 1..20: mol_type = other DNA
gagctggaagattagaggtt

SEQ ID NO: 7269 - DNA, 20 bp, synthetic construct
  misc_feature 1..20: note = Description of Artificial Sequence: Synthetic oligonucleotide
  misc_feature 1..20: note = Target: SCN10A; (-) strand; PAM type: NNGRRT; PAM sequence: GTGAGT
  source 1..20: mol_type = other DNA
tagggagaggctctctatag

SEQ ID NO: 7270 - DNA, 20 bp, synthetic construct
  misc_feature 1..20: note = Description of Artificial Sequence: Synthetic oligonucleotide
  misc_feature 1..20: note = Target: SCN10A; (-) strand; PAM type: NNGRRT; PAM sequence: AAGAGT
  source 1..20: mol_type = other DNA
atctttcagagccagcaaat

SEQ ID NO: 7271 - DNA, 20 bp, synthetic construct
  misc_feature 1..20: note = Description of Artificial Sequence: Synthetic oligonucleotide
  misc_feature 1..20: note = Target: SCN10A; (-) strand; PAM type: NNGRRT; PAM sequence: TAGGAT
  source 1..20: mol_type = other DNA
gaatggtaatgcctacttgg

SEQ ID NO: 7272 - DNA, 20 bp, synthetic construct
  misc_feature 1..20: note = Description of Artificial Sequence: Synthetic oligonucleotide
  misc_feature 1..20: note = Target: SCN10A; (-) strand; PAM type: NNGRRT; PAM sequence: CTGAAT
  source 1..20: mol_type = other DNA
ccatttattcatctatgaaa

SEQ ID NO: 7273 - DNA, 20 bp, synthetic construct
  misc_feature 1..20: note = Description of Artificial Sequence: Synthetic oligonucleotide
  misc_feature 1..20: note = Target: SCN10A; (-) strand; PAM type: NNGRRT; PAM sequence: AAGAGT
  source 1..20: mol_type = other DNA
tggttctaggtatagaaaga

SEQ ID NO: 7274 - DNA, 20 bp, synthetic construct
  misc_feature 1..20: note = Description of Artificial Sequence: Synthetic oligonucleotide
  misc_feature 1..20: note = Target: SCN10A; (-) strand; PAM type: NNGRRT; PAM sequence: CAGGGT
  source 1..20: mol_type = other DNA
ccattgccacaatctcactc

SEQ ID NO: 7275 - DNA, 20 bp, synthetic construct
  misc_feature 1..20: note = Description of Artificial Sequence: Synthetic oligonucleotide
  misc_feature 1..20: note = Target: SCN10A; (-) strand; PAM type: NNGRRT; PAM sequence: GGGAAT
  source 1..20: mol_type = other DNA
ataacctcatttcttatcct

SEQ ID NO: 7276 - DNA, 20 bp, synthetic construct
  misc_feature 1..20: note = Description of Artificial Sequence: Synthetic oligonucleotide
  misc_feature 1..20: note = Target: SCN10A; (-) strand; PAM type: NNGRRT; PAM sequence: TGGGGT
  source 1..20: mol_type = other DNA
ctggagggtggcggtgaagg

SEQ ID NO: 7277 - DNA, 20 bp, synthetic construct
  misc_feature 1..20: note = Description of Artificial Sequence: Synthetic oligonucleotide
  misc_feature 1..20: note = Target: SCN10A; (-) strand; PAM type: NNGRRT; PAM sequence: GAGGGT
  source 1..20: mol_type = other DNA
cagtgggctggtagaggctg

SEQ ID NO: 7278 - DNA, 20 bp, synthetic construct
  misc_feature 1..20: note = Description of Artificial Sequence: Synthetic oligonucleotide
  misc_feature 1..20: note = Target: SCN10A; (-) strand; PAM type: NNGRRT; PAM sequence: ATGAGT
  source 1..20: mol_type = other DNA
cctgggtgagacgtggaaag

SEQ ID NO: 7279 - DNA, 20 bp, synthetic construct
  misc_feature 1..20: note = Description of Artificial Sequence: Synthetic oligonucleotide
  misc_feature 1..20: note = Target: SCN10A; (-) strand; PAM type: NNGRRT; PAM sequence: CTGGGT
  source 1..20: mol_type = other DNA
ctgaggacctggctccatcc

SEQ ID NO: 7280 - DNA, 20 bp, synthetic construct
  misc_feature 1..20: note = Description of Artificial Sequence: Synthetic oligonucleotide
  misc_feature 1..20: note = Target: SCN10A; (-) strand; PAM type: NNGRRT; PAM sequence: AAGGGT
  source 1..20: mol_type = other DNA
aaatttagaactggtcatct

SEQ ID NO: 7281 - DNA, 20 bp, synthetic construct
  misc_feature 1..20: note = Description of Artificial Sequence: Synthetic oligonucleotide
  misc_feature 1..20: note = Target: SCN10A; (-) strand; PAM type: NNGRRT; PAM sequence: ATGAGT
  source 1..20: mol_type = other DNA
gtatgtatatatgtatgtac

SEQ ID NO: 7282 - DNA, 20 bp, synthetic construct
  misc_feature 1..20: note = Description of Artificial Sequence: Synthetic oligonucleotide
  misc_feature 1..20: note = Target: SCN10A; (-) strand; PAM type: NNGRRT; PAM sequence: AAGGAT
  source 1..20: mol_type = other DNA
tcttataattaatggagccc

SEQ ID NO: 7283 - DNA, 20 bp, synthetic construct
  misc_feature 1..20: note = Description of Artificial Sequence: Synthetic oligonucleotide
  misc_feature 1..20: note = Target: SCN10A; (-) strand; PAM type: NNGRRT; PAM sequence: CTGAAT
  source 1..20: mol_type = other DNA
atatttagtcatcaaaacag

SEQ ID NO: 7284 - DNA, 20 bp, synthetic construct
  misc_feature 1..20: note = Description of Artificial Sequence: Synthetic oligonucleotide
  misc_feature 1..20: note = Target: SCN10A; (-) strand; PAM type: NNGRRT; PAM sequence: TTGAGT
  source 1..20: mol_type = other DNA
tggtccagaaaagctgtgct

SEQ ID NO: 7285 - DNA, 20 bp, synthetic construct
  misc_feature 1..20: note = Description of Artificial Sequence: Synthetic oligonucleotide
  misc_feature 1..20: note = Target: SCN10A; (-) strand; PAM type: NNGRRT; PAM sequence: CAGGAT
  source 1..20: mol_type = other DNA
taatgagatttctctaagaa

SEQ ID NO: 7286 - DNA, 20 bp, synthetic construct
  misc_feature 1..20: note = Description of Artificial Sequence: Synthetic oligonucleotide
  misc_feature 1..20: note = Target: SCN10A; (-) strand; PAM type: NNGRRT; PAM sequence: GGGGAT
  source 1..20: mol_type = other DNA
aaggccaccttgaggtgctt

SEQ ID NO: 7287 - DNA, 20 bp, synthetic construct
  misc_feature 1..20: note = Description of Artificial Sequence: Synthetic oligonucleotide
  misc_feature 1..20: note = Target: SCN10A; (-) strand; PAM type: NNGRRT; PAM sequence: GGGAGT
  source 1..20: mol_type = other DNA
attccccaggcagacaaaca

SEQ ID NO: 7288 - DNA, 20 bp, synthetic construct
  misc_feature 1..20: note = Description of Artificial Sequence: Synthetic oligonucleotide
  misc_feature 1..20: note = Target: SCN10A; (-) strand; PAM type: NNGRRT; PAM sequence: CAGAAT
  source 1..20: mol_type = other DNA
cagggcctggaagaaaaagt

SEQ ID NO: 7289 - DNA, 20 bp, synthetic construct
  misc_feature 1..20: note = Description of Artificial Sequence: Synthetic oligonucleotide
  misc_feature 1..20: note = Target: SCN10A; (-) strand; PAM type: NNGRRT; PAM sequence: AGGAGT
  source 1..20: mol_type = other DNA
aaccatgccaagctttccag

SEQ ID NO: 7290 - DNA, 20 bp, synthetic construct
  misc_feature 1..20: note = Description of Artificial Sequence: Synthetic oligonucleotide
  misc_feature 1..20: note = Target: SCN10A; (-) strand; PAM type: NNGRRT; PAM sequence: TTGAGT
  source 1..20: mol_type = other DNA
gtggggaggggcttcagggc

SEQ ID NO: 7291 - DNA, 20 bp, synthetic construct
  misc_feature 1..20: note = Description of Artificial Sequence: Synthetic oligonucleotide
  misc_feature 1..20: note = Target: SCN10A; (-) strand; PAM type: NNGRRT; PAM sequence: AAGAGT
  source 1..20: mol_type = other DNA
gtgatccccaaaggacaggt

SEQ ID NO: 7292 - DNA, 20 bp, synthetic construct
  misc_feature 1..20: note = Description of Artificial Sequence: Synthetic oligonucleotide
  misc_feature 1..20: note = Target: SCN10A; (-) strand; PAM type: NNGRRT; PAM sequence: GAGGAT
  source 1..20: mol_type = other DNA
aatctgatcttgatgacttg

SEQ ID NO: 7293 - DNA, 20 bp, synthetic construct
  misc_feature 1..20: note = Description of Artificial Sequence: Synthetic oligonucleotide
  misc_feature 1..20: note = Target: SCN10A; (-) strand; PAM type: NNGRRT; PAM sequence: GTGAAT
  source 1..20: mol_type = other DNA
ctctgtgcccattgctgagg

SEQ ID NO: 7294 - DNA, 20 bp, synthetic construct
  misc_feature 1..20: note = Description of Artificial Sequence: Synthetic oligonucleotide
  misc_feature 1..20: note = Target: SCN10A; (-) strand; PAM type: NNGRRT; PAM sequence: GAGGGT
  source 1..20: mol_type = other DNA
gggtctctgtgcccattgct

SEQ ID NO: 7295 - DNA, 20 bp, synthetic construct
  misc_feature 1..20: note = Description of Artificial Sequence: Synthetic oligonucleotide
  misc_feature 1..20: note = Target: SCN10A; (-) strand; PAM type: NNGRRT; PAM sequence: GTGGGT
  source 1..20: mol_type = other DNA
ttcatcgctaatccgactgt

SEQ ID NO: 7296 - DNA, 20 bp, synthetic construct
  misc_feature 1..20: note = Description of Artificial Sequence: Synthetic oligonucleotide
  misc_feature 1..20: note = Target: SCN10A; (-) strand; PAM type: NNGRRT; PAM sequence: AGGGAT
  source 1..20: mol_type = other DNA
tccaagctcccagaggcccc

SEQ ID NO: 7297 - DNA, 20 bp, synthetic construct
  misc_feature 1..20: note = Description of Artificial Sequence: Synthetic oligonucleotide
  misc_feature 1..20: note = Target: SCN10A; (-) strand; PAM type: NNGRRT; PAM sequence: ACGGAT
  source 1..20: mol_type = other DNA
aacctgcaggtggccctggc

SEQ ID NO: 7298 - DNA, 20 bp, synthetic construct
  misc_feature 1..20: note = Description of Artificial Sequence: Synthetic oligonucleotide
  misc_feature 1..20: note = Target: SCN10A; (-) strand; PAM type: NNGRRT; PAM sequence: CCGGGT
  source 1..20: mol_type = other DNA
cccccaaaagggacagcatc

SEQ ID NO: 7299 - DNA, 20 bp, synthetic construct
  misc_feature 1..20: note = Description of Artificial Sequence: Synthetic oligonucleotide
  misc_feature 1..20: note = Target: SCN10A; (-) strand; PAM type: NNGRRT; PAM sequence: GCGGGT
  source 1..20: mol_type = other DNA
tccaagcctcgtccactgag

SEQ ID NO: 7300 - DNA, 20 bp, synthetic construct
  misc_feature 1..20: note = Description of Artificial Sequence: Synthetic oligonucleotide
  misc_feature 1..20: note = Target: SCN10A; (-) strand; PAM type: NNGRRT; PAM sequence: GAGGGT
  source 1..20: mol_type = other DNA
agcccagggctttggcacat

SEQ ID NO: 7301 - DNA, 20 bp, synthetic construct
  misc_feature 1..20: note = Description of Artificial Sequence: Synthetic oligonucleotide
  misc_feature 1..20: note = Target: SCN10A; (-) strand; PAM type: NNGRRT; PAM sequence: CAGAGT
  source 1..20: mol_type = other DNA
gcaagatgtgcccaggattc

SEQ ID NO: 7302 - DNA, 20 bp, synthetic construct
  misc_feature 1..20: note = Description of Artificial Sequence: Synthetic oligonucleotide
  misc_feature 1..20: note = Target: SCN10A; (-) strand; PAM type: NNGRRT; PAM sequence: CAGGAT
  source 1..20: mol_type = other DNA
tggaagcagcaagatgtgcc

SEQ ID NO: 7303 - DNA, 20 bp, synthetic construct
  misc_feature 1..20: note = Description of Artificial Sequence: Synthetic oligonucleotide
  misc_feature 1..20: note = Target: SCN10A; (-) strand; PAM type: NNGRRT; PAM sequence: AGGGAT
  source 1..20: mol_type = other DNA
tccaccctggtgcctgagcc

SEQ ID NO: 7304 - DNA, 20 bp, synthetic construct
  misc_feature 1..20: note = Description of Artificial Sequence: Synthetic oligonucleotide
  misc_feature 1..20: note = Target: SCN10A; (-) strand; PAM type: NNGRRT; PAM sequence: ATGAGT
  source 1..20: mol_type = other DNA
ccaacttgggttctttcctc

SEQ ID NO: 7305 - DNA, 20 bp, synthetic construct
  misc_feature 1..20: note = Description of Artificial Sequence: Synthetic oligonucleotide
  misc_feature 1..20: note = Target: SCN10A; (-) strand; PAM type: NNGRRT; PAM sequence: TTGGGT
  source 1..20: mol_type = other DNA
tgccctggacatcaaccaac

SEQ ID NO: 7306 - DNA, 20 bp, synthetic construct
  misc_feature 1..20: note = Description of Artificial Sequence: Synthetic oligonucleotide
  misc_feature 1..20: note = Target: SCN10A; (-) strand; PAM type: NNGRRT; PAM sequence: GAGGAT
  source 1..20: mol_type = other DNA
gggactgactggttgtgtgg

SEQ ID NO: 7307 - DNA, 20 bp, synthetic construct
  misc_feature 1..20: note = Description of Artificial Sequence: Synthetic oligonucleotide
  misc_feature 1..20: note = Target: SCN10A; (-) strand; PAM type: NNGRRT; PAM sequence: TGGGGT
  source 1..20: mol_type = other DNA
tccacccactctggtcatgg

SEQ ID NO: 7308 - DNA, 20 bp, synthetic construct
  misc_feature 1..20: note = Description of Artificial Sequence: Synthetic oligonucleotide
  misc_feature 1..20: note = Target: SCN10A; (-) strand; PAM type: NNGRRT; PAM sequence: ATGGGT
  source 1..20: mol_type = other DNA
ggctgcagggagggggcaca

SEQ ID NO: 7309 - DNA, 20 bp, synthetic construct
  misc_feature 1..20: note = Description of Artificial Sequence: Synthetic oligonucleotide
  misc_feature 1..20: note = Target: SCN10A; (-) strand; PAM type: NNGRRT; PAM sequence: GAGAAT
  source 1..20: mol_type = other DNA
cttactcatgggtttactgg

SEQ ID NO: 7310 - DNA, 20 bp, synthetic construct
  misc_feature 1..20: note = Description of Artificial Sequence: Synthetic oligonucleotide
  misc_feature 1..20: note = Target: SCN10A; (-) strand; PAM type: NNGRRT; PAM sequence: ATGGGT
  source 1..20: mol_type = other DNA
caagaaaataatgcttactc

SEQ ID NO: 7311 - DNA, 20 bp, synthetic construct
  misc_feature 1..20: note = Description of Artificial Sequence: Synthetic oligonucleotide
  misc_feature 1..20: note = Target: SCN10A; (-) strand; PAM type: NNGRRT; PAM sequence: GTGGGT
  source 1..20: mol_type = other DNA
tctgctccaccatttactag

SEQ ID NO: 7312 - DNA, 20 bp, synthetic construct
  misc_feature 1..20: note = Description of Artificial Sequence: Synthetic oligonucleotide
  misc_feature 1..20: note = Target: SCN10A; (-) strand; PAM type: NNGRRT; PAM sequence: TAGAAT
  source 1..20: mol_type = other DNA
tagaaaagaaagacctggtg

SEQ ID NO: 7313 - DNA, 20 bp, synthetic construct
  misc_feature 1..20: note = Description of Artificial Sequence: Synthetic oligonucleotide
  misc_feature 1..20: note = Target: SCN10A; (-) strand; PAM type: NNGRRT; PAM sequence: AGGAAT
  source 1..20: mol_type = other DNA
tgggaggcagtctgacttgc

SEQ ID NO: 7314 - DNA, 20 bp, synthetic construct
  misc_feature 1..20: note = Description of Artificial Sequence: Synthetic oligonucleotide
  misc_feature 1..20: note = Target: SCN10A; (-) strand; PAM type: NNGRRT; PAM sequence: TGGGAT
  source 1..20: mol_type = other DNA
tcaaacttttcaaattcatg

SEQ ID NO: 7315 - DNA, 20 bp, synthetic construct
  misc_feature 1..20: note = Description of Artificial Sequence: Synthetic oligonucleotide
  misc_feature 1..20: note = Target: SCN10A; (-) strand; PAM type: NNGRRT; PAM sequence: CTGGGT
  source 1..20: mol_type = other DNA
ctggggaaaggagaaggctt

SEQ ID NO: 7316 - DNA, 20 bp, synthetic construct
  misc_feature 1..20: note = Description of Artificial Sequence: Synthetic oligonucleotide
  misc_feature 1..20: note = Target: SCN10A; (-) strand; PAM type: NNGRRT; PAM sequence: GTGAGT
  source 1..20: mol_type = other DNA
tggtgctagggaacctggtg

SEQ ID NO: 7317 - DNA, 20 bp, synthetic construct
  misc_feature 1..20: note = Description of Artificial Sequence: Synthetic oligonucleotide
  misc_feature 1..20: note = Target: SCN10A; (-) strand; PAM type: NNGRRT; PAM sequence: GTGGAT
  source 1..20: mol_type = other DNA
ttccgtatcctctgtggaga

SEQ ID NO: 7318 - DNA, 20 bp, synthetic construct
  misc_feature 1..20: note = Description of Artificial Sequence: Synthetic oligonucleotide
  misc_feature 1..20: note = Target: SCN10A; (-) strand; PAM type: NNGRRT; PAM sequence: GAGAGT
  source 1..20: mol_type = other DNA
tgtcttccgtatcctctgtg

SEQ ID NO: 7319 - DNA, 20 bp, synthetic construct
  misc_feature 1..20: note = Description of Artificial Sequence: Synthetic oligonucleotide
  misc_feature 1..20: note = Target: SCN10A; (-) strand; PAM type: NNGRRT; PAM sequence: TGGGAT
  source 1..20: mol_type = other DNA
cagaaaacgccctggtttaa

SEQ ID NO: 7320 - DNA, 20 bp, synthetic construct
  misc_feature 1..20: note = Description of Artificial Sequence: Synthetic oligonucleotide
  misc_feature 1..20: note = Target: SCN10A; (-) strand; PAM type: NNGRRT; PAM sequence: TTGAGT
  source 1..20: mol_type = other DNA
atagaaggcagatcatattt

SEQ ID NO: 7321 - DNA, 20 bp, synthetic construct
  misc_feature 1..20: note = Description of Artificial Sequence: Synthetic oligonucleotide
  misc_feature 1..20: note = Target: SCN10A; (-) strand; PAM type: NNGRRT; PAM sequence: CAGAGT
  source 1..20: mol_type = other DNA
tcaggcctgtggctatagaa

SEQ ID NO: 7322 - DNA, 20 bp, synthetic construct
  misc_feature 1..20: note = Description of Artificial Sequence: Synthetic oligonucleotide
  misc_feature 1..20: note = Target: SCN10A; (-) strand; PAM type: NNGRRT; PAM sequence: AGGGAT
  source 1..20: mol_type = other DNA
agaagaggcccatattcagg

SEQ ID NO: 7323 - DNA, 20 bp, synthetic construct
  misc_feature 1..20: note = Description of Artificial Sequence: Synthetic oligonucleotide
  misc_feature 1..20: note = Target: SCN10A; (-) strand; PAM type: NNGRRT; PAM sequence: GTGGGT
  source 1..20: mol_type = other DNA
gccaatacctatcgaatgca

SEQ ID NO: 7324 - DNA, 20 bp, synthetic construct
  misc_feature 1..20: note = Description of Artificial Sequence: Synthetic oligonucleotide
  misc_feature 1..20: note = Target: SCN10A; (-) strand; PAM type: NNGRRT; PAM sequence: TCGAAT
  source 1..20: mol_type = other DNA
agatgttttgccaataccta

SEQ ID NO: 7325 - DNA, 20 bp, synthetic construct
  misc_feature 1..20: note = Description of Artificial Sequence: Synthetic oligonucleotide
  misc_feature 1..20: note = Target: SCN10A; (-) strand; PAM type: NNGRRT; PAM sequence: CTGAGT
  source 1..20: mol_type = other DNA
attaaatcaacttatgaatg

SEQ ID NO: 7326 - DNA, 20 bp, synthetic construct
  misc_feature 1..20: note = Description of Artificial Sequence: Synthetic oligonucleotide
  misc_feature 1..20: note = Target: SCN10A; (-) strand; PAM type: NNGRRT; PAM sequence: ATGAAT
  source 1..20: mol_type = other DNA
ttggtcaattaaatcaactt

SEQ ID NO: 7327 - DNA, 20 bp, synthetic construct
  misc_feature 1..20: note = Description of Artificial Sequence: Synthetic oligonucleotide
  misc_feature 1..20: note = Target: SCN10A; (-) strand; PAM type: NNGRRT; PAM sequence: GGGGGT
  source 1..20: mol_type = other DNA
cctgcacggctggagttctg

SEQ ID NO: 7328 - DNA, 20 bp, synthetic construct
  misc_feature 1..20: note = Description of Artificial Sequence: Synthetic oligonucleotide
  misc_feature 1..20: note = Target: SCN10A; (-) strand; PAM type: NNGRRT; PAM sequence: TGGAGT
  source 1..20: mol_type = other DNA
ctgccatgcacctgcacggc

SEQ ID NO: 7329 - DNA, 20 bp, synthetic construct
  misc_feature 1..20: note = Description of Artificial Sequence: Synthetic oligonucleotide
  misc_feature 1..20: note = Target: SCN10A; (-) strand; PAM type: NNGRRT; PAM sequence: TTGAGT
  source 1..20: mol_type = other DNA
tcttgtgggacttagcatat

SEQ ID NO: 7330 - DNA, 20 bp, synthetic construct
  misc_feature 1..20: note = Description of Artificial Sequence: Synthetic oligonucleotide
  misc_feature 1..20: note = Target: SCN10A; (-) strand; PAM type: NNGRRT; PAM sequence: ATGGGT
  source 1..20: mol_type = other DNA
cgtgggatttactcacggat

SEQ ID NO: 7331 - DNA, 20 bp, synthetic construct
  misc_feature 1..20: note = Description of Artificial Sequence: Synthetic oligonucleotide
  misc_feature 1..20: note = Target: SCN10A; (-) strand; PAM type: NNGRRT; PAM sequence: ACGGAT
  source 1..20: mol_type = other DNA
tcctcccgtgggatttactc

SEQ ID NO: 7332 - DNA, 20 bp, synthetic construct
  misc_feature 1..20: note = Description of Artificial Sequence: Synthetic oligonucleotide
  misc_feature 1..20: note = Target: SCN10A; (-) strand; PAM type: NNGRRT; PAM sequence: TGGGAT
  source 1..20: mol_type = other DNA
caggattaaacctcctcccg

SEQ ID NO: 7333 - DNA, 20 bp, synthetic construct
  misc_feature 1..20: note = Description of Artificial Sequence: Synthetic oligonucleotide
  misc_feature 1..20: note = Target: SCN10A; (-) strand; PAM type: NNGRRT; PAM sequence: CAGGAT
  source 1..20: mol_type = other DNA
atacagcacttactgtataa

SEQ ID NO: 7334 - DNA, 20 bp, synthetic construct
  misc_feature 1..20: note = Description of Artificial Sequence: Synthetic oligonucleotide
  misc_feature 1..20: note = Target: SCN10A; (-) strand; PAM type: NNGRRT; PAM sequence: TTGGGT
  source 1..20: mol_type = other DNA
tgaggagagtaacttccaga

SEQ ID NO: 7335 - DNA, 20 bp, synthetic construct
  misc_feature 1..20: note = Description of Artificial Sequence: Synthetic oligonucleotide
  misc_feature 1..20: note = Target: SCN10A; (-) strand; PAM type: NNGRRT; PAM sequence: GAGAGT
  source 1..20: mol_type = other DNA
agctctgcttcccatatgag

SEQ ID NO: 7336 - DNA, 20 bp, synthetic construct
  misc_feature 1..20: note = Description of Artificial Sequence: Synthetic oligonucleotide
  misc_feature 1..20: note = Target: SCN10A; (-) strand; PAM type: NNGRRT; PAM sequence: CAGAGT
  source 1..20: mol_type = other DNA
ctgcctctgtgaccagtcca

SEQ ID NO: 7337 - DNA, 20 bp, synthetic construct
  misc_feature 1..20: note = Description of Artificial Sequence: Synthetic oligonucleotide
  misc_feature 1..20: note = Target: SCN10A; (-) strand; PAM type: NNGRRT; PAM sequence: TGGGAT
  source 1..20: mol_type = other DNA
acatgaagggtatagctctt

SEQ ID NO: 7338 - DNA, 20 bp, synthetic construct
  misc_feature 1..20: note = Description of Artificial Sequence: Synthetic oligonucleotide
  misc_feature 1..20: note = Target: SCN10A; (-) strand; PAM type: NNGRRT; PAM sequence: AAGGGT
  source 1..20: mol_type = other DNA
ttgtggttcatccttacatg

SEQ ID NO: 7339 - DNA, 20 bp, synthetic construct
  misc_feature 1..20: note = Description of Artificial Sequence: Synthetic oligonucleotide
  misc_feature 1..20: note = Target: SCN10A; (-) strand; PAM type: NNGRRT; PAM sequence: TGGGAT
  source 1..20: mol_type = other DNA
caattttccttgcattctcc

SEQ ID NO: 7340 - DNA, 20 bp, synthetic construct
  misc_feature 1..20: note = Description of Artificial Sequence: Synthetic oligonucleotide
  misc_feature 1..20: note = Target: SCN10A; (-) strand; PAM type: NNGRRT; PAM sequence: GTGAAT
  source 1..20: mol_type = other DNA
acttaaaatacctaggtagt

SEQ ID NO: 7341 - DNA, 20 bp, synthetic construct
  misc_feature 1..20: note = Description of Artificial Sequence: Synthetic oligonucleotide
  misc_feature 1..20: note = Target: SCN10A; (-) strand; PAM type: NNGRRT; PAM sequence: TAGAAT
  source 1..20: mol_type = other DNA
taattctgcagagcactttg

SEQ ID NO: 7342 - DNA, 20 bp, synthetic construct
  misc_feature 1..20: note = Description of Artificial Sequence: Synthetic oligonucleotide
  misc_feature 1..20: note = Target: SCN10A; (-) strand; PAM type: NNGRRT; PAM sequence: GGGAAT
  source 1..20: mol_type = other DNA
aactcttaaacaatttttga

SEQ ID NO: 7343 - DNA, 20 bp, synthetic construct
  misc_feature 1..20: note = Description of Artificial Sequence: Synthetic oligonucleotide
  misc_feature 1..20: note = Target: SCN10A; (-) strand; PAM type: NNGRRT; PAM sequence: TGGAAT
  source 1..20: mol_type = other DNA
aattctatcatctgaagaaa

SEQ ID NO: 7344 - DNA, 20 bp, synthetic construct
  misc_feature 1..20: note = Description of Artificial Sequence: Synthetic oligonucleotide
  misc_feature 1..20: note = Target: SCN10A; (-) strand; PAM type: NNGRRT; PAM sequence: AAGAGT
  source 1..20: mol_type = other DNA
gtattatatttttcatttct

SEQ ID NO: 7345 - DNA, 20 bp, synthetic construct
  misc_feature 1..20: note = Description of Artificial Sequence: Synthetic oligonucleotide
  misc_feature 1..20: note = Target: SCN10A; (-) strand; PAM type: NNGRRT; PAM sequence: CTGAAT
  source 1..20: mol_type = other DNA
atgtctctctaggttacatt

SEQ ID NO: 7346 - DNA, 20 bp, synthetic construct
  misc_feature 1..20: note = Description of Artificial Sequence: Synthetic oligonucleotide
  misc_feature 1..20: note = Target: SCN10A; (-) strand; PAM type: NNGRRT; PAM sequence: TTGAAT
  source 1..20: mol_type = other DNA
gcttaagatatactgacttc

SEQ ID NO: 7347 - DNA, 20 bp, synthetic construct
  misc_feature 1..20: note = Description of Artificial Sequence: Synthetic oligonucleotide
  misc_feature 1..20: note = Target: SCN10A; (-) strand; PAM type: NNGRRT; PAM sequence: CTGGAT
  source 1..20: mol_type = other DNA
taactgttattccttccttt

SEQ ID NO: 7348 - DNA, 20 bp, synthetic construct
  misc_feature 1..20: note = Description of Artificial Sequence: Synthetic oligonucleotide
  misc_feature 1..20: note = Target: SCN10A; (-) strand; PAM type: NNGRRT; PAM sequence: ATGAAT
  source 1..20: mol_type = other DNA
gtctttgagagacatttctt

SEQ ID NO: 7349 - DNA, 20 bp, synthetic construct
  misc_feature 1..20: note = Description of Artificial Sequence: Synthetic oligonucleotide
  misc_feature 1..20: note = Target: SCN10A; (-) strand; PAM type: NNGRRT; PAM sequence: TAGAAT
  source 1..20: mol_type = other DNA
tctacctgaagtacctcctt

SEQ ID NO: 7350 - DNA, 20 bp, synthetic construct
  misc_feature 1..20: note = Description of Artificial Sequence: Synthetic oligonucleotide
  misc_feature 1..20: note = Target: SCN10A; (-) strand; PAM type: NNGRRT; PAM sequence: TGGGAT
  source 1..20: mol_type = other DNA
tacacattacatattacttc

SEQ ID NO: 7351 - DNA, 20 bp, synthetic construct
  misc_feature 1..20: note = Description of Artificial Sequence: Synthetic oligonucleotide
  misc_feature 1..20: note = Target: SCN10A; (-) strand; PAM type: NNGRRT; PAM sequence: GTGAGT
  source 1..20: mol_type = other DNA
gtttgagtttcagattttca

SEQ ID NO: 7352 - DNA, 20 bp, synthetic construct
  misc_feature 1..20: note = Description of Artificial Sequence: Synthetic oligonucleotide
  misc_feature 1..20: note = Target: SCN10A; (-) strand; PAM type: NNGRRT; PAM sequence: TTGAGT
  source 1..20: mol_type = other DNA
cttactctttggaacacagt

SEQ ID NO: 7353 - DNA, 20 bp, synthetic construct
  misc_feature 1..20: note = Description of Artificial Sequence: Synthetic oligonucleotide
  misc_feature 1..20: note = Target: SCN10A; (-) strand; PAM type: NNGRRT; PAM sequence: AAGAAT
  source 1..20: mol_type = other DNA
atctgctatcctaaaaactc

SEQ ID NO: 7354 - DNA, 20 bp, synthetic construct
  misc_feature 1..20: note = Description of Artificial Sequence: Synthetic oligonucleotide
  misc_feature 1..20: note = Target: SCN10A; (-) strand; PAM type: NNGRRT; PAM sequence: GGGAGT
  source 1..20: mol_type = other DNA
ttcatcatcacacaagggga

SEQ ID NO: 7355 - DNA, 20 bp, synthetic construct
  misc_feature 1..20: note = Description of Artificial Sequence: Synthetic oligonucleotide
  misc_feature 1..20: note = Target: SCN10A; (-) strand; PAM type: NNGRRT; PAM sequence: GGGAGT
  source 1..20: mol_type = other DNA
gttgcatatgcaaatctggg

SEQ ID NO: 7356 - DNA, 20 bp, synthetic construct
  misc_feature 1..20: note = Description of Artificial Sequence: Synthetic oligonucleotide
  misc_feature 1..20: note = Target: SCN10A; (-) strand; PAM type: NNGRRT; PAM sequence: ATGGGT
  source 1..20: mol_type = other DNA
ttatctcttcatgcttactc

SEQ ID NO: 7357 - DNA, 20 bp, synthetic construct
  misc_feature 1..20: note = Description of Artificial Sequence: Synthetic oligonucleotide
  misc_feature 1..20: note = Target: SCN10A; (-) strand; PAM type: NNGRRT; PAM sequence: GAGAGT
  source 1..20: mol_type = other DNA
ggaaggaaaggggaggtttg

SEQ ID NO: 7358 - DNA, 20 bp, synthetic construct
  misc_feature 1..20: note = Description of Artificial Sequence: Synthetic oligonucleotide
  misc_feature 1..20: note = Target: SCN10A; (-) strand; PAM type: NNGRRT; PAM sequence: CGGGAT
  source 1..20: mol_type = other DNA
aatgtttagtgggtggatac

SEQ ID NO: 7359 - DNA, 20 bp, synthetic construct
  misc_feature 1..20: note = Description of Artificial Sequence: Synthetic oligonucleotide
  misc_feature 1..20: note = Target: SCN10A; (-) strand; PAM type: NNGRRT; PAM sequence: GTGGAT
  source 1..20: mol_type = other DNA
tattagaaaatgtttagtgg

SEQ ID NO: 7360 - DNA, 20 bp, synthetic construct
  misc_feature 1..20: note = Description of Artificial Sequence: Synthetic oligonucleotide
  misc_feature 1..20: note = Target: SCN10A; (-) strand; PAM type: NNGRRT; PAM sequence: GTGGGT
  source 1..20: mol_type = other DNA
tttttattagaaaatgttta

SEQ ID NO: 7361 - DNA, 20 bp, synthetic construct
  misc_feature 1..20: note = Description of Artificial Sequence: Synthetic oligonucleotide
  misc_feature 1..20: note = Target: SCN10A; (-) strand; PAM type: NNGRRT; PAM sequence: GTGAAT
  source 1..20: mol_type = other DNA
ttgtgtctgggaggagaaaa

SEQ ID NO: 7362 - DNA, 20 bp, synthetic construct
  misc_feature 1..20: note = Description of Artificial Sequence: Synthetic oligonucleotide
  misc_feature 1..20: note = Target: SCN10A; (-) strand; PAM type: NNGRRT; PAM sequence: GGGGGT
  source 1..20: mol_type = other DNA
aaagggaaagaaaaagttca

SEQ ID NO: 7363 - DNA, 20 bp, synthetic construct
  misc_feature 1..20: note = Description of Artificial Sequence: Synthetic oligonucleotide
  misc_feature 1..20: note = Target: SCN10A; (-) strand; PAM type: NNGRRT; PAM sequence: TAGGAT
  source 1..20: mol_type = other DNA
caagtagcgcctcaaggatc

SEQ ID NO: 7364 - DNA, 20 bp, synthetic construct
  misc_feature 1..20: note = Description of Artificial Sequence: Synthetic oligonucleotide
  misc_feature 1..20: note = Target: SCN10A; (-) strand; PAM type: NNGRRT; PAM sequence: AAGGAT
  source 1..20: mol_type = other DNA
tctacttcaagtagcgcctc

SEQ ID NO: 7365 - DNA, 20 bp, synthetic construct
  misc_feature 1..20: note = Description of Artificial Sequence: Synthetic oligonucleotide
  misc_feature 1..20: note = Target: SCN10A; (-) strand; PAM type: NNGRRT; PAM sequence: GGGAGT
  source 1..20: mol_type = other DNA
gcttgttgggaagctctcct

SEQ ID NO: 7366 - DNA, 20 bp, synthetic construct
  misc_feature 1..20: note = Description of Artificial Sequence: Synthetic oligonucleotide
  misc_feature 1..20: note = Target: SCN10A; (-) strand; PAM type: NNGRRT; PAM sequence: GTGAGT
  source 1..20: mol_type = other DNA
cagtgataccctctaaatct

SEQ ID NO: 7367 - DNA, 20 bp, synthetic construct
  misc_feature 1..20: note = Description of Artificial Sequence: Synthetic oligonucleotide
  misc_feature 1..20: note = Target: SCN10A; (-) strand; PAM type: NNGRRT; PAM sequence: CTGAAT
  source 1..20: mol_type = other DNA
tgccagcaatatttttgtca

SEQ ID NO: 7368 - DNA, 20 bp, synthetic construct
  misc_feature 1..20: note = Description of Artificial Sequence: Synthetic oligonucleotide
  misc_feature 1..20: note = Target: SCN10A; (-) strand; PAM type: NNGRRT; PAM sequence: TAGGGT
  source 1..20: mol_type = other DNA
ggtttaataaacccttcccc

SEQ ID NO: 7369 - DNA, 20 bp, synthetic construct
  misc_feature 1..20: note = Description of Artificial Sequence: Synthetic oligonucleotide
  misc_feature 1..20: note = Target: SCN10A; (-) strand; PAM type: NNGRRT; PAM sequence: CTGGAT
  source 1..20: mol_type = other DNA
atcgtcaaggctctaaactt

SEQ ID NO: 7370 - DNA, 20 bp, synthetic construct
  misc_feature 1..20: note = Description of Artificial Sequence: Synthetic oligonucleotide
  misc_feature 1..20: note = Target: SCN10A; (-) strand; PAM type: NNGRRT; PAM sequence: TGGAAT
  source 1..20: mol_type = other DNA
taatcccattgctcactgcc

SEQ ID NO: 7371 - DNA, 20 bp, synthetic construct
  misc_feature 1..20: note = Description of Artificial Sequence: Synthetic oligonucleotide
  misc_feature 1..20: note = Target: SCN10A; (-) strand; PAM type: NNGRRT; PAM sequence: AAGAGT
  source 1..20: mol_type = other DNA
ccattactacaagctttgct

SEQ ID NO: 7372 - DNA, 20 bp, synthetic construct
  misc_feature 1..20: note = Description of Artificial Sequence: Synthetic oligonucleotide
  misc_feature 1..20: note = Target: SCN10A; (-) strand; PAM type: NNGRRT; PAM sequence: AGGGAT
  source 1..20: mol_type = other DNA
agtgaaaggctttttcagtc

SEQ ID NO: 7373 - DNA, 20 bp, synthetic construct
  misc_feature 1..20: note = Description of Artificial Sequence: Synthetic oligonucleotide
  misc_feature 1..20: note = Target: SCN10A; (-) strand; PAM type: NNGRRT; PAM sequence: CTGAGT
  source 1..20: mol_type = other DNA
tatacagacaatctctaaaa

SEQ ID NO: 7374 - DNA, 20 bp, synthetic construct
  misc_feature 1..20: note = Description of Artificial Sequence: Synthetic oligonucleotide
  misc_feature 1..20: note = Target: SCN10A; (-) strand; PAM type: NNGRRT; PAM sequence: GAGGAT
  source 1..20: mol_type = other DNA
tatttgggaggctgaggtgg

SEQ ID NO: 7375 - DNA, 20 bp, synthetic construct
  misc_feature 1..20: note = Description of Artificial Sequence: Synthetic oligonucleotide
  misc_feature 1..20: note = Target: SCN10A; (-) strand; PAM type: NNGRRT; PAM sequence: GAGAAT
  source 1..20: mol_type = other DNA
tacttgggaggctgagggag

SEQ ID NO: 7376 - DNA, 20 bp, synthetic construct
  misc_feature 1..20: note = Description of Artificial Sequence: Synthetic oligonucleotide
  misc_feature 1..20: note = Target: SCN10A; (-) strand; PAM type: NNGRRT; PAM sequence: GGGAGT
  source 1..20: mol_type = other DNA
caggcggatcacctgaggtc

SEQ ID NO: 7377 - DNA, 20 bp, synthetic construct
  misc_feature 1..20: note = Description of Artificial Sequence: Synthetic oligonucleotide
  misc_feature 1..20: note = Target: SCN10A; (-) strand; PAM type: NNGRRT; PAM sequence: GCGGAT
  source 1..20: mol_type = other DNA
actgttggaggcgcaggcag

SEQ ID NO: 7378 - DNA, 20 bp, synthetic construct
  misc_feature 1..20: note = Description of Artificial Sequence: Synthetic oligonucleotide
  misc_feature 1..20: note = Target: SCN10A; (-) strand; PAM type: NNGRRT; PAM sequence: TTGAAT
  source 1..20: mol_type = other DNA
gggtgaggcatgagaattgc

SEQ ID NO: 7379 - DNA, 20 bp, synthetic construct
  misc_feature 1..20: note = Description of Artificial Sequence: Synthetic oligonucleotide
  misc_feature 1..20: note = Target: SCN10A; (-) strand; PAM type: NNGRRT; PAM sequence: GAGAAT
  source 1..20: mol_type = other DNA
tactcaggagggtgaggcat

SEQ ID NO: 7380 - DNA, 20 bp, synthetic construct
  misc_feature 1..20: note = Description of Artificial Sequence: Synthetic oligonucleotide
  misc_feature 1..20: note = Target: SCN10A; (-) strand; PAM type: NNGRRT; PAM sequence: GAGGGT
  source 1..20: mol_type = other DNA
ctgtaatcccagctactcag

SEQ ID NO: 7381 - DNA, 20 bp, synthetic construct
  misc_feature 1..20: note = Description of Artificial Sequence: Synthetic oligonucleotide
  misc_feature 1..20: note = Target: SCN10A; (-) strand; PAM type: NNGRRT; PAM sequence: CTGGGT
  source 1..20: mol_type = other DNA
actaaaaatatataaattag

SEQ ID NO: 7382 - DNA, 20 bp, synthetic construct
  misc_feature 1..20: note = Description of Artificial Sequence: Synthetic oligonucleotide
  misc_feature 1..20: note = Target: SCN10A; (-) strand; PAM type: NNGRRT; PAM sequence: AGGAGT
  source 1..20: mol_type = other DNA
tgggaggattgcttgaggac

SEQ ID NO: 7383 - DNA, 20 bp, synthetic construct
  misc_feature 1..20: note = Description of Artificial Sequence: Synthetic oligonucleotide
  misc_feature 1..20: note = Target: SCN10A; (-) strand; PAM type: NNGRRT; PAM sequence: GAGGAT
  source 1..20: mol_type = other DNA
attttgggaggccaaggtgg

SEQ ID NO: 7384 - DNA, 20 bp, synthetic construct
  misc_feature 1..20: note = Description of Artificial Sequence: Synthetic oligonucleotide
  misc_feature 1..20: note = Target: SCN10A; (-) strand; PAM type: NNGRRT; PAM sequence: CAGAAT
  source 1..20: mol_type = other DNA
gtggctcacgcctgtaatcc

SEQ ID NO: 7385 - DNA, 20 bp, synthetic construct
  misc_feature 1..20: note = Description of Artificial Sequence: Synthetic oligonucleotide
  misc_feature 1..20: note = Target: SCN10A; (-) strand; PAM type: NNGRRT; PAM sequence: TGGGGT
  source 1..20: mol_type = other DNA
ttaaagccaagggggccagg

SEQ ID NO: 7386 - DNA, 20 bp, synthetic construct
  misc_feature 1..20: note = Description of Artificial Sequence: Synthetic oligonucleotide
  misc_feature 1..20: note = Target: SCN10A; (-) strand; PAM type: NNGRRT; PAM sequence: ATGAGT
  source 1..20: mol_type = other DNA
agatttttttatccatatca

SEQ ID NO: 7387 - DNA, 20 bp, synthetic construct
  misc_feature 1..20: note = Description of Artificial Sequence: Synthetic oligonucleotide
  misc_feature 1..20: note = Target: SCN10A; (-) strand; PAM type: NNGRRT; PAM sequence: GTGAAT
  source 1..20: mol_type = other DNA
tccttcaatctgttaaagtg

SEQ ID NO: 7388 - DNA, 20 bp, synthetic construct
  misc_feature 1..20: note = Description of Artificial Sequence: Synthetic oligonucleotide
  misc_feature 1..20: note = Target: SCN10A; (-) strand; PAM type: NNGRRT; PAM sequence: ATGGAT
  source 1..20: mol_type = other DNA
atcaagaatatttatcatga

SEQ ID NO: 7389 - DNA, 20 bp, synthetic construct
  misc_feature 1..20: note = Description of Artificial Sequence: Synthetic oligonucleotide
  misc_feature 1..20: note = Target: SCN10A; (-) strand; PAM type: NNGRRT; PAM sequence: ATGAAT
  source 1..20: mol_type = other DNA
ttttatcaagaatatttatc

SEQ ID NO: 7390 - DNA, 20 bp, synthetic construct
  misc_feature 1..20: note = Description of Artificial Sequence: Synthetic oligonucleotide
  misc_feature 1..20: note = Target: SCN10A; (-) strand; PAM type: NNGRRT; PAM sequence: AAGAAT
  source 1..20: mol_type = other DNA
tcaggaagttctcttttatc

SEQ ID NO: 7391 - DNA, 20 bp, synthetic construct
  misc_feature 1..20: note = Description of Artificial Sequence: Synthetic oligonucleotide
  misc_feature 1..20: note = Target: SCN10A; (-) strand; PAM type: NNGRRT; PAM sequence: AAGAAT
  source 1..20: mol_type = other DNA
atcaattttctgatcccaaa

SEQ ID NO: 7392 - DNA, 20 bp, synthetic construct
  misc_feature 1..20: note = Description of Artificial Sequence: Synthetic oligonucleotide
  misc_feature 1..20: note = Target: SCN10A; (-) strand; PAM type: NNGRRT; PAM sequence: TGGGAT
  source 1..20: mol_type = other DNA
gccttggcctcctaaagtgc

SEQ ID NO: 7393 - DNA, 20 bp, synthetic construct
  misc_feature 1..20: note = Description of Artificial Sequence: Synthetic oligonucleotide
  misc_feature 1..20: note = Target: SCN10A; (-) strand; PAM type: NNGRRT; PAM sequence: CAGGAT
  source 1..20: mol_type = other DNA
cggggtttcaccgtgttagc

SEQ ID NO: 7394 - DNA, 20 bp, synthetic construct
  misc_feature 1..20: note = Description of Artificial Sequence: Synthetic oligonucleotide
  misc_feature 1..20: note = Target: SCN10A; (-) strand; PAM type: NNGRRT; PAM sequence: CGGGGT
  source 1..20: mol_type = other DNA
ctttgtatttttagtagaga

SEQ ID NO: 7395 - DNA, 20 bp, synthetic construct
  misc_feature 1..20: note = Description of Artificial Sequence: Synthetic oligonucleotide
  misc_feature 1..20: note = Target: SCN10A; (-) strand; PAM type: NNGRRT; PAM sequence: CTGAGT
  source 1..20: mol_type = other DNA
cattctcctgcctcagcctc

SEQ ID NO: 7396 - DNA, 20 bp, synthetic construct
  misc_feature 1..20: note = Description of Artificial Sequence: Synthetic oligonucleotide
  misc_feature 1..20: note = Target: SCN10A; (-) strand; PAM type: NNGRRT; PAM sequence: CCGGGT
  source 1..20: mol_type = other DNA
ctcattgccagctccacctc

SEQ ID NO: 7397 - DNA, 20 bp, synthetic construct
  misc_feature 1..20: note = Description of Artificial Sequence: Synthetic oligonucleotide
  misc_feature 1..20: note = Target: SCN10A; (-) strand; PAM type: NNGRRT; PAM sequence: TAGAGT
  source 1..20: mol_type = other DNA
tctcgctctgtcacccaggc

SEQ ID NO: 7398 - DNA, 20 bp, synthetic construct
  misc_feature 1..20: note = Description of Artificial Sequence: Synthetic oligonucleotide
  misc_feature 1..20: note = Target: SCN10A; (-) strand; PAM type: NNGRRT; PAM sequence: CAGAGT
  source 1..20: mol_type = other DNA
ttttttttttttttttgaga

SEQ ID NO: 7399 - DNA, 20 bp, synthetic construct
  misc_feature 1..20: note = Description of Artificial Sequence: Synthetic oligonucleotide
  misc_feature 1..20: note = Target: SCN10A; (-) strand; PAM type: NNGRRT; PAM sequence: ATGAGT
  source 1..20: mol_type = other DNA
cacatcatgtgaaaataaca

SEQ ID NO: 7400 - DNA, 20 bp, synthetic construct
  misc_feature 1..20: note = Description of Artificial Sequence: Synthetic oligonucleotide
  misc_feature 1..20: note = Target: SCN10A; (-) strand; PAM type: NNGRRT; PAM sequence: TAGGAT
  source 1..20: mol_type = other DNA
ggtttttataattttctcca

SEQ ID NO: 7401 - DNA, 20 bp, synthetic construct
  misc_feature 1..20: note = Description of Artificial Sequence: Synthetic oligonucleotide
  misc_feature 1..20: note = Target: SCN10A; (-) strand; PAM type: NNGRRT; PAM sequence: TAGAAT
  source 1..20: mol_type = other DNA
gcacactttcatattcactt

SEQ ID NO: 7402 - DNA, 20 bp, synthetic construct
  misc_feature 1..20: note = Description of Artificial Sequence: Synthetic oligonucleotide
  misc_feature 1..20: note = Target: SCN10A; (-) strand; PAM type: NNGRRT; PAM sequence: AAGAAT
  source 1..20: mol_type = other DNA
taatccacctaatttacttc

SEQ ID NO: 7403 - DNA, 20 bp, synthetic construct
  misc_feature 1..20: note = Description of Artificial Sequence: Synthetic oligonucleotide
  misc_feature 1..20: note = Target: SCN10A; (-) strand; PAM type: NNGRRT; PAM sequence: CAGAGT
  source 1..20: mol_type = other DNA
ctatcccatgaggcaaaaac

SEQ ID NO: 7404 - DNA, 20 bp, synthetic construct
  misc_feature 1..20: note = Description of Artificial Sequence: Synthetic oligonucleotide
  misc_feature 1..20: note = Target: SCN10A; (-) strand; PAM type: NNGRRT; PAM sequence: TTGGAT
  source 1..20: mol_type = other DNA
cccaaccacactatctaaag

SEQ ID NO: 7405 - DNA, 20 bp, synthetic construct
  misc_feature 1..20: note = Description of Artificial Sequence: Synthetic oligonucleotide
  misc_feature 1..20: note = Target: SCN10A; (-) strand; PAM type: NNGRRT; PAM sequence: TGGAAT
  source 1..20: mol_type = other DNA
gaagtttttttcgctgtgcc

SEQ ID NO: 7406 - DNA, 20 bp, synthetic construct
  misc_feature 1..20: note = Description of Artificial Sequence: Synthetic oligonucleotide
  misc_feature 1..20: note = Target: SCN10A; (-) strand; PAM type: NNGRRT; PAM sequence: GAGAAT
  source 1..20: mol_type = other DNA
cactggtttcccattgctct

SEQ ID NO: 7407 - DNA, 20 bp, synthetic construct
  misc_feature 1..20: note = Description of Artificial Sequence: Synthetic oligonucleotide
  misc_feature 1..20: note = Target: SCN10A; (-) strand; PAM type: NNGRRT; PAM sequence: CAGAGT
  source 1..20: mol_type = other DNA
cacacacacacacacacaca

SEQ ID NO: 7408 - DNA, 20 bp, synthetic construct
  misc_feature 1..20: note = Description of Artificial Sequence: Synthetic oligonucleotide
  misc_feature 1..20: note = Target: SCN10A; (-) strand; PAM type: NNGRRT; PAM sequence: GAGAGT
  source 1..20: mol_type = other DNA
tgtttgccaaaacctcaccg

SEQ ID NO: 7409 - DNA, 20 bp, synthetic construct
  misc_feature 1..20: note = Description of Artificial Sequence: Synthetic oligonucleotide
  misc_feature 1..20: note = Target: SCN10A; (-) strand; PAM type: NNGRRT; PAM sequence: TGGGAT
  source 1..20: mol_type = other DNA
ccaccaactacacactttct

SEQ ID NO: 7410 - DNA, 20 bp, synthetic construct
  misc_feature 1..20: note = Description of Artificial Sequence: Synthetic oligonucleotide
  misc_feature 1..20: note = Target: SCN10A; (-) strand; PAM type: NNGRRT; PAM sequence: GGGAAT
  source 1..20: mol_type = other DNA
gcccctacaggattctgcag

SEQ ID NO: 7411 - DNA, 20 bp, synthetic construct
  misc_feature 1..20: note = Description of Artificial Sequence: Synthetic oligonucleotide
  misc_feature 1..20: note = Target: SCN10A; (-) strand; PAM type: NNGRRT; PAM sequence: CAGGAT
  source 1..20: mol_type = other DNA
tacttcacagtctgccccta

SEQ ID NO: 7412 - DNA, 20 bp, synthetic construct
  misc_feature 1..20: note = Description of Artificial Sequence: Synthetic oligonucleotide
  misc_feature 1..20: note = Target: SCN10A; (-) strand; PAM type: NNGRRT; PAM sequence: GAGAAT
  source 1..20: mol_type = other DNA
tactcgggaggctgaggcag

SEQ ID NO: 7413 - DNA, 20 bp, synthetic construct
  misc_feature 1..20: note = Description of Artificial Sequence: Synthetic oligonucleotide
  misc_feature 1..20: note = Target: SCN10A; (-) strand; PAM type: NNGRRT; PAM sequence: GCGGAT
  source 1..20: mol_type = other DNA
actttgggaggccgaggcag

SEQ ID NO: 7414 - DNA, 20 bp, synthetic construct
  misc_feature 1..20: note = Description of Artificial Sequence: Synthetic oligonucleotide
  misc_feature 1..20: note = Target: SCN10A; (-) strand; PAM type: NNGRRT; PAM sequence: CAGAAT
  source 1..20: mol_type = other DNA
acttgaaaatcttacaaggt

SEQ ID NO: 7415 - DNA, 20 bp, synthetic construct
  misc_feature 1..20: note = Description of Artificial Sequence: Synthetic oligonucleotide
  misc_feature 1..20: note = Target: SCN10A; (-) strand; PAM type: NNGRRT; PAM sequence: TAGAGT
  source 1..20: mol_type = other DNA
catcccagggaggagaaggg

SEQ ID NO: 7416 - DNA, 20 bp, synthetic construct
  misc_feature 1..20: note = Description of Artificial Sequence: Synthetic oligonucleotide
  misc_feature 1..20: note = Target: SCN10A; (-) strand; PAM type: NNGRRT; PAM sequence: AAGGGT
  source 1..20: mol_type = other DNA
gtcaccatcccagggaggag

SEQ ID NO: 7417 - DNA, 20 bp, synthetic construct
  misc_feature 1..20: note = Description of Artificial Sequence: Synthetic oligonucleotide
  misc_feature 1..20: note = Target: SCN10A; (-) strand; PAM type: NNGRRT; PAM sequence: CAGAGT
  source 1..20: mol_type = other DNA
tatggcctgtccattattgt

SEQ ID NO: 7418 - DNA, 20 bp, synthetic construct
  misc_feature 1..20: note = Description of Artificial Sequence: Synthetic oligonucleotide
  misc_feature 1..20: note = Target: SCN10A; (-) strand; PAM type: NNGRRT; PAM sequence: AGGAAT
  source 1..20: mol_type = other DNA
gaaaggagacacagagagag

SEQ ID NO: 7419 - DNA, 20 bp, synthetic construct
  misc_feature 1..20: note = Description of Artificial Sequence: Synthetic oligonucleotide
  misc_feature 1..20: note = Target: SCN10A; (-) strand; PAM type: NNGRRT; PAM sequence: CAGAGT
  source 1..20: mol_type = other DNA
ctgcactccagcctgggaga

SEQ ID NO: 7420 - DNA, 20 bp, synthetic construct
  misc_feature 1..20: note = Description of Artificial Sequence: Synthetic oligonucleotide
  misc_feature 1..20: note = Target: SCN10A; (-) strand; PAM type: NNGRRT; PAM sequence: GAGGAT
  source 1..20: mol_type = other DNA
tactcagaagactgaggtgg

SEQ ID NO: 7421 - DNA, 20 bp, synthetic construct
  misc_feature 1..20: note = Description of Artificial Sequence: Synthetic oligonucleotide
  misc_feature 1..20: note = Target: SCN10A; (-) strand; PAM type: NNGRRT; PAM sequence: AGGAGT
  source 1..20: mol_type = other DNA
caggcagatcgcttgagccc

SEQ ID NO: 7422 - DNA, 20 bp, synthetic construct
  misc_feature 1..20: note = Description of Artificial Sequence: Synthetic oligonucleotide
  misc_feature 1..20: note = Target: SCN10A; (-) strand; PAM type: NNGRRT; PAM sequence: AGGGAT
  source 1..20: mol_type = other DNA
agcagtgcacaactcctggg

SEQ ID NO: 7423 - DNA, 20 bp, synthetic construct
  misc_feature 1..20: note = Description of Artificial Sequence: Synthetic oligonucleotide
  misc_feature 1..20: note = Target: SCN10A; (-) strand; PAM type: NNGRRT; PAM sequence: CTGGAT
  source 1..20: mol_type = other DNA
ccatggaagagatgtgggca

SEQ ID NO: 7424 - DNA, 20 bp, synthetic construct
  misc_feature 1..20: note = Description of Artificial Sequence: Synthetic oligonucleotide
  misc_feature 1..20: note = Target: SCN10A; (-) strand; PAM type: NNGRRT; PAM sequence: AGGGGT
  source 1..20: mol_type = other DNA
gaacttggcgtacctggatt

SEQ ID NO: 7425 - DNA, 20 bp, synthetic construct
  misc_feature 1..20: note = Description of Artificial Sequence: Synthetic oligonucleotide
  misc_feature 1..20: note = Target: SCN10A; (-) strand; PAM type: NNGRRT; PAM sequence: CTGGAT
  source 1..20: mol_type = other DNA
agcccctgaacttggcgtac

SEQ ID NO: 7426 - DNA, 20 bp, synthetic construct
  misc_feature 1..20: note = Description of Artificial Sequence: Synthetic oligonucleotide
  misc_feature 1..20: note = Target: SCN10A; (-) strand; PAM type: NNGRRT; PAM sequence: GGGGGT
  source 1..20: mol_type = other DNA
gttggcatccagaggttgaa

SEQ ID NO: 7427 - DNA, 20 bp, synthetic construct
  misc_feature 1..20: note = Description of Artificial Sequence: Synthetic oligonucleotide
  misc_feature 1..20: note = Target: SCN10A; (-) strand; PAM type: NNGRRT; PAM sequence: GGGAGT
  source 1..20: mol_type = other DNA
agagaggtgacaaaacaaag

SEQ ID NO: 7428 - DNA, 20 bp, synthetic construct
  misc_feature 1..20: note = Description of Artificial Sequence: Synthetic oligonucleotide
  misc_feature 1..20: note = Target: SCN10A; (-) strand; PAM type: NNGRRT; PAM sequence: AGGAAT
  source 1..20: mol_type = other DNA
agcgcaggccgcctgctctc

SEQ ID NO: 7429 - DNA, 20 bp, synthetic construct
  misc_feature 1..20: note = Description of Artificial Sequence: Synthetic oligonucleotide
  misc_feature 1..20: note = Target: SCN10A; (-) strand; PAM type: NNGRRT; PAM sequence: GGGAAT
  source 1..20: mol_type = other DNA
ttggcatctcactgactctt

SEQ ID NO: 7430 - DNA, 20 bp, synthetic construct
  misc_feature 1..20: note = Description of Artificial Sequence: Synthetic oligonucleotide
  misc_feature 1..20: note = Target: SCN10A; (-) strand; PAM type: NNGRRT; PAM sequence: TCGGGT
  source 1..20: mol_type = other DNA
ctgtcagattcccaggagtg

SEQ ID NO: 7431 - DNA, 20 bp, synthetic construct
  misc_feature 1..20: note = Description of Artificial Sequence: Synthetic oligonucleotide
  misc_feature 1..20: note = Target: SCN10A; (-) strand; PAM type: NNGRRT; PAM sequence: AGGAGT
  source 1..20: mol_type = other DNA
gccaaacctgtcagattccc

SEQ ID NO: 7432 - DNA, 20 bp, synthetic construct
  misc_feature 1..20: note = Description of Artificial Sequence: Synthetic oligonucleotide
  misc_feature 1..20: note = Target: SCN10A; (-) strand; PAM type: NNGRRT; PAM sequence: CTGGAT
  source 1..20: mol_type = other DNA
caagcgaataagccacagac

SEQ ID NO: 7433 - DNA, 20 bp, synthetic construct
  misc_feature 1..20: note = Description of Artificial Sequence: Synthetic oligonucleotide
  misc_feature 1..20: note = Target: SCN10A; (-) strand; PAM type: NNGRRT; PAM sequence: GCGAAT
  source 1..20: mol_type = other DNA
gtctcccatctgccaagcaa

SEQ ID NO: 7434 - DNA, 20 bp, synthetic construct
  misc_feature 1..20: note = Description of Artificial Sequence: Synthetic oligonucleotide
  misc_feature 1..20: note = Target: SCN10A; (-) strand; PAM type: NNGRRT; PAM sequence: AAGAAT
  source 1..20: mol_type = other DNA
ctcaggggtgggtgaggaaa

SEQ ID NO: 7435 - DNA, 20 bp, synthetic construct
  misc_feature 1..20: note = Description of Artificial Sequence: Synthetic oligonucleotide
  misc_feature 1..20: note = Target: SCN10A; (-) strand; PAM type: NNGRRT; PAM sequence: GTGGGT
  source 1..20: mol_type = other DNA
cgtttttaagatcctcaggg

SEQ ID NO: 7436 - DNA, 20 bp, synthetic construct
  misc_feature 1..20: note = Description of Artificial Sequence: Synthetic oligonucleotide
  misc_feature 1..20: note = Target: SCN10A; (-) strand; PAM type: NNGRRT; PAM sequence: AGGGGT
  source 1..20: mol_type = other DNA
tagtcgtttttaagatcctc

SEQ ID NO: 7437 - DNA, 20 bp, synthetic construct
  misc_feature 1..20: note = Description of Artificial Sequence: Synthetic oligonucleotide
  misc_feature 1..20: note = Target: SCN10A; (-) strand; PAM type: NNGRRT; PAM sequence: CAGAGT
  source 1..20: mol_type = other DNA
gccccagcttttcgctgact

SEQ ID NO: 7438 - DNA, 20 bp, synthetic construct
  misc_feature 1..20: note = Description of Artificial Sequence: Synthetic oligonucleotide
  misc_feature 1..20: note = Target: SCN10A; (-) strand; PAM type: NNGRRT; PAM sequence: TTGGGT
  source 1..20: mol_type = other DNA
actcctgggcgactggagac

SEQ ID NO: 7439 - DNA, 20 bp, synthetic construct
  misc_feature 1..20: note = Description of Artificial Sequence: Synthetic oligonucleotide
  misc_feature 1..20: note = Target: SCN10A; (-) strand; PAM type: NNGRRT; PAM sequence: CAGGGT
  source 1..20: mol_type = other DNA
cctgtccttgtgggagggag

SEQ ID NO: 7440 - DNA, 20 bp, synthetic construct
  misc_feature 1..20: note = Description of Artificial Sequence: Synthetic oligonucleotide
  misc_feature 1..20: note = Target: SCN10A; (-) strand; PAM type: NNGRRT; PAM sequence: GTGAGT
  source 1..20: mol_type = other DNA
ttgactgcatcatcgtcact

SEQ ID NO: 7441 - DNA, 20 bp, synthetic construct
  misc_feature 1..20: note = Description of Artificial Sequence: Synthetic oligonucleotide
  misc_feature 1..20: note = Target: SCN10A; (-) strand; PAM type: NNGRRT; PAM sequence: TGGAAT
  source 1..20: mol_type = other DNA
actattatttccagaagaag

SEQ ID NO: 7442 - DNA, 20 bp, synthetic construct
  misc_feature 1..20: note = Description of Artificial Sequence: Synthetic oligonucleotide
  misc_feature 1..20: note = Target: SCN10A; (-) strand; PAM type: NNGRRT; PAM sequence: AAGGAT
  source 1..20: mol_type = other DNA
atagcaactgaacaaaacaa

SEQ ID NO: 7443 - DNA, 20 bp, synthetic construct
  misc_feature 1..20: note = Description of Artificial Sequence: Synthetic oligonucleotide
  misc_feature 1..20: note = Target: SCN10A; (-) strand; PAM type: NNGRRT; PAM sequence: GAGAAT
  source 1..20: mol_type = other DNA
ctgcagcatgcacagcccct

SEQ ID NO: 7444 - DNA, 20 bp, synthetic construct
  misc_feature 1..20: note = Description of Artificial Sequence: Synthetic oligonucleotide
  misc_feature 1..20: note = Target: SCN10A; (-) strand; PAM type: NNGRRT; PAM sequence: TGGGAT
  source 1..20: mol_type = other DNA
aagctaggaaatgtctgggc

SEQ ID NO: 7445 - DNA, 20 bp, synthetic construct
  misc_feature 1..20: note = Description of Artificial Sequence: Synthetic oligonucleotide
  misc_feature 1..20: note = Target: SCN10A; (-) strand; PAM type: NNGRRT; PAM sequence: AAGGAT
  source 1..20: mol_type = other DNA
tgaggaaattgaggtacagg

SEQ ID NO: 7446 - DNA, 20 bp, synthetic construct
  misc_feature 1..20: note = Description of Artificial Sequence: Synthetic oligonucleotide
  misc_feature 1..20: note = Target: SCN10A; (-) strand; PAM type: NNGRRT; PAM sequence: ATGAAT
  source 1..20: mol_type = other DNA
ctagtcactgttacttatga

SEQ ID NO: 7447 - DNA, 20 bp, synthetic construct
  misc_feature 1..20: note = Description of Artificial Sequence: Synthetic oligonucleotide
  misc_feature 1..20: note = Target: SCN10A; (-) strand; PAM type: NNGRRT; PAM sequence: ATGAAT
  source 1..20: mol_type = other DNA
cttactagtcactgttactt

SEQ ID NO: 7448 - DNA, 20 bp, synthetic construct
  misc_feature 1..20: note = Description of Artificial Sequence: Synthetic oligonucleotide
  misc_feature 1..20: note = Target: SCN10A; (-) strand; PAM type: NNGRRT; PAM sequence: ATGAAT
  source 1..20: mol_type = other DNA
ctaaaagaatcttagaggca

SEQ ID NO: 7449 - DNA, 20 bp, synthetic construct
  misc_feature 1..20: note = Description of Artificial Sequence: Synthetic oligonucleotide
  misc_feature 1..20: note = Target: SCN10A; (-) strand; PAM type: NNGRRT; PAM sequence: AAGAAT
  source 1..20: mol_type = other DNA
tagagacacacagagcctaa

SEQ ID NO: 7450 - DNA, 20 bp, synthetic construct
  misc_feature 1..20: note = Description of Artificial Sequence: Synthetic oligonucleotide
  misc_feature 1..20: note = Target: SCN10A; (-) strand; PAM type: NNGRRT; PAM sequence: CAGAAT
  source 1..20: mol_type = other DNA
gttctgacctctctcagtgt

SEQ ID NO: 7451 - DNA, 20 bp, synthetic construct
  misc_feature 1..20: note = Description of Artificial Sequence: Synthetic oligonucleotide
  misc_feature 1..20: note = Target: SCN10A; (-) strand; PAM type: NNGRRT; PAM sequence: AAGGAT
  source 1..20: mol_type = other DNA
cctgttttcttctccataag

SEQ ID NO: 7452 - DNA, 20 bp, synthetic construct
  misc_feature 1..20: note = Description of Artificial Sequence: Synthetic oligonucleotide
  misc_feature 1..20: note = Target: SCN10A; (-) strand; PAM type: NNGRRT; PAM sequence: TTGAAT
  source 1..20: mol_type = other DNA
ggacactccatagatactct

SEQ ID NO: 7453 - DNA, 20 bp, synthetic construct
  misc_feature 1..20: note = Description of Artificial Sequence: Synthetic oligonucleotide
  misc_feature 1..20: note = Target: SCN10A; (-) strand; PAM type: NNGRRT; PAM sequence: CAGGGT
  source 1..20: mol_type = other DNA
atagctggtgagggtggatc

SEQ ID NO: 7454 - DNA, 20 bp, synthetic construct
  misc_feature 1..20: note = Description of Artificial Sequence: Synthetic oligonucleotide
  misc_feature 1..20: note = Target: SCN10A; (-) strand; PAM type: NNGRRT; PAM sequence: GTGGAT
  source 1..20: mol_type = other DNA
aaattgtatagctggtgagg

SEQ ID NO: 7455 - DNA, 20 bp, synthetic construct
  misc_feature 1..20: note = Description of Artificial Sequence: Synthetic oligonucleotide
  misc_feature 1..20: note = Target: SCN10A; (-) strand; PAM type: NNGRRT; PAM sequence: GAGGGT
  source 1..20: mol_type = other DNA
cccaaaattgtatagctggt

SEQ ID NO: 7456 - DNA, 20 bp, synthetic construct
  misc_feature 1..20: note = Description of Artificial Sequence: Synthetic oligonucleotide
  misc_feature 1..20: note = Target: SCN10A; (-) strand; PAM type: NNGRRT; PAM sequence: ATGAAT
  source 1..20: mol_type = other DNA
tgcaatgagtcaggtgcttt

SEQ ID NO: 7457 - DNA, 20 bp, synthetic construct
  misc_feature 1..20: note = Description of Artificial Sequence: Synthetic oligonucleotide
  misc_feature 1..20: note = Target: SCN10A; (-) strand; PAM type: NNGRRT; PAM sequence: ATGAGT
  source 1..20: mol_type = other DNA
tcatgtgcttggtgcctgca

SEQ ID NO: 7458 - DNA, 20 bp, synthetic construct
  misc_feature 1..20: note = Description of Artificial Sequence: Synthetic oligonucleotide
  misc_feature 1..20: note = Target: SCN10A; (-) strand; PAM type: NNGRRT; PAM sequence: TGGAAT
  source 1..20: mol_type = other DNA
taagaccacagagggcctta

SEQ ID NO: 7459 - DNA, 20 bp, synthetic construct
  misc_feature 1..20: note = Description of Artificial Sequence: Synthetic oligonucleotide
  misc_feature 1..20: note = Target: SCN10A; (-) strand; PAM type: NNGRRT; PAM sequence: GAGAAT
  source 1..20: mol_type = other DNA
aaggaaaaatggaaagagaa

SEQ ID NO: 7460 - DNA, 20 bp, synthetic construct
  misc_feature 1..20: note = Description of Artificial Sequence: Synthetic oligonucleotide
  misc_feature 1..20: note = Target: SCN10A; (-) strand; PAM type: NNGRRT; PAM sequence: TGGAAT
  source 1..20: mol_type = other DNA
cagtaggttctggaacatgg

SEQ ID NO: 7461 - DNA, 20 bp, synthetic construct
  misc_feature 1..20: note = Description of Artificial Sequence: Synthetic oligonucleotide
  misc_feature 1..20: note = Target: SCN10A; (-) strand; PAM type: NNGRRT; PAM sequence: TGGGGT
  source 1..20: mol_type = other DNA
tcaccagaactgtctggctt

SEQ ID NO: 7462 - DNA, 20 bp, synthetic construct
  misc_feature 1..20: note = Description of Artificial Sequence: Synthetic oligonucleotide
  misc_feature 1..20: note = Target: SCN10A; (-) strand; PAM type: NNGRRT; PAM sequence: CTGGAT
  source 1..20: mol_type = other DNA
accaagctggaggtgaccta

SEQ ID NO: 7463 - DNA, 20 bp, synthetic construct
  misc_feature 1..20: note = Description of Artificial Sequence: Synthetic oligonucleotide
  misc_feature 1..20: note = Target: SCN10A; (-) strand; PAM type: NNGRRT; PAM sequence: CAGGGT
  source 1..20: mol_type = other DNA
tcctgccttcatgtccgcag

SEQ ID NO: 7464 - DNA, 20 bp, synthetic construct
  misc_feature 1..20: note = Description of Artificial Sequence: Synthetic oligonucleotide
  misc_feature 1..20: note = Target: SCN10A; (-) strand; PAM type: NNGRRT; PAM sequence: AAGGGT
  source 1..20: mol_type = other DNA
catgataggcagaagctaga

SEQ ID NO: 7465 - DNA, 20 bp, synthetic construct
  misc_feature 1..20: note = Description of Artificial Sequence: Synthetic oligonucleotide
  misc_feature 1..20: note = Target: SCN10A; (-) strand; PAM type: NNGRRT; PAM sequence: CTGAAT
  source 1..20: mol_type = other DNA
aagcccgcttttcttaaccc

SEQ ID NO: 7466 - DNA, 20 bp, synthetic construct
  misc_feature 1..20: note = Description of Artificial Sequence: Synthetic oligonucleotide
  misc_feature 1..20: note = Target: SCN10A; (-) strand; PAM type: NNGRRT; PAM sequence: CAGAAT
  source 1..20: mol_type = other DNA
gttgagtttagtggccacat

SEQ ID NO: 7467 - DNA, 20 bp, synthetic construct
  misc_feature 1..20: note = Description of Artificial Sequence: Synthetic oligonucleotide
  misc_feature 1..20: note = Target: SCN10A; (-) strand; PAM type: NNGRRT; PAM sequence: TTGAGT
  source 1..20: mol_type = other DNA
atcttcccaagatcatagag

SEQ ID NO: 7468 - DNA, 20 bp, synthetic construct
  misc_feature 1..20: note = Description of Artificial Sequence: Synthetic oligonucleotide
  misc_feature 1..20: note = Target: SCN10A; (-) strand; PAM type: NNGRRT; PAM sequence: TAGAGT
  source 1..20: mol_type = other DNA
aaataatcttcccaagatca

SEQ ID NO: 7469 - DNA, 20 bp, synthetic construct
  misc_feature 1..20: note = Description of Artificial Sequence: Synthetic oligonucleotide
  misc_feature 1..20: note = Target: SCN10A; (-) strand; PAM type: NNGRRT; PAM sequence: ATGGAT
  source 1..20: mol_type = other DNA
ataatactcagatgcttctc

SEQ ID NO: 7470 - DNA, 20 bp, synthetic construct
  misc_feature 1..20: note = Description of Artificial Sequence: Synthetic oligonucleotide
  misc_feature 1..20: note = Target: SCN10A; (-) strand; PAM type: NNGRRT; PAM sequence: AGGAAT
  source 1..20: mol_type = other DNA
tccaaccttgccccacccac

SEQ ID NO: 7471 - DNA, 20 bp, synthetic construct
  misc_feature 1..20: note = Description of Artificial Sequence: Synthetic oligonucleotide
  misc_feature 1..20: note = Target: SCN10A; (-) strand; PAM type: NNGRRT; PAM sequence: CTGGAT
  source 1..20: mol_type = other DNA
atactggatttcactatata

SEQ ID NO: 7472 - DNA, 20 bp, synthetic construct
  misc_feature 1..20: note = Description of Artificial Sequence: Synthetic oligonucleotide
  misc_feature 1..20: note = Target: SCN10A; (-) strand; PAM type: NNGRRT; PAM sequence: CTGGAT
  source 1..20: mol_type = other DNA
ttaacaagatacaatccata

SEQ ID NO: 7473 - DNA, 20 bp, synthetic construct
  misc_feature 1..20: note = Description of Artificial Sequence: Synthetic oligonucleotide
  misc_feature 1..20: note = Target: SCN10A; (-) strand; PAM type: NNGRRT; PAM sequence: AAGAGT
  source 1..20: mol_type = other DNA
tgttgtcacttaaggagaaa

SEQ ID NO: 7474 - DNA, 20 bp, synthetic construct
  misc_feature 1..20: note = Description of Artificial Sequence: Synthetic oligonucleotide
  misc_feature 1..20: note = Target: SCN10A; (-) strand; PAM type: NNGRRT; PAM sequence: GAGGAT
  source 1..20: mol_type = other DNA
agttgcctctaccttgaaat

SEQ ID NO: 7475 - DNA, 20 bp, synthetic construct
  misc_feature 1..20: note = Description of Artificial Sequence: Synthetic oligonucleotide
  misc_feature 1..20: note = Target: SCN10A; (-) strand; PAM type: NNGRRT; PAM sequence: CTGGAT
  source 1..20: mol_type = other DNA
aggacaaccacttgaatttt

SEQ ID NO: 7476 - DNA, 20 bp, synthetic construct
  misc_feature 1..20: note = Description of Artificial Sequence: Synthetic oligonucleotide
  misc_feature 1..20: note = Target: SCN10A; (-) strand; PAM type: NNGRRT; PAM sequence: TTGAAT
  source 1..20: mol_type = other DNA
acaaaacataggacaaccac

SEQ ID NO: 7477 - DNA, 20 bp, synthetic construct
  misc_feature 1..20: note = Description of Artificial Sequence: Synthetic oligonucleotide
  misc_feature 1..20: note = Target: SCN10A; (-) strand; PAM type: NNGRRT; PAM sequence: TGGGAT
  source 1..20: mol_type = other DNA
tgagctggtgggaatggctt

SEQ ID NO: 7478 - DNA, 20 bp, synthetic construct
  misc_feature 1..20: note = Description of Artificial Sequence: Synthetic oligonucleotide
  misc_feature 1..20: note = Target: SCN10A; (-) strand; PAM type: NNGRRT; PAM sequence: GGGAAT
  source 1..20: mol_type = other DNA
aggacccaggctgagctggt

SEQ ID NO: 7479 - DNA, 20 bp, synthetic construct
  misc_feature 1..20: note = Description of Artificial Sequence: Synthetic oligonucleotide
  misc_feature 1..20: note = Target: SCN10A; (-) strand; PAM type: NNGRRT; PAM sequence: CTGGGT
  source 1..20: mol_type = other DNA
gtgcaggagacatgtggaca

SEQ ID NO: 7480 - DNA, 20 bp, synthetic construct
  misc_feature 1..20: note = Description of Artificial Sequence: Synthetic oligonucleotide
  misc_feature 1..20: note = Target: SCN10A; (-) strand; PAM type: NNGRRT; PAM sequence: TGGGGT
  source 1..20: mol_type = other DNA
atggcagggtgcagttcggg

SEQ ID NO: 7481 - DNA, 20 bp, synthetic construct
  misc_feature 1..20: note = Description of Artificial Sequence: Synthetic oligonucleotide
  misc_feature 1..20: note = Target: SCN10A; (-) strand; PAM type: NNGRRT; PAM sequence: TCGGGT
  source 1..20: mol_type = other DNA
ggatgatggcagggtgcagt

SEQ ID NO: 7482 - DNA, 20 bp, synthetic construct
  misc_feature 1..20: note = Description of Artificial Sequence: Synthetic oligonucleotide
  misc_feature 1..20: note = Target: SCN10A; (-) strand; PAM type: NNGRRT; PAM sequence: CAGGGT
  source 1..20: mol_type = other DNA
gggcggggtggggatgatgg

SEQ ID NO: 7483 - DNA, 20 bp, synthetic construct
  misc_feature 1..20: note = Description of Artificial Sequence: Synthetic oligonucleotide
  misc_feature 1..20: note = Target: SCN10A; (-) strand; PAM type: NNGRRT; PAM sequence: GGGGAT
  source 1..20: mol_type = other DNA
tggcgtggtcggggcggggt

SEQ ID NO: 7484 - DNA, 20 bp, synthetic construct
  misc_feature 1..20: note = Description of Artificial Sequence: Synthetic oligonucleotide
  misc_feature 1..20: note = Target: SCN10A; (-) strand; PAM type: NNGRRT; PAM sequence: CGGGGT
  source 1..20: mol_type = other DNA
cctcactggcgtggtcgggg

SEQ ID NO: 7485 - DNA, 20 bp, synthetic construct
  misc_feature 1..20: note = Description of Artificial Sequence: Synthetic oligonucleotide
  misc_feature 1..20: note = Target: SCN10A; (-) strand; PAM type: NNGRRT; PAM sequence: GTGAGT
  source 1..20: mol_type = other DNA
tgctccagataggcaacatc

SEQ ID NO: 7486 - DNA, 20 bp, synthetic construct
  misc_feature 1..20: note = Description of Artificial Sequence: Synthetic oligonucleotide
  misc_feature 1..20: note = Target: SCN10A; (-) strand; PAM type: NNGRRT; PAM sequence: ACGGAT
  source 1..20: mol_type = other DNA
caattctctttgggcttgtg

SEQ ID NO: 7487 - DNA, 20 bp, synthetic construct
  misc_feature 1..20: note = Description of Artificial Sequence: Synthetic oligonucleotide
  misc_feature 1..20: note = Target: SCN10A; (-) strand; PAM type: NNGRRT; PAM sequence: GTGGGT
  source 1..20: mol_type = other DNA
atctgggattgctgccccat

SEQ ID NO: 7488 - DNA, 20 bp, synthetic construct
  misc_feature 1..20: note = Description of Artificial Sequence: Synthetic oligonucleotide
  misc_feature 1..20: note = Target: SCN10A; (-) strand; PAM type: NNGRRT; PAM sequence: TGGGAT
  source 1..20: mol_type = other DNA
tgtctcagaagtatctgatc

SEQ ID NO: 7489 - DNA, 20 bp, synthetic construct
  misc_feature 1..20: note = Description of Artificial Sequence: Synthetic oligonucleotide
  misc_feature 1..20: note = Target: SCN10A; (-) strand; PAM type: NNGRRT; PAM sequence: AGGAGT
  source 1..20: mol_type = other DNA
acactataatgcagaactcg

SEQ ID NO: 7490 - DNA, 20 bp, synthetic construct
  misc_feature 1..20: note = Description of Artificial Sequence: Synthetic oligonucleotide
  misc_feature 1..20: note = Target: SCN10A; (-) strand; PAM type: NNGRRT; PAM sequence: TGGGGT
  source 1..20: mol_type = other DNA
ctagaggatgaccgcagaat

SEQ ID NO: 7491 - DNA, 20 bp, synthetic construct
  misc_feature 1..20: note = Description of Artificial Sequence: Synthetic oligonucleotide
  misc_feature 1..20: note = Target: SCN10A; (-) strand; PAM type: NNGRRT; PAM sequence: CAGAAT
  source 1..20: mol_type = other DNA
caaggtctagaggatgaccg

SEQ ID NO: 7492 - DNA, 20 bp, synthetic construct
  misc_feature 1..20: note = Description of Artificial Sequence: Synthetic oligonucleotide
  misc_feature 1..20: note = Target: SCN10A; (-) strand; PAM type: NNGRRT; PAM sequence: GAGGAT
  source 1..20: mol_type = other DNA
attattaacaacaaggtcta

SEQ ID NO: 7493 - DNA, 20 bp, synthetic construct
  misc_feature 1..20: note = Description of Artificial Sequence: Synthetic oligonucleotide
  misc_feature 1..20: note = Target: SCN10A; (-) strand; PAM type: NNGRRT; PAM sequence: ATGAAT
  source 1..20: mol_type = other DNA
aggagttcaaaatataggaa

SEQ ID NO: 7494 - DNA, 20 bp, synthetic construct
  misc_feature 1..20: note = Description of Artificial Sequence: Synthetic oligonucleotide
  misc_feature 1..20: note = Target: SCN10A; (-) strand; PAM type: NNGRRT; PAM sequence: AGGAGT
  source 1..20: mol_type = other DNA
aattggagttgcaggactaa

SEQ ID NO: 7495 - DNA, 20 bp, synthetic construct
  misc_feature 1..20: note = Description of Artificial Sequence: Synthetic oligonucleotide
  misc_feature 1..20: note = Target: SCN10A; (-) strand; PAM type: NNGRRT; PAM sequence: TGGAGT
  source 1..20: mol_type = other DNA
tggatggggcagatattaat

SEQ ID NO: 7496 - DNA, 20 bp, synthetic construct
  misc_feature 1..20: note = Description of Artificial Sequence: Synthetic oligonucleotide
  misc_feature 1..20: note = Target: SCN10A; (-) strand; PAM type: NNGRRT; PAM sequence: CTGGAT
  source 1..20: mol_type = other DNA
aatgtcagcagtttaaagga

SEQ ID NO: 7497 - DNA, 20 bp, synthetic construct
  misc_feature 1..20: note = Description of Artificial Sequence: Synthetic oligonucleotide
  misc_feature 1..20: note = Target: SCN10A; (-) strand; PAM type: NNGRRT; PAM sequence: ATGGAT
  source 1..20: mol_type = other DNA
acaagggagtagttagagag

SEQ ID NO: 7498 - DNA, 20 bp, synthetic construct
  misc_feature 1..20: note = Description of Artificial Sequence: Synthetic oligonucleotide
  misc_feature 1..20: note = Target: SCN10A; (-) strand; PAM type: NNGRRT; PAM sequence: GGGAGT
  source 1..20: mol_type = other DNA
ggaattgagggtgcctacaa

SEQ ID NO: 7499 - DNA, 20 bp, synthetic construct
  misc_feature 1..20: note = Description of Artificial Sequence: Synthetic oligonucleotide
  misc_feature 1..20: note = Target: SCN10A; (-) strand; PAM type: NNGRRT; PAM sequence: GAGGGT
  source 1..20: mol_type = other DNA
aggagaggggcaaaggaatt

SEQ ID NO: 7500 - DNA, 20 bp, synthetic construct
  misc_feature 1..20: note = Description of Artificial Sequence: Synthetic oligonucleotide
  misc_feature 1..20: note = Target: SCN10A; (-) strand; PAM type: NNGRRT; PAM sequence: AGGAAT
  source 1..20: mol_type = other DNA
atgaaggaggagaggggcaa

SEQ ID NO: 7501 - DNA, 20 bp, synthetic construct
  misc_feature 1..20: note = Description of Artificial Sequence: Synthetic oligonucleotide
  misc_feature 1..20: note = Target: SCN10A; (-) strand; PAM type: NNGRRT; PAM sequence: TTGGGT
  source 1..20: mol_type = other DNA
agtacagagtagtctacaaa

SEQ ID NO: 7502 - DNA, 20 bp, synthetic construct
  misc_feature 1..20: note = Description of Artificial Sequence: Synthetic oligonucleotide
  misc_feature 1..20: note = Target: SCN10A; (-) strand; PAM type: NNGRRT; PAM sequence: CAGAGT
  source 1..20: mol_type = other DNA
cagctggttgggtgcaagta

SEQ ID NO: 7503 - DNA, 20 bp, synthetic construct
  misc_feature 1..20: note = Description of Artificial Sequence: Synthetic oligonucleotide
  misc_feature 1..20: note = Target: SCN10A; (-) strand; PAM type: NNGRRT; PAM sequence: TTGGGT
  source 1..20: mol_type = other DNA
ttccagccaggtccagctgg

SEQ ID NO: 7504 - DNA, 20 bp, synthetic construct
  misc_feature 1..20: note = Description of Artificial Sequence: Synthetic oligonucleotide
  misc_feature 1..20: note = Target: SCN10A; (-) strand; PAM type: NNGRRT; PAM sequence: GAGGGT
  source 1..20: mol_type = other DNA
tggggctcacagatctctag

SEQ ID NO: 7505 - DNA, 20 bp, synthetic construct
  misc_feature 1..20: note = Description of Artificial Sequence: Synthetic oligonucleotide
  misc_feature 1..20: note = Target: SCN10A; (-) strand; PAM type: NNGRRT; PAM sequence: TGGAAT
  source 1..20: mol_type = other DNA
catctggaagaatgaaggaa

SEQ ID NO: 7506 - DNA, 20 bp, synthetic construct
  misc_feature 1..20: note = Description of Artificial Sequence: Synthetic oligonucleotide
  misc_feature 1..20: note = Target: SCN10A; (-) strand; PAM type: NNGRRT; PAM sequence: AGGAAT
  source 1..20: mol_type = other DNA
acagtcatctggaagaatga

SEQ ID NO: 7507 - DNA, 20 bp, synthetic construct
  misc_feature 1..20: note = Description of Artificial Sequence: Synthetic oligonucleotide
  misc_feature 1..20: note = Target: SCN10A; (-) strand; PAM type: NNGRRT; PAM sequence: AAGAAT
  source 1..20: mol_type = other DNA
agtgagaaacagtcatctgg

SEQ ID NO: 7508 - DNA, 20 bp, synthetic construct
  misc_feature 1..20: note = Description of Artificial Sequence: Synthetic oligonucleotide
  misc_feature 1..20: note = Target: SCN10A; (-) strand; PAM type: NNGRRT; PAM sequence: GAGAGT
  source 1..20: mol_type = other DNA
taaaagggagctcatcaaca

SEQ ID NO: 7509 - DNA, 20 bp, synthetic construct
  misc_feature 1..20: note = Description of Artificial Sequence: Synthetic oligonucleotide
  misc_feature 1..20: note = Target: SCN10A; (-) strand; PAM type: NNGRRT; PAM sequence: CTGAGT
  source 1..20: mol_type = other DNA
tttgtgaactagtctatatt

SEQ ID NO: 7510 - DNA, 20 bp, synthetic construct
  misc_feature 1..20: note = Description of Artificial Sequence: Synthetic oligonucleotide
  misc_feature 1..20: note = Target: SCN10A; (-) strand; PAM type: NNGRRT; PAM sequence: CAGAAT
  source 1..20: mol_type = other DNA
cactgtgtggggcacgaaga

SEQ ID NO: 7511 - DNA, 20 bp, synthetic construct
  misc_feature 1..20: note = Description of Artificial Sequence: Synthetic oligonucleotide
  misc_feature 1..20: note = Target: SCN10A; (-) strand; PAM type: NNGRRT; PAM sequence: AGGGGT
  source 1..20: mol_type = other DNA
aagagcccggcacaagtggg

SEQ ID NO: 7512 - DNA, 20 bp, synthetic construct
  misc_feature 1..20: note = Description of Artificial Sequence: Synthetic oligonucleotide
  misc_feature 1..20: note = Target: SCN10A; (-) strand; PAM type: NNGRRT; PAM sequence: TTGAAT
  source 1..20: mol_type = other DNA
aggtctggatgatgcaggcc

SEQ ID NO: 7513 - DNA, 20 bp, synthetic construct
  misc_feature 1..20: note = Description of Artificial Sequence: Synthetic oligonucleotide
  misc_feature 1..20: note = Target: SCN10A; (-) strand; PAM type: NNGRRT; PAM sequence: CTGGAT
  source 1..20: mol_type = other DNA
ggtctggaagggagacaggt

SEQ ID NO: 7514 - DNA, 20 bp, synthetic construct
  misc_feature 1..20: note = Description of Artificial Sequence: Synthetic oligonucleotide
  misc_feature 1..20: note = Target: SCN10A; (-) strand; PAM type: NNGRRT; PAM sequence: TGGGGT
  source 1..20: mol_type = other DNA
agcagtaatgaaagagagca

SEQ ID NO: 7515 - DNA, 20 bp, synthetic construct
  misc_feature 1..20: note = Description of Artificial Sequence: Synthetic oligonucleotide
  misc_feature 1..20: note = Target: SCN10A; (-) strand; PAM type: NNGRRT; PAM sequence: AGGAAT
  source 1..20: mol_type = other DNA
aagtgtagaaaactcttgca

SEQ ID NO: 7516 - DNA, 20 bp, synthetic construct
  misc_feature 1..20: note = Description of Artificial Sequence: Synthetic oligonucleotide
  misc_feature 1..20: note = Target: SCN10A; (-) strand; PAM type: NNGRRT; PAM sequence: TTGAAT
  source 1..20: mol_type = other DNA
gagaactggaaatcaattat

SEQ ID NO: 7517 - DNA, 20 bp, synthetic construct
  misc_feature 1..20: note = Description of Artificial Sequence: Synthetic oligonucleotide
  misc_feature 1..20: note = Target: SCN10A; (-) strand; PAM type: NNGRRT; PAM sequence: AAGGGT
  source 1..20: mol_type = other DNA
taaattctgtcaaatgttat

SEQ ID NO: 7518 - DNA, 20 bp, synthetic construct
  misc_feature 1..20: note = Description of Artificial Sequence: Synthetic oligonucleotide
  misc_feature 1..20: note = Target: SCN10A; (-) strand; PAM type: NNGRRT; PAM sequence: TTGAGT
  source 1..20: mol_type = other DNA
agaagctaaggtgagaatgc

SEQ ID NO: 7519 - DNA, 20 bp, synthetic construct
  misc_feature 1..20: note = Description of Artificial Sequence: Synthetic oligonucleotide
  misc_feature 1..20: note = Target: SCN10A; (-) strand; PAM type: NNGRRT; PAM sequence: GAGAAT
  source 1..20: mol_type = other DNA
aaacacagagaagctaaggt

SEQ ID NO: 7520 - DNA, 20 bp, synthetic construct
  misc_feature 1..20: note = Description of Artificial Sequence: Synthetic oligonucleotide
  misc_feature 1..20: note = Target: SCN10A; (-) strand; PAM type: NNGRRT; PAM sequence: GGGAAT
  source 1..20: mol_type = other DNA
aattggacacataatttggt

SEQ ID NO: 7521 - DNA, 20 bp, synthetic construct
  misc_feature 1..20: note = Description of Artificial Sequence: Synthetic oligonucleotide
  misc_feature 1..20: note = Target: SCN10A; (-) strand; PAM type: NNGRRT; PAM sequence: AGGGAT
  source 1..20: mol_type = other DNA
gataagcctagtgttcagga

SEQ ID NO: 7522 - DNA, 20 bp, synthetic construct
  misc_feature 1..20: note = Description of Artificial Sequence: Synthetic oligonucleotide
  misc_feature 1..20: note = Target: SCN10A; (-) strand; PAM type: NNGRRT; PAM sequence: AGGAAT
  source 1..20: mol_type = other DNA
tcaagatgcatgtcttgccg

SEQ ID NO: 7523 - DNA, 20 bp, synthetic construct
  misc_feature 1..20: note = Description of Artificial Sequence: Synthetic oligonucleotide
  misc_feature 1..20: note = Target: SCN10A; (-) strand; PAM type: NNGRRT; PAM sequence: CAGGAT
  source 1..20: mol_type = other DNA
gggattgttgattttggtcc

SEQ ID NO: 7524 - DNA, 20 bp, synthetic construct
  misc_feature 1..20: note = Description of Artificial Sequence: Synthetic oligonucleotide
  misc_feature 1..20: note = Target: SCN10A; (-) strand; PAM type: NNGRRT; PAM sequence: AGGGAT
  source 1..20: mol_type = other DNA
ttcttgcttttgttccaaac

SEQ ID NO: 7525 - DNA, 20 bp, synthetic construct
  misc_feature 1..20: note = Description of Artificial Sequence: Synthetic oligonucleotide
  misc_feature 1..20: note = Target: SCN10A; (-) strand; PAM type: NNGRRT; PAM sequence: CAGGAT
  source 1..20: mol_type = other DNA
ggggacctctttaagcgtaa

SEQ ID NO: 7526 - DNA, 20 bp, synthetic construct
  misc_feature 1..20: note = Description of Artificial Sequence: Synthetic oligonucleotide
  misc_feature 1..20: note = Target: SCN10A; (-) strand; PAM type: NNGRRT; PAM sequence: GAGAAT
  source 1..20: mol_type = other DNA
agactcctgcagtggcagga

SEQ ID NO: 7527 - DNA, 20 bp, synthetic construct
  misc_feature 1..20: note = Description of Artificial Sequence: Synthetic oligonucleotide
  misc_feature 1..20: note = Target: SCN10A; (-) strand; PAM type: NNGRRT; PAM sequence: AAGGGT
  source 1..20: mol_type = other DNA
gactgaagattaagggaaga

SEQ ID NO: 7528 - DNA, 20 bp, synthetic construct
  misc_feature 1..20: note = Description of Artificial Sequence: Synthetic oligonucleotide
  misc_feature 1..20: note = Target: SCN10A; (-) strand; PAM type: NNGRRT; PAM sequence: GAGAAT
  source 1..20: mol_type = other DNA
tgctaatgggaaggatctgg

SEQ ID NO: 7529 - DNA, 20 bp, synthetic construct
  misc_feature 1..20: note = Description of Artificial Sequence: Synthetic oligonucleotide
  misc_feature 1..20: note = Target: SCN10A; (-) strand; PAM type: NNGRRT; PAM sequence: AAGGAT
  source 1..20: mol_type = other DNA
catatttgcatgctaatggg

SEQ ID NO: 7530 - DNA, 20 bp, synthetic construct
  misc_feature 1..20: note = Description of Artificial Sequence: Synthetic oligonucleotide
  misc_feature 1..20: note = Target: SCN10A; (-) strand; PAM type: NNGRRT; PAM sequence: GGGAGT
  source 1..20: mol_type = other DNA
tttttggtttttgtgtttgg

SEQ ID NO: 7531 - DNA, 20 bp, synthetic construct
  misc_feature 1..20: note = Description of Artificial Sequence: Synthetic oligonucleotide
  misc_feature 1..20: note = Target: SCN10A; (-) strand; PAM type: NNGRRT; PAM sequence: GAGAAT
  source 1..20: mol_type = other DNA
agatggcactagggagtagg

SEQ ID NO: 7532 - DNA, 20 bp, synthetic construct
  misc_feature 1..20: note = Description of Artificial Sequence: Synthetic oligonucleotide
  misc_feature 1..20: note = Target: SCN10A; (-) strand; PAM type: NNGRRT; PAM sequence: GGGAGT
  source 1..20: mol_type = other DNA
gagatagtaagatggcacta

SEQ ID NO: 7533 - DNA, 20 bp, synthetic construct
  misc_feature 1..20: note = Description of Artificial Sequence: Synthetic oligonucleotide
  misc_feature 1..20: note = Target: SCN10A; (-) strand; PAM type: NNGRRT; PAM sequence: GCGGGT
  source 1..20: mol_type = other DNA
atattgaaggggcttaaaga

SEQ ID NO: 7534 - DNA, 20 bp, synthetic construct
  misc_feature 1..20: note = Description of Artificial Sequence: Synthetic oligonucleotide
  misc_feature 1..20: note = Target: SCN10A; (-) strand; PAM type: NNGRRT; PAM sequence: AAGGGT
  source 1..20: mol_type = other DNA
aaagaggattaatggagtaa

SEQ ID NO: 7535 - DNA, 20 bp, synthetic construct
  misc_feature 1..20: note = Description of Artificial Sequence: Synthetic oligonucleotide
  misc_feature 1..20: note = Target: SCN10A; (-) strand; PAM type: NNGRRT; PAM sequence: TGGAGT
  source 1..20: mol_type = other DNA
tctaagcaaaagaggattaa

SEQ ID NO: 7536 - DNA, 20 bp, synthetic construct
  misc_feature 1..20: note = Description of Artificial Sequence: Synthetic oligonucleotide
  misc_feature 1..20: note = Target: SCN10A; (-) strand; PAM type: NNGRRT; PAM sequence: GAGGAT
  source 1..20: mol_type = other DNA
ctttggtgatctaagcaaaa

SEQ ID NO: 7537 - DNA, 20 bp, synthetic construct
  misc_feature 1..20: note = Description of Artificial Sequence: Synthetic oligonucleotide
  misc_feature 1..20: note = Target: SCN10A; (-) strand; PAM type: NNGRRT; PAM sequence: ATGGAT
  source 1..20: mol_type = other DNA
ggtccaggggctttagtcac

SEQ ID NO: 7538 - DNA, 20 bp, synthetic construct
  misc_feature 1..20: note = Description of Artificial Sequence: Synthetic oligonucleotide
  misc_feature 1..20: note = Target: SCN10A; (-) strand; PAM type: NNGRRT; PAM sequence: AAGAAT
  source 1..20: mol_type = other DNA
agagtaaaaatttcttcaga

SEQ ID NO: 7539 - DNA, 20 bp, synthetic construct
  misc_feature 1..20: note = Description of Artificial Sequence: Synthetic oligonucleotide
  misc_feature 1..20: note = Target: SCN10A; (-) strand; PAM type: NNGRRT; PAM sequence: AAGAGT
  source 1..20: mol_type = other DNA
gaagaatacaatgcagagcc

SEQ ID NO: 7540 - DNA, 20 bp, synthetic construct
  misc_feature 1..20: note = Description of Artificial Sequence: Synthetic oligonucleotide
  misc_feature 1..20: note = Target: SCN10A; (-) strand; PAM type: NNGRRT; PAM sequence: AAGAAT
  source 1..20: mol_type = other DNA
agaaataggaaaagatctag

SEQ ID NO: 7541 - DNA, 20 bp, synthetic construct
  misc_feature 1..20: note = Description of Artificial Sequence: Synthetic oligonucleotide
  misc_feature 1..20: note = Target: SCN10A; (-) strand; PAM type: NNGRRT; PAM sequence: AAGGGT
  source 1..20: mol_type = other DNA
aactggatgagttaacacag

SEQ ID NO: 7542 - DNA, 20 bp, synthetic construct
  misc_feature 1..20: note = Description of Artificial Sequence: Synthetic oligonucleotide
  misc_feature 1..20: note = Target: SCN10A; (-) strand; PAM type: NNGRRT; PAM sequence: ATGAGT
  source 1..20: mol_type = other DNA
ttttgaaaagatgcaactgg

SEQ ID NO: 7543 - DNA, 20 bp, synthetic construct
  misc_feature 1..20: note = Description of Artificial Sequence: Synthetic oligonucleotide
  misc_feature 1..20: note = Target: SCN10A; (-) strand; PAM type: NNGRRT; PAM sequence: CTGGAT
  source 1..20: mol_type = other DNA
gtaattttgaaaagatgcaa

SEQ ID NO: 7544 - DNA, 20 bp, synthetic construct
  misc_feature 1..20: note = Description of Artificial Sequence: Synthetic oligonucleotide
  misc_feature 1..20: note = Target: SCN10A; (-) strand; PAM type: NNGRRT; PAM sequence: TTGAAT
  source 1..20: mol_type = other DNA
tatatatatttgaaagcagt

SEQ ID NO: 7545 - DNA, 20 bp, synthetic construct
  misc_feature 1..20: note = Description of Artificial Sequence: Synthetic oligonucleotide
  misc_feature 1..20: note = Target: SCN10A; (-) strand; PAM type: NNGRRT; PAM sequence: AGGGGT
  source 1..20: mol_type = other DNA
ggaagttgactttaggatat

SEQ ID NO: 7546 - DNA, 20 bp, synthetic construct
  misc_feature 1..20: note = Description of Artificial Sequence: Synthetic oligonucleotide
  misc_feature 1..20: note = Target: SCN10A; (-) strand; PAM type: NNGRRT; PAM sequence: TAGGAT
  source 1..20: mol_type = other DNA
gtccagtaggaagttgactt

SEQ ID NO: 7547 - DNA, 20 bp, synthetic construct
  misc_feature 1..20: note = Description of Artificial Sequence: Synthetic oligonucleotide
  misc_feature 1..20: note = Target: SCN10A; (-) strand; PAM type: NNGRRT; PAM sequence: AGGGGT
  source 1..20: mol_type = other DNA
tgcccttggagcatctaggt

SEQ ID NO: 7548 - DNA, 20 bp, synthetic construct
  misc_feature 1..20: note = Description of Artificial Sequence: Synthetic oligonucleotide
  misc_feature 1..20: note = Target: SCN10A; (-) strand; PAM type: NNGRRT; PAM sequence: TTGGGT
  source 1..20: mol_type = other DNA
tgagttgagtctgggatata

SEQ ID NO: 7549 - DNA, 20 bp, synthetic construct
  misc_feature 1..20: note = Description of Artificial Sequence: Synthetic oligonucleotide
  misc_feature 1..20: note = Target: SCN10A; (-) strand; PAM type: NNGRRT; PAM sequence: TGGGAT
  source 1..20: mol_type = other DNA
agaagattatgagttgagtc

SEQ ID NO: 7550 - DNA, 20 bp, synthetic construct
  misc_feature 1..20: note = Description of Artificial Sequence: Synthetic oligonucleotide
  misc_feature 1..20: note = Target: SCN10A; (-) strand; PAM type: NNGRRT; PAM sequence: TTGAGT
  source 1..20: mol_type = other DNA
agatgaaagaagattatgag

SEQ ID NO: 7551 - DNA, 20 bp, synthetic construct
  misc_feature 1..20: note = Description of Artificial Sequence: Synthetic oligonucleotide
  misc_feature 1..20: note = Target: SCN10A; (-) strand; PAM type: NNGRRT; PAM sequence: ATGAGT
  source 1..20: mol_type = other DNA
gggaaagatgaaagaagatt

SEQ ID NO: 7552 - DNA, 20 bp, synthetic construct
  misc_feature 1..20: note = Description of Artificial Sequence: Synthetic oligonucleotide
  misc_feature 1..20: note = Target: SCN10A; (-) strand; PAM type: NNGRRT; PAM sequence: AAGGAT
  source 1..20: mol_type = other DNA
gtggggctgatgggaaatgg

SEQ ID NO: 7553 - DNA, 20 bp, synthetic construct
  misc_feature 1..20: note = Description of Artificial Sequence: Synthetic oligonucleotide
  misc_feature 1..20: note = Target: SCN10A; (-) strand; PAM type: NNGRRT; PAM sequence: TGGGGT
  source 1..20: mol_type = other DNA
agatggcagtgcttgaactc

SEQ ID NO: 7554 - DNA, 20 bp, synthetic construct
  misc_feature 1..20: note = Description of Artificial Sequence: Synthetic oligonucleotide
  misc_feature 1..20: note = Target: SCN10A; (-) strand; PAM type: NNGRRT; PAM sequence: CTGGAT
  source 1..20: mol_type = other DNA
tgcattttataaaagttact

SEQ ID NO: 7555 - DNA, 20 bp, synthetic construct
  misc_feature 1..20: note = Description of Artificial Sequence: Synthetic oligonucleotide
  misc_feature 1..20: note = Target: SCN10A; (-) strand; PAM type: NNGRRT; PAM sequence: AAGGAT
  source 1..20: mol_type = other DNA
agaggagtgaggtgccatta

SEQ ID NO: 7556 - DNA, 20 bp, synthetic construct
  misc_feature 1..20: note = Description of Artificial Sequence: Synthetic oligonucleotide
  misc_feature 1..20: note = Target: SCN10A; (-) strand; PAM type: NNGRRT; PAM sequence: AGGAGT
  source 1..20: mol_type = other DNA
atatgggacttcatgctaag

SEQ ID NO: 7557 - DNA, 20 bp, synthetic construct
  misc_feature 1..20: note = Description of Artificial Sequence: Synthetic oligonucleotide
  misc_feature 1..20: note = Target: SCN10A; (-) strand; PAM type: NNGRRT; PAM sequence: AAGGAT
  source 1..20: mol_type = other DNA
agaaactcctagactgcatt

SEQ ID NO: 7558 - DNA, 20 bp, synthetic construct
  misc_feature 1..20: note = Description of Artificial Sequence: Synthetic oligonucleotide
  misc_feature 1..20: note = Target: SCN10A; (-) strand; PAM type: NNGRRT; PAM sequence: ATGAGT
  source 1..20: mol_type = other DNA
ctgaaaataaggctagaggg

SEQ ID NO: 7559 - DNA, 20 bp, synthetic construct
  misc_feature 1..20: note = Description of Artificial Sequence: Synthetic oligonucleotide
  misc_feature 1..20: note = Target: SCN10A; (-) strand; PAM type: NNGRRT; PAM sequence: AGGGAT
  source 1..20: mol_type = other DNA
agaactgaaaataaggctag

SEQ ID NO: 7560 - DNA, 20 bp, synthetic construct
  misc_feature 1..20: note = Description of Artificial Sequence: Synthetic oligonucleotide
  misc_feature 1..20: note = Target: SCN10A; (-) strand; PAM type: NNGRRT; PAM sequence: AGGAAT
  source 1..20: mol_type = other DNA
gaagagagaataacatttga

SEQ ID NO: 7561 - DNA, 20 bp, synthetic construct
  misc_feature 1..20: note = Description of Artificial Sequence: Synthetic oligonucleotide
  misc_feature 1..20: note = Target: SCN10A; (-) strand; PAM type: NNGRRT; PAM sequence: GAGAAT
  source 1..20: mol_type = other DNA
aaggactgcaaagcagaaga

SEQ ID NO: 7562 - DNA, 20 bp, synthetic construct
  misc_feature 1..20: note = Description of Artificial Sequence: Synthetic oligonucleotide
  misc_feature 1..20: note = Target: SCN10A; (-) strand; PAM type: NNGRRT; PAM sequence: GGGAAT
  source 1..20: mol_type = other DNA
gtaagatttgcctggagcca

SEQ ID NO: 7563 - DNA, 20 bp, synthetic construct
  misc_feature 1..20: note = Description of Artificial Sequence: Synthetic oligonucleotide
  misc_feature 1..20: note = Target: SCN10A; (-) strand; PAM type: NNGRRT; PAM sequence: CAGGAT
  source 1..20: mol_type = other DNA
agtgccttaaagaggaagtg

SEQ ID NO: 7564 - DNA, 20 bp, synthetic construct
  misc_feature 1..20: note = Description of Artificial Sequence: Synthetic oligonucleotide
  misc_feature 1..20: note = Target: SCN10A; (-) strand; PAM type: NNGRRT; PAM sequence: GTGAGT
  source 1..20: mol_type = other DNA
gcagtgagcttactggagtg

SEQ ID NO: 7565 - DNA, 20 bp, synthetic construct
  misc_feature 1..20: note = Description of Artificial Sequence: Synthetic oligonucleotide
  misc_feature 1..20: note = Target: SCN10A; (-) strand; PAM type: NNGRRT; PAM sequence: TGGAGT
  source 1..20: mol_type = other DNA
ggtcacagcagtgagcttac

SEQ ID NO: 7566 - DNA, 20 bp, synthetic construct
  misc_feature 1..20: note = Description of Artificial Sequence: Synthetic oligonucleotide
  misc_feature 1..20: note = Target: SCN10A; (-) strand; PAM type: NNGRRT; PAM sequence: CTGGGT
  source 1..20: mol_type = other DNA
ccaagccagaattccagaag

SEQ ID NO: 7567 - DNA, 20 bp, synthetic construct
  misc_feature 1..20: note = Description of Artificial Sequence: Synthetic oligonucleotide
  misc_feature 1..20: note = Target: SCN10A; (-) strand; PAM type: NNGRRT; PAM sequence: CAGAAT
  source 1..20: mol_type = other DNA
gatttcactgttgtccaagc

SEQ ID NO: 7568 - DNA, 20 bp, synthetic construct
  misc_feature 1..20: note = Description of Artificial Sequence: Synthetic oligonucleotide
  misc_feature 1..20: note = Target: SCN10A; (-) strand; PAM type: NNGRRT; PAM sequence: AGGAGT
  source 1..20: mol_type = other DNA
aaagtttggcccaaaccaac

SEQ ID NO: 7569 - DNA, 20 bp, synthetic construct
  misc_feature 1..20: note = Description of Artificial Sequence: Synthetic oligonucleotide
  misc_feature 1..20: note = Target: SCN10A; (-) strand; PAM type: NNGRRT; PAM sequence: AGGGAT
  source 1..20: mol_type = other DNA
ataaaggccacctctttaag

SEQ ID NO: 7570 - DNA, 20 bp, synthetic construct
  misc_feature 1..20: note = Description of Artificial Sequence: Synthetic oligonucleotide
  misc_feature 1..20: note = Target: SCN10A; (-) strand; PAM type: NNGRRT; PAM sequence: TAGGAT
  source 1..20: mol_type = other DNA
tcatgctgccagagtcgtaa

SEQ ID NO: 7571 - DNA, 20 bp, synthetic construct
  misc_feature 1..20: note = Description of Artificial Sequence: Synthetic oligonucleotide
  misc_feature 1..20: note = Target: SCN10A; (-) strand; PAM type: NNGRRT; PAM sequence: CAGAGT
  source 1..20: mol_type = other DNA
tgaaggatgcttcatgctgc

SEQ ID NO: 7572 - DNA, 20 bp, synthetic construct
  misc_feature 1..20: note = Description of Artificial Sequence: Synthetic oligonucleotide
  misc_feature 1..20: note = Target: SCN10A; (-) strand; PAM type: NNGRRT; PAM sequence: AAGGAT
  source 1..20: mol_type = other DNA
ttacacacatgagacacctg

SEQ ID NO: 7573 - DNA, 20 bp, synthetic construct
  misc_feature 1..20: note = Description of Artificial Sequence: Synthetic oligonucleotide
  misc_feature 1..20: note = Target: SCN10A; (-) strand; PAM type: NNGRRT; PAM sequence: TTGGAT
  source 1..20: mol_type = other DNA
gggcacatcatcttctctgg

SEQ ID NO: 7574 - DNA, 20 bp, synthetic construct
  misc_feature 1..20: note = Description of Artificial Sequence: Synthetic oligonucleotide
  misc_feature 1..20: note = Target: SCN10A; (-) strand; PAM type: NNGRRT; PAM sequence: TAGAGT
  source 1..20: mol_type = other DNA
caaggaagatgctgtgacag

SEQ ID NO: 7575 - DNA, 20 bp, synthetic construct
  misc_feature 1..20: note = Description of Artificial Sequence: Synthetic oligonucleotide
  misc_feature 1..20: note = Target: SCN10A; (-) strand; PAM type: NNGRRT; PAM sequence: TAGGGT
  source 1..20: mol_type = other DNA
aataggcaaatatgttgggg

SEQ ID NO: 7576 - DNA, 20 bp, synthetic construct
  misc_feature 1..20: note = Description of Artificial Sequence: Synthetic oligonucleotide
  misc_feature 1..20: note = Target: SCN10A; (-) strand; PAM type: NNGRRT; PAM sequence: TGGGGT
  source 1..20: mol_type = other DNA
taagtaataggcaaatatgt

SEQ ID NO: 7577 - DNA, 20 bp, synthetic construct
  misc_feature 1..20: note = Description of Artificial Sequence: Synthetic oligonucleotide
  misc_feature 1..20: note = Target: SCN10A; (-) strand; PAM type: NNGRRT; PAM sequence: GGGAGT
  source 1..20: mol_type = other DNA
atatttgggtggttggcggc

SEQ ID NO: 7578 - DNA, 20 bp, synthetic construct
  misc_feature 1..20: note = Description of Artificial Sequence: Synthetic oligonucleotide
  misc_feature 1..20: note = Target: SCN10A; (-) strand; PAM type: NNGRRT; PAM sequence: TTGGGT
  source 1..20: mol_type = other DNA
tgcatgcacaaaggtgatat

SEQ ID NO: 7579 - DNA, 20 bp, synthetic construct
  misc_feature 1..20: note = Description of Artificial Sequence: Synthetic oligonucleotide
  misc_feature 1..20: note = Target: SCN10A; (-) strand; PAM type: NNGRRT; PAM sequence: ATGAGT
  source 1..20: mol_type = other DNA
tagagttttgtgaggattaa

SEQ ID NO: 7580 - DNA, 20 bp, synthetic construct
  misc_feature 1..20: note = Description of Artificial Sequence: Synthetic oligonucleotide
  misc_feature 1..20: note = Target: SCN10A; (-) strand; PAM type: NNGRRT; PAM sequence: GAGGAT
  source 1..20: mol_type = other DNA
cttatcttgtagagttttgt

SEQ ID NO: 7581 - DNA, 20 bp, synthetic construct
  misc_feature 1..20: note = Description of Artificial Sequence: Synthetic oligonucleotide
  misc_feature 1..20: note = Target: SCN10A; (-) strand; PAM type: NNGRRT; PAM sequence: TAGAGT
  source 1..20: mol_type = other DNA
gtgagaatatacttatcttg

SEQ ID NO: 7582 - DNA, 20 bp, synthetic construct
  misc_feature 1..20: note = Description of Artificial Sequence: Synthetic oligonucleotide
  misc_feature 1..20: note = Target: SCN10A; (-) strand; PAM type: NNGRRT; PAM sequence: GAGAAT
  source 1..20: mol_type = other DNA
tttttagcctgtaaagtagt

SEQ ID NO: 7583 - DNA, 20 bp, synthetic construct
  misc_feature 1..20: note = Description of Artificial Sequence: Synthetic oligonucleotide
  misc_feature 1..20: note = Target: SCN10A; (-) strand; PAM type: NNGRRT; PAM sequence: CTGGGT
  source 1..20: mol_type = other DNA
ctgctctggaacccggctgc

SEQ ID NO: 7584 - DNA, 20 bp, synthetic construct
  misc_feature 1..20: note = Description of Artificial Sequence: Synthetic oligonucleotide
  misc_feature 1..20: note = Target: SCN10A; (-) strand; PAM type: NNGRRT; PAM sequence: GAGGGT
  source 1..20: mol_type = other DNA
gggatgaatgagaggcaaca

SEQ ID NO: 7585 - DNA, 20 bp, synthetic construct
  misc_feature 1..20: note = Description of Artificial Sequence: Synthetic oligonucleotide
  misc_feature 1..20: note = Target: SCN10A; (-) strand; PAM type: NNGRRT; PAM sequence: ATGAAT
  source 1..20: mol_type = other DNA
agacaaaagaaggtcatggg

SEQ ID NO: 7586 - DNA, 20 bp, synthetic construct
  misc_feature 1..20: note = Description of Artificial Sequence: Synthetic oligonucleotide
  misc_feature 1..20: note = Target: SCN10A; (-) strand; PAM type: NNGRRT; PAM sequence: TGGGAT
  source 1..20: mol_type = other DNA
ggtaagacaaaagaaggtca

SEQ ID NO: 7587 - DNA, 20 bp, synthetic construct
  misc_feature 1..20: note = Description of Artificial Sequence: Synthetic oligonucleotide
  misc_feature 1..20: note = Target: SCN10A; (-) strand; PAM type: NNGRRT; PAM sequence: AAGAAT
  source 1..20: mol_type = other DNA
gcaagtacaatgcattctgc

SEQ ID NO: 7588 - DNA, 20 bp, synthetic construct
  misc_feature 1..20: note = Description of Artificial Sequence: Synthetic oligonucleotide
  misc_feature 1..20: note = Target: SCN10A; (-) strand; PAM type: NNGRRT; PAM sequence: AGGAAT
  source 1..20: mol_type = other DNA
cagaaatttgaattaaataa

SEQ ID NO: 7589 - DNA, 20 bp, synthetic construct
  misc_feature 1..20: note = Description of Artificial Sequence: Synthetic oligonucleotide
  misc_feature 1..20: note = Target: SCN10A; (-) strand; PAM type: NNGRRT; PAM sequence: TTGAAT
  source 1..20: mol_type = other DNA
tctccaagaagaacagaaat

SEQ ID NO: 7590 - DNA, 20 bp, synthetic construct
  misc_feature 1..20: note = Description of Artificial Sequence: Synthetic oligonucleotide
  misc_feature 1..20: note = Target: SCN10A; (-) strand; PAM type: NNGRRT; PAM sequence: ATGAAT
  source 1..20: mol_type = other DNA
cagggaaggggacatgaaag

SEQ ID NO: 7591 - DNA, 20 bp, synthetic construct
  misc_feature 1..20: note = Description of Artificial Sequence: Synthetic oligonucleotide
  misc_feature 1..20: note = Target: SCN10A; (-) strand; PAM type: NNGRRT; PAM sequence: TGGAAT
  source 1..20: mol_type = other DNA
ctgatataagcttgcgctca

SEQ ID NO: 7592 - DNA, 20 bp, synthetic construct
  misc_feature 1..20: note = Description of Artificial Sequence: Synthetic oligonucleotide
  misc_feature 1..20: note = Target: SCN10A; (-) strand; PAM type: NNGRRT; PAM sequence: TGGGAT
  source 1..20: mol_type = other DNA
tgtggcattgcttcaggtgc

SEQ ID NO: 7593 - DNA, 20 bp, synthetic construct
  misc_feature 1..20: note = Description of Artificial Sequence: Synthetic oligonucleotide
  misc_feature 1..20: note = Target: SCN10A; (-) strand; PAM type: NNGRRT; PAM sequence: TTGAAT
  source 1..20: mol_type = other DNA
tagtcatcaaacagcaaaca

SEQ ID NO: 7594 - DNA, 20 bp, synthetic construct
  misc_feature 1..20: note = Description of Artificial Sequence: Synthetic oligonucleotide
  misc_feature 1..20: note = Target: SCN10A; (-) strand; PAM type: NNGRRT; PAM sequence: TAGAAT
  source 1..20: mol_type = other DNA
ttctaacatttttcatggca

SEQ ID NO: 7595 - DNA, 20 bp, synthetic construct
  misc_feature 1..20: note = Description of Artificial Sequence: Synthetic oligonucleotide
  misc_feature 1..20: note = Target: SCN10A; (-) strand; PAM type: NNGRRT; PAM sequence: TAGAGT
  source 1..20: mol_type = other DNA
aatatcactgttcattgtaa

SEQ ID NO: 7596 - DNA, 20 bp, synthetic construct
  misc_feature 1..20: note = Description of Artificial Sequence: Synthetic oligonucleotide
  misc_feature 1..20: note = Target: SCN10A; (-) strand; PAM type: NNGRRT; PAM sequence: CTGAGT
  source 1..20: mol_type = other DNA
aagttacatttcttgcatac

SEQ ID NO: 7597 - DNA, 20 bp, synthetic construct
  misc_feature 1..20: note = Description of Artificial Sequence: Synthetic oligonucleotide
  misc_feature 1..20: note = Target: SCN10A; (-) strand; PAM type: NNGRRT; PAM sequence: TTGAAT
  source 1..20: mol_type = other DNA
gtgaggacttgaagcataaa

SEQ ID NO: 7598 - DNA, 20 bp, synthetic construct
  misc_feature 1..20: note = Description of Artificial Sequence: Synthetic oligonucleotide
  misc_feature 1..20: note = Target: SCN10A; (-) strand; PAM type: NNGRRT; PAM sequence: ATGAGT
  source 1..20: mol_type = other DNA
agtgaaggctatggaaaaag

SEQ ID NO: 7599 - DNA, 20 bp, synthetic construct
  misc_feature 1..20: note = Description of Artificial Sequence: Synthetic oligonucleotide
  misc_feature 1..20: note = Target: SCN10A; (-) strand; PAM type: NNGRRT; PAM sequence: CTGGGT
  source 1..20: mol_type = other DNA
tccagaatggcagagaggag

SEQ ID NO: 7600 - DNA, 20 bp, synthetic construct
  misc_feature 1..20: note = Description of Artificial Sequence: Synthetic oligonucleotide
  misc_feature 1..20: note = Target: SCN10A; (-) strand; PAM type: NNGRRT; PAM sequence: CAGAAT
  source 1..20: mol_type = other DNA
cagagagagccctgtggctc

SEQ ID NO: 7601 - DNA, 20 bp, synthetic construct
  misc_feature 1..20: note = Description of Artificial Sequence: Synthetic oligonucleotide
  misc_feature 1..20: note = Target: SCN10A; (-) strand; PAM type: NNGRRT; PAM sequence: TAGAGT
  source 1..20: mol_type = other DNA
caaggaagatactgtgagag

SEQ ID NO: 7602 - DNA, 20 bp, synthetic construct
  misc_feature 1..20: note = Description of Artificial Sequence: Synthetic oligonucleotide
  misc_feature 1..20: note = Target: SCN10A; (-) strand; PAM type: NNGRRT; PAM sequence: GAGAGT
  source 1..20: mol_type = other DNA
ccgctcaaggaagatactgt

SEQ ID NO: 7603 - DNA, 20 bp, synthetic construct
  misc_feature 1..20: note = Description of Artificial Sequence: Synthetic oligonucleotide
  misc_feature 1..20: note = Target: SCN10A; (-) strand; PAM type: NNGRRT; PAM sequence: TAGGAT
  source 1..20: mol_type = other DNA
aatagtcaggtatcttgggg

SEQ ID NO: 7604 - DNA, 20 bp, synthetic construct
  misc_feature 1..20: note = Description of Artificial Sequence: Synthetic oligonucleotide
  misc_feature 1..20: note = Target: SCN10A; (-) strand; PAM type: NNGRRT; PAM sequence: TGGGGT
  source 1..20: mol_type = other DNA
taaggaatagtcaggtatct

SEQ ID NO: 7605 - DNA, 20 bp, synthetic construct
  misc_feature 1..20: note = Description of Artificial Sequence: Synthetic oligonucleotide
  misc_feature 1..20: note = Target: SCN10A; (-) strand; PAM type: NNGRRT; PAM sequence: AGGAAT
  source 1..20: mol_type = other DNA
tgataaaaaggaagaaaata

SEQ ID NO: 7606 - DNA, 20 bp, synthetic construct
  misc_feature 1..20: note = Description of Artificial Sequence: Synthetic oligonucleotide
  misc_feature 1..20: note = Target: SCN10A; (-) strand; PAM type: NNGRRT; PAM sequence: GGGGGT
  source 1..20: mol_type = other DNA
attaacaaaggtgatatctg

SEQ ID NO: 7607 - DNA, 20 bp, synthetic construct
  misc_feature 1..20: note = Description of Artificial Sequence: Synthetic oligonucleotide
  misc_feature 1..20: note = Target: SCN10A; (-) strand; PAM type: NNGRRT; PAM sequence: CTGGAT
  source 1..20: mol_type = other DNA
tgtatctgttttgctcacag

SEQ ID NO: 7608 - DNA, 20 bp, synthetic construct
  misc_feature 1..20: note = Description of Artificial Sequence: Synthetic oligonucleotide
  misc_feature 1..20: note = Target: SCN10A; (-) strand; PAM type: NNGRRT; PAM sequence: TAGAGT
  source 1..20: mol_type = other DNA
attcacatgcacagaaactg

SEQ ID NO: 7609 - DNA, 20 bp, synthetic construct
  misc_feature 1..20: note = Description of Artificial Sequence: Synthetic oligonucleotide
  misc_feature 1..20: note = Target: SCN10A; (-) strand; PAM type: NNGRRT; PAM sequence: AGGGAT
  source 1..20: mol_type = other DNA
agaaaccaaaaaaatgtttg

SEQ ID NO: 7610 - DNA, 20 bp, synthetic construct
  misc_feature 1..20: note = Description of Artificial Sequence: Synthetic oligonucleotide
  misc_feature 1..20: note = Target: SCN10A; (-) strand; PAM type: NNGRRT; PAM sequence: CTGAAT
  source 1..20: mol_type = other DNA
gttttcctcccagccctagg

SEQ ID NO: 7611 - DNA, 20 bp, synthetic construct
  misc_feature 1..20: note = Description of Artificial Sequence: Synthetic oligonucleotide
  misc_feature 1..20: note = Target: SCN10A; (-) strand; PAM type: NNGRRT; PAM sequence: AGGAGT
  source 1..20: mol_type = other DNA
gtgctggtgtgcccctgaga

SEQ ID NO: 7612 - DNA, 20 bp, synthetic construct
  misc_feature 1..20: note = Description of Artificial Sequence: Synthetic oligonucleotide
  misc_feature 1..20: note = Target: SCN10A; (-) strand; PAM type: NNGRRT; PAM sequence: TTGAGT
  source 1..20: mol_type = other DNA
tggaggagttgtaagggagc

SEQ ID NO: 7613 - DNA, 20 bp, synthetic construct
  misc_feature 1..20: note = Description of Artificial Sequence: Synthetic oligonucleotide
  misc_feature 1..20: note = Target: SCN10A; (-) strand; PAM type: NNGRRT; PAM sequence: AGGAGT
  source 1..20: mol_type = other DNA
attaaactgacctaggctgg

SEQ ID NO: 7614 - DNA, 20 bp, synthetic construct
  misc_feature 1..20: note = Description of Artificial Sequence: Synthetic oligonucleotide
  misc_feature 1..20: note = Target: SCN10A; (-) strand; PAM type: NNGRRT; PAM sequence: GAGAAT
  source 1..20: mol_type = other DNA
tttttttgccttagggtatg

SEQ ID NO: 7615 - DNA, 20 bp, synthetic construct
  misc_feature 1..20: note = Description of Artificial Sequence: Synthetic oligonucleotide
  misc_feature 1..20: note = Target: SCN10A; (-) strand; PAM type: NNGRRT; PAM sequence: TAGGGT
  source 1..20: mol_type = other DNA
aatccagcctttttttgcct

SEQ ID NO: 7616 - DNA, 20 bp, synthetic construct
  misc_feature 1..20: note = Description of Artificial Sequence: Synthetic oligonucleotide
  misc_feature 1..20: note = Target: SCN10A; (-) strand; PAM type: NNGRRT; PAM sequence: GAGAGT
  source 1..20: mol_type = other DNA
caagccaaagggtagaggaa

SEQ ID NO: 7617 - DNA, 20 bp, synthetic construct
  misc_feature 1..20: note = Description of Artificial Sequence: Synthetic oligonucleotide
  misc_feature 1..20: note = Target: SCN10A; (-) strand; PAM type: NNGRRT; PAM sequence: AAGGGT
  source 1..20: mol_type = other DNA
tgtatctaagttccaagcca

SEQ ID NO: 7618 - DNA, 20 bp, synthetic construct
  misc_feature 1..20: note = Description of Artificial Sequence: Synthetic oligonucleotide
  misc_feature 1..20: note = Target: SCN10A; (-) strand; PAM type: NNGRRT; PAM sequence: GGGAAT
  source 1..20: mol_type = other DNA
tagaattctaccaatcaagt

SEQ ID NO: 7619 - DNA, 20 bp, synthetic construct
  misc_feature 1..20: note = Description of Artificial Sequence: Synthetic oligonucleotide
  misc_feature 1..20: note = Target: SCN10A; (-) strand; PAM type: NNGRRT; PAM sequence: TAGAAT
  source 1..20: mol_type = other DNA
taactaagtccttgttaatt

SEQ ID NO: 7620 - DNA, 20 bp, synthetic construct
  misc_feature 1..20: note = Description of Artificial Sequence: Synthetic oligonucleotide
  misc_feature 1..20: note = Target: SCN10A; (-) strand; PAM type: NNGRRT; PAM sequence: CTGAAT
  source 1..20: mol_type = other DNA
ttgttcaagcccacattatg

SEQ ID NO: 7621 - DNA, 20 bp, synthetic construct
  misc_feature 1..20: note = Description of Artificial Sequence: Synthetic oligonucleotide
  misc_feature 1..20: note = Target: SCN10A; (-) strand; PAM type: NNGRRT; PAM sequence: GAGAAT
  source 1..20: mol_type = other DNA
aagtgatctggcaggcatca

SEQ ID NO: 7622 - DNA, 20 bp, synthetic construct
  misc_feature 1..20: note = Description of Artificial Sequence: Synthetic oligonucleotide
  misc_feature 1..20: note = Target: SCN10A; (-) strand; PAM type: NNGRRT; PAM sequence: ATGAAT
  source 1..20: mol_type = other DNA
ttcaaaaacaaaataatttg

SEQ ID NO: 7623 - DNA, 20 bp, synthetic construct
  misc_feature 1..20: note = Description of Artificial Sequence: Synthetic oligonucleotide
  misc_feature 1..20: note = Target: SCN10A; (-) strand; PAM type: NNGRRT; PAM sequence: TGGAAT
  source 1..20: mol_type = other DNA
aagcgtccatctctgtgtac

SEQ ID NO: 7624 - DNA, 20 bp, synthetic construct
  misc_feature 1..20: note = Description of Artificial Sequence: Synthetic oligonucleotide
  misc_feature 1..20: note = Target: SCN10A; (-) strand; PAM type: NNGRRT; PAM sequence: ATGAAT
  source 1..20: mol_type = other DNA
tgttcatccactgtgtcatg

SEQ ID NO: 7625 - DNA, 20 bp, synthetic construct
  misc_feature 1..20: note = Description of Artificial Sequence: Synthetic oligonucleotide
  misc_feature 1..20: note = Target: SCN10A; (-) strand; PAM type: NNGRRT; PAM sequence: GAGGGT
  source 1..20: mol_type = other DNA
gtatcataacctccgtcctt

SEQ ID NO: 7626 - DNA, 20 bp, synthetic construct
  misc_feature 1..20: note = Description of Artificial Sequence: Synthetic oligonucleotide
  misc_feature 1..20: note = Target: SCN10A; (-) strand; PAM type: NNGRRT; PAM sequence: ATGAGT
  source 1..20: mol_type = other DNA
ctttccgggcccaaagggca

SEQ ID NO: 7627 - DNA, 20 bp, synthetic construct
  misc_feature 1..20: note = Description of Artificial Sequence: Synthetic oligonucleotide
  misc_feature 1..20: note = Target: SCN10A; (-) strand; PAM type: NNGRRT; PAM sequence: CAGAAT
  source 1..20: mol_type = other DNA
aaagaagactttcttgtcag

SEQ ID NO: 7628 - DNA, 20 bp, synthetic construct
  misc_feature 1..20: note = Description of Artificial Sequence: Synthetic oligonucleotide
  misc_feature 1..20: note = Target: SCN10A; (-) strand; PAM type: NNGRRT; PAM sequence: CTGAAT
  source 1..20: mol_type = other DNA
tgagattggccaataagagg

SEQ ID NO: 7629 - DNA, 20 bp, synthetic construct
  misc_feature 1..20: note = Description of Artificial Sequence: Synthetic oligonucleotide
  misc_feature 1..20: note = Target: SCN10A; (-) strand; PAM type: NNGRRT; PAM sequence: CAGAAT
  source 1..20: mol_type = other DNA
aatacaatgtaggatattca

SEQ ID NO: 7630 - DNA, 20 bp, synthetic construct
  misc_feature 1..20: note = Description of Artificial Sequence: Synthetic oligonucleotide
  misc_feature 1..20: note = Target: SCN10A; (-) strand; PAM type: NNGRRT; PAM sequence: TAGGAT
  source 1..20: mol_type = other DNA
ttgtttgtgtaaatacaatg

SEQ ID NO: 7631 - DNA, 20 bp, synthetic construct
  misc_feature 1..20: note = Description of Artificial Sequence: Synthetic oligonucleotide
  misc_feature 1..20: note = Target: SCN10A; (-) strand; PAM type: NNGRRT; PAM sequence: GAGGGT
  source 1..20: mol_type = other DNA
aaaaggtttctaaatagctg

SEQ ID NO: 7632 - DNA, 20 bp, synthetic construct
  misc_feature 1..20: note = Description of Artificial Sequence: Synthetic oligonucleotide
  misc_feature 1..20: note = Target: SCN10A; (-) strand; PAM type: NNGRRT; PAM sequence: CTGAGT
  source 1..20: mol_type = other DNA
ccaactgtgccagttaccac

SEQ ID NO: 7633 - DNA, 20 bp, synthetic construct
  misc_feature 1..20: note = Description of Artificial Sequence: Synthetic oligonucleotide
  misc_feature 1..20: note = Target: SCN10A; (-) strand; PAM type: NNGRRT; PAM sequence: GGGAGT
  source 1..20: mol_type = other DNA
ggcatcctgcagggctcgct

SEQ ID NO: 7634 - DNA, 20 bp, synthetic construct
  misc_feature 1..20: note = Description of Artificial Sequence: Synthetic oligonucleotide
  misc_feature 1..20: note = Target: SCN10A; (-) strand; PAM type: NNGRRT; PAM sequence: TGGAAT
  source 1..20: mol_type = other DNA
gagtaggtctccagggcaaa

SEQ ID NO: 7635 - DNA, 20 bp, synthetic construct
  misc_feature 1..20: note = Description of Artificial Sequence: Synthetic oligonucleotide
  misc_feature 1..20: note = Target: SCN10A; (-) strand; PAM type: NNGRRT; PAM sequence: GAGAGT
  source 1..20: mol_type = other DNA
cagagacagtggagaaggta

SEQ ID NO: 7636 - DNA, 20 bp, synthetic construct
  misc_feature 1..20: note = Description of Artificial Sequence: Synthetic oligonucleotide
  misc_feature 1..20: note = Target: SCN10A; (-) strand; PAM type: NNGRRT; PAM sequence: AAGGAT
  source 1..20: mol_type = other DNA
cctggccagaaccagagggt

SEQ ID NO: 7637 - DNA, 20 bp, synthetic construct
  misc_feature 1..20: note = Description of Artificial Sequence: Synthetic oligonucleotide
  misc_feature 1..20: note = Target: SCN10A; (-) strand; PAM type: NNGRRT; PAM sequence: GAGGGT
  source 1..20: mol_type = other DNA
accaaacctggccagaacca

SEQ ID NO: 7638 - DNA, 20 bp, synthetic construct
  misc_feature 1..20: note = Description of Artificial Sequence: Synthetic oligonucleotide
  misc_feature 1..20: note = Target: SCN10A; (-) strand; PAM type: NNGRRT; PAM sequence: TTGAAT
  source 1..20: mol_type = other DNA
acttgtctctccttctatcc

SEQ ID NO: 7639 - DNA, 20 bp, synthetic construct
  misc_feature 1..20: note = Description of Artificial Sequence: Synthetic oligonucleotide
  misc_feature 1..20: note = Target: SCN10A; (-) strand; PAM type: NNGRRT; PAM sequence: GAGGAT
  source 1..20: mol_type = other DNA
cagaacttgtgatcttagta

SEQ ID NO: 7640 - DNA, 20 bp, synthetic construct
  misc_feature 1..20: note = Description of Artificial Sequence: Synthetic oligonucleotide
  misc_feature 1..20: note = Target: SCN10A; (-) strand; PAM type: NNGRRT; PAM sequence: CAGAAT
  source 1..20: mol_type = other DNA
gaagggatgaaggaaaggac

SEQ ID NO: 7641 - DNA, 20 bp, synthetic construct
  misc_feature 1..20: note = Description of Artificial Sequence: Synthetic oligonucleotide
  misc_feature 1..20: note = Target: SCN10A; (-) strand; PAM type: NNGRRT; PAM sequence: AGGGAT
  source 1..20: mol_type = other DNA
ctgttacatgcctaggctga

SEQ ID NO: 7642 - DNA, 20 bp, synthetic construct
  misc_feature 1..20: note = Description of Artificial Sequence: Synthetic oligonucleotide
  misc_feature 1..20: note = Target: SCN10A; (-) strand; PAM type: NNGRRT; PAM sequence: ATGAAT
  source 1..20: mol_type = other DNA
gtgtgggctgggcttaggga

SEQ ID NO: 7643 - DNA, 20 bp, synthetic construct
  misc_feature 1..20: note = Description of Artificial Sequence: Synthetic oligonucleotide
  misc_feature 1..20: note = Target: SCN10A; (-) strand; PAM type: NNGRRT; PAM sequence: GGGAAT
  source 1..20: mol_type = other DNA
agaggtgtgggctgggctta

SEQ ID NO: 7644 - DNA, 20 bp, synthetic construct
  misc_feature 1..20: note = Description of Artificial Sequence: Synthetic oligonucleotide
  misc_feature 1..20: note = Target: SCN10A; (-) strand; PAM type: NNGRRT; PAM sequence: GAGAGT
  source 1..20: mol_type = other DNA
cactccgatgggctaataga

SEQ ID NO: 7645 - DNA, 20 bp, synthetic construct
  misc_feature 1..20: note = Description of Artificial Sequence: Synthetic oligonucleotide
  misc_feature 1..20: note = Target: SCN10A; (-) strand; PAM type: NNGRRT; PAM sequence: CAGGGT
  source 1..20: mol_type = other DNA
tgactcaatgtcatgtgatt

SEQ ID NO: 7646 - DNA, 20 bp, synthetic construct
  misc_feature 1..20: note = Description of Artificial Sequence: Synthetic oligonucleotide
  misc_feature 1..20: note = Target: SCN10A; (-) strand; PAM type: NNGRRT; PAM sequence: TAGAGT
  source 1..20: mol_type = other DNA
ccactgatacagataagtct

SEQ ID NO: 7647 - DNA, 20 bp, synthetic construct
  misc_feature 1..20: note = Description of Artificial Sequence: Synthetic oligonucleotide
  misc_feature 1..20: note = Target: SCN10A; (-) strand; PAM type: NNGRRT; PAM sequence: CAGAAT
  source 1..20: mol_type = other DNA
ggatacagcgcaattgcaga

SEQ ID NO: 7648 - DNA, 20 bp, synthetic construct
  misc_feature 1..20: note = Description of Artificial Sequence: Synthetic oligonucleotide
  misc_feature 1..20: note = Target: SCN10A; (-) strand; PAM type: NNGRRT; PAM sequence: AGGGAT
  source 1..20: mol_type = other DNA
tttgccctctctggctagcc

SEQ ID NO: 7649 - DNA, 20 bp, synthetic construct
  misc_feature 1..20: note = Description of Artificial Sequence: Synthetic oligonucleotide
  misc_feature 1..20: note = Target: SCN10A; (-) strand; PAM type: NNGRRT; PAM sequence: GTGAGT
  source 1..20: mol_type = other DNA
tcctcattggattgggagct

SEQ ID NO: 7650 - DNA, 20 bp, synthetic construct
  misc_feature 1..20: note = Description of Artificial Sequence: Synthetic oligonucleotide
  misc_feature 1..20: note = Target: SCN10A; (-) strand; PAM type: NNGRRT; PAM sequence: TTGGAT
  source 1..20: mol_type = other DNA
ggcaagtcagggattcctca

SEQ ID NO: 7651 - DNA, 20 bp, synthetic construct
  misc_feature 1..20: note = Description of Artificial Sequence: Synthetic oligonucleotide
  misc_feature 1..20: note = Target: SCN10A; (-) strand; PAM type: NNGRRT; PAM sequence: AGGGAT
  source 1..20: mol_type = other DNA
gcagagtgtaatggcaagtc

SEQ ID NO: 7652 - DNA, 20 bp, synthetic construct
  misc_feature 1..20: note = Description of Artificial Sequence: Synthetic oligonucleotide
  misc_feature 1..20: note = Target: SCN10A; (-) strand; PAM type: NNGRRT; PAM sequence: CAGAGT
  source 1..20: mol_type = other DNA
actctttaatagaataatcg

SEQ ID NO: 7653 - DNA, 20 bp, synthetic construct
  misc_feature 1..20: note = Description of Artificial Sequence: Synthetic oligonucleotide
  misc_feature 1..20: note = Target: SCN10A; (-) strand; PAM type: NNGRRT; PAM sequence: TAGAAT
  source 1..20: mol_type = other DNA
aactggccagcactctttaa

SEQ ID NO: 7654 - DNA, 20 bp, synthetic construct
  misc_feature 1..20: note = Description of Artificial Sequence: Synthetic oligonucleotide
  misc_feature 1..20: note = Target: SCN10A; (-) strand; PAM type: NNGRRT; PAM sequence: CTGAAT
  source 1..20: mol_type = other DNA
ggaagtttcttaggacagat

SEQ ID NO: 7655 - DNA, 20 bp, synthetic construct
  misc_feature 1..20: note = Description of Artificial Sequence: Synthetic oligonucleotide
  misc_feature 1..20: note = Target: SCN10A; (-) strand; PAM type: NNGRRT; PAM sequence: TTGAGT
  source 1..20: mol_type = other DNA
gacccagagagagagagaga

SEQ ID NO: 7656 - DNA, 20 bp, synthetic construct
  misc_feature 1..20: note = Description of Artificial Sequence: Synthetic oligonucleotide
  misc_feature 1..20: note = Target: SCN10A; (-) strand; PAM type: NNGRRT; PAM sequence: AGGGAT
  source 1..20: mol_type = other DNA
gcctgagtatcaccaatgga

SEQ ID NO: 7657 - DNA, 20 bp, synthetic construct
  misc_feature 1..20: note = Description of Artificial Sequence: Synthetic oligonucleotide
  misc_feature 1..20: note = Target: SCN10A; (-) strand; PAM type: NNGRRT; PAM sequence: CTGAGT
  source 1..20: mol_type = other DNA
gaagccttgagccaagaagc

SEQ ID NO: 7658 - DNA, 20 bp, synthetic construct
  misc_feature 1..20: note = Description of Artificial Sequence: Synthetic oligonucleotide
  misc_feature 1..20: note = Target: SCN10A; (-) strand; PAM type: NNGRRT; PAM sequence: GTGAAT
  source 1..20: mol_type = other DNA
gtcgatgtctcggtgagttt

SEQ ID NO: 7659 - DNA, 20 bp, synthetic construct
  misc_feature 1..20: note = Description of Artificial Sequence: Synthetic oligonucleotide
  misc_feature 1..20: note = Target: SCN10A; (-) strand; PAM type: NNGRRT; PAM sequence: GTGAGT
  source 1..20: mol_type = other DNA
ctggagctgtcgatgtctcg

SEQ ID NO: 7660 - DNA, 20 bp, synthetic construct
  misc_feature 1..20: note = Description of Artificial Sequence: Synthetic oligonucleotide
  misc_feature 1..20: note = Target: SCN10A; (-) strand; PAM type: NNGRRT; PAM sequence: GGGGGT
  source 1..20: mol_type = other DNA
ggggctctctgctgctgggt

SEQ ID NO: 7661 - DNA, 20 bp, synthetic construct
  misc_feature 1..20: note = Description of Artificial Sequence: Synthetic oligonucleotide
  misc_feature 1..20: note = Target: SCN10A; (-) strand; PAM type: NNGRRT; PAM sequence: CTGGGT
  source 1..20: mol_type = other DNA
gccatcggggctctctgctg

SEQ ID NO: 7662 - DNA, 20 bp, synthetic construct
  misc_feature 1..20: note = Description of Artificial Sequence: Synthetic oligonucleotide
  misc_feature 1..20: note = Target: SCN10A; (-) strand; PAM type: NNGRRT; PAM sequence: TGGAGT
  source 1..20: mol_type = other DNA
cctgagggagtcacagatga

SEQ ID NO: 7663 - DNA, 20 bp, synthetic construct
  misc_feature 1..20: note = Description of Artificial Sequence: Synthetic oligonucleotide
  misc_feature 1..20: note = Target: SCN10A; (-) strand; PAM type: NNGRRT; PAM sequence: GGGAGT
  source 1..20: mol_type = other DNA
cgagatatctcactccctga

SEQ ID NO: 7664 - DNA, 20 bp, synthetic construct
  misc_feature 1..20: note = Description of Artificial Sequence: Synthetic oligonucleotide
  misc_feature 1..20: note = Target: SCN10A; (-) strand; PAM type: NNGRRT; PAM sequence: GGGAGT
  source 1..20: mol_type = other DNA
aaagacaggggcagggaaat

SEQ ID NO: 7665 - DNA, 20 bp, synthetic construct
  misc_feature 1..20: note = Description of Artificial Sequence: Synthetic oligonucleotide
  misc_feature 1..20: note = Target: SCN10A; (-) strand; PAM type: NNGRRT; PAM sequence: TAGAAT
  source 1..20: mol_type = other DNA
ttttccccaccatgcatacc

SEQ ID NO: 7666 - DNA, 20 bp, synthetic construct
  misc_feature 1..20: note = Description of Artificial Sequence: Synthetic oligonucleotide
  misc_feature 1..20: note = Target: SCN10A; (-) strand; PAM type: NNGRRT; PAM sequence: TAGAGT
  source 1..20: mol_type = other DNA
ggtctttcccggagtctatc

SEQ ID NO: 7667 - DNA, 20 bp, synthetic construct
  misc_feature 1..20: note = Description of Artificial Sequence: Synthetic oligonucleotide
  misc_feature 1..20: note = Target: SCN10A; (-) strand; PAM type: NNGRRT; PAM sequence: CGGAGT
  source 1..20: mol_type = other DNA
tcctctctcctggtctttcc

SEQ ID NO: 7668 - DNA, 20 bp, synthetic construct
  misc_feature 1..20: note = Description of Artificial Sequence: Synthetic oligonucleotide
  misc_feature 1..20: note = Target: SCN10A; (-) strand; PAM type: NNGRRT; PAM sequence: ATGAAT
  source 1..20: mol_type = other DNA
attcatacagatgggatcta

SEQ ID NO: 7669 - DNA, 20 bp, synthetic construct
  misc_feature 1..20: note = Description of Artificial Sequence: Synthetic oligonucleotide
  misc_feature 1..20: note = Target: SCN10A; (-) strand; PAM type: NNGRRT; PAM sequence: TGGGAT
  source 1..20: mol_type = other DNA
aactctcacattcatacaga

SEQ ID NO: 7670 - DNA, 20 bp, synthetic construct
  misc_feature 1..20: note = Description of Artificial Sequence: Synthetic oligonucleotide
  misc_feature 1..20: note = Target: SCN10A; (-) strand; PAM type: NNGRRT; PAM sequence: AGGGAT
  source 1..20: mol_type = other DNA
tgttgactgttcaagcctcg

SEQ ID NO: 7671 - DNA, 20 bp, synthetic construct
  misc_feature 1..20: note = Description of Artificial Sequence: Synthetic oligonucleotide
  misc_feature 1..20: note = Target: SCN10A; (-) strand; PAM type: NNGRRT; PAM sequence: AGGAAT
  source 1..20: mol_type = other DNA
ggaaatgtttattgatttgg

SEQ ID NO: 7672 - DNA, 20 bp, synthetic construct
  misc_feature 1..20: note = Description of Artificial Sequence: Synthetic oligonucleotide
  misc_feature 1..20: note = Target: SCN10A; (-) strand; PAM type: NNGRRT; PAM sequence: ATGAAT
  source 1..20: mol_type = other DNA
tctctgagggctctgggttt

SEQ ID NO: 7673 - DNA, 20 bp, synthetic construct
  misc_feature 1..20: note = Description of Artificial Sequence: Synthetic oligonucleotide
  misc_feature 1..20: note = Target: SCN10A; (-) strand; PAM type: NNGRRT; PAM sequence: CTGGGT
  source 1..20: mol_type = other DNA
acactaattctctgagggct

SEQ ID NO: 7674 - DNA, 20 bp, synthetic construct
  misc_feature 1..20: note = Description of Artificial Sequence: Synthetic oligonucleotide
  misc_feature 1..20: note = Target: SCN10A; (-) strand; PAM type: NNGRRT; PAM sequence: CAGAGT
  source 1..20: mol_type = other DNA
gtggaataaatcggtatgat

SEQ ID NO: 7675 - DNA, 20 bp, synthetic construct
  misc_feature 1..20: note = Description of Artificial Sequence: Synthetic oligonucleotide
  misc_feature 1..20: note = Target: SCN10A; (-) strand; PAM type: NNGRRT; PAM sequence: TGGAAT
  source 1..20: mol_type = other DNA
aaggagttaaggaaggtgag

SEQ ID NO: 7676 - DNA, 20 bp, synthetic construct
  misc_feature 1..20: note = Description of Artificial Sequence: Synthetic oligonucleotide
  misc_feature 1..20: note = Target: SCN10A; (-) strand; PAM type: NNGRRT; PAM sequence: GTGAGT
  source 1..20: mol_type = other DNA
ataaaaaggagttaaggaag

SEQ ID NO: 7677 - DNA, 20 bp, synthetic construct
  misc_feature 1..20: note = Description of Artificial Sequence: Synthetic oligonucleotide
  misc_feature 1..20: note = Target: SCN10A; (-) strand; PAM type: NNGRRT; PAM sequence: AGGAGT
  source 1..20: mol_type = other DNA
ttagtagcttagtaataaaa

SEQ ID NO: 7678 - DNA, 20 bp, synthetic construct
  misc_feature 1..20: note = Description of Artificial Sequence: Synthetic oligonucleotide
  misc_feature 1..20: note = Target: SCN10A; (-) strand; PAM type: NNGRRT; PAM sequence: GGGGAT
  source 1..20: mol_type = other DNA
acttcagttctgtgagataa

SEQ ID NO: 7679 - DNA, 20 bp, synthetic construct
  misc_feature 1..20: note = Description of Artificial Sequence: Synthetic oligonucleotide
  misc_feature 1..20: note = Target: SCN10A; (-) strand; PAM type: NNGRRT; PAM sequence: CAGGAT
  source 1..20: mol_type = other DNA
ttttaataatggttgctaaa

SEQ ID NO: 7680 - DNA, 20 bp, synthetic construct
  misc_feature 1..20: note = Description of Artificial Sequence: Synthetic oligonucleotide
  misc_feature 1..20: note = Target: SCN10A; (-) strand; PAM type: NNGRRT; PAM sequence: GAGAGT
  source 1..20: mol_type = other DNA
ttgggcatgtattacaggca

SEQ ID NO: 7681 - DNA, 20 bp, synthetic construct
  misc_feature 1..20: note = Description of Artificial Sequence: Synthetic oligonucleotide
  misc_feature 1..20: note = Target: SCN10A; (-) strand; PAM type: NNGRRT; PAM sequence: ATGAGT
  source 1..20: mol_type = other DNA
tggaaggatttttgcatttt

SEQ ID NO: 7682 - DNA, 20 bp, synthetic construct
  misc_feature 1..20: note = Description of Artificial Sequence: Synthetic oligonucleotide
  misc_feature 1..20: note = Target: SCN10A; (-) strand; PAM type: NNGRRT; PAM sequence: AAGGAT
  source 1..20: mol_type = other DNA
tcatttgcttcaaaaattgg

SEQ ID NO: 7683 - DNA, 20 bp, synthetic construct
  misc_feature 1..20: note = Description of Artificial Sequence: Synthetic oligonucleotide
  misc_feature 1..20: note = Target: SCN10A; (-) strand; PAM type: NNGRRT; PAM sequence: ATGGAT
  source 1..20: mol_type = other DNA
gtagtattcccttccttaat

SEQ ID NO: 7684 - DNA, 20 bp, synthetic construct
  misc_feature 1..20: note = Description of Artificial Sequence: Synthetic oligonucleotide
  misc_feature 1..20: note = Target: SCN10A; (-) strand; PAM type: NNGRRT; PAM sequence: ATGAAT
  source 1..20: mol_type = other DNA
ccagttggtctcgttagagg

SEQ ID NO: 7685 - DNA, 20 bp, synthetic construct
  misc_feature 1..20: note = Description of Artificial Sequence: Synthetic oligonucleotide
  misc_feature 1..20: note = Target: SCN10A; (-) strand; PAM type: NNGRRT; PAM sequence: GAGGAT
  source 1..20: mol_type = other DNA
cagaccagttggtctcgtta

SEQ ID NO: 7686 - DNA, 20 bp, synthetic construct
  misc_feature 1..20: note = Description of Artificial Sequence: Synthetic oligonucleotide
  misc_feature 1..20: note = Target: SCN10A; (-) strand; PAM type: NNGRRT; PAM sequence: GAGGGT
  source 1..20: mol_type = other DNA
aatatatagaagagacccag

SEQ ID NO: 7687 - DNA, 20 bp, synthetic construct
  misc_feature 1..20: note = Description of Artificial Sequence: Synthetic oligonucleotide
  misc_feature 1..20: note = Target: SCN10A; (-) strand; PAM type: NNGRRT; PAM sequence: AGGAAT
  source 1..20: mol_type = other DNA
aaccaatagaaattaaatag

SEQ ID NO: 7688 - DNA, 20 bp, synthetic construct
  misc_feature 1..20: note = Description of Artificial Sequence: Synthetic oligonucleotide
  misc_feature 1..20: note = Target: SCN10A; (-) strand; PAM type: NNGRRT; PAM sequence: AGGAGT
  source 1..20: mol_type = other DNA
agacttgagagagtttgggg

SEQ ID NO: 7689 - DNA, 20 bp, synthetic construct
  misc_feature 1..20: note = Description of Artificial Sequence: Synthetic oligonucleotide
  misc_feature 1..20: note = Target: SCN10A; (-) strand; PAM type: NNGRRT; PAM sequence: GAGAGT
  source 1..20: mol_type = other DNA
tctagtaattgaagacttga

SEQ ID NO: 7690 - DNA, 20 bp, synthetic construct
  misc_feature 1..20: note = Description of Artificial Sequence: Synthetic oligonucleotide
  misc_feature 1..20: note = Target: SCN10A; (-) strand; PAM type: NNGRRT; PAM sequence: AGGGGT
  source 1..20: mol_type = other DNA
atcaacaataaatagcatgt

SEQ ID NO: 7691 - DNA, 20 bp, synthetic construct
  misc_feature 1..20: note = Description of Artificial Sequence: Synthetic oligonucleotide
  misc_feature 1..20: note = Target: SCN10A; (-) strand; PAM type: NNGRRT; PAM sequence: TGGGAT
  source 1..20: mol_type = other DNA
ttcctggaggaaggcataat

SEQ ID NO: 7692 - DNA, 20 bp, synthetic construct
  misc_feature 1..20: note = Description of Artificial Sequence: Synthetic oligonucleotide
  misc_feature 1..20: note = Target: SCN10A; (-) strand; PAM type: NNGRRT; PAM sequence: CTGGAT
  source 1..20: mol_type = other DNA
aaacatccactcttatgggg

SEQ ID NO: 7693 - DNA, 20 bp, synthetic construct
  misc_feature 1..20: note = Description of Artificial Sequence: Synthetic oligonucleotide
  misc_feature 1..20: note = Target: SCN10A; (-) strand; PAM type: NNGRRT; PAM sequence: GAGAAT
  source 1..20: mol_type = other DNA
agacacatacatggtgtttt

SEQ ID NO: 7694 - DNA, 20 bp, synthetic construct
  misc_feature 1..20: note = Description of Artificial Sequence: Synthetic oligonucleotide
  misc_feature 1..20: note = Target: SCN10A; (-) strand; PAM type: NNGRRT; PAM sequence: TTGGGT
  source 1..20: mol_type = other DNA
ttttccctaaggatttccat

SEQ ID NO: 7695 - DNA, 20 bp, synthetic construct
  misc_feature 1..20: note = Description of Artificial Sequence: Synthetic oligonucleotide
  misc_feature 1..20: note = Target: SCN10A; (-) strand; PAM type: NNGRRT; PAM sequence: AAGGAT
  source 1..20: mol_type = other DNA
tagaacatgttcttttccct

SEQ ID NO: 7696 - DNA, 20 bp, synthetic construct
  misc_feature 1..20: note = Description of Artificial Sequence: Synthetic oligonucleotide
  misc_feature 1..20: note = Target: SCN10A; (-) strand; PAM type: NNGRRT; PAM sequence: TTGGAT
  source 1..20: mol_type = other DNA
agccccacacagattagcac

SEQ ID NO: 7697 - DNA, 20 bp, synthetic construct
  misc_feature 1..20: note = Description of Artificial Sequence: Synthetic oligonucleotide
  misc_feature 1..20: note = Target: SCN10A; (-) strand; PAM type: NNGRRT; PAM sequence: CTGAAT
  source 1..20: mol_type = other DNA
ccatggaaatgtcaatgaca

SEQ ID NO: 7698 - DNA, 20 bp, synthetic construct
  misc_feature 1..20: note = Description of Artificial Sequence: Synthetic oligonucleotide
  misc_feature 1..20: note = Target: SCN10A; (-) strand; PAM type: NNGRRT; PAM sequence: ATGAAT
  source 1..20: mol_type = other DNA
tcagacaatcacagaacagg

SEQ ID NO: 7699 - DNA, 20 bp, synthetic construct
  misc_feature 1..20: note = Description of Artificial Sequence: Synthetic oligonucleotide
  misc_feature 1..20: note = Target: SCN10A; (-) strand; PAM type: NNGRRT; PAM sequence: CAGGAT
  source 1..20: mol_type = other DNA
cagttcagacaatcacagaa

SEQ ID NO: 7700 - DNA, 20 bp, synthetic construct
  misc_feature 1..20: note = Description of Artificial Sequence: Synthetic oligonucleotide
  misc_feature 1..20: note = Target: SCN10A; (-) strand; PAM type: NNGRRT; PAM sequence: AAGGAT
  source 1..20: mol_type = other DNA
tcttttcctgtgctaagccg

SEQ ID NO: 7701 - DNA, 20 bp, synthetic construct
  misc_feature 1..20: note = Description of Artificial Sequence: Synthetic oligonucleotide
  misc_feature 1..20: note = Target: SCN10A; (-) strand; PAM type: NNGRRT; PAM sequence: GGGGAT
  source 1..20: mol_type = other DNA
cacactaacagtgtggaaaa

SEQ ID NO: 7702 - DNA, 20 bp, synthetic construct
  misc_feature 1..20: note = Description of Artificial Sequence: Synthetic oligonucleotide
  misc_feature 1..20: note = Target: SCN10A; (-) strand; PAM type: NNGRRT; PAM sequence: GAGGGT
  source 1..20: mol_type = other DNA
agataatatctgctgtgtgg

SEQ ID NO: 7703 - DNA, 20 bp, synthetic construct
  misc_feature 1..20: note = Description of Artificial Sequence: Synthetic oligonucleotide
  misc_feature 1..20: note = Target: SCN10A; (-) strand; PAM type: NNGRRT; PAM sequence: GGGAAT
  source 1..20: mol_type = other DNA
tctgtgacacaatccagcct

SEQ ID NO: 7704 - DNA, 20 bp, synthetic construct
  misc_feature 1..20: note = Description of Artificial Sequence: Synthetic oligonucleotide
  misc_feature 1..20: note = Target: SCN10A; (-) strand; PAM type: NNGRRT; PAM sequence: TTGGGT
  source 1..20: mol_type = other DNA
ttcacaattttatataatta

SEQ ID NO: 7705 - DNA, 20 bp, synthetic construct
  misc_feature 1..20: note = Description of Artificial Sequence: Synthetic oligonucleotide
  misc_feature 1..20: note = Target: SCN10A; (-) strand; PAM type: NNGRRT; PAM sequence: TAGAGT
  source 1..20: mol_type = other DNA
gaggctctggtctgcagttc

SEQ ID NO: 7706 - DNA, 20 bp, synthetic construct
  misc_feature 1..20: note = Description of Artificial Sequence: Synthetic oligonucleotide
  misc_feature 1..20: note = Target: SCN10A; (-) strand; PAM type: NNGRRT; PAM sequence: ATGGGT
  source 1..20: mol_type = other DNA
tttcaggattgggcaatcaa

SEQ ID NO: 7707 - DNA, 20 bp, synthetic construct
  misc_feature 1..20: note = Description of Artificial Sequence: Synthetic oligonucleotide
  misc_feature 1..20: note = Target: SCN10A; (-) strand; PAM type: NNGRRT; PAM sequence: CAGGAT
  source 1..20: mol_type = other DNA
ccaatttgactcccaggttt

SEQ ID NO: 7708 - DNA, 20 bp, synthetic construct
  misc_feature 1..20: note = Description of Artificial Sequence: Synthetic oligonucleotide
  misc_feature 1..20: note = Target: SCN10A; (-) strand; PAM type: NNGRRT; PAM sequence: GGGAGT
  source 1..20: mol_type = other DNA
ggactgtggaaaaaggaaag

SEQ ID NO: 7709 - DNA, 20 bp, synthetic construct
  misc_feature 1..20: note = Description of Artificial Sequence: Synthetic oligonucleotide
  misc_feature 1..20: note = Target: SCN10A; (-) strand; PAM type: NNGRRT; PAM sequence: TGGGAT
  source 1..20: mol_type = other DNA
gggaagtggatcaacaagat

SEQ ID NO: 7710 - DNA, 20 bp, synthetic construct
  misc_feature 1..20: note = Description of Artificial Sequence: Synthetic oligonucleotide
  misc_feature 1..20: note = Target: SCN10A; (-) strand; PAM type: NNGRRT; PAM sequence: GTGGAT
  source 1..20: mol_type = other DNA
tataaggacaccttagggaa

SEQ ID NO: 7711 - DNA, 20 bp, synthetic construct
  misc_feature 1..20: note = Description of Artificial Sequence: Synthetic oligonucleotide
  misc_feature 1..20: note = Target: SCN10A; (-) strand; PAM type: NNGRRT; PAM sequence: GTGAAT
  source 1..20: mol_type = other DNA
attatagatggggaaaaggg

SEQ ID NO: 7712 - DNA, 20 bp, synthetic construct
  misc_feature 1..20: note = Description of Artificial Sequence: Synthetic oligonucleotide
  misc_feature 1..20: note = Target: SCN10A; (-) strand; PAM type: NNGRRT; PAM sequence: AGGGGT
  source 1..20: mol_type = other DNA
tgtaattatagatggggaaa

SEQ ID NO: 7713 - DNA, 20 bp, synthetic construct
  misc_feature 1..20: note = Description of Artificial Sequence: Synthetic oligonucleotide
  misc_feature 1..20: note = Target: SCN10A; (-) strand; PAM type: NNGRRT; PAM sequence: AAGGAT
  source 1..20: mol_type = other DNA
gctggaggcatagagcctaa

SEQ ID NO: 7714 - DNA, 20 bp, synthetic construct
  misc_feature 1..20: note = Description of Artificial Sequence: Synthetic oligonucleotide
  misc_feature 1..20: note = Target: SCN10A; (-) strand; PAM type: NNGRRT; PAM sequence: TGGAGT
  source 1..20: mol_type = other DNA
agctgccgtagacaatgagt

SEQ ID NO: 7715 - DNA, 20 bp, synthetic construct
  misc_feature 1..20: note = Description of Artificial Sequence: Synthetic oligonucleotide
  misc_feature 1..20: note = Target: SCN10A; (-) strand; PAM type: NNGRRT; PAM sequence: ATGAGT
  source 1..20: mol_type = other DNA
cattgcagctgccgtagaca

SEQ ID NO: 7716 - DNA, 20 bp, synthetic construct
  misc_feature 1..20: note = Description of Artificial Sequence: Synthetic oligonucleotide
  misc_feature 1..20: note = Target: SCN10A; (-) strand; PAM type: NNGRRT; PAM sequence: CAGGAT
  source 1..20: mol_type = other DNA
tctgatccttacaaccagcg

SEQ ID NO: 7717 - DNA, 20 bp, synthetic construct
  misc_feature 1..20: note = Description of Artificial Sequence: Synthetic oligonucleotide
  misc_feature 1..20: note = Target: SCN10A; (-) strand; PAM type: NNGRRT; PAM sequence: AAGAGT
  source 1..20: mol_type = other DNA
agaaggcatagaataaagcc

SEQ ID NO: 7718 - DNA, 20 bp, synthetic construct
  misc_feature 1..20: note = Description of Artificial Sequence: Synthetic oligonucleotide
  misc_feature 1..20: note = Target: SCN10A; (-) strand; PAM type: NNGRRT; PAM sequence: TAGAAT
  source 1..20: mol_type = other DNA
aatgccagtgagagaaggca

SEQ ID NO: 7719 - DNA, 20 bp, synthetic construct
  misc_feature 1..20: note = Description of Artificial Sequence: Synthetic oligonucleotide
  misc_feature 1..20: note = Target: SCN10A; (-) strand; PAM type: NNGRRT; PAM sequence: ATGGAT
  source 1..20: mol_type = other DNA
aacctctctccactcccaca

SEQ ID NO: 7720 - DNA, 20 bp, synthetic construct
  misc_feature 1..20: note = Description of Artificial Sequence: Synthetic oligonucleotide
  misc_feature 1..20: note = Target: SCN10A; (-) strand; PAM type: NNGRRT; PAM sequence: AGGGAT
  source 1..20: mol_type = other DNA
tcgcaggtgctagcagcact

SEQ ID NO: 7721 - DNA, 20 bp, synthetic construct
  misc_feature 1..20: note = Description of Artificial Sequence: Synthetic oligonucleotide
  misc_feature 1..20: note = Target: SCN10A; (-) strand; PAM type: NNGRRT; PAM sequence: GGGGGT
  source 1..20: mol_type = other DNA
agagtaccccatgaatgagt

SEQ ID NO: 7722 - DNA, 20 bp, synthetic construct
  misc_feature 1..20: note = Description of Artificial Sequence: Synthetic oligonucleotide
  misc_feature 1..20: note = Target: SCN10A; (-) strand; PAM type: NNGRRT; PAM sequence: ATGAGT
  source 1..20: mol_type = other DNA
accaacagagtaccccatga

SEQ ID NO: 7723 - DNA, 20 bp, synthetic construct
  misc_feature 1..20: note = Description of Artificial Sequence: Synthetic oligonucleotide
  misc_feature 1..20: note = Target: SCN10A; (-) strand; PAM type: NNGRRT; PAM sequence: ATGAAT
  source 1..20: mol_type = other DNA
gggcaccaacagagtacccc

SEQ ID NO: 7724 - DNA, 20 bp, synthetic construct
  misc_feature 1..20: note = Description of Artificial Sequence: Synthetic oligonucleotide
  misc_feature 1..20: note = Target: SCN10A; (-) strand; PAM type: NNGRRT; PAM sequence: CAGAGT
  source 1..20: mol_type = other DNA
ggatctgggtggggcaccaa

SEQ ID NO: 7725 - DNA, 20 bp, synthetic construct
  misc_feature 1..20: note = Description of Artificial Sequence: Synthetic oligonucleotide
  misc_feature 1..20: note = Target: SCN10A; (-) strand; PAM type: NNGRRT; PAM sequence: CTGGGT
  source 1..20: mol_type = other DNA
gctgacctggtgaaagggat

SEQ ID NO: 7726 - DNA, 20 bp, synthetic construct
  misc_feature 1..20: note = Description of Artificial Sequence: Synthetic oligonucleotide
  misc_feature 1..20: note = Target: SCN10A; (-) strand; PAM type: NNGRRT; PAM sequence: AGGGAT
  source 1..20: mol_type = other DNA
agctgtgctgacctggtgaa

SEQ ID NO: 7727 - DNA, 20 bp, synthetic construct
  misc_feature 1..20: note = Description of Artificial Sequence: Synthetic oligonucleotide
  misc_feature 1..20: note = Target: SCN10A; (-) strand; PAM type: NNGRRT; PAM sequence: CGGGAT
  source 1..20: mol_type = other DNA
ctgctgccatgcaagcagct

SEQ ID NO: 7728 - DNA, 20 bp, synthetic construct
  misc_feature 1..20: note = Description of Artificial Sequence: Synthetic oligonucleotide
  misc_feature 1..20: note = Target: SCN10A; (-) strand; PAM type: NNGRRT; PAM sequence: TAGAAT
  source 1..20: mol_type = other DNA
gccaaaagagactttttttg

SEQ ID NO: 7729 - DNA, 20 bp, synthetic construct
  misc_feature 1..20: note = Description of Artificial Sequence: Synthetic oligonucleotide
  misc_feature 1..20: note = Target: SCN10A; (-) strand; PAM type: NNGRRT; PAM sequence: AGGAGT
  source 1..20: mol_type = other DNA
gcagagggtggaactaaaca

SEQ ID NO: 7730 - DNA, 20 bp, synthetic construct
  misc_feature 1..20: note = Description of Artificial Sequence: Synthetic oligonucleotide
  misc_feature 1..20: note = Target: SCN10A; (-) strand; PAM type: NNGRRT; PAM sequence: GAGGGT
  source 1..20: mol_type = other DNA
aagcaaaacagaatggggca

SEQ ID NO: 7731 - DNA, 20 bp, synthetic construct
  misc_feature 1..20: note = Description of Artificial Sequence: Synthetic oligonucleotide
  misc_feature 1..20: note = Target: SCN10A; (-) strand; PAM type: NNGRRT; PAM sequence: CAGAAT
  source 1..20: mol_type = other DNA
agaaagcgaatgaagcaaaa

SEQ ID NO: 7732 - DNA, 20 bp, synthetic construct
  misc_feature 1..20: note = Description of Artificial Sequence: Synthetic oligonucleotide
  misc_feature 1..20: note = Target: SCN10A; (-) strand; PAM type: NNGRRT; PAM sequence: GCGAAT
  source 1..20: mol_type = other DNA
gggagtgctctcaggagaaa

SEQ ID NO: 7733 - DNA, 20 bp, synthetic construct
  misc_feature 1..20: note = Description of Artificial Sequence: Synthetic oligonucleotide
  misc_feature 1..20: note = Target: SCN10A; (-) strand; PAM type: NNGRRT; PAM sequence: GGGAGT
  source 1..20: mol_type = other DNA
ttgtgcaagtgacctattga

SEQ ID NO: 7734 - DNA, 20 bp, synthetic construct
  misc_feature 1..20: note = Description of Artificial Sequence: Synthetic oligonucleotide
  misc_feature 1..20: note = Target: SCN10A; (-) strand; PAM type: NNGRRT; PAM sequence: GAGGAT
  source 1..20: mol_type = other DNA
tctcaaagaagaagctaagt

SEQ ID NO: 7735 - DNA, 20 bp, synthetic construct
  misc_feature 1..20: note = Description of Artificial Sequence: Synthetic oligonucleotide
  misc_feature 1..20: note = Target: SCN10A; (-) strand; PAM type: NNGRRT; PAM sequence: AGGAAT
  source 1..20: mol_type = other DNA
accgtttagggagctatagg

SEQ ID NO: 7736 - DNA, 20 bp, synthetic construct
  misc_feature 1..20: note = Description of Artificial Sequence: Synthetic oligonucleotide
  misc_feature 1..20: note = Target: SCN10A; (-) strand; PAM type: NNGRRT; PAM sequence: TTGGAT
  source 1..20: mol_type = other DNA
aggttgcagactgtccattc

SEQ ID NO: 7737 - DNA, 20 bp, synthetic construct
  misc_feature 1..20: note = Description of Artificial Sequence: Synthetic oligonucleotide
  misc_feature 1..20: note = Target: SCN10A; (-) strand; PAM type: NNGRRT; PAM sequence: AGGAGT
  source 1..20: mol_type = other DNA
gaaggagcaggaggtttgtg

SEQ ID NO: 7738 - DNA, 20 bp, synthetic construct
  misc_feature 1..20: note = Description of Artificial Sequence: Synthetic oligonucleotide
  misc_feature 1..20: note = Target: SCN10A; (-) strand; PAM type: NNGRRT; PAM sequence: TGGGAT
  source 1..20: mol_type = other DNA
ttttgtgctcgtaatcttcc

SEQ ID NO: 7739 - DNA, 20 bp, synthetic construct
  misc_feature 1..20: note = Description of Artificial Sequence: Synthetic oligonucleotide
  misc_feature 1..20: note = Target: SCN10A; (-) strand; PAM type: NNGRRT; PAM sequence: ATGGGT
  source 1..20: mol_type = other DNA
aattcaggggtccatgtgct

SEQ ID NO: 7740 - DNA, 20 bp, synthetic construct
  misc_feature 1..20: note = Description of Artificial Sequence: Synthetic oligonucleotide
  misc_feature 1..20: note = Target: SCN10A; (-) strand; PAM type: NNGRRT; PAM sequence: AGGGGT
  source 1..20: mol_type = other DNA
gaggaggctgacttaaattc

SEQ ID NO: 7741 - DNA, 20 bp, synthetic construct
  misc_feature 1..20: note = Description of Artificial Sequence: Synthetic oligonucleotide
  misc_feature 1..20: note = Target: SCN10A; (-) strand; PAM type: NNGRRT; PAM sequence: GTGGGT
  source 1..20: mol_type = other DNA
gcagacttggttggaggctg

SEQ ID NO: 7742 - DNA, 20 bp, synthetic construct
  misc_feature 1..20: note = Description of Artificial Sequence: Synthetic oligonucleotide
  misc_feature 1..20: note = Target: SCN10A; (-) strand; PAM type: NNGRRT; PAM sequence: CAGGAT
  source 1..20: mol_type = other DNA
cactgttccgcctcatgaca

SEQ ID NO: 7743 - DNA, 20 bp, synthetic construct
  misc_feature 1..20: note = Description of Artificial Sequence: Synthetic oligonucleotide
  misc_feature 1..20: note = Target: SCN10A; (-) strand; PAM type: NNGRRT; PAM sequence: CCGGAT
  source 1..20: mol_type = other DNA
gccttaaaacttctgacaac

SEQ ID NO: 7744 - DNA, 20 bp, synthetic construct
  misc_feature 1..20: note = Description of Artificial Sequence: Synthetic oligonucleotide
  misc_feature 1..20: note = Target: SCN10A; (-) strand; PAM type: NNGRRT; PAM sequence: GGGGAT
  source 1..20: mol_type = other DNA
taccttgtctgcaataagca

SEQ ID NO: 7745 - DNA, 20 bp, synthetic construct
  misc_feature 1..20: note = Description of Artificial Sequence: Synthetic oligonucleotide
  misc_feature 1..20: note = Target: SCN10A; (-) strand; PAM type: NNGRRT; PAM sequence: ATGGAT
  source 1..20: mol_type = other DNA
agtattagcgtccccgtttt

SEQ ID NO: 7746 - DNA, 20 bp, synthetic construct
  misc_feature 1..20: note = Description of Artificial Sequence: Synthetic oligonucleotide
  misc_feature 1..20: note = Target: SCN10A; (-) strand; PAM type: NNGRRT; PAM sequence: TTGAGT
  source 1..20: mol_type = other DNA
ttatctgtaaagaaagaaca

SEQ ID NO: 7747 - DNA, 20 bp, synthetic construct
  misc_feature 1..20: note = Description of Artificial Sequence: Synthetic oligonucleotide
  misc_feature 1..20: note = Target: SCN10A; (-) strand; PAM type: NNGRRT; PAM sequence: AGGAGT
  source 1..20: mol_type = other DNA
tcctattatgagagagagga

SEQ ID NO: 7748 - DNA, 20 bp, synthetic construct
  misc_feature 1..20: note = Description of Artificial Sequence: Synthetic oligonucleotide
  misc_feature 1..20: note = Target: SCN10A; (-) strand; PAM type: NNGRRT; PAM sequence: GTGGAT
  source 1..20: mol_type = other DNA
atcaggccatctctgctagg

SEQ ID NO: 7749 - DNA, 20 bp, synthetic construct
  misc_feature 1..20: note = Description of Artificial Sequence: Synthetic oligonucleotide
  misc_feature 1..20: note = Target: SCN10A; (-) strand; PAM type: NNGRRT; PAM sequence: TAGGGT
  source 1..20: mol_type = other DNA
attgatcaggccatctctgc

SEQ ID NO: 7750 - DNA, 20 bp, synthetic construct
  misc_feature 1..20: note = Description of Artificial Sequence: Synthetic oligonucleotide
  misc_feature 1..20: note = Target: SCN10A; (-) strand; PAM type: NNGRRT; PAM sequence: AGGAAT
  source 1..20: mol_type = other DNA
aagaattccatgtattcaca

SEQ ID NO: 7751 - DNA, 20 bp, synthetic construct
  misc_feature 1..20: note = Description of Artificial Sequence: Synthetic oligonucleotide
  misc_feature 1..20: note = Target: SCN10A; (-) strand; PAM type: NNGRRT; PAM sequence: AAGAAT
  source 1..20: mol_type = other DNA
tggagaaatcctgggagtaa

SEQ ID NO: 7752 - DNA, 20 bp, synthetic construct
  misc_feature 1..20: note = Description of Artificial Sequence: Synthetic oligonucleotide
  misc_feature 1..20: note = Target: SCN10A; (-) strand; PAM type: NNGRRT; PAM sequence: GGGAGT
  source 1..20: mol_type = other DNA
ggagttcatggagaaatcct

SEQ ID NO: 7753 - DNA, 20 bp, synthetic construct
  misc_feature 1..20: note = Description of Artificial Sequence: Synthetic oligonucleotide
  misc_feature 1..20: note = Target: SCN10A; (-) strand; PAM type: NNGRRT; PAM sequence: TGGAGT
  source 1..20: mol_type = other DNA
ataaggagagccccagaggt

SEQ ID NO: 7754 - DNA, 20 bp, synthetic construct
  misc_feature 1..20: note = Description of Artificial Sequence: Synthetic oligonucleotide
  misc_feature 1..20: note = Target: SCN10A; (-) strand; PAM type: NNGRRT; PAM sequence: TGGGAT
  source 1..20: mol_type = other DNA
gggttgttcacatggatgtc

SEQ ID NO: 7755 - DNA, 20 bp, synthetic construct
  misc_feature 1..20: note = Description of Artificial Sequence: Synthetic oligonucleotide
  misc_feature 1..20: note = Target: SCN10A; (-) strand; PAM type: NNGRRT; PAM sequence: ATGGAT
  source 1..20: mol_type = other DNA
ccatggtatgggttgttcac

SEQ ID NO: 7756 - DNA, 20 bp, synthetic construct
  misc_feature 1..20: note = Description of Artificial Sequence: Synthetic oligonucleotide
  misc_feature 1..20: note = Target: SCN10A; (-) strand; PAM type: NNGRRT; PAM sequence: ATGGGT
  source 1..20: mol_type = other DNA
tcagagctctaatccatggt

SEQ ID NO: 7757 - DNA, 20 bp, synthetic construct
  misc_feature 1..20: note = Description of Artificial Sequence: Synthetic oligonucleotide
  misc_feature 1..20: note = Target: SCN10A; (-) strand; PAM type: NNGRRT; PAM sequence: TAGAAT
  source 1..20: mol_type = other DNA
gagatagacttggaactgat

SEQ ID NO: 7758 - DNA, 20 bp, synthetic construct
  misc_feature 1..20: note = Description of Artificial Sequence: Synthetic oligonucleotide
  misc_feature 1..20: note = Target: SCN10A; (-) strand; PAM type: NNGRRT; PAM sequence: GTGGGT
  source 1..20: mol_type = other DNA
ccaagagcctatctttaaat

SEQ ID NO: 7759 - DNA, 20 bp, synthetic construct
  misc_feature 1..20: note = Description of Artificial Sequence: Synthetic oligonucleotide
  misc_feature 1..20: note = Target: SCN10A; (-) strand; PAM type: NNGRRT; PAM sequence: ATGGGT
  source 1..20: mol_type = other DNA
aattaagaaacctacaggaa

SEQ ID NO: 7760 - DNA, 20 bp, synthetic construct
  misc_feature 1..20: note = Description of Artificial Sequence: Synthetic oligonucleotide
  misc_feature 1..20: note = Target: SCN10A; (-) strand; PAM type: NNGRRT; PAM sequence: CAGAGT
  source 1..20: mol_type = other DNA
catagaaacaaggctgccct

SEQ ID NO: 7761 - DNA, 20 bp, synthetic construct
  misc_feature 1..20: note = Description of Artificial Sequence: Synthetic oligonucleotide
  misc_feature 1..20: note = Target: SCN10A; (-) strand; PAM type: NNGRRT; PAM sequence: GTGGAT
  source 1..20: mol_type = other DNA
gtttatatgcagtggctatg

SEQ ID NO: 7762 - DNA, 20 bp, synthetic construct
  misc_feature 1..20: note = Description of Artificial Sequence: Synthetic oligonucleotide
  misc_feature 1..20: note = Target: SCN10A; (-) strand; PAM type: NNGRRT; PAM sequence: AGGAAT
  source 1..20: mol_type = other DNA
cttccaaggttaaaaacaat

SEQ ID NO: 7763 - DNA, 20 bp, synthetic construct
  misc_feature 1..20: note = Description of Artificial Sequence: Synthetic oligonucleotide
  misc_feature 1..20: note = Target: SCN10A; (-) strand; PAM type: NNGRRT; PAM sequence: ATGGAT
  source 1..20: mol_type = other DNA
caggggtctcaaggcagaaa

SEQ ID NO: 7764 - DNA, 20 bp, synthetic construct
  misc_feature 1..20: note = Description of Artificial Sequence: Synthetic oligonucleotide
  misc_feature 1..20: note = Target: SCN10A; (-) strand; PAM type: NNGRRT; PAM sequence: AGGGGT
  source 1..20: mol_type = other DNA
ggcactgtgggaggaaggtc

SEQ ID NO: 7765 - DNA, 20 bp, synthetic construct
  misc_feature 1..20: note = Description of Artificial Sequence: Synthetic oligonucleotide
  misc_feature 1..20: note = Target: SCN10A; (-) strand; PAM type: NNGRRT; PAM sequence: CAGAGT
  source 1..20: mol_type = other DNA
ctgtggggctgcagagaagc

SEQ ID NO: 7766 - DNA, 20 bp, synthetic construct
  misc_feature 1..20: note = Description of Artificial Sequence: Synthetic oligonucleotide
  misc_feature 1..20: note = Target: SCN10A; (-) strand; PAM type: NNGRRT; PAM sequence: CTGGGT
  source 1..20: mol_type = other DNA
gcatgccgtgaaagctaaac

SEQ ID NO: 7767 - DNA, 20 bp, synthetic construct
  misc_feature 1..20: note = Description of Artificial Sequence: Synthetic oligonucleotide
  misc_feature 1..20: note = Target: SCN10A; (-) strand; PAM type: NNGRRT; PAM sequence: CAGAGT
  source 1..20: mol_type = other DNA
ggccagctcaggataacgga

SEQ ID NO: 7768 - DNA, 20 bp, synthetic construct
  misc_feature 1..20: note = Description of Artificial Sequence: Synthetic oligonucleotide
  misc_feature 1..20: note = Target: SCN10A; (-) strand; PAM type: NNGRRT; PAM sequence: CAGGAT
  source 1..20: mol_type = other DNA
atggcagagagaggccagct

SEQ ID NO: 7769 - DNA, 20 bp, synthetic construct
  misc_feature 1..20: note = Description of Artificial Sequence: Synthetic oligonucleotide
  misc_feature 1..20: note = Target: SCN10A; (-) strand; PAM type: NNGRRT; PAM sequence: TGGGAT
  source 1..20: mol_type = other DNA
agtgggggagtggaccaggc

SEQ ID NO: 7770 - DNA, 20 bp, synthetic construct
  misc_feature 1..20: note = Description of Artificial Sequence: Synthetic oligonucleotide
  misc_feature 1..20: note = Target: SCN10A; (-) strand; PAM type: NNGRRT; PAM sequence: GGGAGT
  source 1..20: mol_type = other DNA
aggtgccagccaggcagtgg

SEQ ID NO: 7771 - DNA, 20 bp, synthetic construct
  misc_feature 1..20: note = Description of Artificial Sequence: Synthetic oligonucleotide
  misc_feature 1..20: note = Target: SCN10A; (-) strand; PAM type: NNGRRT; PAM sequence: TTGGGT
  source 1..20: mol_type = other DNA
tcctttttgtggtaaagttg

SEQ ID NO: 7772 - DNA, 20 bp, synthetic construct
  misc_feature 1..20: note = Description of Artificial Sequence: Synthetic oligonucleotide
  misc_feature 1..20: note = Target: SCN10A; (-) strand; PAM type: NNGRRT; PAM sequence: GAGGGT
  source 1..20: mol_type = other DNA
tttggttctttggctcatga

SEQ ID NO: 7773 - DNA, 20 bp, synthetic construct
  misc_feature 1..20: note = Description of Artificial Sequence: Synthetic oligonucleotide
  misc_feature 1..20: note = Target: SCN10A; (-) strand; PAM type: NNGRRT; PAM sequence: AGGGAT
  source 1..20: mol_type = other DNA
cagaatgtgagacaaagcta

SEQ ID NO: 7774 - DNA, 20 bp, synthetic construct
  misc_feature 1..20: note = Description of Artificial Sequence: Synthetic oligonucleotide
  misc_feature 1..20: note = Target: SCN10A; (-) strand; PAM type: NNGRRT; PAM sequence: CAGAAT
  source 1..20: mol_type = other DNA
gaccattccaggtggcagaa

SEQ ID NO: 7775 - DNA, 20 bp, synthetic construct
  misc_feature 1..20: note = Description of Artificial Sequence: Synthetic oligonucleotide
  misc_feature 1..20: note = Target: SCN10A; (-) strand; PAM type: NNGRRT; PAM sequence: GTGAAT
  source 1..20: mol_type = other DNA
gtaggatgtctccaggctgg

SEQ ID NO: 7776 - DNA, 20 bp, synthetic construct
  misc_feature 1..20: note = Description of Artificial Sequence: Synthetic oligonucleotide
  misc_feature 1..20: note = Target: SCN10A; (-) strand; PAM type: NNGRRT; PAM sequence: CTGGGT
  source 1..20: mol_type = other DNA
gcaggtaggatgtctccagg

SEQ ID NO: 7777 - DNA, 20 bp, synthetic construct
  misc_feature 1..20: note = Description of Artificial Sequence: Synthetic oligonucleotide
  misc_feature 1..20: note = Target: SCN10A; (-) strand; PAM type: NNGRRT; PAM sequence: TAGGAT
  source 1..20: mol_type = other DNA
ggtgagctttcaagggcagg

SEQ ID NO: 7778 - DNA, 20 bp, synthetic construct
  misc_feature 1..20: note = Description of Artificial Sequence: Synthetic oligonucleotide
  misc_feature 1..20: note = Target: SCN10A; (-) strand; PAM type: NNGRRT; PAM sequence: GTGGGT
  source 1..20: mol_type = other DNA
tttggttgccatgtggaaat

SEQ ID NO: 7779 - DNA, 20 bp, synthetic construct
  misc_feature 1..20: note = Description of Artificial Sequence: Synthetic oligonucleotide
  misc_feature 1..20: note = Target: SCN10A; (-) strand; PAM type: NNGRRT; PAM sequence: GAGAGT
  source 1..20: mol_type = other DNA
caggagggaacctaggagct

SEQ ID NO: 7780 - DNA, 20 bp, synthetic construct
  misc_feature 1..20: note = Description of Artificial Sequence: Synthetic oligonucleotide
  misc_feature 1..20: note = Target: SCN10A; (-) strand; PAM type: NNGRRT; PAM sequence: TGGAGT
  source 1..20: mol_type = other DNA
gattcataacaacaaatgag

SEQ ID NO: 7781 - DNA, 20 bp, synthetic construct
  misc_feature 1..20: note = Description of Artificial Sequence: Synthetic oligonucleotide
  misc_feature 1..20: note = Target: SCN10A; (-) strand; PAM type: NNGRRT; PAM sequence: ATGAGT
  source 1..20: mol_type = other DNA
ggccagattcataacaacaa

SEQ ID NO: 7782 - DNA, 20 bp, synthetic construct
  misc_feature 1..20: note = Description of Artificial Sequence: Synthetic oligonucleotide
  misc_feature 1..20: note = Target: SCN10A; (-) strand; PAM type: NNGRRT; PAM sequence: TCGAAT
  source 1..20: mol_type = other DNA
atgtatcagactttgcaatt

SEQ ID NO: 7783 - DNA, 20 bp, synthetic construct
  misc_feature 1..20: note = Description of Artificial Sequence: Synthetic oligonucleotide
  misc_feature 1..20: note = Target: SCN10A; (-) strand; PAM type: NNGRRT; PAM sequence: AAGAAT
  source 1..20: mol_type = other DNA
gggtgtggatacatagagac

SEQ ID NO: 7784 - DNA, 20 bp, synthetic construct
  misc_feature 1..20: note = Description of Artificial Sequence: Synthetic oligonucleotide
  misc_feature 1..20: note = Target: SCN10A; (-) strand; PAM type: NNGRRT; PAM sequence: GTGGAT
  source 1..20: mol_type = other DNA
aaagtcacattggaaagggt

SEQ ID NO: 7785 - DNA, 20 bp, synthetic construct
  misc_feature 1..20: note = Description of Artificial Sequence: Synthetic oligonucleotide
  misc_feature 1..20: note = Target: SCN10A; (-) strand; PAM type: NNGRRT; PAM sequence: AAGGGT
  source 1..20: mol_type = other DNA
agctgaaaagtcacattgga

SEQ ID NO: 7786 - DNA, 20 bp, synthetic construct
  misc_feature 1..20: note = Description of Artificial Sequence: Synthetic oligonucleotide
  misc_feature 1..20: note = Target: SCN10A; (-) strand; PAM type: NNGRRT; PAM sequence: TTGGGT
  source 1..20: mol_type = other DNA
ggactgggatcagatgggca

SEQ ID NO: 7787 - DNA, 20 bp, synthetic construct
  misc_feature 1..20: note = Description of Artificial Sequence: Synthetic oligonucleotide
  misc_feature 1..20: note = Target: SCN10A; (-) strand; PAM type: NNGRRT; PAM sequence: TGGGAT
  source 1..20: mol_type = other DNA
tgtgcatcagcattttggac

SEQ ID NO: 7788 - DNA, 20 bp, synthetic construct
  misc_feature 1..20: note = Description of Artificial Sequence: Synthetic oligonucleotide
  misc_feature 1..20: note = Target: SCN10A; (-) strand; PAM type: NNGRRT; PAM sequence: GTGAAT
  source 1..20: mol_type = other DNA
acaaatgaccccaaaatttt

SEQ ID NO: 7789 - DNA, 20 bp, synthetic construct
  misc_feature 1..20: note = Description of Artificial Sequence: Synthetic oligonucleotide
  misc_feature 1..20: note = Target: SCN10A; (-) strand; PAM type: NNGRRT; PAM sequence: ATGAGT
  source 1..20: mol_type = other DNA
agctcatggggagggaatgt

SEQ ID NO: 7790 - DNA, 20 bp, synthetic construct
  misc_feature 1..20: note = Description of Artificial Sequence: Synthetic oligonucleotide
  misc_feature 1..20: note = Target: SCN10A; (-) strand; PAM type: NNGRRT; PAM sequence: GGGAAT
  source 1..20: mol_type = other DNA
caacccagagctcatgggga

SEQ ID NO: 7791 - DNA, 20 bp, synthetic construct
  misc_feature 1..20: note = Description of Artificial Sequence: Synthetic oligonucleotide
  misc_feature 1..20: note = Target: SCN10A; (-) strand; PAM type: NNGRRT; PAM sequence: TGGGGT
  source 1..20: mol_type = other DNA
tggcatattatgggcacaga

SEQ ID NO: 7792 - DNA, 20 bp, synthetic construct
  misc_feature 1..20: note = Description of Artificial Sequence: Synthetic oligonucleotide
  misc_feature 1..20: note = Target: SCN10A; (-) strand; PAM type: NNGRRT; PAM sequence: ACGAGT
  source 1..20: mol_type = other DNA
ttcccaacttatgacaaagc

SEQ ID NO: 7793 - DNA, 20 bp, synthetic construct
  misc_feature 1..20: note = Description of Artificial Sequence: Synthetic oligonucleotide
  misc_feature 1..20: note = Target: SCN10A; (-) strand; PAM type: NNGRRT; PAM sequence: GTGAGT
  source 1..20: mol_type = other DNA
ggcaatggatctgactcagg

SEQ ID NO: 7794 - DNA, 20 bp, synthetic construct
  misc_feature 1..20: note = Description of Artificial Sequence: Synthetic oligonucleotide
  misc_feature 1..20: note = Target: SCN10A; (-) strand; PAM type: NNGRRT; PAM sequence: CAGGGT
  source 1..20: mol_type = other DNA
gtgtggcaatggatctgact

SEQ ID NO: 7795 - DNA, 20 bp, synthetic construct
  misc_feature 1..20: note = Description of Artificial Sequence: Synthetic oligonucleotide
  misc_feature 1..20: note = Target: SCN10A; (-) strand; PAM type: NNGRRT; PAM sequence: ATGGAT
  source 1..20: mol_type = other DNA
tgaccccttactgtgtggca

SEQ ID NO: 7796 - DNA, 20 bp, synthetic construct
  misc_feature 1..20: note = Description of Artificial Sequence: Synthetic oligonucleotide
  misc_feature 1..20: note = Target: SCN10A; (-) strand; PAM type: NNGRRT; PAM sequence: GAGGGT
  source 1..20: mol_type = other DNA
accacacaaggcttgggttg

SEQ ID NO: 7797 - DNA, 20 bp, synthetic construct
  misc_feature 1..20: note = Description of Artificial Sequence: Synthetic oligonucleotide
  misc_feature 1..20: note = Target: SCN10A; (-) strand; PAM type: NNGRRT; PAM sequence: TTGGGT
  source 1..20: mol_type = other DNA
ttgcattcaccacacaaggc

SEQ ID NO: 7798 - DNA, 20 bp, synthetic construct
  misc_feature 1..20: note = Description of Artificial Sequence: Synthetic oligonucleotide
  misc_feature 1..20: note = Target: SCN10A; (-) strand; PAM type: NNGRRT; PAM sequence: GGGAAT
  source 1..20: mol_type = other DNA
gagctcactttggaagactt

SEQ ID NO: 7799 - DNA, 20 bp, synthetic construct
  misc_feature 1..20: note = Description of Artificial Sequence: Synthetic oligonucleotide
  misc_feature 1..20: note = Target: SCN10A; (-) strand; PAM type: NNGRRT; PAM sequence: CTGAGT
  source 1..20: mol_type = other DNA
catgtggcccagcatgccca

SEQ ID NO: 7800 - DNA, 20 bp, synthetic construct
  misc_feature 1..20: note = Description of Artificial Sequence: Synthetic oligonucleotide
  misc_feature 1..20: note = Target: SCN10A; (-) strand; PAM type: NNGRRT; PAM sequence: TTGGGT
  source 1..20: mol_type = other DNA
tcttgagttgtgttttactt

SEQ ID NO: 7801 - DNA, 20 bp, synthetic construct
  misc_feature 1..20: note = Description of Artificial Sequence: Synthetic oligonucleotide
  misc_feature 1..20: note = Target: SCN10A; (-) strand; PAM type: NNGRRT; PAM sequence: TTGAGT
  source 1..20: mol_type = other DNA
ttcctgccaaaatggttctc

SEQ ID NO: 7802 - DNA, 20 bp, synthetic construct
  misc_feature 1..20: note = Description of Artificial Sequence: Synthetic oligonucleotide
  misc_feature 1..20: note = Target: SCN10A; (-) strand; PAM type: NNGRRT; PAM sequence: GGGGAT
  source 1..20: mol_type = other DNA
cttggtatcatatagggaca

SEQ ID NO: 7803 - DNA, 20 bp, synthetic construct
  misc_feature 1..20: note = Description of Artificial Sequence: Synthetic oligonucleotide
  misc_feature 1..20: note = Target: SCN10A; (-) strand; PAM type: NNGRRT; PAM sequence: TGGAGT
  source 1..20: mol_type = other DNA
catctcacagaaaacgtgag

SEQ ID NO: 7804 - DNA, 20 bp, synthetic construct
  misc_feature 1..20: note = Description of Artificial Sequence: Synthetic oligonucleotide
  misc_feature 1..20: note = Target: SCN10A; (-) strand; PAM type: NNGRRT; PAM sequence: GTGAGT
  source 1..20: mol_type = other DNA
ctactcatctcacagaaaac

SEQ ID NO: 7805 - DNA, 20 bp, synthetic construct
  misc_feature 1..20: note = Description of Artificial Sequence: Synthetic oligonucleotide
  misc_feature 1..20: note = Target: SCN10A; (-) strand; PAM type: NNGRRT; PAM sequence: AAGAAT
  source 1..20: mol_type = other DNA
acctcaaaaataaatgtgtc

SEQ ID NO: 7806 - DNA, 20 bp, synthetic construct
  misc_feature 1..20: note = Description of Artificial Sequence: Synthetic oligonucleotide
  misc_feature 1..20: note = Target: SCN10A; (-) strand; PAM type: NNGRRT; PAM sequence: GAGGAT
  source 1..20: mol_type = other DNA
tcctgtatgtagagatgaag

SEQ ID NO: 7807 - DNA, 20 bp, synthetic construct
  misc_feature 1..20: note = Description of Artificial Sequence: Synthetic oligonucleotide
  misc_feature 1..20: note = Target: SCN10A; (-) strand; PAM type: NNGRRT; PAM sequence: TGGAGT
  source 1..20: mol_type = other DNA
gaaaggtcttggaactgccc

SEQ ID NO: 7808 - DNA, 20 bp, synthetic construct
  misc_feature 1..20: note = Description of Artificial Sequence: Synthetic oligonucleotide
  misc_feature 1..20: note = Target: SCN10A; (-) strand; PAM type: NNGRRT; PAM sequence: TCGGAT
  source 1..20: mol_type = other DNA
tctcagagtaaatgcaagct

SEQ ID NO: 7809 - DNA, 20 bp, synthetic construct
  misc_feature 1..20: note = Description of Artificial Sequence: Synthetic oligonucleotide
  misc_feature 1..20: note = Target: SCN10A; (-) strand; PAM type: NNGRRT; PAM sequence: CAGAGT
  source 1..20: mol_type = other DNA
ctgactctctgcctgcctct

SEQ ID NO: 7810 - DNA, 20 bp, synthetic construct
  misc_feature 1..20: note = Description of Artificial Sequence: Synthetic oligonucleotide
  misc_feature 1..20: note = Target: SCN10A; (-) strand; PAM type: NNGRRT; PAM sequence: GAGAAT
  source 1..20: mol_type = other DNA
agttgcatcgtctttataat

SEQ ID NO: 7811 - DNA, 20 bp, synthetic construct
  misc_feature 1..20: note = Description of Artificial Sequence: Synthetic oligonucleotide
  misc_feature 1..20: note = Target: SCN10A; (-) strand; PAM type: NNGRRT; PAM sequence: CTGGGT
  source 1..20: mol_type = other DNA
gatgataaaaaatgcattgc

SEQ ID NO: 7812 - DNA, 20 bp, synthetic construct
  misc_feature 1..20: note = Description of Artificial Sequence: Synthetic oligonucleotide
  misc_feature 1..20: note = Target: SCN10A; (-) strand; PAM type: NNGRRT; PAM sequence: AGGAAT
  source 1..20: mol_type = other DNA
taaattgaattgctagtgtc

SEQ ID NO: 7813 - DNA, 20 bp, synthetic construct
  misc_feature 1..20: note = Description of Artificial Sequence: Synthetic oligonucleotide
  misc_feature 1..20: note = Target: SCN10A; (-) strand; PAM type: NNGRRT; PAM sequence: TTGAAT
  source 1..20: mol_type = other DNA
ctcagcataaattatttaaa

SEQ ID NO: 7814 - DNA, 20 bp, synthetic construct
  misc_feature 1..20: note = Description of Artificial Sequence: Synthetic oligonucleotide
  misc_feature 1..20: note = Target: SCN10A; (-) strand; PAM type: NNGRRT; PAM sequence: TGGGGT
  source 1..20: mol_type = other DNA
aaagacagatgccaaattac

SEQ ID NO: 7815 - DNA, 20 bp, synthetic construct
  misc_feature 1..20: note = Description of Artificial Sequence: Synthetic oligonucleotide
  misc_feature 1..20: note = Target: SCN10A; (-) strand; PAM type: NNGRRT; PAM sequence: GTGGAT
  source 1..20: mol_type = other DNA
actgacacatgtagtgctca

SEQ ID NO: 7816 - DNA, 20 bp, synthetic construct
  misc_feature 1..20: note = Description of Artificial Sequence: Synthetic oligonucleotide
  misc_feature 1..20: note = Target: SCN10A; (-) strand; PAM type: NNGRRT; PAM sequence: TGGGAT
  source 1..20: mol_type = other DNA
tactgtgctgccccttcttc

SEQ ID NO: 7817 - DNA, 20 bp, synthetic construct
  misc_feature 1..20: note = Description of Artificial Sequence: Synthetic oligonucleotide
  misc_feature 1..20: note = Target: SCN10A; (-) strand; PAM type: NNGRRT; PAM sequence: TGGAAT
  source 1..20: mol_type = other DNA
cctcacatctcaccatgctc

SEQ ID NO: 7818 - DNA, 20 bp, synthetic construct
  misc_feature 1..20: note = Description of Artificial Sequence: Synthetic oligonucleotide
  misc_feature 1..20: note = Target: SCN10A; (-) strand; PAM type: NNGRRT; PAM sequence: CTGAGT
  source 1..20: mol_type = other DNA
tactctcaactgggaagacc

SEQ ID NO: 7819 - DNA, 20 bp, synthetic construct
  misc_feature 1..20: note = Description of Artificial Sequence: Synthetic oligonucleotide
  misc_feature 1..20: note = Target: SCN10A; (-) strand; PAM type: NNGRRT; PAM sequence: TAGAGT
  source 1..20: mol_type = other DNA
gtaaacagaaacacccattc

SEQ ID NO: 7820 - DNA, 20 bp, synthetic construct
  misc_feature 1..20: note = Description of Artificial Sequence: Synthetic oligonucleotide
  misc_feature 1..20: note = Target: SCN10A; (-) strand; PAM type: NNGRRT; PAM sequence: AAGAAT
  source 1..20: mol_type = other DNA
aggttctctcctctcacccc

SEQ ID NO: 7821 - DNA, 20 bp, synthetic construct
  misc_feature 1..20: note = Description of Artificial Sequence: Synthetic oligonucleotide
  misc_feature 1..20: note = Target: SCN10A; (-) strand; PAM type: NNGRRT; PAM sequence: GAGGAT
  source 1..20: mol_type = other DNA
gcccccatgaggttgatggt

SEQ ID NO: 7822 - DNA, 20 bp, synthetic construct
  misc_feature 1..20: note = Description of Artificial Sequence: Synthetic oligonucleotide
  misc_feature 1..20: note = Target: SCN10A; (-) strand; PAM type: NNGRRT; PAM sequence: GAGAAT
  source 1..20: mol_type = other DNA
ttaggcaattcttgattact

SEQ ID NO: 7823 - DNA, 20 bp, synthetic construct
  misc_feature 1..20: note = Description of Artificial Sequence: Synthetic oligonucleotide
  misc_feature 1..20: note = Target: SCN10A; (-) strand; PAM type: NNGRRT; PAM sequence: AAGAAT
  source 1..20: mol_type = other DNA
tttagacacccagaggaaaa

SEQ ID NO: 7824 - DNA, 20 bp, synthetic construct
  misc_feature 1..20: note = Description of Artificial Sequence: Synthetic oligonucleotide
  misc_feature 1..20: note = Target: SCN10A; (-) strand; PAM type: NNGRRT; PAM sequence: AAGGAT
  source 1..20: mol_type = other DNA
tttatttataccttaaacta

SEQ ID NO: 7825 - DNA, 20 bp, synthetic construct
  misc_feature 1..20: note = Description of Artificial Sequence: Synthetic oligonucleotide
  misc_feature 1..20: note = Target: SCN10A; (-) strand; PAM type: NNGRRT; PAM sequence: TTGAAT
  source 1..20: mol_type = other DNA
attcaggcaagacccctcag

SEQ ID NO: 7826 - DNA, 20 bp, synthetic construct
  misc_feature 1..20: note = Description of Artificial Sequence: Synthetic oligonucleotide
  misc_feature 1..20: note = Target: SCN10A; (-) strand; PAM type: NNGRRT; PAM sequence: TGGGAT
  source 1..20: mol_type = other DNA
ttcactttctgttctggttg

SEQ ID NO: 7827 - DNA, 20 bp, synthetic construct
  misc_feature 1..20: note = Description of Artificial Sequence: Synthetic oligonucleotide
  misc_feature 1..20: note = Target: SCN10A; (-) strand; PAM type: NNGRRT; PAM sequence: TGGAGT
  source 1..20: mol_type = other DNA
aagacaaaggaactgaggcc

SEQ ID NO: 7828 - DNA, 20 bp, synthetic construct
  misc_feature 1..20: note = Description of Artificial Sequence: Synthetic oligonucleotide
  misc_feature 1..20: note = Target: SCN10A; (-) strand; PAM type: NNGRRT; PAM sequence: CAGAGT
  source 1..20: mol_type = other DNA
atctcaggcctgcggacatt

SEQ ID NO: 7829 - DNA, 20 bp, synthetic construct
  misc_feature 1..20: note = Description of Artificial Sequence: Synthetic oligonucleotide
  misc_feature 1..20: note = Target: SCN10A; (-) strand; PAM type: NNGRRT; PAM sequence: TGGGAT
  source 1..20: mol_type = other DNA
ggcacagcaatagatctccg

SEQ ID NO: 7830 - DNA, 20 bp, synthetic construct
  misc_feature 1..20: note = Description of Artificial Sequence: Synthetic oligonucleotide
  misc_feature 1..20: note = Target: SCN10A; (-) strand; PAM type: NNGRRT; PAM sequence: AAGGGT
  source 1..20: mol_type = other DNA
gatcacaatgcatcttctca

SEQ ID NO: 7831 - DNA, 20 bp, synthetic construct
  misc_feature 1..20: note = Description of Artificial Sequence: Synthetic oligonucleotide
  misc_feature 1..20: note = Target: SCN10A; (-) strand; PAM type: NNGRRT; PAM sequence: GTGGAT
  source 1..20: mol_type = other DNA
ataacagttagcctgtcaca

SEQ ID NO: 7832 - DNA, 20 bp, synthetic construct
  misc_feature 1..20: note = Description of Artificial Sequence: Synthetic oligonucleotide
  misc_feature 1..20: note = Target: SCN10A; (-) strand; PAM type: NNGRRT; PAM sequence: GGGGGT
  source 1..20: mol_type = other DNA
ttgccacagagtaccgcttc

SEQ ID NO: 7833 - DNA, 20 bp, synthetic construct
  misc_feature 1..20: note = Description of Artificial Sequence: Synthetic oligonucleotide
  misc_feature 1..20: note = Target: SCN10A; (-) strand; PAM type: NNGRRT; PAM sequence: CAGAGT
  source 1..20: mol_type = other DNA
atggcctggggttcttgcca

SEQ ID NO: 7834 - DNA, 20 bp, synthetic construct
  misc_feature 1..20: note = Description of Artificial Sequence: Synthetic oligonucleotide
  misc_feature 1..20: note = Target: SCN10A; (-) strand; PAM type: NNGRRT; PAM sequence: TGGGGT
  source 1..20: mol_type = other DNA
tcatttggaattgtatggcc

SEQ ID NO: 7835 - DNA, 20 bp, synthetic construct
  misc_feature 1..20: note = Description of Artificial Sequence: Synthetic oligonucleotide
  misc_feature 1..20: note = Target: SCN10A; (-) strand; PAM type: NNGRRT; PAM sequence: TGGAAT
  source 1..20: mol_type = other DNA
ctcagttcagcttcctcatt

SEQ ID NO: 7836 - DNA, 20 bp, synthetic construct
  misc_feature 1..20: note = Description of Artificial Sequence: Synthetic oligonucleotide
  misc_feature 1..20: note = Target: SCN10A; (-) strand; PAM type: NNGRRT; PAM sequence: ATGGGT
  source 1..20: mol_type = other DNA
tgggtgtccatgtggggctt

SEQ ID NO: 7837 - DNA, 20 bp, synthetic construct
  misc_feature 1..20: note = Description of Artificial Sequence: Synthetic oligonucleotide
  misc_feature 1..20: note = Target: SCN10A; (-) strand; PAM type: NNGRRT; PAM sequence: ATGGGT
  source 1..20: mol_type = other DNA
aataaaataaaaagatttgc

SEQ ID NO: 7838 - DNA, 20 bp, synthetic construct
  misc_feature 1..20: note = Description of Artificial Sequence: Synthetic oligonucleotide
  misc_feature 1..20: note = Target: SCN10A; (-) strand; PAM type: NNGRRT; PAM sequence: AAGAAT
  source 1..20: mol_type = other DNA
aatctcagaaatcagcgtta

SEQ ID NO: 7839 - DNA, 20 bp, synthetic construct
  misc_feature 1..20: note = Description of Artificial Sequence: Synthetic oligonucleotide
  misc_feature 1..20: note = Target: SCN10A; (-) strand; PAM type: NNGRRT; PAM sequence: TCGGGT
  source 1..20: mol_type = other DNA
ctgggtacagtgtacactgc

SEQ ID NO: 7840 - DNA, 20 bp, synthetic construct
  misc_feature 1..20: note = Description of Artificial Sequence: Synthetic oligonucleotide
  misc_feature 1..20: note = Target: SCN10A; (-) strand; PAM type: NNGRRT; PAM sequence: CTGGGT
  source 1..20: mol_type = other DNA
aagggataagagactacaca

SEQ ID NO: 7841 - DNA, 20 bp, synthetic construct
  misc_feature 1..20: note = Description of Artificial Sequence: Synthetic oligonucleotide
  misc_feature 1..20: note = Target: SCN10A; (-) strand; PAM type: NNGRRT; PAM sequence: AGGGAT
  source 1..20: mol_type = other DNA
ggaaaggtgagacgaaggta

SEQ ID NO: 7842 - DNA, 20 bp, synthetic construct
  misc_feature 1..20: note = Description of Artificial Sequence: Synthetic oligonucleotide
  misc_feature 1..20: note = Target: SCN10A; (-) strand; PAM type: NNGRRT; PAM sequence: GAGGAT
  source 1..20: mol_type = other DNA
acaagcaggagctaagctgt

SEQ ID NO: 7843 - DNA, 20 bp, synthetic construct
  misc_feature 1..20: note = Description of Artificial Sequence: Synthetic oligonucleotide
  misc_feature 1..20: note = Target: SCN10A; (-) strand; PAM type: NNGRRT; PAM sequence: AGGAAT
  source 1..20: mol_type = other DNA
tattctaaatgaagtaactc

SEQ ID NO: 7844 - DNA, 20 bp, synthetic construct
  misc_feature 1..20: note = Description of Artificial Sequence: Synthetic oligonucleotide
  misc_feature 1..20: note = Target: SCN10A; (-) strand; PAM type: NNGRRT; PAM sequence: TGGAGT
  source 1..20: mol_type = other DNA
ggcattggcagcaagctgga

SEQ ID NO: 7845 - DNA, 20 bp, synthetic construct
  misc_feature 1..20: note = Description of Artificial Sequence: Synthetic oligonucleotide
  misc_feature 1..20: note = Target: SCN10A; (-) strand; PAM type: NNGRRT; PAM sequence: CTGGAT
  source 1..20: mol_type = other DNA
ataatggcattggcagcaag

SEQ ID NO: 7846 - DNA, 20 bp, synthetic construct
  misc_feature 1..20: note = Description of Artificial Sequence: Synthetic oligonucleotide
  misc_feature 1..20: note = Target: SCN10A; (-) strand; PAM type: NNGRRT; PAM sequence: AGGAAT
  source 1..20: mol_type = other DNA
aatactactcagttgtaaaa

SEQ ID NO: 7847 - DNA, 20 bp, synthetic construct
  misc_feature 1..20: note = Description of Artificial Sequence: Synthetic oligonucleotide
  misc_feature 1..20: note = Target: SCN10A; (-) strand; PAM type: NNGRRT; PAM sequence: TGGAAT
  source 1..20: mol_type = other DNA
aatatggtgtatgcatacca

SEQ ID NO: 7848 - DNA, 20 bp, synthetic construct
  misc_feature 1..20: note = Description of Artificial Sequence: Synthetic oligonucleotide
  misc_feature 1..20: note = Target: SCN10A; (-) strand; PAM type: NNGRRT; PAM sequence: CTGGGT
  source 1..20: mol_type = other DNA
ttggtccagcaatcccacta

SEQ ID NO: 7849 - DNA, 20 bp, synthetic construct
  misc_feature 1..20: note = Description of Artificial Sequence: Synthetic oligonucleotide
  misc_feature 1..20: note = Target: SCN10A; (-) strand; PAM type: NNGRRT; PAM sequence: GGGAAT
  source 1..20: mol_type = other DNA
aacaattttacactgctggt

SEQ ID NO: 7850 - DNA, 20 bp, synthetic construct
  misc_feature 1..20: note = Description of Artificial Sequence: Synthetic oligonucleotide
  misc_feature 1..20: note = Target: SCN10A; (-) strand; PAM type: NNGRRT; PAM sequence: ATGGAT
  source 1..20: mol_type = other DNA
aaaaaataatagatgttggc

SEQ ID NO: 7851 - DNA, 20 bp, synthetic construct
  misc_feature 1..20: note = Description of Artificial Sequence: Synthetic oligonucleotide
  misc_feature 1..20: note = Target: SCN10A; (-) strand; PAM type: NNGRRT; PAM sequence: AAGAAT
  source 1..20: mol_type = other DNA
agataccaccttactcctgc

SEQ ID NO: 7852 - DNA, 20 bp, synthetic construct
  misc_feature 1..20: note = Description of Artificial Sequence: Synthetic oligonucleotide
  misc_feature 1..20: note = Target: SCN10A; (-) strand; PAM type: NNGRRT; PAM sequence: AAGAAT
  source 1..20: mol_type = other DNA
tccaaaagtgggcaaaggac

SEQ ID NO: 7853 - DNA, 20 bp, synthetic construct
  misc_feature 1..20: note = Description of Artificial Sequence: Synthetic oligonucleotide
  misc_feature 1..20: note = Target: SCN10A; (-) strand; PAM type: NNGRRT; PAM sequence: TAGGAT
  source 1..20: mol_type = other DNA
ccaagtaaacagacaaccca

SEQ ID NO: 7854 - DNA, 20 bp, synthetic construct
  misc_feature 1..20: note = Description of Artificial Sequence: Synthetic oligonucleotide
  misc_feature 1..20: note = Target: SCN10A; (-) strand; PAM type: NNGRRT; PAM sequence: TGGGAT
  source 1..20: mol_type = other DNA
caaaaacaaaaataaataga

SEQ ID NO: 7855 - DNA, 20 bp, synthetic construct
  misc_feature 1..20: note = Description of Artificial Sequence: Synthetic oligonucleotide
  misc_feature 1..20: note = Target: SCN10A; (-) strand; PAM type: NNGRRT; PAM sequence: ATGGAT
  source 1..20: mol_type = other DNA
tatacaaaaatcaattcaag

SEQ ID NO: 7856 - DNA, 20 bp, synthetic construct
  misc_feature 1..20: note = Description of Artificial Sequence: Synthetic oligonucleotide
  misc_feature 1..20: note = Target: SCN10A; (-) strand; PAM type: NNGRRT; PAM sequence: CTGAAT
  source 1..20: mol_type = other DNA
ccacatgtggaagaaagaaa

SEQ ID NO: 7857 - DNA, 20 bp, synthetic construct
  misc_feature 1..20: note = Description of Artificial Sequence: Synthetic oligonucleotide
  misc_feature 1..20: note = Target: SCN10A; (-) strand; PAM type: NNGRRT; PAM sequence: TGGGAT
  source 1..20: mol_type = other DNA
ccctattcaacaaatggtgc

SEQ ID NO: 7858 - DNA, 20 bp, synthetic construct
  misc_feature 1..20: note = Description of Artificial Sequence: Synthetic oligonucleotide
  misc_feature 1..20: note = Target: SCN10A; (-) strand; PAM type: NNGRRT; PAM sequence: AAGAAT
  source 1..20: mol_type = other DNA
aagcacatagaccaatggaa

SEQ ID NO: 7859 - DNA, 20 bp, synthetic construct
  misc_feature 1..20: note = Description of Artificial Sequence: Synthetic oligonucleotide
  misc_feature 1..20: note = Target: SCN10A; (-) strand; PAM type: NNGRRT; PAM sequence: AAGAAT
  source 1..20: mol_type = other DNA
tagccaaagcaagactaagc

SEQ ID NO: 7860 - DNA, 20 bp, synthetic construct
  misc_feature 1..20: note = Description of Artificial Sequence: Synthetic oligonucleotide
  misc_feature 1..20: note = Target: SCN10A; (-) strand; PAM type: NNGRRT; PAM sequence: AGGAAT
  source 1..20: mol_type = other DNA
aaattcatagggaaccaaaa

SEQ ID NO: 7861 - DNA, 20 bp, synthetic construct
  misc_feature 1..20: note = Description of Artificial Sequence: Synthetic oligonucleotide
  misc_feature 1..20: note = Target: SCN10A; (-) strand; PAM type: NNGRRT; PAM sequence: ATGGAT
  source 1..20: mol_type = other DNA
aacacatcccatgctcatgg

SEQ ID NO: 7862 - DNA, 20 bp, synthetic construct
  misc_feature 1..20: note = Description of Artificial Sequence: Synthetic oligonucleotide
  misc_feature 1..20: note = Target: SCN10A; (-) strand; PAM type: NNGRRT; PAM sequence: ATGGAT
  source 1..20: mol_type = other DNA
tgggaacacatcccatgctc

SEQ ID NO: 7863 - DNA, 20 bp, synthetic construct
  misc_feature 1..20: note = Description of Artificial Sequence: Synthetic oligonucleotide
  misc_feature 1..20: note = Target: SCN10A; (-) strand; PAM type: NNGRRT; PAM sequence: AGGAAT
  source 1..20: mol_type = other DNA
aataaaaacaaaaaaatctt

SEQ ID NO: 7864 - DNA, 20 bp, synthetic construct
  misc_feature 1..20: note = Description of Artificial Sequence: Synthetic oligonucleotide
  misc_feature 1..20: note = Target: SCN10A; (-) strand; PAM type: NNGRRT; PAM sequence: CAGGAT
  source 1..20: mol_type = other DNA
aaatgaattcagtaaagttt

SEQ ID NO: 7865 - DNA, 20 bp, synthetic construct
  misc_feature 1..20: note = Description of Artificial Sequence: Synthetic oligonucleotide
  misc_feature 1..20: note = Target: SCN10A; (-) strand; PAM type: NNGRRT; PAM sequence: ATGAAT
  source 1..20: mol_type = other DNA
aaagctcctagatctaataa

SEQ ID NO: 7866 - DNA, 20 bp, synthetic construct
  misc_feature 1..20: note = Description of Artificial Sequence: Synthetic oligonucleotide
  misc_feature 1..20: note = Target: SCN10A; (-) strand; PAM type: NNGRRT; PAM sequence: GGGAAT
  source 1..20: mol_type = other DNA
agacaagagaaataaataaa

SEQ ID NO: 7867 - DNA, 20 bp, synthetic construct
  misc_feature 1..20: note = Description of Artificial Sequence: Synthetic oligonucleotide
  misc_feature 1..20: note = Target: SCN10A; (-) strand; PAM type: NNGRRT; PAM sequence: AAGGAT
  source 1..20: mol_type = other DNA
cctgagaactgaaacaagac

SEQ ID NO: 7868 - DNA, 20 bp, synthetic construct
  misc_feature 1..20: note = Description of Artificial Sequence: Synthetic oligonucleotide
  misc_feature 1..20: note = Target: SCN10A; (-) strand; PAM type: NNGRRT; PAM sequence: CAGAAT
  source 1..20: mol_type = other DNA
aatgctgcacgtcacataaa

SEQ ID NO: 7869 - DNA, 20 bp, synthetic construct
  misc_feature 1..20: note = Description of Artificial Sequence: Synthetic oligonucleotide
  misc_feature 1..20: note = Target: SCN10A; (-) strand; PAM type: NNGRRT; PAM sequence: AGGGAT
  source 1..20: mol_type = other DNA
gggtttcataccagggaggt

SEQ ID NO: 7870 - DNA, 20 bp, synthetic construct
  misc_feature 1..20: note = Description of Artificial Sequence: Synthetic oligonucleotide
  misc_feature 1..20: note = Target: SCN10A; (-) strand; PAM type: NNGRRT; PAM sequence: GGGGGT
  source 1..20: mol_type = other DNA
agataacacaccatgatcaa

SEQ ID NO: 7871 - DNA, 20 bp, synthetic construct
  misc_feature 1..20: note = Description of Artificial Sequence: Synthetic oligonucleotide
  misc_feature 1..20: note = Target: SCN10A; (-) strand; PAM type: NNGRRT; PAM sequence: TTGAAT
  source 1..20: mol_type = other DNA
ctcaacaaaatgctagctaa

SEQ ID NO: 7872 - DNA, 20 bp, synthetic construct
  misc_feature 1..20: note = Description of Artificial Sequence: Synthetic oligonucleotide
  misc_feature 1..20: note = Target: SCN10A; (-) strand; PAM type: NNGRRT; PAM sequence: GGGAAT
  source 1..20: mol_type = other DNA
ttccaaaagatgcagaaaga

SEQ ID NO: 7873 - DNA, 20 bp, synthetic construct
  misc_feature 1..20: note = Description of Artificial Sequence: Synthetic oligonucleotide
  misc_feature 1..20: note = Target: SCN10A; (-) strand; PAM type: NNGRRT; PAM sequence: AAGAAT
  source 1..20: mol_type = other DNA
attctatcagacattcaaag

SEQ ID NO: 7874 - DNA, 20 bp, synthetic construct
  misc_feature 1..20: note = Description of Artificial Sequence: Synthetic oligonucleotide
  misc_feature 1..20: note = Target: SCN10A; (-) strand; PAM type: NNGRRT; PAM sequence: CTGAAT
  source 1..20: mol_type = other DNA
ggagcagactggattcacag

SEQ ID NO: 7875 - DNA, 20 bp, synthetic construct
  misc_feature 1..20: note = Description of Artificial Sequence: Synthetic oligonucleotide
  misc_feature 1..20: note = Target: SCN10A; (-) strand; PAM type: NNGRRT; PAM sequence: CTGGAT
  source 1..20: mol_type = other DNA
aaaaaaagtccaggagcaga

SEQ ID NO: 7876 - DNA, 20 bp, synthetic construct
  misc_feature 1..20: note = Description of Artificial Sequence: Synthetic oligonucleotide
  misc_feature 1..20: note = Target: SCN10A; (-) strand; PAM type: NNGRRT; PAM sequence: ATGAAT
  source 1..20: mol_type = other DNA
aactagaaaatttagaggag

SEQ ID NO: 7877 - DNA, 20 bp, synthetic construct
  misc_feature 1..20: note = Description of Artificial Sequence: Synthetic oligonucleotide
  misc_feature 1..20: note = Target: SCN10A; (-) strand; PAM type: NNGRRT; PAM sequence: GCGGGT
  source 1..20: mol_type = other DNA
aaagataagtgaaacaaaaa

SEQ ID NO: 7878 - DNA, 20 bp, synthetic construct
  misc_feature 1..20: note = Description of Artificial Sequence: Synthetic oligonucleotide
  misc_feature 1..20: note = Target: SCN10A; (-) strand; PAM type: NNGRRT; PAM sequence: AGGAAT
  source 1..20: mol_type = other DNA
cccaaaccaagcagaagaaa

SEQ ID NO: 7879 - DNA, 20 bp, synthetic construct
  misc_feature 1..20: note = Description of Artificial Sequence: Synthetic oligonucleotide
  misc_feature 1..20: note = Target: SCN10A; (-) strand; PAM type: NNGRRT; PAM sequence: AGGAAT
  source 1..20: mol_type = other DNA
taatctaaggtcacacctca

SEQ ID NO: 7880 - DNA, 20 bp, synthetic construct
  misc_feature 1..20: note = Description of Artificial Sequence: Synthetic oligonucleotide
  misc_feature 1..20: note = Target: SCN10A; (-) strand; PAM type: NNGRRT; PAM sequence: TGGGAT
  source 1..20: mol_type = other DNA
acacaacttatcaaaacctc

SEQ ID NO: 7881 - DNA, 20 bp, synthetic construct
  misc_feature 1..20: note = Description of Artificial Sequence: Synthetic oligonucleotide
  misc_feature 1..20: note = Target: SCN10A; (-) strand; PAM type: NNGRRT; PAM sequence: CTGAAT
  source 1..20: mol_type = other DNA
aagtttaaaaattttttgaa

SEQ ID NO: 7882 - DNA, 20 bp, synthetic construct
  misc_feature 1..20: note = Description of Artificial Sequence: Synthetic oligonucleotide
  misc_feature 1..20: note = Target: SCN10A; (-) strand; PAM type: NNGRRT; PAM sequence: TTGGGT
  source 1..20: mol_type = other DNA
aatctgctcttgaatgatct

SEQ ID NO: 7883 - DNA, 20 bp, synthetic construct
  misc_feature 1..20: note = Description of Artificial Sequence: Synthetic oligonucleotide
  misc_feature 1..20: note = Target: SCN10A; (-) strand; PAM type: NNGRRT; PAM sequence: TTGAAT
  source 1..20: mol_type = other DNA
gaaaactaaacaatctgctc

SEQ ID NO: 7884 - DNA, 20 bp, synthetic construct
  misc_feature 1..20: note = Description of Artificial Sequence: Synthetic oligonucleotide
  misc_feature 1..20: note = Target: SCN10A; (-) strand; PAM type: NNGRRT; PAM sequence: CGGAGT
  source 1..20: mol_type = other DNA
gagcacagtcgaataaacct

SEQ ID NO: 7885 - DNA, 20 bp, synthetic construct
  misc_feature 1..20: note = Description of Artificial Sequence: Synthetic oligonucleotide
  misc_feature 1..20: note = Target: SCN10A; (-) strand; PAM type: NNGRRT; PAM sequence: TCGAAT
  source 1..20: mol_type = other DNA
ggtatcctctcagagcacag

SEQ ID NO: 7886 - DNA, 20 bp, synthetic construct
  misc_feature 1..20: note = Description of Artificial Sequence: Synthetic oligonucleotide
  misc_feature 1..20: note = Target: SCN10A; (-) strand; PAM type: NNGRRT; PAM sequence: TGGAAT
  source 1..20: mol_type = other DNA
acattcttttcatcagcaca

SEQ ID NO: 7887 - DNA, 20 bp, synthetic construct
  misc_feature 1..20: note = Description of Artificial Sequence: Synthetic oligonucleotide
  misc_feature 1..20: note = Target: SCN10A; (-) strand; PAM type: NNGRRT; PAM sequence: CAGAAT
  source 1..20: mol_type = other DNA
aacattctaccaaacaactg

SEQ ID NO: 7888 - DNA, 20 bp, synthetic construct
  misc_feature 1..20: note = Description of Artificial Sequence: Synthetic oligonucleotide
  misc_feature 1..20: note = Target: SCN10A; (-) strand; PAM type: NNGRRT; PAM sequence: GGGGAT
  source 1..20: mol_type = other DNA
acagcaatataataatagtg

SEQ ID NO: 7889 - DNA, 20 bp, synthetic construct
  misc_feature 1..20: note = Description of Artificial Sequence: Synthetic oligonucleotide
  misc_feature 1..20: note = Target: SCN10A; (-) strand; PAM type: NNGRRT; PAM sequence: AGGAGT
  source 1..20: mol_type = other DNA
aatggaaaccaaaagcaagc

SEQ ID NO: 7890 - DNA, 20 bp, synthetic construct
  misc_feature 1..20: note = Description of Artificial Sequence: Synthetic oligonucleotide
  misc_feature 1..20: note = Target: SCN10A; (-) strand; PAM type: NNGRRT; PAM sequence: TTGAGT
  source 1..20: mol_type = other DNA
ctcacatctcaatactgatg

SEQ ID NO: 7891 - DNA, 20 bp, synthetic construct
  misc_feature 1..20: note = Description of Artificial Sequence: Synthetic oligonucleotide
  misc_feature 1..20: note = Target: SCN10A; (-) strand; PAM type: NNGRRT; PAM sequence: AAGAGT
  source 1..20: mol_type = other DNA
ataactagcataatgaatag

SEQ ID NO: 7892 - DNA, 20 bp, synthetic construct
  misc_feature 1..20: note = Description of Artificial Sequence: Synthetic oligonucleotide
  misc_feature 1..20: note = Target: SCN10A; (-) strand; PAM type: NNGRRT; PAM sequence: ATGAAT
  source 1..20: mol_type = other DNA
ttaaggcaataactagcata

SEQ ID NO: 7893 - DNA, 20 bp, synthetic construct
  misc_feature 1..20: note = Description of Artificial Sequence: Synthetic oligonucleotide
  misc_feature 1..20: note = Target: SCN10A; (-) strand; PAM type: NNGRRT; PAM sequence: AGGAAT
  source 1..20: mol_type = other DNA
aacaataacacaataaaaaa

SEQ ID NO: 7894 - DNA, 20 bp, synthetic construct
  misc_feature 1..20: note = Description of Artificial Sequence: Synthetic oligonucleotide
  misc_feature 1..20: note = Target: SCN10A; (-) strand; PAM type: NNGRRT; PAM sequence: AGGAAT
  source 1..20: mol_type = other DNA
gcactacaagaaatgctaaa

SEQ ID NO: 7895 - DNA, 20 bp, synthetic construct
  misc_feature 1..20: note = Description of Artificial Sequence: Synthetic oligonucleotide
  misc_feature 1..20: note = Target: SCN10A; (-) strand; PAM type: NNGRRT; PAM sequence: GAGAAT
  source 1..20: mol_type = other DNA
ttcagacaaacaaatggtga

SEQ ID NO: 7896 - DNA, 20 bp, synthetic construct
  misc_feature 1..20: note = Description of Artificial Sequence: Synthetic oligonucleotide
  misc_feature 1..20: note = Target: SCN10A; (-) strand; PAM type: NNGRRT; PAM sequence: AAGAAT
  source 1..20: mol_type = other DNA
aaacaaaataattgccagcc

SEQ ID NO: 7897 - DNA, 20 bp, synthetic construct
  misc_feature 1..20: note = Description of Artificial Sequence: Synthetic oligonucleotide
  misc_feature 1..20: note = Target: SCN10A; (-) strand; PAM type: NNGRRT; PAM sequence: TAGGGT
  source 1..20: mol_type = other DNA
ccttgcaagccagaagggat

SEQ ID NO: 7898 - DNA, 20 bp, synthetic construct
  misc_feature 1..20: note = Description of Artificial Sequence: Synthetic oligonucleotide
  misc_feature 1..20: note = Target: SCN10A; (-) strand; PAM type: NNGRRT; PAM sequence: AGGGAT
  source 1..20: mol_type = other DNA
ctgaaaccttgcaagccaga

SEQ ID NO: 7899 - DNA, 20 bp, synthetic construct
  misc_feature 1..20: note = Description of Artificial Sequence: Synthetic oligonucleotide
  misc_feature 1..20: note = Target: SCN10A; (-) strand; PAM type: NNGRRT; PAM sequence: AAGAAT
  source 1..20: mol_type = other DNA
tctaaagtcaagacaaagaa

SEQ ID NO: 7900 - DNA, 20 bp, synthetic construct
  misc_feature 1..20: note = Description of Artificial Sequence: Synthetic oligonucleotide
  misc_feature 1..20: note = Target: SCN10A; (-) strand; PAM type: NNGRRT; PAM sequence: AAGAAT
  source 1..20: mol_type = other DNA
atccaaatacaagaagctca

SEQ ID NO: 7901 - DNA, 20 bp, synthetic construct
  misc_feature 1..20: note = Description of Artificial Sequence: Synthetic oligonucleotide
  misc_feature 1..20: note = Target: SCN10A; (-) strand; PAM type: NNGRRT; PAM sequence: GGGAAT
  source 1..20: mol_type = other DNA
agtttggaaaacttatttga

SEQ ID NO: 7902 - DNA, 20 bp, synthetic construct
  misc_feature 1..20: note = Description of Artificial Sequence: Synthetic oligonucleotide
  misc_feature 1..20: note = Target: SCN10A; (-) strand; PAM type: NNGRRT; PAM sequence: AAGAAT
  source 1..20: mol_type = other DNA
aataatgggtgttcccaagg

SEQ ID NO: 7903 - DNA, 20 bp, synthetic construct
  misc_feature 1..20: note = Description of Artificial Sequence: Synthetic oligonucleotide
  misc_feature 1..20: note = Target: SCN10A; (-) strand; PAM type: NNGRRT; PAM sequence: ATGGGT
  source 1..20: mol_type = other DNA
aacaaccaaacctaagaata

SEQ ID NO: 7904 - DNA, 20 bp, synthetic construct
  misc_feature 1..20: note = Description of Artificial Sequence: Synthetic oligonucleotide
  misc_feature 1..20: note = Target: SCN10A; (-) strand; PAM type: NNGRRT; PAM sequence: AAGAAT
  source 1..20: mol_type = other DNA
catgtgaaacaaccaaacct

SEQ ID NO: 7905 - DNA, 20 bp, synthetic construct
  misc_feature 1..20: note = Description of Artificial Sequence: Synthetic oligonucleotide
  misc_feature 1..20: note = Target: SCN10A; (-) strand; PAM type: NNGRRT; PAM sequence: TGGAAT
  source 1..20: mol_type = other DNA
gacaaatcggccaataaatt

SEQ ID NO: 7906 - DNA, 20 bp, synthetic construct
  misc_feature 1..20: note = Description of Artificial Sequence: Synthetic oligonucleotide
  misc_feature 1..20: note = Target: SCN10A; (-) strand; PAM type: NNGRRT; PAM sequence: AAGAAT
  source 1..20: mol_type = other DNA
aactaagacacacaaaaaga

SEQ ID NO: 7907 - DNA, 20 bp, synthetic construct
  misc_feature 1..20: note = Description of Artificial Sequence: Synthetic oligonucleotide
  misc_feature 1..20: note = Target: SCN10A; (-) strand; PAM type: NNGRRT; PAM sequence: ATGGAT
  source 1..20: mol_type = other DNA
aatttttaaaacaacaagat

SEQ ID NO: 7908 - DNA, 20 bp, synthetic construct
  misc_feature 1..20: note = Description of Artificial Sequence: Synthetic oligonucleotide
  misc_feature 1..20: note = Target: SCN10A; (-) strand; PAM type: NNGRRT; PAM sequence: AAGAAT
  source 1..20: mol_type = other DNA
catctcaaaaaaaaaaaaaa

SEQ ID NO: 7909 - DNA, 20 bp, synthetic construct
  misc_feature 1..20: note = Description of Artificial Sequence: Synthetic oligonucleotide
  misc_feature 1..20: note = Target: SCN10A; (-) strand; PAM type: NNGRRT; PAM sequence: AAGAGT
  source 1..20: mol_type = other DNA
tgcactccagcctgggcaac

SEQ ID NO: 7910 - DNA, 20 bp, synthetic construct
  misc_feature 1..20: note = Description of Artificial Sequence: Synthetic oligonucleotide
  misc_feature 1..20: note = Target: SCN10A; (-) strand; PAM type: NNGRRT; PAM sequence: GAGAAT
  source 1..20: mol_type = other DNA
tactcaggagactgaggcag

SEQ ID NO: 7911 - DNA, 20 bp, synthetic construct
  misc_feature 1..20: note = Description of Artificial Sequence: Synthetic oligonucleotide
  misc_feature 1..20: note = Target: SCN10A; (-) strand; PAM type: NNGRRT; PAM sequence: AAGAAT
  source 1..20: mol_type = other DNA
aatctctgaattgccagata

SEQ ID NO: 7912 - DNA, 20 bp, synthetic construct
  misc_feature 1..20: note = Description of Artificial Sequence: Synthetic oligonucleotide
  misc_feature 1..20: note = Target: SCN10A; (-) strand; PAM type: NNGRRT; PAM sequence: CTGAAT
  source 1..20: mol_type = other DNA
tccaaactaagaagaaatct

SEQ ID NO: 7913 - DNA, 20 bp, synthetic construct
  misc_feature 1..20: note = Description of Artificial Sequence: Synthetic oligonucleotide
  misc_feature 1..20: note = Target: SCN10A; (-) strand; PAM type: NNGRRT; PAM sequence: ATGGAT
  source 1..20: mol_type = other DNA
atcaaactagctccccaaca

SEQ ID NO: 7914 - DNA, 20 bp, synthetic construct
  misc_feature 1..20: note = Description of Artificial Sequence: Synthetic oligonucleotide
  misc_feature 1..20: note = Target: SCN10A; (-) strand; PAM type: NNGRRT; PAM sequence: GAGGGT
  source 1..20: mol_type = other DNA
attctggtaatatgacaaaa

SEQ ID NO: 7915 - DNA, 20 bp, synthetic construct
  misc_feature 1..20: note = Description of Artificial Sequence: Synthetic oligonucleotide
  misc_feature 1..20: note = Target: SCN10A; (-) strand; PAM type: NNGRRT; PAM sequence: AAGAAT
  source 1..20: mol_type = other DNA
agagatcacccatgaaacaa

SEQ ID NO: 7916 - DNA, 20 bp, synthetic construct
  misc_feature 1..20: note = Description of Artificial Sequence: Synthetic oligonucleotide
  misc_feature 1..20: note = Target: SCN10A; (-) strand; PAM type: NNGRRT; PAM sequence: GGGGAT
  source 1..20: mol_type = other DNA
ctcaggaagccccatcccca

SEQ ID NO: 7917 - DNA, 20 bp, synthetic construct
  misc_feature 1..20: note = Description of Artificial Sequence: Synthetic oligonucleotide
  misc_feature 1..20: note = Target: SCN10A; (-) strand; PAM type: NNGRRT; PAM sequence: CTGAGT
  source 1..20: mol_type = other DNA
atcctggctaaccagacgtc

SEQ ID NO: 7918 - DNA, 20 bp, synthetic construct
  misc_feature 1..20: note = Description of Artificial Sequence: Synthetic oligonucleotide
  misc_feature 1..20: note = Target: SCN10A; (-) strand; PAM type: NNGRRT; PAM sequence: CAGAAT
  source 1..20: mol_type = other DNA
gccattaaagcaactcatga

SEQ ID NO: 7919 - DNA, 20 bp, synthetic construct
  misc_feature 1..20: note = Description of Artificial Sequence: Synthetic oligonucleotide
  misc_feature 1..20: note = Target: SCN10A; (-) strand; PAM type: NNGRRT; PAM sequence: TAGGGT
  source 1..20: mol_type = other DNA
aatatttaccctggccaact

SEQ ID NO: 7920 - DNA, 20 bp, synthetic construct
  misc_feature 1..20: note = Description of Artificial Sequence: Synthetic oligonucleotide
  misc_feature 1..20: note = Target: SCN10A; (-) strand; PAM type: NNGRRT; PAM sequence: CTGAGT
  source 1..20: mol_type = other DNA
aatccctacccaagaagggt

SEQ ID NO: 7921 - DNA, 20 bp, synthetic construct
  misc_feature 1..20: note = Description of Artificial Sequence: Synthetic oligonucleotide
  misc_feature 1..20: note = Target: SCN10A; (-) strand; PAM type: NNGRRT; PAM sequence: AAGGGT
  source 1..20: mol_type = other DNA
cacagcaatccctacccaag

SEQ ID NO: 7922 - DNA, 20 bp, synthetic construct
  misc_feature 1..20: note = Description of Artificial Sequence: Synthetic oligonucleotide
  misc_feature 1..20: note = Target: SCN10A; (-) strand; PAM type: NNGRRT; PAM sequence: CTGAGT
  source 1..20: mol_type = other DNA
ctcacagcctggggcaaggt

SEQ ID NO: 7923 - DNA, 20 bp, synthetic construct
  misc_feature 1..20: note = Description of Artificial Sequence: Synthetic oligonucleotide
  misc_feature 1..20: note = Target: SCN10A; (-) strand; PAM type: NNGRRT; PAM sequence: AGGGAT
  source 1..20: mol_type = other DNA
ggaactgcaagcagacagtg

SEQ ID NO: 7924 - DNA, 20 bp, synthetic construct
  misc_feature 1..20: note = Description of Artificial Sequence: Synthetic oligonucleotide
  misc_feature 1..20: note = Target: SCN10A; (-) strand; PAM type: NNGRRT; PAM sequence: CAGAAT
  source 1..20: mol_type = other DNA
tgggcacaaattttcttgag

SEQ ID NO: 7925 - DNA, 20 bp, synthetic construct
  misc_feature 1..20: note = Description of Artificial Sequence: Synthetic oligonucleotide
  misc_feature 1..20: note = Target: SCN10A; (-) strand; PAM type: NNGRRT; PAM sequence: CAGGAT
  source 1..20: mol_type = other DNA
gtggaatcagggaggggtca

SEQ ID NO: 7926 - DNA, 20 bp, synthetic construct
  misc_feature 1..20: note = Description of Artificial Sequence: Synthetic oligonucleotide
  misc_feature 1..20: note = Target: SCN10A; (-) strand; PAM type: NNGRRT; PAM sequence: AGGGGT
  source 1..20: mol_type = other DNA
ggcagccagtggaatcaggg

SEQ ID NO: 7927 - DNA, 20 bp, synthetic construct
  misc_feature 1..20: note = Description of Artificial Sequence: Synthetic oligonucleotide
  misc_feature 1..20: note = Target: SCN10A; (-) strand; PAM type: NNGRRT; PAM sequence: TGGAAT
  source 1..20: mol_type = other DNA
cccttggggaaggcagccag

SEQ ID NO: 7928 - DNA, 20 bp, synthetic construct
  misc_feature 1..20: note = Description of Artificial Sequence: Synthetic oligonucleotide
  misc_feature 1..20: note = Target: SCN10A; (-) strand; PAM type: NNGRRT; PAM sequence: GGGAAT
  source 1..20: mol_type = other DNA
cagtctccagcttgagacca

SEQ ID NO: 7929 - DNA, 20 bp, synthetic construct
  misc_feature 1..20: note = Description of Artificial Sequence: Synthetic oligonucleotide
  misc_feature 1..20: note = Target: SCN10A; (-) strand; PAM type: NNGRRT; PAM sequence: TGGAAT
  source 1..20: mol_type = other DNA
gagaagaatttacccttacc

SEQ ID NO: 7930 - DNA, 20 bp, synthetic construct
  misc_feature 1..20: note = Description of Artificial Sequence: Synthetic oligonucleotide
  misc_feature 1..20: note = Target: SCN10A; (-) strand; PAM type: NNGRRT; PAM sequence: AAGAAT
  source 1..20: mol_type = other DNA
gaaaatccagatcacaggag

SEQ ID NO: 7931 - DNA, 20 bp, synthetic construct
  misc_feature 1..20: note = Description of Artificial Sequence: Synthetic oligonucleotide
  misc_feature 1..20: note = Target: SCN10A; (-) strand; PAM type: NNGRRT; PAM sequence: CTGGGT
  source 1..20: mol_type = other DNA
cctccaaacatacatcccaa

SEQ ID NO: 7932 - DNA, 20 bp, synthetic construct
  misc_feature 1..20: note = Description of Artificial Sequence: Synthetic oligonucleotide
  misc_feature 1..20: note = Target: SCN10A; (-) strand; PAM type: NNGRRT; PAM sequence: AAGAAT
  source 1..20: mol_type = other DNA
gaatataccaggagaactga

SEQ ID NO: 7933 - DNA, 20 bp, synthetic construct
  misc_feature 1..20: note = Description of Artificial Sequence: Synthetic oligonucleotide
  misc_feature 1..20: note = Target: SCN10A; (-) strand; PAM type: NNGRRT; PAM sequence: AGGAAT
  source 1..20: mol_type = other DNA
tttgctccaagaaccactgc

SEQ ID NO: 7934 - DNA, 20 bp, synthetic construct
  misc_feature 1..20: note = Description of Artificial Sequence: Synthetic oligonucleotide
  misc_feature 1..20: note = Target: SCN10A; (-) strand; PAM type: NNGRRT; PAM sequence: CAGAGT
  source 1..20: mol_type = other DNA
acatgcaggtcccacttgga

SEQ ID NO: 7935 - DNA, 20 bp, synthetic construct
  misc_feature 1..20: note = Description of Artificial Sequence: Synthetic oligonucleotide
  misc_feature 1..20: note = Target: SCN10A; (-) strand; PAM type: NNGRRT; PAM sequence: GTGGGT
  source 1..20: mol_type = other DNA
ataggagaggggacaaaatg

SEQ ID NO: 7936 - DNA, 20 bp, synthetic construct
  misc_feature 1..20: note = Description of Artificial Sequence: Synthetic oligonucleotide
  misc_feature 1..20: note = Target: SCN10A; (-) strand; PAM type: NNGRRT; PAM sequence: GTGAGT
  source 1..20: mol_type = other DNA
tttagcgtcattaccctggc

SEQ ID NO: 7937 - DNA, 20 bp, synthetic construct
  misc_feature 1..20: note = Description of Artificial Sequence: Synthetic oligonucleotide
  misc_feature 1..20: note = Target: SCN10A; (-) strand; PAM type: NNGRRT; PAM sequence: CTGGAT
  source 1..20: mol_type = other DNA
tgagagatccttggaactgg

SEQ ID NO: 7938 - DNA, 20 bp, synthetic construct
  misc_feature 1..20: note = Description of Artificial Sequence: Synthetic oligonucleotide
  misc_feature 1..20: note = Target: SCN10A; (-) strand; PAM type: NNGRRT; PAM sequence: ATGAGT
  source 1..20: mol_type = other DNA
ggcaagaggattttgtctaa

SEQ ID NO: 7939 - DNA, 20 bp, synthetic construct
  misc_feature 1..20: note = Description of Artificial Sequence: Synthetic oligonucleotide
  misc_feature 1..20: note = Target: SCN10A; (-) strand; PAM type: NNGRRT; PAM sequence: GAGGAT
  source 1..20: mol_type = other DNA
cttgataaagatactggcaa

SEQ ID NO: 7940 - DNA, 20 bp, synthetic construct
  misc_feature 1..20: note = Description of Artificial Sequence: Synthetic oligonucleotide
  misc_feature 1..20: note = Target: SCN10A; (-) strand; PAM type: NNGRRT; PAM sequence: CTGAGT
  source 1..20: mol_type = other DNA
ctcctggaagaaggaacccc

SEQ ID NO: 7941 - DNA, 20 bp, synthetic construct
  misc_feature 1..20: note = Description of Artificial Sequence: Synthetic oligonucleotide
  misc_feature 1..20: note = Target: SCN10A; (-) strand; PAM type: NNGRRT; PAM sequence: GAGAAT
  source 1..20: mol_type = other DNA
gccctggcagacataaacag

SEQ ID NO: 7942 - DNA, 20 bp, synthetic construct
  misc_feature 1..20: note = Description of Artificial Sequence: Synthetic oligonucleotide
  misc_feature 1..20: note = Target: SCN10A; (-) strand; PAM type: NNGRRT; PAM sequence: CAGGAT
  source 1..20: mol_type = other DNA
gatgagcctccagcttcttg

SEQ ID NO: 7943 - DNA, 20 bp, synthetic construct
  misc_feature 1..20: note = Description of Artificial Sequence: Synthetic oligonucleotide
  misc_feature 1..20: note = Target: SCN10A; (-) strand; PAM type: NNGRRT; PAM sequence: GGGAGT
  source 1..20: mol_type = other DNA
cactccagtttctaaaaact

SEQ ID NO: 7944 - DNA, 20 bp, synthetic construct
  misc_feature 1..20: note = Description of Artificial Sequence: Synthetic oligonucleotide
  misc_feature 1..20: note = Target: SCN10A; (-) strand; PAM type: NNGRRT; PAM sequence: CTGGGT
  source 1..20: mol_type = other DNA
cagcatagcttggcttgctt

SEQ ID NO: 7945 - DNA, 20 bp, synthetic construct
  misc_feature 1..20: note = Description of Artificial Sequence: Synthetic oligonucleotide
  misc_feature 1..20: note = Target: SCN10A; (-) strand; PAM type: NNGRRT; PAM sequence: ATGGAT
  source 1..20: mol_type = other DNA
cagaaacagtttctcattga

SEQ ID NO: 7946 - DNA, 20 bp, synthetic construct
  misc_feature 1..20: note = Description of Artificial Sequence: Synthetic oligonucleotide
  misc_feature 1..20: note = Target: SCN10A; (-) strand; PAM type: NNGRRT; PAM sequence: TTGAAT
  source 1..20: mol_type = other DNA
ggagcagaaacagtttctca

SEQ ID NO: 7947 - DNA, 20 bp, synthetic construct
  misc_feature 1..20: note = Description of Artificial Sequence: Synthetic oligonucleotide
  misc_feature 1..20: note = Target: SCN10A; (-) strand; PAM type: NNGRRT; PAM sequence: GGGAGT
  source 1..20: mol_type = other DNA
gagcagaagtgaatagggag

SEQ ID NO: 7948 - DNA, 20 bp, synthetic construct
  misc_feature 1..20: note = Description of Artificial Sequence: Synthetic oligonucleotide
  misc_feature 1..20: note = Target: SCN10A; (-) strand; PAM type: NNGRRT; PAM sequence: GTGAAT
  source 1..20: mol_type = other DNA
aaacttaacgaggagcagaa

SEQ ID NO: 7949 - DNA, 20 bp, synthetic construct
  misc_feature 1..20: note = Description of Artificial Sequence: Synthetic oligonucleotide
  misc_feature 1..20: note = Target: SCN10A; (-) strand; PAM type: NNGRRT; PAM sequence: CAGGAT
  source 1..20: mol_type = other DNA
cggggtttcaccgcgttagc

SEQ ID NO: 7950 - DNA, 20 bp, synthetic construct
  misc_feature 1..20: note = Description of Artificial Sequence: Synthetic oligonucleotide
  misc_feature 1..20: note = Target: SCN10A; (-) strand; PAM type: NNGRRT; PAM sequence: CGGGGT
  source 1..20: mol_type = other DNA
ttttgtatttttagtagaga

SEQ ID NO: 7951 - DNA, 20 bp, synthetic construct
  misc_feature 1..20: note = Description of Artificial Sequence: Synthetic oligonucleotide
  misc_feature 1..20: note = Target: SCN10A; (-) strand; PAM type: NNGRRT; PAM sequence: CGGAGT
  source 1..20: mol_type = other DNA
cattctcccgcctcagcctc

SEQ ID NO: 7952 - DNA, 20 bp, synthetic construct
  misc_feature 1..20: note = Description of Artificial Sequence: Synthetic oligonucleotide
  misc_feature 1..20: note = Target: SCN10A; (-) strand; PAM type: NNGRRT; PAM sequence: CCGGGT
  source 1..20: mol_type = other DNA
ctcactgcaagctccgcctc

SEQ ID NO: 7953 - DNA, 20 bp, synthetic construct
  misc_feature 1..20: note = Description of Artificial Sequence: Synthetic oligonucleotide
  misc_feature 1..20: note = Target: SCN10A; (-) strand; PAM type: NNGRRT; PAM sequence: TGGAGT
  source 1..20: mol_type = other DNA
tcttgctctgtcacccagac

SEQ ID NO: 7954 - DNA, 20 bp, synthetic construct
  misc_feature 1..20: note = Description of Artificial Sequence: Synthetic oligonucleotide
  misc_feature 1..20: note = Target: SCN10A; (-) strand; PAM type: NNGRRT; PAM sequence: AAGGGT
  source 1..20: mol_type = other DNA
gcttctagtaactttattag

SEQ ID NO: 7955 - DNA, 20 bp, synthetic construct
  misc_feature 1..20: note = Description of Artificial Sequence: Synthetic oligonucleotide
  misc_feature 1..20: note = Target: SCN10A; (-) strand; PAM type: NNGRRT; PAM sequence: CTGGGT
  source 1..20: mol_type = other DNA
aggctgttggcctcaaactc

SEQ ID NO: 7956 - DNA, 20 bp, synthetic construct
  misc_feature 1..20: note = Description of Artificial Sequence: Synthetic oligonucleotide
  misc_feature 1..20: note = Target: SCN10A; (-) strand; PAM type: NNGRRT; PAM sequence: TTGAAT
  source 1..20: mol_type = other DNA
atcgcatatatgtttcttgt

SEQ ID NO: 7957 - DNA, 20 bp, synthetic construct
  misc_feature 1..20: note = Description of Artificial Sequence: Synthetic oligonucleotide
  misc_feature 1..20: note = Target: SCN10A; (-) strand; PAM type: NNGRRT; PAM sequence: CTGGAT
  source 1..20: mol_type = other DNA
ggattccttttgcctcttcc

SEQ ID NO: 7958 - DNA, 20 bp, synthetic construct
  misc_feature 1..20: note = Description of Artificial Sequence: Synthetic oligonucleotide
  misc_feature 1..20: note = Target: SCN10A; (-) strand; PAM type: NNGRRT; PAM sequence: TTGGAT
  source 1..20: mol_type = other DNA
ttttcttcttcattcttttt

SEQ ID NO: 7959 - DNA, 20 bp, synthetic construct
  misc_feature 1..20: note = Description of Artificial Sequence: Synthetic oligonucleotide
  misc_feature 1..20: note = Target: SCN10A; (-) strand; PAM type: NNGRRT; PAM sequence: TAGAGT
  source 1..20: mol_type = other DNA
tttcctatgggaatcacagc

SEQ ID NO: 7960 - DNA, 20 bp, synthetic construct
  misc_feature 1..20: note = Description of Artificial Sequence: Synthetic oligonucleotide
  misc_feature 1..20: note = Target: SCN10A; (-) strand; PAM type: NNGRRT; PAM sequence: GGGAAT
  source 1..20: mol_type = other DNA
gtgtatcatttttttcctat

SEQ ID NO: 7961 - DNA, 20 bp, synthetic construct
  misc_feature 1..20: note = Description of Artificial Sequence: Synthetic oligonucleotide
  misc_feature 1..20: note = Target: SCN10A; (-) strand; PAM type: NNGRRT; PAM sequence: AAGGAT
  source 1..20: mol_type = other DNA
ttgctttccttggagttaat

SEQ ID NO: 7962 - DNA, 20 bp, synthetic construct
  misc_feature 1..20: note = Description of Artificial Sequence: Synthetic oligonucleotide
  misc_feature 1..20: note = Target: SCN10A; (-) strand; PAM type: NNGRRT; PAM sequence: TGGAGT
  source 1..20: mol_type = other DNA
cacaatgtttttgctttcct

SEQ ID NO: 7963 - DNA, 20 bp, synthetic construct
  misc_feature 1..20: note = Description of Artificial Sequence: Synthetic oligonucleotide
  misc_feature 1..20: note = Target: SCN10A; (-) strand; PAM type: NNGRRT; PAM sequence: CAGAGT
  source 1..20: mol_type = other DNA
gttcataatttaaaaggtca

SEQ ID NO: 7964 - DNA, 20 bp, synthetic construct
  misc_feature 1..20: note = Description of Artificial Sequence: Synthetic oligonucleotide
  misc_feature 1..20: note = Target: SCN10A; (-) strand; PAM type: NNGRRT; PAM sequence: AAGAGT
  source 1..20: mol_type = other DNA
tttctaatttagaaaacata

SEQ ID NO: 7965 - DNA, 20 bp, synthetic construct
  misc_feature 1..20: note = Description of Artificial Sequence: Synthetic oligonucleotide
  misc_feature 1..20: note = Target: SCN10A; (-) strand; PAM type: NNGRRT; PAM sequence: CTGAGT
  source 1..20: mol_type = other DNA
cttcccaacaacctataatt

SEQ ID NO: 7966 - DNA, 20 bp, synthetic construct
  misc_feature 1..20: note = Description of Artificial Sequence: Synthetic oligonucleotide
  misc_feature 1..20: note = Target: SCN10A; (-) strand; PAM type: NNGRRT; PAM sequence: CTGGGT
  source 1..20: mol_type = other DNA
gagcactctctccataattt

SEQ ID NO: 7967 - DNA, 20 bp, synthetic construct
  misc_feature 1..20: note = Description of Artificial Sequence: Synthetic oligonucleotide
  misc_feature 1..20: note = Target: SCN10A; (-) strand; PAM type: NNGRRT; PAM sequence: GAGGAT
  source 1..20: mol_type = other DNA
gagccaaataccaccaaaga

SEQ ID NO: 7968 - DNA, 20 bp, synthetic construct
  misc_feature 1..20: note = Description of Artificial Sequence: Synthetic oligonucleotide
  misc_feature 1..20: note = Target: SCN10A; (-) strand; PAM type: NNGRRT; PAM sequence: CTGAAT
  source 1..20: mol_type = other DNA
gggcttattaaaaattacat

SEQ ID NO: 7969 - DNA, 20 bp, synthetic construct
  misc_feature 1..20: note = Description of Artificial Sequence: Synthetic oligonucleotide
  misc_feature 1..20: note = Target: SCN10A; (-) strand; PAM type: NNGRRT; PAM sequence: CGGGAT
  source 1..20: mol_type = other DNA
tgttttcagagcctgaatat

SEQ ID NO: 7970 - DNA, 20 bp, synthetic construct
  misc_feature 1..20: note = Description of Artificial Sequence: Synthetic oligonucleotide
  misc_feature 1..20: note = Target: SCN10A; (-) strand; PAM type: NNGRRT; PAM sequence: CTGAAT
  source 1..20: mol_type = other DNA
tgaatctttgttttcagagc

SEQ ID NO: 7971 - DNA, 20 bp, synthetic construct
  misc_feature 1..20: note = Description of Artificial Sequence: Synthetic oligonucleotide
  misc_feature 1..20: note = Target: SCN10A; (-) strand; PAM type: NNGRRT; PAM sequence: ATGAAT
  source 1..20: mol_type = other DNA
ccattcagaatttgaatatt

SEQ ID NO: 7972 - DNA, 20 bp, synthetic construct
  misc_feature 1..20: note = Description of Artificial Sequence: Synthetic oligonucleotide
  misc_feature 1..20: note = Target: SCN10A; (-) strand; PAM type: NNGRRT; PAM sequence: TTGAAT
  source 1..20: mol_type = other DNA
ctcagtgatccattcagaat

SEQ ID NO: 7973 - DNA, 20 bp, synthetic construct
  misc_feature 1..20: note = Description of Artificial Sequence: Synthetic oligonucleotide
  misc_feature 1..20: note = Target: SCN10A; (-) strand; PAM type: NNGRRT; PAM sequence: CAGAAT
  source 1..20: mol_type = other DNA
gggtatctcagtgatccatt

SEQ ID NO: 7974 - DNA, 20 bp, synthetic construct
  misc_feature 1..20: note = Description of Artificial Sequence: Synthetic oligonucleotide
  misc_feature 1..20: note = Target: SCN10A; (-) strand; PAM type: NNGRRT; PAM sequence: TTGGGT
  source 1..20: mol_type = other DNA
accatttttatgaatacaag

SEQ ID NO: 7975 - DNA, 20 bp, synthetic construct
  misc_feature 1..20: note = Description of Artificial Sequence: Synthetic oligonucleotide
  misc_feature 1..20: note = Target: SCN10A; (-) strand; PAM type: NNGRRT; PAM sequence: ATGAAT
  source 1..20: mol_type = other DNA
tgttttaaattaccattttt

SEQ ID NO: 7976 - DNA, 20 bp, synthetic construct
  misc_feature 1..20: note = Description of Artificial Sequence: Synthetic oligonucleotide
  misc_feature 1..20: note = Target: SCN10A; (-) strand; PAM type: NNGRRT; PAM sequence: AGGAAT
  source 1..20: mol_type = other DNA
tacacagagttttaaaaata

SEQ ID NO: 7977 - DNA, 20 bp, synthetic construct
  misc_feature 1..20: note = Description of Artificial Sequence: Synthetic oligonucleotide
  misc_feature 1..20: note = Target: SCN10A; (-) strand; PAM type: NNGRRT; PAM sequence: CAGAGT
  source 1..20: mol_type = other DNA
gcaaatgggaagggcttaca

SEQ ID NO: 7978 - DNA, 20 bp, synthetic construct
  misc_feature 1..20: note = Description of Artificial Sequence: Synthetic oligonucleotide
  misc_feature 1..20: note = Target: SCN10A; (-) strand; PAM type: NNGRRT; PAM sequence: CTGAAT
  source 1..20: mol_type = other DNA
agagaggctgctctcccaca

SEQ ID NO: 7979 - DNA, 20 bp, synthetic construct
  misc_feature 1..20: note = Description of Artificial Sequence: Synthetic oligonucleotide
  misc_feature 1..20: note = Target: SCN10A; (-) strand; PAM type: NNGRRT; PAM sequence: GTGAGT
  source 1..20: mol_type = other DNA
ctactgggctgaaatgaaaa

SEQ ID NO: 7980 - DNA, 20 bp, synthetic construct
  misc_feature 1..20: note = Description of Artificial Sequence: Synthetic oligonucleotide
  misc_feature 1..20: note = Target: SCN10A; (-) strand; PAM type: NNGRRT; PAM sequence: GTGAAT
  source 1..20: mol_type = other DNA
tgaggtacacagtggaaatt

SEQ ID NO: 7981 - DNA, 20 bp, synthetic construct
  misc_feature 1..20: note = Description of Artificial Sequence: Synthetic oligonucleotide
  misc_feature 1..20: note = Target: SCN10A; (-) strand; PAM type: NNGRRT; PAM sequence: GGGGGT
  source 1..20: mol_type = other DNA
cttattcacggaacgcagct

SEQ ID NO: 7982 - DNA, 20 bp, synthetic construct
  misc_feature 1..20: note = Description of Artificial Sequence: Synthetic oligonucleotide
  misc_feature 1..20: note = Target: SCN10A; (-) strand; PAM type: NNGRRT; PAM sequence: CTGAAT
  source 1..20: mol_type = other DNA
gtggtgatagttccacaata

SEQ ID NO: 7983 - DNA, 20 bp, synthetic construct
  misc_feature 1..20: note = Description of Artificial Sequence: Synthetic oligonucleotide
  misc_feature 1..20: note = Target: SCN10A; (-) strand; PAM type: NNGRRT; PAM sequence: CGGGAT
  source 1..20: mol_type = other DNA
ttaatgggtacatttctgtt

SEQ ID NO: 7984 - DNA, 20 bp, synthetic construct
  misc_feature 1..20: note = Description of Artificial Sequence: Synthetic oligonucleotide
  misc_feature 1..20: note = Target: SCN10A; (-) strand; PAM type: NNGRRT; PAM sequence: ATGGGT
  source 1..20: mol_type = other DNA
gaatggggagttattattta

SEQ ID NO: 7985 - DNA, 20 bp, synthetic construct
  misc_feature 1..20: note = Description of Artificial Sequence: Synthetic oligonucleotide
  misc_feature 1..20: note = Target: SCN10A; (-) strand; PAM type: NNGRRT; PAM sequence: GGGAGT
  source 1..20: mol_type = other DNA
gttgccagagagggggaatg

SEQ ID NO: 7986 - DNA, 20 bp, synthetic construct
  misc_feature 1..20: note = Description of Artificial Sequence: Synthetic oligonucleotide
  misc_feature 1..20: note = Target: SCN10A; (-) strand; PAM type: NNGRRT; PAM sequence: GGGAAT
  source 1..20: mol_type = other DNA
aatggaagttgccagagagg

SEQ ID NO: 7987 - DNA, 20 bp, synthetic construct
  misc_feature 1..20: note = Description of Artificial Sequence: Synthetic oligonucleotide
  misc_feature 1..20: note = Target: SCN10A; (-) strand; PAM type: NNGRRT; PAM sequence: TAGAAT
  source 1..20: mol_type = other DNA
aaattcatggagacagaaag

SEQ ID NO: 7988 - DNA, 20 bp, synthetic construct
  misc_feature 1..20: note = Description of Artificial Sequence: Synthetic oligonucleotide
  misc_feature 1..20: note = Target: SCN10A; (-) strand; PAM type: NNGRRT; PAM sequence: ATGAAT
  source 1..20: mol_type = other DNA
aatatcattcagttttaaaa

SEQ ID NO: 7989 - DNA, 20 bp, synthetic construct
  misc_feature 1..20: note = Description of Artificial Sequence: Synthetic oligonucleotide
  misc_feature 1..20: note = Target: SCN10A; (-) strand; PAM type: NNGRRT; PAM sequence: TTGAAT
  source 1..20: mol_type = other DNA
tgtagtatatatgtaaacaa

SEQ ID NO: 7990 - DNA, 20 bp, synthetic construct
  misc_feature 1..20: note = Description of Artificial Sequence: Synthetic oligonucleotide
  misc_feature 1..20: note = Target: SCN10A; (-) strand; PAM type: NNGRRT; PAM sequence: ATGGAT
  source 1..20: mol_type = other DNA
atatgtccatcaacagatga

SEQ ID NO: 7991 - DNA, 20 bp, synthetic construct
  misc_feature 1..20: note = Description of Artificial Sequence: Synthetic oligonucleotide
  misc_feature 1..20: note = Target: SCN10A; (-) strand; PAM type: NNGRRT; PAM sequence: ATGAAT
  source 1..20: mol_type = other DNA
ccaaatatgtccatcaacag

SEQ ID NO: 7992 - DNA, 20 bp, synthetic construct
  misc_feature 1..20: note = Description of Artificial Sequence: Synthetic oligonucleotide
  misc_feature 1..20: note = Target: SCN10A; (-) strand; PAM type: NNGRRT; PAM sequence: ATGAAT
  source 1..20: mol_type = other DNA
ttttatagttgaacaaaact

SEQ ID NO: 7993 - DNA, 20 bp, synthetic construct
  misc_feature 1..20: note = Description of Artificial Sequence: Synthetic oligonucleotide
  misc_feature 1..20: note = Target: SCN10A; (-) strand; PAM type: NNGRRT; PAM sequence: TAGAGT
  source 1..20: mol_type = other DNA
ttgagaagacaacaaaacta

SEQ ID NO: 7994 - DNA, 20 bp, synthetic construct
  misc_feature 1..20: note = Description of Artificial Sequence: Synthetic oligonucleotide
  misc_feature 1..20: note = Target: SCN10A; (-) strand; PAM type: NNGRRT; PAM sequence: TTGAAT
  source 1..20: mol_type = other DNA
caaccccacttttaaaccaa

SEQ ID NO: 7995 - DNA, 20 bp, synthetic construct
  misc_feature 1..20: note = Description of Artificial Sequence: Synthetic oligonucleotide
  misc_feature 1..20: note = Target: SCN10A; (-) strand; PAM type: NNGRRT; PAM sequence: TTGAAT
  source 1..20: mol_type = other DNA
atgacaatgaataatgataa

SEQ ID NO: 7996 - DNA, 20 bp, synthetic construct
  misc_feature 1..20: note = Description of Artificial Sequence: Synthetic oligonucleotide
  misc_feature 1..20: note = Target: SCN10A; (-) strand; PAM type: NNGRRT; PAM sequence: ATGAAT
  source 1..20: mol_type = other DNA
agaaaatgggagccatgaca

SEQ ID NO: 7997 - DNA, 20 bp, synthetic construct
  misc_feature 1..20: note = Description of Artificial Sequence: Synthetic oligonucleotide
  misc_feature 1..20: note = Target: SCN10A; (-) strand; PAM type: NNGRRT; PAM sequence: GTGGAT
  source 1..20: mol_type = other DNA
gagacaagtggataatggat

SEQ ID NO: 7998 - DNA, 20 bp, synthetic construct
  misc_feature 1..20: note = Description of Artificial Sequence: Synthetic oligonucleotide
  misc_feature 1..20: note = Target: SCN10A; (-) strand; PAM type: NNGRRT; PAM sequence: ATGGAT
  source 1..20: mol_type = other DNA
tgtcatgagacaagtggata

SEQ ID NO: 7999 - DNA, 20 bp, synthetic construct
  misc_feature 1..20: note = Description of Artificial Sequence: Synthetic oligonucleotide
  misc_feature 1..20: note = Target: SCN10A; (-) strand; PAM type: NNGRRT; PAM sequence: GTGGAT
  source 1..20: mol_type = other DNA
atctgtttgtcatgagacaa

SEQ ID NO: 8000 - DNA, 20 bp, synthetic construct
  misc_feature 1..20: note = Description of Artificial Sequence: Synthetic oligonucleotide
  misc_feature 1..20: note = Target: SCN10A; (-) strand; PAM type: NNGRRT; PAM sequence: ATGAAT
  source 1..20: mol_type = other DNA
ccattgtaaaaatacaaagc

SEQ ID NO: 8001 - DNA, 20 bp, synthetic construct
  misc_feature 1..20: note = Description of Artificial Sequence: Synthetic oligonucleotide
  misc_feature 1..20: note = Target: SCN10A; (-) strand; PAM type: NNGRRT; PAM sequence: ATGAAT
  source 1..20: mol_type = other DNA
ataaggtcacaatgtaagta

SEQ ID NO: 8002 - DNA, 20 bp, synthetic construct
  misc_feature 1..20: note = Description of Artificial Sequence: Synthetic oligonucleotide
  misc_feature 1..20: note = Target: SCN10A; (-) strand; PAM type: NNGRRT; PAM sequence: AAGAGT
  source 1..20: mol_type = other DNA
taatatcacaattcaaaaaa

SEQ ID NO: 8003 - DNA, 20 bp, synthetic construct
  misc_feature 1..20: note = Description of Artificial Sequence: Synthetic oligonucleotide
  misc_feature 1..20: note = Target: SCN10A; (-) strand; PAM type: NNGRRT; PAM sequence: TGGAGT
  source 1..20: mol_type = other DNA
ttcattcataatggttaaca

SEQ ID NO: 8004 - DNA, 20 bp, synthetic construct
  misc_feature 1..20: note = Description of Artificial Sequence: Synthetic oligonucleotide
  misc_feature 1..20: note = Target: SCN10A; (-) strand; PAM type: NNGRRT; PAM sequence: TAGAAT
  source 1..20: mol_type = other DNA
aagattaattattatattca

SEQ ID NO: 8005 - DNA, 20 bp, synthetic construct
  misc_feature 1..20: note = Description of Artificial Sequence: Synthetic oligonucleotide
  misc_feature 1..20: note = Target: SCN10A; (-) strand; PAM type: NNGRRT; PAM sequence: AAGGAT
  source 1..20: mol_type = other DNA
tgtttctcaacaagtgatct

SEQ ID NO: 8006 - DNA, 20 bp, synthetic construct
  misc_feature 1..20: note = Description of Artificial Sequence: Synthetic oligonucleotide
  misc_feature 1..20: note = Target: SCN10A; (-) strand; PAM type: NNGRRT; PAM sequence: TGGGAT
  source 1..20: mol_type = other DNA
tctttcataaactgtccctt

SEQ ID NO: 8007 - DNA, 20 bp, synthetic construct
  misc_feature 1..20: note = Description of Artificial Sequence: Synthetic oligonucleotide
  misc_feature 1..20: note = Target: SCN10A; (-) strand; PAM type: NNGRRT; PAM sequence: CTGGAT
  source 1..20: mol_type = other DNA
ggttccagctgatcattttg

SEQ ID NO: 8008 - DNA, 20 bp, synthetic construct
  misc_feature 1..20: note = Description of Artificial Sequence: Synthetic oligonucleotide
  misc_feature 1..20: note = Target: SCN10A; (-) strand; PAM type: NNGRRT; PAM sequence: ATGGGT
  source 1..20: mol_type = other DNA
tgttgagactttcatcatga

SEQ ID NO: 8009 - DNA, 20 bp, synthetic construct
  misc_feature 1..20: note = Description of Artificial Sequence: Synthetic oligonucleotide
  misc_feature 1..20: note = Target: SCN10A; (-) strand; PAM type: NNGRRT; PAM sequence: ATGAAT
  source 1..20: mol_type = other DNA
tgtttgttgagactttcatc

SEQ ID NO: 8010 - DNA, 20 bp, synthetic construct
  misc_feature 1..20: note = Description of Artificial Sequence: Synthetic oligonucleotide
  misc_feature 1..20: note = Target: SCN10A; (-) strand; PAM type: NNGRRT; PAM sequence: GAGAGT
  source 1..20: mol_type = other DNA
ttcactattatgatgtttat

SEQ ID NO: 8011 - DNA, 20 bp, synthetic construct
  misc_feature 1..20: note = Description of Artificial Sequence: Synthetic oligonucleotide
  misc_feature 1..20: note = Target: SCN10A; (-) strand; PAM type: NNGRRT; PAM sequence: TTGAAT
  source 1..20: mol_type = other DNA
tttttatttttcctgtctta

SEQ ID NO: 8012 - DNA, 20 bp, synthetic construct
  misc_feature 1..20: note = Description of Artificial Sequence: Synthetic oligonucleotide
  misc_feature 1..20: note = Target: SCN10A; (-) strand; PAM type: NNGRRT; PAM sequence: TTGAAT
  source 1..20: mol_type = other DNA
ttgcaattttggttgcccta

SEQ ID NO: 8013 - DNA, 20 bp, synthetic construct
  misc_feature 1..20: note = Description of Artificial Sequence: Synthetic oligonucleotide
  misc_feature 1..20: note = Target: SCN10A; (-) strand; PAM type: NNGRRT; PAM sequence: AAGAAT
  source 1..20: mol_type = other DNA
aattgatttatcaccacagg

SEQ ID NO: 8014 - DNA, 20 bp, synthetic construct
  misc_feature 1..20: note = Description of Artificial Sequence: Synthetic oligonucleotide
  misc_feature 1..20: note = Target: SCN10A; (-) strand; PAM type: NNGRRT; PAM sequence: CTGAAT
  source 1..20: mol_type = other DNA
aaactttgtttggtaatgca

SEQ ID NO: 8015 - DNA, 20 bp, synthetic construct
  misc_feature 1..20: note = Description of Artificial Sequence: Synthetic oligonucleotide
  misc_feature 1..20: note = Target: SCN10A; (-) strand; PAM type: NNGRRT; PAM sequence: AAGGGT
  source 1..20: mol_type = other DNA
ttacttttccatatcagttt

SEQ ID NO: 8016 - DNA, 20 bp, synthetic construct
  misc_feature 1..20: note = Description of Artificial Sequence: Synthetic oligonucleotide
  misc_feature 1..20: note = Target: SCN10A; (-) strand; PAM type: NNGRRT; PAM sequence: GTGGAT
  source 1..20: mol_type = other DNA
acatcctgagtcaacaccac

SEQ ID NO: 8017 - DNA, 20 bp, synthetic construct
  misc_feature 1..20: note = Description of Artificial Sequence: Synthetic oligonucleotide
  misc_feature 1..20: note = Target: SCN10A; (-) strand; PAM type: NNGRRT; PAM sequence: CTGAGT
  source 1..20: mol_type = other DNA
agtaatctcattgtcacatc

SEQ ID NO: 8018 - DNA, 20 bp, synthetic construct
  misc_feature 1..20: note = Description of Artificial Sequence: Synthetic oligonucleotide
  misc_feature 1..20: note = Target: SCN10A; (-) strand; PAM type: NNGRRT; PAM sequence: CTGAAT
  source 1..20: mol_type = other DNA
gcaccagattcccatgtcta

SEQ ID NO: 8019 - DNA, 20 bp, synthetic construct
  misc_feature 1..20: note = Description of Artificial Sequence: Synthetic oligonucleotide
  misc_feature 1..20: note = Target: SCN10A; (-) strand; PAM type: NNGRRT; PAM sequence: ATGGAT
  source 1..20: mol_type = other DNA
ggcttccaatatttttccat

SEQ ID NO: 8020 - DNA, 20 bp, synthetic construct
  misc_feature 1..20: note = Description of Artificial Sequence: Synthetic oligonucleotide
  misc_feature 1..20: note = Target: SCN10A; (-) strand; PAM type: NNGRRT; PAM sequence: TAGAAT
  source 1..20: mol_type = other DNA
atttaggtatttcaatctcc

SEQ ID NO: 8021 - DNA, 20 bp, synthetic construct
  misc_feature 1..20: note = Description of Artificial Sequence: Synthetic oligonucleotide
  misc_feature 1..20: note = Target: SCN10A; (-) strand; PAM type: NNGRRT; PAM sequence: ATGGAT
  source 1..20: mol_type = other DNA
tgtttttgggatttgcccaa

SEQ ID NO: 8022 - DNA, 20 bp, synthetic construct
  misc_feature 1..20: note = Description of Artificial Sequence: Synthetic oligonucleotide
  misc_feature 1..20: note = Target: SCN10A; (-) strand; PAM type: NNGRRT; PAM sequence: TGGGAT
  source 1..20: mol_type = other DNA
atgttttaaaattatgtttt

SEQ ID NO: 8023 - DNA, 20 bp, synthetic construct
  misc_feature 1..20: note = Description of Artificial Sequence: Synthetic oligonucleotide
  misc_feature 1..20: note = Target: SCN10A; (-) strand; PAM type: NNGRRT; PAM sequence: GTGGGT
  source 1..20: mol_type = other DNA
aatctactgcaaacggggaa

SEQ ID NO: 8024 - DNA, 20 bp, synthetic construct
  misc_feature 1..20: note = Description of Artificial Sequence: Synthetic oligonucleotide
  misc_feature 1..20: note = Target: SCN10A; (-) strand; PAM type: NNGRRT; PAM sequence: CTGAAT
  source 1..20: mol_type = other DNA
aaagaacatgtgaaatgaag

SEQ ID NO: 8025 - DNA, 20 bp, synthetic construct
  misc_feature 1..20: note = Description of Artificial Sequence: Synthetic oligonucleotide
  misc_feature 1..20: note = Target: SCN10A; (-) strand; PAM type: NNGRRT; PAM sequence: GAGAAT
  source 1..20: mol_type = other DNA
ctccccatgccctggtttca

SEQ ID NO: 8026 - DNA, 20 bp, synthetic construct
  misc_feature 1..20: note = Description of Artificial Sequence: Synthetic oligonucleotide
  misc_feature 1..20: note = Target: SCN10A; (-) strand; PAM type: NNGRRT; PAM sequence: GGGGGT
  source 1..20: mol_type = other DNA
accagaaggtaaagagagca

SEQ ID NO: 8027 - DNA, 20 bp, synthetic construct
  misc_feature 1..20: note = Description of Artificial Sequence: Synthetic oligonucleotide
  misc_feature 1..20: note = Target: SCN10A; (-) strand; PAM type: NNGRRT; PAM sequence: AGGAAT
  source 1..20: mol_type = other DNA
gcattaaattgtagccagtg

SEQ ID NO: 8028 - DNA, 20 bp, synthetic construct
  misc_feature 1..20: note = Description of Artificial Sequence: Synthetic oligonucleotide
  misc_feature 1..20: note = Target: SCN10A; (-) strand; PAM type: NNGRRT; PAM sequence: TGGGAT
  source 1..20: mol_type = other DNA
aggaagataataaatgtcct

SEQ ID NO: 8029 - DNA, 20 bp, synthetic construct
  misc_feature 1..20: note = Description of Artificial Sequence: Synthetic oligonucleotide
  misc_feature 1..20: note = Target: SCN10A; (-) strand; PAM type: NNGRRT; PAM sequence: TTGGAT
  source 1..20: mol_type = other DNA
gggaatttatgtgacaggta

SEQ ID NO: 8030 - DNA, 20 bp, synthetic construct
  misc_feature 1..20: note = Description of Artificial Sequence: Synthetic oligonucleotide
  misc_feature 1..20: note = Target: SCN10A; (-) strand; PAM type: NNGRRT; PAM sequence: GGGAAT
  source 1..20: mol_type = other DNA
acctatatggtcacaatcct

SEQ ID NO: 8031 - DNA, 20 bp, synthetic construct
  misc_feature 1..20: note = Description of Artificial Sequence: Synthetic oligonucleotide
  misc_feature 1..20: note = Target: SCN10A; (-) strand; PAM type: NNGRRT; PAM sequence: TTGGAT
  source 1..20: mol_type = other DNA
tgccaaatcgtcttccaaag

SEQ ID NO: 8032 - DNA, 20 bp, synthetic construct
  misc_feature 1..20: note = Description of Artificial Sequence: Synthetic oligonucleotide
  misc_feature 1..20: note = Target: SCN10A; (-) strand; PAM type: NNGRRT; PAM sequence: AGGGGT
  source 1..20: mol_type = other DNA
aagtagaattgccaggtcaa

SEQ ID NO: 8033 - DNA, 20 bp, synthetic construct
  misc_feature 1..20: note = Description of Artificial Sequence: Synthetic oligonucleotide
  misc_feature 1..20: note = Target: SCN10A; (-) strand; PAM type: NNGRRT; PAM sequence: TAGAAT
  source 1..20: mol_type = other DNA
taaggatgaatttctagaag

SEQ ID NO: 8034 - DNA, 20 bp, synthetic construct
  misc_feature 1..20: note = Description of Artificial Sequence: Synthetic oligonucleotide
  misc_feature 1..20: note = Target: SCN10A; (-) strand; PAM type: NNGRRT; PAM sequence: ATGAAT
  source 1..20: mol_type = other DNA
taatatgagtaaaattaagg

SEQ ID NO: 8035 - DNA, 20 bp, synthetic construct
  misc_feature 1..20: note = Description of Artificial Sequence: Synthetic oligonucleotide
  misc_feature 1..20: note = Target: SCN10A; (-) strand; PAM type: NNGRRT; PAM sequence: AAGGAT
  source 1..20: mol_type = other DNA
cacataatatgagtaaaatt

SEQ ID NO: 8036 - DNA, 20 bp, synthetic construct
  misc_feature 1..20: note = Description of Artificial Sequence: Synthetic oligonucleotide
  misc_feature 1..20: note = Target: SCN10A; (-) strand; PAM type: NNGRRT; PAM sequence: ATGAGT
  source 1..20: mol_type = other DNA
tgtatctttgtacacataat

SEQ ID NO: 8037 - DNA, 20 bp, synthetic construct
  misc_feature 1..20: note = Description of Artificial Sequence: Synthetic oligonucleotide
  misc_feature 1..20: note = Target: SCN10A; (-) strand; PAM type: NNGRRT; PAM sequence: GTGAGT
  source 1..20: mol_type = other DNA
caccacatattaattttttg

SEQ ID NO: 8038 - DNA, 20 bp, synthetic construct
  misc_feature 1..20: note = Description of Artificial Sequence: Synthetic oligonucleotide
  misc_feature 1..20: note = Target: SCN10A; (-) strand; PAM type: NNGRRT; PAM sequence: ATGGAT
  source 1..20: mol_type = other DNA
gctgaacagatttcatttgc

SEQ ID NO: 8039 - DNA, 20 bp, synthetic construct
  misc_feature 1..20: note = Description of Artificial Sequence: Synthetic oligonucleotide
  misc_feature 1..20: note = Target: SCN10A; (-) strand; PAM type: NNGRRT; PAM sequence: TAGAAT
  source 1..20: mol_type = other DNA
attagaagattcataattgt

SEQ ID NO: 8040 - DNA, 20 bp, synthetic construct
  misc_feature 1..20: note = Description of Artificial Sequence: Synthetic oligonucleotide
  misc_feature 1..20: note = Target: SCN10A; (-) strand; PAM type: NNGRRT; PAM sequence: CTGGAT
  source 1..20: mol_type = other DNA
ttaaaggatgtctcatgtga

SEQ ID NO: 8041 - DNA, 20 bp, synthetic construct
  misc_feature 1..20: note = Description of Artificial Sequence: Synthetic oligonucleotide
  misc_feature 1..20: note = Target: SCN10A; (-) strand; PAM type: NNGRRT; PAM sequence: AAGGAT
  source 1..20: mol_type = other DNA
taaagtacctaaatgaatta

SEQ ID NO: 8042 - DNA, 20 bp, synthetic construct
  misc_feature 1..20: note = Description of Artificial Sequence: Synthetic oligonucleotide
  misc_feature 1..20: note = Target: SCN10A; (-) strand; PAM type: NNGRRT; PAM sequence: ATGAAT
  source 1..20: mol_type = other DNA
agaaattttaaagtacctaa

SEQ ID NO: 8043 - DNA, 20 bp, synthetic construct
  misc_feature 1..20: note = Description of Artificial Sequence: Synthetic oligonucleotide
  misc_feature 1..20: note = Target: SCN10A; (-) strand; PAM type: NNGRRT; PAM sequence: AAGGAT
  source 1..20: mol_type = other DNA
agacctaacaaaactagaaa

SEQ ID NO: 8044 - DNA, 20 bp, synthetic construct
  misc_feature 1..20: note = Description of Artificial Sequence: Synthetic oligonucleotide
  misc_feature 1..20: note = Target: SCN10A; (-) strand; PAM type: NNGRRT; PAM sequence: TAGAAT
  source 1..20: mol_type = other DNA
taagtcacagcatggaagca

SEQ ID NO: 8045 - DNA, 20 bp, synthetic construct
  misc_feature 1..20: note = Description of Artificial Sequence: Synthetic oligonucleotide
  misc_feature 1..20: note = Target: SCN10A; (-) strand; PAM type: NNGRRT; PAM sequence: GGGAAT
  source 1..20: mol_type = other DNA
gttaaagacatacatattca

SEQ ID NO: 8046 - DNA, 20 bp, synthetic construct
  misc_feature 1..20: note = Description of Artificial Sequence: Synthetic oligonucleotide
  misc_feature 1..20: note = Target: SCN10A; (-) strand; PAM type: NNGRRT; PAM sequence: GAGAGT
  source 1..20: mol_type = other DNA
aacagtttaatcagaaccta

SEQ ID NO: 8047 - DNA, 20 bp, synthetic construct
  misc_feature 1..20: note = Description of Artificial Sequence: Synthetic oligonucleotide
  misc_feature 1..20: note = Target: SCN10A; (-) strand; PAM type: NNGRRT; PAM sequence: AAGAAT
  source 1..20: mol_type = other DNA
atttttaaaaatctctctta

SEQ ID NO: 8048 - DNA, 20 bp, synthetic construct
  misc_feature 1..20: note = Description of Artificial Sequence: Synthetic oligonucleotide
  misc_feature 1..20: note = Target: SCN10A; (-) strand; PAM type: NNGRRT; PAM sequence: TAGAGT
  source 1..20: mol_type = other DNA
attctctgatcataatgaaa

SEQ ID NO: 8049 - DNA, 20 bp, synthetic construct
  misc_feature 1..20: note = Description of Artificial Sequence: Synthetic oligonucleotide
  misc_feature 1..20: note = Target: SCN10A; (-) strand; PAM type: NNGRRT; PAM sequence: AGGAAT
  source 1..20: mol_type = other DNA
aggataaataaaaacattgt

SEQ ID NO: 8050 - DNA, 20 bp, synthetic construct
  misc_feature 1..20: note = Description of Artificial Sequence: Synthetic oligonucleotide
  misc_feature 1..20: note = Target: SCN10A; (-) strand; PAM type: NNGRRT; PAM sequence: GAGGAT
  source 1..20: mol_type = other DNA
atcagaaattattagagtag

SEQ ID NO: 8051 - DNA, 20 bp, synthetic construct
  misc_feature 1..20: note = Description of Artificial Sequence: Synthetic oligonucleotide
  misc_feature 1..20: note = Target: SCN10A; (-) strand; PAM type: NNGRRT; PAM sequence: TAGAGT
  source 1..20: mol_type = other DNA
atttataaatcagaaattat

SEQ ID NO: 8052 - DNA, 20 bp, synthetic construct
  misc_feature 1..20: note = Description of Artificial Sequence: Synthetic oligonucleotide
  misc_feature 1..20: note = Target: SCN10A; (-) strand; PAM type: NNGRRT; PAM sequence: TGGAAT
  source 1..20: mol_type = other DNA
gattttaatatcagagaaag

SEQ ID NO: 8053 - DNA, 20 bp, synthetic construct
  misc_feature 1..20: note = Description of Artificial Sequence: Synthetic oligonucleotide
  misc_feature 1..20: note = Target: SCN10A; (-) strand; PAM type: NNGRRT; PAM sequence: CAGGAT
  source 1..20: mol_type = other DNA
gcaaaggcaaacaaagaaag

SEQ ID NO: 8054 - DNA, 20 bp, synthetic construct
  misc_feature 1..20: note = Description of Artificial Sequence: Synthetic oligonucleotide
  misc_feature 1..20: note = Target: SCN10A; (-) strand; PAM type: NNGRRT; PAM sequence: TAGAAT
  source 1..20: mol_type = other DNA
atacagaaaggctaaaatta

SEQ ID NO: 8055 - DNA, 20 bp, synthetic construct
  misc_feature 1..20: note = Description of Artificial Sequence: Synthetic oligonucleotide
  misc_feature 1..20: note = Target: SCN10A; (-) strand; PAM type: NNGRRT; PAM sequence: TTGAAT
  source 1..20: mol_type = other DNA
aagcaatacccaactctatg

SEQ ID NO: 8056 - DNA, 20 bp, synthetic construct
  misc_feature 1..20: note = Description of Artificial Sequence: Synthetic oligonucleotide
  misc_feature 1..20: note = Target: SCN10A; (-) strand; PAM type: NNGRRT; PAM sequence: ATGGAT
  source 1..20: mol_type = other DNA
tgtcatgtcactaaatataa

SEQ ID NO: 8057 - DNA, 20 bp, synthetic construct
  misc_feature 1..20: note = Description of Artificial Sequence: Synthetic oligonucleotide
  misc_feature 1..20: note = Target: SCN10A; (-) strand; PAM type: NNGRRT; PAM sequence: AAGAAT
  source 1..20: mol_type = other DNA
taacatggtcacatttattt

SEQ ID NO: 8058 - DNA, 20 bp, synthetic construct
  misc_feature 1..20: note = Description of Artificial Sequence: Synthetic oligonucleotide
  misc_feature 1..20: note = Target: SCN10A; (-) strand; PAM type: NNGRRT; PAM sequence: TCGAAT
  source 1..20: mol_type = other DNA
aactcaaataagaaaatcgc

SEQ ID NO: 8059 - DNA, 20 bp, synthetic construct
  misc_feature 1..20: note = Description of Artificial Sequence: Synthetic oligonucleotide
  misc_feature 1..20: note = Target: SCN10A; (-) strand; PAM type: NNGRRT; PAM sequence: TTGAGT
  source 1..20: mol_type = other DNA
ggccaaatgcgttgttgatg

SEQ ID NO: 8060 - DNA, 20 bp, synthetic construct
  misc_feature 1..20: note = Description of Artificial Sequence: Synthetic oligonucleotide
  misc_feature 1..20: note = Target: SCN10A; (-) strand; PAM type: NNGRRT; PAM sequence: GAGGAT
  source 1..20: mol_type = other DNA
agcttcttgtgcagttgtaa

SEQ ID NO: 8061 - DNA, 20 bp, synthetic construct
  misc_feature 1..20: note = Description of Artificial Sequence: Synthetic oligonucleotide
  misc_feature 1..20: note = Target: SCN10A; (-) strand; PAM type: NNGRRT; PAM sequence: ATGAGT
  source 1..20: mol_type = other DNA
tgaccgtagaatggtcaacg

SEQ ID NO: 8062 - DNA, 20 bp, synthetic construct
  misc_feature 1..20: note = Description of Artificial Sequence: Synthetic oligonucleotide
  misc_feature 1..20: note = Target: SCN10A; (-) strand; PAM type: NNGRRT; PAM sequence: TAGAAT
  source 1..20: mol_type = other DNA
cttcaactgccgaatgaccg

SEQ ID NO: 8063 - DNA, 20 bp, synthetic construct
  misc_feature 1..20: note = Description of Artificial Sequence: Synthetic oligonucleotide
  misc_feature 1..20: note = Target: SCN10A; (-) strand; PAM type: NNGRRT; PAM sequence: CCGAAT
  source 1..20: mol_type = other DNA
tttccaatttgcttcaactg

SEQ ID NO: 8064 - DNA, 20 bp, synthetic construct
  misc_feature 1..20: note = Description of Artificial Sequence: Synthetic oligonucleotide
  misc_feature 1..20: note = Target: SCN10A; (-) strand; PAM type: NNGRRT; PAM sequence: TAGAAT
  source 1..20: mol_type = other DNA
aatagttcatttttgttgca

SEQ ID NO: 8065 - DNA, 20 bp, synthetic construct
  misc_feature 1..20: note = Description of Artificial Sequence: Synthetic oligonucleotide
  misc_feature 1..20: note = Target: SCN10A; (-) strand; PAM type: NNGRRT; PAM sequence: TTGGGT
  source 1..20: mol_type = other DNA
acgactttttttggtgcaag

SEQ ID NO: 8066 - DNA, 20 bp, synthetic construct
  misc_feature 1..20: note = Description of Artificial Sequence: Synthetic oligonucleotide
  misc_feature 1..20: note = Target: SCN10A; (-) strand; PAM type: NNGRRT; PAM sequence: TGGGAT
  source 1..20: mol_type = other DNA
ctcagatgtaatggctttgc

SEQ ID NO: 8067 - DNA, 20 bp, synthetic construct
  misc_feature 1..20: note = Description of Artificial Sequence: Synthetic oligonucleotide
  misc_feature 1..20: note = Target: SCN10A; (-) strand; PAM type: NNGRRT; PAM sequence: AAGAAT
  source 1..20: mol_type = other DNA
tgcagtcggttgttgtggag

SEQ ID NO: 8068 - DNA, 20 bp, synthetic construct
  misc_feature 1..20: note = Description of Artificial Sequence: Synthetic oligonucleotide
  misc_feature 1..20: note = Target: SCN10A; (-) strand; PAM type: NNGRRT; PAM sequence: GTGGAT
  source 1..20: mol_type = other DNA
tgagaggtcaggtgaatatg

SEQ ID NO: 8069 - DNA, 20 bp, synthetic construct
  misc_feature 1..20: note = Description of Artificial Sequence: Synthetic oligonucleotide
  misc_feature 1..20: note = Target: SCN10A; (-) strand; PAM type: NNGRRT; PAM sequence: GTGAAT
  source 1..20: mol_type = other DNA
gttggttggtgagaggtcag

SEQ ID NO: 8070 - DNA, 20 bp, synthetic construct
  misc_feature 1..20: note = Description of Artificial Sequence: Synthetic oligonucleotide
  misc_feature 1..20: note = Target: SCN10A; (-) strand; PAM type: NNGRRT; PAM sequence: TGGGAT
  source 1..20: mol_type = other DNA
tagcataaaaatccatgctt

SEQ ID NO: 8071 - DNA, 20 bp, synthetic construct
  misc_feature 1..20: note = Description of Artificial Sequence: Synthetic oligonucleotide
  misc_feature 1..20: note = Target: SCN10A; (-) strand; PAM type: NNGRRT; PAM sequence: ATGAGT
  source 1..20: mol_type = other DNA
cacatttttgccaatgagaa

SEQ ID NO: 8072 - DNA, 20 bp, synthetic construct
  misc_feature 1..20: note = Description of Artificial Sequence: Synthetic oligonucleotide
  misc_feature 1..20: note = Target: SCN10A; (-) strand; PAM type: NNGRRT; PAM sequence: TGGGGT
  source 1..20: mol_type = other DNA
tgaaaaggtacaaaagtaat

SEQ ID NO: 8073 - DNA, 20 bp, synthetic construct
  misc_feature 1..20: note = Description of Artificial Sequence: Synthetic oligonucleotide
  misc_feature 1..20: note = Target: SCN10A; (-) strand; PAM type: NNGRRT; PAM sequence: AAGAAT
  source 1..20: mol_type = other DNA
tgacaaactctaaatactgg

SEQ ID NO: 8074 - DNA, 20 bp, synthetic construct
  misc_feature 1..20: note = Description of Artificial Sequence: Synthetic oligonucleotide
  misc_feature 1..20: note = Target: SCN10A; (-) strand; PAM type: NNGRRT; PAM sequence: TAGGAT
  source 1..20: mol_type = other DNA
ttacttataaagacaaccac

SEQ ID NO: 8075 - DNA, 20 bp, synthetic construct
  misc_feature 1..20: note = Description of Artificial Sequence: Synthetic oligonucleotide
  misc_feature 1..20: note = Target: SCN10A; (-) strand; PAM type: NNGRRT; PAM sequence: AGGAAT
  source 1..20: mol_type = other DNA
atggataaaacagagaggaa

SEQ ID NO: 8076 - DNA, 20 bp, synthetic construct
  misc_feature 1..20: note = Description of Artificial Sequence: Synthetic oligonucleotide
  misc_feature 1..20: note = Target: SCN10A; (-) strand; PAM type: NNGRRT; PAM sequence: ATGGAT
  source 1..20: mol_type = other DNA
ttattaaatacagtcagata

SEQ ID NO: 8077 - DNA, 20 bp, synthetic construct
  misc_feature 1..20: note = Description of Artificial Sequence: Synthetic oligonucleotide
  misc_feature 1..20: note = Target: SCN10A; (-) strand; PAM type: NNGRRT; PAM sequence: AAGAGT
  source 1..20: mol_type = other DNA
tctataataacaagaagtta

SEQ ID NO: 8078 - DNA, 20 bp, synthetic construct
  misc_feature 1..20: note = Description of Artificial Sequence: Synthetic oligonucleotide
  misc_feature 1..20: note = Target: SCN10A; (-) strand; PAM type: NNGRRT; PAM sequence: CAGAGT
  source 1..20: mol_type = other DNA
aagaggaaagaacatgtgag

SEQ ID NO: 8079 - DNA, 20 bp, synthetic construct
  misc_feature 1..20: note = Description of Artificial Sequence: Synthetic oligonucleotide
  misc_feature 1..20: note = Target: SCN10A; (-) strand; PAM type: NNGRRT; PAM sequence: GAGAAT
  source 1..20: mol_type = other DNA
ctccagagggggataaaaat

SEQ ID NO: 8080 - DNA, 20 bp, synthetic construct
  misc_feature 1..20: note = Description of Artificial Sequence: Synthetic oligonucleotide
  misc_feature 1..20: note = Target: SCN10A; (-) strand; PAM type: NNGRRT; PAM sequence: GGGGAT
  source 1..20: mol_type = other DNA
aaaccacggtgcctccagag

SEQ ID NO: 8081 - DNA, 20 bp, synthetic construct
  misc_feature 1..20: note = Description of Artificial Sequence: Synthetic oligonucleotide
  misc_feature 1..20: note = Target: SCN10A; (-) strand; PAM type: NNGRRT; PAM sequence: CAGGGT
  source 1..20: mol_type = other DNA
tggtaaatcacttagcagat

SEQ ID NO: 8082 - DNA, 20 bp, synthetic construct
  misc_feature 1..20: note = Description of Artificial Sequence: Synthetic oligonucleotide
  misc_feature 1..20: note = Target: SCN10A; (-) strand; PAM type: NNGRRT; PAM sequence: GTGGGT
  source 1..20: mol_type = other DNA
aaacacttggaagaccaaaa

SEQ ID NO: 8083 - DNA, 20 bp, synthetic construct
  misc_feature 1..20: note = Description of Artificial Sequence: Synthetic oligonucleotide
  misc_feature 1..20: note = Target: SCN10A; (-) strand; PAM type: NNGRRT; PAM sequence: GAGAAT
  source 1..20: mol_type = other DNA
tatacaagaacaaagagaaa

SEQ ID NO: 8084 - DNA, 20 bp, synthetic construct
  misc_feature 1..20: note = Description of Artificial Sequence: Synthetic oligonucleotide
  misc_feature 1..20: note = Target: SCN10A; (-) strand; PAM type: NNGRRT; PAM sequence: TAGAAT
  source 1..20: mol_type = other DNA
ccaccctctcaaaatgccaa

SEQ ID NO: 8085 - DNA, 20 bp, synthetic construct
  misc_feature 1..20: note = Description of Artificial Sequence: Synthetic oligonucleotide
  misc_feature 1..20: note = Target: SCN10A; (-) strand; PAM type: NNGRRT; PAM sequence: TAGAAT
  source 1..20: mol_type = other DNA
ttgtggttaaatatggaaga

SEQ ID NO: 8086 - DNA, 20 bp, synthetic construct
  misc_feature 1..20: note = Description of Artificial Sequence: Synthetic oligonucleotide
  misc_feature 1..20: note = Target: SCN10A; (-) strand; PAM type: NNGRRT; PAM sequence: GGGAGT
  source 1..20: mol_type = other DNA
ttttgcaaaatgagttattt

SEQ ID NO: 8087 - DNA, 20 bp, synthetic construct
  misc_feature 1..20: note = Description of Artificial Sequence: Synthetic oligonucleotide
  misc_feature 1..20: note = Target: SCN10A; (-) strand; PAM type: NNGRRT; PAM sequence: ATGAGT
  source 1..20: mol_type = other DNA
gtaaaacatttttttgcaaa

SEQ ID NO: 8088 - DNA, 20 bp, synthetic construct
  misc_feature 1..20: note = Description of Artificial Sequence: Synthetic oligonucleotide
  misc_feature 1..20: note = Target: SCN10A; (-) strand; PAM type: NNGRRT; PAM sequence: TGGAGT
  source 1..20: mol_type = other DNA
taaaatgtctatgcttcttt

SEQ ID NO: 8089 - DNA, 20 bp, synthetic construct
  misc_feature 1..20: note = Description of Artificial Sequence: Synthetic oligonucleotide
  misc_feature 1..20: note = Target: SCN10A; (-) strand; PAM type: NNGRRT; PAM sequence: GAGAGT
  source 1..20: mol_type = other DNA
agacatctataagctagaaa

SEQ ID NO: 8090 - DNA, 20 bp, synthetic construct
  misc_feature 1..20: note = Description of Artificial Sequence: Synthetic oligonucleotide
  misc_feature 1..20: note = Target: SCN10A; (-) strand; PAM type: NNGRRT; PAM sequence: AAGAGT
  source 1..20: mol_type = other DNA
attgggttaaatgaagtcac

SEQ ID NO: 8091 - DNA, 20 bp, synthetic construct
  misc_feature 1..20: note = Description of Artificial Sequence: Synthetic oligonucleotide
  misc_feature 1..20: note = Target: SCN10A; (-) strand; PAM type: NNGRRT; PAM sequence: TTGGGT
  source 1..20: mol_type = other DNA
ttgggcctctaaggaggtga

SEQ ID NO: 8092 - DNA, 20 bp, synthetic construct
  misc_feature 1..20: note = Description of Artificial Sequence: Synthetic oligonucleotide
  misc_feature 1..20: note = Target: SCN10A; (-) strand; PAM type: NNGRRT; PAM sequence: GTGAAT
  source 1..20: mol_type = other DNA
gtcacacaagctgctatgga

SEQ ID NO: 8093 - DNA, 20 bp, synthetic construct
  misc_feature 1..20: note = Description of Artificial Sequence: Synthetic oligonucleotide
  misc_feature 1..20: note = Target: SCN10A; (-) strand; PAM type: NNGRRT; PAM sequence: TGGAGT
  source 1..20: mol_type = other DNA
agttgtcacacaagctgcta

SEQ ID NO: 8094 - DNA, 20 bp, synthetic construct
  misc_feature 1..20: note = Description of Artificial Sequence: Synthetic oligonucleotide
  misc_feature 1..20: note = Target: SCN10A; (-) strand; PAM type: NNGRRT; PAM sequence: ATGGGT
  source 1..20: mol_type = other DNA
gtcacgttccattttatggc

SEQ ID NO: 8095 - DNA, 20 bp, synthetic construct
  misc_feature 1..20: note = Description of Artificial Sequence: Synthetic oligonucleotide
  misc_feature 1..20: note = Target: SCN10A; (-) strand; PAM type: NNGRRT; PAM sequence: GAGGAT
  source 1..20: mol_type = other DNA
ggcctccagggcagaagagg

SEQ ID NO: 8096 - DNA, 20 bp, synthetic construct
  misc_feature 1..20: note = Description of Artificial Sequence: Synthetic oligonucleotide
  misc_feature 1..20: note = Target: SCN10A; (-) strand; PAM type: NNGRRT; PAM sequence: GAGAAT
  source 1..20: mol_type = other DNA
gaaaaagtaccaaaaattag

SEQ ID NO: 8097 - DNA, 20 bp, synthetic construct
  misc_feature 1..20: note = Description of Artificial Sequence: Synthetic oligonucleotide
  misc_feature 1..20: note = Target: SCN10A; (-) strand; PAM type: NNGRRT; PAM sequence: AGGAAT
  source 1..20: mol_type = other DNA
aaaactaaactattttgttt

SEQ ID NO: 8098 - DNA, 20 bp, synthetic construct
  misc_feature 1..20: note = Description of Artificial Sequence: Synthetic oligonucleotide
  misc_feature 1..20: note = Target: SCN10A; (-) strand; PAM type: NNGRRT; PAM sequence: AAGGAT
  source 1..20: mol_type = other DNA
aacaaaaaaagccaaatgca

SEQ ID NO: 8099 - DNA, 20 bp, synthetic construct
  misc_feature 1..20: note = Description of Artificial Sequence: Synthetic oligonucleotide
  misc_feature 1..20: note = Target: SCN10A; (-) strand; PAM type: NNGRRT; PAM sequence: ATGAGT
  source 1..20: mol_type = other DNA
agtgctgcacaacaataagg

SEQ ID NO: 8100 - DNA, 20 bp, synthetic construct
  misc_feature 1..20: note = Description of Artificial Sequence: Synthetic oligonucleotide
  misc_feature 1..20: note = Target: SCN10A; (-) strand; PAM type: NNGRRT; PAM sequence: AAGGAT
  source 1..20: mol_type = other DNA
ctttagtgctgcacaacaat

SEQ ID NO: 8101 - DNA, 20 bp, synthetic construct
  misc_feature 1..20: note = Description of Artificial Sequence: Synthetic oligonucleotide
  misc_feature 1..20: note = Target: SCN10A; (-) strand; PAM type: NNGRRT; PAM sequence: TTGAGT
  source 1..20: mol_type = other DNA
cactcaaatgtccataaact

SEQ ID NO: 8102 - DNA, 20 bp, synthetic construct
  misc_feature 1..20: note = Description of Artificial Sequence: Synthetic oligonucleotide
  misc_feature 1..20: note = Target: SCN10A; (-) strand; PAM type: NNGRRT; PAM sequence: AGGGGT
  source 1..20: mol_type = other DNA
gacaacctctttggaaagca

SEQ ID NO: 8103 - DNA, 20 bp, synthetic construct
  misc_feature 1..20: note = Description of Artificial Sequence: Synthetic oligonucleotide
  misc_feature 1..20: note = Target: SCN10A; (-) strand; PAM type: NNGRRT; PAM sequence: GGGAGT
  source 1..20: mol_type = other DNA
gaaactcacacactgctggt

SEQ ID NO: 8104 - DNA, 20 bp, synthetic construct
  misc_feature 1..20: note = Description of Artificial Sequence: Synthetic oligonucleotide
  misc_feature 1..20: note = Target: SCN10A; (-) strand; PAM type: NNGRRT; PAM sequence: GGGAAT
  source 1..20: mol_type = other DNA
gtgtcacaataccaagtatt

SEQ ID NO: 8105 - DNA, 20 bp, synthetic construct
  misc_feature 1..20: note = Description of Artificial Sequence: Synthetic oligonucleotide
  misc_feature 1..20: note = Target: SCN10A; (-) strand; PAM type: NNGRRT; PAM sequence: AAGAGT
  source 1..20: mol_type = other DNA
cttaacctttttttaaatca

SEQ ID NO: 8106 - DNA, 20 bp, synthetic construct
  misc_feature 1..20: note = Description of Artificial Sequence: Synthetic oligonucleotide
  misc_feature 1..20: note = Target: SCN10A; (-) strand; PAM type: NNGRRT; PAM sequence: TTGAAT
  source 1..20: mol_type = other DNA
cttgtaaaatagcacaaaat

SEQ ID NO: 8107 - DNA, 20 bp, synthetic construct
  misc_feature 1..20: note = Description of Artificial Sequence: Synthetic oligonucleotide
  misc_feature 1..20: note = Target: SCN10A; (-) strand; PAM type: NNGRRT; PAM sequence: CAGAGT
  source 1..20: mol_type = other DNA
aaaaagcaagtgcttatatt

SEQ ID NO: 8108 - DNA, 20 bp, synthetic construct
  misc_feature 1..20: note = Description of Artificial Sequence: Synthetic oligonucleotide
  misc_feature 1..20: note = Target: SCN10A; (-) strand; PAM type: NNGRRT; PAM sequence: AAGAAT
  source 1..20: mol_type = other DNA
cattttagtatactataatt

SEQ ID NO: 8109 - DNA, 20 bp, synthetic construct
  misc_feature 1..20: note = Description of Artificial Sequence: Synthetic oligonucleotide
  misc_feature 1..20: note = Target: SCN10A; (-) strand; PAM type: NNGRRT; PAM sequence: AGGAAT
  source 1..20: mol_type = other DNA
tttgaaaggaaaaaacaaag

SEQ ID NO: 8110 - DNA, 20 bp, synthetic construct
  misc_feature 1..20: note = Description of Artificial Sequence: Synthetic oligonucleotide
  misc_feature 1..20: note = Target: SCN10A; (-) strand; PAM type: NNGRRT; PAM sequence: GTGGAT
  source 1..20: mol_type = other DNA
atgaagccgacttgatcgtg

SEQ ID NO: 8111 - DNA, 20 bp, synthetic construct
  misc_feature 1..20: note = Description of Artificial Sequence: Synthetic oligonucleotide
  misc_feature 1..20: note = Target: SCN10A; (-) strand; PAM type: NNGRRT; PAM sequence: ATGGAT
  source 1..20: mol_type = other DNA
tcattggttctgtttgtgtg

SEQ ID NO: 8112 - DNA, 20 bp, synthetic construct
  misc_feature 1..20: note = Description of Artificial Sequence: Synthetic oligonucleotide
  misc_feature 1..20: note = Target: SCN10A; (-) strand; PAM type: NNGRRT; PAM sequence: TTGAAT
  source 1..20: mol_type = other DNA
gcttttagcatgaatgggtg

SEQ ID NO: 8113 - DNA, 20 bp, synthetic construct
  misc_feature 1..20: note = Description of Artificial Sequence: Synthetic oligonucleotide
  misc_feature 1..20: note = Target: SCN10A; (-) strand; PAM type: NNGRRT; PAM sequence: ATGGGT
  source 1..20: mol_type = other DNA
attgagagcttttagcatga

SEQ ID NO: 8114 - DNA, 20 bp, synthetic construct
  misc_feature 1..20: note = Description of Artificial Sequence: Synthetic oligonucleotide
  misc_feature 1..20: note = Target: SCN10A; (-) strand; PAM type: NNGRRT; PAM sequence: ATGAAT
  source 1..20: mol_type = other DNA
gtttattgagagcttttagc

SEQ ID NO: 8115 - DNA, 20 bp, synthetic construct
  misc_feature 1..20: note = Description of Artificial Sequence: Synthetic oligonucleotide
  misc_feature 1..20: note = Target: SCN10A; (-) strand; PAM type: NNGRRT; PAM sequence: AAGAGT
  source 1..20: mol_type = other DNA
cttccaatactatgttgaat

SEQ ID NO: 8116 - DNA, 20 bp, synthetic construct
  misc_feature 1..20: note = Description of Artificial Sequence: Synthetic oligonucleotide
  misc_feature 1..20: note = Target: SCN10A; (-) strand; PAM type: NNGRRT; PAM sequence: TTGAAT
  source 1..20: mol_type = other DNA
ccagaacttccaatactatg

SEQ ID NO: 8117 - DNA, 20 bp, synthetic construct
  misc_feature 1..20: note = Description of Artificial Sequence: Synthetic oligonucleotide
  misc_feature 1..20: note = Target: SCN10A; (-) strand; PAM type: NNGRRT; PAM sequence: TTGAAT
  source 1..20: mol_type = other DNA
ttgacttcctcttttcctat

SEQ ID NO: 8118 - DNA, 20 bp, synthetic construct
  misc_feature 1..20: note = Description of Artificial Sequence: Synthetic oligonucleotide
  misc_feature 1..20: note = Target: SCN10A; (-) strand; PAM type: NNGRRT; PAM sequence: TGGGGT
  source 1..20: mol_type = other DNA
gagattttgggctgagatga

SEQ ID NO: 8119 - DNA, 20 bp, synthetic construct
  misc_feature 1..20: note = Description of Artificial Sequence: Synthetic oligonucleotide
  misc_feature 1..20: note = Target: SCN10A; (-) strand; PAM type: NNGRRT; PAM sequence: GGGAAT
  source 1..20: mol_type = other DNA
tttgtctgttattggtgtat

SEQ ID NO: 8120 - DNA, 20 bp, synthetic construct
  misc_feature 1..20: note = Description of Artificial Sequence: Synthetic oligonucleotide
  misc_feature 1..20: note = Target: SCN10A; (-) strand; PAM type: NNGRRT; PAM sequence: GGGAGT
  source 1..20: mol_type = other DNA
tctttgttgcaattgtgaat

SEQ ID NO: 8121 - DNA, 20 bp, synthetic construct
  misc_feature 1..20: note = Description of Artificial Sequence: Synthetic oligonucleotide
  misc_feature 1..20: note = Target: SCN10A; (-) strand; PAM type: NNGRRT; PAM sequence: GTGAAT
  source 1..20: mol_type = other DNA
ttattctctttgttgcaatt

SEQ ID NO: 8122 - DNA, 20 bp, synthetic construct
  misc_feature 1..20: note = Description of Artificial Sequence: Synthetic oligonucleotide
  misc_feature 1..20: note = Target: SCN10A; (-) strand; PAM type: NNGRRT; PAM sequence: TGGAAT
  source 1..20: mol_type = other DNA
atttttcctatccatgagca

SEQ ID NO: 8123 - DNA, 20 bp, synthetic construct
  misc_feature 1..20: note = Description of Artificial Sequence: Synthetic oligonucleotide
  misc_feature 1..20: note = Target: SCN10A; (-) strand; PAM type: NNGRRT; PAM sequence: TTGAAT
  source 1..20: mol_type = other DNA
gtagcttgatggggataaca

SEQ ID NO: 8124 - DNA, 20 bp, synthetic construct
  misc_feature 1..20: note = Description of Artificial Sequence: Synthetic oligonucleotide
  misc_feature 1..20: note = Target: SCN10A; (-) strand; PAM type: NNGRRT; PAM sequence: GGGGAT
  source 1..20: mol_type = other DNA
aaagtcagtggtagcttgat

SEQ ID NO: 8125 - DNA, 20 bp, synthetic construct
  misc_feature 1..20: note = Description of Artificial Sequence: Synthetic oligonucleotide
  misc_feature 1..20: note = Target: SCN10A; (-) strand; PAM type: NNGRRT; PAM sequence: TAGAAT
  source 1..20: mol_type = other DNA
ccaactttcttctttttgct

SEQ ID NO: 8126 - DNA, 20 bp, synthetic construct
  misc_feature 1..20: note = Description of Artificial Sequence: Synthetic oligonucleotide
  misc_feature 1..20: note = Target: SCN10A; (-) strand; PAM type: NNGRRT; PAM sequence: GGGAAT
  source 1..20: mol_type = other DNA
cccacaccatttattaaata

SEQ ID NO: 8127 - DNA, 20 bp, synthetic construct
  misc_feature 1..20: note = Description of Artificial Sequence: Synthetic oligonucleotide
  misc_feature 1..20: note = Target: SCN10A; (-) strand; PAM type: NNGRRT; PAM sequence: AGGGAT
  source 1..20: mol_type = other DNA
ttttgtgtaaggtataagga

SEQ ID NO: 8128 - DNA, 20 bp, synthetic construct
  misc_feature 1..20: note = Description of Artificial Sequence: Synthetic oligonucleotide
  misc_feature 1..20: note = Target: SCN10A; (-) strand; PAM type: NNGRRT; PAM sequence: TTGAGT
  source 1..20: mol_type = other DNA
gtttaagtctttaatctatc

SEQ ID NO: 8129 - DNA, 20 bp, synthetic construct
  misc_feature 1..20: note = Description of Artificial Sequence: Synthetic oligonucleotide
  misc_feature 1..20: note = Target: SCN10A; (-) strand; PAM type: NNGRRT; PAM sequence: TAGGGT
  source 1..20: mol_type = other DNA
gtattgcctaggttttcttc

SEQ ID NO: 8130 - DNA, 20 bp, synthetic construct
  misc_feature 1..20: note = Description of Artificial Sequence: Synthetic oligonucleotide
  misc_feature 1..20: note = Target: SCN10A; (-) strand; PAM type: NNGRRT; PAM sequence: AAGGGT
  source 1..20: mol_type = other DNA
ttgcccatgcctatgtcctg

SEQ ID NO: 8131 - DNA, 20 bp, synthetic construct
  misc_feature 1..20: note = Description of Artificial Sequence: Synthetic oligonucleotide
  misc_feature 1..20: note = Target: SCN10A; (-) strand; PAM type: NNGRRT; PAM sequence: TTGGAT
  source 1..20: mol_type = other DNA
gcagaagctctttagtttaa

SEQ ID NO: 8132 - DNA, 20 bp, synthetic construct
  misc_feature 1..20: note = Description of Artificial Sequence: Synthetic oligonucleotide
  misc_feature 1..20: note = Target: SCN10A; (-) strand; PAM type: NNGRRT; PAM sequence: CTGGAT
  source 1..20: mol_type = other DNA
gtttaagttttttgtagatt

SEQ ID NO: 8133 - DNA, 20 bp, synthetic construct
  misc_feature 1..20: note = Description of Artificial Sequence: Synthetic oligonucleotide
  misc_feature 1..20: note = Target: SCN10A; (-) strand; PAM type: NNGRRT; PAM sequence: TGGAGT
  source 1..20: mol_type = other DNA
atcctttgcccactttttga

SEQ ID NO: 8134 - DNA, 20 bp, synthetic construct
  misc_feature 1..20: note = Description of Artificial Sequence: Synthetic oligonucleotide
  misc_feature 1..20: note = Target: SCN10A; (-) strand; PAM type: NNGRRT; PAM sequence: AGGAAT
  source 1..20: mol_type = other DNA
tttctggttctagatccttg

SEQ ID NO: 8135 - DNA, 20 bp, synthetic construct
  misc_feature 1..20: note = Description of Artificial Sequence: Synthetic oligonucleotide
  misc_feature 1..20: note = Target: SCN10A; (-) strand; PAM type: NNGRRT; PAM sequence: CTGGGT
  source 1..20: mol_type = other DNA
tatacccagtaatggaattg

SEQ ID NO: 8136 - DNA, 20 bp, synthetic construct
  misc_feature 1..20: note = Description of Artificial Sequence: Synthetic oligonucleotide
  misc_feature 1..20: note = Target: SCN10A; (-) strand; PAM type: NNGRRT; PAM sequence: TGGAAT
  source 1..20: mol_type = other DNA
tttgggtatatacccagtaa

SEQ ID NO: 8137 - DNA, 20 bp, synthetic construct
  misc_feature 1..20: note = Description of Artificial Sequence: Synthetic oligonucleotide
  misc_feature 1..20: note = Target: SCN10A; (-) strand; PAM type: NNGRRT; PAM sequence: TTGGGT
  source 1..20: mol_type = other DNA
gtagaataatttataatcct

SEQ ID NO: 8138 - DNA, 20 bp, synthetic construct
  misc_feature 1..20: note = Description of Artificial Sequence: Synthetic oligonucleotide
  misc_feature 1..20: note = Target: SCN10A; (-) strand; PAM type: NNGRRT; PAM sequence: TAGAAT
  source 1..20: mol_type = other DNA
gcatgcttgtatctttatag

SEQ ID NO: 8139 - DNA, 20 bp, synthetic construct
  misc_feature 1..20: note = Description of Artificial Sequence: Synthetic oligonucleotide
  misc_feature 1..20: note = Target: SCN10A; (-) strand; PAM type: NNGRRT; PAM sequence: TTGGGT
  source 1..20: mol_type = other DNA
agtctatcactgatgggcgt

SEQ ID NO: 8140 - DNA, 20 bp, synthetic construct
  misc_feature 1..20: note = Description of Artificial Sequence: Synthetic oligonucleotide
  misc_feature 1..20: note = Target: SCN10A; (-) strand; PAM type: NNGRRT; PAM sequence: GAGAAT
  source 1..20: mol_type = other DNA
tgttcttatgtcagtttgct

SEQ ID NO: 8141 - DNA, 20 bp, synthetic construct
  misc_feature 1..20: note = Description of Artificial Sequence: Synthetic oligonucleotide
  misc_feature 1..20: note = Target: SCN10A; (-) strand; PAM type: NNGRRT; PAM sequence: ATGAGT
  source 1..20: mol_type = other DNA
tcattgttcatctcccacct

SEQ ID NO: 8142 - DNA, 20 bp, synthetic construct
  misc_feature 1..20: note = Description of Artificial Sequence: Synthetic oligonucleotide
  misc_feature 1..20: note = Target: SCN10A; (-) strand; PAM type: NNGRRT; PAM sequence: TGGGGT
  source 1..20: mol_type = other DNA
ttaaattttactttaagttc

SEQ ID NO: 8143 - DNA, 20 bp, synthetic construct
  misc_feature 1..20: note = Description of Artificial Sequence: Synthetic oligonucleotide
  misc_feature 1..20: note = Target: SCN10A; (-) strand; PAM type: NNGRRT; PAM sequence: GTGGAT
  source 1..20: mol_type = other DNA
cacacaagaatcaattctag

SEQ ID NO: 8144 - DNA, 20 bp, synthetic construct
  misc_feature 1..20: note = Description of Artificial Sequence: Synthetic oligonucleotide
  misc_feature 1..20: note = Target: SCN10A; (-) strand; PAM type: NNGRRT; PAM sequence: AAGAAT
  source 1..20: mol_type = other DNA
tccaactttgcaccacacac

SEQ ID NO: 8145 - DNA, 20 bp, synthetic construct
  misc_feature 1..20: note = Description of Artificial Sequence: Synthetic oligonucleotide
  misc_feature 1..20: note = Target: SCN10A; (-) strand; PAM type: NNGRRT; PAM sequence: AGGAAT
  source 1..20: mol_type = other DNA
aaaaatgatgctgaagaatt

SEQ ID NO: 8146 - DNA, 20 bp, synthetic construct
  misc_feature 1..20: note = Description of Artificial Sequence: Synthetic oligonucleotide
  misc_feature 1..20: note = Target: SCN10A; (-) strand; PAM type: NNGRRT; PAM sequence: AAGAAT
  source 1..20: mol_type = other DNA
gtcttcaaaaaatgatgctg

SEQ ID NO: 8147 - DNA, 20 bp, synthetic construct
  misc_feature 1..20: note = Description of Artificial Sequence: Synthetic oligonucleotide
  misc_feature 1..20: note = Target: SCN10A; (-) strand; PAM type: NNGRRT; PAM sequence: CAGAAT
  source 1..20: mol_type = other DNA
gccattggtgtaagattggt

SEQ ID NO: 8148 - DNA, 20 bp, synthetic construct
  misc_feature 1..20: note = Description of Artificial Sequence: Synthetic oligonucleotide
  misc_feature 1..20: note = Target: SCN10A; (-) strand; PAM type: NNGRRT; PAM sequence: CTGGAT
  source 1..20: mol_type = other DNA
aagtgggagaactcattcta

SEQ ID NO: 8149 - DNA, 20 bp, synthetic construct
  misc_feature 1..20: note = Description of Artificial Sequence: Synthetic oligonucleotide
  misc_feature 1..20: note = Target: SCN10A; (-) strand; PAM type: NNGRRT; PAM sequence: AGGAAT
  source 1..20: mol_type = other DNA
ttttaaaatgtcaagtatct

SEQ ID NO: 8150 - DNA, 20 bp, synthetic construct
  misc_feature 1..20: note = Description of Artificial Sequence: Synthetic oligonucleotide
  misc_feature 1..20: note = Target: SCN10A; (-) strand; PAM type: NNGRRT; PAM sequence: CTGGGT
  source 1..20: mol_type = other DNA
aaaagagtatagtaaggtag

SEQ ID NO: 8151 - DNA, 20 bp, synthetic construct
  misc_feature 1..20: note = Description of Artificial Sequence: Synthetic oligonucleotide
  misc_feature 1..20: note = Target: SCN10A; (-) strand; PAM type: NNGRRT; PAM sequence: AAGAGT
  source 1..20: mol_type = other DNA
taaacagtaagaattaataa

SEQ ID NO: 8152 - DNA, 20 bp, synthetic construct
  misc_feature 1..20: note = Description of Artificial Sequence: Synthetic oligonucleotide
  misc_feature 1..20: note = Target: SCN10A; (-) strand; PAM type: NNGRRT; PAM sequence: AAGAAT
  source 1..20: mol_type = other DNA
ataacctagagataaacagt

SEQ ID NO: 8153 - DNA, 20 bp, synthetic construct
  misc_feature 1..20: note = Description of Artificial Sequence: Synthetic oligonucleotide
  misc_feature 1..20: note = Target: SCN10A; (-) strand; PAM type: NNGRRT; PAM sequence: AAGGGT
  source 1..20: mol_type = other DNA
gggattgcatcactctgata

SEQ ID NO: 8154 - DNA, 20 bp, synthetic construct
  misc_feature 1..20: note = Description of Artificial Sequence: Synthetic oligonucleotide
  misc_feature 1..20: note = Target: SCN10A; (-) strand; PAM type: NNGRRT; PAM sequence: GGGGAT
  source 1..20: mol_type = other DNA
aagtataataattttaaaaa

SEQ ID NO: 8155 - DNA, 20 bp, synthetic construct
  misc_feature 1..20: note = Description of Artificial Sequence: Synthetic oligonucleotide
  misc_feature 1..20: note = Target: SCN10A; (-) strand; PAM type: NNGRRT; PAM sequence: ACGGGT
  source 1..20: mol_type = other DNA
gtgcagcaaaccaccatggc

SEQ ID NO: 8156 - DNA, 20 bp, synthetic construct
  misc_feature 1..20: note = Description of Artificial Sequence: Synthetic oligonucleotide
  misc_feature 1..20: note = Target: SCN10A; (-) strand; PAM type: NNGRRT; PAM sequence: AAGGGT
  source 1..20: mol_type = other DNA
ctaatgtaaatgacgggttg

SEQ ID NO: 8157 - DNA, 20 bp, synthetic construct
  misc_feature 1..20: note = Description of Artificial Sequence: Synthetic oligonucleotide
  misc_feature 1..20: note = Target: SCN10A; (-) strand; PAM type: NNGRRT; PAM sequence: ACGGGT
  source 1..20: mol_type = other DNA
agaaatacctaatgtaaatg

SEQ ID NO: 8158 - DNA, 20 bp, synthetic construct
  misc_feature 1..20: note = Description of Artificial Sequence: Synthetic oligonucleotide
  misc_feature 1..20: note = Target: SCN10A; (-) strand; PAM type: NNGRRT; PAM sequence: AGGGAT
  source 1..20: mol_type = other DNA
gaggggtggggggctagggg

SEQ ID NO: 8159 - DNA, 20 bp, synthetic construct
  misc_feature 1..20: note = Description of Artificial Sequence: Synthetic oligonucleotide
  misc_feature 1..20: note = Target: SCN10A; (-) strand; PAM type: NNGRRT; PAM sequence: AGGGGT
  source 1..20: mol_type = other DNA
gaacacactggggcctgttg

SEQ ID NO: 8160 - DNA, 20 bp, synthetic construct
  misc_feature 1..20: note = Description of Artificial Sequence: Synthetic oligonucleotide
  misc_feature 1..20: note = Target: SCN10A; (-) strand; PAM type: NNGRRT; PAM sequence: GGGAGT
  source 1..20: mol_type = other DNA
gtatgttctcactcataagt

SEQ ID NO: 8161 - DNA, 20 bp, synthetic construct
  misc_feature 1..20: note = Description of Artificial Sequence: Synthetic oligonucleotide
  misc_feature 1..20: note = Target: SCN10A; (-) strand; PAM type: NNGRRT; PAM sequence: ATGGAT
  source 1..20: mol_type = other DNA
ttcatgtcctttgcagggac

SEQ ID NO: 8162 - DNA, 20 bp, synthetic construct
  misc_feature 1..20: note = Description of Artificial Sequence: Synthetic oligonucleotide
  misc_feature 1..20: note = Target: SCN10A; (-) strand; PAM type: NNGRRT; PAM sequence: ATGAGT
  source 1..20: mol_type = other DNA
ctatgcagtcataaaaaagg

SEQ ID NO: 8163 - DNA, 20 bp, synthetic construct
  misc_feature 1..20: note = Description of Artificial Sequence: Synthetic oligonucleotide
  misc_feature 1..20: note = Target: SCN10A; (-) strand; PAM type: NNGRRT; PAM sequence: AAGGAT
  source 1..20: mol_type = other DNA
aatgctatgcagtcataaaa

SEQ ID NO: 8164 - DNA, 20 bp, synthetic construct
  misc_feature 1..20: note = Description of Artificial Sequence: Synthetic oligonucleotide
  misc_feature 1..20: note = Target: SCN10A; (-) strand; PAM type: NNGRRT; PAM sequence: TGGAAT
  source 1..20: mol_type = other DNA
aatgtggcacatatacacca

SEQ ID NO: 8165 - DNA, 20 bp, synthetic construct
  misc_feature 1..20: note = Description of Artificial Sequence: Synthetic oligonucleotide
  misc_feature 1..20: note = Target: SCN10A; (-) strand; PAM type: NNGRRT; PAM sequence: GGGAAT
  source 1..20: mol_type = other DNA
ttagaaaagttgaaatagaa

SEQ ID NO: 8166 - DNA, 20 bp, synthetic construct
  misc_feature 1..20: note = Description of Artificial Sequence: Synthetic oligonucleotide
  misc_feature 1..20: note = Target: SCN10A; (-) strand; PAM type: NNGRRT; PAM sequence: AAGGAT
  source 1..20: mol_type = other DNA
ttattaatagattaaaggaa

SEQ ID NO: 8167 - DNA, 20 bp, synthetic construct
  misc_feature 1..20: note = Description of Artificial Sequence: Synthetic oligonucleotide
  misc_feature 1..20: note = Target: SCN10A; (-) strand; PAM type: NNGRRT; PAM sequence: AGGGAT
  source 1..20: mol_type = other DNA
tccatatccacacatctggg

SEQ ID NO: 8168 - DNA, 20 bp, synthetic construct
  misc_feature 1..20: note = Description of Artificial Sequence: Synthetic oligonucleotide
  misc_feature 1..20: note = Target: SCN10A; (-) strand; PAM type: NNGRRT; PAM sequence: GGGAGT
  source 1..20: mol_type = other DNA
cccctatagtttcagaatct

SEQ ID NO: 8169 - DNA, 20 bp, synthetic construct
  misc_feature 1..20: note = Description of Artificial Sequence: Synthetic oligonucleotide
  misc_feature 1..20: note = Target: SCN10A; (-) strand; PAM type: NNGRRT; PAM sequence: CAGAAT
  source 1..20: mol_type = other DNA
gggtgaaacccctatagttt

SEQ ID NO: 8170 - DNA, 20 bp, synthetic construct
  misc_feature 1..20: note = Description of Artificial Sequence: Synthetic oligonucleotide
  misc_feature 1..20: note = Target: SCN10A; (-) strand; PAM type: NNGRRT; PAM sequence: GTGGGT
  source 1..20: mol_type = other DNA
tattctatttccctaggtta

SEQ ID NO: 8171 - DNA, 20 bp, synthetic construct
  misc_feature 1..20: note = Description of Artificial Sequence: Synthetic oligonucleotide
  misc_feature 1..20: note = Target: SCN10A; (-) strand; PAM type: NNGRRT; PAM sequence: TGGAGT
  source 1..20: mol_type = other DNA
gaactaagaacaaatggctc

SEQ ID NO: 8172 - DNA, 20 bp, synthetic construct
  misc_feature 1..20: note = Description of Artificial Sequence: Synthetic oligonucleotide
  misc_feature 1..20: note = Target: SCN10A; (-) strand; PAM type: NNGRRT; PAM sequence: ATGAGT
  source 1..20: mol_type = other DNA
gtctaaggtggcctgggaag

SEQ ID NO: 8173 - DNA, 20 bp, synthetic construct
  misc_feature 1..20: note = Description of Artificial Sequence: Synthetic oligonucleotide
  misc_feature 1..20: note = Target: SCN10A; (-) strand; PAM type: NNGRRT; PAM sequence: CTGAGT
  source 1..20: mol_type = other DNA
tggggagattttttaaatgc

SEQ ID NO: 8174 - DNA, 20 bp, synthetic construct
  misc_feature 1..20: note = Description of Artificial Sequence: Synthetic oligonucleotide
  misc_feature 1..20: note = Target: SCN10A; (-) strand; PAM type: NNGRRT; PAM sequence: CTGAAT
  source 1..20: mol_type = other DNA
catgcctcatgtgggtaatg

SEQ ID NO: 8175 - DNA, 20 bp, synthetic construct
  misc_feature 1..20: note = Description of Artificial Sequence: Synthetic oligonucleotide
  misc_feature 1..20: note = Target: SCN10A; (-) strand; PAM type: NNGRRT; PAM sequence: GTGGGT
  source 1..20: mol_type = other DNA
tttatcctgccatgcctcat

SEQ ID NO: 8176 - DNA, 20 bp, synthetic construct
  misc_feature 1..20: note = Description of Artificial Sequence: Synthetic oligonucleotide
  misc_feature 1..20: note = Target: SCN10A; (-) strand; PAM type: NNGRRT; PAM sequence: GTGAGT
  source 1..20: mol_type = other DNA
gaccttccagagaaaattga

SEQ ID NO: 8177 - DNA, 20 bp, synthetic construct
  misc_feature 1..20: note = Description of Artificial Sequence: Synthetic oligonucleotide
  misc_feature 1..20: note = Target: SCN10A; (-) strand; PAM type: NNGRRT; PAM sequence: TTGAGT
  source 1..20: mol_type = other DNA
aactgaccttccagagaaaa

SEQ ID NO: 8178 - DNA, 20 bp, synthetic construct
  misc_feature 1..20: note = Description of Artificial Sequence: Synthetic oligonucleotide
  misc_feature 1..20: note = Target: SCN10A; (-) strand; PAM type: NNGRRT; PAM sequence: ATGAAT
  source 1..20: mol_type = other DNA
gctaatattggctaagattt

SEQ ID NO: 8179 - DNA, 20 bp, synthetic construct
  misc_feature 1..20: note = Description of Artificial Sequence: Synthetic oligonucleotide
  misc_feature 1..20: note = Target: SCN10A; (-) strand; PAM type: NNGRRT; PAM sequence: AAGAGT
  source 1..20: mol_type = other DNA
gagtttgttatcaaacagat

SEQ ID NO: 8180 - DNA, 20 bp, synthetic construct
  misc_feature 1..20: note = Description of Artificial Sequence: Synthetic oligonucleotide
  misc_feature 1..20: note = Target: SCN10A; (-) strand; PAM type: NNGRRT; PAM sequence: CAGAGT
  source 1..20: mol_type = other DNA
ctgtttccttctatcttgct

SEQ ID NO: 8181 - DNA, 20 bp, synthetic construct
  misc_feature 1..20: note = Description of Artificial Sequence: Synthetic oligonucleotide
  misc_feature 1..20: note = Target: SCN10A; (-) strand; PAM type: NNGRRT; PAM sequence: GGGAGT
  source 1..20: mol_type = other DNA
cagaaggacattttggaaaa

SEQ ID NO: 8182 - DNA, 20 bp, synthetic construct
  misc_feature 1..20: note = Description of Artificial Sequence: Synthetic oligonucleotide
  misc_feature 1..20: note = Target: SCN10A; (-) strand; PAM type: NNGRRT; PAM sequence: TAGAAT
  source 1..20: mol_type = other DNA
tctaacttttctttgtcttt

SEQ ID NO: 8183 - DNA, 20 bp, synthetic construct
  misc_feature 1..20: note = Description of Artificial Sequence: Synthetic oligonucleotide
  misc_feature 1..20: note = Target: SCN10A; (-) strand; PAM type: NNGRRT; PAM sequence: TGGGGT
  source 1..20: mol_type = other DNA
cactccagcctaatcctact

SEQ ID NO: 8184 - DNA, 20 bp, synthetic construct
  misc_feature 1..20: note = Description of Artificial Sequence: Synthetic oligonucleotide
  misc_feature 1..20: note = Target: SCN10A; (-) strand; PAM type: NNGRRT; PAM sequence: CAGAGT
  source 1..20: mol_type = other DNA
tattctccactctagctatt

SEQ ID NO: 8185 - DNA, 20 bp, synthetic construct
  misc_feature 1..20: note = Description of Artificial Sequence: Synthetic oligonucleotide
  misc_feature 1..20: note = Target: SCN10A; (-) strand; PAM type: NNGRRT; PAM sequence: ATGAGT
  source 1..20: mol_type = other DNA
acttctgctcaaattgaaaa

SEQ ID NO: 8186 - DNA, 20 bp, synthetic construct
  misc_feature 1..20: note = Description of Artificial Sequence: Synthetic oligonucleotide
  misc_feature 1..20: note = Target: SCN10A; (-) strand; PAM type: NNGRRT; PAM sequence: TAGAAT
  source 1..20: mol_type = other DNA
ggaaaatgtggtttaattaa

SEQ ID NO: 8187 - DNA, 20 bp, synthetic construct
  misc_feature 1..20: note = Description of Artificial Sequence: Synthetic oligonucleotide
  misc_feature 1..20: note = Target: SCN10A; (-) strand; PAM type: NNGRRT; PAM sequence: TTGGAT
  source 1..20: mol_type = other DNA
acacgattttagtttaatcc

SEQ ID NO: 8188 - DNA, 20 bp, synthetic construct
  misc_feature 1..20: note = Description of Artificial Sequence: Synthetic oligonucleotide
  misc_feature 1..20: note = Target: SCN10A; (-) strand; PAM type: NNGRRT; PAM sequence: TAGAAT
  source 1..20: mol_type = other DNA
atattacttttaaatatttg

SEQ ID NO: 8189 - DNA, 20 bp, synthetic construct
  misc_feature 1..20: note = Description of Artificial Sequence: Synthetic oligonucleotide
  misc_feature 1..20: note = Target: SCN10A; (-) strand; PAM type: NNGRRT; PAM sequence: ATGAAT
  source 1..20: mol_type = other DNA
taattctaatcacatttgct

SEQ ID NO: 8190 - DNA, 20 bp, synthetic construct
  misc_feature 1..20: note = Description of Artificial Sequence: Synthetic oligonucleotide
  misc_feature 1..20: note = Target: SCN10A; (-) strand; PAM type: NNGRRT; PAM sequence: TAGAAT
  source 1..20: mol_type = other DNA
actccagccccaaaagatac

SEQ ID NO: 8191 - DNA, 20 bp, synthetic construct
  misc_feature 1..20: note = Description of Artificial Sequence: Synthetic oligonucleotide
  misc_feature 1..20: note = Target: SCN10A; (-) strand; PAM type: NNGRRT; PAM sequence: GGGGGT
  source 1..20: mol_type = other DNA
ctggacagaaaagctgttga

SEQ ID NO: 8192 - DNA, 20 bp, synthetic construct
  misc_feature 1..20: note = Description of Artificial Sequence: Synthetic oligonucleotide
  misc_feature 1..20: note = Target: SCN10A; (-) strand; PAM type: NNGRRT; PAM sequence: TAGAGT
  source 1..20: mol_type = other DNA
atgagtaaataattgcttgg

SEQ ID NO: 8193 - DNA, 20 bp, synthetic construct
  misc_feature 1..20: note = Description of Artificial Sequence: Synthetic oligonucleotide
  misc_feature 1..20: note = Target: SCN10A; (-) strand; PAM type: NNGRRT; PAM sequence: ATGAGT
  source 1..20: mol_type = other DNA
tctcttcatcttgagatttg

SEQ ID NO: 8194 - DNA, 20 bp, synthetic construct
  misc_feature 1..20: note = Description of Artificial Sequence: Synthetic oligonucleotide
  misc_feature 1..20: note = Target: SCN10A; (-) strand; PAM type: NNGRRT; PAM sequence: GTGAAT
  source 1..20: mol_type = other DNA
taaaaagaaccaagtgacca

SEQ ID NO: 8195 - DNA, 20 bp, synthetic construct
  misc_feature 1..20: note = Description of Artificial Sequence: Synthetic oligonucleotide
  misc_feature 1..20: note = Target: SCN10A; (-) strand; PAM type: NNGRRT; PAM sequence: CTGGAT
  source 1..20: mol_type = other DNA
ggattctggttgaattacat

SEQ ID NO: 8196 - DNA, 20 bp, synthetic construct
  misc_feature 1..20: note = Description of Artificial Sequence: Synthetic oligonucleotide
  misc_feature 1..20: note = Target: SCN10A; (-) strand; PAM type: NNGRRT; PAM sequence: TTGAAT
  source 1..20: mol_type = other DNA
ctcctctttatggattctgg

SEQ ID NO: 8197 - DNA, 20 bp, synthetic construct
  misc_feature 1..20: note = Description of Artificial Sequence: Synthetic oligonucleotide
  misc_feature 1..20: note = Target: SCN10A; (-) strand; PAM type: NNGRRT; PAM sequence: ATGGAT
  source 1..20: mol_type = other DNA
aaacatacaaactcctcttt

SEQ ID NO: 8198 - DNA, 20 bp, synthetic construct
  misc_feature 1..20: note = Description of Artificial Sequence: Synthetic oligonucleotide
  misc_feature 1..20: note = Target: SCN10A; (-) strand; PAM type: NNGRRT; PAM sequence: TTGGGT
  source 1..20: mol_type = other DNA
tctcaatgtgtcgtctctgc

SEQ ID NO: 8199 - DNA, 20 bp, synthetic construct
  misc_feature 1..20: note = Description of Artificial Sequence: Synthetic oligonucleotide
  misc_feature 1..20: note = Target: SCN10A; (-) strand; PAM type: NNGRRT; PAM sequence: CAGGGT
  source 1..20: mol_type = other DNA
gaagtagggtggaaagtaat

SEQ ID NO: 8200 - DNA, 20 bp, synthetic construct
  misc_feature 1..20: note = Description of Artificial Sequence: Synthetic oligonucleotide
  misc_feature 1..20: note = Target: SCN10A; (-) strand; PAM type: NNGRRT; PAM sequence: TAGGGT
  source 1..20: mol_type = other DNA
cagtatctacagtgaggaag

SEQ ID NO: 8201 - DNA, 20 bp, synthetic construct
  misc_feature 1..20: note = Description of Artificial Sequence: Synthetic oligonucleotide
  misc_feature 1..20: note = Target: SCN10A; (-) strand; PAM type: NNGRRT; PAM sequence: AAGGAT
  source 1..20: mol_type = other DNA
tgaattttcagattctacag

SEQ ID NO: 8202 - DNA, 20 bp, synthetic construct
  misc_feature 1..20: note = Description of Artificial Sequence: Synthetic oligonucleotide
  misc_feature 1..20: note = Target: SCN10A; (-) strand; PAM type: NNGRRT; PAM sequence: TTGAAT
  source 1..20: mol_type = other DNA
tacgttttctgagctgaatc

SEQ ID NO: 8203 - DNA, 20 bp, synthetic construct
  misc_feature 1..20: note = Description of Artificial Sequence: Synthetic oligonucleotide
  misc_feature 1..20: note = Target: SCN10A; (-) strand; PAM type: NNGRRT; PAM sequence: CTGAAT
  source 1..20: mol_type = other DNA
caagaattacgttttctgag

SEQ ID NO: 8204 - DNA, 20 bp, synthetic construct
  misc_feature 1..20: note = Description of Artificial Sequence: Synthetic oligonucleotide
  misc_feature 1..20: note = Target: SCN10A; (-) strand; PAM type: NNGRRT; PAM sequence: AAGAAT
  source 1..20: mol_type = other DNA
tttctttctggctggccagc

SEQ ID NO: 8205 - DNA, 20 bp, synthetic construct
  misc_feature 1..20: note = Description of Artificial Sequence: Synthetic oligonucleotide
  misc_feature 1..20: note = Target: SCN10A; (-) strand; PAM type: NNGRRT; PAM sequence: TTGGAT
  source 1..20: mol_type = other DNA
cctaactctgaggcagattg

SEQ ID NO: 8206 - DNA, 20 bp, synthetic construct
  misc_feature 1..20: note = Description of Artificial Sequence: Synthetic oligonucleotide
  misc_feature 1..20: note = Target: SCN10A; (-) strand; PAM type: NNGRRT; PAM sequence: AAGAGT
  source 1..20: mol_type = other DNA
cttagaaggcttcagtaaaa

SEQ ID NO: 8207 - DNA, 20 bp, synthetic construct
  misc_feature 1..20: note = Description of Artificial Sequence: Synthetic oligonucleotide
  misc_feature 1..20: note = Target: SCN10A; (-) strand; PAM type: NNGRRT; PAM sequence: AAGAAT
  source 1..20: mol_type = other DNA
cttgcaggaggttgatgtac

SEQ ID NO: 8208 - DNA, 20 bp, synthetic construct
  misc_feature 1..20: note = Description of Artificial Sequence: Synthetic oligonucleotide
  misc_feature 1..20: note = Target: SCN10A; (-) strand; PAM type: NNGRRT; PAM sequence: AAGGAT
  source 1..20: mol_type = other DNA
ctaagatccttggtcatcgg

SEQ ID NO: 8209 - DNA, 20 bp, synthetic construct
  misc_feature 1..20: note = Description of Artificial Sequence: Synthetic oligonucleotide
  misc_feature 1..20: note = Target: SCN10A; (-) strand; PAM type: NNGRRT; PAM sequence: CTGGGT
  source 1..20: mol_type = other DNA
tttggtttcctaagatcttc

SEQ ID NO: 8210 - DNA, 20 bp, synthetic construct
  misc_feature 1..20: note = Description of Artificial Sequence: Synthetic oligonucleotide
  misc_feature 1..20: note = Target: SCN10A; (-) strand; PAM type: NNGRRT; PAM sequence: GGGGAT
  source 1..20: mol_type = other DNA
aatgtcagaagctgctttca

SEQ ID NO: 8211 - DNA, 20 bp, synthetic construct
  misc_feature 1..20: note = Description of Artificial Sequence: Synthetic oligonucleotide
  misc_feature 1..20: note = Target: SCN10A; (-) strand; PAM type: NNGRRT; PAM sequence: ATGAAT
  source 1..20: mol_type = other DNA
attggtcaaatgtctactat

SEQ ID NO: 8212 - DNA, 20 bp, synthetic construct
  misc_feature 1..20: note = Description of Artificial Sequence: Synthetic oligonucleotide
  misc_feature 1..20: note = Target: SCN10A; (-) strand; PAM type: NNGRRT; PAM sequence: ATGAGT
  source 1..20: mol_type = other DNA
tttgggcagatgagataggc

SEQ ID NO: 8213 - DNA, 20 bp, synthetic construct
  misc_feature 1..20: note = Description of Artificial Sequence: Synthetic oligonucleotide
  misc_feature 1..20: note = Target: SCN10A; (-) strand; PAM type: NNGRRT; PAM sequence: GTGGAT
  source 1..20: mol_type = other DNA
agactaatctagacacacct

SEQ ID NO: 8214 - DNA, 20 bp, synthetic construct
  misc_feature 1..20: note = Description of Artificial Sequence: Synthetic oligonucleotide
  misc_feature 1..20: note = Target: SCN10A; (-) strand; PAM type: NNGRRT; PAM sequence: TTGGAT
  source 1..20: mol_type = other DNA
ttatgcaacacacaggtggt

SEQ ID NO: 8215 - DNA, 20 bp, synthetic construct
  misc_feature 1..20: note = Description of Artificial Sequence: Synthetic oligonucleotide
  misc_feature 1..20: note = Target: SCN10A; (-) strand; PAM type: NNGRRT; PAM sequence: TTGAAT
  source 1..20: mol_type = other DNA
gcaacagagcccttatccaa

SEQ ID NO: 8216 - DNA, 20 bp, synthetic construct
  misc_feature 1..20: note = Description of Artificial Sequence: Synthetic oligonucleotide
  misc_feature 1..20: note = Target: SCN10A; (-) strand; PAM type: NNGRRT; PAM sequence: AGGAAT
  source 1..20: mol_type = other DNA
tttaaaaacatggttgtata

SEQ ID NO: 8217 - DNA, 20 bp, synthetic construct
  misc_feature 1..20: note = Description of Artificial Sequence: Synthetic oligonucleotide
  misc_feature 1..20: note = Target: SCN10A; (-) strand; PAM type: NNGRRT; PAM sequence: GAGGAT
  source 1..20: mol_type = other DNA
gaggatcttgctgagagggt

SEQ ID NO: 8218 - DNA, 20 bp, synthetic construct
  misc_feature 1..20: note = Description of Artificial Sequence: Synthetic oligonucleotide
  misc_feature 1..20: note = Target: SCN10A; (-) strand; PAM type: NNGRRT; PAM sequence: GAGGGT
  source 1..20: mol_type = other DNA
agagatgaggatcttgctga

SEQ ID NO: 8219 - DNA, 20 bp, synthetic construct
  misc_feature 1..20: note = Description of Artificial Sequence: Synthetic oligonucleotide
  misc_feature 1..20: note = Target: SCN10A; (-) strand; PAM type: NNGRRT; PAM sequence: GAGGAT
  source 1..20: mol_type = other DNA
gcactgtcagtcccagagat

SEQ ID NO: 8220 - DNA, 20 bp, synthetic construct
  misc_feature 1..20: note = Description of Artificial Sequence: Synthetic oligonucleotide
  misc_feature 1..20: note = Target: SCN10A; (-) strand; PAM type: NNGRRT; PAM sequence: GAGGAT
  source 1..20: mol_type = other DNA
ataacacctcttaccagcct

SEQ ID NO: 8221 - DNA, 20 bp, synthetic construct
  misc_feature 1..20: note = Description of Artificial Sequence: Synthetic oligonucleotide
  misc_feature 1..20: note = Target: SCN10A; (-) strand; PAM type: NNGRRT; PAM sequence: CAGAGT
  source 1..20: mol_type = other DNA
taacttcaccatcctgttgc

SEQ ID NO: 8222 - DNA, 20 bp, synthetic construct
  misc_feature 1..20: note = Description of Artificial Sequence: Synthetic oligonucleotide
  misc_feature 1..20: note = Target: SCN10A; (-) strand; PAM type: NNGRRT; PAM sequence: AAGGAT
  source 1..20: mol_type = other DNA
cagaagaaacattacaaaac

SEQ ID NO: 8223 - DNA, 20 bp, synthetic construct
  misc_feature 1..20: note = Description of Artificial Sequence: Synthetic oligonucleotide
  misc_feature 1..20: note = Target: SCN10A; (-) strand; PAM type: NNGRRT; PAM sequence: GAGGAT
  source 1..20: mol_type = other DNA
ctcagagggagaaaccagga

SEQ ID NO: 8224 - DNA, 20 bp, synthetic construct
  misc_feature 1..20: note = Description of Artificial Sequence: Synthetic oligonucleotide
  misc_feature 1..20: note = Target: SCN10A; (-) strand; PAM type: NNGRRT; PAM sequence: AAGAGT
  source 1..20: mol_type = other DNA
tcttcctcctctcccatgcc

SEQ ID NO: 8225 - DNA, 20 bp, synthetic construct
  misc_feature 1..20: note = Description of Artificial Sequence: Synthetic oligonucleotide
  misc_feature 1..20: note = Target: SCN10A; (-) strand; PAM type: NNGRRT; PAM sequence: CTGAAT
  source 1..20: mol_type = other DNA
gcagagtaaataaaaaggca

SEQ ID NO: 8226 - DNA, 20 bp, synthetic construct
  misc_feature 1..20: note = Description of Artificial Sequence: Synthetic oligonucleotide
  misc_feature 1..20: note = Target: SCN10A; (-) strand; PAM type: NNGRRT; PAM sequence: CAGAGT
  source 1..20: mol_type = other DNA
gccatctcaaatatggctag

SEQ ID NO: 8227 - DNA, 20 bp, synthetic construct
  misc_feature 1..20: note = Description of Artificial Sequence: Synthetic oligonucleotide
  misc_feature 1..20: note = Target: SCN10A; (-) strand; PAM type: NNGRRT; PAM sequence: AGGAAT
  source 1..20: mol_type = other DNA
tgtttgggagttaggaggac

SEQ ID NO: 8228 - DNA, 20 bp, synthetic construct
  misc_feature 1..20: note = Description of Artificial Sequence: Synthetic oligonucleotide
  misc_feature 1..20: note = Target: SCN10A; (-) strand; PAM type: NNGRRT; PAM sequence: GGGAGT
  source 1..20: mol_type = other DNA
aaaatggtgaatgcatgttt

SEQ ID NO: 8229 - DNA, 20 bp, synthetic construct
  misc_feature 1..20: note = Description of Artificial Sequence: Synthetic oligonucleotide
  misc_feature 1..20: note = Target: SCN10A; (-) strand; PAM type: NNGRRT; PAM sequence: GTGAAT
  source 1..20: mol_type = other DNA
gttctacgagccaaaaaatg

SEQ ID NO: 8230 - DNA, 20 bp, synthetic construct
  misc_feature 1..20: note = Description of Artificial Sequence: Synthetic oligonucleotide
  misc_feature 1..20: note = Target: SCN10A; (-) strand; PAM type: NNGRRT; PAM sequence: GAGAAT
  source 1..20: mol_type = other DNA
tccctgaaatcaaaaagttt

SEQ ID NO: 8231 - DNA, 20 bp, synthetic construct
  misc_feature 1..20: note = Description of Artificial Sequence: Synthetic oligonucleotide
  misc_feature 1..20: note = Target: SCN10A; (-) strand; PAM type: NNGRRT; PAM sequence: GAGAGT
  source 1..20: mol_type = other DNA
tggggtcctcaataaggttt

SEQ ID NO: 8232 - DNA, 20 bp, synthetic construct
  misc_feature 1..20: note = Description of Artificial Sequence: Synthetic oligonucleotide
  misc_feature 1..20: note = Target: SCN10A; (-) strand; PAM type: NNGRRT; PAM sequence: TGGGGT
  source 1..20: mol_type = other DNA
caacataaacaaaagttatt

SEQ ID NO: 8233 - DNA, 20 bp, synthetic construct
  misc_feature 1..20: note = Description of Artificial Sequence: Synthetic oligonucleotide
  misc_feature 1..20: note = Target: SCN10A; (-) strand; PAM type: NNGRRT; PAM sequence: TTGAAT
  source 1..20: mol_type = other DNA
gttttaaaatttcctgagtt

SEQ ID NO: 8234 - DNA, 20 bp, synthetic construct
  misc_feature 1..20: note = Description of Artificial Sequence: Synthetic oligonucleotide
  misc_feature 1..20: note = Target: SCN10A; (-) strand; PAM type: NNGRRT; PAM sequence: CTGAGT
  source 1..20: mol_type = other DNA
ttcccgtgttttaaaatttc

SEQ ID NO: 8235 - DNA, 20 bp, synthetic construct
  misc_feature 1..20: note = Description of Artificial Sequence: Synthetic oligonucleotide
  misc_feature 1..20: note = Target: SCN10A; (-) strand; PAM type: NNGRRT; PAM sequence: TGGAAT
  source 1..20: mol_type = other DNA
gtcatcactctaaaagctac

SEQ ID NO: 8236 - DNA, 20 bp, synthetic construct
  misc_feature 1..20: note = Description of Artificial Sequence: Synthetic oligonucleotide
  misc_feature 1..20: note = Target: SCN10A; (-) strand; PAM type: NNGRRT; PAM sequence: GGGGAT
  source 1..20: mol_type = other DNA
gaatatagaggctattgatg

SEQ ID NO: 8237 - DNA, 20 bp, synthetic construct
  misc_feature 1..20: note = Description of Artificial Sequence: Synthetic oligonucleotide
  misc_feature 1..20: note = Target: SCN10A; (-) strand; PAM type: NNGRRT; PAM sequence: GTGAAT
  source 1..20: mol_type = other DNA
tctcttatgatcatacattg

SEQ ID NO: 8238 - DNA, 20 bp, synthetic construct
  misc_feature 1..20: note = Description of Artificial Sequence: Synthetic oligonucleotide
  misc_feature 1..20: note = Target: SCN10A; (-) strand; PAM type: NNGRRT; PAM sequence: TTGGAT
  source 1..20: mol_type = other DNA
aaactattgtataacaatac

SEQ ID NO: 8239 - DNA, 20 bp, synthetic construct
  misc_feature 1..20: note = Description of Artificial Sequence: Synthetic oligonucleotide
  misc_feature 1..20: note = Target: SCN10A; (-) strand; PAM type: NNGRRT; PAM sequence: GTGGGT
  source 1..20: mol_type = other DNA
gtgtccccaaaactgtttta

SEQ ID NO: 8240 - DNA, 20 bp, synthetic construct
  misc_feature 1..20: note = Description of Artificial Sequence: Synthetic oligonucleotide
  misc_feature 1..20: note = Target: SCN10A; (-) strand; PAM type: NNGRRT; PAM sequence: ATGAAT
  source 1..20: mol_type = other DNA
cggtgaggacagaaagcagg

SEQ ID NO: 8241 - DNA, 20 bp, synthetic construct
  misc_feature 1..20: note = Description of Artificial Sequence: Synthetic oligonucleotide
  misc_feature 1..20: note = Target: SCN10A; (-) strand; PAM type: NNGRRT; PAM sequence: CAGGAT
  source 1..20: mol_type = other DNA
atggcggtgaggacagaaag

SEQ ID NO: 8242 - DNA, 20 bp, synthetic construct
  misc_feature 1..20: note = Description of Artificial Sequence: Synthetic oligonucleotide
  misc_feature 1..20: note = Target: SCN10A; (-) strand; PAM type: NNGRRT; PAM sequence: TTGGGT
  source 1..20: mol_type = other DNA
gcctggggcctccagaggag

SEQ ID NO: 8243 - DNA, 20 bp, synthetic construct
  misc_feature 1..20: note = Description of Artificial Sequence: Synthetic oligonucleotide
  misc_feature 1..20: note = Target: SCN10A; (-) strand; PAM type: NNGRRT; PAM sequence: AGGAGT
  source 1..20: mol_type = other DNA
ctctggcctggggcctccag

SEQ ID NO: 8244 - DNA, 20 bp, synthetic construct
  misc_feature 1..20: note = Description of Artificial Sequence: Synthetic oligonucleotide
  misc_feature 1..20: note = Target: SCN10A; (-) strand; PAM type: NNGRRT; PAM sequence: TTGGAT
  source 1..20: mol_type = other DNA
agggaaagttggctgttccc

SEQ ID NO: 8245 - DNA, 20 bp, synthetic construct
  misc_feature 1..20: note = Description of Artificial Sequence: Synthetic oligonucleotide
  misc_feature 1..20: note = Target: SCN10A; (-) strand; PAM type: NNGRRT; PAM sequence: TTGAAT
  source 1..20: mol_type = other DNA
taacttatttgatgatctct

SEQ ID NO: 8246 - DNA, 20 bp, synthetic construct
  misc_feature 1..20: note = Description of Artificial Sequence: Synthetic oligonucleotide
  misc_feature 1..20: note = Target: SCN10A; (-) strand; PAM type: NNGRRT; PAM sequence: CTGGGT
  source 1..20: mol_type = other DNA
ccagaaagtcctccttggcc

SEQ ID NO: 8247 - DNA, 20 bp, synthetic construct
  misc_feature 1..20: note = Description of Artificial Sequence: Synthetic oligonucleotide
  misc_feature 1..20: note = Target: SCN10A; (-) strand; PAM type: NNGRRT; PAM sequence: AGGAAT
  source 1..20: mol_type = other DNA
accgggtaagagctactagt

SEQ ID NO: 8248 - DNA, 20 bp, synthetic construct
  misc_feature 1..20: note = Description of Artificial Sequence: Synthetic oligonucleotide
  misc_feature 1..20: note = Target: SCN10A; (-) strand; PAM type: NNGRRT; PAM sequence: CCGGGT
  source 1..20: mol_type = other DNA
gatccgttctacagcacaca

SEQ ID NO: 8249 - DNA, 20 bp, synthetic construct
  misc_feature 1..20: note = Description of Artificial Sequence: Synthetic oligonucleotide
  misc_feature 1..20: note = Target: SCN10A; (-) strand; PAM type: NNGRRT; PAM sequence: GAGGAT
  source 1..20: mol_type = other DNA
aactgatcggggagcccctg

SEQ ID NO: 8250 - DNA, 20 bp, synthetic construct
  misc_feature 1..20: note = Description of Artificial Sequence: Synthetic oligonucleotide
  misc_feature 1..20: note = Target: SCN10A; (-) strand; PAM type: NNGRRT; PAM sequence: CGGAGT
  source 1..20: mol_type = other DNA
caacttccgtcgctttactc

SEQ ID NO: 8251 - DNA, 20 bp, synthetic construct
  misc_feature 1..20: note = Description of Artificial Sequence: Synthetic oligonucleotide
  misc_feature 1..20: note = Target: SCN10A; (-) strand; PAM type: NNGRRT; PAM sequence: TTGGAT
  source 1..20: mol_type = other DNA
tgagaagatggaattcccca

SEQ ID NO: 8252 - DNA, 20 bp, synthetic construct
  misc_feature 1..20: note = Description of Artificial Sequence: Synthetic oligonucleotide
  misc_feature 1..20: note = Target: SCN10A; (-) strand; PAM type: NNGRRT; PAM sequence: TGGAAT
  source 1..20: mol_type = other DNA
cctgaagaagaatgagaaga

SEQ ID NO: 8253 - DNA, 20 bp, synthetic construct
  misc_feature 1..20: note = Description of Artificial Sequence: Synthetic oligonucleotide
  misc_feature 1..20: note = Target: SCN10A; (-) strand; PAM type: NNGRRT; PAM sequence: AAGAAT
  source 1..20: mol_type = other DNA
agtataaatacttcctgaag

SEQ ID NO: 8254 - DNA, 20 bp, synthetic construct
  misc_feature 1..20: note = Description of Artificial Sequence: Synthetic oligonucleotide
  misc_feature 1..20: note = Target: SCN10A; (-) strand; PAM type: NNGRRT; PAM sequence: AAGAGT
  source 1..20: mol_type = other DNA
gtggttatgtccactcttat

SEQ ID NO: 8255 - DNA, 20 bp, synthetic construct
  misc_feature 1..20: note = Description of Artificial Sequence: Synthetic oligonucleotide
  misc_feature 1..20: note = Target: SCN10A; (-) strand; PAM type: NNGRRT; PAM sequence: GAGGGT
  source 1..20: mol_type = other DNA
ttcagggaggggccagatat

SEQ ID NO: 8256 - DNA, 20 bp, synthetic construct
  misc_feature 1..20: note = Description of Artificial Sequence: Synthetic oligonucleotide
  misc_feature 1..20: note = Target: SCN10A; (-) strand; PAM type: NNGRRT; PAM sequence: GTGAGT
  source 1..20: mol_type = other DNA
gttcctgggaggagccaagt

SEQ ID NO: 8257 - DNA, 20 bp, synthetic construct
  misc_feature 1..20: note = Description of Artificial Sequence: Synthetic oligonucleotide
  misc_feature 1..20: note = Target: SCN10A; (-) strand; PAM type: NNGRRT; PAM sequence: ATGGGT
  source 1..20: mol_type = other DNA
cctgaatgccttgcagggga

SEQ ID NO: 8258 - DNA, 20 bp, synthetic construct
  misc_feature 1..20: note = Description of Artificial Sequence: Synthetic oligonucleotide
  misc_feature 1..20: note = Target: SCN10A; (-) strand; PAM type: NNGRRT; PAM sequence: GGGAAT
  source 1..20: mol_type = other DNA
ctcccctgaatgccttgcag

SEQ ID NO: 8259 - DNA, 20 bp, synthetic construct
  misc_feature 1..20: note = Description of Artificial Sequence: Synthetic oligonucleotide
  misc_feature 1..20: note = Target: SCN10A; (-) strand; PAM type: NNGRRT; PAM sequence: CTGAAT
  source 1..20: mol_type = other DNA
ggttgaataaacagcctccc

SEQ ID NO: 8260 - DNA, 20 bp, synthetic construct
  misc_feature 1..20: note = Description of Artificial Sequence: Synthetic oligonucleotide
  misc_feature 1..20: note = Target: SCN10A; (-) strand; PAM type: NNGRRT; PAM sequence: TTGAAT
  source 1..20: mol_type = other DNA
ctgaggcacctggaggaggg

SEQ ID NO: 8261 - DNA, 20 bp, synthetic construct
  misc_feature 1..20: note = Description of Artificial Sequence: Synthetic oligonucleotide
  misc_feature 1..20: note = Target: SCN10A; (-) strand; PAM type: NNGRRT; PAM sequence: GAGGGT
  source 1..20: mol_type = other DNA
taaccctgaggcacctggag

SEQ ID NO: 8262 - DNA, 20 bp, synthetic construct
  misc_feature 1..20: note = Description of Artificial Sequence: Synthetic oligonucleotide
  misc_feature 1..20: note = Target: SCN10A; (-) strand; PAM type: NNGRRT; PAM sequence: TAGGAT
  source 1..20: mol_type = other DNA
gctaaatctggtggtggtgg

SEQ ID NO: 8263 - DNA, 20 bp, synthetic construct
  misc_feature 1..20: note = Description of Artificial Sequence: Synthetic oligonucleotide
  misc_feature 1..20: note = Target: SCN10A; (-) strand; PAM type: NNGRRT; PAM sequence: GAGAGT
  source 1..20: mol_type = other DNA
aaagtctttgatgaatatgg

SEQ ID NO: 8264 - DNA, 20 bp, synthetic construct
  misc_feature 1..20: note = Description of Artificial Sequence: Synthetic oligonucleotide
  misc_feature 1..20: note = Target: SCN10A; (-) strand; PAM type: NNGRRT; PAM sequence: ATGAAT
  source 1..20: mol_type = other DNA
actataaaccaaagtctttg

SEQ ID NO: 8265 - DNA, 20 bp, synthetic construct
  misc_feature 1..20: note = Description of Artificial Sequence: Synthetic oligonucleotide
  misc_feature 1..20: note = Target: SCN10A; (-) strand; PAM type: NNGRRT; PAM sequence: TGGAGT
  source 1..20: mol_type = other DNA
aatgaaattctccaataatc

SEQ ID NO: 8266 - DNA, 20 bp, synthetic construct
  misc_feature 1..20: note = Description of Artificial Sequence: Synthetic oligonucleotide
  misc_feature 1..20: note = Target: SCN10A; (-) strand; PAM type: NNGRRT; PAM sequence: GGGAGT
  source 1..20: mol_type = other DNA
gggatttaggataagggtga

SEQ ID NO: 8267 - DNA, 20 bp, synthetic construct
  misc_feature 1..20: note = Description of Artificial Sequence: Synthetic oligonucleotide
  misc_feature 1..20: note = Target: SCN10A; (-) strand; PAM type: NNGRRT; PAM sequence: AAGGGT
  source 1..20: mol_type = other DNA
ttagccttgggatttaggat

SEQ ID NO: 8268 - DNA, 20 bp, synthetic construct
  misc_feature 1..20: note = Description of Artificial Sequence: Synthetic oligonucleotide
  misc_feature 1..20: note = Target: SCN10A; (-) strand; PAM type: NNGRRT; PAM sequence: TAGGAT
  source 1..20: mol_type = other DNA
attgacttagccttgggatt

SEQ ID NO: 8269 - DNA, 20 bp, synthetic construct
  misc_feature 1..20: note = Description of Artificial Sequence: Synthetic oligonucleotide
  misc_feature 1..20: note = Target: SCN10A; (-) strand; PAM type: NNGRRT; PAM sequence: TGGGAT
  source 1..20: mol_type = other DNA
gttctagattgacttagcct

SEQ ID NO: 8270 - DNA, 20 bp, synthetic construct
  misc_feature 1..20: note = Description of Artificial Sequence: Synthetic oligonucleotide
  misc_feature 1..20: note = Target: SCN10A; (-) strand; PAM type: NNGRRT; PAM sequence: AGGGAT
  source 1..20: mol_type = other DNA
actagaagaaactgctgact

SEQ ID NO: 8271 - DNA, 20 bp, synthetic construct
  misc_feature 1..20: note = Description of Artificial Sequence: Synthetic oligonucleotide
  misc_feature 1..20: note = Target: SCN10A; (-) strand; PAM type: NNGRRT; PAM sequence: AAGAGT
  source 1..20: mol_type = other DNA
aagacagggaatagtgagaa

SEQ ID NO: 8272 - DNA, 20 bp, synthetic construct
  misc_feature 1..20: note = Description of Artificial Sequence: Synthetic oligonucleotide
  misc_feature 1..20: note = Target: SCN10A; (-) strand; PAM type: NNGRRT; PAM sequence: GGGAAT
  source 1..20: mol_type = other DNA
gcttactgcaagggaagaca

SEQ ID NO: 8273 - DNA, 20 bp, synthetic construct
  misc_feature 1..20: note = Description of Artificial Sequence: Synthetic oligonucleotide
  misc_feature 1..20: note = Target: SCN10A; (-) strand; PAM type: NNGRRT; PAM sequence: CAGAGT
  source 1..20: mol_type = other DNA
gtttgatggtatgaagttgg

SEQ ID NO: 8274 - DNA, 20 bp, synthetic construct
  misc_feature 1..20: note = Description of Artificial Sequence: Synthetic oligonucleotide
  misc_feature 1..20: note = Target: SCN10A; (-) strand; PAM type: NNGRRT; PAM sequence: GTGAGT
  source 1..20: mol_type = other DNA
aaagaaggctgcagacacag

SEQ ID NO: 8275 - DNA, 20 bp, synthetic construct
  misc_feature 1..20: note = Description of Artificial Sequence: Synthetic oligonucleotide
  misc_feature 1..20: note = Target: SCN10A; (-) strand; PAM type: NNGRRT; PAM sequence: TAGAAT
  source 1..20: mol_type = other DNA
agagggaaaggaatggtcct

SEQ ID NO: 8276 - DNA, 20 bp, synthetic construct
  misc_feature 1..20: note = Description of Artificial Sequence: Synthetic oligonucleotide
  misc_feature 1..20: note = Target: SCN10A; (-) strand; PAM type: NNGRRT; PAM sequence: AGGAAT
  source 1..20: mol_type = other DNA
aagatcctaagcagagggaa

SEQ ID NO: 8277 - DNA, 20 bp, synthetic construct
  misc_feature 1..20: note = Description of Artificial Sequence: Synthetic oligonucleotide
  misc_feature 1..20: note = Target: SCN10A; (-) strand; PAM type: NNGRRT; PAM sequence: CTGGAT
  source 1..20: mol_type = other DNA
caggagagaggagggaagac

SEQ ID NO: 8278 - DNA, 20 bp, synthetic construct
  misc_feature 1..20: note = Description of Artificial Sequence: Synthetic oligonucleotide
  misc_feature 1..20: note = Target: SCN10A; (-) strand; PAM type: NNGRRT; PAM sequence: GTGAGT
  source 1..20: mol_type = other DNA
ctgaaaagtgactggaaaca

SEQ ID NO: 8279 - DNA, 20 bp, synthetic construct
  misc_feature 1..20: note = Description of Artificial Sequence: Synthetic oligonucleotide
  misc_feature 1..20: note = Target: SCN10A; (-) strand; PAM type: NNGRRT; PAM sequence: CCGGGT
  source 1..20: mol_type = other DNA
ttgcaccactgcactctagt

SEQ ID NO: 8280 - DNA, 20 bp, synthetic construct
  misc_feature 1..20: note = Description of Artificial Sequence: Synthetic oligonucleotide
  misc_feature 1..20: note = Target: SCN10A; (-) strand; PAM type: NNGRRT; PAM sequence: GAGAAT
  source 1..20: mol_type = other DNA
tattcgggaggctgaggtgg

SEQ ID NO: 8281 - DNA, 20 bp, synthetic construct
  misc_feature 1..20: note = Description of Artificial Sequence: Synthetic oligonucleotide
  misc_feature 1..20: note = Target: SCN10A; (-) strand; PAM type: NNGRRT; PAM sequence: CCGAGT
  source 1..20: mol_type = other DNA
aaaaattttttcaaaactag

SEQ ID NO: 8282 - DNA, 20 bp, synthetic construct
  misc_feature 1..20: note = Description of Artificial Sequence: Synthetic oligonucleotide
  misc_feature 1..20: note = Target: SCN10A; (-) strand; PAM type: NNGRRT; PAM sequence: GAGAGT
  source 1..20: mol_type = other DNA
gagaaagttaggaaaaccaa

SEQ ID NO: 8283 - DNA, 20 bp, synthetic construct
  misc_feature 1..20: note = Description of Artificial Sequence: Synthetic oligonucleotide
  misc_feature 1..20: note = Target: SCN10A; (-) strand; PAM type: NNGRRT; PAM sequence: TAGAGT
  source 1..20: mol_type = other DNA
attattctgaaaacaaaaga

SEQ ID NO: 8284 - DNA, 20 bp, synthetic construct
  misc_feature 1..20: note = Description of Artificial Sequence: Synthetic oligonucleotide
  misc_feature 1..20: note = Target: SCN10A; (-) strand; PAM type: NNGRRT; PAM sequence: TGGAAT
  source 1..20: mol_type = other DNA
atccagagtctgaaatacag

SEQ ID NO: 8285 - DNA, 20 bp, synthetic construct
  misc_feature 1..20: note = Description of Artificial Sequence: Synthetic oligonucleotide
  misc_feature 1..20: note = Target: SCN10A; (-) strand; PAM type: NNGRRT; PAM sequence: CAGAGT
  source 1..20: mol_type = other DNA
tgcatgaaaattgcttaatc

SEQ ID NO: 8286 - DNA, 20 bp, synthetic construct
  misc_feature 1..20: note = Description of Artificial Sequence: Synthetic oligonucleotide
  misc_feature 1..20: note = Target: SCN10A; (-) strand; PAM type: NNGRRT; PAM sequence: CTGAGT
  source 1..20: mol_type = other DNA
agagattgtggcaaacatac

SEQ ID NO: 8287 - DNA, 20 bp, synthetic construct
  misc_feature 1..20: note = Description of Artificial Sequence: Synthetic oligonucleotide
  misc_feature 1..20: note = Target: SCN10A; (-) strand; PAM type: NNGRRT; PAM sequence: GGGAAT
  source 1..20: mol_type = other DNA
taaatgagaagtgaagatat

SEQ ID NO: 8288 - DNA, 20 bp, synthetic construct
  misc_feature 1..20: note = Description of Artificial Sequence: Synthetic oligonucleotide
  misc_feature 1..20: note = Target: SCN10A; (-) strand; PAM type: NNGRRT; PAM sequence: ATGAGT
  source 1..20: mol_type = other DNA
aaagaagtgaggagataatt

SEQ ID NO: 8289 - DNA, 20 bp, synthetic construct
  misc_feature 1..20: note = Description of Artificial Sequence: Synthetic oligonucleotide
  misc_feature 1..20: note = Target: SCN10A; (-) strand; PAM type: NNGRRT; PAM sequence: TGGAAT
  source 1..20: mol_type = other DNA
actagatgtttgattgtatg

SEQ ID NO: 8290 - DNA, 20 bp, synthetic construct
  misc_feature 1..20: note = Description of Artificial Sequence: Synthetic oligonucleotide
  misc_feature 1..20: note = Target: SCN10A; (-) strand; PAM type: NNGRRT; PAM sequence: GGGAAT
  source 1..20: mol_type = other DNA
taggttagaaaggactaaag

SEQ ID NO: 8291 - DNA, 20 bp, synthetic construct
  misc_feature 1..20: note = Description of Artificial Sequence: Synthetic oligonucleotide
  misc_feature 1..20: note = Target: SCN10A; (-) strand; PAM type: NNGRRT; PAM sequence: GAGAAT
  source 1..20: mol_type = other DNA
atatcatttggccactgttg

SEQ ID NO: 8292 - DNA, 20 bp, synthetic construct
  misc_feature 1..20: note = Description of Artificial Sequence: Synthetic oligonucleotide
  misc_feature 1..20: note = Target: SCN10A; (-) strand; PAM type: NNGRRT; PAM sequence: TAGAAT
  source 1..20: mol_type = other DNA
ttgagtgctatggagagctt

SEQ ID NO: 8293 - DNA, 20 bp, synthetic construct
  misc_feature 1..20: note = Description of Artificial Sequence: Synthetic oligonucleotide
  misc_feature 1..20: note = Target: SCN10A; (-) strand; PAM type: NNGRRT; PAM sequence: TTGAGT
  source 1..20: mol_type = other DNA
agcgcacagtttgggttatc

SEQ ID NO: 8294 - DNA, 20 bp, synthetic construct
  misc_feature 1..20: note = Description of Artificial Sequence: Synthetic oligonucleotide
  misc_feature 1..20: note = Target: SCN10A; (-) strand; PAM type: NNGRRT; PAM sequence: TTGGGT
  source 1..20: mol_type = other DNA
tggagaggtcagcgcacagt

SEQ ID NO: 8295 - DNA, 20 bp, synthetic construct
  misc_feature 1..20: note = Description of Artificial Sequence: Synthetic oligonucleotide
  misc_feature 1..20: note = Target: SCN10A; (-) strand; PAM type: NNGRRT; PAM sequence: AAGGAT
  source 1..20: mol_type = other DNA
aaaaagaatgggtcaaattc

SEQ ID NO: 8296 - DNA, 20 bp, synthetic construct
  misc_feature 1..20: note = Description of Artificial Sequence: Synthetic oligonucleotide
  misc_feature 1..20: note = Target: SCN10A; (-) strand; PAM type: NNGRRT; PAM sequence: ATGGGT
  source 1..20: mol_type = other DNA
aagccttaacataaaaaaga

SEQ ID NO: 8297 - DNA, 20 bp, synthetic construct
  misc_feature 1..20: note = Description of Artificial Sequence: Synthetic oligonucleotide
  misc_feature 1..20: note = Target: SCN10A; (-) strand; PAM type: NNGRRT; PAM sequence: AAGAAT
  source 1..20: mol_type = other DNA
ggaaaagccttaacataaaa

SEQ ID NO: 8298 - DNA, 20 bp, synthetic construct
  misc_feature 1..20: note = Description of Artificial Sequence: Synthetic oligonucleotide
  misc_feature 1..20: note = Target: SCN10A; (-) strand; PAM type: NNGRRT; PAM sequence: GGGAAT
  source 1..20: mol_type = other DNA
ataattttaggcaaaggaag

SEQ ID NO: 8299 - DNA, 20 bp, synthetic construct
  misc_feature 1..20: note = Description of Artificial Sequence: Synthetic oligonucleotide
  misc_feature 1..20: note = Target: SCN10A; (-) strand; PAM type: NNGRRT; PAM sequence: GAGGAT
  source 1..20: mol_type = other DNA
ccaagagtacaagaataaga

SEQ ID NO: 8300 - DNA, 20 bp, synthetic construct
  misc_feature 1..20: note = Description of Artificial Sequence: Synthetic oligonucleotide
  misc_feature 1..20: note = Target: SCN10A; (-) strand; PAM type: NNGRRT; PAM sequence: AAGAAT
  source 1..20: mol_type = other DNA
tgtctcaaagccaagagtac

SEQ ID NO: 8301 - DNA, 20 bp, synthetic construct
  misc_feature 1..20: note = Description of Artificial Sequence: Synthetic oligonucleotide
  misc_feature 1..20: note = Target: SCN10A; (-) strand; PAM type: NNGRRT; PAM sequence: AAGAGT
  source 1..20: mol_type = other DNA
gaagaaattgtctcaaagcc

SEQ ID NO: 8302 - DNA, 20 bp, synthetic construct
  misc_feature 1..20: note = Description of Artificial Sequence: Synthetic oligonucleotide
  misc_feature 1..20: note = Target: SCN10A; (-) strand; PAM type: NNGRRT; PAM sequence: AGGAAT
  source 1..20: mol_type = other DNA
gagttatgggaacatgaaac

SEQ ID NO: 8303 - DNA, 20 bp, synthetic construct
  misc_feature 1..20: note = Description of Artificial Sequence: Synthetic oligonucleotide
  misc_feature 1..20: note = Target: SCN10A; (-) strand; PAM type: NNGRRT; PAM sequence: GAGAGT
  source 1..20: mol_type = other DNA
atgtttatagagaaagtgca

SEQ ID NO: 8304 - DNA, 20 bp, synthetic construct
  misc_feature 1..20: note = Description of Artificial Sequence: Synthetic oligonucleotide
  misc_feature 1..20: note = Target: SCN10A; (-) strand; PAM type: NNGRRT; PAM sequence: GTGAGT
  source 1..20: mol_type = other DNA
caatgctgaacaaaatagat

SEQ ID NO: 8305 - DNA, 20 bp, synthetic construct
  misc_feature 1..20: note = Description of Artificial Sequence: Synthetic oligonucleotide
  misc_feature 1..20: note = Target: SCN10A; (-) strand; PAM type: NNGRRT; PAM sequence: TTGGAT
  source 1..20: mol_type = other DNA
ggttccttatattcctatta

SEQ ID NO: 8306 - DNA, 20 bp, synthetic construct
  misc_feature 1..20: note = Description of Artificial Sequence: Synthetic oligonucleotide
  misc_feature 1..20: note = Target: SCN10A; (-) strand; PAM type: NNGRRT; PAM sequence: TGGGGT
  source 1..20: mol_type = other DNA
tgccaccatctgcttgactt

SEQ ID NO: 8307 - DNA, 20 bp, synthetic construct
  misc_feature 1..20: note = Description of Artificial Sequence: Synthetic oligonucleotide
  misc_feature 1..20: note = Target: SCN10A; (-) strand; PAM type: NNGRRT; PAM sequence: AGGGGT
  source 1..20: mol_type = other DNA
gcaagcaggatctccatcat

SEQ ID NO: 8308 - DNA, 20 bp, synthetic construct
  misc_feature 1..20: note = Description of Artificial Sequence: Synthetic oligonucleotide
  misc_feature 1..20: note = Target: SCN10A; (-) strand; PAM type: NNGRRT; PAM sequence: CAGGAT
  source 1..20: mol_type = other DNA
ctaggtatggtgggagcaag

SEQ ID NO: 8309 - DNA, 20 bp, synthetic construct
  misc_feature 1..20: note = Description of Artificial Sequence: Synthetic oligonucleotide
  misc_feature 1..20: note = Target: SCN10A; (-) strand; PAM type: NNGRRT; PAM sequence: TTGGAT
  source 1..20: mol_type = other DNA
gtgtctatatcacagaggta

SEQ ID NO: 8310 - DNA, 20 bp, synthetic construct
  misc_feature 1..20: note = Description of Artificial Sequence: Synthetic oligonucleotide
  misc_feature 1..20: note = Target: SCN10A; (-) strand; PAM type: NNGRRT; PAM sequence: TTGGGT
  source 1..20: mol_type = other DNA
gagcctcctacatatgggta

SEQ ID NO: 8311 - DNA, 20 bp, synthetic construct
  misc_feature 1..20: note = Description of Artificial Sequence: Synthetic oligonucleotide
  misc_feature 1..20: note = Target: SCN10A; (-) strand; PAM type: NNGRRT; PAM sequence: ATGGGT
  source 1..20: mol_type = other DNA
accagcagagcctcctacat

SEQ ID NO: 8312 - DNA, 20 bp, synthetic construct
  misc_feature 1..20: note = Description of Artificial Sequence: Synthetic oligonucleotide
  misc_feature 1..20: note = Target: SCN10A; (-) strand; PAM type: NNGRRT; PAM sequence: GTGAGT
  source 1..20: mol_type = other DNA
agaggaatggtgtcagagca

SEQ ID NO: 8313 - DNA, 20 bp, synthetic construct
  misc_feature 1..20: note = Description of Artificial Sequence: Synthetic oligonucleotide
  misc_feature 1..20: note = Target: SCN10A; (-) strand; PAM type: NNGRRT; PAM sequence: AGGAAT
  source 1..20: mol_type = other DNA
aatggaggacattaaggaag

SEQ ID NO: 8314 - DNA, 20 bp, synthetic construct
  misc_feature 1..20: note = Description of Artificial Sequence: Synthetic oligonucleotide
  misc_feature 1..20: note = Target: SCN10A; (-) strand; PAM type: NNGRRT; PAM sequence: GAGGGT
  source 1..20: mol_type = other DNA
aataggcaggaggagaggaa

SEQ ID NO: 8315 - DNA, 20 bp, synthetic construct
  misc_feature 1..20: note = Description of Artificial Sequence: Synthetic oligonucleotide
  misc_feature 1..20: note = Target: SCN10A; (-) strand; PAM type: NNGRRT; PAM sequence: CAGAAT
  source 1..20: mol_type = other DNA
cataaatacaccatgttaat

SEQ ID NO: 8316 - DNA, 20 bp, synthetic construct
  misc_feature 1..20: note = Description of Artificial Sequence: Synthetic oligonucleotide
  misc_feature 1..20: note = Target: SCN10A; (-) strand; PAM type: NNGRRT; PAM sequence: TTGAAT
  source 1..20: mol_type = other DNA
gacactgaagtcaacagtgt

SEQ ID NO: 8317 - DNA, 20 bp, synthetic construct
  misc_feature 1..20: note = Description of Artificial Sequence: Synthetic oligonucleotide
  misc_feature 1..20: note = Target: SCN10A; (-) strand; PAM type: NNGRRT; PAM sequence: AAGAAT
  source 1..20: mol_type = other DNA
atctttgtttctcagaaggg

SEQ ID NO: 8318 - DNA, 20 bp, synthetic construct
  misc_feature 1..20: note = Description of Artificial Sequence: Synthetic oligonucleotide
  misc_feature 1..20: note = Target: SCN10A; (-) strand; PAM type: NNGRRT; PAM sequence: TGGGAT
  source 1..20: mol_type = other DNA
gttactaaacaactgagtcc

SEQ ID NO: 8319 - DNA, 20 bp, synthetic construct
  misc_feature 1..20: note = Description of Artificial Sequence: Synthetic oligonucleotide
  misc_feature 1..20: note = Target: SCN10A; (-) strand; PAM type: NNGRRT; PAM sequence: CTGAGT
  source 1..20: mol_type = other DNA
cttgcattgttactaaacaa

SEQ ID NO: 8320 - DNA, 20 bp, synthetic construct
  misc_feature 1..20: note = Description of Artificial Sequence: Synthetic oligonucleotide
  misc_feature 1..20: note = Target: SCN10A; (-) strand; PAM type: NNGRRT; PAM sequence: GAGAAT
  source 1..20: mol_type = other DNA
ttgcattccagtgtcactga

SEQ ID NO: 8321 - DNA, 20 bp, synthetic construct
  misc_feature 1..20: note = Description of Artificial Sequence: Synthetic oligonucleotide
  misc_feature 1..20: note = Target: SCN10A; (-) strand; PAM type: NNGRRT; PAM sequence: TGGAAT
  source 1..20: mol_type = other DNA
caagctccagctccaggacc

SEQ ID NO: 8322 - DNA, 20 bp, synthetic construct
  misc_feature 1..20: note = Description of Artificial Sequence: Synthetic oligonucleotide
  misc_feature 1..20: note = Target: SCN10A; (-) strand; PAM type: NNGRRT; PAM sequence: CTGAGT
  source 1..20: mol_type = other DNA
gcatgaagtcagtctcatag

SEQ ID NO: 8323 - DNA, 20 bp, synthetic construct
  misc_feature 1..20: note = Description of Artificial Sequence: Synthetic oligonucleotide
  misc_feature 1..20: note = Target: SCN10A; (-) strand; PAM type: NNGRRT; PAM sequence: CAGAAT
  source 1..20: mol_type = other DNA
tggagggatttatggtagcc

SEQ ID NO: 8324 - DNA, 20 bp, synthetic construct
  misc_feature 1..20: note = Description of Artificial Sequence: Synthetic oligonucleotide
  misc_feature 1..20: note = Target: SCN10A; (-) strand; PAM type: NNGRRT; PAM sequence: AGGGAT
  source 1..20: mol_type = other DNA
acaattttgtccttagctgg

SEQ ID NO: 8325 - DNA, 20 bp, synthetic construct
  misc_feature 1..20: note = Description of Artificial Sequence: Synthetic oligonucleotide
  misc_feature 1..20: note = Target: SCN10A; (-) strand; PAM type: NNGRRT; PAM sequence: AGGGAT
  source 1..20: mol_type = other DNA
atagagaaccacttcaatca

SEQ ID NO: 8326 - DNA, 20 bp, synthetic construct
  misc_feature 1..20: note = Description of Artificial Sequence: Synthetic oligonucleotide
  misc_feature 1..20: note = Target: SCN10A; (-) strand; PAM type: NNGRRT; PAM sequence: GGGAAT
  source 1..20: mol_type = other DNA
aaagacactgggtaatagat

SEQ ID NO: 8327 - DNA, 20 bp, synthetic construct
  misc_feature 1..20: note = Description of Artificial Sequence: Synthetic oligonucleotide
  misc_feature 1..20: note = Target: SCN10A; (-) strand; PAM type: NNGRRT; PAM sequence: CTGGGT
  source 1..20: mol_type = other DNA
cagaatgtcatgtaaagaca

SEQ ID NO: 8328 - DNA, 20 bp, synthetic construct
  misc_feature 1..20: note = Description of Artificial Sequence: Synthetic oligonucleotide
  misc_feature 1..20: note = Target: SCN10A; (-) strand; PAM type: NNGRRT; PAM sequence: CAGAAT
  source 1..20: mol_type = other DNA
ttgcaccccaatagttttct

SEQ ID NO: 8329 - DNA, 20 bp, synthetic construct
  misc_feature 1..20: note = Description of Artificial Sequence: Synthetic oligonucleotide
  misc_feature 1..20: note = Target: SCN10A; (-) strand; PAM type: NNGRRT; PAM sequence: AAGAGT
  source 1..20: mol_type = other DNA
tctgagcccagtttgcccat

SEQ ID NO: 8330 - DNA, 20 bp, synthetic construct
  misc_feature 1..20: note = Description of Artificial Sequence: Synthetic oligonucleotide
  misc_feature 1..20: note = Target: SCN10A; (-) strand; PAM type: NNGRRT; PAM sequence: TAGAGT
  source 1..20: mol_type = other DNA
ggccactgaagtaagttctg

SEQ ID NO: 8331 - DNA, 20 bp, synthetic construct
  misc_feature 1..20: note = Description of Artificial Sequence: Synthetic oligonucleotide
  misc_feature 1..20: note = Target: SCN10A; (-) strand; PAM type: NNGRRT; PAM sequence: AGGGAT
  source 1..20: mol_type = other DNA
ctgcaccttgctcatttccc

SEQ ID NO: 8332 - DNA, 20 bp, synthetic construct
  misc_feature 1..20: note = Description of Artificial Sequence: Synthetic oligonucleotide
  misc_feature 1..20: note = Target: SCN10A; (-) strand; PAM type: NNGRRT; PAM sequence: AGGGAT
  source 1..20: mol_type = other DNA
attcaactagactctaaaat

SEQ ID NO: 8333 - DNA, 20 bp, synthetic construct
  misc_feature 1..20: note = Description of Artificial Sequence: Synthetic oligonucleotide
  misc_feature 1..20: note = Target: SCN10A; (-) strand; PAM type: NNGRRT; PAM sequence: AAGGAT
  source 1..20: mol_type = other DNA
tttgatatggctacctcaca

SEQ ID NO: 8334 - DNA, 20 bp, synthetic construct
  misc_feature 1..20: note = Description of Artificial Sequence: Synthetic oligonucleotide
  misc_feature 1..20: note = Target: SCN10A; (-) strand; PAM type: NNGRRT; PAM sequence: GTGAGT
  source 1..20: mol_type = other DNA
ctcagccattaatccaagaa

SEQ ID NO: 8335 - DNA, 20 bp, synthetic construct
  misc_feature 1..20: note = Description of Artificial Sequence: Synthetic oligonucleotide
  misc_feature 1..20: note = Target: SCN10A; (-) strand; PAM type: NNGRRT; PAM sequence: TTGGAT
  source 1..20: mol_type = other DNA
taaactagaatagatatttc

SEQ ID NO: 8336 - DNA, 20 bp, synthetic construct
  misc_feature 1..20: note = Description of Artificial Sequence: Synthetic oligonucleotide
  misc_feature 1..20: note = Target: SCN10A; (-) strand; PAM type: NNGRRT; PAM sequence: TAGAAT
  source 1..20: mol_type = other DNA
ggccgagcttggagctaaac

SEQ ID NO: 8337 - DNA, 20 bp, synthetic construct
  misc_feature 1..20: note = Description of Artificial Sequence: Synthetic oligonucleotide
  misc_feature 1..20: note = Target: SCN10A; (-) strand; PAM type: NNGRRT; PAM sequence: GGGAAT
  source 1..20: mol_type = other DNA
ggaacagctattaaacttaa

SEQ ID NO: 8338 - DNA, 20 bp, synthetic construct
  misc_feature 1..20: note = Description of Artificial Sequence: Synthetic oligonucleotide
  misc_feature 1..20: note = Target: SCN10A; (-) strand; PAM type: NNGRRT; PAM sequence: CCGAAT
  source 1..20: mol_type = other DNA
ttgggagggctgaatgccca

SEQ ID NO: 8339 - DNA, 20 bp, synthetic construct
  misc_feature 1..20: note = Description of Artificial Sequence: Synthetic oligonucleotide
  misc_feature 1..20: note = Target: SCN10A; (-) strand; PAM type: NNGRRT; PAM sequence: CTGAAT
  source 1..20: mol_type = other DNA
gttggttcatcttgggaggg

SEQ ID NO: 8340 - DNA, 20 bp, synthetic construct
  misc_feature 1..20: note = Description of Artificial Sequence: Synthetic oligonucleotide
  misc_feature 1..20: note = Target: SCN10A; (-) strand; PAM type: NNGRRT; PAM sequence: CAGAGT
  source 1..20: mol_type = other DNA
ctgcactccagcctggacaa

SEQ ID NO: 8341 - DNA, 20 bp, synthetic construct
  misc_feature 1..20: note = Description of Artificial Sequence: Synthetic oligonucleotide
  misc_feature 1..20: note = Target: SCN10A; (-) strand; PAM type: NNGRRT; PAM sequence: GAGGAT
  source 1..20: mol_type = other DNA
tacttgggaggctgaggtgg

SEQ ID NO: 8342 - DNA, 20 bp, synthetic construct
  misc_feature 1..20: note = Description of Artificial Sequence: Synthetic oligonucleotide
  misc_feature 1..20: note = Target: SCN10A; (+) strand; PAM type: NNGRRT; PAM sequence: CAGAAT
  source 1..20: mol_type = other DNA
tttgtgtggctttctgtaaa

SEQ ID NO: 8343 - DNA, 20 bp, synthetic construct
  misc_feature 1..20: note = Description of Artificial Sequence: Synthetic oligonucleotide
  misc_feature 1..20: note = Target: SCN10A; (+) strand; PAM type: NNGRRT; PAM sequence: TTGAAT
  source 1..20: mol_type = other DNA
tttctgtaaacagaatttat

SEQ ID NO: 8344 - DNA, 20 bp, synthetic construct
  misc_feature 1..20: note = Description of Artificial Sequence: Synthetic oligonucleotide
  misc_feature 1..20: note = Target: SCN10A; (+) strand; PAM type: NNGRRT; PAM sequence: CAGAGT
  source 1..20: mol_type = other DNA
ttgactgacactctttttcc

SEQ ID NO: 8345 - DNA, 20 bp, synthetic construct
  misc_feature 1..20: note = Description of Artificial Sequence: Synthetic oligonucleotide
  misc_feature 1..20: note = Target: SCN10A; (+) strand; PAM type: NNGRRT; PAM sequence: ATGAAT
  source 1..20: mol_type = other DNA
atttaaatttaatgtaattt

SEQ ID NO: 8346 - DNA, 20 bp, synthetic construct
  misc_feature 1..20: note = Description of Artificial Sequence: Synthetic oligonucleotide
  misc_feature 1..20: note = Target: SCN10A; (+) strand; PAM type: NNGRRT; PAM sequence: TTGAAT
  source 1..20: mol_type = other DNA
atttatgaatatttttgttt

SEQ ID NO: 8347 - DNA, 20 bp, synthetic construct
  misc_feature 1..20: note = Description of Artificial Sequence: Synthetic oligonucleotide
  misc_feature 1..20: note = Target: SCN10A; (+) strand; PAM type: NNGRRT; PAM sequence: CCGGGT
  source 1..20: mol_type = other DNA
attctgtatgtctctatatc

SEQ ID NO: 8348 - DNA, 20 bp, synthetic construct
  misc_feature 1..20: note = Description of Artificial Sequence: Synthetic oligonucleotide
  misc_feature 1..20: note = Target: SCN10A; (+) strand; PAM type: NNGRRT; PAM sequence: TAGGAT
  source 1..20: mol_type = other DNA
tattattatactttaagttt

SEQ ID NO: 8349 - DNA, 20 bp, synthetic construct
  misc_feature 1..20: note = Description of Artificial Sequence: Synthetic oligonucleotide
  misc_feature 1..20: note = Target: SCN10A; (+) strand; PAM type: NNGRRT; PAM sequence: ATGAGT
  source 1..20: mol_type = other DNA
ttattgttcaattcccacct

SEQ ID NO: 8350 - DNA, 20 bp, synthetic construct
  misc_feature 1..20: note = Description of Artificial Sequence: Synthetic oligonucleotide
  misc_feature 1..20: note = Target: SCN10A; (+) strand; PAM type: NNGRRT; PAM sequence: GAGAAT
  source 1..20: mol_type = other DNA
tgtccttgcgatagtttgct

SEQ ID NO: 8351 - DNA, 20 bp, synthetic construct
  misc_feature 1..20: note = Description of Artificial Sequence: Synthetic oligonucleotide
  misc_feature 1..20: note = Target: SCN10A; (+) strand; PAM type: NNGRRT; PAM sequence: TTGGGT
  source 1..20: mol_type = other DNA
agtctatcactgttggacat

SEQ ID NO: 8352 - DNA, 20 bp, synthetic construct
  misc_feature 1..20: note = Description of Artificial Sequence: Synthetic oligonucleotide
  misc_feature 1..20: note = Target: SCN10A; (+) strand; PAM type: NNGRRT; PAM sequence: GTGAAT
  source 1..20: mol_type = other DNA
ggttccaagtctttgctatt

SEQ ID NO: 8353 - DNA, 20 bp, synthetic construct
  misc_feature 1..20: note = Description of Artificial Sequence: Synthetic oligonucleotide
  misc_feature 1..20: note = Target: SCN10A; (+) strand; PAM type: NNGRRT; PAM sequence: TTGGGT
  source 1..20: mol_type = other DNA
gcagtatgatttataatcct

SEQ ID NO: 8354 - DNA, 20 bp, synthetic construct
  misc_feature 1..20: note = Description of Artificial Sequence: Synthetic oligonucleotide
  misc_feature 1..20: note = Target: SCN10A; (+) strand; PAM type: NNGRRT; PAM sequence: TGGGAT
  source 1..20: mol_type = other DNA
tttgggtatatacccagtaa

SEQ ID NO: 8355 - DNA, 20 bp, synthetic construct
  misc_feature 1..20: note = Description of Artificial Sequence: Synthetic oligonucleotide
  misc_feature 1..20: note = Target: SCN10A; (+) strand; PAM type: NNGRRT; PAM sequence: CTGGGT
  source 1..20: mol_type = other DNA
tatacccagtaatgggatgg

SEQ ID NO: 8356 - DNA, 20 bp, synthetic construct
  misc_feature 1..20: note = Description of Artificial Sequence: Synthetic oligonucleotide
  misc_feature 1..20: note = Target: SCN10A; (+) strand; PAM type: NNGRRT; PAM sequence: AGGAAT
  source 1..20: mol_type = other DNA
tttctggttctagatccctg

SEQ ID NO: 8357 - DNA, 20 bp, synthetic construct
  misc_feature 1..20: note = Description of Artificial Sequence: Synthetic oligonucleotide
  misc_feature 1..20: note = Target: SCN10A; (+) strand; PAM type: NNGRRT; PAM sequence: TGGGAT
  source 1..20: mol_type = other DNA
atccttcgcccactttttga

SEQ ID NO: 8358 - DNA, 20 bp, synthetic construct
  misc_feature 1..20: note = Description of Artificial Sequence: Synthetic oligonucleotide
  misc_feature 1..20: note = Target: SCN10A; (+) strand; PAM type: NNGRRT; PAM sequence: TTGAGT
  source 1..20: mol_type = other DNA
ttttttccttgtaaatttgt

SEQ ID NO: 8359 - DNA, 20 bp, synthetic construct
  misc_feature 1..20: note = Description of Artificial Sequence: Synthetic oligonucleotide
  misc_feature 1..20: note = Target: SCN10A; (+) strand; PAM type: NNGRRT; PAM sequence: CTGGAT
  source 1..20: mol_type = other DNA
gtttgagttcattgtagatt

SEQ ID NO: 8360 - DNA, 20 bp, synthetic construct
  misc_feature 1..20: note = Description of Artificial Sequence: Synthetic oligonucleotide
  misc_feature 1..20: note = Target: SCN10A; (+) strand; PAM type: NNGRRT; PAM sequence: ATGAGT
  source 1..20: mol_type = other DNA
ggatattagcccttcgtcag

SEQ ID NO: 8361 - DNA, 20 bp, synthetic construct
  misc_feature 1..20: note = Description of Artificial Sequence: Synthetic oligonucleotide
  misc_feature 1..20: note = Target: SCN10A; (+) strand; PAM type: NNGRRT; PAM sequence: CTGAAT
  source 1..20: mol_type = other DNA
tccttgcccatgcctatgtc

SEQ ID NO: 8362 - DNA, 20 bp, synthetic construct
  misc_feature 1..20: note = Description of Artificial Sequence: Synthetic oligonucleotide
  misc_feature 1..20: note = Target: SCN10A; (+) strand; PAM type: NNGRRT; PAM sequence: TAGGGT
  source 1..20: mol_type = other DNA
gtattgcctaggttctcttc

SEQ ID NO: 8363 - DNA, 20 bp, synthetic construct
  misc_feature 1..20: note = Description of Artificial Sequence: Synthetic oligonucleotide
  misc_feature 1..20: note = Target: SCN10A; (+) strand; PAM type: NNGRRT; PAM sequence: TTGAAT
  source 1..20: mol_type = other DNA
atttaagtctttaatccatc

SEQ ID NO: 8364 - DNA, 20 bp, synthetic construct
  misc_feature 1..20: note = Description of Artificial Sequence: Synthetic oligonucleotide
  misc_feature 1..20: note = Target: SCN10A; (+) strand; PAM type: NNGRRT; PAM sequence: AGGGAT
  source 1..20: mol_type = other DNA
ttttgtataaggtgtaagga

SEQ ID NO: 8365 - DNA, 20 bp, synthetic construct
  misc_feature 1..20: note = Description of Artificial Sequence: Synthetic oligonucleotide
  misc_feature 1..20: note = Target: SCN10A; (+) strand; PAM type: NNGRRT; PAM sequence: GGGAAT
  source 1..20: mol_type = other DNA
ccagcaccatttattaaata

SEQ ID NO: 8366 - DNA, 20 bp, synthetic construct
  misc_feature 1..20: note = Description of Artificial Sequence: Synthetic oligonucleotide
  misc_feature 1..20: note = Target: SCN10A; (+) strand; PAM type: NNGRRT; PAM sequence: ATGAGT
  source 1..20: mol_type = other DNA
gacaaacagagagccaaatc

SEQ ID NO: 8367 - DNA, 20 bp, synthetic construct
  misc_feature 1..20: note = Description of Artificial Sequence: Synthetic oligonucleotide
  misc_feature 1..20: note = Target: SCN10A; (+) strand; PAM type: NNGRRT; PAM sequence: GAGAAT
  source 1..20: mol_type = other DNA
ccattcacaattgcttcaaa

SEQ ID NO: 8368 - DNA, 20 bp, synthetic construct
  misc_feature 1..20: note = Description of Artificial Sequence: Synthetic oligonucleotide
  misc_feature 1..20: note = Target: SCN10A; (+) strand; PAM type: NNGRRT; PAM sequence: AGGAAT
  source 1..20: mol_type = other DNA
tcaaagagaataaaatacct

SEQ ID NO: 8369 - DNA, 20 bp, synthetic construct
  misc_feature 1..20: note = Description of Artificial Sequence: Synthetic oligonucleotide
  misc_feature 1..20: note = Target: SCN10A; (+) strand; PAM type: NNGRRT; PAM sequence: AGGGAT
  source 1..20: mol_type = other DNA
acctaggaatgcaacttaca

SEQ ID NO: 8370 - DNA, 20 bp, synthetic construct
  misc_feature 1..20: note = Description of Artificial Sequence: Synthetic oligonucleotide
  misc_feature 1..20: note = Target: SCN10A; (+) strand; PAM type: NNGRRT; PAM sequence: GAGGAT
  source 1..20: mol_type = other DNA
cactgctcagtgaaataaaa

SEQ ID NO: 8371 - DNA, 20 bp, synthetic construct
  misc_feature 1..20: note = Description of Artificial Sequence: Synthetic oligonucleotide
  misc_feature 1..20: note = Target: SCN10A; (+) strand; PAM type: NNGRRT; PAM sequence: AAGAAT
  source 1..20: mol_type = other DNA
aagaggatacaaacaaatgg

SEQ ID NO: 8372 - DNA, 20 bp, synthetic construct
  misc_feature 1..20: note = Description of Artificial Sequence: Synthetic oligonucleotide
  misc_feature 1..20: note = Target: SCN10A; (+) strand; PAM type: NNGRRT; PAM sequence: ATGGGT
  source 1..20: mol_type = other DNA
tggaagaatactccatgctc

SEQ ID NO: 8373 - DNA, 20 bp, synthetic construct
  misc_feature 1..20: note = Description of Artificial Sequence: Synthetic oligonucleotide
  misc_feature 1..20: note = Target: SCN10A; (+) strand; PAM type: NNGRRT; PAM sequence: AAGAAT
  source 1..20: mol_type = other DNA
actccatgctcatgggtagg

SEQ ID NO: 8374 - DNA, 20 bp, synthetic construct
  misc_feature 1..20: note = Description of Artificial Sequence: Synthetic oligonucleotide
  misc_feature 1..20: note = Target: SCN10A; (+) strand; PAM type: NNGRRT; PAM sequence: CAGAAT
  source 1..20: mol_type = other DNA
gctaccaatgactttcttct

SEQ ID NO: 8375 - DNA, 20 bp, synthetic construct
  misc_feature 1..20: note = Description of Artificial Sequence: Synthetic oligonucleotide
  misc_feature 1..20: note = Target: SCN10A; (+) strand; PAM type: NNGRRT; PAM sequence: ACGGGT
  source 1..20: mol_type = other DNA
agaaatacctaatgtagatg

SEQ ID NO: 8376 - DNA, 20 bp, synthetic construct
  misc_feature 1..20: note = Description of Artificial Sequence: Synthetic oligonucleotide
  misc_feature 1..20: note = Target: SCN10A; (+) strand; PAM type: NNGRRT; PAM sequence: ATGGGT
  source 1..20: mol_type = other DNA
ctaatgtagatgacgggttg

SEQ ID NO: 8377 - DNA, 20 bp, synthetic construct
  misc_feature 1..20: note = Description of Artificial Sequence: Synthetic oligonucleotide
  misc_feature 1..20: note = Target: SCN10A; (+) strand; PAM type: NNGRRT; PAM sequence: TAGAAT
  source 1..20: mol_type = other DNA
tacattgtgcacatgtaccc

SEQ ID NO: 8378 - DNA, 20 bp, synthetic construct
  misc_feature 1..20: note = Description of Artificial Sequence: Synthetic oligonucleotide
  misc_feature 1..20: note = Target: SCN10A; (+) strand; PAM type: NNGRRT; PAM sequence: AGGAAT
  source 1..20: mol_type = other DNA
attttaaaaaaagaaaaaaa

SEQ ID NO: 8379 - DNA, 20 bp, synthetic construct
  misc_feature 1..20: note = Description of Artificial Sequence: Synthetic oligonucleotide
  misc_feature 1..20: note = Target: SCN10A; (+) strand; PAM type: NNGRRT; PAM sequence: GTGGAT
  source 1..20: mol_type = other DNA
tacctactattctgtgttaa

SEQ ID NO: 8380 - DNA, 20 bp, synthetic construct
  misc_feature 1..20: note = Description of Artificial Sequence: Synthetic oligonucleotide
  misc_feature 1..20: note = Target: SCN10A; (+) strand; PAM type: NNGRRT; PAM sequence: CTGAAT
  source 1..20: mol_type = other DNA
ttctgtgttaagtggatgtt

SEQ ID NO: 8381 - DNA, 20 bp, synthetic construct
  misc_feature 1..20: note = Description of Artificial Sequence: Synthetic oligonucleotide
  misc_feature 1..20: note = Target: SCN10A; (+) strand; PAM type: NNGRRT; PAM sequence: GTGGGT
  source 1..20: mol_type = other DNA
agattctagttttacctctt

SEQ ID NO: 8382 - DNA, 20 bp, synthetic construct
  misc_feature 1..20: note = Description of Artificial Sequence: Synthetic oligonucleotide
  misc_feature 1..20: note = Target: SCN10A; (+) strand; PAM type: NNGRRT; PAM sequence: TGGGGT
  source 1..20: mol_type = other DNA
ctagttttacctcttgtggg

SEQ ID NO: 8383 - DNA, 20 bp, synthetic construct
  misc_feature 1..20: note = Description of Artificial Sequence: Synthetic oligonucleotide
  misc_feature 1..20: note = Target: SCN10A; (+) strand; PAM type: NNGRRT; PAM sequence: TTGGAT
  source 1..20: mol_type = other DNA
ttcaaaagataatcttgcat

SEQ ID NO: 8384 - DNA, 20 bp, synthetic construct
  misc_feature 1..20: note = Description of Artificial Sequence: Synthetic oligonucleotide
  misc_feature 1..20: note = Target: SCN10A; (+) strand; PAM type: NNGRRT; PAM sequence: ATGGAT
  source 1..20: mol_type = other DNA
ttgtgcagaaaaaatgagaa

SEQ ID NO: 8385 - DNA, 20 bp, synthetic construct
  misc_feature 1..20: note = Description of Artificial Sequence: Synthetic oligonucleotide
  misc_feature 1..20: note = Target: SCN10A; (+) strand; PAM type: NNGRRT; PAM sequence: TGGGAT
  source 1..20: mol_type = other DNA
gagaaatggattagtttccc

SEQ ID NO: 8386 - DNA, 20 bp, synthetic construct
  misc_feature 1..20: note = Description of Artificial Sequence: Synthetic oligonucleotide
  misc_feature 1..20: note = Target: SCN10A; (+) strand; PAM type: NNGRRT; PAM sequence: TTGGAT
  source 1..20: mol_type = other DNA
tattttagcaacaccagtca

SEQ ID NO: 8387 - DNA, 20 bp, synthetic construct
  misc_feature 1..20: note = Description of Artificial Sequence: Synthetic oligonucleotide
  misc_feature 1..20: note = Target: SCN10A; (+) strand; PAM type: NNGRRT; PAM sequence: CTGAAT
  source 1..20: mol_type = other DNA
ggattagggctcaccttcat

SEQ ID NO: 8388 - DNA, 20 bp, synthetic construct
  misc_feature 1..20: note = Description of Artificial Sequence: Synthetic oligonucleotide
  misc_feature 1..20: note = Target: SCN10A; (+) strand; PAM type: NNGRRT; PAM sequence: TTGAAT
  source 1..20: mol_type = other DNA
aagcataattcaacataaag

SEQ ID NO: 8389 - DNA, 20 bp, synthetic construct
  misc_feature 1..20: note = Description of Artificial Sequence: Synthetic oligonucleotide
  misc_feature 1..20: note = Target: SCN10A; (+) strand; PAM type: NNGRRT; PAM sequence: GAGAAT
  source 1..20: mol_type = other DNA
ctcaaagtaaaaatactttt

SEQ ID NO: 8390 - DNA, 20 bp, synthetic construct
  misc_feature 1..20: note = Description of Artificial Sequence: Synthetic oligonucleotide
  misc_feature 1..20: note = Target: SCN10A; (+) strand; PAM type: NNGRRT; PAM sequence: TGGGAT
  source 1..20: mol_type = other DNA
tggctttttcatcatccaca

SEQ ID NO: 8391 - DNA, 20 bp, synthetic construct
  misc_feature 1..20: note = Description of Artificial Sequence: Synthetic oligonucleotide
  misc_feature 1..20: note = Target: SCN10A; (+) strand; PAM type: NNGRRT; PAM sequence: CCGGGT
  source 1..20: mol_type = other DNA
cacagtcagtatctgtgctc

SEQ ID NO: 8392 - DNA, 20 bp, synthetic construct
  misc_feature 1..20: note = Description of Artificial Sequence: Synthetic oligonucleotide
  misc_feature 1..20: note = Target: SCN10A; (+) strand; PAM type: NNGRRT; PAM sequence: AAGAGT
  source 1..20: mol_type = other DNA
gttcagtggtacgagagagg

SEQ ID NO: 8393 - DNA, 20 bp, synthetic construct
  misc_feature 1..20: note = Description of Artificial Sequence: Synthetic oligonucleotide
  misc_feature 1..20: note = Target: SCN10A; (+) strand; PAM type: NNGRRT; PAM sequence: TAGAAT
  source 1..20: mol_type = other DNA
atttggttgaactcatcttt

SEQ ID NO: 8394 - DNA, 20 bp, synthetic construct
  misc_feature 1..20: note = Description of Artificial Sequence: Synthetic oligonucleotide
  misc_feature 1..20: note = Target: SCN10A; (+) strand; PAM type: NNGRRT; PAM sequence: GAGAAT
  source 1..20: mol_type = other DNA
tagaataaatcaggcattca

SEQ ID NO: 8395 - DNA, 20 bp, synthetic construct
  misc_feature 1..20: note = Description of Artificial Sequence: Synthetic oligonucleotide
  misc_feature 1..20: note = Target: SCN10A; (+) strand; PAM type: NNGRRT; PAM sequence: GTGGAT
  source 1..20: mol_type = other DNA
catcttattaacctgcatct

SEQ ID NO: 8396 - DNA, 20 bp, synthetic construct
  misc_feature 1..20: note = Description of Artificial Sequence: Synthetic oligonucleotide
  misc_feature 1..20: note = Target: SCN10A; (+) strand; PAM type: NNGRRT; PAM sequence: ATGAAT
  source 1..20: mol_type = other DNA
aatgatcaaatatatagaca

SEQ ID NO: 8397 - DNA, 20 bp, synthetic construct
  misc_feature 1..20: note = Description of Artificial Sequence: Synthetic oligonucleotide
  misc_feature 1..20: note = Target: SCN10A; (+) strand; PAM type: NNGRRT; PAM sequence: TTGAAT
  source 1..20: mol_type = other DNA
acaatgaattggctatatat

SEQ ID NO: 8398 - DNA, 20 bp, synthetic construct
  misc_feature 1..20: note = Description of Artificial Sequence: Synthetic oligonucleotide
  misc_feature 1..20: note = Target: SCN10A; (+) strand; PAM type: NNGRRT; PAM sequence: GGGAAT
  source 1..20: mol_type = other DNA
gaatctttgtgattgtggct

SEQ ID NO: 8399 - DNA, 20 bp, synthetic construct
  misc_feature 1..20: note = Description of Artificial Sequence: Synthetic oligonucleotide
  misc_feature 1..20: note = Target: SCN10A; (+) strand; PAM type: NNGRRT; PAM sequence: AAGAGT
  source 1..20: mol_type = other DNA
attgtggctgggaatgggcc

SEQ ID NO: 8400 - DNA, 20 bp, synthetic construct
  misc_feature 1..20: note = Description of Artificial Sequence: Synthetic oligonucleotide
  misc_feature 1..20: note = Target: SCN10A; (+) strand; PAM type: NNGRRT; PAM sequence: GGGAGT
  source 1..20: mol_type = other DNA
ctatgtcctatgttgttata

SEQ ID NO: 8401 - DNA, 20 bp, synthetic construct
  misc_feature 1..20: note = Description of Artificial Sequence: Synthetic oligonucleotide
  misc_feature 1..20: note = Target: SCN10A; (+) strand; PAM type: NNGRRT; PAM sequence: CAGGAT
  source 1..20: mol_type = other DNA
tacgtaattaataacatttg

SEQ ID NO: 8402 - DNA, 20 bp, synthetic construct
  misc_feature 1..20: note = Description of Artificial Sequence: Synthetic oligonucleotide
  misc_feature 1..20: note = Target: SCN10A; (+) strand; PAM type: NNGRRT; PAM sequence: ATGAAT
  source 1..20: mol_type = other DNA
taattaataacatttgcagg

SEQ ID NO: 8403 - DNA, 20 bp, synthetic construct
  misc_feature 1..20: note = Description of Artificial Sequence: Synthetic oligonucleotide
  misc_feature 1..20: note = Target: SCN10A; (+) strand; PAM type: NNGRRT; PAM sequence: CTGGAT
  source 1..20: mol_type = other DNA
ctggccataccttttatcta

SEQ ID NO: 8404 - DNA, 20 bp, synthetic construct
  misc_feature 1..20: note = Description of Artificial Sequence: Synthetic oligonucleotide
  misc_feature 1..20: note = Target: SCN10A; (+) strand; PAM type: NNGRRT; PAM sequence: TGGAGT
  source 1..20: mol_type = other DNA
tcttctgattatattaacta

SEQ ID NO: 8405 - DNA, 20 bp, synthetic construct
  misc_feature 1..20: note = Description of Artificial Sequence: Synthetic oligonucleotide
  misc_feature 1..20: note = Target: SCN10A; (+) strand; PAM type: NNGRRT; PAM sequence: TGGAAT
  source 1..20: mol_type = other DNA
tatgagatgtgaacagactc

SEQ ID NO: 8406 - DNA, 20 bp, synthetic construct
  misc_feature 1..20: note = Description of Artificial Sequence: Synthetic oligonucleotide
  misc_feature 1..20: note = Target: SCN10A; (+) strand; PAM type: NNGRRT; PAM sequence: AAGAGT
  source 1..20: mol_type = other DNA
cagccatttcagcctcagaa

SEQ ID NO: 8407 - DNA, 20 bp, synthetic construct
  misc_feature 1..20: note = Description of Artificial Sequence: Synthetic oligonucleotide
  misc_feature 1..20: note = Target: SCN10A; (+) strand; PAM type: NNGRRT; PAM sequence: TGGAGT
  source 1..20: mol_type = other DNA
tataaatggggcaggcacca

SEQ ID NO: 8408 - DNA, 20 bp, synthetic construct
  misc_feature 1..20: note = Description of Artificial Sequence: Synthetic oligonucleotide
  misc_feature 1..20: note = Target: SCN10A; (+) strand; PAM type: NNGRRT; PAM sequence: TAGGAT
  source 1..20: mol_type = other DNA
cagacaattggtggaaaagt

SEQ ID NO: 8409 - DNA, 20 bp, synthetic construct
  misc_feature 1..20: note = Description of Artificial Sequence: Synthetic oligonucleotide
  misc_feature 1..20: note = Target: SCN10A; (+) strand; PAM type: NNGRRT; PAM sequence: CAGGAT
  source 1..20: mol_type = other DNA
aatctcaaactgaaaaatat

SEQ ID NO: 8410 - DNA, 20 bp, synthetic construct
  misc_feature 1..20: note = Description of Artificial Sequence: Synthetic oligonucleotide
  misc_feature 1..20: note = Target: SCN10A; (+) strand; PAM type: NNGRRT; PAM sequence: AGGGGT
  source 1..20: mol_type = other DNA
tatcaggatcccagaaagtg

SEQ ID NO: 8411 - DNA, 20 bp, synthetic construct
  misc_feature 1..20: note = Description of Artificial Sequence: Synthetic oligonucleotide
  misc_feature 1..20: note = Target: SCN10A; (+) strand; PAM type: NNGRRT; PAM sequence: ATGGAT
  source 1..20: mol_type = other DNA
atttaaaaatattaatttta

SEQ ID NO: 8412 - DNA, 20 bp, synthetic construct
  misc_feature 1..20: note = Description of Artificial Sequence: Synthetic oligonucleotide
  misc_feature 1..20: note = Target: SCN10A; (+) strand; PAM type: NNGRRT; PAM sequence: CTGGGT
  source 1..20: mol_type = other DNA
cataggccacaggtgttacc

SEQ ID NO: 8413 - DNA, 20 bp, synthetic construct
  misc_feature 1..20: note = Description of Artificial Sequence: Synthetic oligonucleotide
  misc_feature 1..20: note = Target: SCN10A; (+) strand; PAM type: NNGRRT; PAM sequence: AGGGAT
  source 1..20: mol_type = other DNA
acaacaaaaataaaaggaca

SEQ ID NO: 8414 - DNA, 20 bp, synthetic construct
  misc_feature 1..20: note = Description of Artificial Sequence: Synthetic oligonucleotide
  misc_feature 1..20: note = Target: SCN10A; (+) strand; PAM type: NNGRRT; PAM sequence: GAGAGT
  source 1..20: mol_type = other DNA
aggacaagggatattttctg

SEQ ID NO: 8415 - DNA, 20 bp, synthetic construct
  misc_feature 1..20: note = Description of Artificial Sequence: Synthetic oligonucleotide
  misc_feature 1..20: note = Target: SCN10A; (+) strand; PAM type: NNGRRT; PAM sequence: CTGGGT
  source 1..20: mol_type = other DNA
atgcattggtgaggctgtag

SEQ ID NO: 8416 - DNA, 20 bp, synthetic construct
  misc_feature 1..20: note = Description of Artificial Sequence: Synthetic oligonucleotide
  misc_feature 1..20: note = Target: SCN10A; (+) strand; PAM type: NNGRRT; PAM sequence: AAGAGT
  source 1..20: mol_type = other DNA
gggtgtgatctgcaatggga

SEQ ID NO: 8417 - DNA, 20 bp, synthetic construct
  misc_feature 1..20: note = Description of Artificial Sequence: Synthetic oligonucleotide
  misc_feature 1..20: note = Target: SCN10A; (+) strand; PAM type: NNGRRT; PAM sequence: TGGAGT
  source 1..20: mol_type = other DNA
ataactgaacatatccaggc

SEQ ID NO: 8418 - DNA, 20 bp, synthetic construct
  misc_feature 1..20: note = Description of Artificial Sequence: Synthetic oligonucleotide
  misc_feature 1..20: note = Target: SCN10A; (+) strand; PAM type: NNGRRT; PAM sequence: GGGAAT
  source 1..20: mol_type = other DNA
tgacactctcataggacggt

SEQ ID NO: 8419 - DNA, 20 bp, synthetic construct
  misc_feature 1..20: note = Description of Artificial Sequence: Synthetic oligonucleotide
  misc_feature 1..20: note = Target: SCN10A; (+) strand; PAM type: NNGRRT; PAM sequence: GGGAGT
  source 1..20: mol_type = other DNA
aagcagtttcagatttgtct

SEQ ID NO: 8420 - DNA, 20 bp, synthetic construct
  misc_feature 1..20: note = Description of Artificial Sequence: Synthetic oligonucleotide
  misc_feature 1..20: note = Target: SCN10A; (+) strand; PAM type: NNGRRT; PAM sequence: GTGAAT
  source 1..20: mol_type = other DNA
gtacacaattttcatttgct

SEQ ID NO: 8421 - DNA, 20 bp, synthetic construct
  misc_feature 1..20: note = Description of Artificial Sequence: Synthetic oligonucleotide
  misc_feature 1..20: note = Target: SCN10A; (+) strand; PAM type: NNGRRT; PAM sequence: GGGAGT
  source 1..20: mol_type = other DNA
atgcaacaaaaccttcatct

SEQ ID NO: 8422 - DNA, 20 bp, synthetic construct
  misc_feature 1..20: note = Description of Artificial Sequence: Synthetic oligonucleotide
  misc_feature 1..20: note = Target: SCN10A; (+) strand; PAM type: NNGRRT; PAM sequence: TGGGGT
  source 1..20: mol_type = other DNA
tcctcagctctgggcacaca

SEQ ID NO: 8423 - DNA, 20 bp, synthetic construct
  misc_feature 1..20: note = Description of Artificial Sequence: Synthetic oligonucleotide
  misc_feature 1..20: note = Target: SCN10A; (+) strand; PAM type: NNGRRT; PAM sequence: GAGAGT
  source 1..20: mol_type = other DNA
tgggcacacatggggtgtta

SEQ ID NO: 8424 - DNA, 20 bp, synthetic construct
  misc_feature 1..20: note = Description of Artificial Sequence: Synthetic oligonucleotide
  misc_feature 1..20: note = Target: SCN10A; (+) strand; PAM type: NNGRRT; PAM sequence: TTGAAT
  source 1..20: mol_type = other DNA
acatagctccgataggcctt

SEQ ID NO: 8425 - DNA, 20 bp, synthetic construct
  misc_feature 1..20: note = Description of Artificial Sequence: Synthetic oligonucleotide
  misc_feature 1..20: note = Target: SCN10A; (+) strand; PAM type: NNGRRT; PAM sequence: GAGAGT
  source 1..20: mol_type = other DNA
atgtcttcttgcttccatcg

SEQ ID NO: 8426 - DNA, 20 bp, synthetic construct
  misc_feature 1..20: note = Description of Artificial Sequence: Synthetic oligonucleotide
  misc_feature 1..20: note = Target: SCN10A; (+) strand; PAM type: NNGRRT; PAM sequence: TAGGAT
  source 1..20: mol_type = other DNA
gagtggttgctattggttca

SEQ ID NO: 8427 - DNA, 20 bp, synthetic construct
  misc_feature 1..20: note = Description of Artificial Sequence: Synthetic oligonucleotide
  misc_feature 1..20: note = Target: SCN10A; (+) strand; PAM type: NNGRRT; PAM sequence: GAGAAT
  source 1..20: mol_type = other DNA
ctcctccatatttgccttca

SEQ ID NO: 8428 - DNA, 20 bp, synthetic construct
  misc_feature 1..20: note = Description of Artificial Sequence: Synthetic oligonucleotide
  misc_feature 1..20: note = Target: SCN10A; (+) strand; PAM type: NNGRRT; PAM sequence: CCGGAT
  source 1..20: mol_type = other DNA
ccttcagagaatccaactcc

SEQ ID NO: 8429 - DNA, 20 bp, synthetic construct
  misc_feature 1..20: note = Description of Artificial Sequence: Synthetic oligonucleotide
  misc_feature 1..20: note = Target: SCN10A; (+) strand; PAM type: NNGRRT; PAM sequence: AAGGAT
  source 1..20: mol_type = other DNA
acattcttggtgaaagcaaa

SEQ ID NO: 8430 - DNA, 20 bp, synthetic construct
  misc_feature 1..20: note = Description of Artificial Sequence: Synthetic oligonucleotide
  misc_feature 1..20: note = Target: SCN10A; (+) strand; PAM type: NNGRRT; PAM sequence: GTGGAT
  source 1..20: mol_type = other DNA
gcaaaaaggatgtccaagca

SEQ ID NO: 8431 - DNA, 20 bp, synthetic construct
  misc_feature 1..20: note = Description of Artificial Sequence: Synthetic oligonucleotide
  misc_feature 1..20: note = Target: SCN10A; (+) strand; PAM type: NNGRRT; PAM sequence: CTGGAT
  source 1..20: mol_type = other DNA
gggaccaaaggcaggtccat

SEQ ID NO: 8432 - DNA, 20 bp, synthetic construct
  misc_feature 1..20: note = Description of Artificial Sequence: Synthetic oligonucleotide
  misc_feature 1..20: note = Target: SCN10A; (+) strand; PAM type: NNGRRT; PAM sequence: TTGGGT
  source 1..20: mol_type = other DNA
tctggatcagtatatttcga

SEQ ID NO: 8433 - DNA, 20 bp, synthetic construct
  misc_feature 1..20: note = Description of Artificial Sequence: Synthetic oligonucleotide
  misc_feature 1..20: note = Target: SCN10A; (+) strand; PAM type: NNGRRT; PAM sequence: TGGGAT
  source 1..20: mol_type = other DNA
agtatatttcgattgggttt

SEQ ID NO: 8434 - DNA, 20 bp, synthetic construct
  misc_feature 1..20: note = Description of Artificial Sequence: Synthetic oligonucleotide
  misc_feature 1..20: note = Target: SCN10A; (+) strand; PAM type: NNGRRT; PAM sequence: GAGAGT
  source 1..20: mol_type = other DNA
gggattctcaggggaccaga

SEQ ID NO: 8435 - DNA, 20 bp, synthetic construct
  misc_feature 1..20: note = Description of Artificial Sequence: Synthetic oligonucleotide
  misc_feature 1..20: note = Target: SCN10A; (+) strand; PAM type: NNGRRT; PAM sequence: CTGAGT
  source 1..20: mol_type = other DNA
agagcagaaaaggtaataaa

SEQ ID NO: 8436 - DNA, 20 bp, synthetic construct
  misc_feature 1..20: note = Description of Artificial Sequence: Synthetic oligonucleotide
  misc_feature 1..20: note = Target: SCN10A; (+) strand; PAM type: NNGRRT; PAM sequence: CTGGGT
  source 1..20: mol_type = other DNA
ggtaataaactgagtggcct

SEQ ID NO: 8437 - DNA, 20 bp, synthetic construct
  misc_feature 1..20: note = Description of Artificial Sequence: Synthetic oligonucleotide
  misc_feature 1..20: note = Target: SCN10A; (+) strand; PAM type: NNGRRT; PAM sequence: CAGAAT
  source 1..20: mol_type = other DNA
gtggccacattgaagttctc

SEQ ID NO: 8438 - DNA, 20 bp, synthetic construct
  misc_feature 1..20: note = Description of Artificial Sequence: Synthetic oligonucleotide
  misc_feature 1..20: note = Target: SCN10A; (+) strand; PAM type: NNGRRT; PAM sequence: TGGGGT
  source 1..20: mol_type = other DNA
gccattgctgttgggcagat

SEQ ID NO: 8439 - DNA, 20 bp, synthetic construct
  misc_feature 1..20: note = Description of Artificial Sequence: Synthetic oligonucleotide
  misc_feature 1..20: note = Target: SCN10A; (+) strand; PAM type: NNGRRT; PAM sequence: GAGGAT
  source 1..20: mol_type = other DNA
cagtaggggggccctgtgtt

SEQ ID NO: 8440 - DNA, 20 bp, synthetic construct
  misc_feature 1..20: note = Description of Artificial Sequence: Synthetic oligonucleotide
  misc_feature 1..20: note = Target: SCN10A; (+) strand; PAM type: NNGRRT; PAM sequence: TAGAGT
  source 1..20: mol_type = other DNA
aaagctggacataccgaaga

SEQ ID NO: 8441 - DNA, 20 bp, synthetic construct
  misc_feature 1..20: note = Description of Artificial Sequence: Synthetic oligonucleotide
  misc_feature 1..20: note = Target: SCN10A; (+) strand; PAM type: NNGRRT; PAM sequence: AGGAAT
  source 1..20: mol_type = other DNA
tagagtagatgaacatgaca

SEQ ID NO: 8442 - DNA, 20 bp, synthetic construct
  misc_feature 1..20: note = Description of Artificial Sequence: Synthetic oligonucleotide
  misc_feature 1..20: note = Target: SCN10A; (+) strand; PAM type: NNGRRT; PAM sequence: GCGGAT
  source 1..20: mol_type = other DNA
atgagggcaaagagcagtgt

SEQ ID NO: 8443 - DNA, 20 bp, synthetic construct
  misc_feature 1..20: note = Description of Artificial Sequence: Synthetic oligonucleotide
  misc_feature 1..20: note = Target: SCN10A; (+) strand; PAM type: NNGRRT; PAM sequence: TCGGAT
  source 1..20: mol_type = other DNA
gtgcggatccccttggccgc

SEQ ID NO: 8444 - DNA, 20 bp, synthetic construct
  misc_feature 1..20: note = Description of Artificial Sequence: Synthetic oligonucleotide
  misc_feature 1..20: note = Target: SCN10A; (+) strand; PAM type: NNGRRT; PAM sequence: GAGGAT
  source 1..20: mol_type = other DNA
ttggccgctcggatcagtct

SEQ ID NO: 8445 - DNA, 20 bp, synthetic construct
  misc_feature 1..20: note = Description of Artificial Sequence: Synthetic oligonucleotide
  misc_feature 1..20: note = Target: SCN10A; (+) strand; PAM type: NNGRRT; PAM sequence: GCGGAT
  source 1..20: mol_type = other DNA
atgcggccaattcgggccag

SEQ ID NO: 8446 - DNA, 20 bp, synthetic construct
  misc_feature 1..20: note = Description of Artificial Sequence: Synthetic oligonucleotide
  misc_feature 1..20: note = Target: SCN10A; (+) strand; PAM type: NNGRRT; PAM sequence: AAGAAT
  source 1..20: mol_type = other DNA
aagtaactttgaagtgactt

SEQ ID NO: 8447 - DNA, 20 bp, synthetic construct
  misc_feature 1..20: note = Description of Artificial Sequence: Synthetic oligonucleotide
  misc_feature 1..20: note = Target: SCN10A; (+) strand; PAM type: NNGRRT; PAM sequence: TAGAAT
  source 1..20: mol_type = other DNA
atgttatctttgcctccgcc

SEQ ID NO: 8448 - DNA, 20 bp, synthetic construct
  misc_feature 1..20: note = Description of Artificial Sequence: Synthetic oligonucleotide
  misc_feature 1..20: note = Target: SCN10A; (+) strand; PAM type: NNGRRT; PAM sequence: TTGGGT
  source 1..20: mol_type = other DNA
cctccctgatactgcagcct

SEQ ID NO: 8449 - DNA, 20 bp, synthetic construct
  misc_feature 1..20: note = Description of Artificial Sequence: Synthetic oligonucleotide
  misc_feature 1..20: note = Target: SCN10A; (+) strand; PAM type: NNGRRT; PAM sequence: GAGGAT
  source 1..20: mol_type = other DNA
tgttaattacaagggggcct

SEQ ID NO: 8450 - DNA, 20 bp, synthetic construct
  misc_feature 1..20: note = Description of Artificial Sequence: Synthetic oligonucleotide
  misc_feature 1..20: note = Target: SCN10A; (+) strand; PAM type: NNGRRT; PAM sequence: AGGGAT
  source 1..20: mol_type = other DNA
tggctgacagctaaagcata

SEQ ID NO: 8451 - DNA, 20 bp, synthetic construct
  misc_feature 1..20: note = Description of Artificial Sequence: Synthetic oligonucleotide
  misc_feature 1..20: note = Target: SCN10A; (+) strand; PAM type: NNGRRT; PAM sequence: TTGAAT
  source 1..20: mol_type = other DNA
acagctaaagcataagggat

SEQ ID NO: 8452 - DNA, 20 bp, synthetic construct
  misc_feature 1..20: note = Description of Artificial Sequence: Synthetic oligonucleotide
  misc_feature 1..20: note = Target: SCN10A; (+) strand; PAM type: NNGRRT; PAM sequence: GGGAGT
  source 1..20: mol_type = other DNA
ctggagataggtttttttgg

SEQ ID NO: 8453 - DNA, 20 bp, synthetic construct
  misc_feature 1..20: note = Description of Artificial Sequence: Synthetic oligonucleotide
  misc_feature 1..20: note = Target: SCN10A; (+) strand; PAM type: NNGRRT; PAM sequence: AAGAAT
  source 1..20: mol_type = other DNA
tgaacaaagttggaaatata

SEQ ID NO: 8454 - DNA, 20 bp, synthetic construct
  misc_feature 1..20: note = Description of Artificial Sequence: Synthetic oligonucleotide
  misc_feature 1..20: note = Target: SCN10A; (+) strand; PAM type: NNGRRT; PAM sequence: GAGGGT
  source 1..20: mol_type = other DNA
ggcaaggcctttaggtaaga

SEQ ID NO: 8455 - DNA, 20 bp, synthetic construct
  misc_feature 1..20: note = Description of Artificial Sequence: Synthetic oligonucleotide
  misc_feature 1..20: note = Target: SCN10A; (+) strand; PAM type: NNGRRT; PAM sequence: AGGGAT
  source 1..20: mol_type = other DNA
atctcacaggaaaaatggtg

SEQ ID NO: 8456 - DNA, 20 bp, synthetic construct
  misc_feature 1..20: note = Description of Artificial Sequence: Synthetic oligonucleotide
  misc_feature 1..20: note = Target: SCN10A; (+) strand; PAM type: NNGRRT; PAM sequence: ATGGGT
  source 1..20: mol_type = other DNA
tgctctttgttgttatgcac

SEQ ID NO: 8457 - DNA, 20 bp, synthetic construct
  misc_feature 1..20: note = Description of Artificial Sequence: Synthetic oligonucleotide
  misc_feature 1..20: note = Target: SCN10A; (+) strand; PAM type: NNGRRT; PAM sequence: TTGGAT
  source 1..20: mol_type = other DNA
cttgggaaataattataatt

SEQ ID NO: 8458 - DNA, 20 bp, synthetic construct
  misc_feature 1..20: note = Description of Artificial Sequence: Synthetic oligonucleotide
  misc_feature 1..20: note = Target: SCN10A; (+) strand; PAM type: NNGRRT; PAM sequence: GTGAAT
  source 1..20: mol_type = other DNA
atctttgtggaagaccttct

SEQ ID NO: 8459 - DNA, 20 bp, synthetic construct
  misc_feature 1..20: note = Description of Artificial Sequence: Synthetic oligonucleotide
  misc_feature 1..20: note = Target: SCN10A; (+) strand; PAM type: NNGRRT; PAM sequence: TAGGGT
  source 1..20: mol_type = other DNA
taggacatgttcccatcgtg

SEQ ID NO: 8460 - DNA, 20 bp, synthetic construct
  misc_feature 1..20: note = Description of Artificial Sequence: Synthetic oligonucleotide
  misc_feature 1..20: note = Target: SCN10A; (+) strand; PAM type: NNGRRT; PAM sequence: CAGGAT
  source 1..20: mol_type = other DNA
cagcacattttaatttgctc

SEQ ID NO: 8461 - DNA, 20 bp, synthetic construct
  misc_feature 1..20: note = Description of Artificial Sequence: Synthetic oligonucleotide
  misc_feature 1..20: note = Target: SCN10A; (+) strand; PAM type: NNGRRT; PAM sequence: GAGAAT
  source 1..20: mol_type = other DNA
tccaggatcttattttaagg

SEQ ID NO: 8462 - DNA, 20 bp, synthetic construct
  misc_feature 1..20: note = Description of Artificial Sequence: Synthetic oligonucleotide
  misc_feature 1..20: note = Target: SCN10A; (+) strand; PAM type: NNGRRT; PAM sequence: GAGGGT
  source 1..20: mol_type = other DNA
aagaaagggaggtaaggaga

SEQ ID NO: 8463 - DNA, 20 bp, synthetic construct
  misc_feature 1..20: note = Description of Artificial Sequence: Synthetic oligonucleotide
  misc_feature 1..20: note = Target: SCN10A; (+) strand; PAM type: NNGRRT; PAM sequence: GTGGGT
  source 1..20: mol_type = other DNA
gagggtagaaagattgatat

SEQ ID NO: 8464 - DNA, 20 bp, synthetic construct
  misc_feature 1..20: note = Description of Artificial Sequence: Synthetic oligonucleotide
  misc_feature 1..20: note = Target: SCN10A; (+) strand; PAM type: NNGRRT; PAM sequence: AGGGAT
  source 1..20: mol_type = other DNA
gcttattttccagctctata

SEQ ID NO: 8465 - DNA, 20 bp, synthetic construct
  misc_feature 1..20: note = Description of Artificial Sequence: Synthetic oligonucleotide
  misc_feature 1..20: note = Target: SCN10A; (+) strand; PAM type: NNGRRT; PAM sequence: GCGGAT
  source 1..20: mol_type = other DNA
tataagggattcctgcccca

SEQ ID NO: 8466 - DNA, 20 bp, synthetic construct
  misc_feature 1..20: note = Description of Artificial Sequence: Synthetic oligonucleotide
  misc_feature 1..20: note = Target: SCN10A; (+) strand; PAM type: NNGRRT; PAM sequence: TGGAAT
  source 1..20: mol_type = other DNA
tataaaatcaaaatagcctt

SEQ ID NO: 8467 - DNA, 20 bp, synthetic construct
  misc_feature 1..20: note = Description of Artificial Sequence: Synthetic oligonucleotide
  misc_feature 1..20: note = Target: SCN10A; (+) strand; PAM type: NNGRRT; PAM sequence: AGGAAT
  source 1..20: mol_type = other DNA
gacatgattgcatttatata

SEQ ID NO: 8468 - DNA, 20 bp, synthetic construct
  misc_feature 1..20: note = Description of Artificial Sequence: Synthetic oligonucleotide
  misc_feature 1..20: note = Target: SCN10A; (+) strand; PAM type: NNGRRT; PAM sequence: GAGAAT
  source 1..20: mol_type = other DNA
tagtcaaactcatgggagca

SEQ ID NO: 8469 - DNA, 20 bp, synthetic construct
  misc_feature 1..20: note = Description of Artificial Sequence: Synthetic oligonucleotide
  misc_feature 1..20: note = Target: SCN10A; (+) strand; PAM type: NNGRRT; PAM sequence: TAGAAT
  source 1..20: mol_type = other DNA
aaactcatgggagcagagaa

SEQ ID NO: 8470 - DNA, 20 bp, synthetic construct
  misc_feature 1..20: note = Description of Artificial Sequence: Synthetic oligonucleotide
  misc_feature 1..20: note = Target: SCN10A; (+) strand; PAM type: NNGRRT; PAM sequence: ATGAAT
  source 1..20: mol_type = other DNA
caaacttccagttatgtgac

SEQ ID NO: 8471 - DNA, 20 bp, synthetic construct
  misc_feature 1..20: note = Description of Artificial Sequence: Synthetic oligonucleotide
  misc_feature 1..20: note = Target: SCN10A; (+) strand; PAM type: NNGRRT; PAM sequence: GAGAAT
  source 1..20: mol_type = other DNA
tctacctaaaaatttgccaa

SEQ ID NO: 8472 - DNA, 20 bp, synthetic construct
  misc_feature 1..20: note = Description of Artificial Sequence: Synthetic oligonucleotide
  misc_feature 1..20: note = Target: SCN10A; (+) strand; PAM type: NNGRRT; PAM sequence: ATGGGT
  source 1..20: mol_type = other DNA
ttgatggtggtgatggtttc

SEQ ID NO: 8473 - DNA, 20 bp, synthetic construct
  misc_feature 1..20: note = Description of Artificial Sequence: Synthetic oligonucleotide
  misc_feature 1..20: note = Target: SCN10A; (+) strand; PAM type: NNGRRT; PAM sequence: GTGGAT
  source 1..20: mol_type = other DNA
acatgtatagctttttacat

SEQ ID NO: 8474 - DNA, 20 bp, synthetic construct
  misc_feature 1..20: note = Description of Artificial Sequence: Synthetic oligonucleotide
  misc_feature 1..20: note = Target: SCN10A; (+) strand; PAM type: NNGRRT; PAM sequence: CAGGAT
  source 1..20: mol_type = other DNA
gacatgaaaagtaagcaggt

SEQ ID NO: 8475 - DNA, 20 bp, synthetic construct
  misc_feature 1..20: note = Description of Artificial Sequence: Synthetic oligonucleotide
  misc_feature 1..20: note = Target: SCN10A; (+) strand; PAM type: NNGRRT; PAM sequence: TAGGGT
  source 1..20: mol_type = other DNA
tgagcatgatttggccttta

SEQ ID NO: 8476 - DNA, 20 bp, synthetic construct
  misc_feature 1..20: note = Description of Artificial Sequence: Synthetic oligonucleotide
  misc_feature 1..20: note = Target: SCN10A; (+) strand; PAM type: NNGRRT; PAM sequence: CTGAGT
  source 1..20: mol_type = other DNA
ctgcataatattcttgatct

SEQ ID NO: 8477 - DNA, 20 bp, synthetic construct
  misc_feature 1..20: note = Description of Artificial Sequence: Synthetic oligonucleotide
  misc_feature 1..20: note = Target: SCN10A; (+) strand; PAM type: NNGRRT; PAM sequence: AAGGAT
  source 1..20: mol_type = other DNA
caattttaaatgtataaaat

SEQ ID NO: 8478 - DNA, 20 bp, synthetic construct
  misc_feature 1..20: note = Description of Artificial Sequence: Synthetic oligonucleotide
  misc_feature 1..20: note = Target: SCN10A; (+) strand; PAM type: NNGRRT; PAM sequence: GAGAAT
  source 1..20: mol_type = other DNA
taattccagaccctagactt

SEQ ID NO: 8479 - DNA, 20 bp, synthetic construct
  misc_feature 1..20: note = Description of Artificial Sequence: Synthetic oligonucleotide
  misc_feature 1..20: note = Target: SCN10A; (+) strand; PAM type: NNGRRT; PAM sequence: AGGAGT
  source 1..20: mol_type = other DNA
tacggtctgaggttctcagg

SEQ ID NO: 8480 - DNA, 20 bp, synthetic construct
  misc_feature 1..20: note = Description of Artificial Sequence: Synthetic oligonucleotide
  misc_feature 1..20: note = Target: SCN10A; (+) strand; PAM type: NNGRRT; PAM sequence: CAGGGT
  source 1..20: mol_type = other DNA
ctcttggaaagctgcaaata

SEQ ID NO: 8481 - DNA, 20 bp, synthetic construct
  misc_feature 1..20: note = Description of Artificial Sequence: Synthetic oligonucleotide
  misc_feature 1..20: note = Target: SCN10A; (+) strand; PAM type: NNGRRT; PAM sequence: CAGAAT
  source 1..20: mol_type = other DNA
aagaactggttgattttgcc

SEQ ID NO: 8482 - DNA, 20 bp, synthetic construct
  misc_feature 1..20: note = Description of Artificial Sequence: Synthetic oligonucleotide
  misc_feature 1..20: note = Target: SCN10A; (+) strand; PAM type: NNGRRT; PAM sequence: ATGAGT
  source 1..20: mol_type = other DNA
ggcatctgtgttatctgtag

SEQ ID NO: 8483 - DNA, 20 bp, synthetic construct
  misc_feature 1..20: note = Description of Artificial Sequence: Synthetic oligonucleotide
  misc_feature 1..20: note = Target: SCN10A; (+) strand; PAM type: NNGRRT; PAM sequence: TTGAGT
  source 1..20: mol_type = other DNA
ctgtctaaattccaacagtc

SEQ ID NO: 8484 - DNA, 20 bp, synthetic construct
  misc_feature 1..20: note = Description of Artificial Sequence: Synthetic oligonucleotide
  misc_feature 1..20: note = Target: SCN10A; (+) strand; PAM type: NNGRRT; PAM sequence: TGGAGT
  source 1..20: mol_type = other DNA
tttaagctccacttactgca

SEQ ID NO: 8485 - DNA, 20 bp, synthetic construct
  misc_feature 1..20: note = Description of Artificial Sequence: Synthetic oligonucleotide
  misc_feature 1..20: note = Target: SCN10A; (+) strand; PAM type: NNGRRT; PAM sequence: GGGGAT
  source 1..20: mol_type = other DNA
acacactaccctgtcccttt

SEQ ID NO: 8486 - DNA, 20 bp, synthetic construct
  misc_feature 1..20: note = Description of Artificial Sequence: Synthetic oligonucleotide
  misc_feature 1..20: note = Target: SCN10A; (+) strand; PAM type: NNGRRT; PAM sequence: TCGAGT
  source 1..20: mol_type = other DNA
atcccacttttcagtcagcc

SEQ ID NO: 8487 - DNA, 20 bp, synthetic construct
  misc_feature 1..20: note = Description of Artificial Sequence: Synthetic oligonucleotide
  misc_feature 1..20: note = Target: SCN10A; (+) strand; PAM type: NNGRRT; PAM sequence: AAGAGT
  source 1..20: mol_type = other DNA
tgcagtgccctgcacattgc

SEQ ID NO: 8488 - DNA, 20 bp, synthetic construct
  misc_feature 1..20: note = Description of Artificial Sequence: Synthetic oligonucleotide
  misc_feature 1..20: note = Target: SCN10A; (+) strand; PAM type: NNGRRT; PAM sequence: GAGAGT
  source 1..20: mol_type = other DNA
ttaatttgagctactttgct

SEQ ID NO: 8489 - DNA, 20 bp, synthetic construct
  misc_feature 1..20: note = Description of Artificial Sequence: Synthetic oligonucleotide
  misc_feature 1..20: note = Target: SCN10A; (+) strand; PAM type: NNGRRT; PAM sequence: TAGGGT
  source 1..20: mol_type = other DNA
gcaaatgcaggtatagggcg

SEQ ID NO: 8490 - DNA, 20 bp, synthetic construct
  misc_feature 1..20: note = Description of Artificial Sequence: Synthetic oligonucleotide
  misc_feature 1..20: note = Target: SCN10A; (+) strand; PAM type: NNGRRT; PAM sequence: CAGAGT
  source 1..20: mol_type = other DNA
gtttgcatcttggaaggagg

SEQ ID NO: 8491 - DNA, 20 bp, synthetic construct
  misc_feature 1..20: note = Description of Artificial Sequence: Synthetic oligonucleotide
  misc_feature 1..20: note = Target: SCN10A; (+) strand; PAM type: NNGRRT; PAM sequence: CTGGAT
  source 1..20: mol_type = other DNA
ttggaaggaggcagagtggc

SEQ ID NO: 8492 - DNA, 20 bp, synthetic construct
  misc_feature 1..20: note = Description of Artificial Sequence: Synthetic oligonucleotide
  misc_feature 1..20: note = Target: SCN10A; (+) strand; PAM type: NNGRRT; PAM sequence: GTGAGT
  source 1..20: mol_type = other DNA
tgtgaacatcttactgctct

SEQ ID NO: 8493 - DNA, 20 bp, synthetic construct
  misc_feature 1..20: note = Description of Artificial Sequence: Synthetic oligonucleotide
  misc_feature 1..20: note = Target: SCN10A; (+) strand; PAM type: NNGRRT; PAM sequence: AGGGGT
  source 1..20: mol_type = other DNA
tcccctaccccatgtacctc

SEQ ID NO: 8494 - DNA, 20 bp, synthetic construct
  misc_feature 1..20: note = Description of Artificial Sequence: Synthetic oligonucleotide
  misc_feature 1..20: note = Target: SCN10A; (+) strand; PAM type: NNGRRT; PAM sequence: ATGGGT
  source 1..20: mol_type = other DNA
gtccctctgcctcagtaatg

SEQ ID NO: 8495 - DNA, 20 bp, synthetic construct
  misc_feature 1..20: note = Description of Artificial Sequence: Synthetic oligonucleotide
  misc_feature 1..20: note = Target: SCN10A; (+) strand; PAM type: NNGRRT; PAM sequence: CAGAAT
  source 1..20: mol_type = other DNA
tagtttctcctaacttaaag

SEQ ID NO: 8496 - DNA, 20 bp, synthetic construct
  misc_feature 1..20: note = Description of Artificial Sequence: Synthetic oligonucleotide
  misc_feature 1..20: note = Target: SCN10A; (+) strand; PAM type: NNGRRT; PAM sequence: AAGAGT
  source 1..20: mol_type = other DNA
ttcaaagcaaaatttcttga

SEQ ID NO: 8497 - DNA, 20 bp, synthetic construct
  misc_feature 1..20: note = Description of Artificial Sequence: Synthetic oligonucleotide
  misc_feature 1..20: note = Target: SCN10A; (+) strand; PAM type: NNGRRT; PAM sequence: ATGAAT
  source 1..20: mol_type = other DNA
agattgttctcactaagatc

SEQ ID NO: 8498 - DNA, 20 bp, synthetic construct
  misc_feature 1..20: note = Description of Artificial Sequence: Synthetic oligonucleotide
  misc_feature 1..20: note = Target: SCN10A; (+) strand; PAM type: NNGRRT; PAM sequence: CAGAGT
  source 1..20: mol_type = other DNA
tttacccaacttttagacat

SEQ ID NO: 8499 - DNA, 20 bp, synthetic construct
  misc_feature 1..20: note = Description of Artificial Sequence: Synthetic oligonucleotide
  misc_feature 1..20: note = Target: SCN10A; (+) strand; PAM type: NNGRRT; PAM sequence: AGGAAT
  source 1..20: mol_type = other DNA
ccttgacaatttatccagcc

SEQ ID NO: 8500 - DNA, 20 bp, synthetic construct
  misc_feature 1..20: note = Description of Artificial Sequence: Synthetic oligonucleotide
  misc_feature 1..20: note = Target: SCN10A; (+) strand; PAM type: NNGRRT; PAM sequence: AAGAGT
  source 1..20: mol_type = other DNA
gtcactggactgtaaactgt

SEQ ID NO: 8501 - DNA, 20 bp, synthetic construct
  misc_feature 1..20: note = Description of Artificial Sequence: Synthetic oligonucleotide
  misc_feature 1..20: note = Target: SCN10A; (+) strand; PAM type: NNGRRT; PAM sequence: ATGAAT
  source 1..20: mol_type = other DNA
gatgctctgcaaatttgtaa

SEQ ID NO: 8502 - DNA, 20 bp, synthetic construct
  misc_feature 1..20: note = Description of Artificial Sequence: Synthetic oligonucleotide
  misc_feature 1..20: note = Target: SCN10A; (+) strand; PAM type: NNGRRT; PAM sequence: CAGAAT
  source 1..20: mol_type = other DNA
atttgtaaatgaatggaaga

SEQ ID NO: 8503 - DNA, 20 bp, synthetic construct
  misc_feature 1..20: note = Description of Artificial Sequence: Synthetic oligonucleotide
  misc_feature 1..20: note = Target: SCN10A; (+) strand; PAM type: NNGRRT; PAM sequence: CTGAGT
  source 1..20: mol_type = other DNA
ggaagacagaatgggcagct

SEQ ID NO: 8504 - DNA, 20 bp, synthetic construct
  misc_feature 1..20: note = Description of Artificial Sequence: Synthetic oligonucleotide
  misc_feature 1..20: note = Target: SCN10A; (+) strand; PAM type: NNGRRT; PAM sequence: AAGGGT
  source 1..20: mol_type = other DNA
actaaattcaattctgtacc

SEQ ID NO: 8505 - DNA, 20 bp, synthetic construct
  misc_feature 1..20: note = Description of Artificial Sequence: Synthetic oligonucleotide
  misc_feature 1..20: note = Target: SCN10A; (+) strand; PAM type: NNGRRT; PAM sequence: CTGAAT
  source 1..20: mol_type = other DNA
ttctgtaccaagggtacata

SEQ ID NO: 8506 - DNA, 20 bp, synthetic construct
  misc_feature 1..20: note = Description of Artificial Sequence: Synthetic oligonucleotide
  misc_feature 1..20: note = Target: SCN10A; (+) strand; PAM type: NNGRRT; PAM sequence: TGGGAT
  source 1..20: mol_type = other DNA
aagggtacatactgaatgta

SEQ ID NO: 8507 - DNA, 20 bp, synthetic construct
  misc_feature 1..20: note = Description of Artificial Sequence: Synthetic oligonucleotide
  misc_feature 1..20: note = Target: SCN10A; (+) strand; PAM type: NNGRRT; PAM sequence: ATGAGT
  source 1..20: mol_type = other DNA
tgggatgtgcaagcctctgc

SEQ ID NO: 8508 - DNA, 20 bp, synthetic construct
  misc_feature 1..20: note = Description of Artificial Sequence: Synthetic oligonucleotide
  misc_feature 1..20: note = Target: SCN10A; (+) strand; PAM type: NNGRRT; PAM sequence: GGGGAT
  source 1..20: mol_type = other DNA
cttgccttctgcttcatggt

SEQ ID NO: 8509 - DNA, 20 bp, synthetic construct
  misc_feature 1..20: note = Description of Artificial Sequence: Synthetic oligonucleotide
  misc_feature 1..20: note = Target: SCN10A; (+) strand; PAM type: NNGRRT; PAM sequence: ATGGGT
  source 1..20: mol_type = other DNA
ccttctgcttcatggtgggg

SEQ ID NO: 8510 - DNA, 20 bp, synthetic construct
  misc_feature 1..20: note = Description of Artificial Sequence: Synthetic oligonucleotide
  misc_feature 1..20: note = Target: SCN10A; (+) strand; PAM type: NNGRRT; PAM sequence: TTGGGT
  source 1..20: mol_type = other DNA
ggggatgggttgctatcctg

SEQ ID NO: 8511 - DNA, 20 bp, synthetic construct
  misc_feature 1..20: note = Description of Artificial Sequence: Synthetic oligonucleotide
  misc_feature 1..20: note = Target: SCN10A; (+) strand; PAM type: NNGRRT; PAM sequence: AAGAAT
  source 1..20: mol_type = other DNA
tatcctgttgggttagagca

SEQ ID NO: 8512 - DNA, 20 bp, synthetic construct
  misc_feature 1..20: note = Description of Artificial Sequence: Synthetic oligonucleotide
  misc_feature 1..20: note = Target: SCN10A; (+) strand; PAM type: NNGRRT; PAM sequence: GGGGAT
  source 1..20: mol_type = other DNA
catctttcctggggcaggag

SEQ ID NO: 8513 - DNA, 20 bp, synthetic construct
  misc_feature 1..20: note = Description of Artificial Sequence: Synthetic oligonucleotide
  misc_feature 1..20: note = Target: SCN10A; (+) strand; PAM type: NNGRRT; PAM sequence: CTGGGT
  source 1..20: mol_type = other DNA
gcaacggcatcgttaagtgg

SEQ ID NO: 8514 - DNA, 20 bp, synthetic construct
  misc_feature 1..20: note = Description of Artificial Sequence: Synthetic oligonucleotide
  misc_feature 1..20: note = Target: SCN10A; (+) strand; PAM type: NNGRRT; PAM sequence: CTGGAT
  source 1..20: mol_type = other DNA
ggctgggtgtgaagtttgcc

SEQ ID NO: 8515 - DNA, 20 bp, synthetic construct
  misc_feature 1..20: note = Description of Artificial Sequence: Synthetic oligonucleotide
  misc_feature 1..20: note = Target: SCN10A; (+) strand; PAM type: NNGRRT; PAM sequence: GGGAAT
  source 1..20: mol_type = other DNA
ccctggatattctgacttta

SEQ ID NO: 8516 - DNA, 20 bp, synthetic construct
  misc_feature 1..20: note = Description of Artificial Sequence: Synthetic oligonucleotide
  misc_feature 1..20: note = Target: SCN10A; (+) strand; PAM type: NNGRRT; PAM sequence: TGGAGT
  source 1..20: mol_type = other DNA
gatattctgactttagggaa

SEQ ID NO: 8517 - DNA, 20 bp, synthetic construct
  misc_feature 1..20: note = Description of Artificial Sequence: Synthetic oligonucleotide
  misc_feature 1..20: note = Target: SCN10A; (+) strand; PAM type: NNGRRT; PAM sequence: TTGGAT
  source 1..20: mol_type = other DNA
gagtagcttgctagctgctc

SEQ ID NO: 8518 - DNA, 20 bp, synthetic construct
  misc_feature 1..20: note = Description of Artificial Sequence: Synthetic oligonucleotide
  misc_feature 1..20: note = Target: SCN10A; (+) strand; PAM type: NNGRRT; PAM sequence: AGGGAT
  source 1..20: mol_type = other DNA
tcttggattagcccacggtc

SEQ ID NO: 8519 - DNA, 20 bp, synthetic construct
  misc_feature 1..20: note = Description of Artificial Sequence: Synthetic oligonucleotide
  misc_feature 1..20: note = Target: SCN10A; (+) strand; PAM type: NNGRRT; PAM sequence: GTGGGT
  source 1..20: mol_type = other DNA
gtgctctcagagacgatgaa

SEQ ID NO: 8520 - DNA, 20 bp, synthetic construct
  misc_feature 1..20: note = Description of Artificial Sequence: Synthetic oligonucleotide
  misc_feature 1..20: note = Target: SCN10A; (+) strand; PAM type: NNGRRT; PAM sequence: TGGAGT
  source 1..20: mol_type = other DNA
cctattatatttctataaag

SEQ ID NO: 8521 - DNA, 20 bp, synthetic construct
  misc_feature 1..20: note = Description of Artificial Sequence: Synthetic oligonucleotide
  misc_feature 1..20: note = Target: SCN10A; (+) strand; PAM type: NNGRRT; PAM sequence: GGGAAT
  source 1..20: mol_type = other DNA
ttttattgatttctgtagca

SEQ ID NO: 8522 - DNA, 20 bp, synthetic construct
  misc_feature 1..20: note = Description of Artificial Sequence: Synthetic oligonucleotide
  misc_feature 1..20: note = Target: SCN10A; (+) strand; PAM type: NNGRRT; PAM sequence: AAGAAT
  source 1..20: mol_type = other DNA
ttctgtagcagggaatgtta

SEQ ID NO: 8523 - DNA, 20 bp, synthetic construct
  misc_feature 1..20: note = Description of Artificial Sequence: Synthetic oligonucleotide
  misc_feature 1..20: note = Target: SCN10A; (+) strand; PAM type: NNGRRT; PAM sequence: TGGAAT
  source 1..20: mol_type = other DNA
aataaaatttcccagtcttg

SEQ ID NO: 8524 - DNA, 20 bp, synthetic construct
  misc_feature 1..20: note = Description of Artificial Sequence: Synthetic oligonucleotide
  misc_feature 1..20: note = Target: SCN10A; (+) strand; PAM type: NNGRRT; PAM sequence: AAGGGT
  source 1..20: mol_type = other DNA
agcaagctgggcctgggaag

SEQ ID NO: 8525 - DNA, 20 bp, synthetic construct
  misc_feature 1..20: note = Description of Artificial Sequence: Synthetic oligonucleotide
  misc_feature 1..20: note = Target: SCN10A; (+) strand; PAM type: NNGRRT; PAM sequence: GGGAGT
  source 1..20: mol_type = other DNA
tgggaagaagggtcttagtt

SEQ ID NO: 8526 - DNA, 20 bp, synthetic construct
  misc_feature 1..20: note = Description of Artificial Sequence: Synthetic oligonucleotide
  misc_feature 1..20: note = Target: SCN10A; (+) strand; PAM type: NNGRRT; PAM sequence: GGGAAT
  source 1..20: mol_type = other DNA
gaagggtcttagttgggagt

SEQ ID NO: 8527 - DNA, 20 bp, synthetic construct
  misc_feature 1..20: note = Description of Artificial Sequence: Synthetic oligonucleotide
  misc_feature 1..20: note = Target: SCN10A; (+) strand; PAM type: NNGRRT; PAM sequence: TTGGAT
  source 1..20: mol_type = other DNA
agtgggaatttccttttgcc

SEQ ID NO: 8528 - DNA, 20 bp, synthetic construct
  misc_feature 1..20: note = Description of Artificial Sequence: Synthetic oligonucleotide
  misc_feature 1..20: note = Target: SCN10A; (+) strand; PAM type: NNGRRT; PAM sequence: GTGGGT
  source 1..20: mol_type = other DNA
cggcttgtgccactgggcat

SEQ ID NO: 8529 - DNA, 20 bp, synthetic construct
  misc_feature 1..20: note = Description of Artificial Sequence: Synthetic oligonucleotide
  misc_feature 1..20: note = Target: SCN10A; (+) strand; PAM type: NNGRRT; PAM sequence: TTGGAT
  source 1..20: mol_type = other DNA
tcaaagatgttgcctgccat

SEQ ID NO: 8530 - DNA, 20 bp, synthetic construct
  misc_feature 1..20: note = Description of Artificial Sequence: Synthetic oligonucleotide
  misc_feature 1..20: note = Target: SCN10A; (+) strand; PAM type: NNGRRT; PAM sequence: TAGGAT
  source 1..20: mol_type = other DNA
tttggatgctggtcaggagc

SEQ ID NO: 8531 - DNA, 20 bp, synthetic construct
  misc_feature 1..20: note = Description of Artificial Sequence: Synthetic oligonucleotide
  misc_feature 1..20: note = Target: SCN10A; (+) strand; PAM type: NNGRRT; PAM sequence: ATGGGT
  source 1..20: mol_type = other DNA
gctaggatggtccaagacct

SEQ ID NO: 8532 - DNA, 20 bp, synthetic construct
  misc_feature 1..20: note = Description of Artificial Sequence: Synthetic oligonucleotide
  misc_feature 1..20: note = Target: SCN10A; (+) strand; PAM type: NNGRRT; PAM sequence: TGGAGT
  source 1..20: mol_type = other DNA
ggtccaagacctatgggtcc

SEQ ID NO: 8533 - DNA, 20 bp, synthetic construct
  misc_feature 1..20: note = Description of Artificial Sequence: Synthetic oligonucleotide
  misc_feature 1..20: note = Target: SCN10A; (+) strand; PAM type: NNGRRT; PAM sequence: AAGAGT
  source 1..20: mol_type = other DNA
cgaaattagggaacaaagga

SEQ ID NO: 8534 - DNA, 20 bp, synthetic construct
  misc_feature 1..20: note = Description of Artificial Sequence: Synthetic oligonucleotide
  misc_feature 1..20: note = Target: SCN10A; (+) strand; PAM type: NNGRRT; PAM sequence: CAGAAT
  source 1..20: mol_type = other DNA
agtgtttaccttgcttgggc

SEQ ID NO: 8535 - DNA, 20 bp, synthetic construct
  misc_feature 1..20: note = Description of Artificial Sequence: Synthetic oligonucleotide
  misc_feature 1..20: note = Target: SCN10A; (+) strand; PAM type: NNGRRT; PAM sequence: GAGAGT
  source 1..20: mol_type = other DNA
actaaggctagcaaaaggtt

SEQ ID NO: 8536 - DNA, 20 bp, synthetic construct
  misc_feature 1..20: note = Description of Artificial Sequence: Synthetic oligonucleotide
  misc_feature 1..20: note = Target: SCN10A; (+) strand; PAM type: NNGRRT; PAM sequence: GTGAAT
  source 1..20: mol_type = other DNA
aggctagcaaaaggttgaga

SEQ ID NO: 8537 - DNA, 20 bp, synthetic construct
  misc_feature 1..20: note = Description of Artificial Sequence: Synthetic oligonucleotide
  misc_feature 1..20: note = Target: SCN10A; (+) strand; PAM type: NNGRRT; PAM sequence: AAGGAT
  source 1..20: mol_type = other DNA
atccactcttcttccattca

SEQ ID NO: 8538 - DNA, 20 bp, synthetic construct
  misc_feature 1..20: note = Description of Artificial Sequence: Synthetic oligonucleotide
  misc_feature 1..20: note = Target: SCN10A; (+) strand; PAM type: NNGRRT; PAM sequence: GAGAAT
  source 1..20: mol_type = other DNA
cttcttccattcaaaggatg

SEQ ID NO: 8539 - DNA, 20 bp, synthetic construct
  misc_feature 1..20: note = Description of Artificial Sequence: Synthetic oligonucleotide
  misc_feature 1..20: note = Target: SCN10A; (+) strand; PAM type: NNGRRT; PAM sequence: CAGAAT
  source 1..20: mol_type = other DNA
aggatggagaatctcaggaa

SEQ ID NO: 8540 - DNA, 20 bp, synthetic construct
  misc_feature 1..20: note = Description of Artificial Sequence: Synthetic oligonucleotide
  misc_feature 1..20: note = Target: SCN10A; (+) strand; PAM type: NNGRRT; PAM sequence: GAGGAT
  source 1..20: mol_type = other DNA
ctccccctgtgccatcctcg

SEQ ID NO: 8541 - DNA, 20 bp, synthetic construct
  misc_feature 1..20: note = Description of Artificial Sequence: Synthetic oligonucleotide
  misc_feature 1..20: note = Target: SCN10A; (+) strand; PAM type: NNGRRT; PAM sequence: TGGAAT
  source 1..20: mol_type = other DNA
tcccactcctatttactgcc

SEQ ID NO: 8542 - DNA, 20 bp, synthetic construct
  misc_feature 1..20: note = Description of Artificial Sequence: Synthetic oligonucleotide
  misc_feature 1..20: note = Target: SCN10A; (+) strand; PAM type: NNGRRT; PAM sequence: TAGGGT
  source 1..20: mol_type = other DNA
actgcctggaatttcaacat

SEQ ID NO: 8543 - DNA, 20 bp, synthetic construct
  misc_feature 1..20: note = Description of Artificial Sequence: Synthetic oligonucleotide
  misc_feature 1..20: note = Target: SCN10A; (+) strand; PAM type: NNGRRT; PAM sequence: CAGGGT
  source 1..20: mol_type = other DNA
ttgtaggtagatgccctctc

SEQ ID NO: 8544 - DNA, 20 bp, synthetic construct
  misc_feature 1..20: note = Description of Artificial Sequence: Synthetic oligonucleotide
  misc_feature 1..20: note = Target: SCN10A; (+) strand; PAM type: NNGRRT; PAM sequence: AAGAAT
  source 1..20: mol_type = other DNA
aatatgatttatcttgtcct

SEQ ID NO: 8545 - DNA, 20 bp, synthetic construct
  misc_feature 1..20: note = Description of Artificial Sequence: Synthetic oligonucleotide
  misc_feature 1..20: note = Target: SCN10A; (+) strand; PAM type: NNGRRT; PAM sequence: TGGGGT
  source 1..20: mol_type = other DNA
aagctttctttggcagccta

SEQ ID NO: 8546 - DNA, 20 bp, synthetic construct
  misc_feature 1..20: note = Description of Artificial Sequence: Synthetic oligonucleotide
  misc_feature 1..20: note = Target: SCN10A; (+) strand; PAM type: NNGRRT; PAM sequence: TTGGGT
  source 1..20: mol_type = other DNA
ttctttggcagcctatgggg

SEQ ID NO: 8547 - DNA, 20 bp, synthetic construct
  misc_feature 1..20: note = Description of Artificial Sequence: Synthetic oligonucleotide
  misc_feature 1..20: note = Target: SCN10A; (+) strand; PAM type: NNGRRT; PAM sequence: TGGGAT
  source 1..20: mol_type = other DNA
ggtgatgacagggaagaagc

SEQ ID NO: 8548 - DNA, 20 bp, synthetic construct
  misc_feature 1..20: note = Description of Artificial Sequence: Synthetic oligonucleotide
  misc_feature 1..20: note = Target: SCN10A; (+) strand; PAM type: NNGRRT; PAM sequence: TTGAGT
  source 1..20: mol_type = other DNA
gctgggatgtcaaagagaga

SEQ ID NO: 8549 - DNA, 20 bp, synthetic construct
  misc_feature 1..20: note = Description of Artificial Sequence: Synthetic oligonucleotide
  misc_feature 1..20: note = Target: SCN10A; (+) strand; PAM type: NNGRRT; PAM sequence: AAGGGT
  source 1..20: mol_type = other DNA
aaaactttcatgtttttgcc

SEQ ID NO: 8550 - DNA, 20 bp, synthetic construct
  misc_feature 1..20: note = Description of Artificial Sequence: Synthetic oligonucleotide
  misc_feature 1..20: note = Target: SCN10A; (+) strand; PAM type: NNGRRT; PAM sequence: GTGGAT
  source 1..20: mol_type = other DNA
ccttggcatctggctcaaat

SEQ ID NO: 8551 - DNA, 20 bp, synthetic construct
  misc_feature 1..20: note = Description of Artificial Sequence: Synthetic oligonucleotide
  misc_feature 1..20: note = Target: SCN10A; (+) strand; PAM type: NNGRRT; PAM sequence: TAGGGT
  source 1..20: mol_type = other DNA
gcttgcttctcagtaagtct

SEQ ID NO: 8552 - DNA, 20 bp, synthetic construct
  misc_feature 1..20: note = Description of Artificial Sequence: Synthetic oligonucleotide
  misc_feature 1..20: note = Target: SCN10A; (+) strand; PAM type: NNGRRT; PAM sequence: TTGAAT
  source 1..20: mol_type = other DNA
ctcctctcattacccatgac

SEQ ID NO: 8553 - DNA, 20 bp, synthetic construct
  misc_feature 1..20: note = Description of Artificial Sequence: Synthetic oligonucleotide
  misc_feature 1..20: note = Target: SCN10A; (+) strand; PAM type: NNGRRT; PAM sequence: AGGGAT
  source 1..20: mol_type = other DNA
tccactgaacttgttgatgg

SEQ ID NO: 8554 - DNA, 20 bp, synthetic construct
  misc_feature 1..20: note = Description of Artificial Sequence: Synthetic oligonucleotide
  misc_feature 1..20: note = Target: SCN10A; (+) strand; PAM type: NNGRRT; PAM sequence: ATGGGT
  source 1..20: mol_type = other DNA
aatccagttatcttgattgt

SEQ ID NO: 8555 - DNA, 20 bp, synthetic construct
  misc_feature 1..20: note = Description of Artificial Sequence: Synthetic oligonucleotide
  misc_feature 1..20: note = Target: SCN10A; (+) strand; PAM type: NNGRRT; PAM sequence: CAGAAT
  source 1..20: mol_type = other DNA
cccattgtaatacttcttat

SEQ ID NO: 8556 - DNA, 20 bp, synthetic construct
  misc_feature 1..20: note = Description of Artificial Sequence: Synthetic oligonucleotide
  misc_feature 1..20: note = Target: SCN10A; (+) strand; PAM type: NNGRRT; PAM sequence: CAGAAT
  source 1..20: mol_type = other DNA
aaatctaatagcttggctaa

SEQ ID NO: 8557 - DNA, 20 bp, synthetic construct
  misc_feature 1..20: note = Description of Artificial Sequence: Synthetic oligonucleotide
  misc_feature 1..20: note = Target: SCN10A; (+) strand; PAM type: NNGRRT; PAM sequence: TGGAGT
  source 1..20: mol_type = other DNA
acagggccaattccattcac

SEQ ID NO: 8558 - DNA, 20 bp, synthetic construct
  misc_feature 1..20: note = Description of Artificial Sequence: Synthetic oligonucleotide
  misc_feature 1..20: note = Target: SCN10A; (+) strand; PAM type: NNGRRT; PAM sequence: GTGGAT
  source 1..20: mol_type = other DNA
ggccaattccattcactgga

SEQ ID NO: 8559 - DNA, 20 bp, synthetic construct
  misc_feature 1..20: note = Description of Artificial Sequence: Synthetic oligonucleotide
  misc_feature 1..20: note = Target: SCN10A; (+) strand; PAM type: NNGRRT; PAM sequence: ATGGGT
  source 1..20: mol_type = other DNA
taggtgatatcatgtgtggt

SEQ ID NO: 8560 - DNA, 20 bp, synthetic construct
  misc_feature 1..20: note = Description of Artificial Sequence: Synthetic oligonucleotide
  misc_feature 1..20: note = Target: SCN10A; (+) strand; PAM type: NNGRRT; PAM sequence: AGGAGT
  source 1..20: mol_type = other DNA
cttgagatctttatgaaaaa

SEQ ID NO: 8561 - DNA, 20 bp, synthetic construct
  misc_feature 1..20: note = Description of Artificial Sequence: Synthetic oligonucleotide
  misc_feature 1..20: note = Target: SCN10A; (+) strand; PAM type: NNGRRT; PAM sequence: TAGAGT
  source 1..20: mol_type = other DNA
tatgaaaaaaggagtgaaac

SEQ ID NO: 8562 - DNA, 20 bp, synthetic construct
  misc_feature 1..20: note = Description of Artificial Sequence: Synthetic oligonucleotide
  misc_feature 1..20: note = Target: SCN10A; (+) strand; PAM type: NNGRRT; PAM sequence: TCGAGT
  source 1..20: mol_type = other DNA
tttttgcccaatctttaaac

SEQ ID NO: 8563 - DNA, 20 bp, synthetic construct
  misc_feature 1..20: note = Description of Artificial Sequence: Synthetic oligonucleotide
  misc_feature 1..20: note = Target: SCN10A; (+) strand; PAM type: NNGRRT; PAM sequence: TGGGAT
  source 1..20: mol_type = other DNA
gcccaatctttaaactcgag

SEQ ID NO: 8564 - DNA, 20 bp, synthetic construct
  misc_feature 1..20: note = Description of Artificial Sequence: Synthetic oligonucleotide
  misc_feature 1..20: note = Target: SCN10A; (+) strand; PAM type: NNGRRT; PAM sequence: TTGGAT
  source 1..20: mol_type = other DNA
accactaccatgactgcatc

SEQ ID NO: 8565 - DNA, 20 bp, synthetic construct
  misc_feature 1..20: note = Description of Artificial Sequence: Synthetic oligonucleotide
  misc_feature 1..20: note = Target: SCN10A; (+) strand; PAM type: NNGRRT; PAM sequence: GGGAGT
  source 1..20: mol_type = other DNA
tgcatcttggatcctgacag

SEQ ID NO: 8566 - DNA, 20 bp, synthetic construct
  misc_feature 1..20: note = Description of Artificial Sequence: Synthetic oligonucleotide
  misc_feature 1..20: note = Target: SCN10A; (+) strand; PAM type: NNGRRT; PAM sequence: TTGGGT
  source 1..20: mol_type = other DNA
cttggatcctgacaggggag

SEQ ID NO: 8567 - DNA, 20 bp, synthetic construct
  misc_feature 1..20: note = Description of Artificial Sequence: Synthetic oligonucleotide
  misc_feature 1..20: note = Target: SCN10A; (+) strand; PAM type: NNGRRT; PAM sequence: TGGGGT
  source 1..20: mol_type = other DNA
cctctctatacctgtaggcg

SEQ ID NO: 8568 - DNA, 20 bp, synthetic construct
  misc_feature 1..20: note = Description of Artificial Sequence: Synthetic oligonucleotide
  misc_feature 1..20: note = Target: SCN10A; (+) strand; PAM type: NNGRRT; PAM sequence: TAGAAT
  source 1..20: mol_type = other DNA
ctatacctgtaggcgtgggg

SEQ ID NO: 8569 - DNA, 20 bp, synthetic construct
  misc_feature 1..20: note = Description of Artificial Sequence: Synthetic oligonucleotide
  misc_feature 1..20: note = Target: SCN10A; (+) strand; PAM type: NNGRRT; PAM sequence: TAGGGT
  source 1..20: mol_type = other DNA
tgtaggcgtggggtagaata

SEQ ID NO: 8570 - DNA, 20 bp, synthetic construct
  misc_feature 1..20: note = Description of Artificial Sequence: Synthetic oligonucleotide
  misc_feature 1..20: note = Target: SCN10A; (+) strand; PAM type: NNGRRT; PAM sequence: CTGGGT
  source 1..20: mol_type = other DNA
taaccacacaagtttaatcc

SEQ ID NO: 8571 - DNA, 20 bp, synthetic construct
  misc_feature 1..20: note = Description of Artificial Sequence: Synthetic oligonucleotide
  misc_feature 1..20: note = Target: SCN10A; (+) strand; PAM type: NNGRRT; PAM sequence: CAGAGT
  source 1..20: mol_type = other DNA
gtatgtttactccagaagac

SEQ ID NO: 8572 - DNA, 20 bp, synthetic construct
  misc_feature 1..20: note = Description of Artificial Sequence: Synthetic oligonucleotide
  misc_feature 1..20: note = Target: SCN10A; (+) strand; PAM type: NNGRRT; PAM sequence: TTGGAT
  source 1..20: mol_type = other DNA
cacaggcatagactgtcatg

SEQ ID NO: 8573 - DNA, 20 bp, synthetic construct
  misc_feature 1..20: note = Description of Artificial Sequence: Synthetic oligonucleotide
  misc_feature 1..20: note = Target: SCN10A; (+) strand; PAM type: NNGRRT; PAM sequence: TGGGAT
  source 1..20: mol_type = other DNA
ctggggctcaccaggggccg

SEQ ID NO: 8574 - DNA, 20 bp, synthetic construct
  misc_feature 1..20: note = Description of Artificial Sequence: Synthetic oligonucleotide
  misc_feature 1..20: note = Target: SCN10A; (+) strand; PAM type: NNGRRT; PAM sequence: ACGGAT
  source 1..20: mol_type = other DNA
taaagcaagaggaaccccct

SEQ ID NO: 8575 - DNA, 20 bp, synthetic construct
  misc_feature 1..20: note = Description of Artificial Sequence: Synthetic oligonucleotide
  misc_feature 1..20: note = Target: SCN10A; (+) strand; PAM type: NNGRRT; PAM sequence: AAGGAT
  source 1..20: mol_type = other DNA
atcagaacaggcaggagaga

SEQ ID NO: 8576 - DNA, 20 bp, synthetic construct
  misc_feature 1..20: note = Description of Artificial Sequence: Synthetic oligonucleotide
  misc_feature 1..20: note = Target: SCN10A; (+) strand; PAM type: NNGRRT; PAM sequence: AGGAGT
  source 1..20: mol_type = other DNA
acaaaccaagcccagcatca

SEQ ID NO: 8577 - DNA, 20 bp, synthetic construct
  misc_feature 1..20: note = Description of Artificial Sequence: Synthetic oligonucleotide
  misc_feature 1..20: note = Target: SCN10A; (+) strand; PAM type: NNGRRT; PAM sequence: CTGAGT
  source 1..20: mol_type = other DNA
ccagtgtcggaacggtggga

SEQ ID NO: 8578 - DNA, 20 bp, synthetic construct
  misc_feature 1..20: note = Description of Artificial Sequence: Synthetic oligonucleotide
  misc_feature 1..20: note = Target: SCN10A; (+) strand; PAM type: NNGRRT; PAM sequence: CTGGGT
  source 1..20: mol_type = other DNA
ttccattgctgactccctgc

SEQ ID NO: 8579 - DNA, 20 bp, synthetic construct
  misc_feature 1..20: note = Description of Artificial Sequence: Synthetic oligonucleotide
  misc_feature 1..20: note = Target: SCN10A; (+) strand; PAM type: NNGRRT; PAM sequence: AGGGAT
  source 1..20: mol_type = other DNA
aaagccagtttctgttctcc

SEQ ID NO: 8580 - DNA, 20 bp, synthetic construct
  misc_feature 1..20: note = Description of Artificial Sequence: Synthetic oligonucleotide
  misc_feature 1..20: note = Target: SCN10A; (+) strand; PAM type: NNGRRT; PAM sequence: CTGGAT
  source 1..20: mol_type = other DNA
tctccagggatccagagatg

SEQ ID NO: 8581 - DNA, 20 bp, synthetic construct
  misc_feature 1..20: note = Description of Artificial Sequence: Synthetic oligonucleotide
  misc_feature 1..20: note = Target: SCN10A; (+) strand; PAM type: NNGRRT; PAM sequence: AAGGGT
  source 1..20: mol_type = other DNA
ggatccagagatgctggata

SEQ ID NO: 8582 - DNA, 20 bp, synthetic construct
  misc_feature 1..20: note = Description of Artificial Sequence: Synthetic oligonucleotide
  misc_feature 1..20: note = Target: SCN10A; (+) strand; PAM type: NNGRRT; PAM sequence: GAGGGT
  source 1..20: mol_type = other DNA
gatgctggataaagggtggg

SEQ ID NO: 8583 - DNA, 20 bp, synthetic construct
  misc_feature 1..20: note = Description of Artificial Sequence: Synthetic oligonucleotide
  misc_feature 1..20: note = Target: SCN10A; (+) strand; PAM type: NNGRRT; PAM sequence: TTGGAT
  source 1..20: mol_type = other DNA
tgttggttcaaatctgagcc

SEQ ID NO: 8584 - DNA, 20 bp, synthetic construct
  misc_feature 1..20: note = Description of Artificial Sequence: Synthetic oligonucleotide
  misc_feature 1..20: note = Target: SCN10A; (+) strand; PAM type: NNGRRT; PAM sequence: TAGAGT
  source 1..20: mol_type = other DNA
agtaaaattctttgggcttc

SEQ ID NO: 8585 - DNA, 20 bp, synthetic construct
  misc_feature 1..20: note = Description of Artificial Sequence: Synthetic oligonucleotide
  misc_feature 1..20: note = Target: SCN10A; (+) strand; PAM type: NNGRRT; PAM sequence: TTGGGT
  source 1..20: mol_type = other DNA
ggacaattactgccttatcc

SEQ ID NO: 8586 - DNA, 20 bp, synthetic construct
  misc_feature 1..20: note = Description of Artificial Sequence: Synthetic oligonucleotide
  misc_feature 1..20: note = Target: SCN10A; (+) strand; PAM type: NNGRRT; PAM sequence: TAGGAT
  source 1..20: mol_type = other DNA
acgaagatgttttcctccct

SEQ ID NO: 8587 - DNA, 20 bp, synthetic construct
  misc_feature 1..20: note = Description of Artificial Sequence: Synthetic oligonucleotide
  misc_feature 1..20: note = Target: SCN10A; (+) strand; PAM type: NNGRRT; PAM sequence: TTGGGT
  source 1..20: mol_type = other DNA
gatgttttcctcccttagga

SEQ ID NO: 8588 - DNA, 20 bp, synthetic construct
  misc_feature 1..20: note = Description of Artificial Sequence: Synthetic oligonucleotide
  misc_feature 1..20: note = Target: SCN10A; (+) strand; PAM type: NNGRRT; PAM sequence: TTGGAT
  source 1..20: mol_type = other DNA
agtttttctttaggggccct

SEQ ID NO: 8589 - DNA, 20 bp, synthetic construct
  misc_feature 1..20: note = Description of Artificial Sequence: Synthetic oligonucleotide
  misc_feature 1..20: note = Target: SCN10A; (+) strand; PAM type: NNGRRT; PAM sequence: TGGAAT
  source 1..20: mol_type = other DNA
ggaaactgggctgagatctg

SEQ ID NO: 8590 - DNA, 20 bp, synthetic construct
  misc_feature 1..20: note = Description of Artificial Sequence: Synthetic oligonucleotide
  misc_feature 1..20: note = Target: SCN10A; (+) strand; PAM type: NNGRRT; PAM sequence: GTGGGT
  source 1..20: mol_type = other DNA
agaaggaaagggcaagggca

SEQ ID NO: 8591 - DNA, 20 bp, synthetic construct
  misc_feature 1..20: note = Description of Artificial Sequence: Synthetic oligonucleotide
  misc_feature 1..20: note = Target: SCN10A; (+) strand; PAM type: NNGRRT; PAM sequence: AAGGAT
  source 1..20: mol_type = other DNA
tcatgctgagaactctgacc

SEQ ID NO: 8592 - DNA, 20 bp, synthetic construct
  misc_feature 1..20: note = Description of Artificial Sequence: Synthetic oligonucleotide
  misc_feature 1..20: note = Target: SCN10A; (+) strand; PAM type: NNGRRT; PAM sequence: CAGGGT
  source 1..20: mol_type = other DNA
tcaataatctcaaacctccc

SEQ ID NO: 8593 - DNA, 20 bp, synthetic construct
  misc_feature 1..20: note = Description of Artificial Sequence: Synthetic oligonucleotide
  misc_feature 1..20: note = Target: SCN10A; (+) strand; PAM type: NNGRRT; PAM sequence: AAGGAT
  source 1..20: mol_type = other DNA
ttatgctcagaaccctgggc

SEQ ID NO: 8594 - DNA, 20 bp, synthetic construct
  misc_feature 1..20: note = Description of Artificial Sequence: Synthetic oligonucleotide
  misc_feature 1..20: note = Target: SCN10A; (+) strand; PAM type: NNGRRT; PAM sequence: TGGAAT
  source 1..20: mol_type = other DNA
gggcaaggatttcctgtaag

SEQ ID NO: 8595 - DNA, 20 bp, synthetic construct
  misc_feature 1..20: note = Description of Artificial Sequence: Synthetic oligonucleotide
  misc_feature 1..20: note = Target: SCN10A; (+) strand; PAM type: NNGRRT; PAM sequence: CAGGAT
  source 1..20: mol_type = other DNA
tatgctcagtgatctttgtt

SEQ ID NO: 8596 - DNA, 20 bp, synthetic construct
  misc_feature 1..20: note = Description of Artificial Sequence: Synthetic oligonucleotide
  misc_feature 1..20: note = Target: SCN10A; (+) strand; PAM type: NNGRRT; PAM sequence: GAGAGT
  source 1..20: mol_type = other DNA
ttacccctcaccacaatcca

SEQ ID NO: 8597 - DNA, 20 bp, synthetic construct
  misc_feature 1..20: note = Description of Artificial Sequence: Synthetic oligonucleotide
  misc_feature 1..20: note = Target: SCN10A; (+) strand; PAM type: NNGRRT; PAM sequence: TTGAAT
  source 1..20: mol_type = other DNA
agtaggtattattagcccca

SEQ ID NO: 8598 - DNA, 20 bp, synthetic construct
  misc_feature 1..20: note = Description of Artificial Sequence: Synthetic oligonucleotide
  misc_feature 1..20: note = Target: SCN10A; (+) strand; PAM type: NNGRRT; PAM sequence: ATGAAT
  source 1..20: mol_type = other DNA
ggtattattagccccattga

SEQ ID NO: 8599 - DNA, 20 bp, synthetic construct
  misc_feature 1..20: note = Description of Artificial Sequence: Synthetic oligonucleotide
  misc_feature 1..20: note = Target: SCN10A; (+) strand; PAM type: NNGRRT; PAM sequence: AGGGGT
  source 1..20: mol_type = other DNA
atgagaaaactgagactcag

SEQ ID NO: 8600 - DNA, 20 bp, synthetic construct
  misc_feature 1..20: note = Description of Artificial Sequence: Synthetic oligonucleotide
  misc_feature 1..20: note = Target: SCN10A; (+) strand; PAM type: NNGRRT; PAM sequence: TTGAGT
  source 1..20: mol_type = other DNA
catgagccatccacaagtag

SEQ ID NO: 8601 - DNA, 20 bp, synthetic construct
  misc_feature 1..20: note = Description of Artificial Sequence: Synthetic oligonucleotide
  misc_feature 1..20: note = Target: SCN10A; (+) strand; PAM type: NNGRRT; PAM sequence: AGGAAT
  source 1..20: mol_type = other DNA
catccacaagtagttgagtc

SEQ ID NO: 8602 - DNA, 20 bp, synthetic construct
  misc_feature 1..20: note = Description of Artificial Sequence: Synthetic oligonucleotide
  misc_feature 1..20: note = Target: SCN10A; (+) strand; PAM type: NNGRRT; PAM sequence: CGGGAT
  source 1..20: mol_type = other DNA
ccatgtagccccttttctct

SEQ ID NO: 8603 - DNA, 20 bp, synthetic construct
  misc_feature 1..20: note = Description of Artificial Sequence: Synthetic oligonucleotide
  misc_feature 1..20: note = Target: SCN10A; (+) strand; PAM type: NNGRRT; PAM sequence: AGGGGT
  source 1..20: mol_type = other DNA
gaacagcgcctatctacctc

SEQ ID NO: 8604 - DNA, 20 bp, synthetic construct
  misc_feature 1..20: note = Description of Artificial Sequence: Synthetic oligonucleotide
  misc_feature 1..20: note = Target: SCN10A; (+) strand; PAM type: NNGRRT; PAM sequence: AAGGAT
  source 1..20: mol_type = other DNA
gtatggaaggcattaaatga

SEQ ID NO: 8605 - DNA, 20 bp, synthetic construct
  misc_feature 1..20: note = Description of Artificial Sequence: Synthetic oligonucleotide
  misc_feature 1..20: note = Target: SCN10A; (+) strand; PAM type: NNGRRT; PAM sequence: TGGGAT
  source 1..20: mol_type = other DNA
tataaacatgagaggttatc

SEQ ID NO: 8606 - DNA, 20 bp, synthetic construct
  misc_feature 1..20: note = Description of Artificial Sequence: Synthetic oligonucleotide
  misc_feature 1..20: note = Target: SCN10A; (+) strand; PAM type: NNGRRT; PAM sequence: CAGAGT
  source 1..20: mol_type = other DNA
gggattcgattcctattaat

SEQ ID NO: 8607 - DNA, 20 bp, synthetic construct
  misc_feature 1..20: note = Description of Artificial Sequence: Synthetic oligonucleotide
  misc_feature 1..20: note = Target: SCN10A; (+) strand; PAM type: NNGRRT; PAM sequence: GAGGGT
  source 1..20: mol_type = other DNA
gccttcctccccatcccaag

SEQ ID NO: 8608 - DNA, 20 bp, synthetic construct
  misc_feature 1..20: note = Description of Artificial Sequence: Synthetic oligonucleotide
  misc_feature 1..20: note = Target: SCN10A; (+) strand; PAM type: NNGRRT; PAM sequence: TGGGAT
  source 1..20: mol_type = other DNA
ctccccatcccaaggagggt

SEQ ID NO: 8609 - DNA, 20 bp, synthetic construct
  misc_feature 1..20: note = Description of Artificial Sequence: Synthetic oligonucleotide
  misc_feature 1..20: note = Target: SCN10A; (+) strand; PAM type: NNGRRT; PAM sequence: GGGGAT
  source 1..20: mol_type = other DNA
gccctgactcagtcctttgt

SEQ ID NO: 8610 - DNA, 20 bp, synthetic construct
  misc_feature 1..20: note = Description of Artificial Sequence: Synthetic oligonucleotide
  misc_feature 1..20: note = Target: SCN10A; (+) strand; PAM type: NNGRRT; PAM sequence: GTGAAT
  source 1..20: mol_type = other DNA
gaccaagatccctttgagat

SEQ ID NO: 8611 - DNA, 20 bp, synthetic construct
  misc_feature 1..20: note = Description of Artificial Sequence: Synthetic oligonucleotide
  misc_feature 1..20: note = Target: SCN10A; (+) strand; PAM type: NNGRRT; PAM sequence: CTGAGT
  source 1..20: mol_type = other DNA
atccctttgagatgtgaatc

SEQ ID NO: 8612 - DNA, 20 bp, synthetic construct
  misc_feature 1..20: note = Description of Artificial Sequence: Synthetic oligonucleotide
  misc_feature 1..20: note = Target: SCN10A; (+) strand; PAM type: NNGRRT; PAM sequence: GAGGAT
  source 1..20: mol_type = other DNA
ttgagatgtgaatcctgagt

SEQ ID NO: 8613 - DNA, 20 bp, synthetic construct
  misc_feature 1..20: note = Description of Artificial Sequence: Synthetic oligonucleotide
  misc_feature 1..20: note = Target: SCN10A; (+) strand; PAM type: NNGRRT; PAM sequence: AAGGGT
  source 1..20: mol_type = other DNA
tgcaacagcaatcacagggc

SEQ ID NO: 8614 - DNA, 20 bp, synthetic construct
  misc_feature 1..20: note = Description of Artificial Sequence: Synthetic oligonucleotide
  misc_feature 1..20: note = Target: SCN10A; (+) strand; PAM type: NNGRRT; PAM sequence: GTGAGT
  source 1..20: mol_type = other DNA
tgatattaaagtgatgggct

SEQ ID NO: 8615 - DNA, 20 bp, synthetic construct
  misc_feature 1..20: note = Description of Artificial Sequence: Synthetic oligonucleotide
  misc_feature 1..20: note = Target: SCN10A; (+) strand; PAM type: NNGRRT; PAM sequence: TTGGGT
  source 1..20: mol_type = other DNA
tgtacacgttgtcctcccac

SEQ ID NO: 8616 - DNA, 20 bp, synthetic construct
  misc_feature 1..20: note = Description of Artificial Sequence: Synthetic oligonucleotide
  misc_feature 1..20: note = Target: SCN10A; (+) strand; PAM type: NNGRRT; PAM sequence: GAGAGT
  source 1..20: mol_type = other DNA
tgacctgtgaccagacaagg

SEQ ID NO: 8617 - DNA, 20 bp, synthetic construct
  misc_feature 1..20: note = Description of Artificial Sequence: Synthetic oligonucleotide
  misc_feature 1..20: note = Target: SCN10A; (+) strand; PAM type: NNGRRT; PAM sequence: GAGGGT
  source 1..20: mol_type = other DNA
agacaagggagagtgggaag

SEQ ID NO: 8618 - DNA, 20 bp, synthetic construct
  misc_feature 1..20: note = Description of Artificial Sequence: Synthetic oligonucleotide
  misc_feature 1..20: note = Target: SCN10A; (+) strand; PAM type: NNGRRT; PAM sequence: GTGGGT
  source 1..20: mol_type = other DNA
aagggagagtgggaaggagg

SEQ ID NO: 8619 - DNA, 20 bp, synthetic construct
  misc_feature 1..20: note = Description of Artificial Sequence: Synthetic oligonucleotide
  misc_feature 1..20: note = Target: SCN10A; (+) strand; PAM type: NNGRRT; PAM sequence: CTGGGT
  source 1..20: mol_type = other DNA
gccaagcctaagacatggac

SEQ ID NO: 8620 - DNA, 20 bp, synthetic construct
  misc_feature 1..20: note = Description of Artificial Sequence: Synthetic oligonucleotide
  misc_feature 1..20: note = Target: SCN10A; (+) strand; PAM type: NNGRRT; PAM sequence: AGGAAT
  source 1..20: mol_type = other DNA
gggaggtgatccaaggaagc

SEQ ID NO: 8621 - DNA, 20 bp, synthetic construct
  misc_feature 1..20: note = Description of Artificial Sequence: Synthetic oligonucleotide
  misc_feature 1..20: note = Target: SCN10A; (+) strand; PAM type: NNGRRT; PAM sequence: GGGAGT
  source 1..20: mol_type = other DNA
atccaaggaagcaggaatga

SEQ ID NO: 8622 - DNA, 20 bp, synthetic construct
  misc_feature 1..20: note = Description of Artificial Sequence: Synthetic oligonucleotide
  misc_feature 1..20: note = Target: SCN10A; (+) strand; PAM type: NNGRRT; PAM sequence: AAGAAT
  source 1..20: mol_type = other DNA
gcaggaatgagggagtgggg

SEQ ID NO: 8623 - DNA, 20 bp, synthetic construct
  misc_feature 1..20: note = Description of Artificial Sequence: Synthetic oligonucleotide
  misc_feature 1..20: note = Target: SCN10A; (+) strand; PAM type: NNGRRT; PAM sequence: GGGAAT
  source 1..20: mol_type = other DNA
gggagtggggaagaataagc

SEQ ID NO: 8624 - DNA, 20 bp, synthetic construct
  misc_feature 1..20: note = Description of Artificial Sequence: Synthetic oligonucleotide
  misc_feature 1..20: note = Target: SCN10A; (+) strand; PAM type: NNGRRT; PAM sequence: GAGGAT
  source 1..20: mol_type = other DNA
atgggagaagagcctgtgaa

SEQ ID NO: 8625 - DNA, 20 bp, synthetic construct
  misc_feature 1..20: note = Description of Artificial Sequence: Synthetic oligonucleotide
  misc_feature 1..20: note = Target: SCN10A; (+) strand; PAM type: NNGRRT; PAM sequence: TGGGGT
  source 1..20: mol_type = other DNA
caactgaagcgcaatcctac

SEQ ID NO: 8626 - DNA, 20 bp, synthetic construct
  misc_feature 1..20: note = Description of Artificial Sequence: Synthetic oligonucleotide
  misc_feature 1..20: note = Target: SCN10A; (+) strand; PAM type: NNGRRT; PAM sequence: CTGAGT
  source 1..20: mol_type = other DNA
cgcaatcctactggggtcct

SEQ ID NO: 8627 - DNA, 20 bp, synthetic construct
  misc_feature 1..20: note = Description of Artificial Sequence: Synthetic oligonucleotide
  misc_feature 1..20: note = Target: SCN10A; (+) strand; PAM type: NNGRRT; PAM sequence: CAGGAT
  source 1..20: mol_type = other DNA
gtaactgtgtagagcacatg

SEQ ID NO: 8628 - DNA, 20 bp, synthetic construct
  misc_feature 1..20: note = Description of Artificial Sequence: Synthetic oligonucleotide
  misc_feature 1..20: note = Target: SCN10A; (+) strand; PAM type: NNGRRT; PAM sequence: TGGAGT
  source 1..20: mol_type = other DNA
tcaccaagggacagggaaac

SEQ ID NO: 8629 - DNA, 20 bp, synthetic construct
  misc_feature 1..20: note = Description of Artificial Sequence: Synthetic oligonucleotide
  misc_feature 1..20: note = Target: SCN10A; (+) strand; PAM type: NNGRRT; PAM sequence: AAGGGT
  source 1..20: mol_type = other DNA
gactcccaaaacttattggt

SEQ ID NO: 8630 - DNA, 20 bp, synthetic construct
  misc_feature 1..20: note = Description of Artificial Sequence: Synthetic oligonucleotide
  misc_feature 1..20: note = Target: SCN10A; (+) strand; PAM type: NNGRRT; PAM sequence: TGGAGT
  source 1..20: mol_type = other DNA
ctgcacaagctcctaagccc

SEQ ID NO: 8631 - DNA, 20 bp, synthetic construct
  misc_feature 1..20: note = Description of Artificial Sequence: Synthetic oligonucleotide
  misc_feature 1..20: note = Target: SCN10A; (+) strand; PAM type: NNGRRT; PAM sequence: GAGAAT
  source 1..20: mol_type = other DNA
agccctggagtctttataca

SEQ ID NO: 8632 - DNA, 20 bp, synthetic construct
  misc_feature 1..20: note = Description of Artificial Sequence: Synthetic oligonucleotide
  misc_feature 1..20: note = Target: SCN10A; (+) strand; PAM type: NNGRRT; PAM sequence: GGGAAT
  source 1..20: mol_type = other DNA
ggctaagggaagaggtggca

SEQ ID NO: 8633 - DNA, 20 bp, synthetic construct
  misc_feature 1..20: note = Description of Artificial Sequence: Synthetic oligonucleotide
  misc_feature 1..20: note = Target: SCN10A; (+) strand; PAM type: NNGRRT; PAM sequence: TTGAGT
  source 1..20: mol_type = other DNA
tcttttctttttttttgaga

SEQ ID NO: 8634 - DNA, 20 bp, synthetic construct
  misc_feature 1..20: note = Description of Artificial Sequence: Synthetic oligonucleotide
  misc_feature 1..20: note = Target: SCN10A; (+) strand; PAM type: NNGRRT; PAM sequence: TGGAGT
  source 1..20: mol_type = other DNA
tctcgctgtctcgcccaagc

SEQ ID NO: 8635 - DNA, 20 bp, synthetic construct
  misc_feature 1..20: note = Description of Artificial Sequence: Synthetic oligonucleotide
  misc_feature 1..20: note = Target: SCN10A; (+) strand; PAM type: NNGRRT; PAM sequence: CCGGGT
  source 1..20: mol_type = other DNA
ctcactgcaacttctgcctc

SEQ ID NO: 8636 - DNA, 20 bp, synthetic construct
  misc_feature 1..20: note = Description of Artificial Sequence: Synthetic oligonucleotide
  misc_feature 1..20: note = Target: SCN10A; (+) strand; PAM type: NNGRRT; PAM sequence: TGGGGT
  source 1..20: mol_type = other DNA
ctttcatattttagtagaga

SEQ ID NO: 8637 - DNA, 20 bp, synthetic construct
  misc_feature 1..20: note = Description of Artificial Sequence: Synthetic oligonucleotide
  misc_feature 1..20: note = Target: SCN10A; (+) strand; PAM type: NNGRRT; PAM sequence: TAGGAT
  source 1..20: mol_type = other DNA
acctcggcctcccaaagtgc

SEQ ID NO: 8638 - DNA, 20 bp, synthetic construct
  misc_feature 1..20: note = Description of Artificial Sequence: Synthetic oligonucleotide
  misc_feature 1..20: note = Target: SCN10A; (+) strand; PAM type: NNGRRT; PAM sequence: CTGGGT
  source 1..20: mol_type = other DNA
accactgcgcctggcccatc

SEQ ID NO: 8639 - DNA, 20 bp, synthetic construct
  misc_feature 1..20: note = Description of Artificial Sequence: Synthetic oligonucleotide
  misc_feature 1..20: note = Target: SCN10A; (+) strand; PAM type: NNGRRT; PAM sequence: GGGAGT
  source 1..20: mol_type = other DNA
tttgctcccacccttgtcca

SEQ ID NO: 8640 - DNA, 20 bp, synthetic construct
  misc_feature 1..20: note = Description of Artificial Sequence: Synthetic oligonucleotide
  misc_feature 1..20: note = Target: SCN10A; (+) strand; PAM type: NNGRRT; PAM sequence: GGGAGT
  source 1..20: mol_type = other DNA
ggaaaacctcgagaagcctg

SEQ ID NO: 8641 - DNA, 20 bp, synthetic construct
  misc_feature 1..20: note = Description of Artificial Sequence: Synthetic oligonucleotide
  misc_feature 1..20: note = Target: SCN10A; (+) strand; PAM type: NNGRRT; PAM sequence: CTGGGT
  source 1..20: mol_type = other DNA
ggagggacagtgtgaggttg

SEQ ID NO: 8642 - DNA, 20 bp, synthetic construct
  misc_feature 1..20: note = Description of Artificial Sequence: Synthetic oligonucleotide
  misc_feature 1..20: note = Target: SCN10A; (+) strand; PAM type: NNGRRT; PAM sequence: CAGGGT
  source 1..20: mol_type = other DNA
gtgatcgcctcttccagtac

SEQ ID NO: 8643 - DNA, 20 bp, synthetic construct
  misc_feature 1..20: note = Description of Artificial Sequence: Synthetic oligonucleotide
  misc_feature 1..20: note = Target: SCN10A; (+) strand; PAM type: NNGRRT; PAM sequence: ATGGGT
  source 1..20: mol_type = other DNA
catttcaaatgcagactgat

SEQ ID NO: 8644 - DNA, 20 bp, synthetic construct
  misc_feature 1..20: note = Description of Artificial Sequence: Synthetic oligonucleotide
  misc_feature 1..20: note = Target: SCN10A; (+) strand; PAM type: NNGRRT; PAM sequence: TAGAAT
  source 1..20: mol_type = other DNA
caaatgcagactgatatggg

SEQ ID NO: 8645 - DNA, 20 bp, synthetic construct
  misc_feature 1..20: note = Description of Artificial Sequence: Synthetic oligonucleotide
  misc_feature 1..20: note = Target: SCN10A; (+) strand; PAM type: NNGRRT; PAM sequence: GGGAAT
  source 1..20: mol_type = other DNA
tgggctgagactcacctccc

SEQ ID NO: 8646 - DNA, 20 bp, synthetic construct
  misc_feature 1..20: note = Description of Artificial Sequence: Synthetic oligonucleotide
  misc_feature 1..20: note = Target: SCN10A; (+) strand; PAM type: NNGRRT; PAM sequence: GAGAGT
  source 1..20: mol_type = other DNA
ggtggcccagtgagagagga

SEQ ID NO: 8647 - DNA, 20 bp, synthetic construct
  misc_feature 1..20: note = Description of Artificial Sequence: Synthetic oligonucleotide
  misc_feature 1..20: note = Target: SCN10A; (+) strand; PAM type: NNGRRT; PAM sequence: AAGAAT
  source 1..20: mol_type = other DNA
ttggaaagggcttgtgcaga

SEQ ID NO: 8648 - DNA, 20 bp, synthetic construct
  misc_feature 1..20: note = Description of Artificial Sequence: Synthetic oligonucleotide
  misc_feature 1..20: note = Target: SCN10A; (+) strand; PAM type: NNGRRT; PAM sequence: TTGGGT
  source 1..20: mol_type = other DNA
gaatgaaaggaaaagttccc

SEQ ID NO: 8649 - DNA, 20 bp, synthetic construct
  misc_feature 1..20: note = Description of Artificial Sequence: Synthetic oligonucleotide
  misc_feature 1..20: note = Target: SCN10A; (+) strand; PAM type: NNGRRT; PAM sequence: AAGAAT
  source 1..20: mol_type = other DNA
aatcccacatgtggctgttt

SEQ ID NO: 8650 - DNA, 20 bp, synthetic construct
  misc_feature 1..20: note = Description of Artificial Sequence: Synthetic oligonucleotide
  misc_feature 1..20: note = Target: SCN10A; (+) strand; PAM type: NNGRRT; PAM sequence: TAGAGT
  source 1..20: mol_type = other DNA
cacatgtggctgtttaagaa

SEQ ID NO: 8651 - DNA, 20 bp, synthetic construct
  misc_feature 1..20: note = Description of Artificial Sequence: Synthetic oligonucleotide
  misc_feature 1..20: note = Target: SCN10A; (+) strand; PAM type: NNGRRT; PAM sequence: CAGAAT
  source 1..20: mol_type = other DNA
attaaagacacagagccttt

SEQ ID NO: 8652 - DNA, 20 bp, synthetic construct
  misc_feature 1..20: note = Description of Artificial Sequence: Synthetic oligonucleotide
  misc_feature 1..20: note = Target: SCN10A; (+) strand; PAM type: NNGRRT; PAM sequence: CTGAGT
  source 1..20: mol_type = other DNA
aatgtagtatggactgagga

SEQ ID NO: 8653 - DNA, 20 bp, synthetic construct
  misc_feature 1..20: note = Description of Artificial Sequence: Synthetic oligonucleotide
  misc_feature 1..20: note = Target: SCN10A; (+) strand; PAM type: NNGRRT; PAM sequence: AAGAAT
  source 1..20: mol_type = other DNA
ccaccttatgcacatgatgt

SEQ ID NO: 8654 - DNA, 20 bp, synthetic construct
  misc_feature 1..20: note = Description of Artificial Sequence: Synthetic oligonucleotide
  misc_feature 1..20: note = Target: SCN10A; (+) strand; PAM type: NNGRRT; PAM sequence: GAGAAT
  source 1..20: mol_type = other DNA
atcttccagatggagaagtt

SEQ ID NO: 8655 - DNA, 20 bp, synthetic construct
  misc_feature 1..20: note = Description of Artificial Sequence: Synthetic oligonucleotide
  misc_feature 1..20: note = Target: SCN10A; (+) strand; PAM type: NNGRRT; PAM sequence: CTGGGT
  source 1..20: mol_type = other DNA
gcattcttgaggtctagaaa

SEQ ID NO: 8656 - DNA, 20 bp, synthetic construct
  misc_feature 1..20: note = Description of Artificial Sequence: Synthetic oligonucleotide
  misc_feature 1..20: note = Target: SCN10A; (+) strand; PAM type: NNGRRT; PAM sequence: CTGAGT
  source 1..20: mol_type = other DNA
tctgactgtatctcccaggg

SEQ ID NO: 8657 - DNA, 20 bp, synthetic construct
  misc_feature 1..20: note = Description of Artificial Sequence: Synthetic oligonucleotide
  misc_feature 1..20: note = Target: SCN10A; (+) strand; PAM type: NNGRRT; PAM sequence: TTGAAT
  source 1..20: mol_type = other DNA
agctactcagagattatttg

SEQ ID NO: 8658 - DNA, 20 bp, synthetic construct
  misc_feature 1..20: note = Description of Artificial Sequence: Synthetic oligonucleotide
  misc_feature 1..20: note = Target: SCN10A; (+) strand; PAM type: NNGRRT; PAM sequence: TGGAAT
  source 1..20: mol_type = other DNA
ataaatgcaagaaccaatgg

SEQ ID NO: 8659 - DNA, 20 bp, synthetic construct
  misc_feature 1..20: note = Description of Artificial Sequence: Synthetic oligonucleotide
  misc_feature 1..20: note = Target: SCN10A; (+) strand; PAM type: NNGRRT; PAM sequence: AAGAGT
  source 1..20: mol_type = other DNA
atggtggaatgtagacactc

SEQ ID NO: 8660 - DNA, 20 bp, synthetic construct
  misc_feature 1..20: note = Description of Artificial Sequence: Synthetic oligonucleotide
  misc_feature 1..20: note = Target: SCN10A; (+) strand; PAM type: NNGRRT; PAM sequence: TTGAAT
  source 1..20: mol_type = other DNA
ataagtaattgtattaacac

SEQ ID NO: 8661 - DNA, 20 bp, synthetic construct
  misc_feature 1..20: note = Description of Artificial Sequence: Synthetic oligonucleotide
  misc_feature 1..20: note = Target: SCN10A; (+) strand; PAM type: NNGRRT; PAM sequence: CTGAAT
  source 1..20: mol_type = other DNA
acacttgaatgaacagagga

SEQ ID NO: 8662 - DNA, 20 bp, synthetic construct
  misc_feature 1..20: note = Description of Artificial Sequence: Synthetic oligonucleotide
  misc_feature 1..20: note = Target: SCN10A; (+) strand; PAM type: NNGRRT; PAM sequence: ATGAGT
  source 1..20: mol_type = other DNA
caggtagatgaaggcaagaa

SEQ ID NO: 8663 - DNA, 20 bp, synthetic construct
  misc_feature 1..20: note = Description of Artificial Sequence: Synthetic oligonucleotide
  misc_feature 1..20: note = Target: SCN10A; (+) strand; PAM type: NNGRRT; PAM sequence: CTGGAT
  source 1..20: mol_type = other DNA
ggcaagaaatgagtgattga

SEQ ID NO: 8664 - DNA, 20 bp, synthetic construct
  misc_feature 1..20: note = Description of Artificial Sequence: Synthetic oligonucleotide
  misc_feature 1..20: note = Target: SCN10A; (+) strand; PAM type: NNGRRT; PAM sequence: CAGGAT
  source 1..20: mol_type = other DNA
gatgatgaaagaaagaaaga

SEQ ID NO: 8665 - DNA, 20 bp, synthetic construct
  misc_feature 1..20: note = Description of Artificial Sequence: Synthetic oligonucleotide
  misc_feature 1..20: note = Target: SCN10A; (+) strand; PAM type: NNGRRT; PAM sequence: ATGAAT
  source 1..20: mol_type = other DNA
atgaaagaaagaaagacagg

SEQ ID NO: 8666 - DNA, 20 bp, synthetic construct
  misc_feature 1..20: note = Description of Artificial Sequence: Synthetic oligonucleotide
  misc_feature 1..20: note = Target: SCN10A; (+) strand; PAM type: NNGRRT; PAM sequence: AGGAAT
  source 1..20: mol_type = other DNA
agcctcatggtgtagtctgt

SEQ ID NO: 8667 - DNA, 20 bp, synthetic construct
  misc_feature 1..20: note = Description of Artificial Sequence: Synthetic oligonucleotide
  misc_feature 1..20: note = Target: SCN10A; (+) strand; PAM type: NNGRRT; PAM sequence: GAGAAT
  source 1..20: mol_type = other DNA
tggtgtagtctgtaggaata

SEQ ID NO: 8668 - DNA, 20 bp, synthetic construct
  misc_feature 1..20: note = Description of Artificial Sequence: Synthetic oligonucleotide
  misc_feature 1..20: note = Target: SCN10A; (+) strand; PAM type: NNGRRT; PAM sequence: CTGAGT
  source 1..20: mol_type = other DNA
gagaatgacctcagttcaca

SEQ ID NO: 8669 - DNA, 20 bp, synthetic construct
  misc_feature 1..20: note = Description of Artificial Sequence: Synthetic oligonucleotide
  misc_feature 1..20: note = Target: SCN10A; (+) strand; PAM type: NNGRRT; PAM sequence: TGGAGT
  source 1..20: mol_type = other DNA
gacccagaagaagctgccag

SEQ ID NO: 8670 - DNA, 20 bp, synthetic construct
  misc_feature 1..20: note = Description of Artificial Sequence: Synthetic oligonucleotide
  misc_feature 1..20: note = Target: SCN10A; (+) strand; PAM type: NNGRRT; PAM sequence: TTGAAT
  source 1..20: mol_type = other DNA
aagaagctgccagtggagtt

SEQ ID NO: 8671 - DNA, 20 bp, synthetic construct
  misc_feature 1..20: note = Description of Artificial Sequence: Synthetic oligonucleotide
  misc_feature 1..20: note = Target: SCN10A; (+) strand; PAM type: NNGRRT; PAM sequence: ATGGAT
  source 1..20: mol_type = other DNA
agacgaggaggacattcatg

SEQ ID NO: 8672 - DNA, 20 bp, synthetic construct
  misc_feature 1..20: note = Description of Artificial Sequence: Synthetic oligonucleotide
  misc_feature 1..20: note = Target: SCN10A; (+) strand; PAM type: NNGRRT; PAM sequence: TGGGAT
  source 1..20: mol_type = other DNA
aggaggacattcatgatgga

SEQ ID NO: 8673 - DNA, 20 bp, synthetic construct
  misc_feature 1..20: note = Description of Artificial Sequence: Synthetic oligonucleotide
  misc_feature 1..20: note = Target: SCN10A; (+) strand; PAM type: NNGRRT; PAM sequence: CTGGAT
  source 1..20: mol_type = other DNA
ccaatgccccaccccctctg

SEQ ID NO: 8674 - DNA, 20 bp, synthetic construct
  misc_feature 1..20: note = Description of Artificial Sequence: Synthetic oligonucleotide
  misc_feature 1..20: note = Target: SCN10A; (+) strand; PAM type: NNGRRT; PAM sequence: GTGGGT
  source 1..20: mol_type = other DNA
ctttggaagaagcaagagaa

SEQ ID NO: 8675 - DNA, 20 bp, synthetic construct
  misc_feature 1..20: note = Description of Artificial Sequence: Synthetic oligonucleotide
  misc_feature 1..20: note = Target: SCN10A; (+) strand; PAM type: NNGRRT; PAM sequence: ATGGAT
  source 1..20: mol_type = other DNA
gagacattgggcagctgaag

SEQ ID NO: 8676 - DNA, 20 bp, synthetic construct
  misc_feature 1..20: note = Description of Artificial Sequence: Synthetic oligonucleotide
  misc_feature 1..20: note = Target: SCN10A; (+) strand; PAM type: NNGRRT; PAM sequence: CAGGGT
  source 1..20: mol_type = other DNA
cttcttcccttaacctcatt

SEQ ID NO: 8677 - DNA, 20 bp, synthetic construct
  misc_feature 1..20: note = Description of Artificial Sequence: Synthetic oligonucleotide
  misc_feature 1..20: note = Target: SCN10A; (+) strand; PAM type: NNGRRT; PAM sequence: GTGGGT
  source 1..20: mol_type = other DNA
ttcccttaacctcattcagg

SEQ ID NO: 8678 - DNA, 20 bp, synthetic construct
  misc_feature 1..20: note = Description of Artificial Sequence: Synthetic oligonucleotide
  misc_feature 1..20: note = Target: SCN10A; (+) strand; PAM type: NNGRRT; PAM sequence: ATGGAT
  source 1..20: mol_type = other DNA
gggtgggttgcagtgagaag

SEQ ID NO: 8679 - DNA, 20 bp, synthetic construct
  misc_feature 1..20: note = Description of Artificial Sequence: Synthetic oligonucleotide
  misc_feature 1..20: note = Target: SCN10A; (+) strand; PAM type: NNGRRT; PAM sequence: ATGAGT
  source 1..20: mol_type = other DNA
gggttgcagtgagaagatgg

SEQ ID NO: 8680 - DNA, 20 bp, synthetic construct
  misc_feature 1..20: note = Description of Artificial Sequence: Synthetic oligonucleotide
  misc_feature 1..20: note = Target: SCN10A; (+) strand; PAM type: NNGRRT; PAM sequence: GTGAGT
  source 1..20: mol_type = other DNA
tactgcactcatttagaagt

SEQ ID NO: 8681 - DNA, 20 bp, synthetic construct
  misc_feature 1..20: note = Description of Artificial Sequence: Synthetic oligonucleotide
  misc_feature 1..20: note = Target: SCN10A; (+) strand; PAM type: NNGRRT; PAM sequence: GAGAAT
  source 1..20: mol_type = other DNA
ttatttgtaaataagcaaat

SEQ ID NO: 8682 - DNA, 20 bp, synthetic construct
  misc_feature 1..20: note = Description of Artificial Sequence: Synthetic oligonucleotide
  misc_feature 1..20: note = Target: SCN10A; (+) strand; PAM type: NNGRRT; PAM sequence: TAGAAT
  source 1..20: mol_type = other DNA
agaatctattagatacaaaa

SEQ ID NO: 8683 - DNA, 20 bp, synthetic construct
  misc_feature 1..20: note = Description of Artificial Sequence: Synthetic oligonucleotide
  misc_feature 1..20: note = Target: SCN10A; (+) strand; PAM type: NNGRRT; PAM sequence: TCGGGT
  source 1..20: mol_type = other DNA
atttcaaactatttcaatct

SEQ ID NO: 8684 - DNA, 20 bp, synthetic construct
  misc_feature 1..20: note = Description of Artificial Sequence: Synthetic oligonucleotide
  misc_feature 1..20: note = Target: SCN10A; (+) strand; PAM type: NNGRRT; PAM sequence: GTGGGT
  source 1..20: mol_type = other DNA
tttgtaattatgaggaagag

SEQ ID NO: 8685 - DNA, 20 bp, synthetic construct
  misc_feature 1..20: note = Description of Artificial Sequence: Synthetic oligonucleotide
  misc_feature 1..20: note = Target: SCN10A; (+) strand; PAM type: NNGRRT; PAM sequence: GTGGAT
  source 1..20: mol_type = other DNA
caaggtggaggctgacagtg

SEQ ID NO: 8686 - DNA, 20 bp, synthetic construct
  misc_feature 1..20: note = Description of Artificial Sequence: Synthetic oligonucleotide
  misc_feature 1..20: note = Target: SCN10A; (+) strand; PAM type: NNGRRT; PAM sequence: AGGGGT
  source 1..20: mol_type = other DNA
tgacagtggtggataaggaa

SEQ ID NO: 8687 - DNA, 20 bp, synthetic construct
  misc_feature 1..20: note = Description of Artificial Sequence: Synthetic oligonucleotide
  misc_feature 1..20: note = Target: SCN10A; (+) strand; PAM type: NNGRRT; PAM sequence: GTGGAT
  source 1..20: mol_type = other DNA
agtggtggataaggaaaggg

SEQ ID NO: 8688 - DNA, 20 bp, synthetic construct
  misc_feature 1..20: note = Description of Artificial Sequence: Synthetic oligonucleotide
  misc_feature 1..20: note = Target: SCN10A; (+) strand; PAM type: NNGRRT; PAM sequence: GTGGGT
  source 1..20: mol_type = other DNA
aggagagaagaagcattcca

SEQ ID NO: 8689 - DNA, 20 bp, synthetic construct
  misc_feature 1..20: note = Description of Artificial Sequence: Synthetic oligonucleotide
  misc_feature 1..20: note = Target: SCN10A; (+) strand; PAM type: NNGRRT; PAM sequence: TGGAGT
  source 1..20: mol_type = other DNA
tgagctgatgatgtcactca

SEQ ID NO: 8690 - DNA, 20 bp, synthetic construct
  misc_feature 1..20: note = Description of Artificial Sequence: Synthetic oligonucleotide
  misc_feature 1..20: note = Target: SCN10A; (+) strand; PAM type: NNGRRT; PAM sequence: TGGGAT
  source 1..20: mol_type = other DNA
tcatggaaagacagagaact

SEQ ID NO: 8691 - DNA, 20 bp, synthetic construct
  misc_feature 1..20: note = Description of Artificial Sequence: Synthetic oligonucleotide
  misc_feature 1..20: note = Target: SCN10A; (+) strand; PAM type: NNGRRT; PAM sequence: CAGAGT
  source 1..20: mol_type = other DNA
gagatgttggcaataagagg

SEQ ID NO: 8692 - DNA, 20 bp, synthetic construct
  misc_feature 1..20: note = Description of Artificial Sequence: Synthetic oligonucleotide
  misc_feature 1..20: note = Target: SCN10A; (+) strand; PAM type: NNGRRT; PAM sequence: TTGGGT
  source 1..20: mol_type = other DNA
gttggcaataagaggcagag

SEQ ID NO: 8693 - DNA, 20 bp, synthetic construct
  misc_feature 1..20: note = Description of Artificial Sequence: Synthetic oligonucleotide
  misc_feature 1..20: note = Target: SCN10A; (+) strand; PAM type: NNGRRT; PAM sequence: CAGGAT
  source 1..20: mol_type = other DNA
atgcttgtggagcgatgatt

SEQ ID NO: 8694 - DNA, 20 bp, synthetic construct
  misc_feature 1..20: note = Description of Artificial Sequence: Synthetic oligonucleotide
  misc_feature 1..20: note = Target: SCN10A; (+) strand; PAM type: NNGRRT; PAM sequence: GGGGGT
  source 1..20: mol_type = other DNA
attacttcactaagagcaaa

SEQ ID NO: 8695 - DNA, 20 bp, synthetic construct
  misc_feature 1..20: note = Description of Artificial Sequence: Synthetic oligonucleotide
  misc_feature 1..20: note = Target: SCN10A; (+) strand; PAM type: NNGRRT; PAM sequence: CTGGGT
  source 1..20: mol_type = other DNA
aagagcaaagggggtgaggt

SEQ ID NO: 8696 - DNA, 20 bp, synthetic construct
  misc_feature 1..20: note = Description of Artificial Sequence: Synthetic oligonucleotide
  misc_feature 1..20: note = Target: SCN10A; (+) strand; PAM type: NNGRRT; PAM sequence: ATGGGT
  source 1..20: mol_type = other DNA
tcctggtggctgtaatattt

SEQ ID NO: 8697 - DNA, 20 bp, synthetic construct
  misc_feature 1..20: note = Description of Artificial Sequence: Synthetic oligonucleotide
  misc_feature 1..20: note = Target: SCN10A; (+) strand; PAM type: NNGRRT; PAM sequence: GAGAGT
  source 1..20: mol_type = other DNA
aagacttgaaagagaactaa

SEQ ID NO: 8698 - DNA, 20 bp, synthetic construct
  misc_feature 1..20: note = Description of Artificial Sequence: Synthetic oligonucleotide
  misc_feature 1..20: note = Target: SCN10A; (+) strand; PAM type: NNGRRT; PAM sequence: CAGGGT
  source 1..20: mol_type = other DNA
ggaggtggggccccggagct

SEQ ID NO: 8699 - DNA, 20 bp, synthetic construct
  misc_feature 1..20: note = Description of Artificial Sequence: Synthetic oligonucleotide
  misc_feature 1..20: note = Target: SCN10A; (+) strand; PAM type: NNGRRT; PAM sequence: TGGGAT
  source 1..20: mol_type = other DNA
gccccggagctcagggttgg

SEQ ID NO: 8700 - DNA, 20 bp, synthetic construct
  misc_feature 1..20: note = Description of Artificial Sequence: Synthetic oligonucleotide
  misc_feature 1..20: note = Target: SCN10A; (+) strand; PAM type: NNGRRT; PAM sequence: AAGGGT
  source 1..20: mol_type = other DNA
gatggagggcataaaggggg

SEQ ID NO: 8701 - DNA, 20 bp, synthetic construct
  misc_feature 1..20: note = Description of Artificial Sequence: Synthetic oligonucleotide
  misc_feature 1..20: note = Target: SCN10A; (+) strand; PAM type: NNGRRT; PAM sequence: CGGAGT
  source 1..20: mol_type = other DNA
tttttgtttgttttttgagg

SEQ ID NO: 8702 - DNA, 20 bp, synthetic construct
  misc_feature 1..20: note = Description of Artificial Sequence: Synthetic oligonucleotide
  misc_feature 1..20: note = Target: SCN10A; (+) strand; PAM type: NNGRRT; PAM sequence: TGGAGT
  source 1..20: mol_type = other DNA
tctcgctctgtcacccaggc

SEQ ID NO: 8703 - DNA, 20 bp, synthetic construct
  misc_feature 1..20: note = Description of Artificial Sequence: Synthetic oligonucleotide
  misc_feature 1..20: note = Target: SCN10A; (+) strand; PAM type: NNGRRT; PAM sequence: CAGGGT
  source 1..20: mol_type = other DNA
ttttgtacttttagcagaga

SEQ ID NO: 8704 - DNA, 20 bp, synthetic construct
  misc_feature 1..20: note = Description of Artificial Sequence: Synthetic oligonucleotide
  misc_feature 1..20: note = Target: SCN10A; (+) strand; PAM type: NNGRRT; PAM sequence: CAGGGT
  source 1..20: mol_type = other DNA
cagggtttcggcatgttggc

SEQ ID NO: 8705 - DNA, 20 bp, synthetic construct
  misc_feature 1..20: note = Description of Artificial Sequence: Synthetic oligonucleotide
  misc_feature 1..20: note = Target: SCN10A; (+) strand; PAM type: NNGRRT; PAM sequence: TGGGAT
  source 1..20: mol_type = other DNA
gcctcagcctcccaaagtgc

SEQ ID NO: 8706 - DNA, 20 bp, synthetic construct
  misc_feature 1..20: note = Description of Artificial Sequence: Synthetic oligonucleotide
  misc_feature 1..20: note = Target: SCN10A; (+) strand; PAM type: NNGRRT; PAM sequence: AAGGGT
  source 1..20: mol_type = other DNA
cgcagtggccgcagagcgcg

SEQ ID NO: 8707 - DNA, 20 bp, synthetic construct
  misc_feature 1..20: note = Description of Artificial Sequence: Synthetic oligonucleotide
  misc_feature 1..20: note = Target: SCN10A; (+) strand; PAM type: NNGRRT; PAM sequence: CAGAAT
  source 1..20: mol_type = other DNA
ggctttgatgggagccactt

SEQ ID NO: 8708 - DNA, 20 bp, synthetic construct
  misc_feature 1..20: note = Description of Artificial Sequence: Synthetic oligonucleotide
  misc_feature 1..20: note = Target: SCN10A; (+) strand; PAM type: NNGRRT; PAM sequence: CAGAAT
  source 1..20: mol_type = other DNA
ggagccacttcagaatattc

SEQ ID NO: 8709 - DNA, 20 bp, synthetic construct
  misc_feature 1..20: note = Description of Artificial Sequence: Synthetic oligonucleotide
  misc_feature 1..20: note = Target: SCN10A; (+) strand; PAM type: NNGRRT; PAM sequence: CTGAGT
  source 1..20: mol_type = other DNA
gtgagacttatcagtgagat

SEQ ID NO: 8710 - DNA, 20 bp, synthetic construct
  misc_feature 1..20: note = Description of Artificial Sequence: Synthetic oligonucleotide
  misc_feature 1..20: note = Target: SCN10A; (+) strand; PAM type: NNGRRT; PAM sequence: AAGAGT
  source 1..20: mol_type = other DNA
actccaatgagaggtctaga

SEQ ID NO: 8711 - DNA, 20 bp, synthetic construct
  misc_feature 1..20: note = Description of Artificial Sequence: Synthetic oligonucleotide
  misc_feature 1..20: note = Target: SCN10A; (+) strand; PAM type: NNGRRT; PAM sequence: GAGAGT
  source 1..20: mol_type = other DNA
tccctcctaggggctatgct

SEQ ID NO: 8712 - DNA, 20 bp, synthetic construct
  misc_feature 1..20: note = Description of Artificial Sequence: Synthetic oligonucleotide
  misc_feature 1..20: note = Target: SCN10A; (+) strand; PAM type: NNGRRT; PAM sequence: AGGAAT
  source 1..20: mol_type = other DNA
tatgctgagagtctattctg

SEQ ID NO: 8713 - DNA, 20 bp, synthetic construct
  misc_feature 1..20: note = Description of Artificial Sequence: Synthetic oligonucleotide
  misc_feature 1..20: note = Target: SCN10A; (+) strand; PAM type: NNGRRT; PAM sequence: CTGAAT
  source 1..20: mol_type = other DNA
attctgaggaatatagtaat

SEQ ID NO: 8714 - DNA, 20 bp, synthetic construct
  misc_feature 1..20: note = Description of Artificial Sequence: Synthetic oligonucleotide
  misc_feature 1..20: note = Target: SCN10A; (+) strand; PAM type: NNGRRT; PAM sequence: TGGGGT
  source 1..20: mol_type = other DNA
attatatttgctcagagaag

SEQ ID NO: 8715 - DNA, 20 bp, synthetic construct
  misc_feature 1..20: note = Description of Artificial Sequence: Synthetic oligonucleotide
  misc_feature 1..20: note = Target: SCN10A; (+) strand; PAM type: NNGRRT; PAM sequence: AAGAAT
  source 1..20: mol_type = other DNA
gctcagagaagtggggtgga

SEQ ID NO: 8716 - DNA, 20 bp, synthetic construct
  misc_feature 1..20: note = Description of Artificial Sequence: Synthetic oligonucleotide
  misc_feature 1..20: note = Target: SCN10A; (+) strand; PAM type: NNGRRT; PAM sequence: TTGGGT
  source 1..20: mol_type = other DNA
ggggtggaaagaatagtggt

SEQ ID NO: 8717 - DNA, 20 bp, synthetic construct
  misc_feature 1..20: note = Description of Artificial Sequence: Synthetic oligonucleotide
  misc_feature 1..20: note = Target: SCN10A; (+) strand; PAM type: NNGRRT; PAM sequence: TGGGGT
  source 1..20: mol_type = other DNA
ggaaagaatagtggtttggg

SEQ ID NO: 8718 - DNA, 20 bp, synthetic construct
  misc_feature 1..20: note = Description of Artificial Sequence: Synthetic oligonucleotide
  misc_feature 1..20: note = Target: SCN10A; (+) strand; PAM type: NNGRRT; PAM sequence: TTGGGT
  source 1..20: mol_type = other DNA
aaccctgattttttgtgagc

SEQ ID NO: 8719 - DNA, 20 bp, synthetic construct
  misc_feature 1..20: note = Description of Artificial Sequence: Synthetic oligonucleotide
  misc_feature 1..20: note = Target: SCN10A; (+) strand; PAM type: NNGRRT; PAM sequence: CAGGGT
  source 1..20: mol_type = other DNA
gggttagtgcctggctagtc

SEQ ID NO: 8720 - DNA, 20 bp, synthetic construct
  misc_feature 1..20: note = Description of Artificial Sequence: Synthetic oligonucleotide
  misc_feature 1..20: note = Target: SCN10A; (+) strand; PAM type: NNGRRT; PAM sequence: GAGAAT
  source 1..20: mol_type = other DNA
aaatgaaaaagtcagactaa

SEQ ID NO: 8721 - DNA, 20 bp, synthetic construct
  misc_feature 1..20: note = Description of Artificial Sequence: Synthetic oligonucleotide
  misc_feature 1..20: note = Target: SCN10A; (+) strand; PAM type: NNGRRT; PAM sequence: ATGGGT
  source 1..20: mol_type = other DNA
ttcttcaaaaagtttctggt

SEQ ID NO: 8722 - DNA, 20 bp, synthetic construct
  misc_feature 1..20: note = Description of Artificial Sequence: Synthetic oligonucleotide
  misc_feature 1..20: note = Target: SCN10A; (+) strand; PAM type: NNGRRT; PAM sequence: CTGAAT
  source 1..20: mol_type = other DNA
gccacaccacagatggtggg

SEQ ID NO: 8723 - DNA, 20 bp, synthetic construct
  misc_feature 1..20: note = Description of Artificial Sequence: Synthetic oligonucleotide
  misc_feature 1..20: note = Target: SCN10A; (+) strand; PAM type: NNGRRT; PAM sequence: TGGGAT
  source 1..20: mol_type = other DNA
agcttatcctggcagttagg

SEQ ID NO: 8724 - DNA, 20 bp, synthetic construct
  misc_feature 1..20: note = Description of Artificial Sequence: Synthetic oligonucleotide
  misc_feature 1..20: note = Target: SCN10A; (+) strand; PAM type: NNGRRT; PAM sequence: TTGAGT
  source 1..20: mol_type = other DNA
agaaaagaagggctttatac

SEQ ID NO: 8725 - DNA, 20 bp, synthetic construct
  misc_feature 1..20: note = Description of Artificial Sequence: Synthetic oligonucleotide
  misc_feature 1..20: note = Target: SCN10A; (+) strand; PAM type: NNGRRT; PAM sequence: TTGGAT
  source 1..20: mol_type = other DNA
ccccaagcaatgtccattct

SEQ ID NO: 8726 - DNA, 20 bp, synthetic construct
  misc_feature 1..20: note = Description of Artificial Sequence: Synthetic oligonucleotide
  misc_feature 1..20: note = Target: SCN10A; (+) strand; PAM type: NNGRRT; PAM sequence: ATGAGT
  source 1..20: mol_type = other DNA
aagcaatgtccattctttgg

SEQ ID NO: 8727 - DNA, 20 bp, synthetic construct
  misc_feature 1..20: note = Description of Artificial Sequence: Synthetic oligonucleotide
  misc_feature 1..20: note = Target: SCN10A; (+) strand; PAM type: NNGRRT; PAM sequence: CGGAAT
  source 1..20: mol_type = other DNA
attgcaccaggacaaagaac

SEQ ID NO: 8728 - DNA, 20 bp, synthetic construct
  misc_feature 1..20: note = Description of Artificial Sequence: Synthetic oligonucleotide
  misc_feature 1..20: note = Target: SCN10A; (+) strand; PAM type: NNGRRT; PAM sequence: CTGGGT
  source 1..20: mol_type = other DNA
agcaggtgagacccagctgc

SEQ ID NO: 8729 - DNA, 20 bp, synthetic construct
  misc_feature 1..20: note = Description of Artificial Sequence: Synthetic oligonucleotide
  misc_feature 1..20: note = Target: SCN10A; (+) strand; PAM type: NNGRRT; PAM sequence: GAGGGT
  source 1..20: mol_type = other DNA
acccagctgcctgggtgcat

SEQ ID NO: 8730 - DNA, 20 bp, synthetic construct
  misc_feature 1..20: note = Description of Artificial Sequence: Synthetic oligonucleotide
  misc_feature 1..20: note = Target: SCN10A; (+) strand; PAM type: NNGRRT; PAM sequence: ATGGAT
  source 1..20: mol_type = other DNA
ccctgggaagtctgcctcac

SEQ ID NO: 8731 - DNA, 20 bp, synthetic construct
  misc_feature 1..20: note = Description of Artificial Sequence: Synthetic oligonucleotide
  misc_feature 1..20: note = Target: SCN10A; (+) strand; PAM type: NNGRRT; PAM sequence: CAGGAT
  source 1..20: mol_type = other DNA
cactggtactttatcaccct

SEQ ID NO: 8732 - DNA, 20 bp, synthetic construct
  misc_feature 1..20: note = Description of Artificial Sequence: Synthetic oligonucleotide
  misc_feature 1..20: note = Target: SCN10A; (+) strand; PAM type: NNGRRT; PAM sequence: AAGAAT
  source 1..20: mol_type = other DNA
ctaatgccacctcccatagg

SEQ ID NO: 8733 - DNA, 20 bp, synthetic construct
  misc_feature 1..20: note = Description of Artificial Sequence: Synthetic oligonucleotide
  misc_feature 1..20: note = Target: SCN10A; (+) strand; PAM type: NNGRRT; PAM sequence: AAGAGT
  source 1..20: mol_type = other DNA
attctcaaccaccccacccc

SEQ ID NO: 8734 - DNA, 20 bp, synthetic construct
  misc_feature 1..20: note = Description of Artificial Sequence: Synthetic oligonucleotide
  misc_feature 1..20: note = Target: SCN10A; (+) strand; PAM type: NNGRRT; PAM sequence: GTGAGT
  source 1..20: mol_type = other DNA
agtgtaagatcctggagata

SEQ ID NO: 8735 - DNA, 20 bp, synthetic construct
  misc_feature 1..20: note = Description of Artificial Sequence: Synthetic oligonucleotide
  misc_feature 1..20: note = Target: SCN10A; (+) strand; PAM type: NNGRRT; PAM sequence: TAGGAT
  source 1..20: mol_type = other DNA
tatagcaaatggaagaaaaa

SEQ ID NO: 8736 - DNA, 20 bp, synthetic construct
  misc_feature 1..20: note = Description of Artificial Sequence: Synthetic oligonucleotide
  misc_feature 1..20: note = Target: SCN10A; (+) strand; PAM type: NNGRRT; PAM sequence: TGGGAT
  source 1..20: mol_type = other DNA
tggaagaaaaataggatcat

SEQ ID NO: 8737 - DNA, 20 bp, synthetic construct
  misc_feature 1..20: note = Description of Artificial Sequence: Synthetic oligonucleotide
  misc_feature 1..20: note = Target: SCN10A; (+) strand; PAM type: NNGRRT; PAM sequence: CTGGAT
  source 1..20: mol_type = other DNA
aaagaaagaaagaagtacag

SEQ ID NO: 8738 - DNA, 20 bp, synthetic construct
  misc_feature 1..20: note = Description of Artificial Sequence: Synthetic oligonucleotide
  misc_feature 1..20: note = Target: SCN10A; (+) strand; PAM type: NNGRRT; PAM sequence: AAGGGT
  source 1..20: mol_type = other DNA
tacagctggatgaaaagttg

SEQ ID NO: 8739 - DNA, 20 bp, synthetic construct
  misc_feature 1..20: note = Description of Artificial Sequence: Synthetic oligonucleotide
  misc_feature 1..20: note = Target: SCN10A; (+) strand; PAM type: NNGRRT; PAM sequence: AGGGAT
  source 1..20: mol_type = other DNA
gttgaagggtgattgcatag

SEQ ID NO: 8740 - DNA, 20 bp, synthetic construct
  misc_feature 1..20: note = Description of Artificial Sequence: Synthetic oligonucleotide
  misc_feature 1..20: note = Target: SCN10A; (+) strand; PAM type: NNGRRT; PAM sequence: ATGAAT
  source 1..20: mol_type = other DNA
aagggtgattgcatagaggg

SEQ ID NO: 8741 - DNA, 20 bp, synthetic construct
  misc_feature 1..20: note = Description of Artificial Sequence: Synthetic oligonucleotide
  misc_feature 1..20: note = Target: SCN10A; (+) strand; PAM type: NNGRRT; PAM sequence: AAGGAT
  source 1..20: mol_type = other DNA
ttgcatagagggatgaatta

SEQ ID NO: 8742 - DNA, 20 bp, synthetic construct
  misc_feature 1..20: note = Description of Artificial Sequence: Synthetic oligonucleotide
  misc_feature 1..20: note = Target: SCN10A; (+) strand; PAM type: NNGRRT; PAM sequence: TAGGAT
  source 1..20: mol_type = other DNA
ttaaaggatacaatgataaa

SEQ ID NO: 8743 - DNA, 20 bp, synthetic construct
  misc_feature 1..20: note = Description of Artificial Sequence: Synthetic oligonucleotide
  misc_feature 1..20: note = Target: SCN10A; (+) strand; PAM type: NNGRRT; PAM sequence: ATGAAT
  source 1..20: mol_type = other DNA
ggatagatttaatgtataac

SEQ ID NO: 8744 - DNA, 20 bp, synthetic construct
  misc_feature 1..20: note = Description of Artificial Sequence: Synthetic oligonucleotide
  misc_feature 1..20: note = Target: SCN10A; (+) strand; PAM type: NNGRRT; PAM sequence: CTGAGT
  source 1..20: mol_type = other DNA
gttttcagtatttttgctcg

SEQ ID NO: 8745 - DNA, 20 bp, synthetic construct
  misc_feature 1..20: note = Description of Artificial Sequence: Synthetic oligonucleotide
  misc_feature 1..20: note = Target: SCN10A; (+) strand; PAM type: NNGRRT; PAM sequence: ATGGGT
  source 1..20: mol_type = other DNA
ctcttgccacagggggagaa

SEQ ID NO: 8746 - DNA, 20 bp, synthetic construct
  misc_feature 1..20: note = Description of Artificial Sequence: Synthetic oligonucleotide
  misc_feature 1..20: note = Target: SCN10A; (+) strand; PAM type: NNGRRT; PAM sequence: ATGGAT
  source 1..20: mol_type = other DNA
atgggtaactatgtgagatg

SEQ ID NO: 8747 - DNA, 20 bp, synthetic construct
  misc_feature 1..20: note = Description of Artificial Sequence: Synthetic oligonucleotide
  misc_feature 1..20: note = Target: SCN10A; (+) strand; PAM type: NNGRRT; PAM sequence: TTGAAT
  source 1..20: mol_type = other DNA
gtccccacccaaatcttatc

SEQ ID NO: 8748 - DNA, 20 bp, synthetic construct
  misc_feature 1..20: note = Description of Artificial Sequence: Synthetic oligonucleotide
  misc_feature 1..20: note = Target: SCN10A; (+) strand; PAM type: NNGRRT; PAM sequence: GTGAAT
  source 1..20: mol_type = other DNA
agggaccctgtgggaggtaa

SEQ ID NO: 8749 - DNA, 20 bp, synthetic construct
  misc_feature 1..20: note = Description of Artificial Sequence: Synthetic oligonucleotide
  misc_feature 1..20: note = Target: SCN10A; (+) strand; PAM type: NNGRRT; PAM sequence: GTGAAT
  source 1..20: mol_type = other DNA
cccatgctgttctcatgata

SEQ ID NO: 8750 - DNA, 20 bp, synthetic construct
  misc_feature 1..20: note = Description of Artificial Sequence: Synthetic oligonucleotide
  misc_feature 1..20: note = Target: SCN10A; (+) strand; PAM type: NNGRRT; PAM sequence: GGGAGT
  source 1..20: mol_type = other DNA
gatgtgacggtattataagg

SEQ ID NO: 8751 - DNA, 20 bp, synthetic construct
  misc_feature 1..20: note = Description of Artificial Sequence: Synthetic oligonucleotide
  misc_feature 1..20: note = Target: SCN10A; (+) strand; PAM type: NNGRRT; PAM sequence: ATGGAT
  source 1..20: mol_type = other DNA
aagataacagacacaaaaag

SEQ ID NO: 8752 - DNA, 20 bp, synthetic construct
  misc_feature 1..20: note = Description of Artificial Sequence: Synthetic oligonucleotide
  misc_feature 1..20: note = Target: SCN10A; (+) strand; PAM type: NNGRRT; PAM sequence: TAGGAT
  source 1..20: mol_type = other DNA
aacagacacaaaaagatgga

SEQ ID NO: 8753 - DNA, 20 bp, synthetic construct
  misc_feature 1..20: note = Description of Artificial Sequence: Synthetic oligonucleotide
  misc_feature 1..20: note = Target: SCN10A; (+) strand; PAM type: NNGRRT; PAM sequence: TTGAAT
  source 1..20: mol_type = other DNA
aagatggataggatagatag

SEQ ID NO: 8754 - DNA, 20 bp, synthetic construct
  misc_feature 1..20: note = Description of Artificial Sequence: Synthetic oligonucleotide
  misc_feature 1..20: note = Target: SCN10A; (+) strand; PAM type: NNGRRT; PAM sequence: AAGGAT
  source 1..20: mol_type = other DNA
taggatagatagttgaatgg

SEQ ID NO: 8755 - DNA, 20 bp, synthetic construct
  misc_feature 1..20: note = Description of Artificial Sequence: Synthetic oligonucleotide
  misc_feature 1..20: note = Target: SCN10A; (+) strand; PAM type: NNGRRT; PAM sequence: GGGAAT
  source 1..20: mol_type = other DNA
aaaggaaaagtatgaaagca

SEQ ID NO: 8756 - DNA, 20 bp, synthetic construct
  misc_feature 1..20: note = Description of Artificial Sequence: Synthetic oligonucleotide
  misc_feature 1..20: note = Target: SCN10A; (+) strand; PAM type: NNGRRT; PAM sequence: GTGAAT
  source 1..20: mol_type = other DNA
aagtatgaaagcagggaata

SEQ ID NO: 8757 - DNA, 20 bp, synthetic construct
  misc_feature 1..20: note = Description of Artificial Sequence: Synthetic oligonucleotide
  misc_feature 1..20: note = Target: SCN10A; (+) strand; PAM type: NNGRRT; PAM sequence: ATGGAT
  source 1..20: mol_type = other DNA
atgaaagcagggaatagtga

SEQ ID NO: 8758 - DNA, 20 bp, synthetic construct
  misc_feature 1..20: note = Description of Artificial Sequence: Synthetic oligonucleotide
  misc_feature 1..20: note = Target: SCN10A; (+) strand; PAM type: NNGRRT; PAM sequence: GTGGAT
  source 1..20: mol_type = other DNA
tgaatggatagatgagatag

SEQ ID NO: 8759 - DNA, 20 bp, synthetic construct
  misc_feature 1..20: note = Description of Artificial Sequence: Synthetic oligonucleotide
  misc_feature 1..20: note = Target: SCN10A; (+) strand; PAM type: NNGRRT; PAM sequence: AAGGAT
  source 1..20: mol_type = other DNA
atgagataggtggataagag

SEQ ID NO: 8760 - DNA, 20 bp, synthetic construct
  misc_feature 1..20: note = Description of Artificial Sequence: Synthetic oligonucleotide
  misc_feature 1..20: note = Target: SCN10A; (+) strand; PAM type: NNGRRT; PAM sequence: ATGGAT
  source 1..20: mol_type = other DNA
gataggtggataagagaagg

SEQ ID NO: 8761 - DNA, 20 bp, synthetic construct
  misc_feature 1..20: note = Description of Artificial Sequence: Synthetic oligonucleotide
  misc_feature 1..20: note = Target: SCN10A; (+) strand; PAM type: NNGRRT; PAM sequence: CTGGGT
  source 1..20: mol_type = other DNA
gataagagaaggatggatgg

SEQ ID NO: 8762 - DNA, 20 bp, synthetic construct
  misc_feature 1..20: note = Description of Artificial Sequence: Synthetic oligonucleotide
  misc_feature 1..20: note = Target: SCN10A; (+) strand; PAM type: NNGRRT; PAM sequence: ATGAAT
  source 1..20: mol_type = other DNA
ctgggtaaaatgactaatgc

SEQ ID NO: 8763 - DNA, 20 bp, synthetic construct
  misc_feature 1..20: note = Description of Artificial Sequence: Synthetic oligonucleotide
  misc_feature 1..20: note = Target: SCN10A; (+) strand; PAM type: NNGRRT; PAM sequence: CAGAAT
  source 1..20: mol_type = other DNA
tggaaagatggggagctgga

SEQ ID NO: 8764 - DNA, 20 bp, synthetic construct
  misc_feature 1..20: note = Description of Artificial Sequence: Synthetic oligonucleotide
  misc_feature 1..20: note = Target: SCN10A; (+) strand; PAM type: NNGRRT; PAM sequence: ATGAAT
  source 1..20: mol_type = other DNA
tggggagctggacagaatag

SEQ ID NO: 8765 - DNA, 20 bp, synthetic construct
  misc_feature 1..20: note = Description of Artificial Sequence: Synthetic oligonucleotide
  misc_feature 1..20: note = Target: SCN10A; (+) strand; PAM type: NNGRRT; PAM sequence: TGGAAT
  source 1..20: mol_type = other DNA
agctggacagaatagatgaa

SEQ ID NO: 8766 - DNA, 20 bp, synthetic construct
  misc_feature 1..20: note = Description of Artificial Sequence: Synthetic oligonucleotide
  misc_feature 1..20: note = Target: SCN10A; (+) strand; PAM type: NNGRRT; PAM sequence: GTGAAT
  source 1..20: mol_type = other DNA
tagatgaatggaataaatta

SEQ ID NO: 8767 - DNA, 20 bp, synthetic construct
  misc_feature 1..20: note = Description of Artificial Sequence: Synthetic oligonucleotide
  misc_feature 1..20: note = Target: SCN10A; (+) strand; PAM type: NNGRRT; PAM sequence: TAGGAT
  source 1..20: mol_type = other DNA
gtgaatgactggaaggttga

SEQ ID NO: 8768 - DNA, 20 bp, synthetic construct
  misc_feature 1..20: note = Description of Artificial Sequence: Synthetic oligonucleotide
  misc_feature 1..20: note = Target: SCN10A; (+) strand; PAM type: NNGRRT; PAM sequence: ATGGAT
  source 1..20: mol_type = other DNA
atgactggaaggttgatagg

SEQ ID NO: 8769 - DNA, 20 bp, synthetic construct
  misc_feature 1..20: note = Description of Artificial Sequence: Synthetic oligonucleotide
  misc_feature 1..20: note = Target: SCN10A; (+) strand; PAM type: NNGRRT; PAM sequence: ATGAAT
  source 1..20: mol_type = other DNA
ctggaaggttgataggatgg

SEQ ID NO: 8770 - DNA, 20 bp, synthetic construct
  misc_feature 1..20: note = Description of Artificial Sequence: Synthetic oligonucleotide
  misc_feature 1..20: note = Target: SCN10A; (+) strand; PAM type: NNGRRT; PAM sequence: ATGGAT
  source 1..20: mol_type = other DNA
aaggttgataggatggatga

SEQ ID NO: 8771 - DNA, 20 bp, synthetic construct
  misc_feature 1..20: note = Description of Artificial Sequence: Synthetic oligonucleotide
  misc_feature 1..20: note = Target: SCN10A; (+) strand; PAM type: NNGRRT; PAM sequence: ATGAAT
  source 1..20: mol_type = other DNA
ataggatggatgaatggatg

SEQ ID NO: 8772 - DNA, 20 bp, synthetic construct
  misc_feature 1..20: note = Description of Artificial Sequence: Synthetic oligonucleotide
  misc_feature 1..20: note = Target: SCN10A; (+) strand; PAM type: NNGRRT; PAM sequence: AGGGAT
  source 1..20: mol_type = other DNA
ggatgatgaatggaagggaa

SEQ ID NO: 8773 - DNA, 20 bp, synthetic construct
  misc_feature 1..20: note = Description of Artificial Sequence: Synthetic oligonucleotide
  misc_feature 1..20: note = Target: SCN10A; (+) strand; PAM type: NNGRRT; PAM sequence: ATGAAT
  source 1..20: mol_type = other DNA
gatgaatggaagggaaaggg

SEQ ID NO: 8774 - DNA, 20 bp, synthetic construct
  misc_feature 1..20: note = Description of Artificial Sequence: Synthetic oligonucleotide
  misc_feature 1..20: note = Target: SCN10A; (+) strand; PAM type: NNGRRT; PAM sequence: AAGAAT
  source 1..20: mol_type = other DNA
acagataagtggaagaaagg

SEQ ID NO: 8775 - DNA, 20 bp, synthetic construct
  misc_feature 1..20: note = Description of Artificial Sequence: Synthetic oligonucleotide
  misc_feature 1..20: note = Target: SCN10A; (+) strand; PAM type: NNGRRT; PAM sequence: ATGGAT
  source 1..20: mol_type = other DNA
gtggaagaaaggaagaatag

SEQ ID NO: 8776 - DNA, 20 bp, synthetic construct
  misc_feature 1..20: note = Description of Artificial Sequence: Synthetic oligonucleotide
  misc_feature 1..20: note = Target: SCN10A; (+) strand; PAM type: NNGRRT; PAM sequence: AAGAAT
  source 1..20: mol_type = other DNA
atagatggataggttgaaac

SEQ ID NO: 8777 - DNA, 20 bp, synthetic construct
  misc_feature 1..20: note = Description of Artificial Sequence: Synthetic oligonucleotide
  misc_feature 1..20: note = Target: SCN10A; (+) strand; PAM type: NNGRRT; PAM sequence: AAGAAT
  source 1..20: mol_type = other DNA
aaacaagaatggaaagatag

SEQ ID NO: 8778 - DNA, 20 bp, synthetic construct
  misc_feature 1..20: note = Description of Artificial Sequence: Synthetic oligonucleotide
  misc_feature 1..20: note = Target: SCN10A; (+) strand; PAM type: NNGRRT; PAM sequence: ATGAGT
  source 1..20: mol_type = other DNA
aagaatggaaagatagaaga

SEQ ID NO: 8779 - DNA, 20 bp, synthetic construct
  misc_feature 1..20: note = Description of Artificial Sequence: Synthetic oligonucleotide
  misc_feature 1..20: note = Target: SCN10A; (+) strand; PAM type: NNGRRT; PAM sequence: GTGGAT
  source 1..20: mol_type = other DNA
atggaaagatagaagaatga

SEQ ID NO: 8780 - DNA, 20 bp, synthetic construct
  misc_feature 1..20: note = Description of Artificial Sequence: Synthetic oligonucleotide
  misc_feature 1..20: note = Target: SCN10A; (+) strand; PAM type: NNGRRT; PAM sequence: AAGGAT
  source 1..20: mol_type = other DNA
atagaagaatgagtggatag

SEQ ID NO: 8781 - DNA, 20 bp, synthetic construct
  misc_feature 1..20: note = Description of Artificial Sequence: Synthetic oligonucleotide
  misc_feature 1..20: note = Target: SCN10A; (+) strand; PAM type: NNGRRT; PAM sequence: ATGAGT
  source 1..20: mol_type = other DNA
aagaatgagtggatagaagg

SEQ ID NO: 8782 - DNA, 20 bp, synthetic construct
  misc_feature 1..20: note = Description of Artificial Sequence: Synthetic oligonucleotide
  misc_feature 1..20: note = Target: SCN10A; (+) strand; PAM type: NNGRRT; PAM sequence: GTGAGT
  source 1..20: mol_type = other DNA
atgagtggatagaaggatga

SEQ ID NO: 8783 - DNA, 20 bp, synthetic construct
  misc_feature 1..20: note = Description of Artificial Sequence: Synthetic oligonucleotide
  misc_feature 1..20: note = Target: SCN10A; (+) strand; PAM type: NNGRRT; PAM sequence: TTGGAT
  source 1..20: mol_type = other DNA
atgagtgagtagaagcatgc

SEQ ID NO: 8784 - DNA, 20 bp, synthetic construct
  misc_feature 1..20: note = Description of Artificial Sequence: Synthetic oligonucleotide
  misc_feature 1..20: note = Target: SCN10A; (+) strand; PAM type: NNGRRT; PAM sequence: GTGAAT
  source 1..20: mol_type = other DNA
catgcttggatggaagatgc

SEQ ID NO: 8785 - DNA, 20 bp, synthetic construct
  misc_feature 1..20: note = Description of Artificial Sequence: Synthetic oligonucleotide
  misc_feature 1..20: note = Target: SCN10A; (+) strand; PAM type: NNGRRT; PAM sequence: ATGAGT
  source 1..20: mol_type = other DNA
cttggatggaagatgcgtga

SEQ ID NO: 8786 - DNA, 20 bp, synthetic construct
  misc_feature 1..20: note = Description of Artificial Sequence: Synthetic oligonucleotide
  misc_feature 1..20: note = Target: SCN10A; (+) strand; PAM type: NNGRRT; PAM sequence: CAGAAT
  source 1..20: mol_type = other DNA
aagatgcgtgaatgagtgaa

SEQ ID NO: 8787 - DNA, 20 bp, synthetic construct
  misc_feature 1..20: note = Description of Artificial Sequence: Synthetic oligonucleotide
  misc_feature 1..20: note = Target: SCN10A; (+) strand; PAM type: NNGRRT; PAM sequence: TTGGAT
  source 1..20: mol_type = other DNA
aatgttagatgattggacag

SEQ ID NO: 8788 - DNA, 20 bp, synthetic construct
  misc_feature 1..20: note = Description of Artificial Sequence: Synthetic oligonucleotide
  misc_feature 1..20: note = Target: SCN10A; (+) strand; PAM type: NNGRRT; PAM sequence: AAGAAT
  source 1..20: mol_type = other DNA
atgattggacagttggatag

SEQ ID NO: 8789 - DNA, 20 bp, synthetic construct
  misc_feature 1..20: note = Description of Artificial Sequence: Synthetic oligonucleotide
  misc_feature 1..20: note = Target: SCN10A; (+) strand; PAM type: NNGRRT; PAM sequence: ATGAAT
  source 1..20: mol_type = other DNA
ttggacagttggatagaaga

SEQ ID NO: 8790 - DNA, 20 bp, synthetic construct
  misc_feature 1..20: note = Description of Artificial Sequence: Synthetic oligonucleotide
  misc_feature 1..20: note = Target: SCN10A; (+) strand; PAM type: NNGRRT; PAM sequence: AAGGGT
  source 1..20: mol_type = other DNA
atcaaaagatagaaagatat

SEQ ID NO: 8791 - DNA, 20 bp, synthetic construct
  misc_feature 1..20: note = Description of Artificial Sequence: Synthetic oligonucleotide
  misc_feature 1..20: note = Target: SCN10A; (+) strand; PAM type: NNGRRT; PAM sequence: AAGGAT
  source 1..20: mol_type = other DNA
gatagaaagatataagggtt

SEQ ID NO: 8792 - DNA, 20 bp, synthetic construct
  misc_feature 1..20: note = Description of Artificial Sequence: Synthetic oligonucleotide
  misc_feature 1..20: note = Target: SCN10A; (+) strand; PAM type: NNGRRT; PAM sequence: ATGAAT
  source 1..20: mol_type = other DNA
agatataagggttaaggatg

SEQ ID NO: 8793 - DNA, 20 bp, synthetic construct
  misc_feature 1..20: note = Description of Artificial Sequence: Synthetic oligonucleotide
  misc_feature 1..20: note = Target: SCN10A; (+) strand; PAM type: NNGRRT; PAM sequence: TAGAAT
  source 1..20: mol_type = other DNA
tgaatagatggaaggaagtt

SEQ ID NO: 8794 - DNA, 20 bp, synthetic construct
  misc_feature 1..20: note = Description of Artificial Sequence: Synthetic oligonucleotide
  misc_feature 1..20: note = Target: SCN10A; (+) strand; PAM type: NNGRRT; PAM sequence: AAGAAT
  source 1..20: mol_type = other DNA
gcagaagagaagagggaaag

SEQ ID NO: 8795 - DNA, 20 bp, synthetic construct
  misc_feature 1..20: note = Description of Artificial Sequence: Synthetic oligonucleotide
  misc_feature 1..20: note = Target: SCN10A; (+) strand; PAM type: NNGRRT; PAM sequence: GGGAAT
  source 1..20: mol_type = other DNA
gagaagagggaaagaagaat

SEQ ID NO: 8796 - DNA, 20 bp, synthetic construct
  misc_feature 1..20: note = Description of Artificial Sequence: Synthetic oligonucleotide
  misc_feature 1..20: note = Target: SCN10A; (+) strand; PAM type: NNGRRT; PAM sequence: ATGGAT
  source 1..20: mol_type = other DNA
agagggaaagaagaatggga

SEQ ID NO: 8797 - DNA, 20 bp, synthetic construct
  misc_feature 1..20: note = Description of Artificial Sequence: Synthetic oligonucleotide
  misc_feature 1..20: note = Target: SCN10A; (+) strand; PAM type: NNGRRT; PAM sequence: ATGGAT
  source 1..20: mol_type = other DNA
ggaaagaagaatgggaatgg

SEQ ID NO: 8798 - DNA, 20 bp, synthetic construct
  misc_feature 1..20: note = Description of Artificial Sequence: Synthetic oligonucleotide
  misc_feature 1..20: note = Target: SCN10A; (+) strand; PAM type: NNGRRT; PAM sequence: ATGGAT
  source 1..20: mol_type = other DNA
tacagctggaagaaataaag

SEQ ID NO: 8799 - DNA, 20 bp, synthetic construct
  misc_feature 1..20: note = Description of Artificial Sequence: Synthetic oligonucleotide
  misc_feature 1..20: note = Target: SCN10A; (+) strand; PAM type: NNGRRT; PAM sequence: ATGGAT
  source 1..20: mol_type = other DNA
gctggaagaaataaagatgg

SEQ ID NO: 8800 - DNA, 20 bp, synthetic construct
  misc_feature 1..20: note = Description of Artificial Sequence: Synthetic oligonucleotide
  misc_feature 1..20: note = Target: SCN10A; (+) strand; PAM type: NNGRRT; PAM sequence: CTGAAT
  source 1..20: mol_type = other DNA
ggaggaaggaaaaaggaaga

SEQ ID NO: 8801 - DNA, 20 bp, synthetic construct
  misc_feature 1..20: note = Description of Artificial Sequence: Synthetic oligonucleotide
  misc_feature 1..20: note = Target: SCN10A; (+) strand; PAM type: NNGRRT; PAM sequence: TTGGAT
  source 1..20: mol_type = other DNA
gaaaaaggaagactgaatgg

SEQ ID NO: 8802 - DNA, 20 bp, synthetic construct
  misc_feature 1..20: note = Description of Artificial Sequence: Synthetic oligonucleotide
  misc_feature 1..20: note = Target: SCN10A; (+) strand; PAM type: NNGRRT; PAM sequence: AAGGAT
  source 1..20: mol_type = other DNA
aaggtgaaatgtatggaagg

SEQ ID NO: 8803 - DNA, 20 bp, synthetic construct
  misc_feature 1..20: note = Description of Artificial Sequence: Synthetic oligonucleotide
  misc_feature 1..20: note = Target: SCN10A; (+) strand; PAM type: NNGRRT; PAM sequence: ATGGAT
  source 1..20: mol_type = other DNA
tgaaatgtatggaaggaagg

SEQ ID NO: 8804 - DNA, 20 bp, synthetic construct
  misc_feature 1..20: note = Description of Artificial Sequence: Synthetic oligonucleotide
  misc_feature 1..20: note = Target: SCN10A; (+) strand; PAM type: NNGRRT; PAM sequence: AAGAAT
  source 1..20: mol_type = other DNA
aaggatggatggttggaagg

SEQ ID NO: 8805 - DNA, 20 bp, synthetic construct
  misc_feature 1..20: note = Description of Artificial Sequence: Synthetic oligonucleotide
  misc_feature 1..20: note = Target: SCN10A; (+) strand; PAM type: NNGRRT; PAM sequence: ATGGAT
  source 1..20: mol_type = other DNA
aaggaagaatcagtaggaag

SEQ ID NO: 8806 - DNA, 20 bp, synthetic construct
  misc_feature 1..20: note = Description of Artificial Sequence: Synthetic oligonucleotide
  misc_feature 1..20: note = Target: SCN10A; (+) strand; PAM type: NNGRRT; PAM sequence: ATGAGT
  source 1..20: mol_type = other DNA
tcagtaggaagatggatgaa

SEQ ID NO: 8807 - DNA, 20 bp, synthetic construct
  misc_feature 1..20: note = Description of Artificial Sequence: Synthetic oligonucleotide
  misc_feature 1..20: note = Target: SCN10A; (+) strand; PAM type: NNGRRT; PAM sequence: AGGAGT
  source 1..20: mol_type = other DNA
ctggtgagatcaacataagc

SEQ ID NO: 8808 - DNA, 20 bp, synthetic construct
  misc_feature 1..20: note = Description of Artificial Sequence: Synthetic oligonucleotide
  misc_feature 1..20: note = Target: SCN10A; (+) strand; PAM type: NNGRRT; PAM sequence: AGGGGT
  source 1..20: mol_type = other DNA
aggagtgactgtgcccccaa

SEQ ID NO: 8809 - DNA, 20 bp, synthetic construct
  misc_feature 1..20: note = Description of Artificial Sequence: Synthetic oligonucleotide
  misc_feature 1..20: note = Target: SCN10A; (+) strand; PAM type: NNGRRT; PAM sequence: CGGAAT
  source 1..20: mol_type = other DNA
cccccaaaggggtgggacac

SEQ ID NO: 8810 - DNA, 20 bp, synthetic construct
  misc_feature 1..20: note = Description of Artificial Sequence: Synthetic oligonucleotide
  misc_feature 1..20: note = Target: SCN10A; (+) strand; PAM type: NNGRRT; PAM sequence: ATGAAT
  source 1..20: mol_type = other DNA
aaataattttcctttcattt

SEQ ID NO: 8811 - DNA, 20 bp, synthetic construct
  misc_feature 1..20: note = Description of Artificial Sequence: Synthetic oligonucleotide
  misc_feature 1..20: note = Target: SCN10A; (+) strand; PAM type: NNGRRT; PAM sequence: CAGAAT
  source 1..20: mol_type = other DNA
gaataattatttcatatgca

SEQ ID NO: 8812 - DNA, 20 bp, synthetic construct
  misc_feature 1..20: note = Description of Artificial Sequence: Synthetic oligonucleotide
  misc_feature 1..20: note = Target: SCN10A; (+) strand; PAM type: NNGRRT; PAM sequence: GAGAAT
  source 1..20: mol_type = other DNA
gcattggcatcagggaagaa

SEQ ID NO: 8813 - DNA, 20 bp, synthetic construct
  misc_feature 1..20: note = Description of Artificial Sequence: Synthetic oligonucleotide
  misc_feature 1..20: note = Target: SCN10A; (+) strand; PAM type: NNGRRT; PAM sequence: TTGAAT
  source 1..20: mol_type = other DNA
ggcatcagggaagaagagaa

SEQ ID NO: 8814 - DNA, 20 bp, synthetic construct
  misc_feature 1..20: note = Description of Artificial Sequence: Synthetic oligonucleotide
  misc_feature 1..20: note = Target: SCN10A; (+) strand; PAM type: NNGRRT; PAM sequence: CAGAAT
  source 1..20: mol_type = other DNA
tgccagcacaggaggctgga

SEQ ID NO: 8815 - DNA, 20 bp, synthetic construct
  misc_feature 1..20: note = Description of Artificial Sequence: Synthetic oligonucleotide
  misc_feature 1..20: note = Target: SCN10A; (+) strand; PAM type: NNGRRT; PAM sequence: TTGAGT
  source 1..20: mol_type = other DNA
accttgctgctggcagctgc

SEQ ID NO: 8816 - DNA, 20 bp, synthetic construct
  misc_feature 1..20: note = Description of Artificial Sequence: Synthetic oligonucleotide
  misc_feature 1..20: note = Target: SCN10A; (+) strand; PAM type: NNGRRT; PAM sequence: AGGAAT
  source 1..20: mol_type = other DNA
agatgaggaagagatgactg

SEQ ID NO: 8817 - DNA, 20 bp, synthetic construct
  misc_feature 1..20: note = Description of Artificial Sequence: Synthetic oligonucleotide
  misc_feature 1..20: note = Target: SCN10A; (+) strand; PAM type: NNGRRT; PAM sequence: AGGGAT
  source 1..20: mol_type = other DNA
cacagtcaattctctaatgc

SEQ ID NO: 8818 - DNA, 20 bp, synthetic construct
  misc_feature 1..20: note = Description of Artificial Sequence: Synthetic oligonucleotide
  misc_feature 1..20: note = Target: SCN10A; (+) strand; PAM type: NNGRRT; PAM sequence: ATGAGT
  source 1..20: mol_type = other DNA
attactggccacaggttacc

SEQ ID NO: 8819 - DNA, 20 bp, synthetic construct
  misc_feature 1..20: note = Description of Artificial Sequence: Synthetic oligonucleotide
  misc_feature 1..20: note = Target: SCN10A; (+) strand; PAM type: NNGRRT; PAM sequence: CAGAAT
  source 1..20: mol_type = other DNA
ccacccaagaccaataagat

SEQ ID NO: 8820 - DNA, 20 bp, synthetic construct
  misc_feature 1..20: note = Description of Artificial Sequence: Synthetic oligonucleotide
  misc_feature 1..20: note = Target: SCN10A; (+) strand; PAM type: NNGRRT; PAM sequence: TGGGGT
  source 1..20: mol_type = other DNA
accaataagatcagaatctc

SEQ ID NO: 8821 - DNA, 20 bp, synthetic construct
  misc_feature 1..20: note = Description of Artificial Sequence: Synthetic oligonucleotide
  misc_feature 1..20: note = Target: SCN10A; (+) strand; PAM type: NNGRRT; PAM sequence: ATGGAT
  source 1..20: mol_type = other DNA
aaggtccagaagacccatct

SEQ ID NO: 8822 - DNA, 20 bp, synthetic construct
  misc_feature 1..20: note = Description of Artificial Sequence: Synthetic oligonucleotide
  misc_feature 1..20: note = Target: SCN10A; (+) strand; PAM type: NNGRRT; PAM sequence: TTGGAT
  source 1..20: mol_type = other DNA
gctgcatgtgtcatctcact

SEQ ID NO: 8823 - DNA, 20 bp, synthetic construct
  misc_feature 1..20: note = Description of Artificial Sequence: Synthetic oligonucleotide
  misc_feature 1..20: note = Target: SCN10A; (+) strand; PAM type: NNGRRT; PAM sequence: GAGGAT
  source 1..20: mol_type = other DNA
actttggatgtaaaaatgca

SEQ ID NO: 8824 - DNA, 20 bp, synthetic construct
  misc_feature 1..20: note = Description of Artificial Sequence: Synthetic oligonucleotide
  misc_feature 1..20: note = Target: SCN10A; (+) strand; PAM type: NNGRRT; PAM sequence: AGGGAT
  source 1..20: mol_type = other DNA
gtaaaaatgcagaggattgc

SEQ ID NO: 8825 - DNA, 20 bp, synthetic construct
  misc_feature 1..20: note = Description of Artificial Sequence: Synthetic oligonucleotide
  misc_feature 1..20: note = Target: SCN10A; (+) strand; PAM type: NNGRRT; PAM sequence: CTGAAT
  source 1..20: mol_type = other DNA
agaggattgcagggatcttt

SEQ ID NO: 8826 - DNA, 20 bp, synthetic construct
  misc_feature 1..20: note = Description of Artificial Sequence: Synthetic oligonucleotide
  misc_feature 1..20: note = Target: SCN10A; (+) strand; PAM type: NNGRRT; PAM sequence: ATGGGT
  source 1..20: mol_type = other DNA
ctgcctggactttaccactc

SEQ ID NO: 8827 - DNA, 20 bp, synthetic construct
  misc_feature 1..20: note = Description of Artificial Sequence: Synthetic oligonucleotide
  misc_feature 1..20: note = Target: SCN10A; (+) strand; PAM type: NNGRRT; PAM sequence: TGGAGT
  source 1..20: mol_type = other DNA
aaatgctcaaaacttttctt

SEQ ID NO: 8828 - DNA, 20 bp, synthetic construct
  misc_feature 1..20: note = Description of Artificial Sequence: Synthetic oligonucleotide
  misc_feature 1..20: note = Target: SCN10A; (+) strand; PAM type: NNGRRT; PAM sequence: AGGAGT
  source 1..20: mol_type = other DNA
cctttgccctagctgtagcc

SEQ ID NO: 8829 - DNA, 20 bp, synthetic construct
  misc_feature 1..20: note = Description of Artificial Sequence: Synthetic oligonucleotide
  misc_feature 1..20: note = Target: SCN10A; (+) strand; PAM type: NNGRRT; PAM sequence: AAGGAT
  source 1..20: mol_type = other DNA
tcaaaggcctggaaggaaga

SEQ ID NO: 8830 - DNA, 20 bp, synthetic construct
  misc_feature 1..20: note = Description of Artificial Sequence: Synthetic oligonucleotide
  misc_feature 1..20: note = Target: SCN10A; (+) strand; PAM type: NNGRRT; PAM sequence: CAGAAT
  source 1..20: mol_type = other DNA
cctggaaggaagaaaggatg

SEQ ID NO: 8831 - DNA, 20 bp, synthetic construct
  misc_feature 1..20: note = Description of Artificial Sequence: Synthetic oligonucleotide
  misc_feature 1..20: note = Target: SCN10A; (+) strand; PAM type: NNGRRT; PAM sequence: GGGGAT
  source 1..20: mol_type = other DNA
cctgaccacagtccctggaa

SEQ ID NO: 8832 - DNA, 20 bp, synthetic construct
  misc_feature 1..20: note = Description of Artificial Sequence: Synthetic oligonucleotide
  misc_feature 1..20: note = Target: SCN10A; (+) strand; PAM type: NNGRRT; PAM sequence: TGGGAT
  source 1..20: mol_type = other DNA
tttgctgtggggaggtaaag

SEQ ID NO: 8833 - DNA, 20 bp, synthetic construct
  misc_feature 1..20: note = Description of Artificial Sequence: Synthetic oligonucleotide
  misc_feature 1..20: note = Target: SCN10A; (+) strand; PAM type: NNGRRT; PAM sequence: AGGGAT
  source 1..20: mol_type = other DNA
acagccctgctgatacttgc

SEQ ID NO: 8834 - DNA, 20 bp, synthetic construct
  misc_feature 1..20: note = Description of Artificial Sequence: Synthetic oligonucleotide
  misc_feature 1..20: note = Target: SCN10A; (+) strand; PAM type: NNGRRT; PAM sequence: CTGAAT
  source 1..20: mol_type = other DNA
tgctgatacttgcagggatg

SEQ ID NO: 8835 - DNA, 20 bp, synthetic construct
  misc_feature 1..20: note = Description of Artificial Sequence: Synthetic oligonucleotide
  misc_feature 1..20: note = Target: SCN10A; (+) strand; PAM type: NNGRRT; PAM sequence: TTGGAT
  source 1..20: mol_type = other DNA
agaaagaaaaccttctcaaa

SEQ ID NO: 8836 - DNA, 20 bp, synthetic construct
  misc_feature 1..20: note = Description of Artificial Sequence: Synthetic oligonucleotide
  misc_feature 1..20: note = Target: SCN10A; (+) strand; PAM type: NNGRRT; PAM sequence: AGGGAT
  source 1..20: mol_type = other DNA
ggattttggaagtgaaccaa

SEQ ID NO: 8837 - DNA, 20 bp, synthetic construct
  misc_feature 1..20: note = Description of Artificial Sequence: Synthetic oligonucleotide
  misc_feature 1..20: note = Target: SCN10A; (+) strand; PAM type: NNGRRT; PAM sequence: ACGGAT
  source 1..20: mol_type = other DNA
gtttaaaaataaaagcatca

SEQ ID NO: 8838 - DNA, 20 bp, synthetic construct
  misc_feature 1..20: note = Description of Artificial Sequence: Synthetic oligonucleotide
  misc_feature 1..20: note = Target: SCN10A; (+) strand; PAM type: NNGRRT; PAM sequence: AAGAAT
  source 1..20: mol_type = other DNA
cagtttacaaaaatgaaagt

SEQ ID NO: 8839 - DNA, 20 bp, synthetic construct
  misc_feature 1..20: note = Description of Artificial Sequence: Synthetic oligonucleotide
  misc_feature 1..20: note = Target: SCN10A; (+) strand; PAM type: NNGRRT; PAM sequence: AAGAAT
  source 1..20: mol_type = other DNA
tcgccaacacacctctgaaa

SEQ ID NO: 8840 - DNA, 20 bp, synthetic construct
  misc_feature 1..20: note = Description of Artificial Sequence: Synthetic oligonucleotide
  misc_feature 1..20: note = Target: SCN10A; (+) strand; PAM type: NNGRRT; PAM sequence: AAGAAT
  source 1..20: mol_type = other DNA
tcagactggtggagatggaa

SEQ ID NO: 8841 - DNA, 20 bp, synthetic construct
  misc_feature 1..20: note = Description of Artificial Sequence: Synthetic oligonucleotide
  misc_feature 1..20: note = Target: SCN10A; (+) strand; PAM type: NNGRRT; PAM sequence: TAGGAT
  source 1..20: mol_type = other DNA
gaaaagaataggggaaaccc

SEQ ID NO: 8842 - DNA, 20 bp, synthetic construct
  misc_feature 1..20: note = Description of Artificial Sequence: Synthetic oligonucleotide
  misc_feature 1..20: note = Target: SCN10A; (+) strand; PAM type: NNGRRT; PAM sequence: CGGAGT
  source 1..20: mol_type = other DNA
ttttttttttttttttgaga

SEQ ID NO: 8843 - DNA, 20 bp, synthetic construct
  misc_feature 1..20: note = Description of Artificial Sequence: Synthetic oligonucleotide
  misc_feature 1..20: note = Target: SCN10A; (+) strand; PAM type: NNGRRT; PAM sequence: TGGAGT
  source 1..20: mol_type = other DNA
tctcgctctgtcgcccaggc

SEQ ID NO: 8844 - DNA, 20 bp, synthetic construct
  misc_feature 1..20: note = Description of Artificial Sequence: Synthetic oligonucleotide
  misc_feature 1..20: note = Target: SCN10A; (+) strand; PAM type: NNGRRT; PAM sequence: CGGGAT
  source 1..20: mol_type = other DNA
cccaggctggagtgcagtag

SEQ ID NO: 8845 - DNA, 20 bp, synthetic construct
  misc_feature 1..20: note = Description of Artificial Sequence: Synthetic oligonucleotide
  misc_feature 1..20: note = Target: SCN10A; (+) strand; PAM type: NNGRRT; PAM sequence: CGGGGT
  source 1..20: mol_type = other DNA
ttttgtatttttagtagaga

SEQ ID NO: 8846 - DNA, 20 bp, synthetic construct
  misc_feature 1..20: note = Description of Artificial Sequence: Synthetic oligonucleotide
  misc_feature 1..20: note = Target: SCN10A; (+) strand; PAM type: NNGRRT; PAM sequence: CGGGAT
  source 1..20: mol_type = other DNA
cggggtttcaccgttttagc

SEQ ID NO: 8847 - DNA, 20 bp, synthetic construct
  misc_feature 1..20: note = Description of Artificial Sequence: Synthetic oligonucleotide
  misc_feature 1..20: note = Target: SCN10A; (+) strand; PAM type: NNGRRT; PAM sequence: TGGGAT
  source 1..20: mol_type = other DNA
gcctcagcctcccaaagtgc

SEQ ID NO: 8848 - DNA, 20 bp, synthetic construct
  misc_feature 1..20: note = Description of Artificial Sequence: Synthetic oligonucleotide
  misc_feature 1..20: note = Target: SCN10A; (+) strand; PAM type: NNGRRT; PAM sequence: AGGAGT
  source 1..20: mol_type = other DNA
cactcttacaagtgactggc

SEQ ID NO: 8849 - DNA, 20 bp, synthetic construct
  misc_feature 1..20: note = Description of Artificial Sequence: Synthetic oligonucleotide
  misc_feature 1..20: note = Target: SCN10A; (+) strand; PAM type: NNGRRT; PAM sequence: GGGAGT
  source 1..20: mol_type = other DNA
gcccctatccttcatctgct

SEQ ID NO: 8850 - DNA, 20 bp, synthetic construct
  misc_feature 1..20: note = Description of Artificial Sequence: Synthetic oligonucleotide
  misc_feature 1..20: note = Target: SCN10A; (+) strand; PAM type: NNGRRT; PAM sequence: ATGGAT
  source 1..20: mol_type = other DNA
gtgtcggctgctaatagttc

SEQ ID NO: 8851 - DNA, 20 bp, synthetic construct
  misc_feature 1..20: note = Description of Artificial Sequence: Synthetic oligonucleotide
  misc_feature 1..20: note = Target: SCN10A; (+) strand; PAM type: NNGRRT; PAM sequence: GGGGAT
  source 1..20: mol_type = other DNA
tcagccagggacagtgacag

SEQ ID NO: 8852 - DNA, 20 bp, synthetic construct
  misc_feature 1..20: note = Description of Artificial Sequence: Synthetic oligonucleotide
  misc_feature 1..20: note = Target: SCN10A; (+) strand; PAM type: NNGRRT; PAM sequence: TGGGAT
  source 1..20: mol_type = other DNA
ttgtgcttcagggctttcca

SEQ ID NO: 8853 - DNA, 20 bp, synthetic construct
  misc_feature 1..20: note = Description of Artificial Sequence: Synthetic oligonucleotide
  misc_feature 1..20: note = Target: SCN10A; (+) strand; PAM type: NNGRRT; PAM sequence: CCGGAT
  source 1..20: mol_type = other DNA
ttccatgggatcagctgaag

SEQ ID NO: 8854 - DNA, 20 bp, synthetic construct
  misc_feature 1..20: note = Description of Artificial Sequence: Synthetic oligonucleotide
  misc_feature 1..20: note = Target: SCN10A; (+) strand; PAM type: NNGRRT; PAM sequence: GGGAGT
  source 1..20: mol_type = other DNA
agattatccaacgtctctaa

SEQ ID NO: 8855 - DNA, 20 bp, synthetic construct
  misc_feature 1..20: note = Description of Artificial Sequence: Synthetic oligonucleotide
  misc_feature 1..20: note = Target: SCN10A; (+) strand; PAM type: NNGRRT; PAM sequence: GGGAAT
  source 1..20: mol_type = other DNA
tctctaagggagtacacaca

SEQ ID NO: 8856 - DNA, 20 bp, synthetic construct
  misc_feature 1..20: note = Description of Artificial Sequence: Synthetic oligonucleotide
  misc_feature 1..20: note = Target: SCN10A; (+) strand; PAM type: NNGRRT; PAM sequence: TTGAGT
  source 1..20: mol_type = other DNA
gaagtaaacatagagattgg

SEQ ID NO: 8857 - DNA, 20 bp, synthetic construct
  misc_feature 1..20: note = Description of Artificial Sequence: Synthetic oligonucleotide
  misc_feature 1..20: note = Target: SCN10A; (+) strand; PAM type: NNGRRT; PAM sequence: AGGAAT
  source 1..20: mol_type = other DNA
attggttgagtaaattataa

SEQ ID NO: 8858 - DNA, 20 bp, synthetic construct
  misc_feature 1..20: note = Description of Artificial Sequence: Synthetic oligonucleotide
  misc_feature 1..20: note = Target: SCN10A; (+) strand; PAM type: NNGRRT; PAM sequence: TAGAAT
  source 1..20: mol_type = other DNA
agaaaaatgtactgaggtta

SEQ ID NO: 8859 - DNA, 20 bp, synthetic construct
  misc_feature 1..20: note = Description of Artificial Sequence: Synthetic oligonucleotide
  misc_feature 1..20: note = Target: SCN10A; (+) strand; PAM type: NNGRRT; PAM sequence: GTGAGT
  source 1..20: mol_type = other DNA
gtataccagcatgttttcaa

SEQ ID NO: 8860 - DNA, 20 bp, synthetic construct
  misc_feature 1..20: note = Description of Artificial Sequence: Synthetic oligonucleotide
  misc_feature 1..20: note = Target: SCN10A; (+) strand; PAM type: NNGRRT; PAM sequence: TTGAGT
  source 1..20: mol_type = other DNA
gttttcaagtgagtttctct

SEQ ID NO: 8861 - DNA, 20 bp, synthetic construct
  misc_feature 1..20: note = Description of Artificial Sequence: Synthetic oligonucleotide
  misc_feature 1..20: note = Target: SCN10A; (+) strand; PAM type: NNGRRT; PAM sequence: ATGGAT
  source 1..20: mol_type = other DNA
tctctttgagtgatagggaa

SEQ ID NO: 8862 - DNA, 20 bp, synthetic construct
  misc_feature 1..20: note = Description of Artificial Sequence: Synthetic oligonucleotide
  misc_feature 1..20: note = Target: SCN10A; (+) strand; PAM type: NNGRRT; PAM sequence: GGGAAT
  source 1..20: mol_type = other DNA
gcaggtctgagcttcctcct

SEQ ID NO: 8863 - DNA, 20 bp, synthetic construct
  misc_feature 1..20: note = Description of Artificial Sequence: Synthetic oligonucleotide
  misc_feature 1..20: note = Target: SCN10A; (+) strand; PAM type: NNGRRT; PAM sequence: GGGGGT
  source 1..20: mol_type = other DNA
agcttcctcctgggaatgtg

SEQ ID NO: 8864 - DNA, 20 bp, synthetic construct
  misc_feature 1..20: note = Description of Artificial Sequence: Synthetic oligonucleotide
  misc_feature 1..20: note = Target: SCN10A; (+) strand; PAM type: NNGRRT; PAM sequence: CGGGGT
  source 1..20: mol_type = other DNA
tgggaatgtggggggtggac

SEQ ID NO: 8865 - DNA, 20 bp, synthetic construct
  misc_feature 1..20: note = Description of Artificial Sequence: Synthetic oligonucleotide
  misc_feature 1..20: note = Target: SCN10A; (+) strand; PAM type: NNGRRT; PAM sequence: CAGGAT
  source 1..20: mol_type = other DNA
cacacagttccccctccacc

SEQ ID NO: 8866 - DNA, 20 bp, synthetic construct
  misc_feature 1..20: note = Description of Artificial Sequence: Synthetic oligonucleotide
  misc_feature 1..20: note = Target: SCN10A; (+) strand; PAM type: NNGRRT; PAM sequence: GAGAGT
  source 1..20: mol_type = other DNA
tatttagtaggttgttttta

SEQ ID NO: 8867 - DNA, 20 bp, synthetic construct
  misc_feature 1..20: note = Description of Artificial Sequence: Synthetic oligonucleotide
  misc_feature 1..20: note = Target: SCN10A; (+) strand; PAM type: NNGRRT; PAM sequence: ATGAGT
  source 1..20: mol_type = other DNA
aatgacacatgaggcgcaag

SEQ ID NO: 8868 - DNA, 20 bp, synthetic construct
  misc_feature 1..20: note = Description of Artificial Sequence: Synthetic oligonucleotide
  misc_feature 1..20: note = Target: SCN10A; (+) strand; PAM type: NNGRRT; PAM sequence: GTGAAT
  source 1..20: mol_type = other DNA
tgagtgaaaacactgcagcc

SEQ ID NO: 8869 - DNA, 20 bp, synthetic construct
  misc_feature 1..20: note = Description of Artificial Sequence: Synthetic oligonucleotide
  misc_feature 1..20: note = Target: SCN10A; (+) strand; PAM type: NNGRRT; PAM sequence: GAGGAT
  source 1..20: mol_type = other DNA
tttagaaaatgcaaacaact

SEQ ID NO: 8870 - DNA, 20 bp, synthetic construct
  misc_feature 1..20: note = Description of Artificial Sequence: Synthetic oligonucleotide
  misc_feature 1..20: note = Target: SCN10A; (+) strand; PAM type: NNGRRT; PAM sequence: CGGAGT
  source 1..20: mol_type = other DNA
tgtctaccttggtctattgg

SEQ ID NO: 8871 - DNA, 20 bp, synthetic construct
  misc_feature 1..20: note = Description of Artificial Sequence: Synthetic oligonucleotide
  misc_feature 1..20: note = Target: SCN10A; (+) strand; PAM type: NNGRRT; PAM sequence: CTGAAT
  source 1..20: mol_type = other DNA
cttagagatgtctcccaact

SEQ ID NO: 8872 - DNA, 20 bp, synthetic construct
  misc_feature 1..20: note = Description of Artificial Sequence: Synthetic oligonucleotide
  misc_feature 1..20: note = Target: SCN10A; (+) strand; PAM type: NNGRRT; PAM sequence: GTGGGT
  source 1..20: mol_type = other DNA
aaggccttgttattcaaagt

SEQ ID NO: 8873 - DNA, 20 bp, synthetic construct
  misc_feature 1..20: note = Description of Artificial Sequence: Synthetic oligonucleotide
  misc_feature 1..20: note = Target: SCN10A; (+) strand; PAM type: NNGRRT; PAM sequence: TGGAAT
  source 1..20: mol_type = other DNA
caggccctgccacagattta

SEQ ID NO: 8874 - DNA, 20 bp, synthetic construct
  misc_feature 1..20: note = Description of Artificial Sequence: Synthetic oligonucleotide
  misc_feature 1..20: note = Target: SCN10A; (+) strand; PAM type: NNGRRT; PAM sequence: GAGAAT
  source 1..20: mol_type = other DNA
ctgccacagatttatggaat

SEQ ID NO: 8875 - DNA, 20 bp, synthetic construct
  misc_feature 1..20: note = Description of Artificial Sequence: Synthetic oligonucleotide
  misc_feature 1..20: note = Target: SCN10A; (+) strand; PAM type: NNGRRT; PAM sequence: AGGAGT
  source 1..20: mol_type = other DNA
tgattttctgtgagctttaa

SEQ ID NO: 8876 - DNA, 20 bp, synthetic construct
  misc_feature 1..20: note = Description of Artificial Sequence: Synthetic oligonucleotide
  misc_feature 1..20: note = Target: SCN10A; (+) strand; PAM type: NNGRRT; PAM sequence: GAGGGT
  source 1..20: mol_type = other DNA
gccgtgtgttggggaggtca

SEQ ID NO: 8877 - DNA, 20 bp, synthetic construct
  misc_feature 1..20: note = Description of Artificial Sequence: Synthetic oligonucleotide
  misc_feature 1..20: note = Target: SCN10A; (+) strand; PAM type: NNGRRT; PAM sequence: CGGGAT
  source 1..20: mol_type = other DNA
gggtgggaagccaggggctt

SEQ ID NO: 8878 - DNA, 20 bp, synthetic construct
  misc_feature 1..20: note = Description of Artificial Sequence: Synthetic oligonucleotide
  misc_feature 1..20: note = Target: SCN10A; (+) strand; PAM type: NNGRRT; PAM sequence: CTGGGT
  source 1..20: mol_type = other DNA
gggattaaataagggcaaag

SEQ ID NO: 8879 - DNA, 20 bp, synthetic construct
  misc_feature 1..20: note = Description of Artificial Sequence: Synthetic oligonucleotide
  misc_feature 1..20: note = Target: SCN10A; (+) strand; PAM type: NNGRRT; PAM sequence: TTGGGT
  source 1..20: mol_type = other DNA
tgggttttgctactgacaag

SEQ ID NO: 8880 - DNA, 20 bp, synthetic construct
  misc_feature 1..20: note = Description of Artificial Sequence: Synthetic oligonucleotide
  misc_feature 1..20: note = Target: SCN10A; (+) strand; PAM type: NNGRRT; PAM sequence: TTGAGT
  source 1..20: mol_type = other DNA
ggacaagccttttaaacatt

SEQ ID NO: 8881 - DNA, 20 bp, synthetic construct
  misc_feature 1..20: note = Description of Artificial Sequence: Synthetic oligonucleotide
  misc_feature 1..20: note = Target: SCN10A; (+) strand; PAM type: NNGRRT; PAM sequence: TTGGAT
  source 1..20: mol_type = other DNA
ctgatgcagctccagggcct

SEQ ID NO: 8882 - DNA, 20 bp, synthetic construct
  misc_feature 1..20: note = Description of Artificial Sequence: Synthetic oligonucleotide
  misc_feature 1..20: note = Target: SCN10A; (+) strand; PAM type: NNGRRT; PAM sequence: GAGGAT
  source 1..20: mol_type = other DNA
ttgtaggagattcctatctg

SEQ ID NO: 8883 - DNA, 20 bp, synthetic construct
  misc_feature 1..20: note = Description of Artificial Sequence: Synthetic oligonucleotide
  misc_feature 1..20: note = Target: SCN10A; (+) strand; PAM type: NNGRRT; PAM sequence: CAGGAT
  source 1..20: mol_type = other DNA
accagagatccactgctgag

SEQ ID NO: 8884 - DNA, 20 bp, synthetic construct
  misc_feature 1..20: note = Description of Artificial Sequence: Synthetic oligonucleotide
  misc_feature 1..20: note = Target: SCN10A; (+) strand; PAM type: NNGRRT; PAM sequence: GCGAAT
  source 1..20: mol_type = other DNA
agtttgcagcagggacagtg

SEQ ID NO: 8885 - DNA, 20 bp, synthetic construct
  misc_feature 1..20: note = Description of Artificial Sequence: Synthetic oligonucleotide
  misc_feature 1..20: note = Target: SCN10A; (+) strand; PAM type: NNGRRT; PAM sequence: GTGGGT
  source 1..20: mol_type = other DNA
gtggggagaggtgactgatg

SEQ ID NO: 8886 - DNA, 20 bp, synthetic construct
  misc_feature 1..20: note = Description of Artificial Sequence: Synthetic oligonucleotide
  misc_feature 1..20: note = Target: SCN10A; (+) strand; PAM type: NNGRRT; PAM sequence: GGGGAT
  source 1..20: mol_type = other DNA
ggtgatggccagtgggcaaa

SEQ ID NO: 8887 - DNA, 20 bp, synthetic construct
  misc_feature 1..20: note = Description of Artificial Sequence: Synthetic oligonucleotide
  misc_feature 1..20: note = Target: SCN10A; (+) strand; PAM type: NNGRRT; PAM sequence: TGGAAT
  source 1..20: mol_type = other DNA
cttggaaaaaaattctttcc

SEQ ID NO: 8888 - DNA, 20 bp, synthetic construct
  misc_feature 1..20: note = Description of Artificial Sequence: Synthetic oligonucleotide
  misc_feature 1..20: note = Target: SCN10A; (+) strand; PAM type: NNGRRT; PAM sequence: ATGGGT
  source 1..20: mol_type = other DNA
aaaaaattctttcctggaat

SEQ ID NO: 8889 - DNA, 20 bp, synthetic construct
  misc_feature 1..20: note = Description of Artificial Sequence: Synthetic oligonucleotide
  misc_feature 1..20: note = Target: SCN10A; (+) strand; PAM type: NNGRRT; PAM sequence: AGGGGT
  source 1..20: mol_type = other DNA
ttcctggaatatgggtgaag

SEQ ID NO: 8890 - DNA, 20 bp, synthetic construct
  misc_feature 1..20: note = Description of Artificial Sequence: Synthetic oligonucleotide
  misc_feature 1..20: note = Target: SCN10A; (+) strand; PAM type: NNGRRT; PAM sequence: GGGAGT
  source 1..20: mol_type = other DNA
gtgaagaggggtcccttcca

SEQ ID NO: 8891 - DNA, 20 bp, synthetic construct
  misc_feature 1..20: note = Description of Artificial Sequence: Synthetic oligonucleotide
  misc_feature 1..20: note = Target: SCN10A; (+) strand; PAM type: NNGRRT; PAM sequence: GGGGGT
  source 1..20: mol_type = other DNA
aagctacggcgtatgagcct

SEQ ID NO: 8892 - DNA, 20 bp, synthetic construct
  misc_feature 1..20: note = Description of Artificial Sequence: Synthetic oligonucleotide
  misc_feature 1..20: note = Target: SCN10A; (+) strand; PAM type: NNGRRT; PAM sequence: GGGGAT
  source 1..20: mol_type = other DNA
tgagcctgggggtgcctgag

SEQ ID NO: 8893 - DNA, 20 bp, synthetic construct
  misc_feature 1..20: note = Description of Artificial Sequence: Synthetic oligonucleotide
  misc_feature 1..20: note = Target: SCN10A; (+) strand; PAM type: NNGRRT; PAM sequence: TGGGAT
  source 1..20: mol_type = other DNA
actgagggccacgacgtggc

SEQ ID NO: 8894 - DNA, 20 bp, synthetic construct
  misc_feature 1..20: note = Description of Artificial Sequence: Synthetic oligonucleotide
  misc_feature 1..20: note = Target: SCN10A; (+) strand; PAM type: NNGRRT; PAM sequence: GGGGAT
  source 1..20: mol_type = other DNA
ggccacgacgtggctgggat

SEQ ID NO: 8895 - DNA, 20 bp, synthetic construct
  misc_feature 1..20: note = Description of Artificial Sequence: Synthetic oligonucleotide
  misc_feature 1..20: note = Target: SCN10A; (+) strand; PAM type: NNGRRT; PAM sequence: TTGGGT
  source 1..20: mol_type = other DNA
cgacgtggctgggatgggga

SEQ ID NO: 8896 - DNA, 20 bp, synthetic construct
  misc_feature 1..20: note = Description of Artificial Sequence: Synthetic oligonucleotide
  misc_feature 1..20: note = Target: SCN10A; (+) strand; PAM type: NNGRRT; PAM sequence: CAGGGT
  source 1..20: mol_type = other DNA
cagcccagctcagcccagcc

SEQ ID NO: 8897 - DNA, 20 bp, synthetic construct
  misc_feature 1..20: note = Description of Artificial Sequence: Synthetic oligonucleotide
  misc_feature 1..20: note = Target: SCN10A; (+) strand; PAM type: NNGRRT; PAM sequence: TAGAAT
  source 1..20: mol_type = other DNA
tgaggccacaattcccttta

SEQ ID NO: 8898 - DNA, 20 bp, synthetic construct
  misc_feature 1..20: note = Description of Artificial Sequence: Synthetic oligonucleotide
  misc_feature 1..20: note = Target: SCN10A; (+) strand; PAM type: NNGRRT; PAM sequence: GAGAAT
  source 1..20: mol_type = other DNA
tcattgcacaaatatttatt

SEQ ID NO: 8899 - DNA, 20 bp, synthetic construct
  misc_feature 1..20: note = Description of Artificial Sequence: Synthetic oligonucleotide
  misc_feature 1..20: note = Target: SCN10A; (+) strand; PAM type: NNGRRT; PAM sequence: CTGGGT
  source 1..20: mol_type = other DNA
agatacatcatggccttcct

SEQ ID NO: 8900 - DNA, 20 bp, synthetic construct
  misc_feature 1..20: note = Description of Artificial Sequence: Synthetic oligonucleotide
  misc_feature 1..20: note = Target: SCN10A; (+) strand; PAM type: NNGRRT; PAM sequence: AAGAGT
  source 1..20: mol_type = other DNA
ggtccttcatggtccaaatc

SEQ ID NO: 8901 - DNA, 20 bp, synthetic construct
  misc_feature 1..20: note = Description of Artificial Sequence: Synthetic oligonucleotide
  misc_feature 1..20: note = Target: SCN10A; (+) strand; PAM type: NNGRRT; PAM sequence: AGGGGT
  source 1..20: mol_type = other DNA
ggctggtttagaactcacgg

SEQ ID NO: 8902 - DNA, 20 bp, synthetic construct
  misc_feature 1..20: note = Description of Artificial Sequence: Synthetic oligonucleotide
  misc_feature 1..20: note = Target: SCN10A; (+) strand; PAM type: NNGRRT; PAM sequence: GAGGGT
  source 1..20: mol_type = other DNA
gaactcacggaggggttttt

SEQ ID NO: 8903 - DNA, 20 bp, synthetic construct
  misc_feature 1..20: note = Description of Artificial Sequence: Synthetic oligonucleotide
  misc_feature 1..20: note = Target: SCN10A; (+) strand; PAM type: NNGRRT; PAM sequence: GGGAGT
  source 1..20: mol_type = other DNA
atgcgggcgccctcaagcct

SEQ ID NO: 8904 - DNA, 20 bp, synthetic construct
  misc_feature 1..20: note = Description of Artificial Sequence: Synthetic oligonucleotide
  misc_feature 1..20: note = Target: SCN10A; (+) strand; PAM type: NNGRRT; PAM sequence: GTGGAT
  source 1..20: mol_type = other DNA
gcacagcttgtttgtcttct

SEQ ID NO: 8905 - DNA, 20 bp, synthetic construct
  misc_feature 1..20: note = Description of Artificial Sequence: Synthetic oligonucleotide
  misc_feature 1..20: note = Target: SCN10A; (+) strand; PAM type: NNGRRT; PAM sequence: GTGAGT
  source 1..20: mol_type = other DNA
ttgtcttctgtggatcccag

SEQ ID NO: 8906 - DNA, 20 bp, synthetic construct
  misc_feature 1..20: note = Description of Artificial Sequence: Synthetic oligonucleotide
  misc_feature 1..20: note = Target: SCN10A; (+) strand; PAM type: NNGRRT; PAM sequence: CTGGAT
  source 1..20: mol_type = other DNA
ccaggtgagtgttcgctcaa

SEQ ID NO: 8907 - DNA, 20 bp, synthetic construct
  misc_feature 1..20: note = Description of Artificial Sequence: Synthetic oligonucleotide
  misc_feature 1..20: note = Target: SCN10A; (+) strand; PAM type: NNGRRT; PAM sequence: AGGGAT
  source 1..20: mol_type = other DNA
tccaggtcatctgccagctc

SEQ ID NO: 8908 - DNA, 20 bp, synthetic construct
  misc_feature 1..20: note = Description of Artificial Sequence: Synthetic oligonucleotide
  misc_feature 1..20: note = Target: SCN10A; (+) strand; PAM type: NNGRRT; PAM sequence: CAGGAT
  source 1..20: mol_type = other DNA
gccagctcagggatcttcct

SEQ ID NO: 8909 - DNA, 20 bp, synthetic construct
  misc_feature 1..20: note = Description of Artificial Sequence: Synthetic oligonucleotide
  misc_feature 1..20: note = Target: SCN10A; (+) strand; PAM type: NNGRRT; PAM sequence: CAGGAT
  source 1..20: mol_type = other DNA
gatcttcctcaggatttcct

SEQ ID NO: 8910 - DNA, 20 bp, synthetic construct
  misc_feature 1..20: note = Description of Artificial Sequence: Synthetic oligonucleotide
  misc_feature 1..20: note = Target: SCN10A; (+) strand; PAM type: NNGRRT; PAM sequence: GGGAAT
  source 1..20: mol_type = other DNA
tcgtctctccgcggggcccg

SEQ ID NO: 8911 - DNA, 20 bp, synthetic construct
  misc_feature 1..20: note = Description of Artificial Sequence: Synthetic oligonucleotide
  misc_feature 1..20: note = Target: SCN10A; (+) strand; PAM type: NNGRRT; PAM sequence: TGGAGT
  source 1..20: mol_type = other DNA
taaaccttcggggcccctga

SEQ ID NO: 8912 - DNA, 20 bp, synthetic construct
  misc_feature 1..20: note = Description of Artificial Sequence: Synthetic oligonucleotide
  misc_feature 1..20: note = Target: SCN10A; (+) strand; PAM type: NNGRRT; PAM sequence: TTGAAT
  source 1..20: mol_type = other DNA
actctcagcattcactgggc

SEQ ID NO: 8913 - DNA, 20 bp, synthetic construct
  misc_feature 1..20: note = Description of Artificial Sequence: Synthetic oligonucleotide
  misc_feature 1..20: note = Target: SCN10A; (+) strand; PAM type: NNGRRT; PAM sequence: TGGAGT
  source 1..20: mol_type = other DNA
tgggcttgaatatttaatca

SEQ ID NO: 8914 - DNA, 20 bp, synthetic construct
  misc_feature 1..20: note = Description of Artificial Sequence: Synthetic oligonucleotide
  misc_feature 1..20: note = Target: SCN10A; (+) strand; PAM type: NNGRRT; PAM sequence: ATGAAT
  source 1..20: mol_type = other DNA
cagccctataatgtctccag

SEQ ID NO: 8915 - DNA, 20 bp, synthetic construct
  misc_feature 1..20: note = Description of Artificial Sequence: Synthetic oligonucleotide
  misc_feature 1..20: note = Target: SCN10A; (+) strand; PAM type: NNGRRT; PAM sequence: AGGGGT
  source 1..20: mol_type = other DNA
gtctccagatgaattcaatt

SEQ ID NO: 8916 - DNA, 20 bp, synthetic construct
  misc_feature 1..20: note = Description of Artificial Sequence: Synthetic oligonucleotide
  misc_feature 1..20: note = Target: SCN10A; (+) strand; PAM type: NNGRRT; PAM sequence: GCGGGT
  source 1..20: mol_type = other DNA
taatggacccaaatggtggg

SEQ ID NO: 8917 - DNA, 20 bp, synthetic construct
  misc_feature 1..20: note = Description of Artificial Sequence: Synthetic oligonucleotide
  misc_feature 1..20: note = Target: SCN10A; (+) strand; PAM type: NNGRRT; PAM sequence: CGGGGT
  source 1..20: mol_type = other DNA
tcaggcccctcctgcctagc

SEQ ID NO: 8918 - DNA, 20 bp, synthetic construct
  misc_feature 1..20: note = Description of Artificial Sequence: Synthetic oligonucleotide
  misc_feature 1..20: note = Target: SCN10A; (+) strand; PAM type: NNGRRT; PAM sequence: TTGAGT
  source 1..20: mol_type = other DNA
gaagttgtgtactgaaaaca

SEQ ID NO: 8919 - DNA, 20 bp, synthetic construct
  misc_feature 1..20: note = Description of Artificial Sequence: Synthetic oligonucleotide
  misc_feature 1..20: note = Target: SCN10A; (+) strand; PAM type: NNGRRT; PAM sequence: GGGAGT
  source 1..20: mol_type = other DNA
gagtagggacaactagccag

SEQ ID NO: 8920 - DNA, 20 bp, synthetic construct
  misc_feature 1..20: note = Description of Artificial Sequence: Synthetic oligonucleotide
  misc_feature 1..20: note = Target: SCN10A; (+) strand; PAM type: NNGRRT; PAM sequence: CAGAAT
  source 1..20: mol_type = other DNA
agaagcatgacatccacgtg

SEQ ID NO: 8921 - DNA, 20 bp, synthetic construct
  misc_feature 1..20: note = Description of Artificial Sequence: Synthetic oligonucleotide
  misc_feature 1..20: note = Target: SCN10A; (+) strand; PAM type: NNGRRT; PAM sequence: GGGGAT
  source 1..20: mol_type = other DNA
ctgaagggcttgataacttt

SEQ ID NO: 8922 - DNA, 20 bp, synthetic construct
  misc_feature 1..20: note = Description of Artificial Sequence: Synthetic oligonucleotide
  misc_feature 1..20: note = Target: SCN10A; (+) strand; PAM type: NNGRRT; PAM sequence: ATGAAT
  source 1..20: mol_type = other DNA
agggcttgataactttgggg

SEQ ID NO: 8923 - DNA, 20 bp, synthetic construct
  misc_feature 1..20: note = Description of Artificial Sequence: Synthetic oligonucleotide
  misc_feature 1..20: note = Target: SCN10A; (+) strand; PAM type: NNGRRT; PAM sequence: TTGAAT
  source 1..20: mol_type = other DNA
ctaggtgtcaaattaaattc

SEQ ID NO: 8924 - DNA, 20 bp, synthetic construct
  misc_feature 1..20: note = Description of Artificial Sequence: Synthetic oligonucleotide
  misc_feature 1..20: note = Target: SCN10A; (+) strand; PAM type: NNGRRT; PAM sequence: GAGAAT
  source 1..20: mol_type = other DNA
gtggacaaaagaaagtgggg

SEQ ID NO: 8925 - DNA, 20 bp, synthetic construct
  misc_feature 1..20: note = Description of Artificial Sequence: Synthetic oligonucleotide
  misc_feature 1..20: note = Target: SCN10A; (+) strand; PAM type: NNGRRT; PAM sequence: ATGAAT
  source 1..20: mol_type = other DNA
attaccattcagtttcatag

SEQ ID NO: 8926 - DNA, 20 bp, synthetic construct
  misc_feature 1..20: note = Description of Artificial Sequence: Synthetic oligonucleotide
  misc_feature 1..20: note = Target: SCN10A; (+) strand; PAM type: NNGRRT; PAM sequence: TGGAGT
  source 1..20: mol_type = other DNA
atcttaggtcccacagcttg

SEQ ID NO: 8927 - DNA, 20 bp, synthetic construct
  misc_feature 1..20: note = Description of Artificial Sequence: Synthetic oligonucleotide
  misc_feature 1..20: note = Target: SCN10A; (+) strand; PAM type: NNGRRT; PAM sequence: TGGAGT
  source 1..20: mol_type = other DNA
ttctatacctagaaccaccc

SEQ ID NO: 8928 - DNA, 20 bp, synthetic construct
  misc_feature 1..20: note = Description of Artificial Sequence: Synthetic oligonucleotide
  misc_feature 1..20: note = Target: SCN10A; (+) strand; PAM type: NNGRRT; PAM sequence: GCGGAT
  source 1..20: mol_type = other DNA
atggtgaaagttgaaattgt

SEQ ID NO: 8929 - DNA, 20 bp, synthetic construct
  misc_feature 1..20: note = Description of Artificial Sequence: Synthetic oligonucleotide
  misc_feature 1..20: note = Target: SCN10A; (+) strand; PAM type: NNGRRT; PAM sequence: CAGGAT
  source 1..20: mol_type = other DNA
ggagggactttaaaaattcc

SEQ ID NO: 8930 - DNA, 20 bp, synthetic construct
  misc_feature 1..20: note = Description of Artificial Sequence: Synthetic oligonucleotide
  misc_feature 1..20: note = Target: SCN10A; (+) strand; PAM type: NNGRRT; PAM sequence: TTGAGT
  source 1..20: mol_type = other DNA
taagaaatgaggttatgtga

SEQ ID NO: 8931 - DNA, 20 bp, synthetic construct
  misc_feature 1..20: note = Description of Artificial Sequence: Synthetic oligonucleotide
  misc_feature 1..20: note = Target: SCN10A; (+) strand; PAM type: NNGRRT; PAM sequence: TGGAAT
  source 1..20: mol_type = other DNA
ttatgtgattgagtgcagtc

SEQ ID NO: 8932 - DNA, 20 bp, synthetic construct
  misc_feature 1..20: note = Description of Artificial Sequence: Synthetic oligonucleotide
  misc_feature 1..20: note = Target: SCN10A; (+) strand; PAM type: NNGRRT; PAM sequence: AGGGAT
  source 1..20: mol_type = other DNA
catctttccacgtctcaccc

SEQ ID NO: 8933 - DNA, 20 bp, synthetic construct
  misc_feature 1..20: note = Description of Artificial Sequence: Synthetic oligonucleotide
  misc_feature 1..20: note = Target: SCN10A; (+) strand; PAM type: NNGRRT; PAM sequence: CTGGGT
  source 1..20: mol_type = other DNA
atgttccagtgcctgggctc

SEQ ID NO: 8934 - DNA, 20 bp, synthetic construct
  misc_feature 1..20: note = Description of Artificial Sequence: Synthetic oligonucleotide
  misc_feature 1..20: note = Target: SCN10A; (+) strand; PAM type: NNGRRT; PAM sequence: GAGGGT
  source 1..20: mol_type = other DNA
agctgctcctgctagtgaga

SEQ ID NO: 8935 - DNA, 20 bp, synthetic construct
  misc_feature 1..20: note = Description of Artificial Sequence: Synthetic oligonucleotide
  misc_feature 1..20: note = Target: SCN10A; (+) strand; PAM type: NNGRRT; PAM sequence: CTGGGT
  source 1..20: mol_type = other DNA
ctagtgagagagggtcccaa

SEQ ID NO: 8936 - DNA, 20 bp, synthetic construct
  misc_feature 1..20: note = Description of Artificial Sequence: Synthetic oligonucleotide
  misc_feature 1..20: note = Target: SCN10A; (+) strand; PAM type: NNGRRT; PAM sequence: AGGGAT
  source 1..20: mol_type = other DNA
atgaccagttctaaatttga

SEQ ID NO: 8937 - DNA, 20 bp, synthetic construct
  misc_feature 1..20: note = Description of Artificial Sequence: Synthetic oligonucleotide
  misc_feature 1..20: note = Target: SCN10A; (+) strand; PAM type: NNGRRT; PAM sequence: AAGAGT
  source 1..20: mol_type = other DNA
catcacaggctgccagagcc

SEQ ID NO: 8938 - DNA, 20 bp, synthetic construct
  misc_feature 1..20: note = Description of Artificial Sequence: Synthetic oligonucleotide
  misc_feature 1..20: note = Target: SCN10A; (+) strand; PAM type: NNGRRT; PAM sequence: CTGAGT
  source 1..20: mol_type = other DNA
caaagtaactgaaaatgctt

SEQ ID NO: 8939 - DNA, 20 bp, synthetic construct
  misc_feature 1..20: note = Description of Artificial Sequence: Synthetic oligonucleotide
  misc_feature 1..20: note = Target: SCN10A; (+) strand; PAM type: NNGRRT; PAM sequence: CAGAGT
  source 1..20: mol_type = other DNA
tgagtggcagacagctgtca

SEQ ID NO: 8940 - DNA, 20 bp, synthetic construct
  misc_feature 1..20: note = Description of Artificial Sequence: Synthetic oligonucleotide
  misc_feature 1..20: note = Target: SCN10A; (+) strand; PAM type: NNGRRT; PAM sequence: CAGGGT
  source 1..20: mol_type = other DNA
tgcatgttcctgaggcctca

SEQ ID NO: 8941 - DNA, 20 bp, synthetic construct
  misc_feature 1..20: note = Description of Artificial Sequence: Synthetic oligonucleotide
  misc_feature 1..20: note = Target: SCN10A; (+) strand; PAM type: NNGRRT; PAM sequence: GTGAAT
  source 1..20: mol_type = other DNA
ccttcccacgttgggcagag

SEQ ID NO: 8942 - DNA, 20 bp, synthetic construct
  misc_feature 1..20: note = Description of Artificial Sequence: Synthetic oligonucleotide
  misc_feature 1..20: note = Target: SCN10A; (+) strand; PAM type: NNGRRT; PAM sequence: CTGAGT
  source 1..20: mol_type = other DNA
gttgggcagaggtgaatgcc

SEQ ID NO: 8943 - DNA, 20 bp, synthetic construct
  misc_feature 1..20: note = Description of Artificial Sequence: Synthetic oligonucleotide
  misc_feature 1..20: note = Target: SCN10A; (+) strand; PAM type: NNGRRT; PAM sequence: GAGGGT
  source 1..20: mol_type = other DNA
gttactgagaagaggttagc

SEQ ID NO: 8944 - DNA, 20 bp, synthetic construct
  misc_feature 1..20: note = Description of Artificial Sequence: Synthetic oligonucleotide
  misc_feature 1..20: note = Target: SCN10A; (+) strand; PAM type: NNGRRT; PAM sequence: AGGAAT
  source 1..20: mol_type = other DNA
tataccagcttaaggtagta

SEQ ID NO: 8945 - DNA, 20 bp, synthetic construct
  misc_feature 1..20: note = Description of Artificial Sequence: Synthetic oligonucleotide
  misc_feature 1..20: note = Target: SCN10A; (+) strand; PAM type: NNGRRT; PAM sequence: ATGAGT
  source 1..20: mol_type = other DNA
tgtggggaaaagctggctaa

SEQ ID NO: 8946 - DNA, 20 bp, synthetic construct
  misc_feature 1..20: note = Description of Artificial Sequence: Synthetic oligonucleotide
  misc_feature 1..20: note = Target: SCN10A; (+) strand; PAM type: NNGRRT; PAM sequence: AAGAAT
  source 1..20: mol_type = other DNA
gctggctaaatgagtcacat

SEQ ID NO: 8947 - DNA, 20 bp, synthetic construct
  misc_feature 1..20: note = Description of Artificial Sequence: Synthetic oligonucleotide
  misc_feature 1..20: note = Target: SCN10A; (+) strand; PAM type: NNGRRT; PAM sequence: TAGGAT
  source 1..20: mol_type = other DNA
acataagaatcaggacttct

SEQ ID NO: 8948 - DNA, 20 bp, synthetic construct
  misc_feature 1..20: note = Description of Artificial Sequence: Synthetic oligonucleotide
  misc_feature 1..20: note = Target: SCN10A; (+) strand; PAM type: NNGRRT; PAM sequence: CTGGGT
  source 1..20: mol_type = other DNA
tagcatctcatgcacagagc

SEQ ID NO: 8949 - DNA, 20 bp, synthetic construct
  misc_feature 1..20: note = Description of Artificial Sequence: Synthetic oligonucleotide
  misc_feature 1..20: note = Target: SCN10A; (+) strand; PAM type: NNGRRT; PAM sequence: GGGAAT
  source 1..20: mol_type = other DNA
actccctgtttgtctgcctg

SEQ ID NO: 8950 - DNA, 20 bp, synthetic construct
  misc_feature 1..20: note = Description of Artificial Sequence: Synthetic oligonucleotide
  misc_feature 1..20: note = Target: SCN10A; (+) strand; PAM type: NNGRRT; PAM sequence: GGGGAT
  source 1..20: mol_type = other DNA
actgcctgtggctgtccctt

SEQ ID NO: 8951 - DNA, 20 bp, synthetic construct
  misc_feature 1..20: note = Description of Artificial Sequence: Synthetic oligonucleotide
  misc_feature 1..20: note = Target: SCN10A; (+) strand; PAM type: NNGRRT; PAM sequence: GGGGAT
  source 1..20: mol_type = other DNA
ataactcttacctgtccttt

SEQ ID NO: 8952 - DNA, 20 bp, synthetic construct
  misc_feature 1..20: note = Description of Artificial Sequence: Synthetic oligonucleotide
  misc_feature 1..20: note = Target: SCN10A; (+) strand; PAM type: NNGRRT; PAM sequence: TCGGAT
  source 1..20: mol_type = other DNA
gggcacagagacccacacag

SEQ ID NO: 8953 - DNA, 20 bp, synthetic construct
  misc_feature 1..20: note = Description of Artificial Sequence: Synthetic oligonucleotide
  misc_feature 1..20: note = Target: SCN10A; (+) strand; PAM type: NNGRRT; PAM sequence: GAGAGT
  source 1..20: mol_type = other DNA
ggttctcagccttggagctg

SEQ ID NO: 8954 - DNA, 20 bp, synthetic construct
  misc_feature 1..20: note = Description of Artificial Sequence: Synthetic oligonucleotide
  misc_feature 1..20: note = Target: SCN10A; (+) strand; PAM type: NNGRRT; PAM sequence: GGGAGT
  source 1..20: mol_type = other DNA
cagccttggagctggagagt

SEQ ID NO: 8955 - DNA, 20 bp, synthetic construct
  misc_feature 1..20: note = Description of Artificial Sequence: Synthetic oligonucleotide
  misc_feature 1..20: note = Target: SCN10A; (+) strand; PAM type: NNGRRT; PAM sequence: GGGAAT
  source 1..20: mol_type = other DNA
caggctctgccttgggctgg

SEQ ID NO: 8956 - DNA, 20 bp, synthetic construct
  misc_feature 1..20: note = Description of Artificial Sequence: Synthetic oligonucleotide
  misc_feature 1..20: note = Target: SCN10A; (+) strand; PAM type: NNGRRT; PAM sequence: CTGGAT
  source 1..20: mol_type = other DNA
ttggtacgatggccaaagac

SEQ ID NO: 8957 - DNA, 20 bp, synthetic construct
  misc_feature 1..20: note = Description of Artificial Sequence: Synthetic oligonucleotide
  misc_feature 1..20: note = Target: SCN10A; (+) strand; PAM type: NNGRRT; PAM sequence: AAGAGT
  source 1..20: mol_type = other DNA
tgtgaggttgtcagcactga

SEQ ID NO: 8958 - DNA, 20 bp, synthetic construct
  misc_feature 1..20: note = Description of Artificial Sequence: Synthetic oligonucleotide
  misc_feature 1..20: note = Target: SCN10A; (+) strand; PAM type: NNGRRT; PAM sequence: AGGAAT
  source 1..20: mol_type = other DNA
aggttaagcacctgaagaga

SEQ ID NO: 8959 - DNA, 20 bp, synthetic construct
  misc_feature 1..20: note = Description of Artificial Sequence: Synthetic oligonucleotide
  misc_feature 1..20: note = Target: SCN10A; (+) strand; PAM type: NNGRRT; PAM sequence: CCGGGT
  source 1..20: mol_type = other DNA
ctgagccccacattggccta

SEQ ID NO: 8960 - DNA, 20 bp, synthetic construct
  misc_feature 1..20: note = Description of Artificial Sequence: Synthetic oligonucleotide
  misc_feature 1..20: note = Target: SCN10A; (+) strand; PAM type: NNGRRT; PAM sequence: CGGGAT
  source 1..20: mol_type = other DNA
tgggcctcttcctgcccacc

SEQ ID NO: 8961 - DNA, 20 bp, synthetic construct
  misc_feature 1..20: note = Description of Artificial Sequence: Synthetic oligonucleotide
  misc_feature 1..20: note = Target: SCN10A; (+) strand; PAM type: NNGRRT; PAM sequence: GGGAAT
  source 1..20: mol_type = other DNA
cgggatgctgtcccttttgg

SEQ ID NO: 8962 - DNA, 20 bp, synthetic construct
  misc_feature 1..20: note = Description of Artificial Sequence: Synthetic oligonucleotide
  misc_feature 1..20: note = Target: SCN10A; (+) strand; PAM type: NNGRRT; PAM sequence: GGGGAT
  source 1..20: mol_type = other DNA
gagcagttgagggaaagttt

SEQ ID NO: 8963 - DNA, 20 bp, synthetic construct
  misc_feature 1..20: note = Description of Artificial Sequence: Synthetic oligonucleotide
  misc_feature 1..20: note = Target: SCN10A; (+) strand; PAM type: NNGRRT; PAM sequence: TGGAGT
  source 1..20: mol_type = other DNA
gggaaagtttggggatgtcc

SEQ ID NO: 8964 - DNA, 20 bp, synthetic construct
  misc_feature 1..20: note = Description of Artificial Sequence: Synthetic oligonucleotide
  misc_feature 1..20: note = Target: SCN10A; (+) strand; PAM type: NNGRRT; PAM sequence: TGGAAT
  source 1..20: mol_type = other DNA
ctgggctctgttcctgactc

SEQ ID NO: 8965 - DNA, 20 bp, synthetic construct
  misc_feature 1..20: note = Description of Artificial Sequence: Synthetic oligonucleotide
  misc_feature 1..20: note = Target: SCN10A; (+) strand; PAM type: NNGRRT; PAM sequence: AGGGGT
  source 1..20: mol_type = other DNA
agaaatgtaaaagtgctcag

SEQ ID NO: 8966 - DNA, 20 bp, synthetic construct
  misc_feature 1..20: note = Description of Artificial Sequence: Synthetic oligonucleotide
  misc_feature 1..20: note = Target: SCN10A; (+) strand; PAM type: NNGRRT; PAM sequence: GAGGGT
  source 1..20: mol_type = other DNA
gaggggtaaacttcctgtct

SEQ ID NO: 8967 - DNA, 20 bp, synthetic construct
  misc_feature 1..20: note = Description of Artificial Sequence: Synthetic oligonucleotide
  misc_feature 1..20: note = Target: SCN10A; (+) strand; PAM type: NNGRRT; PAM sequence: AGGGAT
  source 1..20: mol_type = other DNA
aggggcatctgtggctctgc

SEQ ID NO: 8968 - DNA, 20 bp, synthetic construct
  misc_feature 1..20: note = Description of Artificial Sequence: Synthetic oligonucleotide
  misc_feature 1..20: note = Target: SCN10A; (+) strand; PAM type: NNGRRT; PAM sequence: CAGAGT
  source 1..20: mol_type = other DNA
gtgggctcagcctggaagaa

SEQ ID NO: 8969 - DNA, 20 bp, synthetic construct
  misc_feature 1..20: note = Description of Artificial Sequence: Synthetic oligonucleotide
  misc_feature 1..20: note = Target: SCN10A; (+) strand; PAM type: NNGRRT; PAM sequence: TGGGAT
  source 1..20: mol_type = other DNA
gcctggaagaacagagtttc

SEQ ID NO: 8970 - DNA, 20 bp, synthetic construct
  misc_feature 1..20: note = Description of Artificial Sequence: Synthetic oligonucleotide
  misc_feature 1..20: note = Target: SCN10A; (+) strand; PAM type: NNGRRT; PAM sequence: CAGGGT
  source 1..20: mol_type = other DNA
ggcatccctggctcaggcac

SEQ ID NO: 8971 - DNA, 20 bp, synthetic construct
  misc_feature 1..20: note = Description of Artificial Sequence: Synthetic oligonucleotide
  misc_feature 1..20: note = Target: SCN10A; (+) strand; PAM type: NNGRRT; PAM sequence: AAGAGT
  source 1..20: mol_type = other DNA
caccagggtggaaaagacta

SEQ ID NO: 8972 - DNA, 20 bp, synthetic construct
  misc_feature 1..20: note = Description of Artificial Sequence: Synthetic oligonucleotide
  misc_feature 1..20: note = Target: SCN10A; (+) strand; PAM type: NNGRRT; PAM sequence: CTGGAT
  source 1..20: mol_type = other DNA
ggtggaaaagactaaagagt

SEQ ID NO: 8973 - DNA, 20 bp, synthetic construct
  misc_feature 1..20: note = Description of Artificial Sequence: Synthetic oligonucleotide
  misc_feature 1..20: note = Target: SCN10A; (+) strand; PAM type: NNGRRT; PAM sequence: CAGAGT
  source 1..20: mol_type = other DNA
ggcaaggaccccaccatgac

SEQ ID NO: 8974 - DNA, 20 bp, synthetic construct
  misc_feature 1..20: note = Description of Artificial Sequence: Synthetic oligonucleotide
  misc_feature 1..20: note = Target: SCN10A; (+) strand; PAM type: NNGRRT; PAM sequence: GTGGGT
  source 1..20: mol_type = other DNA
aggaccccaccatgaccaga

SEQ ID NO: 8975 - DNA, 20 bp, synthetic construct
  misc_feature 1..20: note = Description of Artificial Sequence: Synthetic oligonucleotide
  misc_feature 1..20: note = Target: SCN10A; (+) strand; PAM type: NNGRRT; PAM sequence: AGGGGT
  source 1..20: mol_type = other DNA
gggccaggctggggcggaga

SEQ ID NO: 8976 - DNA, 20 bp, synthetic construct
  misc_feature 1..20: note = Description of Artificial Sequence: Synthetic oligonucleotide
  misc_feature 1..20: note = Target: SCN10A; (+) strand; PAM type: NNGRRT; PAM sequence: GTGAGT
  source 1..20: mol_type = other DNA
gtattggggcttattggcaa

SEQ ID NO: 8977 - DNA, 20 bp, synthetic construct
  misc_feature 1..20: note = Description of Artificial Sequence: Synthetic oligonucleotide
  misc_feature 1..20: note = Target: SCN10A; (+) strand; PAM type: NNGRRT; PAM sequence: TGGAGT
  source 1..20: mol_type = other DNA
agaggggcttcctccaaaca

SEQ ID NO: 8978 - DNA, 20 bp, synthetic construct
  misc_feature 1..20: note = Description of Artificial Sequence: Synthetic oligonucleotide
  misc_feature 1..20: note = Target: SCN10A; (+) strand; PAM type: NNGRRT; PAM sequence: TTGGAT
  source 1..20: mol_type = other DNA
ttgttattatttctgtggcc

SEQ ID NO: 8979 - DNA, 20 bp, synthetic construct
  misc_feature 1..20: note = Description of Artificial Sequence: Synthetic oligonucleotide
  misc_feature 1..20: note = Target: SCN10A; (+) strand; PAM type: NNGRRT; PAM sequence: CTGAAT
  source 1..20: mol_type = other DNA
atcagtcagctcttacttcc

SEQ ID NO: 8980 - DNA, 20 bp, synthetic construct
  misc_feature 1..20: note = Description of Artificial Sequence: Synthetic oligonucleotide
  misc_feature 1..20: note = Target: SCN10A; (+) strand; PAM type: NNGRRT; PAM sequence: TTGAGT
  source 1..20: mol_type = other DNA
cagctaatagacaccgttta

SEQ ID NO: 8981 - DNA, 20 bp, synthetic construct
  misc_feature 1..20: note = Description of Artificial Sequence: Synthetic oligonucleotide
  misc_feature 1..20: note = Target: SCN10A; (+) strand; PAM type: NNGRRT; PAM sequence: ATGAGT
  source 1..20: mol_type = other DNA
ttaattctcccagtaaaccc

SEQ ID NO: 8982 - DNA, 20 bp, synthetic construct
  misc_feature 1..20: note = Description of Artificial Sequence: Synthetic oligonucleotide
  misc_feature 1..20: note = Target: SCN10A; (+) strand; PAM type: NNGRRT; PAM sequence: TGGGGT
  source 1..20: mol_type = other DNA
aggagattaagtctcttgcc

SEQ ID NO: 8983 - DNA, 20 bp, synthetic construct
  misc_feature 1..20: note = Description of Artificial Sequence: Synthetic oligonucleotide
  misc_feature 1..20: note = Target: SCN10A; (+) strand; PAM type: NNGRRT; PAM sequence: ATGAAT
  source 1..20: mol_type = other DNA
cccaaggcacacttcttgta

SEQ ID NO: 8984 - DNA, 20 bp, synthetic construct
  misc_feature 1..20: note = Description of Artificial Sequence: Synthetic oligonucleotide
  misc_feature 1..20: note = Target: SCN10A; (+) strand; PAM type: NNGRRT; PAM sequence: ATGAAT
  source 1..20: mol_type = other DNA
cttcttgtaatgaatcccac

SEQ ID NO: 8985 - DNA, 20 bp, synthetic construct
  misc_feature 1..20: note = Description of Artificial Sequence: Synthetic oligonucleotide
  misc_feature 1..20: note = Target: SCN10A; (+) strand; PAM type: NNGRRT; PAM sequence: CAGGGT
  source 1..20: mol_type = other DNA
ccaggagacagtgcccccag

SEQ ID NO: 8986 - DNA, 20 bp, synthetic construct
  misc_feature 1..20: note = Description of Artificial Sequence: Synthetic oligonucleotide
  misc_feature 1..20: note = Target: SCN10A; (+) strand; PAM type: NNGRRT; PAM sequence: AAGGAT
  source 1..20: mol_type = other DNA
agcaccatcaccgtcaagaa

SEQ ID NO: 8987 - DNA, 20 bp, synthetic construct
  misc_feature 1..20: note = Description of Artificial Sequence: Synthetic oligonucleotide
  misc_feature 1..20: note = Target: SCN10A; (+) strand; PAM type: NNGRRT; PAM sequence: ATGGAT
  source 1..20: mol_type = other DNA
tcaagaaaaggatgaggcat

SEQ ID NO: 8988 - DNA, 20 bp, synthetic construct
  misc_feature 1..20: note = Description of Artificial Sequence: Synthetic oligonucleotide
  misc_feature 1..20: note = Target: SCN10A; (+) strand; PAM type: NNGRRT; PAM sequence: GAGGAT
  source 1..20: mol_type = other DNA
ttctcaatccactctccaca

SEQ ID NO: 8989 - DNA, 20 bp, synthetic construct
  misc_feature 1..20: note = Description of Artificial Sequence: Synthetic oligonucleotide
  misc_feature 1..20: note = Target: SCN10A; (+) strand; PAM type: NNGRRT; PAM sequence: AAGAGT
  source 1..20: mol_type = other DNA
gatacggaagacaatgagga

SEQ ID NO: 8990 - DNA, 20 bp, synthetic construct
  misc_feature 1..20: note = Description of Artificial Sequence: Synthetic oligonucleotide
  misc_feature 1..20: note = Target: SCN10A; (+) strand; PAM type: NNGRRT; PAM sequence: CAGGAT
  source 1..20: mol_type = other DNA
aagacaaagacaatgatggc

SEQ ID NO: 8991 - DNA, 20 bp, synthetic construct
  misc_feature 1..20: note = Description of Artificial Sequence: Synthetic oligonucleotide
  misc_feature 1..20: note = Target: SCN10A; (+) strand; PAM type: NNGRRT; PAM sequence: CTGAGT
  source 1..20: mol_type = other DNA
gaggttccccagtgccccca

SEQ ID NO: 8992 - DNA, 20 bp, synthetic construct
  misc_feature 1..20: note = Description of Artificial Sequence: Synthetic oligonucleotide
  misc_feature 1..20: note = Target: SCN10A; (+) strand; PAM type: NNGRRT; PAM sequence: ATGAGT
  source 1..20: mol_type = other DNA
ctgagtttccgatgatcttg

SEQ ID NO: 8993 - DNA, 20 bp, synthetic construct
  misc_feature 1..20: note = Description of Artificial Sequence: Synthetic oligonucleotide
  misc_feature 1..20: note = Target: SCN10A; (+) strand; PAM type: NNGRRT; PAM sequence: CAGGAT
  source 1..20: mol_type = other DNA
tgagtgtgtttaaggtgggc

SEQ ID NO: 8994 - DNA, 20 bp, synthetic construct
  misc_feature 1..20: note = Description of Artificial Sequence: Synthetic oligonucleotide
  misc_feature 1..20: note = Target: SCN10A; (+) strand; PAM type: NNGRRT; PAM sequence: TTGAAT
  source 1..20: mol_type = other DNA
tgggccaggatttggccagc

SEQ ID NO: 8995 - DNA, 20 bp, synthetic construct
  misc_feature 1..20: note = Description of Artificial Sequence: Synthetic oligonucleotide
  misc_feature 1..20: note = Target: SCN10A; (+) strand; PAM type: NNGRRT; PAM sequence: CTGAGT
  source 1..20: mol_type = other DNA
atgtgcttcattgactgtgg

SEQ ID NO: 8996 - DNA, 20 bp, synthetic construct
  misc_feature 1..20: note = Description of Artificial Sequence: Synthetic oligonucleotide
  misc_feature 1..20: note = Target: SCN10A; (+) strand; PAM type: NNGRRT; PAM sequence: CAGGGT
  source 1..20: mol_type = other DNA
ttcattgactgtggctgagt

SEQ ID NO: 8997 - DNA, 20 bp, synthetic construct
  misc_feature 1..20: note = Description of Artificial Sequence: Synthetic oligonucleotide
  misc_feature 1..20: note = Target: SCN10A; (+) strand; PAM type: NNGRRT; PAM sequence: TGGGGT
  source 1..20: mol_type = other DNA
gctgagtcagggtcttctac

SEQ ID NO: 8998 - DNA, 20 bp, synthetic construct
  misc_feature 1..20: note = Description of Artificial Sequence: Synthetic oligonucleotide
  misc_feature 1..20: note = Target: SCN10A; (+) strand; PAM type: NNGRRT; PAM sequence: CTGAAT
  source 1..20: mol_type = other DNA
agccacaggcctgatccctc

SEQ ID NO: 8999 - DNA, 20 bp, synthetic construct
  misc_feature 1..20: note = Description of Artificial Sequence: Synthetic oligonucleotide
  misc_feature 1..20: note = Target: SCN10A; (+) strand; PAM type: NNGRRT; PAM sequence: TGGGGT
  source 1..20: mol_type = other DNA
atgggcctcttctgtggagg

SEQ ID NO: 9000 - DNA, 20 bp, synthetic construct
  misc_feature 1..20: note = Description of Artificial Sequence: Synthetic oligonucleotide
  misc_feature 1..20: note = Target: SCN10A; (+) strand; PAM type: NNGRRT; PAM sequence: GTGGGT
  source 1..20: mol_type = other DNA
gcctcttctgtggaggtggg

SEQ ID NO: 9001 - DNA, 20 bp, synthetic construct
  misc_feature 1..20: note = Description of Artificial Sequence: Synthetic oligonucleotide
  misc_feature 1..20: note = Target: SCN10A; (+) strand; PAM type: NNGRRT; PAM sequence: TCGGGT
  source 1..20: mol_type = other DNA
tgaagagagaccagcctcct

SEQ ID NO: 9002 - DNA, 20 bp, synthetic construct
  misc_feature 1..20: note = Description of Artificial Sequence: Synthetic oligonucleotide
  misc_feature 1..20: note = Target: SCN10A; (+) strand; PAM type: NNGRRT; PAM sequence: GGGGAT
  source 1..20: mol_type = other DNA
agaccagcctccttcgggta

SEQ ID NO: 9003 - DNA, 20 bp, synthetic construct
  misc_feature 1..20: note = Description of Artificial Sequence: Synthetic oligonucleotide
  misc_feature 1..20: note = Target: SCN10A; (+) strand; PAM type: NNGRRT; PAM sequence: TAGGAT
  source 1..20: mol_type = other DNA
ccaggctgtggcttaggtgc

SEQ ID NO: 9004 - DNA, 20 bp, synthetic construct
  misc_feature 1..20: note = Description of Artificial Sequence: Synthetic oligonucleotide
  misc_feature 1..20: note = Target: SCN10A; (+) strand; PAM type: NNGRRT; PAM sequence: GTGAGT
  source 1..20: mol_type = other DNA
caattttatcacccatatcc

SEQ ID NO: 9005 - DNA, 20 bp, synthetic construct
  misc_feature 1..20: note = Description of Artificial Sequence: Synthetic oligonucleotide
  misc_feature 1..20: note = Target: SCN10A; (+) strand; PAM type: NNGRRT; PAM sequence: GCGGGT
  source 1..20: mol_type = other DNA
tctttatgtgatgggggaga

SEQ ID NO: 9006 - DNA, 20 bp, synthetic construct
  misc_feature 1..20: note = Description of Artificial Sequence: Synthetic oligonucleotide
  misc_feature 1..20: note = Target: SCN10A; (+) strand; PAM type: NNGRRT; PAM sequence: AGGAAT
  source 1..20: mol_type = other DNA
ccgaaggttgtaagcctagc

SEQ ID NO: 9007 - DNA, 20 bp, synthetic construct
  misc_feature 1..20: note = Description of Artificial Sequence: Synthetic oligonucleotide
  misc_feature 1..20: note = Target: SCN10A; (+) strand; PAM type: NNGRRT; PAM sequence: AAGGAT
  source 1..20: mol_type = other DNA
aagagctatacccttcatgt

SEQ ID NO: 9008 - DNA, 20 bp, synthetic construct
  misc_feature 1..20: note = Description of Artificial Sequence: Synthetic oligonucleotide
  misc_feature 1..20: note = Target: SCN10A; (+) strand; PAM type: NNGRRT; PAM sequence: GAGAAT
  source 1..20: mol_type = other DNA
tgaaccacaaacaatcccag

SEQ ID NO: 9009 - DNA, 20 bp, synthetic construct
  misc_feature 1..20: note = Description of Artificial Sequence: Synthetic oligonucleotide
  misc_feature 1..20: note = Target: SCN10A; (+) strand; PAM type: NNGRRT; PAM sequence: TTGAAT
  source 1..20: mol_type = other DNA
ccaggagaatgcaaggaaaa

SEQ ID NO: 9010 - DNA, 20 bp, synthetic construct
  misc_feature 1..20: note = Description of Artificial Sequence: Synthetic oligonucleotide
  misc_feature 1..20: note = Target: SCN10A; (+) strand; PAM type: NNGRRT; PAM sequence: TAGGAT
  source 1..20: mol_type = other DNA
acaacaaagtggtgctcata

SEQ ID NO: 9011 - DNA, 20 bp, synthetic construct
  misc_feature 1..20: note = Description of Artificial Sequence: Synthetic oligonucleotide
  misc_feature 1..20: note = Target: SCN10A; (+) strand; PAM type: NNGRRT; PAM sequence: TGGAAT
  source 1..20: mol_type = other DNA
tgctcatataggattttatc

SEQ ID NO: 9012 - DNA, 20 bp, synthetic construct
  misc_feature 1..20: note = Description of Artificial Sequence: Synthetic oligonucleotide
  misc_feature 1..20: note = Target: SCN10A; (+) strand; PAM type: NNGRRT; PAM sequence: GAGAAT
  source 1..20: mol_type = other DNA
ctacctaggtattttaagtt

SEQ ID NO: 9013 - DNA, 20 bp, synthetic construct
  misc_feature 1..20: note = Description of Artificial Sequence: Synthetic oligonucleotide
  misc_feature 1..20: note = Target: SCN10A; (+) strand; PAM type: NNGRRT; PAM sequence: CAGAAT
  source 1..20: mol_type = other DNA
caattctacaaagtgctctg

SEQ ID NO: 9014 - DNA, 20 bp, synthetic construct
  misc_feature 1..20: note = Description of Artificial Sequence: Synthetic oligonucleotide
  misc_feature 1..20: note = Target: SCN10A; (+) strand; PAM type: NNGRRT; PAM sequence: AAGAGT
  source 1..20: mol_type = other DNA
tattccctcaaaaattgttt

SEQ ID NO: 9015 - DNA, 20 bp, synthetic construct
  misc_feature 1..20: note = Description of Artificial Sequence: Synthetic oligonucleotide
  misc_feature 1..20: note = Target: SCN10A; (+) strand; PAM type: NNGRRT; PAM sequence: AGGAAT
  source 1..20: mol_type = other DNA
aaaaaacaaacaaaaacaga

SEQ ID NO: 9016 - DNA, 20 bp, synthetic construct
  misc_feature 1..20: note = Description of Artificial Sequence: Synthetic oligonucleotide
  misc_feature 1..20: note = Target: SCN10A; (+) strand; PAM type: NNGRRT; PAM sequence: ATGAGT
  source 1..20: mol_type = other DNA
aacaaacaaaaacagaagga

SEQ ID NO: 9017 - DNA, 20 bp, synthetic construct
  misc_feature 1..20: note = Description of Artificial Sequence: Synthetic oligonucleotide
  misc_feature 1..20: note = Target: SCN10A; (+) strand; PAM type: NNGRRT; PAM sequence: AAGAGT
  source 1..20: mol_type = other DNA
aacagaaggaatgagtcatc

SEQ ID NO: 9018 - DNA, 20 bp, synthetic construct
  misc_feature 1..20: note = Description of Artificial Sequence: Synthetic oligonucleotide
  misc_feature 1..20: note = Target: SCN10A; (+) strand; PAM type: NNGRRT; PAM sequence: GTGAAT
  source 1..20: mol_type = other DNA
gaaggaatgagtcatcaaga

SEQ ID NO: 9019 - DNA, 20 bp, synthetic construct
  misc_feature 1..20: note = Description of Artificial Sequence: Synthetic oligonucleotide
  misc_feature 1..20: note = Target: SCN10A; (+) strand; PAM type: NNGRRT; PAM sequence: TAGAAT
  source 1..20: mol_type = other DNA
cattccatttcttcagatga

SEQ ID NO: 9020 - DNA, 20 bp, synthetic construct
  misc_feature 1..20: note = Description of Artificial Sequence: Synthetic oligonucleotide
  misc_feature 1..20: note = Target: SCN10A; (+) strand; PAM type: NNGRRT; PAM sequence: GAGAAT
  source 1..20: mol_type = other DNA
ataacttgaaactatgtgca

SEQ ID NO: 9021 - DNA, 20 bp, synthetic construct
  misc_feature 1..20: note = Description of Artificial Sequence: Synthetic oligonucleotide
  misc_feature 1..20: note = Target: SCN10A; (+) strand; PAM type: NNGRRT; PAM sequence: GAGAAT
  source 1..20: mol_type = other DNA
agatttgacacagtttggga

SEQ ID NO: 9022 - DNA, 20 bp, synthetic construct
  misc_feature 1..20: note = Description of Artificial Sequence: Synthetic oligonucleotide
  misc_feature 1..20: note = Target: SCN10A; (+) strand; PAM type: NNGRRT; PAM sequence: GAGGAT
  source 1..20: mol_type = other DNA
tgggagagaattagtgaact

SEQ ID NO: 9023 - DNA, 20 bp, synthetic construct
  misc_feature 1..20: note = Description of Artificial Sequence: Synthetic oligonucleotide
  misc_feature 1..20: note = Target: SCN10A; (+) strand; PAM type: NNGRRT; PAM sequence: CAGAAT
  source 1..20: mol_type = other DNA
ttagtgaactgaggatatat

SEQ ID NO: 9024 - DNA, 20 bp, synthetic construct
  misc_feature 1..20: note = Description of Artificial Sequence: Synthetic oligonucleotide
  misc_feature 1..20: note = Target: SCN10A; (+) strand; PAM type: NNGRRT; PAM sequence: CAGAAT
  source 1..20: mol_type = other DNA
atatatcagaataaattatt

SEQ ID NO: 9025 - DNA, 20 bp, synthetic construct
  misc_feature 1..20: note = Description of Artificial Sequence: Synthetic oligonucleotide
  misc_feature 1..20: note = Target: SCN10A; (+) strand; PAM type: NNGRRT; PAM sequence: GAGGAT
  source 1..20: mol_type = other DNA
aaaatagtgtaagagacata

SEQ ID NO: 9026 - DNA, 20 bp, synthetic construct
  misc_feature 1..20: note = Description of Artificial Sequence: Synthetic oligonucleotide
  misc_feature 1..20: note = Target: SCN10A; (+) strand; PAM type: NNGRRT; PAM sequence: TAGAAT
  source 1..20: mol_type = other DNA
agtgtaagagacatagagga

SEQ ID NO: 9027 - DNA, 20 bp, synthetic construct
  misc_feature 1..20: note = Description of Artificial Sequence: Synthetic oligonucleotide
  misc_feature 1..20: note = Target: SCN10A; (+) strand; PAM type: NNGRRT; PAM sequence: GAGAGT
  source 1..20: mol_type = other DNA
agacatagaggatagaatga

SEQ ID NO: 9028 - DNA, 20 bp, synthetic construct
  misc_feature 1..20: note = Description of Artificial Sequence: Synthetic oligonucleotide
  misc_feature 1..20: note = Target: SCN10A; (+) strand; PAM type: NNGRRT; PAM sequence: TAGAAT
  source 1..20: mol_type = other DNA
aagtccagaaggagaaaaaa

SEQ ID NO: 9029 - DNA, 20 bp, synthetic construct
  misc_feature 1..20: note = Description of Artificial Sequence: Synthetic oligonucleotide
  misc_feature 1..20: note = Target: SCN10A; (+) strand; PAM type: NNGRRT; PAM sequence: CAGAAT
  source 1..20: mol_type = other DNA
catcatgtctgggaactttc

SEQ ID NO: 9030 - DNA, 20 bp, synthetic construct
  misc_feature 1..20: note = Description of Artificial Sequence: Synthetic oligonucleotide
  misc_feature 1..20: note = Target: SCN10A; (+) strand; PAM type: NNGRRT; PAM sequence: ATGGAT
  source 1..20: mol_type = other DNA
gaaactgcagaacaccaaag

SEQ ID NO: 9031 - DNA, 20 bp, synthetic construct
  misc_feature 1..20: note = Description of Artificial Sequence: Synthetic oligonucleotide
  misc_feature 1..20: note = Target: SCN10A; (+) strand; PAM type: NNGRRT; PAM sequence: AGGAAT
  source 1..20: mol_type = other DNA
taaaaagcatccagaaagga

SEQ ID NO: 9032 - DNA, 20 bp, synthetic construct
  misc_feature 1..20: note = Description of Artificial Sequence: Synthetic oligonucleotide
  misc_feature 1..20: note = Target: SCN10A; (+) strand; PAM type: NNGRRT; PAM sequence: TGGAAT
  source 1..20: mol_type = other DNA
caacaatggaggctaattgt

SEQ ID NO: 9033 - DNA, 20 bp, synthetic construct
  misc_feature 1..20: note = Description of Artificial Sequence: Synthetic oligonucleotide
  misc_feature 1..20: note = Target: SCN10A; (+) strand; PAM type: NNGRRT; PAM sequence: TAGAAT
  source 1..20: mol_type = other DNA
aaggaagataaagtatcaac

SEQ ID NO: 9034 - DNA, 20 bp, synthetic construct
  misc_feature 1..20: note = Description of Artificial Sequence: Synthetic oligonucleotide
  misc_feature 1..20: note = Target: SCN10A; (+) strand; PAM type: NNGRRT; PAM sequence: AAGAAT
  source 1..20: mol_type = other DNA
atatgtaatgtgtaatatac

SEQ ID NO: 9035 - DNA, 20 bp, synthetic construct
  misc_feature 1..20: note = Description of Artificial Sequence: Synthetic oligonucleotide
  misc_feature 1..20: note = Target: SCN10A; (+) strand; PAM type: NNGRRT; PAM sequence: AAGGGT
  source 1..20: mol_type = other DNA
gaatgtgaaactgtgctcca

SEQ ID NO: 9036 - DNA, 20 bp, synthetic construct
  misc_feature 1..20: note = Description of Artificial Sequence: Synthetic oligonucleotide
  misc_feature 1..20: note = Target: SCN10A; (+) strand; PAM type: NNGRRT; PAM sequence: CAGGAT
  source 1..20: mol_type = other DNA
taactaaatttttaggctta

SEQ ID NO: 9037 - DNA, 20 bp, synthetic construct
  misc_feature 1..20: note = Description of Artificial Sequence: Synthetic oligonucleotide
  misc_feature 1..20: note = Target: SCN10A; (+) strand; PAM type: NNGRRT; PAM sequence: AAGAGT
  source 1..20: mol_type = other DNA
gaaactcaaactgtgttcca

SEQ ID NO: 9038 - DNA, 20 bp, synthetic construct
  misc_feature 1..20: note = Description of Artificial Sequence: Synthetic oligonucleotide
  misc_feature 1..20: note = Target: SCN10A; (+) strand; PAM type: NNGRRT; PAM sequence: TTGAGT
  source 1..20: mol_type = other DNA
tcagtaacttacaaaaattc

SEQ ID NO: 9039 - DNA, 20 bp, synthetic construct
  misc_feature 1..20: note = Description of Artificial Sequence: Synthetic oligonucleotide
  misc_feature 1..20: note = Target: SCN10A; (+) strand; PAM type: NNGRRT; PAM sequence: TAGGAT
  source 1..20: mol_type = other DNA
tacaaaaattcttgagtttt

SEQ ID NO: 9040 - DNA, 20 bp, synthetic construct
  misc_feature 1..20: note = Description of Artificial Sequence: Synthetic oligonucleotide
  misc_feature 1..20: note = Target: SCN10A; (+) strand; PAM type: NNGRRT; PAM sequence: CAGGAT
  source 1..20: mol_type = other DNA
aggctgaaatcaattggaac

SEQ ID NO: 9041 - DNA, 20 bp, synthetic construct
  misc_feature 1..20: note = Description of Artificial Sequence: Synthetic oligonucleotide
  misc_feature 1..20: note = Target: SCN10A; (+) strand; PAM type: NNGRRT; PAM sequence: TGGAGT
  source 1..20: mol_type = other DNA
ttggaaccaggatggccgac

SEQ ID NO: 9042 - DNA, 20 bp, synthetic construct
  misc_feature 1..20: note = Description of Artificial Sequence: Synthetic oligonucleotide
  misc_feature 1..20: note = Target: SCN10A; (+) strand; PAM type: NNGRRT; PAM sequence: CAGAAT
  source 1..20: mol_type = other DNA
atggccgactggagtttgtg

SEQ ID NO: 9043 - DNA, 20 bp, synthetic construct
  misc_feature 1..20: note = Description of Artificial Sequence: Synthetic oligonucleotide
  misc_feature 1..20: note = Target: SCN10A; (+) strand; PAM type: NNGRRT; PAM sequence: CTGAAT
  source 1..20: mol_type = other DNA
gagcttgctgacgtcatgga

SEQ ID NO: 9044 - DNA, 20 bp, synthetic construct
  misc_feature 1..20: note = Description of Artificial Sequence: Synthetic oligonucleotide
  misc_feature 1..20: note = Target: SCN10A; (+) strand; PAM type: NNGRRT; PAM sequence: ATGAGT
  source 1..20: mol_type = other DNA
cagatttgcatatgcaaccc

SEQ ID NO: 9045 - DNA, 20 bp, synthetic construct
  misc_feature 1..20: note = Description of Artificial Sequence: Synthetic oligonucleotide
  misc_feature 1..20: note = Target: SCN10A; (+) strand; PAM type: NNGRRT; PAM sequence: GAGAGT
  source 1..20: mol_type = other DNA
agcaagaaagtgctaagcat

SEQ ID NO: 9046 - DNA, 20 bp, synthetic construct
  misc_feature 1..20: note = Description of Artificial Sequence: Synthetic oligonucleotide
  misc_feature 1..20: note = Target: SCN10A; (+) strand; PAM type: NNGRRT; PAM sequence: GTGAAT
  source 1..20: mol_type = other DNA
agaaagtgctaagcatgaga

SEQ ID NO: 9047 - DNA, 20 bp, synthetic construct
  misc_feature 1..20: note = Description of Artificial Sequence: Synthetic oligonucleotide
  misc_feature 1..20: note = Target: SCN10A; (+) strand; PAM type: NNGRRT; PAM sequence: TTGAGT
  source 1..20: mol_type = other DNA
agagtgaatctaaataaaca

SEQ ID NO: 9048 - DNA, 20 bp, synthetic construct
  misc_feature 1..20: note = Description of Artificial Sequence: Synthetic oligonucleotide
  misc_feature 1..20: note = Target: SCN10A; (+) strand; PAM type: NNGRRT; PAM sequence: TGGGGT
  source 1..20: mol_type = other DNA
cagttttgcttgcaaatagt

SEQ ID NO: 9049 - DNA, 20 bp, synthetic construct
  misc_feature 1..20: note = Description of Artificial Sequence: Synthetic oligonucleotide
  misc_feature 1..20: note = Target: SCN10A; (+) strand; PAM type: NNGRRT; PAM sequence: GTGGGT
  source 1..20: mol_type = other DNA
aaatagttggggtcatgtta

SEQ ID NO: 9050 - DNA, 20 bp, synthetic construct
  misc_feature 1..20: note = Description of Artificial Sequence: Synthetic oligonucleotide
  misc_feature 1..20: note = Target: SCN10A; (+) strand; PAM type: NNGRRT; PAM sequence: TGGAAT
  source 1..20: mol_type = other DNA
tgttagtgggttctgtctgg

SEQ ID NO: 9051 - DNA, 20 bp, synthetic construct
  misc_feature 1..20: note = Description of Artificial Sequence: Synthetic oligonucleotide
  misc_feature 1..20: note = Target: SCN10A; (+) strand; PAM type: NNGRRT; PAM sequence: TGGGAT
  source 1..20: mol_type = other DNA
aagatggtgacatcacgata

SEQ ID NO: 9052 - DNA, 20 bp, synthetic construct
  misc_feature 1..20: note = Description of Artificial Sequence: Synthetic oligonucleotide
  misc_feature 1..20: note = Target: SCN10A; (+) strand; PAM type: NNGRRT; PAM sequence: CTGAAT
  source 1..20: mol_type = other DNA
ggagagcttcccaacaagca

SEQ ID NO: 9053 - DNA, 20 bp, synthetic construct
  misc_feature 1..20: note = Description of Artificial Sequence: Synthetic oligonucleotide
  misc_feature 1..20: note = Target: SCN10A; (+) strand; PAM type: NNGRRT; PAM sequence: GAGGGT
  source 1..20: mol_type = other DNA
tatgttaactcacagattta

SEQ ID NO: 9054 - DNA, 20 bp, synthetic construct
  misc_feature 1..20: note = Description of Artificial Sequence: Synthetic oligonucleotide
  misc_feature 1..20: note = Target: SCN10A; (+) strand; PAM type: NNGRRT; PAM sequence: TTGAGT
  source 1..20: mol_type = other DNA
tgcagctagttgtacttatc

SEQ ID NO: 9055 - DNA, 20 bp, synthetic construct
  misc_feature 1..20: note = Description of Artificial Sequence: Synthetic oligonucleotide
  misc_feature 1..20: note = Target: SCN10A; (+) strand; PAM type: NNGRRT; PAM sequence: TGGAAT
  source 1..20: mol_type = other DNA
gaagctgataggagaaggct

SEQ ID NO: 9056 - DNA, 20 bp, synthetic construct
  misc_feature 1..20: note = Description of Artificial Sequence: Synthetic oligonucleotide
  misc_feature 1..20: note = Target: SCN10A; (+) strand; PAM type: NNGRRT; PAM sequence: AAGGGT
  source 1..20: mol_type = other DNA
tgaaccagcaaccctagggg

SEQ ID NO: 9057 - DNA, 20 bp, synthetic construct
  misc_feature 1..20: note = Description of Artificial Sequence: Synthetic oligonucleotide
  misc_feature 1..20: note = Target: SCN10A; (+) strand; PAM type: NNGRRT; PAM sequence: GTGGGT
  source 1..20: mol_type = other DNA
gtttattaaaccttagtatt

SEQ ID NO: 9058 - DNA, 20 bp, synthetic construct
  misc_feature 1..20: note = Description of Artificial Sequence: Synthetic oligonucleotide
  misc_feature 1..20: note = Target: SCN10A; (+) strand; PAM type: NNGRRT; PAM sequence: AAGAAT
  source 1..20: mol_type = other DNA
gaaagatttagctggtttat

SEQ ID NO: 9059 - DNA, 20 bp, synthetic construct
  misc_feature 1..20: note = Description of Artificial Sequence: Synthetic oligonucleotide
  misc_feature 1..20: note = Target: SCN10A; (+) strand; PAM type: NNGRRT; PAM sequence: TGGGAT
  source 1..20: mol_type = other DNA
agattccaggcagtgagcaa

SEQ ID NO: 9060 - DNA, 20 bp, synthetic construct
  misc_feature 1..20: note = Description of Artificial Sequence: Synthetic oligonucleotide
  misc_feature 1..20: note = Target: SCN10A; (+) strand; PAM type: NNGRRT; PAM sequence: TGGAGT
  source 1..20: mol_type = other DNA
ggcatggcaaagtcacttct

SEQ ID NO: 9061 - DNA, 20 bp, synthetic construct
  misc_feature 1..20: note = Description of Artificial Sequence: Synthetic oligonucleotide
  misc_feature 1..20: note = Target: SCN10A; (+) strand; PAM type: NNGRRT; PAM sequence: ACGAGT
  source 1..20: mol_type = other DNA
ggcttgcattaggctatgat

SEQ ID NO: 9062 - DNA, 20 bp, synthetic construct
  misc_feature 1..20: note = Description of Artificial Sequence: Synthetic oligonucleotide
  misc_feature 1..20: note = Target: SCN10A; (+) strand; PAM type: NNGRRT; PAM sequence: TGGGGT
  source 1..20: mol_type = other DNA
agtgagaaataaacctttat

SEQ ID NO: 9063 - DNA, 20 bp, synthetic construct
  misc_feature 1..20: note = Description of Artificial Sequence: Synthetic oligonucleotide
  misc_feature 1..20: note = Target: SCN10A; (+) strand; PAM type: NNGRRT; PAM sequence: AAGGAT
  source 1..20: mol_type = other DNA
atcattacaataaattggga

SEQ ID NO: 9064 - DNA, 20 bp, synthetic construct
  misc_feature 1..20: note = Description of Artificial Sequence: Synthetic oligonucleotide
  misc_feature 1..20: note = Target: SCN10A; (+) strand; PAM type: NNGRRT; PAM sequence: TGGAAT
  source 1..20: mol_type = other DNA
ataaattgggaaaggatatc

SEQ ID NO: 9065 - DNA, 20 bp, synthetic construct
  misc_feature 1..20: note = Description of Artificial Sequence: Synthetic oligonucleotide
  misc_feature 1..20: note = Target: SCN10A; (+) strand; PAM type: NNGRRT; PAM sequence: GAGAGT
  source 1..20: mol_type = other DNA
tttgattaagttaactaatg

SEQ ID NO: 9066 - DNA, 20 bp, synthetic construct
  misc_feature 1..20: note = Description of Artificial Sequence: Synthetic oligonucleotide
  misc_feature 1..20: note = Target: SCN10A; (+) strand; PAM type: NNGRRT; PAM sequence: TGGAGT
  source 1..20: mol_type = other DNA
ttatttatttatttttgaga

SEQ ID NO: 9067 - DNA, 20 bp, synthetic construct
  misc_feature 1..20: note = Description of Artificial Sequence: Synthetic oligonucleotide
  misc_feature 1..20: note = Target: SCN10A; (+) strand; PAM type: NNGRRT; PAM sequence: TGGAGT
  source 1..20: mol_type = other DNA
tttgcccttgttgcccaggc

SEQ ID NO: 9068 - DNA, 20 bp, synthetic construct
  misc_feature 1..20: note = Description of Artificial Sequence: Synthetic oligonucleotide
  misc_feature 1..20: note = Target: SCN10A; (+) strand; PAM type: NNGRRT; PAM sequence: CCGGGT
  source 1..20: mol_type = other DNA
ctcaccgcaacctccgcctc

SEQ ID NO: 9069 - DNA, 20 bp, synthetic construct
  misc_feature 1..20: note = Description of Artificial Sequence: Synthetic oligonucleotide
  misc_feature 1..20: note = Target: SCN10A; (+) strand; PAM type: NNGRRT; PAM sequence: TGGGAT
  source 1..20: mol_type = other DNA
ccctcagcctcccaagtagc

SEQ ID NO: 9070 - DNA, 20 bp, synthetic construct
  misc_feature 1..20: note = Description of Artificial Sequence: Synthetic oligonucleotide
  misc_feature 1..20: note = Target: SCN10A; (+) strand; PAM type: NNGRRT; PAM sequence: ATGGGT
  source 1..20: mol_type = other DNA
attttgtatttttggtagag

SEQ ID NO: 9071 - DNA, 20 bp, synthetic construct
  misc_feature 1..20: note = Description of Artificial Sequence: Synthetic oligonucleotide
  misc_feature 1..20: note = Target: SCN10A; (+) strand; PAM type: NNGRRT; PAM sequence: TGGGAT
  source 1..20: mol_type = other DNA
gcctgcgcctccaacagtgc

SEQ ID NO: 9072 - DNA, 20 bp, synthetic construct
  misc_feature 1..20: note = Description of Artificial Sequence: Synthetic oligonucleotide
  misc_feature 1..20: note = Target: SCN10A; (+) strand; PAM type: NNGRRT; PAM sequence: CGGAGT
  source 1..20: mol_type = other DNA
ttttattgttttcaatgaga

SEQ ID NO: 9073 - DNA, 20 bp, synthetic construct
  misc_feature 1..20: note = Description of Artificial Sequence: Synthetic oligonucleotide
  misc_feature 1..20: note = Target: SCN10A; (+) strand; PAM type: NNGRRT; PAM sequence: TGGAGT
  source 1..20: mol_type = other DNA
tctcgctctgttgcccaggc

SEQ ID NO: 9074 - DNA, 20 bp, synthetic construct
  misc_feature 1..20: note = Description of Artificial Sequence: Synthetic oligonucleotide
  misc_feature 1..20: note = Target: SCN10A; (+) strand; PAM type: NNGRRT; PAM sequence: TGGGAT
  source 1..20: mol_type = other DNA
ctcactgcaacctctgtctc

SEQ ID NO: 9075 - DNA, 20 bp, synthetic construct
  misc_feature 1..20: note = Description of Artificial Sequence: Synthetic oligonucleotide
  misc_feature 1..20: note = Target: SCN10A; (+) strand; PAM type: NNGRRT; PAM sequence: CTGAGT
  source 1..20: mol_type = other DNA
aattctcatgcctcaccctc

SEQ ID NO: 9076 - DNA, 20 bp, synthetic construct
  misc_feature 1..20: note = Description of Artificial Sequence: Synthetic oligonucleotide
  misc_feature 1..20: note = Target: SCN10A; (+) strand; PAM type: NNGRRT; PAM sequence: TGGGAT
  source 1..20: mol_type = other DNA
gcctcaccctcctgagtagc

SEQ ID NO: 9077 - DNA, 20 bp, synthetic construct
  misc_feature 1..20: note = Description of Artificial Sequence: Synthetic oligonucleotide
  misc_feature 1..20: note = Target: SCN10A; (+) strand; PAM type: NNGRRT; PAM sequence: TGGGGT
  source 1..20: mol_type = other DNA
ttatatatttttagtagaga

SEQ ID NO: 9078 - DNA, 20 bp, synthetic construct
  misc_feature 1..20: note = Description of Artificial Sequence: Synthetic oligonucleotide
  misc_feature 1..20: note = Target: SCN10A; (+) strand; PAM type: NNGRRT; PAM sequence: TGGGAT
  source 1..20: mol_type = other DNA
accttggcctcccaaaattc

SEQ ID NO: 9079 - DNA, 20 bp, synthetic construct
  misc_feature 1..20: note = Description of Artificial Sequence: Synthetic oligonucleotide
  misc_feature 1..20: note = Target: SCN10A; (+) strand; PAM type: NNGRRT; PAM sequence: ATGGAT
  source 1..20: mol_type = other DNA
atcaaatattactcattgat

SEQ ID NO: 9080 - DNA, 20 bp, synthetic construct
  misc_feature 1..20: note = Description of Artificial Sequence: Synthetic oligonucleotide
  misc_feature 1..20: note = Target: SCN10A; (+) strand; PAM type: NNGRRT; PAM sequence: GGGAAT
  source 1..20: mol_type = other DNA
gatcaagctaggtttgagct

SEQ ID NO: 9081 - DNA, 20 bp, synthetic construct
  misc_feature 1..20: note = Description of Artificial Sequence: Synthetic oligonucleotide
  misc_feature 1..20: note = Target: SCN10A; (+) strand; PAM type: NNGRRT; PAM sequence: TAGAAT
  source 1..20: mol_type = other DNA
catgattatctcaatacatg

SEQ ID NO: 9082 - DNA, 20 bp, synthetic construct
  misc_feature 1..20: note = Description of Artificial Sequence: Synthetic oligonucleotide
  misc_feature 1..20: note = Target: SCN10A; (+) strand; PAM type: NNGRRT; PAM sequence: AAGGAT
  source 1..20: mol_type = other DNA
tagaggtggtgaaatattga

SEQ ID NO: 9083 - DNA, 20 bp, synthetic construct
  misc_feature 1..20: note = Description of Artificial Sequence: Synthetic oligonucleotide
  misc_feature 1..20: note = Target: SCN10A; (+) strand; PAM type: NNGRRT; PAM sequence: TGGGAT
  source 1..20: mol_type = other DNA
aatattgaaaggattctttt

SEQ ID NO: 9084 - DNA, 20 bp, synthetic construct
  misc_feature 1..20: note = Description of Artificial Sequence: Synthetic oligonucleotide
  misc_feature 1..20: note = Target: SCN10A; (+) strand; PAM type: NNGRRT; PAM sequence: CTGGAT
  source 1..20: mol_type = other DNA
cacttcttttcaacagtgta

SEQ ID NO: 9085 - DNA, 20 bp, synthetic construct
  misc_feature 1..20: note = Description of Artificial Sequence: Synthetic oligonucleotide
  misc_feature 1..20: note = Target: SCN10A; (+) strand; PAM type: NNGRRT; PAM sequence: AAGGAT
  source 1..20: mol_type = other DNA
taaaaagaacctaatggcat

SEQ ID NO: 9086 - DNA, 20 bp, synthetic construct
  misc_feature 1..20: note = Description of Artificial Sequence: Synthetic oligonucleotide
  misc_feature 1..20: note = Target: SCN10A; (+) strand; PAM type: NNGRRT; PAM sequence: GTGGGT
  source 1..20: mol_type = other DNA
aagaagaaattaggctgggc

SEQ ID NO: 9087 - DNA, 20 bp, synthetic construct
  misc_feature 1..20: note = Description of Artificial Sequence: Synthetic oligonucleotide
  misc_feature 1..20: note = Target: SCN10A; (+) strand; PAM type: NNGRRT; PAM sequence: AAGAAT
  source 1..20: mol_type = other DNA
ccgtctctactaaaaataca

SEQ ID NO: 9088 - DNA, 20 bp, synthetic construct
  misc_feature 1..20: note = Description of Artificial Sequence: Synthetic oligonucleotide
  misc_feature 1..20: note = Target: SCN10A; (+) strand; PAM type: NNGRRT; PAM sequence: GTGGGT
  source 1..20: mol_type = other DNA
agaattagccaggcatggtg

SEQ ID NO: 9089 - DNA, 20 bp, synthetic construct
  misc_feature 1..20: note = Description of Artificial Sequence: Synthetic oligonucleotide
  misc_feature 1..20: note = Target: SCN10A; (+) strand; PAM type: NNGRRT; PAM sequence: GAGAAT
  source 1..20: mol_type = other DNA
tactcaggaggctgaggcag

SEQ ID NO: 9090 - DNA, 20 bp, synthetic construct
  misc_feature 1..20: note = Description of Artificial Sequence: Synthetic oligonucleotide
  misc_feature 1..20: note = Target: SCN10A; (+) strand; PAM type: NNGRRT; PAM sequence: CTGGGT
  source 1..20: mol_type = other DNA
tcacgccactgcactctagc

SEQ ID NO: 9091 - DNA, 20 bp, synthetic construct
  misc_feature 1..20: note = Description of Artificial Sequence: Synthetic oligonucleotide
  misc_feature 1..20: note = Target: SCN10A; (+) strand; PAM type: NNGRRT; PAM sequence: TAGAAT
  source 1..20: mol_type = other DNA
acattgtatagataaattat

SEQ ID NO: 9092 - DNA, 20 bp, synthetic construct
  misc_feature 1..20: note = Description of Artificial Sequence: Synthetic oligonucleotide
  misc_feature 1..20: note = Target: SCN10A; (+) strand; PAM type: NNGRRT; PAM sequence: CTGAAT
  source 1..20: mol_type = other DNA
tatcttcatagatcagaaga

SEQ ID NO: 9093 - DNA, 20 bp, synthetic construct
  misc_feature 1..20: note = Description of Artificial Sequence: Synthetic oligonucleotide
  misc_feature 1..20: note = Target: SCN10A; (+) strand; PAM type: NNGRRT; PAM sequence: GTGGGT
  source 1..20: mol_type = other DNA
aatagcagttttgtgtgtat

SEQ ID NO: 9094 - DNA, 20 bp, synthetic construct
  misc_feature 1..20: note = Description of Artificial Sequence: Synthetic oligonucleotide
  misc_feature 1..20: note = Target: SCN10A; (+) strand; PAM type: NNGRRT; PAM sequence: GTGAAT
  source 1..20: mol_type = other DNA
cttggcaagataattctaaa

SEQ ID NO: 9095 - DNA, 20 bp, synthetic construct
  misc_feature 1..20: note = Description of Artificial Sequence: Synthetic oligonucleotide
  misc_feature 1..20: note = Target: SCN10A; (+) strand; PAM type: NNGRRT; PAM sequence: GTGGAT
  source 1..20: mol_type = other DNA
atattcttgaagtaaattag

SEQ ID NO: 9096 - DNA, 20 bp, synthetic construct
  misc_feature 1..20: note = Description of Artificial Sequence: Synthetic oligonucleotide
  misc_feature 1..20: note = Target: SCN10A; (+) strand; PAM type: NNGRRT; PAM sequence: CAGGAT
  source 1..20: mol_type = other DNA
attaagactgatattggtgc

SEQ ID NO: 9097 - DNA, 20 bp, synthetic construct
  misc_feature 1..20: note = Description of Artificial Sequence: Synthetic oligonucleotide
  misc_feature 1..20: note = Target: SCN10A; (+) strand; PAM type: NNGRRT; PAM sequence: TTGAGT
  source 1..20: mol_type = other DNA
aatcaatcaacaggtgttta

SEQ ID NO: 9098 - DNA, 20 bp, synthetic construct
  misc_feature 1..20: note = Description of Artificial Sequence: Synthetic oligonucleotide
  misc_feature 1..20: note = Target: SCN10A; (+) strand; PAM type: NNGRRT; PAM sequence: TGGGAT
  source 1..20: mol_type = other DNA
tgggccttgtgctaggccct

SEQ ID NO: 9099 - DNA, 20 bp, synthetic construct
  misc_feature 1..20: note = Description of Artificial Sequence: Synthetic oligonucleotide
  misc_feature 1..20: note = Target: SCN10A; (+) strand; PAM type: NNGRRT; PAM sequence: TGGGAT
  source 1..20: mol_type = other DNA
aaactctggtttttgcctca

SEQ ID NO: 9100 - DNA, 20 bp, synthetic construct
  misc_feature 1..20: note = Description of Artificial Sequence: Synthetic oligonucleotide
  misc_feature 1..20: note = Target: SCN10A; (+) strand; PAM type: NNGRRT; PAM sequence: AGGAAT
  source 1..20: mol_type = other DNA
atgccaggttaatttgatga

SEQ ID NO: 9101 - DNA, 20 bp, synthetic construct
  misc_feature 1..20: note = Description of Artificial Sequence: Synthetic oligonucleotide
  misc_feature 1..20: note = Target: SCN10A; (+) strand; PAM type: NNGRRT; PAM sequence: CAGAGT
  source 1..20: mol_type = other DNA
ggtgacaagtgcattgaaca

SEQ ID NO: 9102 - DNA, 20 bp, synthetic construct
  misc_feature 1..20: note = Description of Artificial Sequence: Synthetic oligonucleotide
  misc_feature 1..20: note = Target: SCN10A; (+) strand; PAM type: NNGRRT; PAM sequence: GAGAAT
  source 1..20: mol_type = other DNA
gtgcattgaacacagagttt

SEQ ID NO: 9103 - DNA, 20 bp, synthetic construct
  misc_feature 1..20: note = Description of Artificial Sequence: Synthetic oligonucleotide
  misc_feature 1..20: note = Target: SCN10A; (+) strand; PAM type: NNGRRT; PAM sequence: GAGAGT
  source 1..20: mol_type = other DNA
tctgttatgtgtgaagaaga

SEQ ID NO: 9104 - DNA, 20 bp, synthetic construct
  misc_feature 1..20: note = Description of Artificial Sequence: Synthetic oligonucleotide
  misc_feature 1..20: note = Target: SCN10A; (+) strand; PAM type: NNGRRT; PAM sequence: AGGAGT
  source 1..20: mol_type = other DNA
gaactttgtacaccatcatg

SEQ ID NO: 9105 - DNA, 20 bp, synthetic construct
  misc_feature 1..20: note = Description of Artificial Sequence: Synthetic oligonucleotide
  misc_feature 1..20: note = Target: SCN10A; (+) strand; PAM type: NNGRRT; PAM sequence: CTGGAT
  source 1..20: mol_type = other DNA
tgtacaccatcatgaggagt

SEQ ID NO: 9106 - DNA, 20 bp, synthetic construct
  misc_feature 1..20: note = Description of Artificial Sequence: Synthetic oligonucleotide
  misc_feature 1..20: note = Target: SCN10A; (+) strand; PAM type: NNGRRT; PAM sequence: TGGGAT
  source 1..20: mol_type = other DNA
gtgtgtgtgtgtgtgtgttg

SEQ ID NO: 9107 - DNA, 20 bp, synthetic construct
  misc_feature 1..20: note = Description of Artificial Sequence: Synthetic oligonucleotide
  misc_feature 1..20: note = Target: SCN10A; (+) strand; PAM type: NNGRRT; PAM sequence: TTGAGT
  source 1..20: mol_type = other DNA
gaggcagagggaaaaggtga

SEQ ID NO: 9108 - DNA, 20 bp, synthetic construct
  misc_feature 1..20: note = Description of Artificial Sequence: Synthetic oligonucleotide
  misc_feature 1..20: note = Target: SCN10A; (+) strand; PAM type: NNGRRT; PAM sequence: TGGAAT
  source 1..20: mol_type = other DNA
aagctaggtcatgagggaag

SEQ ID NO: 9109 - DNA, 20 bp, synthetic construct
  misc_feature 1..20: note = Description of Artificial Sequence: Synthetic oligonucleotide
  misc_feature 1..20: note = Target: SCN10A; (+) strand; PAM type: NNGRRT; PAM sequence: GTGGGT
  source 1..20: mol_type = other DNA
cccaagaaagtgtgtagttg

SEQ ID NO: 9110 - DNA, 20 bp, synthetic construct
  misc_feature 1..20: note = Description of Artificial Sequence: Synthetic oligonucleotide
  misc_feature 1..20: note = Target: SCN10A; (+) strand; PAM type: NNGRRT; PAM sequence: GGGAAT
  source 1..20: mol_type = other DNA
gtagttggtgggtgtggtta

SEQ ID NO: 9111 - DNA, 20 bp, synthetic construct
  misc_feature 1..20: note = Description of Artificial Sequence: Synthetic oligonucleotide
  misc_feature 1..20: note = Target: SCN10A; (+) strand; PAM type: NNGRRT; PAM sequence: CAGGGT
  source 1..20: mol_type = other DNA
ttaaatcagcgaggtgggga

SEQ ID NO: 9112 - DNA, 20 bp, synthetic construct
  misc_feature 1..20: note = Description of Artificial Sequence: Synthetic oligonucleotide
  misc_feature 1..20: note = Target: SCN10A; (+) strand; PAM type: NNGRRT; PAM sequence: CAGAAT
  source 1..20: mol_type = other DNA
gacagggtagcattcccctg

SEQ ID NO: 9113 - DNA, 20 bp, synthetic construct
  misc_feature 1..20: note = Description of Artificial Sequence: Synthetic oligonucleotide
  misc_feature 1..20: note = Target: SCN10A; (+) strand; PAM type: NNGRRT; PAM sequence: TGGGAT
  source 1..20: mol_type = other DNA
ttgtttgggactttagactg

SEQ ID NO: 9114 - DNA, 20 bp, synthetic construct
  misc_feature 1..20: note = Description of Artificial Sequence: Synthetic oligonucleotide
  misc_feature 1..20: note = Target: SCN10A; (+) strand; PAM type: NNGRRT; PAM sequence: CGGAGT
  source 1..20: mol_type = other DNA
ttttttttttttttttgaga

SEQ ID NO: 9115 - DNA, 20 bp, synthetic construct
  misc_feature 1..20: note = Description of Artificial Sequence: Synthetic oligonucleotide
  misc_feature 1..20: note = Target: SCN10A; (+) strand; PAM type: NNGRRT; PAM sequence: CCGGAT
  source 1..20: mol_type = other DNA
gtcccgctgtttagcccagg

SEQ ID NO: 9116 - DNA, 20 bp, synthetic construct
  misc_feature 1..20: note = Description of Artificial Sequence: Synthetic oligonucleotide
  misc_feature 1..20: note = Target: SCN10A; (+) strand; PAM type: NNGRRT; PAM sequence: CCGAGT
  source 1..20: mol_type = other DNA
cattctcctgcctcagcctc

SEQ ID NO: 9117 - DNA, 20 bp, synthetic construct
  misc_feature 1..20: note = Description of Artificial Sequence: Synthetic oligonucleotide
  misc_feature 1..20: note = Target: SCN10A; (+) strand; PAM type: NNGRRT; PAM sequence: CGGGGT
  source 1..20: mol_type = other DNA
ttttgtatttttagtagaga

SEQ ID NO: 9118 - DNA, 20 bp, synthetic construct
  misc_feature 1..20: note = Description of Artificial Sequence: Synthetic oligonucleotide
  misc_feature 1..20: note = Target: SCN10A; (+) strand; PAM type: NNGRRT; PAM sequence: TGGGAT
  source 1..20: mol_type = other DNA
gcctcggcctcccaaagtgc

SEQ ID NO: 9119 - DNA, 20 bp, synthetic construct
  misc_feature 1..20: note = Description of Artificial Sequence: Synthetic oligonucleotide
  misc_feature 1..20: note = Target: SCN10A; (+) strand; PAM type: NNGRRT; PAM sequence: CAGGGT
  source 1..20: mol_type = other DNA
aaaactaactgtgggcctgc

SEQ ID NO: 9120 - DNA, 20 bp, synthetic construct
  misc_feature 1..20: note = Description of Artificial Sequence: Synthetic oligonucleotide
  misc_feature 1..20: note = Target: SCN10A; (+) strand; PAM type: NNGRRT; PAM sequence: GGGGGT
  source 1..20: mol_type = other DNA
ctgtgggcctgccagggtat

SEQ ID NO: 9121 - DNA, 20 bp, synthetic construct
  misc_feature 1..20: note = Description of Artificial Sequence: Synthetic oligonucleotide
  misc_feature 1..20: note = Target: SCN10A; (+) strand; PAM type: NNGRRT; PAM sequence: ATGGAT
  source 1..20: mol_type = other DNA
ccttgtaagattttcaagtt

SEQ ID NO: 9122 - DNA, 20 bp, synthetic construct
  misc_feature 1..20: note = Description of Artificial Sequence: Synthetic oligonucleotide
  misc_feature 1..20: note = Target: SCN10A; (+) strand; PAM type: NNGRRT; PAM sequence: AAGAGT
  source 1..20: mol_type = other DNA
agattttcaagttatggata

SEQ ID NO: 9123 - DNA, 20 bp, synthetic construct
  misc_feature 1..20: note = Description of Artificial Sequence: Synthetic oligonucleotide
  misc_feature 1..20: note = Target: SCN10A; (+) strand; PAM type: NNGRRT; PAM sequence: TGGGAT
  source 1..20: mol_type = other DNA
tactctacccttctcctccc

SEQ ID NO: 9124 - DNA, 20 bp, synthetic construct
  misc_feature 1..20: note = Description of Artificial Sequence: Synthetic oligonucleotide
  misc_feature 1..20: note = Target: SCN10A; (+) strand; PAM type: NNGRRT; PAM sequence: TAGAGT
  source 1..20: mol_type = other DNA
gacatgctttatttggtctt

SEQ ID NO: 9125 - DNA, 20 bp, synthetic construct
  misc_feature 1..20: note = Description of Artificial Sequence: Synthetic oligonucleotide
  misc_feature 1..20: note = Target: SCN10A; (+) strand; PAM type: NNGRRT; PAM sequence: CTGGAT
  source 1..20: mol_type = other DNA
ctttagagtgtttttaaaaa

SEQ ID NO: 9126 - DNA, 20 bp, synthetic construct
  misc_feature 1..20: note = Description of Artificial Sequence: Synthetic oligonucleotide
  misc_feature 1..20: note = Target: SCN10A; (+) strand; PAM type: NNGRRT; PAM sequence: CTGGAT
  source 1..20: mol_type = other DNA
aaagacatttgcacaaaaat

SEQ ID NO: 9127 - DNA, 20 bp, synthetic construct
  misc_feature 1..20: note = Description of Artificial Sequence: Synthetic oligonucleotide
  misc_feature 1..20: note = Target: SCN10A; (+) strand; PAM type: NNGRRT; PAM sequence: TGGAGT
  source 1..20: mol_type = other DNA
tcttactctgtctcccaggc

SEQ ID NO: 9128 - DNA, 20 bp, synthetic construct
  misc_feature 1..20: note = Description of Artificial Sequence: Synthetic oligonucleotide
  misc_feature 1..20: note = Target: SCN10A; (+) strand; PAM type: NNGRRT; PAM sequence: CTGAGT
  source 1..20: mol_type = other DNA
gatcctcccacctcagtctt

SEQ ID NO: 9129 - DNA, 20 bp, synthetic construct
  misc_feature 1..20: note = Description of Artificial Sequence: Synthetic oligonucleotide
  misc_feature 1..20: note = Target: SCN10A; (+) strand; PAM type: NNGRRT; PAM sequence: TAGGAT
  source 1..20: mol_type = other DNA
acctcagtcttctgagtagc

SEQ ID NO: 9130 - DNA, 20 bp, synthetic construct
  misc_feature 1..20: note = Description of Artificial Sequence: Synthetic oligonucleotide
  misc_feature 1..20: note = Target: SCN10A; (+) strand; PAM type: NNGRRT; PAM sequence: CGGGGT
  source 1..20: mol_type = other DNA
tttttcattttttgtagaga

SEQ ID NO: 9131 - DNA, 20 bp, synthetic construct
  misc_feature 1..20: note = Description of Artificial Sequence: Synthetic oligonucleotide
  misc_feature 1..20: note = Target: SCN10A; (+) strand; PAM type: NNGRRT; PAM sequence: TAGGAT
  source 1..20: mol_type = other DNA
gcctcggcctcccaaagtac

SEQ ID NO: 9132 - DNA, 20 bp, synthetic construct
  misc_feature 1..20: note = Description of Artificial Sequence: Synthetic oligonucleotide
  misc_feature 1..20: note = Target: SCN10A; (+) strand; PAM type: NNGRRT; PAM sequence: AGGAGT
  source 1..20: mol_type = other DNA
tctatgtaaacatccctccc

SEQ ID NO: 9133 - DNA, 20 bp, synthetic construct
  misc_feature 1..20: note = Description of Artificial Sequence: Synthetic oligonucleotide
  misc_feature 1..20: note = Target: SCN10A; (+) strand; PAM type: NNGRRT; PAM sequence: TTGGGT
  source 1..20: mol_type = other DNA
cccaggagttgtgcactgct

SEQ ID NO: 9134 - DNA, 20 bp, synthetic construct
  misc_feature 1..20: note = Description of Artificial Sequence: Synthetic oligonucleotide
  misc_feature 1..20: note = Target: SCN10A; (+) strand; PAM type: NNGRRT; PAM sequence: TGGAGT
  source 1..20: mol_type = other DNA
ttgggtctgcctaggtgaaa

SEQ ID NO: 9135 - DNA, 20 bp, synthetic construct
  misc_feature 1..20: note = Description of Artificial Sequence: Synthetic oligonucleotide
  misc_feature 1..20: note = Target: SCN10A; (+) strand; PAM type: NNGRRT; PAM sequence: TTGAGT
  source 1..20: mol_type = other DNA
atgtcactgcacatgggcat

SEQ ID NO: 9136 - DNA, 20 bp, synthetic construct
  misc_feature 1..20: note = Description of Artificial Sequence: Synthetic oligonucleotide
  misc_feature 1..20: note = Target: SCN10A; (+) strand; PAM type: NNGRRT; PAM sequence: TAGGGT
  source 1..20: mol_type = other DNA
tgtctcactggcccctgtga

SEQ ID NO: 9137 - DNA, 20 bp, synthetic construct
  misc_feature 1..20: note = Description of Artificial Sequence: Synthetic oligonucleotide
  misc_feature 1..20: note = Target: SCN10A; (+) strand; PAM type: NNGRRT; PAM sequence: TAGAGT
  source 1..20: mol_type = other DNA
ggtcccaagcagatctgtcc

SEQ ID NO: 9138 - DNA, 20 bp, synthetic construct
  misc_feature 1..20: note = Description of Artificial Sequence: Synthetic oligonucleotide
  misc_feature 1..20: note = Target: SCN10A; (+) strand; PAM type: NNGRRT; PAM sequence: CTGGAT
  source 1..20: mol_type = other DNA
ccatgcacccccttcaacct

SEQ ID NO: 9139 - DNA, 20 bp, synthetic construct
  misc_feature 1..20: note = Description of Artificial Sequence: Synthetic oligonucleotide
  misc_feature 1..20: note = Target: SCN10A; (+) strand; PAM type: NNGRRT; PAM sequence: TTGGAT
  source 1..20: mol_type = other DNA
tcaggaccttgggaagattg

SEQ ID NO: 9140 - DNA, 20 bp, synthetic construct
  misc_feature 1..20: note = Description of Artificial Sequence: Synthetic oligonucleotide
  misc_feature 1..20: note = Target: SCN10A; (+) strand; PAM type: NNGRRT; PAM sequence: AAGAGT
  source 1..20: mol_type = other DNA
caggcctctttcctattccc

SEQ ID NO: 9141 - DNA, 20 bp, synthetic construct
  misc_feature 1..20: note = Description of Artificial Sequence: Synthetic oligonucleotide
  misc_feature 1..20: note = Target: SCN10A; (+) strand; PAM type: NNGRRT; PAM sequence: GGGAAT
  source 1..20: mol_type = other DNA
cctagtgacccgacactcct

SEQ ID NO: 9142 - DNA, 20 bp, synthetic construct
  misc_feature 1..20: note = Description of Artificial Sequence: Synthetic oligonucleotide
  misc_feature 1..20: note = Target: SCN10A; (+) strand; PAM type: NNGRRT; PAM sequence: GTGGGT
  source 1..20: mol_type = other DNA
aacctgtggctctgataaaa

SEQ ID NO: 9143 - DNA, 20 bp, synthetic construct
  misc_feature 1..20: note = Description of Artificial Sequence: Synthetic oligonucleotide
  misc_feature 1..20: note = Target: SCN10A; (+) strand; PAM type: NNGRRT; PAM sequence: CTGAGT
  source 1..20: mol_type = other DNA
ctgtagagggcgtcctggag

SEQ ID NO: 9144 - DNA, 20 bp, synthetic construct
  misc_feature 1..20: note = Description of Artificial Sequence: Synthetic oligonucleotide
  misc_feature 1..20: note = Target: SCN10A; (+) strand; PAM type: NNGRRT; PAM sequence: GTGAGT
  source 1..20: mol_type = other DNA
gagaagagccatcattgcat

SEQ ID NO: 9145 - DNA, 20 bp, synthetic construct
  misc_feature 1..20: note = Description of Artificial Sequence: Synthetic oligonucleotide
  misc_feature 1..20: note = Target: SCN10A; (+) strand; PAM type: NNGRRT; PAM sequence: GGGAAT
  source 1..20: mol_type = other DNA
ggctgtgatttcgggcacaa

SEQ ID NO: 9146 - DNA, 20 bp, synthetic construct
  misc_feature 1..20: note = Description of Artificial Sequence: Synthetic oligonucleotide
  misc_feature 1..20: note = Target: SCN10A; (+) strand; PAM type: NNGRRT; PAM sequence: GAGAAT
  source 1..20: mol_type = other DNA
tttcgggcacaagggaatca

SEQ ID NO: 9147 - DNA, 20 bp, synthetic construct
  misc_feature 1..20: note = Description of Artificial Sequence: Synthetic oligonucleotide
  misc_feature 1..20: note = Target: SCN10A; (+) strand; PAM type: NNGRRT; PAM sequence: TGGAGT
  source 1..20: mol_type = other DNA
gctggaaggagctggggctc

SEQ ID NO: 9148 - DNA, 20 bp, synthetic construct
  misc_feature 1..20: note = Description of Artificial Sequence: Synthetic oligonucleotide
  misc_feature 1..20: note = Target: SCN10A; (+) strand; PAM type: NNGRRT; PAM sequence: CTGGAT
  source 1..20: mol_type = other DNA
gggctctggagtcagacaac

SEQ ID NO: 9149 - DNA, 20 bp, synthetic construct
  misc_feature 1..20: note = Description of Artificial Sequence: Synthetic oligonucleotide
  misc_feature 1..20: note = Target: SCN10A; (+) strand; PAM type: NNGRRT; PAM sequence: TCGGGT
  source 1..20: mol_type = other DNA
gcttggcagatgggagactt

SEQ ID NO: 9150 - DNA, 20 bp, synthetic construct
  misc_feature 1..20: note = Description of Artificial Sequence: Synthetic oligonucleotide
  misc_feature 1..20: note = Target: SCN10A; (+) strand; PAM type: NNGRRT; PAM sequence: GAGGAT
  source 1..20: mol_type = other DNA
ctttttcctcacccacccct

SEQ ID NO: 9151 - DNA, 20 bp, synthetic construct
  misc_feature 1..20: note = Description of Artificial Sequence: Synthetic oligonucleotide
  misc_feature 1..20: note = Target: SCN10A; (+) strand; PAM type: NNGRRT; PAM sequence: CAGGGT
  source 1..20: mol_type = other DNA
tcttaaaaacgactatctct

SEQ ID NO: 9152 - DNA, 20 bp, synthetic construct
  misc_feature 1..20: note = Description of Artificial Sequence: Synthetic oligonucleotide
  misc_feature 1..20: note = Target: SCN10A; (+) strand; PAM type: NNGRRT; PAM sequence: CTGAGT
  source 1..20: mol_type = other DNA
ggagaaggcatgtccccact

SEQ ID NO: 9153 - DNA, 20 bp, synthetic construct
  misc_feature 1..20: note = Description of Artificial Sequence: Synthetic oligonucleotide
  misc_feature 1..20: note = Target: SCN10A; (+) strand; PAM type: NNGRRT; PAM sequence: AGGAGT
  source 1..20: mol_type = other DNA
acccaagtctccagtcgccc

SEQ ID NO: 9154 - DNA, 20 bp, synthetic construct
  misc_feature 1..20: note = Description of Artificial Sequence: Synthetic oligonucleotide
  misc_feature 1..20: note = Target: SCN10A; (+) strand; PAM type: NNGRRT; PAM sequence: CTGAAT
  source 1..20: mol_type = other DNA
cccagagcacagtgtcttcc

SEQ ID NO: 9155 - DNA, 20 bp, synthetic construct
  misc_feature 1..20: note = Description of Artificial Sequence: Synthetic oligonucleotide
  misc_feature 1..20: note = Target: SCN10A; (+) strand; PAM type: NNGRRT; PAM sequence: CTGGGT
  source 1..20: mol_type = other DNA
gcacagtgtcttccctgaat

SEQ ID NO: 9156 - DNA, 20 bp, synthetic construct
  misc_feature 1..20: note = Description of Artificial Sequence: Synthetic oligonucleotide
  misc_feature 1..20: note = Target: SCN10A; (+) strand; PAM type: NNGRRT; PAM sequence: GGGAGT
  source 1..20: mol_type = other DNA
tgtcttccctgaatctgggt

SEQ ID NO: 9157 - DNA, 20 bp, synthetic construct
  misc_feature 1..20: note = Description of Artificial Sequence: Synthetic oligonucleotide
  misc_feature 1..20: note = Target: SCN10A; (+) strand; PAM type: NNGRRT; PAM sequence: ATGGGT
  source 1..20: mol_type = other DNA
cttcttctggaaataatagt

SEQ ID NO: 9158 - DNA, 20 bp, synthetic construct
  misc_feature 1..20: note = Description of Artificial Sequence: Synthetic oligonucleotide
  misc_feature 1..20: note = Target: SCN10A; (+) strand; PAM type: NNGRRT; PAM sequence: AGGAGT
  source 1..20: mol_type = other DNA
aaaaaatatggtaaagacct

SEQ ID NO: 9159 - DNA, 20 bp, synthetic construct
  misc_feature 1..20: note = Description of Artificial Sequence: Synthetic oligonucleotide
  misc_feature 1..20: note = Target: SCN10A; (+) strand; PAM type: NNGRRT; PAM sequence: TGGGAT
  source 1..20: mol_type = other DNA
gaaacaagctttcatcacag

SEQ ID NO: 9160 - DNA, 20 bp, synthetic construct
  misc_feature 1..20: note = Description of Artificial Sequence: Synthetic oligonucleotide
  misc_feature 1..20: note = Target: SCN10A; (+) strand; PAM type: NNGRRT; PAM sequence: TGGGGT
  source 1..20: mol_type = other DNA
tttcatcacagtgggatctg

SEQ ID NO: 9161 - DNA, 20 bp, synthetic construct
  misc_feature 1..20: note = Description of Artificial Sequence: Synthetic oligonucleotide
  misc_feature 1..20: note = Target: SCN10A; (+) strand; PAM type: NNGRRT; PAM sequence: GAGGAT
  source 1..20: mol_type = other DNA
tatgttatctgtgggctcct

SEQ ID NO: 9162 - DNA, 20 bp, synthetic construct
  misc_feature 1..20: note = Description of Artificial Sequence: Synthetic oligonucleotide
  misc_feature 1..20: note = Target: SCN10A; (+) strand; PAM type: NNGRRT; PAM sequence: CAGGGT
  source 1..20: mol_type = other DNA
gtgggctcctgaggattggc

SEQ ID NO: 9163 - DNA, 20 bp, synthetic construct
  misc_feature 1..20: note = Description of Artificial Sequence: Synthetic oligonucleotide
  misc_feature 1..20: note = Target: SCN10A; (+) strand; PAM type: NNGRRT; PAM sequence: CAGAAT
  source 1..20: mol_type = other DNA
cagggtaacagtcaacgtga

SEQ ID NO: 9164 - DNA, 20 bp, synthetic construct
  misc_feature 1..20: note = Description of Artificial Sequence: Synthetic oligonucleotide
  misc_feature 1..20: note = Target: SCN10A; (+) strand; PAM type: NNGRRT; PAM sequence: GTGAAT
  source 1..20: mol_type = other DNA
gcatgctgcagtttttccac

SEQ ID NO: 9165 - DNA, 20 bp, synthetic construct
  misc_feature 1..20: note = Description of Artificial Sequence: Synthetic oligonucleotide
  misc_feature 1..20: note = Target: SCN10A; (+) strand; PAM type: NNGRRT; PAM sequence: GGGAGT
  source 1..20: mol_type = other DNA
ttttccacgtgaatggtggt

SEQ ID NO: 9166 - DNA, 20 bp, synthetic construct
  misc_feature 1..20: note = Description of Artificial Sequence: Synthetic oligonucleotide
  misc_feature 1..20: note = Target: SCN10A; (+) strand; PAM type: NNGRRT; PAM sequence: TGGAAT
  source 1..20: mol_type = other DNA
cacgtgaatggtggtgggag

SEQ ID NO: 9167 - DNA, 20 bp, synthetic construct
  misc_feature 1..20: note = Description of Artificial Sequence: Synthetic oligonucleotide
  misc_feature 1..20: note = Target: SCN10A; (+) strand; PAM type: NNGRRT; PAM sequence: GCGGAT
  source 1..20: mol_type = other DNA
tggtggtgggagtggaataa

SEQ ID NO: 9168 - DNA, 20 bp, synthetic construct
  misc_feature 1..20: note = Description of Artificial Sequence: Synthetic oligonucleotide
  misc_feature 1..20: note = Target: SCN10A; (+) strand; PAM type: NNGRRT; PAM sequence: AAGAGT
  source 1..20: mol_type = other DNA
ataatatcattttgtcagtg

SEQ ID NO: 9169 - DNA, 20 bp, synthetic construct
  misc_feature 1..20: note = Description of Artificial Sequence: Synthetic oligonucleotide
  misc_feature 1..20: note = Target: SCN10A; (+) strand; PAM type: NNGRRT; PAM sequence: GTGGGT
  source 1..20: mol_type = other DNA
tggttcagtagttaaaacgt

SEQ ID NO: 9170 - DNA, 20 bp, synthetic construct
  misc_feature 1..20: note = Description of Artificial Sequence: Synthetic oligonucleotide
  misc_feature 1..20: note = Target: SCN10A; (+) strand; PAM type: NNGRRT; PAM sequence: CTGGAT
  source 1..20: mol_type = other DNA
ggttgtgggacatcacagac

SEQ ID NO: 9171 - DNA, 20 bp, synthetic construct
  misc_feature 1..20: note = Description of Artificial Sequence: Synthetic oligonucleotide
  misc_feature 1..20: note = Target: SCN10A; (+) strand; PAM type: NNGRRT; PAM sequence: CAGAAT
  source 1..20: mol_type = other DNA
tctaattgtcttaaatagga

SEQ ID NO: 9172 - DNA, 20 bp, synthetic construct
  misc_feature 1..20: note = Description of Artificial Sequence: Synthetic oligonucleotide
  misc_feature 1..20: note = Target: SCN10A; (+) strand; PAM type: NNGRRT; PAM sequence: TCGGGT
  source 1..20: mol_type = other DNA
gagagaggtcagaaccaggc

SEQ ID NO: 9173 - DNA, 20 bp, synthetic construct
  misc_feature 1..20: note = Description of Artificial Sequence: Synthetic oligonucleotide
  misc_feature 1..20: note = Target: SCN10A; (+) strand; PAM type: NNGRRT; PAM sequence: CAGGGT
  source 1..20: mol_type = other DNA
agaaggaggaaagcaacgac

SEQ ID NO: 9174 - DNA, 20 bp, synthetic construct
  misc_feature 1..20: note = Description of Artificial Sequence: Synthetic oligonucleotide
  misc_feature 1..20: note = Target: SCN10A; (+) strand; PAM type: NNGRRT; PAM sequence: GAGAGT
  source 1..20: mol_type = other DNA
tatggagaagaaaacaggct

SEQ ID NO: 9175 - DNA, 20 bp, synthetic construct
  misc_feature 1..20: note = Description of Artificial Sequence: Synthetic oligonucleotide
  misc_feature 1..20: note = Target: SCN10A; (+) strand; PAM type: NNGRRT; PAM sequence: AAGAGT
  source 1..20: mol_type = other DNA
catgccacaagactgattca

SEQ ID NO: 9176 - DNA, 20 bp, synthetic construct
  misc_feature 1..20: note = Description of Artificial Sequence: Synthetic oligonucleotide
  misc_feature 1..20: note = Target: SCN10A; (+) strand; PAM type: NNGRRT; PAM sequence: TGGAGT
  source 1..20: mol_type = other DNA
actgattcaaagagtatcta

SEQ ID NO: 9177 - DNA, 20 bp, synthetic construct
  misc_feature 1..20: note = Description of Artificial Sequence: Synthetic oligonucleotide
  misc_feature 1..20: note = Target: SCN10A; (+) strand; PAM type: NNGRRT; PAM sequence: GGGGGT
  source 1..20: mol_type = other DNA
caagtcagtgtggtgtggtg

SEQ ID NO: 9178 - DNA, 20 bp, synthetic construct
  misc_feature 1..20: note = Description of Artificial Sequence: Synthetic oligonucleotide
  misc_feature 1..20: note = Target: SCN10A; (+) strand; PAM type: NNGRRT; PAM sequence: TAGGGT
  source 1..20: mol_type = other DNA
cagtgtggtgtggtgggggg

SEQ ID NO: 9179 - DNA, 20 bp, synthetic construct
  misc_feature 1..20: note = Description of Artificial Sequence: Synthetic oligonucleotide
  misc_feature 1..20: note = Target: SCN10A; (+) strand; PAM type: NNGRRT; PAM sequence: CTGGGT
  source 1..20: mol_type = other DNA
gtcttgtgtcttccagagac

SEQ ID NO: 9180 - DNA, 20 bp, synthetic construct
  misc_feature 1..20: note = Description of Artificial Sequence: Synthetic oligonucleotide
  misc_feature 1..20: note = Target: SCN10A; (+) strand; PAM type: NNGRRT; PAM sequence: CTGGAT
  source 1..20: mol_type = other DNA
tccagagacctgggtccacc

SEQ ID NO: 9181 - DNA, 20 bp, synthetic construct
  misc_feature 1..20: note = Description of Artificial Sequence: Synthetic oligonucleotide
  misc_feature 1..20: note = Target: SCN10A; (+) strand; PAM type: NNGRRT; PAM sequence: CAGGAT
  source 1..20: mol_type = other DNA
accagctatacaattttggg

SEQ ID NO: 9182 - DNA, 20 bp, synthetic construct
  misc_feature 1..20: note = Description of Artificial Sequence: Synthetic oligonucleotide
  misc_feature 1..20: note = Target: SCN10A; (+) strand; PAM type: NNGRRT; PAM sequence: CTGAGT
  source 1..20: mol_type = other DNA
gggcaggatatttaacctct

SEQ ID NO: 9183 - DNA, 20 bp, synthetic construct
  misc_feature 1..20: note = Description of Artificial Sequence: Synthetic oligonucleotide
  misc_feature 1..20: note = Target: SCN10A; (+) strand; PAM type: NNGRRT; PAM sequence: GAGGGT
  source 1..20: mol_type = other DNA
agtgctctcttttgtcatgt

SEQ ID NO: 9184 - DNA, 20 bp, synthetic construct
  misc_feature 1..20: note = Description of Artificial Sequence: Synthetic oligonucleotide
  misc_feature 1..20: note = Target: SCN10A; (+) strand; PAM type: NNGRRT; PAM sequence: TAGAAT
  source 1..20: mol_type = other DNA
tgcttccacttttctaactg

SEQ ID NO: 9185 - DNA, 20 bp, synthetic construct
  misc_feature 1..20: note = Description of Artificial Sequence: Synthetic oligonucleotide
  misc_feature 1..20: note = Target: SCN10A; (+) strand; PAM type: NNGRRT; PAM sequence: GAGGGT
  source 1..20: mol_type = other DNA
cacttttctaactgtagaat

SEQ ID NO: 9186 - DNA, 20 bp, synthetic construct
  misc_feature 1..20: note = Description of Artificial Sequence: Synthetic oligonucleotide
  misc_feature 1..20: note = Target: SCN10A; (+) strand; PAM type: NNGRRT; PAM sequence: GGGAAT
  source 1..20: mol_type = other DNA
tggtcttaggctgacttctt

SEQ ID NO: 9187 - DNA, 20 bp, synthetic construct
  misc_feature 1..20: note = Description of Artificial Sequence: Synthetic oligonucleotide
  misc_feature 1..20: note = Target: SCN10A; (+) strand; PAM type: NNGRRT; PAM sequence: TAGGAT
  source 1..20: mol_type = other DNA
tttccttttcatatcaactt

SEQ ID NO: 9188 - DNA, 20 bp, synthetic construct
  misc_feature 1..20: note = Description of Artificial Sequence: Synthetic oligonucleotide
  misc_feature 1..20: note = Target: SCN10A; (+) strand; PAM type: NNGRRT; PAM sequence: CTGGAT
  source 1..20: mol_type = other DNA
ctgctgcccctttcacagcc

SEQ ID NO: 9189 - DNA, 20 bp, synthetic construct
  misc_feature 1..20: note = Description of Artificial Sequence: Synthetic oligonucleotide
  misc_feature 1..20: note = Target: SCN10A; (+) strand; PAM type: NNGRRT; PAM sequence: GGGAGT
  source 1..20: mol_type = other DNA
cagccctggattatggcgga

SEQ ID NO: 9190 - DNA, 20 bp, synthetic construct
  misc_feature 1..20: note = Description of Artificial Sequence: Synthetic oligonucleotide
  misc_feature 1..20: note = Target: SCN10A; (+) strand; PAM type: NNGRRT; PAM sequence: GTGAAT
  source 1..20: mol_type = other DNA
cccaaagccagacagttctg

SEQ ID NO: 9191 - DNA, 20 bp, synthetic construct
  misc_feature 1..20: note = Description of Artificial Sequence: Synthetic oligonucleotide
  misc_feature 1..20: note = Target: SCN10A; (+) strand; PAM type: NNGRRT; PAM sequence: CAGGAT
  source 1..20: mol_type = other DNA
ccctgctgcggacatgaagg

SEQ ID NO: 9192 - DNA, 20 bp, synthetic construct
  misc_feature 1..20: note = Description of Artificial Sequence: Synthetic oligonucleotide
  misc_feature 1..20: note = Target: SCN10A; (+) strand; PAM type: NNGRRT; PAM sequence: AGGGGT
  source 1..20: mol_type = other DNA
cttgtgaggtggcttaattc

SEQ ID NO: 9193 - DNA, 20 bp, synthetic construct
  misc_feature 1..20: note = Description of Artificial Sequence: Synthetic oligonucleotide
  misc_feature 1..20: note = Target: SCN10A; (+) strand; PAM type: NNGRRT; PAM sequence: CTGGGT
  source 1..20: mol_type = other DNA
gggcttggcagccggtctgt

SEQ ID NO: 9194 - DNA, 20 bp, synthetic construct
  misc_feature 1..20: note = Description of Artificial Sequence: Synthetic oligonucleotide
  misc_feature 1..20: note = Target: SCN10A; (+) strand; PAM type: NNGRRT; PAM sequence: GGGAAT
  source 1..20: mol_type = other DNA
ccatttttccatctgggaaa

SEQ ID NO: 9195 - DNA, 20 bp, synthetic construct
  misc_feature 1..20: note = Description of Artificial Sequence: Synthetic oligonucleotide
  misc_feature 1..20: note = Target: SCN10A; (+) strand; PAM type: NNGRRT; PAM sequence: AAGAGT
  source 1..20: mol_type = other DNA
catctgggaaagggaataac

SEQ ID NO: 9196 - DNA, 20 bp, synthetic construct
  misc_feature 1..20: note = Description of Artificial Sequence: Synthetic oligonucleotide
  misc_feature 1..20: note = Target: SCN10A; (+) strand; PAM type: NNGRRT; PAM sequence: TAGGGT
  source 1..20: mol_type = other DNA
taacaagagtgcctaccatg

SEQ ID NO: 9197 - DNA, 20 bp, synthetic construct
  misc_feature 1..20: note = Description of Artificial Sequence: Synthetic oligonucleotide
  misc_feature 1..20: note = Target: SCN10A; (+) strand; PAM type: NNGRRT; PAM sequence: CTGAGT
  source 1..20: mol_type = other DNA
agataatccatgagaagcat

SEQ ID NO: 9198 - DNA, 20 bp, synthetic construct
  misc_feature 1..20: note = Description of Artificial Sequence: Synthetic oligonucleotide
  misc_feature 1..20: note = Target: SCN10A; (+) strand; PAM type: NNGRRT; PAM sequence: GTGGGT
  source 1..20: mol_type = other DNA
tgagtattattactattcct

SEQ ID NO: 9199 - DNA, 20 bp, synthetic construct
  misc_feature 1..20: note = Description of Artificial Sequence: Synthetic oligonucleotide
  misc_feature 1..20: note = Target: SCN10A; (+) strand; PAM type: NNGRRT; PAM sequence: CTGAGT
  source 1..20: mol_type = other DNA
ttggagcagttgttgtccct

SEQ ID NO: 9200 - DNA, 20 bp, synthetic construct
  misc_feature 1..20: note = Description of Artificial Sequence: Synthetic oligonucleotide
  misc_feature 1..20: note = Target: SCN10A; (+) strand; PAM type: NNGRRT; PAM sequence: ATGGAT
  source 1..20: mol_type = other DNA
agtatatagtgaaatccagt

SEQ ID NO: 9201 - DNA, 20 bp, synthetic construct
  misc_feature 1..20: note = Description of Artificial Sequence: Synthetic oligonucleotide
  misc_feature 1..20: note = Target: SCN10A; (+) strand; PAM type: NNGRRT; PAM sequence: AAGAGT
  source 1..20: mol_type = other DNA
agtatggattgtatcttgtt

SEQ ID NO: 9202 - DNA, 20 bp, synthetic construct
  misc_feature 1..20: note = Description of Artificial Sequence: Synthetic oligonucleotide
  misc_feature 1..20: note = Target: SCN10A; (+) strand; PAM type: NNGRRT; PAM sequence: CTGGGT
  source 1..20: mol_type = other DNA
gccattcccaccagctcagc

SEQ ID NO: 9203 - DNA, 20 bp, synthetic construct
  misc_feature 1..20: note = Description of Artificial Sequence: Synthetic oligonucleotide
  misc_feature 1..20: note = Target: SCN10A; (+) strand; PAM type: NNGRRT; PAM sequence: AGGGAT
  source 1..20: mol_type = other DNA
ggtgatggtgagctctgcaa

SEQ ID NO: 9204 - DNA, 20 bp, synthetic construct
  misc_feature 1..20: note = Description of Artificial Sequence: Synthetic oligonucleotide
  misc_feature 1..20: note = Target: SCN10A; (+) strand; PAM type: NNGRRT; PAM sequence: GAGAAT
  source 1..20: mol_type = other DNA
ggatccgtcacaagcccaaa

SEQ ID NO: 9205 - DNA, 20 bp, synthetic construct
  misc_feature 1..20: note = Description of Artificial Sequence: Synthetic oligonucleotide
  misc_feature 1..20: note = Target: SCN10A; (+) strand; PAM type: NNGRRT; PAM sequence: CAGGGT
  source 1..20: mol_type = other DNA
tctgagacaagctggtcaag

SEQ ID NO: 9206 - DNA, 20 bp, synthetic construct
  misc_feature 1..20: note = Description of Artificial Sequence: Synthetic oligonucleotide
  misc_feature 1..20: note = Target: SCN10A; (+) strand; PAM type: NNGRRT; PAM sequence: TCGAGT
  source 1..20: mol_type = other DNA
ggcacttctgttcagactcc

SEQ ID NO: 9207 - DNA, 20 bp, synthetic construct
  misc_feature 1..20: note = Description of Artificial Sequence: Synthetic oligonucleotide
  misc_feature 1..20: note = Target: SCN10A; (+) strand; PAM type: NNGRRT; PAM sequence: GTGAAT
  source 1..20: mol_type = other DNA
tgcctggcaaaacctgaact

SEQ ID NO: 9208 - DNA, 20 bp, synthetic construct
  misc_feature 1..20: note = Description of Artificial Sequence: Synthetic oligonucleotide
  misc_feature 1..20: note = Target: SCN10A; (+) strand; PAM type: NNGRRT; PAM sequence: CAGAAT
  source 1..20: mol_type = other DNA
gagctcccttttatttcact

SEQ ID NO: 9209 - DNA, 20 bp, synthetic construct
  misc_feature 1..20: note = Description of Artificial Sequence: Synthetic oligonucleotide
  misc_feature 1..20: note = Target: SCN10A; (+) strand; PAM type: NNGRRT; PAM sequence: GTGGGT
  source 1..20: mol_type = other DNA
cttcgtgccccacacagtgc

SEQ ID NO: 9210 - DNA, 20 bp, synthetic construct
  misc_feature 1..20: note = Description of Artificial Sequence: Synthetic oligonucleotide
  misc_feature 1..20: note = Target: SCN10A; (+) strand; PAM type: NNGRRT; PAM sequence: AAGAGT
  source 1..20: mol_type = other DNA
ttgacagtaaaattccttgc

SEQ ID NO: 9211 - DNA, 20 bp, synthetic construct
  misc_feature 1..20: note = Description of Artificial Sequence: Synthetic oligonucleotide
  misc_feature 1..20: note = Target: SCN10A; (+) strand; PAM type: NNGRRT; PAM sequence: TGGAAT
  source 1..20: mol_type = other DNA
ctttttttctctgcagcccc

SEQ ID NO: 9212 - DNA, 20 bp, synthetic construct
  misc_feature 1..20: note = Description of Artificial Sequence: Synthetic oligonucleotide
  misc_feature 1..20: note = Target: SCN10A; (+) strand; PAM type: NNGRRT; PAM sequence: CAGAAT
  source 1..20: mol_type = other DNA
cttacccttataacatttga

SEQ ID NO: 9213 - DNA, 20 bp, synthetic construct
  misc_feature 1..20: note = Description of Artificial Sequence: Synthetic oligonucleotide
  misc_feature 1..20: note = Target: SCN10A; (+) strand; PAM type: NNGRRT; PAM sequence: TTGAAT
  source 1..20: mol_type = other DNA
tcctttcctgcttgtaaatg

SEQ ID NO: 9214 - DNA, 20 bp, synthetic construct
  misc_feature 1..20: note = Description of Artificial Sequence: Synthetic oligonucleotide
  misc_feature 1..20: note = Target: SCN10A; (+) strand; PAM type: NNGRRT; PAM sequence: TTGAAT
  source 1..20: mol_type = other DNA
accttagcttctctgtgttt

SEQ ID NO: 9215 - DNA, 20 bp, synthetic construct
  misc_feature 1..20: note = Description of Artificial Sequence: Synthetic oligonucleotide
  misc_feature 1..20: note = Target: SCN10A; (+) strand; PAM type: NNGRRT; PAM sequence: GTGGAT
  source 1..20: mol_type = other DNA
tgcctccgttaaatctccat

SEQ ID NO: 9216 - DNA, 20 bp, synthetic construct
  misc_feature 1..20: note = Description of Artificial Sequence: Synthetic oligonucleotide
  misc_feature 1..20: note = Target: SCN10A; (+) strand; PAM type: NNGRRT; PAM sequence: AAGAAT
  source 1..20: mol_type = other DNA
aagcataatacattgtgaaa

SEQ ID NO: 9217 - DNA, 20 bp, synthetic construct
  misc_feature 1..20: note = Description of Artificial Sequence: Synthetic oligonucleotide
  misc_feature 1..20: note = Target: SCN10A; (+) strand; PAM type: NNGRRT; PAM sequence: AAGAAT
  source 1..20: mol_type = other DNA
tatgcatagaacattgcttg

SEQ ID NO: 9218 - DNA, 20 bp, synthetic construct
  misc_feature 1..20: note = Description of Artificial Sequence: Synthetic oligonucleotide
  misc_feature 1..20: note = Target: SCN10A; (+) strand; PAM type: NNGRRT; PAM sequence: TGGAGT
  source 1..20: mol_type = other DNA
ttgaagaatataagataaac

SEQ ID NO: 9219 - DNA, 20 bp, synthetic construct
  misc_feature 1..20: note = Description of Artificial Sequence: Synthetic oligonucleotide
  misc_feature 1..20: note = Target: SCN10A; (+) strand; PAM type: NNGRRT; PAM sequence: GGGGGT
  source 1..20: mol_type = other DNA
aagataaactggagtgggag

SEQ ID NO: 9220 - DNA, 20 bp, synthetic construct
  misc_feature 1..20: note = Description of Artificial Sequence: Synthetic oligonucleotide
  misc_feature 1..20: note = Target: SCN10A; (+) strand; PAM type: NNGRRT; PAM sequence: AGGAGT
  source 1..20: mol_type = other DNA
gagtgggaggggggtgcacc

SEQ ID NO: 9221 - DNA, 20 bp, synthetic construct
  misc_feature 1..20: note = Description of Artificial Sequence: Synthetic oligonucleotide
  misc_feature 1..20: note = Target: SCN10A; (+) strand; PAM type: NNGRRT; PAM sequence: AAGGGT
  source 1..20: mol_type = other DNA
ccaggagtctggggagcagg

SEQ ID NO: 9222 - DNA, 20 bp, synthetic construct
  misc_feature 1..20: note = Description of Artificial Sequence: Synthetic oligonucleotide
  misc_feature 1..20: note = Target: SCN10A; (+) strand; PAM type: NNGRRT; PAM sequence: TAGGGT
  source 1..20: mol_type = other DNA
gcatacacacttgcagtgtt

SEQ ID NO: 9223 - DNA, 20 bp, synthetic construct
  misc_feature 1..20: note = Description of Artificial Sequence: Synthetic oligonucleotide
  misc_feature 1..20: note = Target: SCN10A; (+) strand; PAM type: NNGRRT; PAM sequence: TAGGGT
  source 1..20: mol_type = other DNA
ttaaattatactttaagttt

SEQ ID NO: 9224 - DNA, 20 bp, synthetic construct
  misc_feature 1..20: note = Description of Artificial Sequence: Synthetic oligonucleotide
  misc_feature 1..20: note = Target: SCN10A; (+) strand; PAM type: NNGRRT; PAM sequence: TTGGGT
  source 1..20: mol_type = other DNA
tggtgcatttgaaatttatt

SEQ ID NO: 9225 - DNA, 20 bp, synthetic construct
  misc_feature 1..20: note = Description of Artificial Sequence: Synthetic oligonucleotide
  misc_feature 1..20: note = Target: SCN10A; (+) strand; PAM type: NNGRRT; PAM sequence: AAGAGT
  source 1..20: mol_type = other DNA
tttgaaatttattttgggta

SEQ ID NO: 9226 - DNA, 20 bp, synthetic construct
  misc_feature 1..20: note = Description of Artificial Sequence: Synthetic oligonucleotide
  misc_feature 1..20: note = Target: SCN10A; (+) strand; PAM type: NNGRRT; PAM sequence: TTGAAT
  source 1..20: mol_type = other DNA
atttatatcaacattactta

SEQ ID NO: 9227 - DNA, 20 bp, synthetic construct
  misc_feature 1..20: note = Description of Artificial Sequence: Synthetic oligonucleotide
  misc_feature 1..20: note = Target: SCN10A; (+) strand; PAM type: NNGRRT; PAM sequence: CTGGAT
  source 1..20: mol_type = other DNA
catgctgttttaatcactga

SEQ ID NO: 9228 - DNA, 20 bp, synthetic construct
  misc_feature 1..20: note = Description of Artificial Sequence: Synthetic oligonucleotide
  misc_feature 1..20: note = Target: SCN10A; (+) strand; PAM type: NNGRRT; PAM sequence: ATGAAT
  source 1..20: mol_type = other DNA
aagaagcacaggaagtagtc

SEQ ID NO: 9229 - DNA, 20 bp, synthetic construct
  misc_feature 1..20: note = Description of Artificial Sequence: Synthetic oligonucleotide
  misc_feature 1..20: note = Target: SCN10A; (+) strand; PAM type: NNGRRT; PAM sequence: AAGGAT
  source 1..20: mol_type = other DNA
tgaccatggccccacctcaa

SEQ ID NO: 9230 - DNA, 20 bp, synthetic construct
  misc_feature 1..20: note = Description of Artificial Sequence: Synthetic oligonucleotide
  misc_feature 1..20: note = Target: SCN10A; (+) strand; PAM type: NNGRRT; PAM sequence: AGGAGT
  source 1..20: mol_type = other DNA
gcattctctcctgccactgc

SEQ ID NO: 9231 - DNA, 20 bp, synthetic construct
  misc_feature 1..20: note = Description of Artificial Sequence: Synthetic oligonucleotide
  misc_feature 1..20: note = Target: SCN10A; (+) strand; PAM type: NNGRRT; PAM sequence: TTGAAT
  source 1..20: mol_type = other DNA
cctgccactgcaggagtctg

SEQ ID NO: 9232 - DNA, 20 bp, synthetic construct
  misc_feature 1..20: note = Description of Artificial Sequence: Synthetic oligonucleotide
  misc_feature 1..20: note = Target: SCN10A; (+) strand; PAM type: NNGRRT; PAM sequence: CTGGGT
  source 1..20: mol_type = other DNA
ttccttttcagtctcctctg

SEQ ID NO: 9233 - DNA, 20 bp, synthetic construct
  misc_feature 1..20: note = Description of Artificial Sequence: Synthetic oligonucleotide
  misc_feature 1..20: note = Target: SCN10A; (+) strand; PAM type: NNGRRT; PAM sequence: ATGAGT
  source 1..20: mol_type = other DNA
tcccctaaaatgctcccttt

SEQ ID NO: 9234 - DNA, 20 bp, synthetic construct
  misc_feature 1..20: note = Description of Artificial Sequence: Synthetic oligonucleotide
  misc_feature 1..20: note = Target: SCN10A; (+) strand; PAM type: NNGRRT; PAM sequence: CTGAAT
  source 1..20: mol_type = other DNA
accatatgcatcatcaagtc

SEQ ID NO: 9235 - DNA, 20 bp, synthetic construct
  misc_feature 1..20: note = Description of Artificial Sequence: Synthetic oligonucleotide
  misc_feature 1..20: note = Target: SCN10A; (+) strand; PAM type: NNGRRT; PAM sequence: CAGAGT
  source 1..20: mol_type = other DNA
cagccccactgtcactaccc

SEQ ID NO: 9236 - DNA, 20 bp, synthetic construct
  misc_feature 1..20: note = Description of Artificial Sequence: Synthetic oligonucleotide
  misc_feature 1..20: note = Target: SCN10A; (+) strand; PAM type: NNGRRT; PAM sequence: CAGAGT
  source 1..20: mol_type = other DNA
ctcttatatctacaagtatc

SEQ ID NO: 9237 - DNA, 20 bp, synthetic construct
  misc_feature 1..20: note = Description of Artificial Sequence: Synthetic oligonucleotide
  misc_feature 1..20: note = Target: SCN10A; (+) strand; PAM type: NNGRRT; PAM sequence: AGGAGT
  source 1..20: mol_type = other DNA
ccatatccttaatgcagtct

SEQ ID NO: 9238 - DNA, 20 bp, synthetic construct
  misc_feature 1..20: note = Description of Artificial Sequence: Synthetic oligonucleotide
  misc_feature 1..20: note = Target: SCN10A; (+) strand; PAM type: NNGRRT; PAM sequence: TGGGAT
  source 1..20: mol_type = other DNA
aatgcagtctaggagtttct

SEQ ID NO: 9239 - DNA, 20 bp, synthetic construct
  misc_feature 1..20: note = Description of Artificial Sequence: Synthetic oligonucleotide
  misc_feature 1..20: note = Target: SCN10A; (+) strand; PAM type: NNGRRT; PAM sequence: TGGGAT
  source 1..20: mol_type = other DNA
gctttgcagtcctttcagcc

SEQ ID NO: 9240 - DNA, 20 bp, synthetic construct
  misc_feature 1..20: note = Description of Artificial Sequence: Synthetic oligonucleotide
  misc_feature 1..20: note = Target: SCN10A; (+) strand; PAM type: NNGRRT; PAM sequence: TGGAAT
  source 1..20: mol_type = other DNA
cactgctgtgacccagcttc

SEQ ID NO: 9241 - DNA, 20 bp, synthetic construct
  misc_feature 1..20: note = Description of Artificial Sequence: Synthetic oligonucleotide
  misc_feature 1..20: note = Target: SCN10A; (+) strand; PAM type: NNGRRT; PAM sequence: TTGAGT
  source 1..20: mol_type = other DNA
gcatagaaggttcacatgct

SEQ ID NO: 9242 - DNA, 20 bp, synthetic construct
  misc_feature 1..20: note = Description of Artificial Sequence: Synthetic oligonucleotide
  misc_feature 1..20: note = Target: SCN10A; (+) strand; PAM type: NNGRRT; PAM sequence: GTGAAT
  source 1..20: mol_type = other DNA
gttcacatgctttgagttca

SEQ ID NO: 9243 - DNA, 20 bp, synthetic construct
  misc_feature 1..20: note = Description of Artificial Sequence: Synthetic oligonucleotide
  misc_feature 1..20: note = Target: SCN10A; (+) strand; PAM type: NNGRRT; PAM sequence: ATGAAT
  source 1..20: mol_type = other DNA
tcaggtgtctcatgtgtgta

SEQ ID NO: 9244 - DNA, 20 bp, synthetic construct
  misc_feature 1..20: note = Description of Artificial Sequence: Synthetic oligonucleotide
  misc_feature 1..20: note = Target: SCN10A; (+) strand; PAM type: NNGRRT; PAM sequence: CTGGGT
  source 1..20: mol_type = other DNA
tttgtgcatgcacttgtctt

SEQ ID NO: 9245 - DNA, 20 bp, synthetic construct
  misc_feature 1..20: note = Description of Artificial Sequence: Synthetic oligonucleotide
  misc_feature 1..20: note = Target: SCN10A; (+) strand; PAM type: NNGRRT; PAM sequence: ATGAGT
  source 1..20: mol_type = other DNA
aatcataatagccaaatgtg

SEQ ID NO: 9246 - DNA, 20 bp, synthetic construct
  misc_feature 1..20: note = Description of Artificial Sequence: Synthetic oligonucleotide
  misc_feature 1..20: note = Target: SCN10A; (+) strand; PAM type: NNGRRT; PAM sequence: TAGGAT
  source 1..20: mol_type = other DNA
tgtaccataagtggaagagc

SEQ ID NO: 9247 - DNA, 20 bp, synthetic construct
  misc_feature 1..20: note = Description of Artificial Sequence: Synthetic oligonucleotide
  misc_feature 1..20: note = Target: SCN10A; (+) strand; PAM type: NNGRRT; PAM sequence: CCGGGT
  source 1..20: mol_type = other DNA
taggatgcaaacccaggcag

SEQ ID NO: 9248 - DNA, 20 bp, synthetic construct
  misc_feature 1..20: note = Description of Artificial Sequence: Synthetic oligonucleotide
  misc_feature 1..20: note = Target: SCN10A; (+) strand; PAM type: NNGRRT; PAM sequence: TGGGAT
  source 1..20: mol_type = other DNA
ttcttttgtcttacctacac

SEQ ID NO: 9249 - DNA, 20 bp, synthetic construct
  misc_feature 1..20: note = Description of Artificial Sequence: Synthetic oligonucleotide
  misc_feature 1..20: note = Target: SCN10A; (+) strand; PAM type: NNGRRT; PAM sequence: CAGAAT
  source 1..20: mol_type = other DNA
ttgttgctatctcattcttg

SEQ ID NO: 9250 - DNA, 20 bp, synthetic construct
  misc_feature 1..20: note = Description of Artificial Sequence: Synthetic oligonucleotide
  misc_feature 1..20: note = Target: SCN10A; (+) strand; PAM type: NNGRRT; PAM sequence: GAGAAT
  source 1..20: mol_type = other DNA
aaatttctgttcttcttgga

SEQ ID NO: 9251 - DNA, 20 bp, synthetic construct
  misc_feature 1..20: note = Description of Artificial Sequence: Synthetic oligonucleotide
  misc_feature 1..20: note = Target: SCN10A; (+) strand; PAM type: NNGRRT; PAM sequence: CTGAAT
  source 1..20: mol_type = other DNA
ttttctcctacttcttatat

SEQ ID NO: 9252 - DNA, 20 bp, synthetic construct
  misc_feature 1..20: note = Description of Artificial Sequence: Synthetic oligonucleotide
  misc_feature 1..20: note = Target: SCN10A; (+) strand; PAM type: NNGRRT; PAM sequence: TAGGAT
  source 1..20: mol_type = other DNA
tttcatgtccccttccctgc

SEQ ID NO: 9253 - DNA, 20 bp, synthetic construct
  misc_feature 1..20: note = Description of Artificial Sequence: Synthetic oligonucleotide
  misc_feature 1..20: note = Target: SCN10A; (+) strand; PAM type: NNGRRT; PAM sequence: CTGAAT
  source 1..20: mol_type = other DNA
aagcttatatcagttcacca

SEQ ID NO: 9254 - DNA, 20 bp, synthetic construct
  misc_feature 1..20: note = Description of Artificial Sequence: Synthetic oligonucleotide
  misc_feature 1..20: note = Target: SCN10A; (+) strand; PAM type: NNGRRT; PAM sequence: GAGAAT
  source 1..20: mol_type = other DNA
caacaaatgcttgttgataa

SEQ ID NO: 9255 - DNA, 20 bp, synthetic construct
  misc_feature 1..20: note = Description of Artificial Sequence: Synthetic oligonucleotide
  misc_feature 1..20: note = Target: SCN10A; (+) strand; PAM type: NNGRRT; PAM sequence: GAGAAT
  source 1..20: mol_type = other DNA
gaggaagcttaacagttttc

SEQ ID NO: 9256 - DNA, 20 bp, synthetic construct
  misc_feature 1..20: note = Description of Artificial Sequence: Synthetic oligonucleotide
  misc_feature 1..20: note = Target: SCN10A; (+) strand; PAM type: NNGRRT; PAM sequence: GGGAAT
  source 1..20: mol_type = other DNA
ctggccaagaaagaaattgt

SEQ ID NO: 9257 - DNA, 20 bp, synthetic construct
  misc_feature 1..20: note = Description of Artificial Sequence: Synthetic oligonucleotide
  misc_feature 1..20: note = Target: SCN10A; (+) strand; PAM type: NNGRRT; PAM sequence: GAGAGT
  source 1..20: mol_type = other DNA
aatgagaaaaaataatagaa

SEQ ID NO: 9258 - DNA, 20 bp, synthetic construct
  misc_feature 1..20: note = Description of Artificial Sequence: Synthetic oligonucleotide
  misc_feature 1..20: note = Target: SCN10A; (+) strand; PAM type: NNGRRT; PAM sequence: ATGAGT
  source 1..20: mol_type = other DNA
gtacacgttgttgttgagaa

SEQ ID NO: 9259 - DNA, 20 bp, synthetic construct
  misc_feature 1..20: note = Description of Artificial Sequence: Synthetic oligonucleotide
  misc_feature 1..20: note = Target: SCN10A; (+) strand; PAM type: NNGRRT; PAM sequence: TTGAAT
  source 1..20: mol_type = other DNA
atgcaagaaatgtaacttag

SEQ ID NO: 9260 - DNA, 20 bp, synthetic construct
  misc_feature 1..20: note = Description of Artificial Sequence: Synthetic oligonucleotide
  misc_feature 1..20: note = Target: SCN10A; (+) strand; PAM type: NNGRRT; PAM sequence: TTGGGT
  source 1..20: mol_type = other DNA
tgtctcttgttaagtcaatg

SEQ ID NO: 9261 - DNA, 20 bp, synthetic construct
  misc_feature 1..20: note = Description of Artificial Sequence: Synthetic oligonucleotide
  misc_feature 1..20: note = Target: SCN10A; (+) strand; PAM type: NNGRRT; PAM sequence: CTGAGT
  source 1..20: mol_type = other DNA
gttgggtactatttcaatat

SEQ ID NO: 9262 - DNA, 20 bp, synthetic construct
  misc_feature 1..20: note = Description of Artificial Sequence: Synthetic oligonucleotide
  misc_feature 1..20: note = Target: SCN10A; (+) strand; PAM type: NNGRRT; PAM sequence: CTGAGT
  source 1..20: mol_type = other DNA
ttcaatatctgagtctgtgt

SEQ ID NO: 9263 - DNA, 20 bp, synthetic construct
  misc_feature 1..20: note = Description of Artificial Sequence: Synthetic oligonucleotide
  misc_feature 1..20: note = Target: SCN10A; (+) strand; PAM type: NNGRRT; PAM sequence: GAGAGT
  source 1..20: mol_type = other DNA
tgtagggctcaaacctggag

SEQ ID NO: 9264 - DNA, 20 bp, synthetic construct
  misc_feature 1..20: note = Description of Artificial Sequence: Synthetic oligonucleotide
  misc_feature 1..20: note = Target: SCN10A; (+) strand; PAM type: NNGRRT; PAM sequence: CTGAGT
  source 1..20: mol_type = other DNA
cattgctaagcgtattttgc

SEQ ID NO: 9265 - DNA, 20 bp, synthetic construct
  misc_feature 1..20: note = Description of Artificial Sequence: Synthetic oligonucleotide
  misc_feature 1..20: note = Target: SCN10A; (+) strand; PAM type: NNGRRT; PAM sequence: GAGAGT
  source 1..20: mol_type = other DNA
tcccatctggtccctggtgg

SEQ ID NO: 9266 - DNA, 20 bp, synthetic construct
  misc_feature 1..20: note = Description of Artificial Sequence: Synthetic oligonucleotide
  misc_feature 1..20: note = Target: SCN10A; (+) strand; PAM type: NNGRRT; PAM sequence: ATGGGT
  source 1..20: mol_type = other DNA
tctctctctagtttccctct

SEQ ID NO: 9267 - DNA, 20 bp, synthetic construct
  misc_feature 1..20: note = Description of Artificial Sequence: Synthetic oligonucleotide
  misc_feature 1..20: note = Target: SCN10A; (+) strand; PAM type: NNGRRT; PAM sequence: GTGAAT
  source 1..20: mol_type = other DNA
actctacagtttctgtgcat

SEQ ID NO: 9268 - DNA, 20 bp, synthetic construct
  misc_feature 1..20: note = Description of Artificial Sequence: Synthetic oligonucleotide
  misc_feature 1..20: note = Target: SCN10A; (+) strand; PAM type: NNGRRT; PAM sequence: TAGGAT
  source 1..20: mol_type = other DNA
accacttcttcccctcaaat

SEQ ID NO: 9269 - DNA, 20 bp, synthetic construct
  misc_feature 1..20: note = Description of Artificial Sequence: Synthetic oligonucleotide
  misc_feature 1..20: note = Target: SCN10A; (+) strand; PAM type: NNGRRT; PAM sequence: GGGAGT
  source 1..20: mol_type = other DNA
ggtcagtttaatttgtctag

SEQ ID NO: 9270 - DNA, 20 bp, synthetic construct
  misc_feature 1..20: note = Description of Artificial Sequence: Synthetic oligonucleotide
  misc_feature 1..20: note = Target: SCN10A; (+) strand; PAM type: NNGRRT; PAM sequence: CTGGAT
  source 1..20: mol_type = other DNA
taccctaaggcaaaaaaagg

SEQ ID NO: 9271 - DNA, 20 bp, synthetic construct
  misc_feature 1..20: note = Description of Artificial Sequence: Synthetic oligonucleotide
  misc_feature 1..20: note = Target: SCN10A; (+) strand; PAM type: NNGRRT; PAM sequence: AGGGAT
  source 1..20: mol_type = other DNA
gacctcctgctcaaggttag

SEQ ID NO: 9272 - DNA, 20 bp, synthetic construct
  misc_feature 1..20: note = Description of Artificial Sequence: Synthetic oligonucleotide
  misc_feature 1..20: note = Target: SCN10A; (+) strand; PAM type: NNGRRT; PAM sequence: GTGGAT
  source 1..20: mol_type = other DNA
cacgctctatggcaaagtgt

SEQ ID NO: 9273 - DNA, 20 bp, synthetic construct
  misc_feature 1..20: note = Description of Artificial Sequence: Synthetic oligonucleotide
  misc_feature 1..20: note = Target: SCN10A; (+) strand; PAM type: NNGRRT; PAM sequence: CTGAGT
  source 1..20: mol_type = other DNA
tagatacattgctggggaga

SEQ ID NO: 9274 - DNA, 20 bp, synthetic construct
  misc_feature 1..20: note = Description of Artificial Sequence: Synthetic oligonucleotide
  misc_feature 1..20: note = Target: SCN10A; (+) strand; PAM type: NNGRRT; PAM sequence: GTGGAT
  source 1..20: mol_type = other DNA
tacattgctggggagactga

SEQ ID NO: 9275 - DNA, 20 bp, synthetic construct
  misc_feature 1..20: note = Description of Artificial Sequence: Synthetic oligonucleotide
  misc_feature 1..20: note = Target: SCN10A; (+) strand; PAM type: NNGRRT; PAM sequence: TAGAAT
  source 1..20: mol_type = other DNA
gtggattcccacttgattgg

SEQ ID NO: 9276 - DNA, 20 bp, synthetic construct
  misc_feature 1..20: note = Description of Artificial Sequence: Synthetic oligonucleotide
  misc_feature 1..20: note = Target: SCN10A; (+) strand; PAM type: NNGRRT; PAM sequence: AAGGAT
  source 1..20: mol_type = other DNA
tataattatgaaaccatgaa

SEQ ID NO: 9277 - DNA, 20 bp, synthetic construct
  misc_feature 1..20: note = Description of Artificial Sequence: Synthetic oligonucleotide
  misc_feature 1..20: note = Target: SCN10A; (+) strand; PAM type: NNGRRT; PAM sequence: AAGGAT
  source 1..20: mol_type = other DNA
ttttgccatgttggaaaatt

SEQ ID NO: 9278 - DNA, 20 bp, synthetic construct
  misc_feature 1..20: note = Description of Artificial Sequence: Synthetic oligonucleotide
  misc_feature 1..20: note = Target: SCN10A; (+) strand; PAM type: NNGRRT; PAM sequence: TAGGAT
  source 1..20: mol_type = other DNA
aatttgaacaagagatgagc

SEQ ID NO: 9279 - DNA, 20 bp, synthetic construct
  misc_feature 1..20: note = Description of Artificial Sequence: Synthetic oligonucleotide
  misc_feature 1..20: note = Target: SCN10A; (+) strand; PAM type: NNGRRT; PAM sequence: AAGAAT
  source 1..20: mol_type = other DNA
gatggtggggcctaagacat

SEQ ID NO: 9280 - DNA, 20 bp, synthetic construct
  misc_feature 1..20: note = Description of Artificial Sequence: Synthetic oligonucleotide
  misc_feature 1..20: note = Target: SCN10A; (+) strand; PAM type: NNGRRT; PAM sequence: AGGAGT
  source 1..20: mol_type = other DNA
gggcctaagacataagaatg

SEQ ID NO: 9281 - DNA, 20 bp, synthetic construct
  misc_feature 1..20: note = Description of Artificial Sequence: Synthetic oligonucleotide
  misc_feature 1..20: note = Target: SCN10A; (+) strand; PAM type: NNGRRT; PAM sequence: AGGAAT
  source 1..20: mol_type = other DNA
acataagaatgaggagtatt

SEQ ID NO: 9282 - DNA, 20 bp, synthetic construct
  misc_feature 1..20: note = Description of Artificial Sequence: Synthetic oligonucleotide
  misc_feature 1..20: note = Target: SCN10A; (+) strand; PAM type: NNGRRT; PAM sequence: ACGAGT
  source 1..20: mol_type = other DNA
acagagatggacgctttgac

SEQ ID NO: 9283 - DNA, 20 bp, synthetic construct
  misc_feature 1..20: note = Description of Artificial Sequence: Synthetic oligonucleotide
  misc_feature 1..20: note = Target: SCN10A; (+) strand; PAM type: NNGRRT; PAM sequence: GGGAAT
  source 1..20: mol_type = other DNA
attgcttctgctgctcacat

SEQ ID NO: 9284 - DNA, 20 bp, synthetic construct
  misc_feature 1..20: note = Description of Artificial Sequence: Synthetic oligonucleotide
  misc_feature 1..20: note = Target: SCN10A; (+) strand; PAM type: NNGRRT; PAM sequence: GTGGAT
  source 1..20: mol_type = other DNA
tgggaattcatcatgacaca

SEQ ID NO: 9285 - DNA, 20 bp, synthetic construct
  misc_feature 1..20: note = Description of Artificial Sequence: Synthetic oligonucleotide
  misc_feature 1..20: note = Target: SCN10A; (+) strand; PAM type: NNGRRT; PAM sequence: TCGAAT
  source 1..20: mol_type = other DNA
aagtcttcttttgtcctgca

SEQ ID NO: 9286 - DNA, 20 bp, synthetic construct
  misc_feature 1..20: note = Description of Artificial Sequence: Synthetic oligonucleotide
  misc_feature 1..20: note = Target: SCN10A; (+) strand; PAM type: NNGRRT; PAM sequence: CAGAGT
  source 1..20: mol_type = other DNA
aatgcctgttgagacacaaa

SEQ ID NO: 9287 - DNA, 20 bp, synthetic construct
  misc_feature 1..20: note = Description of Artificial Sequence: Synthetic oligonucleotide
  misc_feature 1..20: note = Target: SCN10A; (+) strand; PAM type: NNGRRT; PAM sequence: TTGGAT
  source 1..20: mol_type = other DNA
ctgacatcttcatggcaaag

SEQ ID NO: 9288 - DNA, 20 bp, synthetic construct
  misc_feature 1..20: note = Description of Artificial Sequence: Synthetic oligonucleotide
  misc_feature 1..20: note = Target: SCN10A; (+) strand; PAM type: NNGRRT; PAM sequence: GTGAAT
  source 1..20: mol_type = other DNA
ttaggtgatttcatcattct

SEQ ID NO: 9289 - DNA, 20 bp, synthetic construct
  misc_feature 1..20: note = Description of Artificial Sequence: Synthetic oligonucleotide
  misc_feature 1..20: note = Target: SCN10A; (+) strand; PAM type: NNGRRT; PAM sequence: CTGAAT
  source 1..20: mol_type = other DNA
atctgtacagcatgttattg

SEQ ID NO: 9290 - DNA, 20 bp, synthetic construct
  misc_feature 1..20: note = Description of Artificial Sequence: Synthetic oligonucleotide
  misc_feature 1..20: note = Target: SCN10A; (+) strand; PAM type: NNGRRT; PAM sequence: TTGGAT
  source 1..20: mol_type = other DNA
acaaggggagataaggaggc

SEQ ID NO: 9291 - DNA, 20 bp, synthetic construct
  misc_feature 1..20: note = Description of Artificial Sequence: Synthetic oligonucleotide
  misc_feature 1..20: note = Target: SCN10A; (+) strand; PAM type: NNGRRT; PAM sequence: AAGAGT
  source 1..20: mol_type = other DNA
atactaaacagaagggccta

SEQ ID NO: 9292 - DNA, 20 bp, synthetic construct
  misc_feature 1..20: note = Description of Artificial Sequence: Synthetic oligonucleotide
  misc_feature 1..20: note = Target: SCN10A; (+) strand; PAM type: NNGRRT; PAM sequence: TAGAAT
  source 1..20: mol_type = other DNA
cactagcctggtaatttaac

SEQ ID NO: 9293 - DNA, 20 bp, synthetic construct
  misc_feature 1..20: note = Description of Artificial Sequence: Synthetic oligonucleotide
  misc_feature 1..20: note = Target: SCN10A; (+) strand; PAM type: NNGRRT; PAM sequence: ATGAAT
  source 1..20: mol_type = other DNA
agcctggtaatttaactaga

SEQ ID NO: 9294 - DNA, 20 bp, synthetic construct
  misc_feature 1..20: note = Description of Artificial Sequence: Synthetic oligonucleotide
  misc_feature 1..20: note = Target: SCN10A; (+) strand; PAM type: NNGRRT; PAM sequence: CAGAAT
  source 1..20: mol_type = other DNA
taactagaatgaatcaaggt

SEQ ID NO: 9295 - DNA, 20 bp, synthetic construct
  misc_feature 1..20: note = Description of Artificial Sequence: Synthetic oligonucleotide
  misc_feature 1..20: note = Target: SCN10A; (+) strand; PAM type: NNGRRT; PAM sequence: GAGGGT
  source 1..20: mol_type = other DNA
aatctcaggaacagagaaag

SEQ ID NO: 9296 - DNA, 20 bp, synthetic construct
  misc_feature 1..20: note = Description of Artificial Sequence: Synthetic oligonucleotide
  misc_feature 1..20: note = Target: SCN10A; (+) strand; PAM type: NNGRRT; PAM sequence: TAGAGT
  source 1..20: mol_type = other DNA
gccttcagtgaggcattttc

SEQ ID NO: 9297 - DNA, 20 bp, synthetic construct
  misc_feature 1..20: note = Description of Artificial Sequence: Synthetic oligonucleotide
  misc_feature 1..20: note = Target: SCN10A; (+) strand; PAM type: NNGRRT; PAM sequence: CAGGAT
  source 1..20: mol_type = other DNA
tgcactcccagcgagccctg

SEQ ID NO: 9298 - DNA, 20 bp, synthetic construct
  misc_feature 1..20: note = Description of Artificial Sequence: Synthetic oligonucleotide
  misc_feature 1..20: note = Target: SCN10A; (+) strand; PAM type: NNGRRT; PAM sequence: AAGGAT
  source 1..20: mol_type = other DNA
gagacataggcaggacattc

SEQ ID NO: 9299 - DNA, 20 bp, synthetic construct
  misc_feature 1..20: note = Description of Artificial Sequence: Synthetic oligonucleotide
  misc_feature 1..20: note = Target: SCN10A; (+) strand; PAM type: NNGRRT; PAM sequence: CTGAGT
  source 1..20: mol_type = other DNA
tcttctctcctgtgctatgg

SEQ ID NO: 9300 - DNA, 20 bp, synthetic construct
  misc_feature 1..20: note = Description of Artificial Sequence: Synthetic oligonucleotide
  misc_feature 1..20: note = Target: SCN10A; (+) strand; PAM type: NNGRRT; PAM sequence: CGGAGT
  source 1..20: mol_type = other DNA
aactctctctattagcccat

SEQ ID NO: 9301 - DNA, 20 bp, synthetic construct
  misc_feature 1..20: note = Description of Artificial Sequence: Synthetic oligonucleotide
  misc_feature 1..20: note = Target: SCN10A; (+) strand; PAM type: NNGRRT; PAM sequence: CTGAAT
  source 1..20: mol_type = other DNA
atctgtttcttgctgggacc

SEQ ID NO: 9302 - DNA, 20 bp, synthetic construct
  misc_feature 1..20: note = Description of Artificial Sequence: Synthetic oligonucleotide
  misc_feature 1..20: note = Target: SCN10A; (+) strand; PAM type: NNGRRT; PAM sequence: TTGAGT
  source 1..20: mol_type = other DNA
ggaccctgaatcacatgaca

SEQ ID NO: 9303 - DNA, 20 bp, synthetic construct
  misc_feature 1..20: note = Description of Artificial Sequence: Synthetic oligonucleotide
  misc_feature 1..20: note = Target: SCN10A; (+) strand; PAM type: NNGRRT; PAM sequence: AGGAAT
  source 1..20: mol_type = other DNA
tcacagctcccaatccaatg

SEQ ID NO: 9304 - DNA, 20 bp, synthetic construct
  misc_feature 1..20: note = Description of Artificial Sequence: Synthetic oligonucleotide
  misc_feature 1..20: note = Target: SCN10A; (+) strand; PAM type: NNGRRT; PAM sequence: AAGAGT
  source 1..20: mol_type = other DNA
actctgcgattattctatta

SEQ ID NO: 9305 - DNA, 20 bp, synthetic construct
  misc_feature 1..20: note = Description of Artificial Sequence: Synthetic oligonucleotide
  misc_feature 1..20: note = Target: SCN10A; (+) strand; PAM type: NNGRRT; PAM sequence: GTGAGT
  source 1..20: mol_type = other DNA
tttggcaaattatttcttct

SEQ ID NO: 9306 - DNA, 20 bp, synthetic construct
  misc_feature 1..20: note = Description of Artificial Sequence: Synthetic oligonucleotide
  misc_feature 1..20: note = Target: SCN10A; (+) strand; PAM type: NNGRRT; PAM sequence: AGGAAT
  source 1..20: mol_type = other DNA
tttcttctgtgagtaaagca

SEQ ID NO: 9307 - DNA, 20 bp, synthetic construct
  misc_feature 1..20: note = Description of Artificial Sequence: Synthetic oligonucleotide
  misc_feature 1..20: note = Target: SCN10A; (+) strand; PAM type: NNGRRT; PAM sequence: CTGAAT
  source 1..20: mol_type = other DNA
gatctgtcctaagaaacttc

SEQ ID NO: 9308 - DNA, 20 bp, synthetic construct
  misc_feature 1..20: note = Description of Artificial Sequence: Synthetic oligonucleotide
  misc_feature 1..20: note = Target: SCN10A; (+) strand; PAM type: NNGRRT; PAM sequence: CTGGGT
  source 1..20: mol_type = other DNA
aagaaacttcctgaatttct

SEQ ID NO: 9309 - DNA, 20 bp, synthetic construct
  misc_feature 1..20: note = Description of Artificial Sequence: Synthetic oligonucleotide
  misc_feature 1..20: note = Target: SCN10A; (+) strand; PAM type: NNGRRT; PAM sequence: AAGAGT
  source 1..20: mol_type = other DNA
gtgccatttgcccagcctag

SEQ ID NO: 9310 - DNA, 20 bp, synthetic construct
  misc_feature 1..20: note = Description of Artificial Sequence: Synthetic oligonucleotide
  misc_feature 1..20: note = Target: SCN10A; (+) strand; PAM type: NNGRRT; PAM sequence: AAGGGT
  source 1..20: mol_type = other DNA
agagccataagcaggaagag

SEQ ID NO: 9311 - DNA, 20 bp, synthetic construct
  misc_feature 1..20: note = Description of Artificial Sequence: Synthetic oligonucleotide
  misc_feature 1..20: note = Target: SCN10A; (+) strand; PAM type: NNGRRT; PAM sequence: TTGAGT
  source 1..20: mol_type = other DNA
ctatcactgaggcagtgatg

SEQ ID NO: 9312 - DNA, 20 bp, synthetic construct
  misc_feature 1..20: note = Description of Artificial Sequence: Synthetic oligonucleotide
  misc_feature 1..20: note = Target: SCN10A; (+) strand; PAM type: NNGRRT; PAM sequence: TGGGGT
  source 1..20: mol_type = other DNA
agaagcactgataagaaata

SEQ ID NO: 9313 - DNA, 20 bp, synthetic construct
  misc_feature 1..20: note = Description of Artificial Sequence: Synthetic oligonucleotide
  misc_feature 1..20: note = Target: SCN10A; (+) strand; PAM type: NNGRRT; PAM sequence: TGGAAT
  source 1..20: mol_type = other DNA
ataagaaatatggggtcaaa

SEQ ID NO: 9314 - DNA, 20 bp, synthetic construct
  misc_feature 1..20: note = Description of Artificial Sequence: Synthetic oligonucleotide
  misc_feature 1..20: note = Target: SCN10A; (+) strand; PAM type: NNGRRT; PAM sequence: CAGAAT
  source 1..20: mol_type = other DNA
tataatttgcatcactactg

SEQ ID NO: 9315 - DNA, 20 bp, synthetic construct
  misc_feature 1..20: note = Description of Artificial Sequence: Synthetic oligonucleotide
  misc_feature 1..20: note = Target: SCN10A; (+) strand; PAM type: NNGRRT; PAM sequence: CTGGGT
  source 1..20: mol_type = other DNA
aactcaatctctctctctct

SEQ ID NO: 9316 - DNA, 20 bp, synthetic construct
  misc_feature 1..20: note = Description of Artificial Sequence: Synthetic oligonucleotide
  misc_feature 1..20: note = Target: SCN10A; (+) strand; PAM type: NNGRRT; PAM sequence: AGGAGT
  source 1..20: mol_type = other DNA
atcttctatgtctgtaaaaa

SEQ ID NO: 9317 - DNA, 20 bp, synthetic construct
  misc_feature 1..20: note = Description of Artificial Sequence: Synthetic oligonucleotide
  misc_feature 1..20: note = Target: SCN10A; (+) strand; PAM type: NNGRRT; PAM sequence: TAGAAT
  source 1..20: mol_type = other DNA
ctatgtctgtaaaaaaggag

SEQ ID NO: 9318 - DNA, 20 bp, synthetic construct
  misc_feature 1..20: note = Description of Artificial Sequence: Synthetic oligonucleotide
  misc_feature 1..20: note = Target: SCN10A; (+) strand; PAM type: NNGRRT; PAM sequence: CAGGAT
  source 1..20: mol_type = other DNA
tagaatggggaggcattgga

SEQ ID NO: 9319 - DNA, 20 bp, synthetic construct
  misc_feature 1..20: note = Description of Artificial Sequence: Synthetic oligonucleotide
  misc_feature 1..20: note = Target: SCN10A; (+) strand; PAM type: NNGRRT; PAM sequence: GGGAGT
  source 1..20: mol_type = other DNA
ctaggtggaagacagcctga

SEQ ID NO: 9320 - DNA, 20 bp, synthetic construct
  misc_feature 1..20: note = Description of Artificial Sequence: Synthetic oligonucleotide
  misc_feature 1..20: note = Target: SCN10A; (+) strand; PAM type: NNGRRT; PAM sequence: TGGAGT
  source 1..20: mol_type = other DNA
gtgttcatcttctccatgcc

SEQ ID NO: 9321 - DNA, 20 bp, synthetic construct
  misc_feature 1..20: note = Description of Artificial Sequence: Synthetic oligonucleotide
  misc_feature 1..20: note = Target: SCN10A; (+) strand; PAM type: NNGRRT; PAM sequence: CAGGGT
  source 1..20: mol_type = other DNA
atcttctccatgcctggagt

SEQ ID NO: 9322 - DNA, 20 bp, synthetic construct
  misc_feature 1..20: note = Description of Artificial Sequence: Synthetic oligonucleotide
  misc_feature 1..20: note = Target: SCN10A; (+) strand; PAM type: NNGRRT; PAM sequence: CTGGGT
  source 1..20: mol_type = other DNA
catgcctggagtcagggttg

SEQ ID NO: 9323 - DNA, 20 bp, synthetic construct
  misc_feature 1..20: note = Description of Artificial Sequence: Synthetic oligonucleotide
  misc_feature 1..20: note = Target: SCN10A; (+) strand; PAM type: NNGRRT; PAM sequence: GGGAGT
  source 1..20: mol_type = other DNA
catcatctgtgactccctca

SEQ ID NO: 9324 - DNA, 20 bp, synthetic construct
  misc_feature 1..20: note = Description of Artificial Sequence: Synthetic oligonucleotide
  misc_feature 1..20: note = Target: SCN10A; (+) strand; PAM type: NNGRRT; PAM sequence: AGGGGT
  source 1..20: mol_type = other DNA
taagtaaaggcacaaatcta

SEQ ID NO: 9325 - DNA, 20 bp, synthetic construct
  misc_feature 1..20: note = Description of Artificial Sequence: Synthetic oligonucleotide
  misc_feature 1..20: note = Target: SCN10A; (+) strand; PAM type: NNGRRT; PAM sequence: CTGGAT
  source 1..20: mol_type = other DNA
gtcagaggaaaccttgtcac

SEQ ID NO: 9326 - DNA, 20 bp, synthetic construct
  misc_feature 1..20: note = Description of Artificial Sequence: Synthetic oligonucleotide
  misc_feature 1..20: note = Target: SCN10A; (+) strand; PAM type: NNGRRT; PAM sequence: TTGAAT
  source 1..20: mol_type = other DNA
acatacttggtaagtggttg

SEQ ID NO: 9327 - DNA, 20 bp, synthetic construct
  misc_feature 1..20: note = Description of Artificial Sequence: Synthetic oligonucleotide
  misc_feature 1..20: note = Target: SCN10A; (+) strand; PAM type: NNGRRT; PAM sequence: ATGAAT
  source 1..20: mol_type = other DNA
acttggtaagtggttgttga

SEQ ID NO: 9328 - DNA, 20 bp, synthetic construct
  misc_feature 1..20: note = Description of Artificial Sequence: Synthetic oligonucleotide
  misc_feature 1..20: note = Target: SCN10A; (+) strand; PAM type: NNGRRT; PAM sequence: ATGAAT
  source 1..20: mol_type = other DNA
attcattagatcccatctgt

SEQ ID NO: 9329 - DNA, 20 bp, synthetic construct
  misc_feature 1..20: note = Description of Artificial Sequence: Synthetic oligonucleotide
  misc_feature 1..20: note = Target: SCN10A; (+) strand; PAM type: NNGRRT; PAM sequence: GAGAGT
  source 1..20: mol_type = other DNA
gatcccatctgtatgaatgt

SEQ ID NO: 9330 - DNA, 20 bp, synthetic construct
  misc_feature 1..20: note = Description of Artificial Sequence: Synthetic oligonucleotide
  misc_feature 1..20: note = Target: SCN10A; (+) strand; PAM type: NNGRRT; PAM sequence: ATGAGT
  source 1..20: mol_type = other DNA
gacaagagctgtacagtgca

SEQ ID NO: 9331 - DNA, 20 bp, synthetic construct
  misc_feature 1..20: note = Description of Artificial Sequence: Synthetic oligonucleotide
  misc_feature 1..20: note = Target: SCN10A; (+) strand; PAM type: NNGRRT; PAM sequence: TAGGAT
  source 1..20: mol_type = other DNA
tgtacagtgcaatgagtttc

SEQ ID NO: 9332 - DNA, 20 bp, synthetic construct
  misc_feature 1..20: note = Description of Artificial Sequence: Synthetic oligonucleotide
  misc_feature 1..20: note = Target: SCN10A; (+) strand; PAM type: NNGRRT; PAM sequence: AAGGGT
  source 1..20: mol_type = other DNA
aacaatggagagactgaagg

SEQ ID NO: 9333 - DNA, 20 bp, synthetic construct
  misc_feature 1..20: note = Description of Artificial Sequence: Synthetic oligonucleotide
  misc_feature 1..20: note = Target: SCN10A; (+) strand; PAM type: NNGRRT; PAM sequence: AAGAAT
  source 1..20: mol_type = other DNA
gttgcagcctaatttcctgg

SEQ ID NO: 9334 - DNA, 20 bp, synthetic construct
  misc_feature 1..20: note = Description of Artificial Sequence: Synthetic oligonucleotide
  misc_feature 1..20: note = Target: SCN10A; (+) strand; PAM type: NNGRRT; PAM sequence: GAGAAT
  source 1..20: mol_type = other DNA
tcataaacccagagccctca

SEQ ID NO: 9335 - DNA, 20 bp, synthetic construct
  misc_feature 1..20: note = Description of Artificial Sequence: Synthetic oligonucleotide
  misc_feature 1..20: note = Target: SCN10A; (+) strand; PAM type: NNGRRT; PAM sequence: CTGGGT
  source 1..20: mol_type = other DNA
gccctcagagaattagtgtg

SEQ ID NO: 9336 - DNA, 20 bp, synthetic construct
  misc_feature 1..20: note = Description of Artificial Sequence: Synthetic oligonucleotide
  misc_feature 1..20: note = Target: SCN10A; (+) strand; PAM type: NNGRRT; PAM sequence: GAGAAT
  source 1..20: mol_type = other DNA
attactaagctactaaagtg

SEQ ID NO: 9337 - DNA, 20 bp, synthetic construct
  misc_feature 1..20: note = Description of Artificial Sequence: Synthetic oligonucleotide
  misc_feature 1..20: note = Target: SCN10A; (+) strand; PAM type: NNGRRT; PAM sequence: TGGGGT
  source 1..20: mol_type = other DNA
aagtggagaatcttgccaat

SEQ ID NO: 9338 - DNA, 20 bp, synthetic construct
  misc_feature 1..20: note = Description of Artificial Sequence: Synthetic oligonucleotide
  misc_feature 1..20: note = Target: SCN10A; (+) strand; PAM type: NNGRRT; PAM sequence: TAGAGT
  source 1..20: mol_type = other DNA
taaaagctcagtattataaa

SEQ ID NO: 9339 - DNA, 20 bp, synthetic construct
  misc_feature 1..20: note = Description of Artificial Sequence: Synthetic oligonucleotide
  misc_feature 1..20: note = Target: SCN10A; (+) strand; PAM type: NNGRRT; PAM sequence: GGGAAT
  source 1..20: mol_type = other DNA
gacacatccatattaaggaa

SEQ ID NO: 9340 - DNA, 20 bp, synthetic construct
  misc_feature 1..20: note = Description of Artificial Sequence: Synthetic oligonucleotide
  misc_feature 1..20: note = Target: SCN10A; (+) strand; PAM type: NNGRRT; PAM sequence: ACGAGT
  source 1..20: mol_type = other DNA
acagcagtgtctccttggcc

SEQ ID NO: 9341 - DNA, 20 bp, synthetic construct
  misc_feature 1..20: note = Description of Artificial Sequence: Synthetic oligonucleotide
  misc_feature 1..20: note = Target: SCN10A; (+) strand; PAM type: NNGRRT; PAM sequence: TAGAAT
  source 1..20: mol_type = other DNA
tccttggccacgagttattt

SEQ ID NO: 9342 - DNA, 20 bp, synthetic construct
  misc_feature 1..20: note = Description of Artificial Sequence: Synthetic oligonucleotide
  misc_feature 1..20: note = Target: SCN10A; (+) strand; PAM type: NNGRRT; PAM sequence: CTGAGT
  source 1..20: mol_type = other DNA
caaatggtgggcaatgtctt

SEQ ID NO: 9343 - DNA, 20 bp, synthetic construct
  misc_feature 1..20: note = Description of Artificial Sequence: Synthetic oligonucleotide
  misc_feature 1..20: note = Target: SCN10A; (+) strand; PAM type: NNGRRT; PAM sequence: TAGAAT
  source 1..20: mol_type = other DNA
tgtcttctgagtataagcat

SEQ ID NO: 9344 - DNA, 20 bp, synthetic construct
  misc_feature 1..20: note = Description of Artificial Sequence: Synthetic oligonucleotide
  misc_feature 1..20: note = Target: SCN10A; (+) strand; PAM type: NNGRRT; PAM sequence: CTGGGT
  source 1..20: mol_type = other DNA
gattttccacaaaaaccctc

SEQ ID NO: 9345 - DNA, 20 bp, synthetic construct
  misc_feature 1..20: note = Description of Artificial Sequence: Synthetic oligonucleotide
  misc_feature 1..20: note = Target: SCN10A; (+) strand; PAM type: NNGRRT; PAM sequence: ATGAAT
  source 1..20: mol_type = other DNA
gcattaggtctatttaccac

SEQ ID NO: 9346 - DNA, 20 bp, synthetic construct
  misc_feature 1..20: note = Description of Artificial Sequence: Synthetic oligonucleotide
  misc_feature 1..20: note = Target: SCN10A; (+) strand; PAM type: NNGRRT; PAM sequence: GAGGAT
  source 1..20: mol_type = other DNA
tgtacctgggaaaagaggga

SEQ ID NO: 9347 - DNA, 20 bp, synthetic construct
  misc_feature 1..20: note = Description of Artificial Sequence: Synthetic oligonucleotide
  misc_feature 1..20: note = Target: SCN10A; (+) strand; PAM type: NNGRRT; PAM sequence: CTGAGT
  source 1..20: mol_type = other DNA
aagagggagaggatgccttc

SEQ ID NO: 9348 - DNA, 20 bp, synthetic construct
  misc_feature 1..20: note = Description of Artificial Sequence: Synthetic oligonucleotide
  misc_feature 1..20: note = Target: SCN10A; (+) strand; PAM type: NNGRRT; PAM sequence: AAGAGT
  source 1..20: mol_type = other DNA
tgatacctatccagccccat

SEQ ID NO: 9349 - DNA, 20 bp, synthetic construct
  misc_feature 1..20: note = Description of Artificial Sequence: Synthetic oligonucleotide
  misc_feature 1..20: note = Target: SCN10A; (+) strand; PAM type: NNGRRT; PAM sequence: GTGGAT
  source 1..20: mol_type = other DNA
acctatccagccccataaga

SEQ ID NO: 9350 - DNA, 20 bp, synthetic construct
  misc_feature 1..20: note = Description of Artificial Sequence: Synthetic oligonucleotide
  misc_feature 1..20: note = Target: SCN10A; (+) strand; PAM type: NNGRRT; PAM sequence: TTGAAT
  source 1..20: mol_type = other DNA
ataccaagcacctagtattg

SEQ ID NO: 9351 - DNA, 20 bp, synthetic construct
  misc_feature 1..20: note = Description of Artificial Sequence: Synthetic oligonucleotide
  misc_feature 1..20: note = Target: SCN10A; (+) strand; PAM type: NNGRRT; PAM sequence: CAGAAT
  source 1..20: mol_type = other DNA
gctaatctgtgtggggctga

SEQ ID NO: 9352 - DNA, 20 bp, synthetic construct
  misc_feature 1..20: note = Description of Artificial Sequence: Synthetic oligonucleotide
  misc_feature 1..20: note = Target: SCN10A; (+) strand; PAM type: NNGRRT; PAM sequence: GTGGAT
  source 1..20: mol_type = other DNA
atgcagataaatgctgaagt

SEQ ID NO: 9353 - DNA, 20 bp, synthetic construct
  misc_feature 1..20: note = Description of Artificial Sequence: Synthetic oligonucleotide
  misc_feature 1..20: note = Target: SCN10A; (+) strand; PAM type: NNGRRT; PAM sequence: GAGGGT
  source 1..20: mol_type = other DNA
gtatatgcacacataaatct

SEQ ID NO: 9354 - DNA, 20 bp, synthetic construct
  misc_feature 1..20: note = Description of Artificial Sequence: Synthetic oligonucleotide
  misc_feature 1..20: note = Target: SCN10A; (+) strand; PAM type: NNGRRT; PAM sequence: TGGGGT
  source 1..20: mol_type = other DNA
acctatagaaagggcatatt

SEQ ID NO: 9355 - DNA, 20 bp, synthetic construct
  misc_feature 1..20: note = Description of Artificial Sequence: Synthetic oligonucleotide
  misc_feature 1..20: note = Target: SCN10A; (+) strand; PAM type: NNGRRT; PAM sequence: TAGAGT
  source 1..20: mol_type = other DNA
gaaagttgcagtgcaaattt

SEQ ID NO: 9356 - DNA, 20 bp, synthetic construct
  misc_feature 1..20: note = Description of Artificial Sequence: Synthetic oligonucleotide
  misc_feature 1..20: note = Target: SCN10A; (+) strand; PAM type: NNGRRT; PAM sequence: AAGAAT
  source 1..20: mol_type = other DNA
gaaagttattatggggggaa

SEQ ID NO: 9357 - DNA, 20 bp, synthetic construct
  misc_feature 1..20: note = Description of Artificial Sequence: Synthetic oligonucleotide
  misc_feature 1..20: note = Target: SCN10A; (+) strand; PAM type: NNGRRT; PAM sequence: CAGGGT
  source 1..20: mol_type = other DNA
tggggggaaaagaattgcta

SEQ ID NO: 9358 - DNA, 20 bp, synthetic construct
  misc_feature 1..20: note = Description of Artificial Sequence: Synthetic oligonucleotide
  misc_feature 1..20: note = Target: SCN10A; (+) strand; PAM type: NNGRRT; PAM sequence: CTGGAT
  source 1..20: mol_type = other DNA
gtgctgaagccattcccagg

SEQ ID NO: 9359 - DNA, 20 bp, synthetic construct
  misc_feature 1..20: note = Description of Artificial Sequence: Synthetic oligonucleotide
  misc_feature 1..20: note = Target: SCN10A; (+) strand; PAM type: NNGRRT; PAM sequence: ATGGGT
  source 1..20: mol_type = other DNA
ggctggattgtgtcacagag

SEQ ID NO: 9360 - DNA, 20 bp, synthetic construct
  misc_feature 1..20: note = Description of Artificial Sequence: Synthetic oligonucleotide
  misc_feature 1..20: note = Target: SCN10A; (+) strand; PAM type: NNGRRT; PAM sequence: TTGAAT
  source 1..20: mol_type = other DNA
tgataacaacaggtgacagc

SEQ ID NO: 9361 - DNA, 20 bp, synthetic construct
  misc_feature 1..20: note = Description of Artificial Sequence: Synthetic oligonucleotide
  misc_feature 1..20: note = Target: SCN10A; (+) strand; PAM type: NNGRRT; PAM sequence: AAGGAT
  source 1..20: mol_type = other DNA
agaaaaaaaaaaggtgcatg

SEQ ID NO: 9362 - DNA, 20 bp, synthetic construct
  misc_feature 1..20: note = Description of Artificial Sequence: Synthetic oligonucleotide
  misc_feature 1..20: note = Target: SCN10A; (+) strand; PAM type: NNGRRT; PAM sequence: CGGGGT
  source 1..20: mol_type = other DNA
ttcccacctttcctacaaac

SEQ ID NO: 9363 - DNA, 20 bp, synthetic construct
  misc_feature 1..20: note = Description of Artificial Sequence: Synthetic oligonucleotide
  misc_feature 1..20: note = Target: SCN10A; (+) strand; PAM type: NNGRRT; PAM sequence: TGGAAT
  source 1..20: mol_type = other DNA
ttcctccagtgtcctcatct

SEQ ID NO: 9364 - DNA, 20 bp, synthetic construct
  misc_feature 1..20: note = Description of Artificial Sequence: Synthetic oligonucleotide
  misc_feature 1..20: note = Target: SCN10A; (+) strand; PAM type: NNGRRT; PAM sequence: GGGAGT
  source 1..20: mol_type = other DNA
attgcccaatcctgaaacct

SEQ ID NO: 9365 - DNA, 20 bp, synthetic construct
  misc_feature 1..20: note = Description of Artificial Sequence: Synthetic oligonucleotide
  misc_feature 1..20: note = Target: SCN10A; (+) strand; PAM type: NNGRRT; PAM sequence: AGGGGT
  source 1..20: mol_type = other DNA
agtttaagacaccattttgg

SEQ ID NO: 9366 - DNA, 20 bp, synthetic construct
  misc_feature 1..20: note = Description of Artificial Sequence: Synthetic oligonucleotide
  misc_feature 1..20: note = Target: SCN10A; (+) strand; PAM type: NNGRRT; PAM sequence: CTGGAT
  source 1..20: mol_type = other DNA
acaccattttggaggggtgt

SEQ ID NO: 9367 - DNA, 20 bp, synthetic construct
  misc_feature 1..20: note = Description of Artificial Sequence: Synthetic oligonucleotide
  misc_feature 1..20: note = Target: SCN10A; (+) strand; PAM type: NNGRRT; PAM sequence: GTGGGT
  source 1..20: mol_type = other DNA
tgtctacggcagctgcaatg

SEQ ID NO: 9368 - DNA, 20 bp, synthetic construct
  misc_feature 1..20: note = Description of Artificial Sequence: Synthetic oligonucleotide
  misc_feature 1..20: note = Target: SCN10A; (+) strand; PAM type: NNGRRT; PAM sequence: AAGGAT
  source 1..20: mol_type = other DNA
taccatcctgcgctggttgt

SEQ ID NO: 9369 - DNA, 20 bp, synthetic construct
  misc_feature 1..20: note = Description of Artificial Sequence: Synthetic oligonucleotide
  misc_feature 1..20: note = Target: SCN10A; (+) strand; PAM type: NNGRRT; PAM sequence: CGGGGT
  source 1..20: mol_type = other DNA
gctggttgtaaggatcagag

SEQ ID NO: 9370 - DNA, 20 bp, synthetic construct
  misc_feature 1..20: note = Description of Artificial Sequence: Synthetic oligonucleotide
  misc_feature 1..20: note = Target: SCN10A; (+) strand; PAM type: NNGRRT; PAM sequence: GGGAGT
  source 1..20: mol_type = other DNA
ggttaaaggtgatccattgt

SEQ ID NO: 9371 - DNA, 20 bp, synthetic construct
  misc_feature 1..20: note = Description of Artificial Sequence: Synthetic oligonucleotide
  misc_feature 1..20: note = Target: SCN10A; (+) strand; PAM type: NNGRRT; PAM sequence: ATGAAT
  source 1..20: mol_type = other DNA
agtatttgcttggacttagc

SEQ ID NO: 9372 - DNA, 20 bp, synthetic construct
  misc_feature 1..20: note = Description of Artificial Sequence: Synthetic oligonucleotide
  misc_feature 1..20: note = Target: SCN10A; (+) strand; PAM type: NNGRRT; PAM sequence: TGGGGT
  source 1..20: mol_type = other DNA
atgaatgtgtcccccagaca

SEQ ID NO: 9373 - DNA, 20 bp, synthetic construct
  misc_feature 1..20: note = Description of Artificial Sequence: Synthetic oligonucleotide
  misc_feature 1..20: note = Target: SCN10A; (+) strand; PAM type: NNGRRT; PAM sequence: AGGGGT
  source 1..20: mol_type = other DNA
tcccccagacatggggtgcc

SEQ ID NO: 9374 - DNA, 20 bp, synthetic construct
  misc_feature 1..20: note = Description of Artificial Sequence: Synthetic oligonucleotide
  misc_feature 1..20: note = Target: SCN10A; (+) strand; PAM type: NNGRRT; PAM sequence: AAGGGT
  source 1..20: mol_type = other DNA
gatctgaaacagagaagctg

SEQ ID NO: 9375 - DNA, 20 bp, synthetic construct
  misc_feature 1..20: note = Description of Artificial Sequence: Synthetic oligonucleotide
  misc_feature 1..20: note = Target: SCN10A; (+) strand; PAM type: NNGRRT; PAM sequence: CAGGGT
  source 1..20: mol_type = other DNA
agaagctgaagggttaggac

SEQ ID NO: 9376 - DNA, 20 bp, synthetic construct
  misc_feature 1..20: note = Description of Artificial Sequence: Synthetic oligonucleotide
  misc_feature 1..20: note = Target: SCN10A; (+) strand; PAM type: NNGRRT; PAM sequence: TGGGAT
  source 1..20: mol_type = other DNA
ggttaggaccagggtggtgg

SEQ ID NO: 9377 - DNA, 20 bp, synthetic construct
  misc_feature 1..20: note = Description of Artificial Sequence: Synthetic oligonucleotide
  misc_feature 1..20: note = Target: SCN10A; (+) strand; PAM type: NNGRRT; PAM sequence: TCGGGT
  source 1..20: mol_type = other DNA
ccatggcaggaacagacacc

SEQ ID NO: 9378 - DNA, 20 bp, synthetic construct
  misc_feature 1..20: note = Description of Artificial Sequence: Synthetic oligonucleotide
  misc_feature 1..20: note = Target: SCN10A; (+) strand; PAM type: NNGRRT; PAM sequence: TGGGGT
  source 1..20: mol_type = other DNA
gggtcacccccactcattca

SEQ ID NO: 9379 - DNA, 20 bp, synthetic construct
  misc_feature 1..20: note = Description of Artificial Sequence: Synthetic oligonucleotide
  misc_feature 1..20: note = Target: SCN10A; (+) strand; PAM type: NNGRRT; PAM sequence: TGGGAT
  source 1..20: mol_type = other DNA
ctcttttggctgcctgcttc

SEQ ID NO: 9380 - DNA, 20 bp, synthetic construct
  misc_feature 1..20: note = Description of Artificial Sequence: Synthetic oligonucleotide
  misc_feature 1..20: note = Target: SCN10A; (+) strand; PAM type: NNGRRT; PAM sequence: GAGGGT
  source 1..20: mol_type = other DNA
gcttctgggataggtatggg

SEQ ID NO: 9381 - DNA, 20 bp, synthetic construct
  misc_feature 1..20: note = Description of Artificial Sequence: Synthetic oligonucleotide
  misc_feature 1..20: note = Target: SCN10A; (+) strand; PAM type: NNGRRT; PAM sequence: CAGAGT
  source 1..20: mol_type = other DNA
ctgtggtacaggtcatgccc

SEQ ID NO: 9382 - DNA, 20 bp, synthetic construct
  misc_feature 1..20: note = Description of Artificial Sequence: Synthetic oligonucleotide
  misc_feature 1..20: note = Target: SCN10A; (+) strand; PAM type: NNGRRT; PAM sequence: TGGGAT
  source 1..20: mol_type = other DNA
tcatgccccagagttcccca

SEQ ID NO: 9383 - DNA, 20 bp, synthetic construct
  misc_feature 1..20: note = Description of Artificial Sequence: Synthetic oligonucleotide
  misc_feature 1..20: note = Target: SCN10A; (+) strand; PAM type: NNGRRT; PAM sequence: AAGAAT
  source 1..20: mol_type = other DNA
cctcaataggtcacttgcac

SEQ ID NO: 9384 - DNA, 20 bp, synthetic construct
  misc_feature 1..20: note = Description of Artificial Sequence: Synthetic oligonucleotide
  misc_feature 1..20: note = Target: SCN10A; (+) strand; PAM type: NNGRRT; PAM sequence: AAGAAT
  source 1..20: mol_type = other DNA
gctagtccagaacagtatcc

SEQ ID NO: 9385 - DNA, 20 bp, synthetic construct
  misc_feature 1..20: note = Description of Artificial Sequence: Synthetic oligonucleotide
  misc_feature 1..20: note = Target: SCN10A; (+) strand; PAM type: NNGRRT; PAM sequence: CAGGGT
  source 1..20: mol_type = other DNA
tagattttcccagaagtcct

SEQ ID NO: 9386 - DNA, 20 bp, synthetic construct
  misc_feature 1..20: note = Description of Artificial Sequence: Synthetic oligonucleotide
  misc_feature 1..20: note = Target: SCN10A; (+) strand; PAM type: NNGRRT; PAM sequence: CTGAAT
  source 1..20: mol_type = other DNA
tacccatagcacatggaccc

SEQ ID NO: 9387 - DNA, 20 bp, synthetic construct
  misc_feature 1..20: note = Description of Artificial Sequence: Synthetic oligonucleotide
  misc_feature 1..20: note = Target: SCN10A; (+) strand; PAM type: NNGRRT; PAM sequence: GGGAAT
  source 1..20: mol_type = other DNA
ctccaaccaagtctgcgtgg

SEQ ID NO: 9388 - DNA, 20 bp, synthetic construct
  misc_feature 1..20: note = Description of Artificial Sequence: Synthetic oligonucleotide
  misc_feature 1..20: note = Target: SCN10A; (+) strand; PAM type: NNGRRT; PAM sequence: AGGAAT
  source 1..20: mol_type = other DNA
ctgctggtagaggcgttccc

SEQ ID NO: 9389 - DNA, 20 bp, synthetic construct
  misc_feature 1..20: note = Description of Artificial Sequence: Synthetic oligonucleotide
  misc_feature 1..20: note = Target: SCN10A; (+) strand; PAM type: NNGRRT; PAM sequence: AGGAAT
  source 1..20: mol_type = other DNA
tgagaggaaagcccaagcaa

SEQ ID NO: 9390 - DNA, 20 bp, synthetic construct
  misc_feature 1..20: note = Description of Artificial Sequence: Synthetic oligonucleotide
  misc_feature 1..20: note = Target: SCN10A; (+) strand; PAM type: NNGRRT; PAM sequence: CCGGGT
  source 1..20: mol_type = other DNA
aaagctggtgtagttaaaat

SEQ ID NO: 9391 - DNA, 20 bp, synthetic construct
  misc_feature 1..20: note = Description of Artificial Sequence: Synthetic oligonucleotide
  misc_feature 1..20: note = Target: SCN10A; (+) strand; PAM type: NNGRRT; PAM sequence: CAGAGT
  source 1..20: mol_type = other DNA
ccagggctgcgagacaacca

SEQ ID NO: 9392 - DNA, 20 bp, synthetic construct
  misc_feature 1..20: note = Description of Artificial Sequence: Synthetic oligonucleotide
  misc_feature 1..20: note = Target: SCN10A; (+) strand; PAM type: NNGRRT; PAM sequence: CAGAGT
  source 1..20: mol_type = other DNA
cagagttttatgtcagagat

SEQ ID NO: 9393 - DNA, 20 bp, synthetic construct
  misc_feature 1..20: note = Description of Artificial Sequence: Synthetic oligonucleotide
  misc_feature 1..20: note = Target: SCN10A; (+) strand; PAM type: NNGRRT; PAM sequence: CAGGAT
  source 1..20: mol_type = other DNA
cctagtcttcctcttattag

SEQ ID NO: 9394 - DNA, 20 bp, synthetic construct
  misc_feature 1..20: note = Description of Artificial Sequence: Synthetic oligonucleotide
  misc_feature 1..20: note = Target: SCN10A; (+) strand; PAM type: NNGRRT; PAM sequence: CAGAAT
  source 1..20: mol_type = other DNA
ggacgctaatactttcacgt

SEQ ID NO: 9395 - DNA, 20 bp, synthetic construct
  misc_feature 1..20: note = Description of Artificial Sequence: Synthetic oligonucleotide
  misc_feature 1..20: note = Target: SCN10A; (+) strand; PAM type: NNGRRT; PAM sequence: GGGAGT
  source 1..20: mol_type = other DNA
cgtcagaatttcatacacag

SEQ ID NO: 9396 - DNA, 20 bp, synthetic construct
  misc_feature 1..20: note = Description of Artificial Sequence: Synthetic oligonucleotide
  misc_feature 1..20: note = Target: SCN10A; (+) strand; PAM type: NNGRRT; PAM sequence: GAGAGT
  source 1..20: mol_type = other DNA
ccagttcataccagggaaat

SEQ ID NO: 9397 - DNA, 20 bp, synthetic construct
  misc_feature 1..20: note = Description of Artificial Sequence: Synthetic oligonucleotide
  misc_feature 1..20: note = Target: SCN10A; (+) strand; PAM type: NNGRRT; PAM sequence: CAGAGT
  source 1..20: mol_type = other DNA
gagcctgttggcatcatctg

SEQ ID NO: 9398 - DNA, 20 bp, synthetic construct
  misc_feature 1..20: note = Description of Artificial Sequence: Synthetic oligonucleotide
  misc_feature 1..20: note = Target: SCN10A; (+) strand; PAM type: NNGRRT; PAM sequence: AGGAAT
  source 1..20: mol_type = other DNA
atgttctttctttacagata

SEQ ID NO: 9399 - DNA, 20 bp, synthetic construct
  misc_feature 1..20: note = Description of Artificial Sequence: Synthetic oligonucleotide
  misc_feature 1..20: note = Target: SCN10A; (+) strand; PAM type: NNGRRT; PAM sequence: GGGGGT
  source 1..20: mol_type = other DNA
tctttacagataaggaatct

SEQ ID NO: 9400 - DNA, 20 bp, synthetic construct
  misc_feature 1..20: note = Description of Artificial Sequence: Synthetic oligonucleotide
  misc_feature 1..20: note = Target: SCN10A; (+) strand; PAM type: NNGRRT; PAM sequence: TTGAGT
  source 1..20: mol_type = other DNA
actgtcaagtagcccaatac

SEQ ID NO: 9401 - DNA, 20 bp, synthetic construct
  misc_feature 1..20: note = Description of Artificial Sequence: Synthetic oligonucleotide
  misc_feature 1..20: note = Target: SCN10A; (+) strand; PAM type: NNGRRT; PAM sequence: GTGAGT
  source 1..20: mol_type = other DNA
agattaaaaatgactgcctg

SEQ ID NO: 9402 - DNA, 20 bp, synthetic construct
  misc_feature 1..20: note = Description of Artificial Sequence: Synthetic oligonucleotide
  misc_feature 1..20: note = Target: SCN10A; (+) strand; PAM type: NNGRRT; PAM sequence: GGGAAT
  source 1..20: mol_type = other DNA
tgcctggtgagtattgaggt

SEQ ID NO: 9403 - DNA, 20 bp, synthetic construct
  misc_feature 1..20: note = Description of Artificial Sequence: Synthetic oligonucleotide
  misc_feature 1..20: note = Target: SCN10A; (+) strand; PAM type: NNGRRT; PAM sequence: GAGGAT
  source 1..20: mol_type = other DNA
cttcctctctctcataatag

SEQ ID NO: 9404 - DNA, 20 bp, synthetic construct
  misc_feature 1..20: note = Description of Artificial Sequence: Synthetic oligonucleotide
  misc_feature 1..20: note = Target: SCN10A; (+) strand; PAM type: NNGRRT; PAM sequence: ATGAGT
  source 1..20: mol_type = other DNA
ctctctctcataataggagg

SEQ ID NO: 9405 - DNA, 20 bp, synthetic construct
  misc_feature 1..20: note = Description of Artificial Sequence: Synthetic oligonucleotide
  misc_feature 1..20: note = Target: SCN10A; (+) strand; PAM type: NNGRRT; PAM sequence: CAGAAT
  source 1..20: mol_type = other DNA
gcaatgcctcgtttgaagtc

SEQ ID NO: 9406 - DNA, 20 bp, synthetic construct
  misc_feature 1..20: note = Description of Artificial Sequence: Synthetic oligonucleotide
  misc_feature 1..20: note = Target: SCN10A; (+) strand; PAM type: NNGRRT; PAM sequence: GTGAAT
  source 1..20: mol_type = other DNA
tttatttacctgcattcctt

SEQ ID NO: 9407 - DNA, 20 bp, synthetic construct
  misc_feature 1..20: note = Description of Artificial Sequence: Synthetic oligonucleotide
  misc_feature 1..20: note = Target: SCN10A; (+) strand; PAM type: NNGRRT; PAM sequence: TGGAAT
  source 1..20: mol_type = other DNA
ctgcattccttgtgaataca

SEQ ID NO: 9408 - DNA, 20 bp, synthetic construct
  misc_feature 1..20: note = Description of Artificial Sequence: Synthetic oligonucleotide
  misc_feature 1..20: note = Target: SCN10A; (+) strand; PAM type: NNGRRT; PAM sequence: CAGGAT
  source 1..20: mol_type = other DNA
acatggaattcttttactcc

SEQ ID NO: 9409 - DNA, 20 bp, synthetic construct
  misc_feature 1..20: note = Description of Artificial Sequence: Synthetic oligonucleotide
  misc_feature 1..20: note = Target: SCN10A; (+) strand; PAM type: NNGRRT; PAM sequence: ATGGAT
  source 1..20: mol_type = other DNA
ccatgtgaacaacccatacc

SEQ ID NO: 9410 - DNA, 20 bp, synthetic construct
  misc_feature 1..20: note = Description of Artificial Sequence: Synthetic oligonucleotide
  misc_feature 1..20: note = Target: SCN10A; (+) strand; PAM type: NNGRRT; PAM sequence: GAGGAT
  source 1..20: mol_type = other DNA
tataaacagttcactgctct

SEQ ID NO: 9411 - DNA, 20 bp, synthetic construct
  misc_feature 1..20: note = Description of Artificial Sequence: Synthetic oligonucleotide
  misc_feature 1..20: note = Target: SCN10A; (+) strand; PAM type: NNGRRT; PAM sequence: AAGGAT
  source 1..20: mol_type = other DNA
ttaaccttggaagctgctga

SEQ ID NO: 9412 - DNA, 20 bp, synthetic construct
  misc_feature 1..20: note = Description of Artificial Sequence: Synthetic oligonucleotide
  misc_feature 1..20: note = Target: SCN10A; (+) strand; PAM type: NNGRRT; PAM sequence: TGGAAT
  source 1..20: mol_type = other DNA
aagctgctgaaaggataaac

SEQ ID NO: 9413 - DNA, 20 bp, synthetic construct
  misc_feature 1..20: note = Description of Artificial Sequence: Synthetic oligonucleotide
  misc_feature 1..20: note = Target: SCN10A; (+) strand; PAM type: NNGRRT; PAM sequence: CAGGGT
  source 1..20: mol_type = other DNA
gctttcacggcatgccccgg

SEQ ID NO: 9414 - DNA, 20 bp, synthetic construct
  misc_feature 1..20: note = Description of Artificial Sequence: Synthetic oligonucleotide
  misc_feature 1..20: note = Target: SCN10A; (+) strand; PAM type: NNGRRT; PAM sequence: AAGGAT
  source 1..20: mol_type = other DNA
aaatgccattatctagacag

SEQ ID NO: 9415 - DNA, 20 bp, synthetic construct
  misc_feature 1..20: note = Description of Artificial Sequence: Synthetic oligonucleotide
  misc_feature 1..20: note = Target: SCN10A; (+) strand; PAM type: NNGRRT; PAM sequence: GGGGGT
  source 1..20: mol_type = other DNA
ccgtcagcctctcaggcact

SEQ ID NO: 9416 - DNA, 20 bp, synthetic construct
  misc_feature 1..20: note = Description of Artificial Sequence: Synthetic oligonucleotide
  misc_feature 1..20: note = Target: SCN10A; (+) strand; PAM type: NNGRRT; PAM sequence: GTGGGT
  source 1..20: mol_type = other DNA
ccaagctctcagccatggag

SEQ ID NO: 9417 - DNA, 20 bp, synthetic construct
  misc_feature 1..20: note = Description of Artificial Sequence: Synthetic oligonucleotide
  misc_feature 1..20: note = Target: SCN10A; (+) strand; PAM type: NNGRRT; PAM sequence: AGGGGT
  source 1..20: mol_type = other DNA
caaagcagcaggcagagctg

SEQ ID NO: 9418 - DNA, 20 bp, synthetic construct
  misc_feature 1..20: note = Description of Artificial Sequence: Synthetic oligonucleotide
  misc_feature 1..20: note = Target: SCN10A; (+) strand; PAM type: NNGRRT; PAM sequence: TGGAAT
  source 1..20: mol_type = other DNA
tcacattctgttctgccacc

SEQ ID NO: 9419 - DNA, 20 bp, synthetic construct
  misc_feature 1..20: note = Description of Artificial Sequence: Synthetic oligonucleotide
  misc_feature 1..20: note = Target: SCN10A; (+) strand; PAM type: NNGRRT; PAM sequence: CAGGGT
  source 1..20: mol_type = other DNA
agtaaagaacttgttttcca

SEQ ID NO: 9420 - DNA, 20 bp, synthetic construct
  misc_feature 1..20: note = Description of Artificial Sequence: Synthetic oligonucleotide
  misc_feature 1..20: note = Target: SCN10A; (+) strand; PAM type: NNGRRT; PAM sequence: ATGAAT
  source 1..20: mol_type = other DNA
agggtagcatctttatgtct

SEQ ID NO: 9421 - DNA, 20 bp, synthetic construct
  misc_feature 1..20: note = Description of Artificial Sequence: Synthetic oligonucleotide
  misc_feature 1..20: note = Target: SCN10A; (+) strand; PAM type: NNGRRT; PAM sequence: CTGGAT
  source 1..20: mol_type = other DNA
gcaaactagcagcttatagg

SEQ ID NO: 9422 - DNA, 20 bp, synthetic construct
  misc_feature 1..20: note = Description of Artificial Sequence: Synthetic oligonucleotide
  misc_feature 1..20: note = Target: SCN10A; (+) strand; PAM type: NNGRRT; PAM sequence: TGGAAT
  source 1..20: mol_type = other DNA
aacaatatgtagacattttt

SEQ ID NO: 9423 - DNA, 20 bp, synthetic construct
  misc_feature 1..20: note = Description of Artificial Sequence: Synthetic oligonucleotide
  misc_feature 1..20: note = Target: SCN10A; (+) strand; PAM type: NNGRRT; PAM sequence: ATGAAT
  source 1..20: mol_type = other DNA
cactccactcatttgttgtt

SEQ ID NO: 9424 - DNA, 20 bp, synthetic construct
  misc_feature 1..20: note = Description of Artificial Sequence: Synthetic oligonucleotide
  misc_feature 1..20: note = Target: SCN10A; (+) strand; PAM type: NNGRRT; PAM sequence: AAGAAT
  source 1..20: mol_type = other DNA
gttatgaatctggcctctgt

SEQ ID NO: 9425 - DNA, 20 bp, synthetic construct
  misc_feature 1..20: note = Description of Artificial Sequence: Synthetic oligonucleotide
  misc_feature 1..20: note = Target: SCN10A; (+) strand; PAM type: NNGRRT; PAM sequence: GAGGGT
  source 1..20: mol_type = other DNA
gtgttttttcctctacttgt

SEQ ID NO: 9426 - DNA, 20 bp, synthetic construct
  misc_feature 1..20: note = Description of Artificial Sequence: Synthetic oligonucleotide
  misc_feature 1..20: note = Target: SCN10A; (+) strand; PAM type: NNGRRT; PAM sequence: TAGAAT
  source 1..20: mol_type = other DNA
ttgtgagggtaatgtggcta

SEQ ID NO: 9427 - DNA, 20 bp, synthetic construct
  misc_feature 1..20: note = Description of Artificial Sequence: Synthetic oligonucleotide
  misc_feature 1..20: note = Target: SCN10A; (+) strand; PAM type: NNGRRT; PAM sequence: TGGAGT
  source 1..20: mol_type = other DNA
agggtaatgtggctatagaa

SEQ ID NO: 9428 - DNA, 20 bp, synthetic construct
  misc_feature 1..20: note = Description of Artificial Sequence: Synthetic oligonucleotide
  misc_feature 1..20: note = Target: SCN10A; (+) strand; PAM type: NNGRRT; PAM sequence: TGGGGT
  source 1..20: mol_type = other DNA
aataagtattggttccttcc

SEQ ID NO: 9429 - DNA, 20 bp, synthetic construct
  misc_feature 1..20: note = Description of Artificial Sequence: Synthetic oligonucleotide
  misc_feature 1..20: note = Target: SCN10A; (+) strand; PAM type: NNGRRT; PAM sequence: TTGAGT
  source 1..20: mol_type = other DNA
tgacttttcagctctttcca

SEQ ID NO: 9430 - DNA, 20 bp, synthetic construct
  misc_feature 1..20: note = Description of Artificial Sequence: Synthetic oligonucleotide
  misc_feature 1..20: note = Target: SCN10A; (+) strand; PAM type: NNGRRT; PAM sequence: TTGGAT
  source 1..20: mol_type = other DNA
gaagtctatttctctgtctc

SEQ ID NO: 9431 - DNA, 20 bp, synthetic construct
  misc_feature 1..20: note = Description of Artificial Sequence: Synthetic oligonucleotide
  misc_feature 1..20: note = Target: SCN10A; (+) strand; PAM type: NNGRRT; PAM sequence: AAGAAT
  source 1..20: mol_type = other DNA
gactgcaacttgctttagtc

SEQ ID NO: 9432 - DNA, 20 bp, synthetic construct
  misc_feature 1..20: note = Description of Artificial Sequence: Synthetic oligonucleotide
  misc_feature 1..20: note = Target: SCN10A; (+) strand; PAM type: NNGRRT; PAM sequence: CAGAAT
  source 1..20: mol_type = other DNA
tgctttagtcaagaatgtat

SEQ ID NO: 9433 - DNA, 20 bp, synthetic construct
  misc_feature 1..20: note = Description of Artificial Sequence: Synthetic oligonucleotide
  misc_feature 1..20: note = Target: SCN10A; (+) strand; PAM type: NNGRRT; PAM sequence: GGGGGT
  source 1..20: mol_type = other DNA
aggcccaggctaacctgttt

SEQ ID NO: 9434 - DNA, 20 bp, synthetic construct
  misc_feature 1..20: note = Description of Artificial Sequence: Synthetic oligonucleotide
  misc_feature 1..20: note = Target: SCN10A; (+) strand; PAM type: NNGRRT; PAM sequence: ATGAAT
  source 1..20: mol_type = other DNA
aatatgctgtctgcatatgc

SEQ ID NO: 9435 - DNA, 20 bp, synthetic construct
  misc_feature 1..20: note = Description of Artificial Sequence: Synthetic oligonucleotide
  misc_feature 1..20: note = Target: SCN10A; (+) strand; PAM type: NNGRRT; PAM sequence: CAGAAT
  source 1..20: mol_type = other DNA
cagtccaaaatgctgatgca

SEQ ID NO: 9436 - DNA, 20 bp, synthetic construct
  misc_feature 1..20: note = Description of Artificial Sequence: Synthetic oligonucleotide
  misc_feature 1..20: note = Target: SCN10A; (+) strand; PAM type: NNGRRT; PAM sequence: ATGAAT
  source 1..20: mol_type = other DNA
aaatgctgatgcacagaatc

SEQ ID NO: 9437 - DNA, 20 bp, synthetic construct
  misc_feature 1..20: note = Description of Artificial Sequence: Synthetic oligonucleotide
  misc_feature 1..20: note = Target: SCN10A; (+) strand; PAM type: NNGRRT; PAM sequence: TGGGGT
  source 1..20: mol_type = other DNA
tgttttaattcacaaaattt

SEQ ID NO: 9438 - DNA, 20 bp, synthetic construct
  misc_feature 1..20: note = Description of Artificial Sequence: Synthetic oligonucleotide
  misc_feature 1..20: note = Target: SCN10A; (+) strand; PAM type: NNGRRT; PAM sequence: CTGGGT
  source 1..20: mol_type = other DNA
acattccctccccatgagct

SEQ ID NO: 9439 - DNA, 20 bp, synthetic construct
  misc_feature 1..20: note = Description of Artificial Sequence: Synthetic oligonucleotide
  misc_feature 1..20: note = Target: SCN10A; (+) strand; PAM type: NNGRRT; PAM sequence: AGGAAT
  source 1..20: mol_type = other DNA
tgccaaggacaagatggaga

SEQ ID NO: 9440 - DNA, 20 bp, synthetic construct
  misc_feature 1..20: note = Description of Artificial Sequence: Synthetic oligonucleotide
  misc_feature 1..20: note = Target: SCN10A; (+) strand; PAM type: NNGRRT; PAM sequence: CTGAGT
  source 1..20: mol_type = other DNA
tcataagttgggaactcacc

SEQ ID NO: 9441 - DNA, 20 bp, synthetic construct
  misc_feature 1..20: note = Description of Artificial Sequence: Synthetic oligonucleotide
  misc_feature 1..20: note = Target: SCN10A; (+) strand; PAM type: NNGRRT; PAM sequence: AGGGGT
  source 1..20: mol_type = other DNA
agatccattgccacacagta

SEQ ID NO: 9442 - DNA, 20 bp, synthetic construct
  misc_feature 1..20: note = Description of Artificial Sequence: Synthetic oligonucleotide
  misc_feature 1..20: note = Target: SCN10A; (+) strand; PAM type: NNGRRT; PAM sequence: GTGAAT
  source 1..20: mol_type = other DNA
tccaacccaagccttgtgtg

SEQ ID NO: 9443 - DNA, 20 bp, synthetic construct
  misc_feature 1..20: note = Description of Artificial Sequence: Synthetic oligonucleotide
  misc_feature 1..20: note = Target: SCN10A; (+) strand; PAM type: NNGRRT; PAM sequence: TAGAAT
  source 1..20: mol_type = other DNA
tcaatctcccccagcagagg

SEQ ID NO: 9444 - DNA, 20 bp, synthetic construct
  misc_feature 1..20: note = Description of Artificial Sequence: Synthetic oligonucleotide
  misc_feature 1..20: note = Target: SCN10A; (+) strand; PAM type: NNGRRT; PAM sequence: AGGGAT
  source 1..20: mol_type = other DNA
atggctcatttccttgcaag

SEQ ID NO: 9445 - DNA, 20 bp, synthetic construct
  misc_feature 1..20: note = Description of Artificial Sequence: Synthetic oligonucleotide
  misc_feature 1..20: note = Target: SCN10A; (+) strand; PAM type: NNGRRT; PAM sequence: TAGAAT
  source 1..20: mol_type = other DNA
ggatgctgagcaacaggaaa

SEQ ID NO: 9446 - DNA, 20 bp, synthetic construct
  misc_feature 1..20: note = Description of Artificial Sequence: Synthetic oligonucleotide
  misc_feature 1..20: note = Target: SCN10A; (+) strand; PAM type: NNGRRT; PAM sequence: GGGAGT
  source 1..20: mol_type = other DNA
gaaccattttggcaggaaag

SEQ ID NO: 9447 - DNA, 20 bp, synthetic construct
  misc_feature 1..20: note = Description of Artificial Sequence: Synthetic oligonucleotide
  misc_feature 1..20: note = Target: SCN10A; (+) strand; PAM type: NNGRRT; PAM sequence: AAGGGT
  source 1..20: mol_type = other DNA
ccctgtccctatatgatacc

SEQ ID NO: 9448 - DNA, 20 bp, synthetic construct
  misc_feature 1..20: note = Description of Artificial Sequence: Synthetic oligonucleotide
  misc_feature 1..20: note = Target: SCN10A; (+) strand; PAM type: NNGRRT; PAM sequence: ATGAGT
  source 1..20: mol_type = other DNA
ccactcacgttttctgtgag

SEQ ID NO: 9449 - DNA, 20 bp, synthetic construct
  misc_feature 1..20: note = Description of Artificial Sequence: Synthetic oligonucleotide
  misc_feature 1..20: note = Target: SCN10A; (+) strand; PAM type: NNGRRT; PAM sequence: AAGAGT
  source 1..20: mol_type = other DNA
tatttttgaggttgcccttg

SEQ ID NO: 9450 - DNA, 20 bp, synthetic construct
  misc_feature 1..20: note = Description of Artificial Sequence: Synthetic oligonucleotide
  misc_feature 1..20: note = Target: SCN10A; (+) strand; PAM type: NNGRRT; PAM sequence: GAGGAT
  source 1..20: mol_type = other DNA
acacttaggcagaagatggt

SEQ ID NO: 9451 - DNA, 20 bp, synthetic construct
  misc_feature 1..20: note = Description of Artificial Sequence: Synthetic oligonucleotide
  misc_feature 1..20: note = Target: SCN10A; (+) strand; PAM type: NNGRRT; PAM sequence: CTGAGT
  source 1..20: mol_type = other DNA
cacatcagccagtttcttca

SEQ ID NO: 9452 - DNA, 20 bp, synthetic construct
  misc_feature 1..20: note = Description of Artificial Sequence: Synthetic oligonucleotide
  misc_feature 1..20: note = Target: SCN10A; (+) strand; PAM type: NNGRRT; PAM sequence: GTGAAT
  source 1..20: mol_type = other DNA
tcagccagtttcttcactga

SEQ ID NO: 9453 - DNA, 20 bp, synthetic construct
  misc_feature 1..20: note = Description of Artificial Sequence: Synthetic oligonucleotide
  misc_feature 1..20: note = Target: SCN10A; (+) strand; PAM type: NNGRRT; PAM sequence: ATGGAT
  source 1..20: mol_type = other DNA
gatgacagtggtatgaccac

SEQ ID NO: 9454 - DNA, 20 bp, synthetic construct
  misc_feature 1..20: note = Description of Artificial Sequence: Synthetic oligonucleotide
  misc_feature 1..20: note = Target: SCN10A; (+) strand; PAM type: NNGRRT; PAM sequence: AGGAGT
  source 1..20: mol_type = other DNA
cctccttcatctctacatac

SEQ ID NO: 9455 - DNA, 20 bp, synthetic construct
  misc_feature 1..20: note = Description of Artificial Sequence: Synthetic oligonucleotide
  misc_feature 1..20: note = Target: SCN10A; (+) strand; PAM type: NNGRRT; PAM sequence: GAGAGT
  source 1..20: mol_type = other DNA
tttactctgagaggcaggca

SEQ ID NO: 9456 - DNA, 20 bp, synthetic construct
  misc_feature 1..20: note = Description of Artificial Sequence: Synthetic oligonucleotide
  misc_feature 1..20: note = Target: SCN10A; (+) strand; PAM type: NNGRRT; PAM sequence: CTGAGT
  source 1..20: mol_type = other DNA
ttcaatttaaataatttatg

SEQ ID NO: 9457 - DNA, 20 bp, synthetic construct
  misc_feature 1..20: note = Description of Artificial Sequence: Synthetic oligonucleotide
  misc_feature 1..20: note = Target: SCN10A; (+) strand; PAM type: NNGRRT; PAM sequence: GTGAGT
  source 1..20: mol_type = other DNA
acacatgaacctcactgtgt

SEQ ID NO: 9458 - DNA, 20 bp, synthetic construct
  misc_feature 1..20: note = Description of Artificial Sequence: Synthetic oligonucleotide
  misc_feature 1..20: note = Target: SCN10A; (+) strand; PAM type: NNGRRT; PAM sequence: TAGAGT
  source 1..20: mol_type = other DNA
agagagagatgcaagagaga

SEQ ID NO: 9459 - DNA, 20 bp, synthetic construct
  misc_feature 1..20: note = Description of Artificial Sequence: Synthetic oligonucleotide
  misc_feature 1..20: note = Target: SCN10A; (+) strand; PAM type: NNGRRT; PAM sequence: GTGAGT
  source 1..20: mol_type = other DNA
agacacagagaaacagagag

SEQ ID NO: 9460 - DNA, 20 bp, synthetic construct
  misc_feature 1..20: note = Description of Artificial Sequence: Synthetic oligonucleotide
  misc_feature 1..20: note = Target: SCN10A; (+) strand; PAM type: NNGRRT; PAM sequence: AAGGAT
  source 1..20: mol_type = other DNA
aagcacagctggcagcaaag

SEQ ID NO: 9461 - DNA, 20 bp, synthetic construct
  misc_feature 1..20: note = Description of Artificial Sequence: Synthetic oligonucleotide
  misc_feature 1..20: note = Target: SCN10A; (+) strand; PAM type: NNGRRT; PAM sequence: AGGGAT
  source 1..20: mol_type = other DNA
atacacctgcttgtttaagg

SEQ ID NO: 9462 - DNA, 20 bp, synthetic construct
  misc_feature 1..20: note = Description of Artificial Sequence: Synthetic oligonucleotide
  misc_feature 1..20: note = Target: SCN10A; (+) strand; PAM type: NNGRRT; PAM sequence: TAGGAT
  source 1..20: mol_type = other DNA
ctctgaccagggaagcaatc

SEQ ID NO: 9463 - DNA, 20 bp, synthetic construct
  misc_feature 1..20: note = Description of Artificial Sequence: Synthetic oligonucleotide
  misc_feature 1..20: note = Target: SCN10A; (+) strand; PAM type: NNGRRT; PAM sequence: CTGAGT
  source 1..20: mol_type = other DNA
gtcagtccctggactgggag

SEQ ID NO: 9464 - DNA, 20 bp, synthetic construct
  misc_feature 1..20: note = Description of Artificial Sequence: Synthetic oligonucleotide
  misc_feature 1..20: note = Target: SCN10A; (+) strand; PAM type: NNGRRT; PAM sequence: TCGAGT
  source 1..20: mol_type = other DNA
atggctaaggcagcagcatg

SEQ ID NO: 9465 - DNA, 20 bp, synthetic construct
  misc_feature 1..20: note = Description of Artificial Sequence: Synthetic oligonucleotide
  misc_feature 1..20: note = Target: SCN10A; (+) strand; PAM type: NNGRRT; PAM sequence: GGGAAT
  source 1..20: mol_type = other DNA
ttaactgaagttccagaggt

SEQ ID NO: 9466 - DNA, 20 bp, synthetic construct
  misc_feature 1..20: note = Description of Artificial Sequence: Synthetic oligonucleotide
  misc_feature 1..20: note = Target: SCN10A; (+) strand; PAM type: NNGRRT; PAM sequence: TGGGGT
  source 1..20: mol_type = other DNA
tgaagttccagaggtgggaa

SEQ ID NO: 9467 - DNA, 20 bp, synthetic construct
  misc_feature 1..20: note = Description of Artificial Sequence: Synthetic oligonucleotide
  misc_feature 1..20: note = Target: SCN10A; (+) strand; PAM type: NNGRRT; PAM sequence: GTGGGT
  source 1..20: mol_type = other DNA
gttccagaggtgggaatggg

SEQ ID NO: 9468 - DNA, 20 bp, synthetic construct
  misc_feature 1..20: note = Description of Artificial Sequence: Synthetic oligonucleotide
  misc_feature 1..20: note = Target: SCN10A; (+) strand; PAM type: NNGRRT; PAM sequence: TGGAGT
  source 1..20: mol_type = other DNA
agaggtgggaatggggtggg

SEQ ID NO: 9469 - DNA, 20 bp, synthetic construct
  misc_feature 1..20: note = Description of Artificial Sequence: Synthetic oligonucleotide
  misc_feature 1..20: note = Target: SCN10A; (+) strand; PAM type: NNGRRT; PAM sequence: AGGAAT
  source 1..20: mol_type = other DNA
aaaaccttggcagagccctg

SEQ ID NO: 9470 - DNA, 20 bp, synthetic construct
  misc_feature 1..20: note = Description of Artificial Sequence: Synthetic oligonucleotide
  misc_feature 1..20: note = Target: SCN10A; (+) strand; PAM type: NNGRRT; PAM sequence: ATGAGT
  source 1..20: mol_type = other DNA
ccttggcagagccctgagga

SEQ ID NO: 9471 - DNA, 20 bp, synthetic construct
  misc_feature 1..20: note = Description of Artificial Sequence: Synthetic oligonucleotide
  misc_feature 1..20: note = Target: SCN10A; (+) strand; PAM type: NNGRRT; PAM sequence: GTGAGT
  source 1..20: mol_type = other DNA
cagagccctgaggaatgagt

SEQ ID NO: 9472 - DNA, 20 bp, synthetic construct
  misc_feature 1..20: note = Description of Artificial Sequence: Synthetic oligonucleotide
  misc_feature 1..20: note = Target: SCN10A; (+) strand; PAM type: NNGRRT; PAM sequence: TTGAGT
  source 1..20: mol_type = other DNA
ccctgaggaatgagtgtgag

SEQ ID NO: 9473 - DNA, 20 bp, synthetic construct
  misc_feature 1..20: note = Description of Artificial Sequence: Synthetic oligonucleotide
  misc_feature 1..20: note = Target: SCN10A; (+) strand; PAM type: NNGRRT; PAM sequence: AAGGAT
  source 1..20: mol_type = other DNA
agttgagtaaagagaggagg

SEQ ID NO: 9474 - DNA, 20 bp, synthetic construct
  misc_feature 1..20: note = Description of Artificial Sequence: Synthetic oligonucleotide
  misc_feature 1..20: note = Target: SCN10A; (+) strand; PAM type: NNGRRT; PAM sequence: TGGAGT
  source 1..20: mol_type = other DNA
ctgggaggtgagcaatggtg

SEQ ID NO: 9475 - DNA, 20 bp, synthetic construct
  misc_feature 1..20: note = Description of Artificial Sequence: Synthetic oligonucleotide
  misc_feature 1..20: note = Target: SCN10A; (+) strand; PAM type: NNGRRT; PAM sequence: GTGGAT
  source 1..20: mol_type = other DNA
gagtatttgcagaaccgtag

SEQ ID NO: 9476 - DNA, 20 bp, synthetic construct
  misc_feature 1..20: note = Description of Artificial Sequence: Synthetic oligonucleotide
  misc_feature 1..20: note = Target: SCN10A; (+) strand; PAM type: NNGRRT; PAM sequence: CAGGGT
  source 1..20: mol_type = other DNA
caggtcttgcaaataagact

SEQ ID NO: 9477 - DNA, 20 bp, synthetic construct
  misc_feature 1..20: note = Description of Artificial Sequence: Synthetic oligonucleotide
  misc_feature 1..20: note = Target: SCN10A; (+) strand; PAM type: NNGRRT; PAM sequence: GAGAGT
  source 1..20: mol_type = other DNA
gactcagggtcttcccagtt

SEQ ID NO: 9478 - DNA, 20 bp, synthetic construct
  misc_feature 1..20: note = Description of Artificial Sequence: Synthetic oligonucleotide
  misc_feature 1..20: note = Target: SCN10A; (+) strand; PAM type: NNGRRT; PAM sequence: GGGAAT
  source 1..20: mol_type = other DNA
cttcaagaggtgtgtccagt

SEQ ID NO: 9479 - DNA, 20 bp, synthetic construct
  misc_feature 1..20: note = Description of Artificial Sequence: Synthetic oligonucleotide
  misc_feature 1..20: note = Target: SCN10A; (+) strand; PAM type: NNGRRT; PAM sequence: GAGAGT
  source 1..20: mol_type = other DNA
gtgtccagtgggaattggca

SEQ ID NO: 9480 - DNA, 20 bp, synthetic construct
  misc_feature 1..20: note = Description of Artificial Sequence: Synthetic oligonucleotide
  misc_feature 1..20: note = Target: SCN10A; (+) strand; PAM type: NNGRRT; PAM sequence: TAGAAT
  source 1..20: mol_type = other DNA
ggtagaaaagacttccactc

SEQ ID NO: 9481 - DNA, 20 bp, synthetic construct
  misc_feature 1..20: note = Description of Artificial Sequence: Synthetic oligonucleotide
  misc_feature 1..20: note = Target: SCN10A; (+) strand; PAM type: NNGRRT; PAM sequence: ATGGGT
  source 1..20: mol_type = other DNA
gaaaagacttccactctaga

SEQ ID NO: 9482 - DNA, 20 bp, synthetic construct
  misc_feature 1..20: note = Description of Artificial Sequence: Synthetic oligonucleotide
  misc_feature 1..20: note = Target: SCN10A; (+) strand; PAM type: NNGRRT; PAM sequence: ACGAAT
  source 1..20: mol_type = other DNA
ttctgtttacagataagaga

SEQ ID NO: 9483 - DNA, 20 bp, synthetic construct
  misc_feature 1..20: note = Description of Artificial Sequence: Synthetic oligonucleotide
  misc_feature 1..20: note = Target: SCN10A; (+) strand; PAM type: NNGRRT; PAM sequence: TGGGGT
  source 1..20: mol_type = other DNA
cagataagagaacgaattct

SEQ ID NO: 9484 - DNA, 20 bp, synthetic construct
  misc_feature 1..20: note = Description of Artificial Sequence: Synthetic oligonucleotide
  misc_feature 1..20: note = Target: SCN10A; (+) strand; PAM type: NNGRRT; PAM sequence: AAGAGT
  source 1..20: mol_type = other DNA
catcaacctcatgggggctg

SEQ ID NO: 9485 - DNA, 20 bp, synthetic construct
  misc_feature 1..20: note = Description of Artificial Sequence: Synthetic oligonucleotide
  misc_feature 1..20: note = Target: SCN10A; (+) strand; PAM type: NNGRRT; PAM sequence: CTGAAT
  source 1..20: mol_type = other DNA
ttgatggactacttttgttt

SEQ ID NO: 9486 - DNA, 20 bp, synthetic construct
  misc_feature 1..20: note = Description of Artificial Sequence: Synthetic oligonucleotide
  misc_feature 1..20: note = Target: SCN10A; (+) strand; PAM type: NNGRRT; PAM sequence: AAGAAT
  source 1..20: mol_type = other DNA
tttctgaattctcagtaatc

SEQ ID NO: 9487 - DNA, 20 bp, synthetic construct
  misc_feature 1..20: note = Description of Artificial Sequence: Synthetic oligonucleotide
  misc_feature 1..20: note = Target: SCN10A; (+) strand; PAM type: NNGRRT; PAM sequence: CTGGGT
  source 1..20: mol_type = other DNA
ttgcctaattcttttttcct

SEQ ID NO: 9488 - DNA, 20 bp, synthetic construct
  misc_feature 1..20: note = Description of Artificial Sequence: Synthetic oligonucleotide
  misc_feature 1..20: note = Target: SCN10A; (+) strand; PAM type: NNGRRT; PAM sequence: CAGGAT
  source 1..20: mol_type = other DNA
ttcctctgggtgtctaaaga

SEQ ID NO: 9489 - DNA, 20 bp, synthetic construct
  misc_feature 1..20: note = Description of Artificial Sequence: Synthetic oligonucleotide
  misc_feature 1..20: note = Target: SCN10A; (+) strand; PAM type: NNGRRT; PAM sequence: AGGGGT
  source 1..20: mol_type = other DNA
tataaataaaaattcaactg

SEQ ID NO: 9490 - DNA, 20 bp, synthetic construct
  misc_feature 1..20: note = Description of Artificial Sequence: Synthetic oligonucleotide
  misc_feature 1..20: note = Target: SCN10A; (+) strand; PAM type: NNGRRT; PAM sequence: CTGAAT
  source 1..20: mol_type = other DNA
attcaactgaggggtcttgc

SEQ ID NO: 9491 - DNA, 20 bp, synthetic construct
  misc_feature 1..20: note = Description of Artificial Sequence: Synthetic oligonucleotide
  misc_feature 1..20: note = Target: SCN10A; (+) strand; PAM type: NNGRRT; PAM sequence: AGGAGT
  source 1..20: mol_type = other DNA
tgtgggaagagcactggcct

SEQ ID NO: 9492 - DNA, 20 bp, synthetic construct
  misc_feature 1..20: note = Description of Artificial Sequence: Synthetic oligonucleotide
  misc_feature 1..20: note = Target: SCN10A; (+) strand; PAM type: NNGRRT; PAM sequence: TTGGGT
  source 1..20: mol_type = other DNA
ctcttactagtgaagaggcc

SEQ ID NO: 9493 - DNA, 20 bp, synthetic construct
  misc_feature 1..20: note = Description of Artificial Sequence: Synthetic oligonucleotide
  misc_feature 1..20: note = Target: SCN10A; (+) strand; PAM type: NNGRRT; PAM sequence: CAGGGT
  source 1..20: mol_type = other DNA
gtctttgccctggaacctta

SEQ ID NO: 9494 - DNA, 20 bp, synthetic construct
  misc_feature 1..20: note = Description of Artificial Sequence: Synthetic oligonucleotide
  misc_feature 1..20: note = Target: SCN10A; (+) strand; PAM type: NNGRRT; PAM sequence: GGGAGT
  source 1..20: mol_type = other DNA
ttcttgtgaaaattagagaa

SEQ ID NO: 9495 - DNA, 20 bp, synthetic construct
  misc_feature 1..20: note = Description of Artificial Sequence: Synthetic oligonucleotide
  misc_feature 1..20: note = Target: SCN10A; (+) strand; PAM type: NNGRRT; PAM sequence: GTGAAT
  source 1..20: mol_type = other DNA
tgaaaaccaacatatgctct

SEQ ID NO: 9496 - DNA, 20 bp, synthetic construct
  misc_feature 1..20: note = Description of Artificial Sequence: Synthetic oligonucleotide
  misc_feature 1..20: note = Target: SCN10A; (+) strand; PAM type: NNGRRT; PAM sequence: TGGGAT
  source 1..20: mol_type = other DNA
tctgtgaataaatgctcacc

SEQ ID NO: 9497 - DNA, 20 bp, synthetic construct
  misc_feature 1..20: note = Description of Artificial Sequence: Synthetic oligonucleotide
  misc_feature 1..20: note = Target: SCN10A; (+) strand; PAM type: NNGRRT; PAM sequence: CTGAAT
  source 1..20: mol_type = other DNA
tttttaatgctctaagaact

SEQ ID NO: 9498 - DNA, 20 bp, synthetic construct
  misc_feature 1..20: note = Description of Artificial Sequence: Synthetic oligonucleotide
  misc_feature 1..20: note = Target: SCN10A; (+) strand; PAM type: NNGRRT; PAM sequence: AAGGGT
  source 1..20: mol_type = other DNA
tagtcagcatctctgcaagc

SEQ ID NO: 9499 - DNA, 20 bp, synthetic construct
  misc_feature 1..20: note = Description of Artificial Sequence: Synthetic oligonucleotide
  misc_feature 1..20: note = Target: SCN10A; (+) strand; PAM type: NNGRRT; PAM sequence: GGGGAT
  source 1..20: mol_type = other DNA
tctctgcaagcaagggtcct

SEQ ID NO: 9500 - DNA, 20 bp, synthetic construct
  misc_feature 1..20: note = Description of Artificial Sequence: Synthetic oligonucleotide
  misc_feature 1..20: note = Target: SCN10A; (+) strand; PAM type: NNGRRT; PAM sequence: AAGGAT
  source 1..20: mol_type = other DNA
gggatgcatgcagcataaat

SEQ ID NO: 9501 - DNA, 20 bp, synthetic construct
  misc_feature 1..20: note = Description of Artificial Sequence: Synthetic oligonucleotide
  misc_feature 1..20: note = Target: SCN10A; (+) strand; PAM type: NNGRRT; PAM sequence: TGGGGT
  source 1..20: mol_type = other DNA
cagcataaataaggataacc

SEQ ID NO: 9502 - DNA, 20 bp, synthetic construct
  misc_feature 1..20: note = Description of Artificial Sequence: Synthetic oligonucleotide
  misc_feature 1..20: note = Target: SCN10A; (+) strand; PAM type: NNGRRT; PAM sequence: AAGGAT
  source 1..20: mol_type = other DNA
tggggtatcattagcctaga

SEQ ID NO: 9503 - DNA, 20 bp, synthetic construct
  misc_feature 1..20: note = Description of Artificial Sequence: Synthetic oligonucleotide
  misc_feature 1..20: note = Target: SCN10A; (+) strand; PAM type: NNGRRT; PAM sequence: CAGAAT
  source 1..20: mol_type = other DNA
tcattagcctagaaaggatg

SEQ ID NO: 9504 - DNA, 20 bp, synthetic construct
  misc_feature 1..20: note = Description of Artificial Sequence: Synthetic oligonucleotide
  misc_feature 1..20: note = Target: SCN10A; (+) strand; PAM type: NNGRRT; PAM sequence: TAGAAT
  source 1..20: mol_type = other DNA
aaggatgcagaatggacact

SEQ ID NO: 9505 - DNA, 20 bp, synthetic construct
  misc_feature 1..20: note = Description of Artificial Sequence: Synthetic oligonucleotide
  misc_feature 1..20: note = Target: SCN10A; (+) strand; PAM type: NNGRRT; PAM sequence: CAGAGT
  source 1..20: mol_type = other DNA
ttcattattgcaacatcttt

SEQ ID NO: 9506 - DNA, 20 bp, synthetic construct
  misc_feature 1..20: note = Description of Artificial Sequence: Synthetic oligonucleotide
  misc_feature 1..20: note = Target: SCN10A; (+) strand; PAM type: NNGRRT; PAM sequence: ACGGAT
  source 1..20: mol_type = other DNA
ctaggcaacactgcatgtgg

SEQ ID NO: 9507 - DNA, 20 bp, synthetic construct
  misc_feature 1..20: note = Description of Artificial Sequence: Synthetic oligonucleotide
  misc_feature 1..20: note = Target: SCN10A; (+) strand; PAM type: NNGRRT; PAM sequence: AGGAGT
  source 1..20: mol_type = other DNA
gtggacggatcttcaaacac

SEQ ID NO: 9508 - DNA, 20 bp, synthetic construct
  misc_feature 1..20: note = Description of Artificial Sequence: Synthetic oligonucleotide
  misc_feature 1..20: note = Target: SCN10A; (+) strand; PAM type: NNGRRT; PAM sequence: GGGGGT
  source 1..20: mol_type = other DNA
gaaggagaccgccatgtcag

SEQ ID NO: 9509 - DNA, 20 bp, synthetic construct
  misc_feature 1..20: note = Description of Artificial Sequence: Synthetic oligonucleotide
  misc_feature 1..20: note = Target: SCN10A; (+) strand; PAM type: NNGRRT; PAM sequence: CAGAGT
  source 1..20: mol_type = other DNA
ctgagatgaagaaccttctt

SEQ ID NO: 9510 - DNA, 20 bp, synthetic construct
  misc_feature 1..20: note = Description of Artificial Sequence: Synthetic oligonucleotide
  misc_feature 1..20: note = Target: SCN10A; (+) strand; PAM type: NNGRRT; PAM sequence: CTGGAT
  source 1..20: mol_type = other DNA
accttcttcagagtgtgagc

SEQ ID NO: 9511 - DNA, 20 bp, synthetic construct
  misc_feature 1..20: note = Description of Artificial Sequence: Synthetic oligonucleotide
  misc_feature 1..20: note = Target: SCN10A; (+) strand; PAM type: NNGRRT; PAM sequence: ATGAAT
  source 1..20: mol_type = other DNA
aacaggtggtttttggttac

SEQ ID NO: 9512 - DNA, 20 bp, synthetic construct
  misc_feature 1..20: note = Description of Artificial Sequence: Synthetic oligonucleotide
  misc_feature 1..20: note = Target: SCN10A; (+) strand; PAM type: NNGRRT; PAM sequence: TTGGGT
  source 1..20: mol_type = other DNA
gttttgggaaacaggtggtg

SEQ ID NO: 9513 - DNA, 20 bp, synthetic construct
  misc_feature 1..20: note = Description of Artificial Sequence: Synthetic oligonucleotide
  misc_feature 1..20: note = Target: SCN10A; (+) strand; PAM type: NNGRRT; PAM sequence: CTGAGT
  source 1..20: mol_type = other DNA
tgatgcttgactttctattc

SEQ ID NO: 9514 - DNA, 20 bp, synthetic construct
  misc_feature 1..20: note = Description of Artificial Sequence: Synthetic oligonucleotide
  misc_feature 1..20: note = Target: SCN10A; (+) strand; PAM type: NNGRRT; PAM sequence: TAGAAT
  source 1..20: mol_type = other DNA
tattcctgagttacttcatt

SEQ ID NO: 9515 - DNA, 20 bp, synthetic construct
  misc_feature 1..20: note = Description of Artificial Sequence: Synthetic oligonucleotide
  misc_feature 1..20: note = Target: SCN10A; (+) strand; PAM type: NNGRRT; PAM sequence: CTGAGT
  source 1..20: mol_type = other DNA
tatttcattcctttttacaa

SEQ ID NO: 9516 - DNA, 20 bp, synthetic construct
  misc_feature 1..20: note = Description of Artificial Sequence: Synthetic oligonucleotide
  misc_feature 1..20: note = Target: SCN10A; (+) strand; PAM type: NNGRRT; PAM sequence: CTGGGT
  source 1..20: mol_type = other DNA
taataatggcttattttcct

SEQ ID NO: 9517 - DNA, 20 bp, synthetic construct
  misc_feature 1..20: note = Description of Artificial Sequence: Synthetic oligonucleotide
  misc_feature 1..20: note = Target: SCN10A; (+) strand; PAM type: NNGRRT; PAM sequence: TGGGAT
  source 1..20: mol_type = other DNA
tctgggtagatacccagtag

SEQ ID NO: 9518 - DNA, 20 bp, synthetic construct
  misc_feature 1..20: note = Description of Artificial Sequence: Synthetic oligonucleotide
  misc_feature 1..20: note = Target: SCN10A; (+) strand; PAM type: NNGRRT; PAM sequence: AGGAAT
  source 1..20: mol_type = other DNA
gttctacttttagttcttta

SEQ ID NO: 9519 - DNA, 20 bp, synthetic construct
  misc_feature 1..20: note = Description of Artificial Sequence: Synthetic oligonucleotide
  misc_feature 1..20: note = Target: SCN10A; (+) strand; PAM type: NNGRRT; PAM sequence: AGGAGT
  source 1..20: mol_type = other DNA
ttggttatggccattcttgc

SEQ ID NO: 9520 - DNA, 20 bp, synthetic construct
  misc_feature 1..20: note = Description of Artificial Sequence: Synthetic oligonucleotide
  misc_feature 1..20: note = Target: SCN10A; (+) strand; PAM type: NNGRRT; PAM sequence: GAGAAT
  source 1..20: mol_type = other DNA
ccatttatatatcttctttt

SEQ ID NO: 9521 - DNA, 20 bp, synthetic construct
  misc_feature 1..20: note = Description of Artificial Sequence: Synthetic oligonucleotide
  misc_feature 1..20: note = Target: SCN10A; (+) strand; PAM type: NNGRRT; PAM sequence: TTGGAT
  source 1..20: mol_type = other DNA
ttcttgtcctttgcccactt

SEQ ID NO: 9522 - DNA, 20 bp, synthetic construct
  misc_feature 1..20: note = Description of Artificial Sequence: Synthetic oligonucleotide
  misc_feature 1..20: note = Target: SCN10A; (+) strand; PAM type: NNGRRT; PAM sequence: TGGGAT
  source 1..20: mol_type = other DNA
gtcctttgcccacttttgga

SEQ ID NO: 9523 - DNA, 20 bp, synthetic construct
  misc_feature 1..20: note = Description of Artificial Sequence: Synthetic oligonucleotide
  misc_feature 1..20: note = Target: SCN10A; (+) strand; PAM type: NNGRRT; PAM sequence: CTGGAT
  source 1..20: mol_type = other DNA
atttgtgtttcttatagatg

SEQ ID NO: 9524 - DNA, 20 bp, synthetic construct
  misc_feature 1..20: note = Description of Artificial Sequence: Synthetic oligonucleotide
  misc_feature 1..20: note = Target: SCN10A; (+) strand; PAM type: NNGRRT; PAM sequence: ATGGGT
  source 1..20: mol_type = other DNA
aaagatttttctctcatcct

SEQ ID NO: 9525 - DNA, 20 bp, synthetic construct
  misc_feature 1..20: note = Description of Artificial Sequence: Synthetic oligonucleotide
  misc_feature 1..20: note = Target: SCN10A; (+) strand; PAM type: NNGRRT; PAM sequence: TTGGAT
  source 1..20: mol_type = other DNA
cctatgggttgtctgtttac

SEQ ID NO: 9526 - DNA, 20 bp, synthetic construct
  misc_feature 1..20: note = Description of Artificial Sequence: Synthetic oligonucleotide
  misc_feature 1..20: note = Target: SCN10A; (+) strand; PAM type: NNGRRT; PAM sequence: TTGGAT
  source 1..20: mol_type = other DNA
tctatttatttttgtttttg

SEQ ID NO: 9527 - DNA, 20 bp, synthetic construct
  misc_feature 1..20: note = Description of Artificial Sequence: Synthetic oligonucleotide
  misc_feature 1..20: note = Target: SCN10A; (+) strand; PAM type: NNGRRT; PAM sequence: TTGGGT
  source 1..20: mol_type = other DNA
ttgtttttgttggatttgct

SEQ ID NO: 9528 - DNA, 20 bp, synthetic construct
  misc_feature 1..20: note = Description of Artificial Sequence: Synthetic oligonucleotide
  misc_feature 1..20: note = Target: SCN10A; (+) strand; PAM type: NNGRRT; PAM sequence: AAGAGT
  source 1..20: mol_type = other DNA
ttgcctaagccaatgtctag

SEQ ID NO: 9529 - DNA, 20 bp, synthetic construct
  misc_feature 1..20: note = Description of Artificial Sequence: Synthetic oligonucleotide
  misc_feature 1..20: note = Target: SCN10A; (+) strand; PAM type: NNGRRT; PAM sequence: TAGAAT
  source 1..20: mol_type = other DNA
gtttttccaatgttatcttc

SEQ ID NO: 9530 - DNA, 20 bp, synthetic construct
  misc_feature 1..20: note = Description of Artificial Sequence: Synthetic oligonucleotide
  misc_feature 1..20: note = Target: SCN10A; (+) strand; PAM type: NNGRRT; PAM sequence: TTGAAT
  source 1..20: mol_type = other DNA
atttaagccttttatccatc

SEQ ID NO: 9531 - DNA, 20 bp, synthetic construct
  misc_feature 1..20: note = Description of Artificial Sequence: Synthetic oligonucleotide
  misc_feature 1..20: note = Target: SCN10A; (+) strand; PAM type: NNGRRT; PAM sequence: TTGAAT
  source 1..20: mol_type = other DNA
aattatcccagcaccatttg

SEQ ID NO: 9532 - DNA, 20 bp, synthetic construct
  misc_feature 1..20: note = Description of Artificial Sequence: Synthetic oligonucleotide
  misc_feature 1..20: note = Target: SCN10A; (+) strand; PAM type: NNGRRT; PAM sequence: TAGGGT
  source 1..20: mol_type = other DNA
tcccagcaccatttgttgaa

SEQ ID NO: 9533 - DNA, 20 bp, synthetic construct
  misc_feature 1..20: note = Description of Artificial Sequence: Synthetic oligonucleotide
  misc_feature 1..20: note = Target: SCN10A; (+) strand; PAM type: NNGRRT; PAM sequence: CTGAGT
  source 1..20: mol_type = other DNA
gtaagtatttggctttattt

SEQ ID NO: 9534 - DNA, 20 bp, synthetic construct
  misc_feature 1..20: note = Description of Artificial Sequence: Synthetic oligonucleotide
  misc_feature 1..20: note = Target: SCN10A; (+) strand; PAM type: NNGRRT; PAM sequence: GTGGAT
  source 1..20: mol_type = other DNA
cttagtcttgctttggctat

SEQ ID NO: 9535 - DNA, 20 bp, synthetic construct
  misc_feature 1..20: note = Description of Artificial Sequence: Synthetic oligonucleotide
  misc_feature 1..20: note = Target: SCN10A; (+) strand; PAM type: NNGRRT; PAM sequence: ATGAAT
  source 1..20: mol_type = other DNA
ggattcctttttggttccct

SEQ ID NO: 9536 - DNA, 20 bp, synthetic construct
  misc_feature 1..20: note = Description of Artificial Sequence: Synthetic oligonucleotide
  misc_feature 1..20: note = Target: SCN10A; (+) strand; PAM type: NNGRRT; PAM sequence: TAGGGT
  source 1..20: mol_type = other DNA
ttttggttccctatgaattt

SEQ ID NO: 9537 - DNA, 20 bp, synthetic construct
  misc_feature 1..20: note = Description of Artificial Sequence: Synthetic oligonucleotide
  misc_feature 1..20: note = Target: SCN10A; (+) strand; PAM type: NNGRRT; PAM sequence: AAGAAT
  source 1..20: mol_type = other DNA
ttgttatttctatttctgtg

SEQ ID NO: 9538 - DNA, 20 bp, synthetic construct
  misc_feature 1..20: note = Description of Artificial Sequence: Synthetic oligonucleotide
  misc_feature 1..20: note = Target: SCN10A; (+) strand; PAM type: NNGRRT; PAM sequence: TTGAAT
  source 1..20: mol_type = other DNA
gtacttcaatggaaattgta

SEQ ID NO: 9539 - DNA, 20 bp, synthetic construct
  misc_feature 1..20: note = Description of Artificial Sequence: Synthetic oligonucleotide
  misc_feature 1..20: note = Target: SCN10A; (+) strand; PAM type: NNGRRT; PAM sequence: TGGGAT
  source 1..20: mol_type = other DNA
attttatccatccatgagca

SEQ ID NO: 9540 - DNA, 20 bp, synthetic construct
  misc_feature 1..20: note = Description of Artificial Sequence: Synthetic oligonucleotide
  misc_feature 1..20: note = Target: SCN10A; (+) strand; PAM type: NNGRRT; PAM sequence: AGGGAT
  source 1..20: mol_type = other DNA
ttttttgcagctgttgtaaa

SEQ ID NO: 9541 - DNA, 20 bp, synthetic construct
  misc_feature 1..20: note = Description of Artificial Sequence: Synthetic oligonucleotide
  misc_feature 1..20: note = Target: SCN10A; (+) strand; PAM type: NNGRRT; PAM sequence: TTGAGT
  source 1..20: mol_type = other DNA
tgcagctgttgtaaaaggga

SEQ ID NO: 9542 - DNA, 20 bp, synthetic construct
  misc_feature 1..20: note = Description of Artificial Sequence: Synthetic oligonucleotide
  misc_feature 1..20: note = Target: SCN10A; (+) strand; PAM type: NNGRRT; PAM sequence: CTGAAT
  source 1..20: mol_type = other DNA
ttttgtatcctgaaacttta

SEQ ID NO: 9543 - DNA, 20 bp, synthetic construct
  misc_feature 1..20: note = Description of Artificial Sequence: Synthetic oligonucleotide
  misc_feature 1..20: note = Target: SCN10A; (+) strand; PAM type: NNGRRT; PAM sequence: TTGGAT
  source 1..20: mol_type = other DNA
ttattagatctaggagcttt

SEQ ID NO: 9544 - DNA, 20 bp, synthetic construct
  misc_feature 1..20: note = Description of Artificial Sequence: Synthetic oligonucleotide
  misc_feature 1..20: note = Target: SCN10A; (+) strand; PAM type: NNGRRT; PAM sequence: ATGAGT
  source 1..20: mol_type = other DNA
tagatctaggagctttttgg

SEQ ID NO: 9545 - DNA, 20 bp, synthetic construct
  misc_feature 1..20: note = Description of Artificial Sequence: Synthetic oligonucleotide
  misc_feature 1..20: note = Target: SCN10A; (+) strand; PAM type: NNGRRT; PAM sequence: TAGGGT
  source 1..20: mol_type = other DNA
gagctttttggatgagtctt

SEQ ID NO: 9546 - DNA, 20 bp, synthetic construct
  misc_feature 1..20: note = Description of Artificial Sequence: Synthetic oligonucleotide
  misc_feature 1..20: note = Target: SCN10A; (+) strand; PAM type: NNGRRT; PAM sequence: TTGGAT
  source 1..20: mol_type = other DNA
ttgacttcccctttactgat

SEQ ID NO: 9547 - DNA, 20 bp, synthetic construct
  misc_feature 1..20: note = Description of Artificial Sequence: Synthetic oligonucleotide
  misc_feature 1..20: note = Target: SCN10A; (+) strand; PAM type: NNGRRT; PAM sequence: TTGGAT
  source 1..20: mol_type = other DNA
ctaggacttccagtactatg

SEQ ID NO: 9548 - DNA, 20 bp, synthetic construct
  misc_feature 1..20: note = Description of Artificial Sequence: Synthetic oligonucleotide
  misc_feature 1..20: note = Target: SCN10A; (+) strand; PAM type: NNGRRT; PAM sequence: GGGAAT
  source 1..20: mol_type = other DNA
gtcttgtttcagttctcagg

SEQ ID NO: 9549 - DNA, 20 bp, synthetic construct
  misc_feature 1..20: note = Description of Artificial Sequence: Synthetic oligonucleotide
  misc_feature 1..20: note = Target: SCN10A; (+) strand; PAM type: NNGRRT; PAM sequence: GTGGAT
  source 1..20: mol_type = other DNA
tgtttggtataatgttggct

SEQ ID NO: 9550 - DNA, 20 bp, synthetic construct
  misc_feature 1..20: note = Description of Artificial Sequence: Synthetic oligonucleotide
  misc_feature 1..20: note = Target: SCN10A; (+) strand; PAM type: NNGRRT; PAM sequence: TGGAGT
  source 1..20: mol_type = other DNA
atagatggcttttattacct

SEQ ID NO: 9551 - DNA, 20 bp, synthetic construct
  misc_feature 1..20: note = Description of Artificial Sequence: Synthetic oligonucleotide
  misc_feature 1..20: note = Target: SCN10A; (+) strand; PAM type: NNGRRT; PAM sequence: GAGGGT
  source 1..20: mol_type = other DNA
ccttctatgccaatttggtt

SEQ ID NO: 9552 - DNA, 20 bp, synthetic construct
  misc_feature 1..20: note = Description of Artificial Sequence: Synthetic oligonucleotide
  misc_feature 1..20: note = Target: SCN10A; (+) strand; PAM type: NNGRRT; PAM sequence: TGGGAT
  source 1..20: mol_type = other DNA
gttgagggttttaatcataa

SEQ ID NO: 9553 - DNA, 20 bp, synthetic construct
  misc_feature 1..20: note = Description of Artificial Sequence: Synthetic oligonucleotide
  misc_feature 1..20: note = Target: SCN10A; (+) strand; PAM type: NNGRRT; PAM sequence: CTGGAT
  source 1..20: mol_type = other DNA
gttttaatcataatgggatg

SEQ ID NO: 9554 - DNA, 20 bp, synthetic construct
  misc_feature 1..20: note = Description of Artificial Sequence: Synthetic oligonucleotide
  misc_feature 1..20: note = Target: SCN10A; (+) strand; PAM type: NNGRRT; PAM sequence: TTGGAT
  source 1..20: mol_type = other DNA
tgatcatggtgtgttatctt

SEQ ID NO: 9555 - DNA, 20 bp, synthetic construct
  misc_feature 1..20: note = Description of Artificial Sequence: Synthetic oligonucleotide
  misc_feature 1..20: note = Target: SCN10A; (+) strand; PAM type: NNGRRT; PAM sequence: TTGGAT
  source 1..20: mol_type = other DNA
tgttatcttttggatatgtg

SEQ ID NO: 9556 - DNA, 20 bp, synthetic construct
  misc_feature 1..20: note = Description of Artificial Sequence: Synthetic oligonucleotide
  misc_feature 1..20: note = Target: SCN10A; (+) strand; PAM type: NNGRRT; PAM sequence: GAGGAT
  source 1..20: mol_type = other DNA
caattagctagcattttgtt

SEQ ID NO: 9557 - DNA, 20 bp, synthetic construct
  misc_feature 1..20: note = Description of Artificial Sequence: Synthetic oligonucleotide
  misc_feature 1..20: note = Target: SCN10A; (+) strand; PAM type: NNGRRT; PAM sequence: AGGGAT
  source 1..20: mol_type = other DNA
tttttgcatctatgttcatc

SEQ ID NO: 9558 - DNA, 20 bp, synthetic construct
  misc_feature 1..20: note = Description of Artificial Sequence: Synthetic oligonucleotide
  misc_feature 1..20: note = Target: SCN10A; (+) strand; PAM type: NNGRRT; PAM sequence: TAGGGT
  source 1..20: mol_type = other DNA
tccttttctggttttggtat

SEQ ID NO: 9559 - DNA, 20 bp, synthetic construct
  misc_feature 1..20: note = Description of Artificial Sequence: Synthetic oligonucleotide
  misc_feature 1..20: note = Target: SCN10A; (+) strand; PAM type: NNGRRT; PAM sequence: GAGGAT
  source 1..20: mol_type = other DNA
ggcttcataaaatgatttag

SEQ ID NO: 9560 - DNA, 20 bp, synthetic construct
  misc_feature 1..20: note = Description of Artificial Sequence: Synthetic oligonucleotide
  misc_feature 1..20: note = Target: SCN10A; (+) strand; PAM type: NNGRRT; PAM sequence: TGGAAT
  source 1..20: mol_type = other DNA
ttccctctttctgcatcttt

SEQ ID NO: 9561 - DNA, 20 bp, synthetic construct
  misc_feature 1..20: note = Description of Artificial Sequence: Synthetic oligonucleotide
  misc_feature 1..20: note = Target: SCN10A; (+) strand; PAM type: NNGRRT; PAM sequence: TTGAAT
  source 1..20: mol_type = other DNA
aaattggtaccaattcttct

SEQ ID NO: 9562 - DNA, 20 bp, synthetic construct
  misc_feature 1..20: note = Description of Artificial Sequence: Synthetic oligonucleotide
  misc_feature 1..20: note = Target: SCN10A; (+) strand; PAM type: NNGRRT; PAM sequence: TAGAAT
  source 1..20: mol_type = other DNA
attcttctttgaatgtctga

SEQ ID NO: 9563 - DNA, 20 bp, synthetic construct
  misc_feature 1..20: note = Description of Artificial Sequence: Synthetic oligonucleotide
  misc_feature 1..20: note = Target: SCN10A; (+) strand; PAM type: NNGRRT; PAM sequence: GTGAAT
  source 1..20: mol_type = other DNA
atgtctgatagaattcagct

SEQ ID NO: 9564 - DNA, 20 bp, synthetic construct
  misc_feature 1..20: note = Description of Artificial Sequence: Synthetic oligonucleotide
  misc_feature 1..20: note = Target: SCN10A; (+) strand; PAM type: NNGRRT; PAM sequence: TTGAAT
  source 1..20: mol_type = other DNA
ctttttttccttggcaattt

SEQ ID NO: 9565 - DNA, 20 bp, synthetic construct
  misc_feature 1..20: note = Description of Artificial Sequence: Synthetic oligonucleotide
  misc_feature 1..20: note = Target: SCN10A; (+) strand; PAM type: NNGRRT; PAM sequence: TAGAGT
  source 1..20: mol_type = other DNA
ctacttgttattggtctgtt

SEQ ID NO: 9566 - DNA, 20 bp, synthetic construct
  misc_feature 1..20: note = Description of Artificial Sequence: Synthetic oligonucleotide
  misc_feature 1..20: note = Target: SCN10A; (+) strand; PAM type: NNGRRT; PAM sequence: AGGAAT
  source 1..20: mol_type = other DNA
taagacagttgtatatttcc

SEQ ID NO: 9567 - DNA, 20 bp, synthetic construct
  misc_feature 1..20: note = Description of Artificial Sequence: Synthetic oligonucleotide
  misc_feature 1..20: note = Target: SCN10A; (+) strand; PAM type: NNGRRT; PAM sequence: TTGAAT
  source 1..20: mol_type = other DNA
taaaggtgttcatagtagcc

SEQ ID NO: 9568 - DNA, 20 bp, synthetic construct
  misc_feature 1..20: note = Description of Artificial Sequence: Synthetic oligonucleotide
  misc_feature 1..20: note = Target: SCN10A; (+) strand; PAM type: NNGRRT; PAM sequence: TTGGAT
  source 1..20: mol_type = other DNA
ttatttctaattgagcttat

SEQ ID NO: 9569 - DNA, 20 bp, synthetic construct
  misc_feature 1..20: note = Description of Artificial Sequence: Synthetic oligonucleotide
  misc_feature 1..20: note = Target: SCN10A; (+) strand; PAM type: NNGRRT; PAM sequence: TTGAAT
  source 1..20: mol_type = other DNA
tgtattattattatttttat

SEQ ID NO: 9570 - DNA, 20 bp, synthetic construct
  misc_feature 1..20: note = Description of Artificial Sequence: Synthetic oligonucleotide
  misc_feature 1..20: note = Target: SCN10A; (+) strand; PAM type: NNGRRT; PAM sequence: TTGGGT
  source 1..20: mol_type = other DNA
ttccttttcttctgcttggt

SEQ ID NO: 9571 - DNA, 20 bp, synthetic construct
  misc_feature 1..20: note = Description of Artificial Sequence: Synthetic oligonucleotide
  misc_feature 1..20: note = Target: SCN10A; (+) strand; PAM type: NNGRRT; PAM sequence: GAGGGT
  source 1..20: mol_type = other DNA
tcatgtatttgtatagtttt

SEQ ID NO: 9572 - DNA, 20 bp, synthetic construct
  misc_feature 1..20: note = Description of Artificial Sequence: Synthetic oligonucleotide
  misc_feature 1..20: note = Target: SCN10A; (+) strand; PAM type: NNGRRT; PAM sequence: TGGAGT
  source 1..20: mol_type = other DNA
atagttttgagggtttcttt

SEQ ID NO: 9573 - DNA, 20 bp, synthetic construct
  misc_feature 1..20: note = Description of Artificial Sequence: Synthetic oligonucleotide
  misc_feature 1..20: note = Target: SCN10A; (+) strand; PAM type: NNGRRT; PAM sequence: GAGGAT
  source 1..20: mol_type = other DNA
tttattcgactgtgctctga

SEQ ID NO: 9574 - DNA, 20 bp, synthetic construct
  misc_feature 1..20: note = Description of Artificial Sequence: Synthetic oligonucleotide
  misc_feature 1..20: note = Target: SCN10A; (+) strand; PAM type: NNGRRT; PAM sequence: GAGAAT
  source 1..20: mol_type = other DNA
ctatcacgtggtctatctta

SEQ ID NO: 9575 - DNA, 20 bp, synthetic construct
  misc_feature 1..20: note = Description of Artificial Sequence: Synthetic oligonucleotide
  misc_feature 1..20: note = Target: SCN10A; (+) strand; PAM type: NNGRRT; PAM sequence: AAGAAT
  source 1..20: mol_type = other DNA
atattccatgtgctgatgaa

SEQ ID NO: 9576 - DNA, 20 bp, synthetic construct
  misc_feature 1..20: note = Description of Artificial Sequence: Synthetic oligonucleotide
  misc_feature 1..20: note = Target: SCN10A; (+) strand; PAM type: NNGRRT; PAM sequence: TAGAAT
  source 1..20: mol_type = other DNA
tatattctgcagttgtttgg

SEQ ID NO: 9577 - DNA, 20 bp, synthetic construct
  misc_feature 1..20: note = Description of Artificial Sequence: Synthetic oligonucleotide
  misc_feature 1..20: note = Target: SCN10A; (+) strand; PAM type: NNGRRT; PAM sequence: TGGAAT
  source 1..20: mol_type = other DNA
gacctgtctagtgctgtcag

SEQ ID NO: 9578 - DNA, 20 bp, synthetic construct
  misc_feature 1..20: note = Description of Artificial Sequence: Synthetic oligonucleotide
  misc_feature 1..20: note = Target: SCN10A; (+) strand; PAM type: NNGRRT; PAM sequence: TAGGAT
  source 1..20: mol_type = other DNA
gtgttaggtgcatatgtatt

SEQ ID NO: 9579 - DNA, 20 bp, synthetic construct
  misc_feature 1..20: note = Description of Artificial Sequence: Synthetic oligonucleotide
  misc_feature 1..20: note = Target: SCN10A; (+) strand; PAM type: NNGRRT; PAM sequence: AAGAAT
  source 1..20: mol_type = other DNA
aggtctgttttctctgatat

SEQ ID NO: 9580 - DNA, 20 bp, synthetic construct
  misc_feature 1..20: note = Description of Artificial Sequence: Synthetic oligonucleotide
  misc_feature 1..20: note = Target: SCN10A; (+) strand; PAM type: NNGRRT; PAM sequence: TGGAAT
  source 1..20: mol_type = other DNA
gcttttggtttccatttgca

SEQ ID NO: 9581 - DNA, 20 bp, synthetic construct
  misc_feature 1..20: note = Description of Artificial Sequence: Synthetic oligonucleotide
  misc_feature 1..20: note = Target: SCN10A; (+) strand; PAM type: NNGRRT; PAM sequence: GTGAGT
  source 1..20: mol_type = other DNA
tgtggctccttatgtgttag

SEQ ID NO: 9582 - DNA, 20 bp, synthetic construct
  misc_feature 1..20: note = Description of Artificial Sequence: Synthetic oligonucleotide
  misc_feature 1..20: note = Target: SCN10A; (+) strand; PAM type: NNGRRT; PAM sequence: GTGGAT
  source 1..20: mol_type = other DNA
agacagtagatacttggttg

SEQ ID NO: 9583 - DNA, 20 bp, synthetic construct
  misc_feature 1..20: note = Description of Artificial Sequence: Synthetic oligonucleotide
  misc_feature 1..20: note = Target: SCN10A; (+) strand; PAM type: NNGRRT; PAM sequence: GTGGAT
  source 1..20: mol_type = other DNA
tgcccttctgtatattttaa

SEQ ID NO: 9584 - DNA, 20 bp, synthetic construct
  misc_feature 1..20: note = Description of Artificial Sequence: Synthetic oligonucleotide
  misc_feature 1..20: note = Target: SCN10A; (+) strand; PAM type: NNGRRT; PAM sequence: TAGAAT
  source 1..20: mol_type = other DNA
taaggttttatttcaagatt

SEQ ID NO: 9585 - DNA, 20 bp, synthetic construct
  misc_feature 1..20: note = Description of Artificial Sequence: Synthetic oligonucleotide
  misc_feature 1..20: note = Target: SCN10A; (+) strand; PAM type: NNGRRT; PAM sequence: TTGGAT
  source 1..20: mol_type = other DNA
attctttgagcttcttgtat

SEQ ID NO: 9586 - DNA, 20 bp, synthetic construct
  misc_feature 1..20: note = Description of Artificial Sequence: Synthetic oligonucleotide
  misc_feature 1..20: note = Target: SCN10A; (+) strand; PAM type: NNGRRT; PAM sequence: TTGGGT
  source 1..20: mol_type = other DNA
ttctttttgtgtgtcttagt

SEQ ID NO: 9587 - DNA, 20 bp, synthetic construct
  misc_feature 1..20: note = Description of Artificial Sequence: Synthetic oligonucleotide
  misc_feature 1..20: note = Target: SCN10A; (+) strand; PAM type: NNGRRT; PAM sequence: GTGAGT
  source 1..20: mol_type = other DNA
tgcattttgtatttctctaa

SEQ ID NO: 9588 - DNA, 20 bp, synthetic construct
  misc_feature 1..20: note = Description of Artificial Sequence: Synthetic oligonucleotide
  misc_feature 1..20: note = Target: SCN10A; (+) strand; PAM type: NNGRRT; PAM sequence: GAGAAT
  source 1..20: mol_type = other DNA
tctttatatctatttctctg

SEQ ID NO: 9589 - DNA, 20 bp, synthetic construct
  misc_feature 1..20: note = Description of Artificial Sequence: Synthetic oligonucleotide
  misc_feature 1..20: note = Target: SCN10A; (+) strand; PAM type: NNGRRT; PAM sequence: TTGAAT
  source 1..20: mol_type = other DNA
tatctttctctggtgtctcc

SEQ ID NO: 9590 - DNA, 20 bp, synthetic construct
  misc_feature 1..20: note = Description of Artificial Sequence: Synthetic oligonucleotide
  misc_feature 1..20: note = Target: SCN10A; (+) strand; PAM type: NNGRRT; PAM sequence: CTGAAT
  source 1..20: mol_type = other DNA
atcacttaataatcagcctt

SEQ ID NO: 9591 - DNA, 20 bp, synthetic construct
  misc_feature 1..20: note = Description of Artificial Sequence: Synthetic oligonucleotide
  misc_feature 1..20: note = Target: SCN10A; (+) strand; PAM type: NNGRRT; PAM sequence: ATGGAT
  source 1..20: mol_type = other DNA
cttttttttttttttttgag

SEQ ID NO: 9592 - DNA, 20 bp, synthetic construct
  misc_feature 1..20: note = Description of Artificial Sequence: Synthetic oligonucleotide
  misc_feature 1..20: note = Target: SCN10A; (+) strand; PAM type: NNGRRT; PAM sequence: TGGAGT
  source 1..20: mol_type = other DNA
ttcactcttgttgcccaggc

SEQ ID NO: 9593 - DNA, 20 bp, synthetic construct
  misc_feature 1..20: note = Description of Artificial Sequence: Synthetic oligonucleotide
  misc_feature 1..20: note = Target: SCN10A; (+) strand; PAM type: NNGRRT; PAM sequence: CTGAGT
  source 1..20: mol_type = other DNA
aattctcctgcctcagtctc

SEQ ID NO: 9594 - DNA, 20 bp, synthetic construct
  misc_feature 1..20: note = Description of Artificial Sequence: Synthetic oligonucleotide
  misc_feature 1..20: note = Target: SCN10A; (+) strand; PAM type: NNGRRT; PAM sequence: TGGGAT
  source 1..20: mol_type = other DNA
gcctcagtctcctgagtagc

SEQ ID NO: 9595 - DNA, 20 bp, synthetic construct
  misc_feature 1..20: note = Description of Artificial Sequence: Synthetic oligonucleotide
  misc_feature 1..20: note = Target: SCN10A; (+) strand; PAM type: NNGRRT; PAM sequence: CGGGGT
  source 1..20: mol_type = other DNA
tttgtattttttagtagaga

SEQ ID NO: 9596 - DNA, 20 bp, synthetic construct
  misc_feature 1..20: note = Description of Artificial Sequence: Synthetic oligonucleotide
  misc_feature 1..20: note = Target: SCN10A; (+) strand; PAM type: NNGRRT; PAM sequence: CTGAAT
  source 1..20: mol_type = other DNA
gtgagctactgtgcccagcc

SEQ ID NO: 9597 - DNA, 20 bp, synthetic construct
  misc_feature 1..20: note = Description of Artificial Sequence: Synthetic oligonucleotide
  misc_feature 1..20: note = Target: SCN10A; (+) strand; PAM type: NNGRRT; PAM sequence: TTGGAT
  source 1..20: mol_type = other DNA
ttcagagatttcttcttagt

SEQ ID NO: 9598 - DNA, 20 bp, synthetic construct
  misc_feature 1..20: note = Description of Artificial Sequence: Synthetic oligonucleotide
  misc_feature 1..20: note = Target: SCN10A; (+) strand; PAM type: NNGRRT; PAM sequence: AGGGGT
  source 1..20: mol_type = other DNA
ggagctagtttgatcttttg

SEQ ID NO: 9599 - DNA, 20 bp, synthetic construct
  misc_feature 1..20: note = Description of Artificial Sequence: Synthetic oligonucleotide
  misc_feature 1..20: note = Target: SCN10A; (+) strand; PAM type: NNGRRT; PAM sequence: CAGAAT
  source 1..20: mol_type = other DNA
accctcttttgtcatattac

SEQ ID NO: 9600 - DNA, 20 bp, synthetic construct
  misc_feature 1..20: note = Description of Artificial Sequence: Synthetic oligonucleotide
  misc_feature 1..20: note = Target: SCN10A; (+) strand; PAM type: NNGRRT; PAM sequence: TTGAGT
  source 1..20: mol_type = other DNA
cttttctggttccttctcat

SEQ ID NO: 9601 - DNA, 20 bp, synthetic construct
  misc_feature 1..20: note = Description of Artificial Sequence: Synthetic oligonucleotide
  misc_feature 1..20: note = Target: SCN10A; (+) strand; PAM type: NNGRRT; PAM sequence: CTGAAT
  source 1..20: mol_type = other DNA
ttcagagaaaagatctggaa

SEQ ID NO: 9602 - DNA, 20 bp, synthetic construct
  misc_feature 1..20: note = Description of Artificial Sequence: Synthetic oligonucleotide
  misc_feature 1..20: note = Target: SCN10A; (+) strand; PAM type: NNGRRT; PAM sequence: ATGGGT
  source 1..20: mol_type = other DNA
tgtgcagattcttttgtttc

SEQ ID NO: 9603 - DNA, 20 bp, synthetic construct
  misc_feature 1..20: note = Description of Artificial Sequence: Synthetic oligonucleotide
  misc_feature 1..20: note = Target: SCN10A; (+) strand; PAM type: NNGRRT; PAM sequence: GGGGAT
  source 1..20: mol_type = other DNA
ggtgctctccccaatcccct

SEQ ID NO: 9604 - DNA, 20 bp, synthetic construct
  misc_feature 1..20: note = Description of Artificial Sequence: Synthetic oligonucleotide
  misc_feature 1..20: note = Target: SCN10A; (+) strand; PAM type: NNGRRT; PAM sequence: TGGGGT
  source 1..20: mol_type = other DNA
acagaggggctaccaggctc

SEQ ID NO: 9605 - DNA, 20 bp, synthetic construct
  misc_feature 1..20: note = Description of Artificial Sequence: Synthetic oligonucleotide
  misc_feature 1..20: note = Target: SCN10A; (+) strand; PAM type: NNGRRT; PAM sequence: AAGAGT
  source 1..20: mol_type = other DNA
tagtactgggaaatgcctgc

SEQ ID NO: 9606 - DNA, 20 bp, synthetic construct
  misc_feature 1..20: note = Description of Artificial Sequence: Synthetic oligonucleotide
  misc_feature 1..20: note = Target: SCN10A; (+) strand; PAM type: NNGRRT; PAM sequence: ATGGAT
  source 1..20: mol_type = other DNA
gatcttgaagtctcccagcc

SEQ ID NO: 9607 - DNA, 20 bp, synthetic construct
  misc_feature 1..20: note = Description of Artificial Sequence: Synthetic oligonucleotide
  misc_feature 1..20: note = Target: SCN10A; (+) strand; PAM type: NNGRRT; PAM sequence: AGGAAT
  source 1..20: mol_type = other DNA
tgttctggtgaaggtggcag

SEQ ID NO: 9608 - DNA, 20 bp, synthetic construct
  misc_feature 1..20: note = Description of Artificial Sequence: Synthetic oligonucleotide
  misc_feature 1..20: note = Target: SCN10A; (+) strand; PAM type: NNGRRT; PAM sequence: TAGAGT
  source 1..20: mol_type = other DNA
aaggtggcagaggaatgaag

SEQ ID NO: 9609 - DNA, 20 bp, synthetic construct
  misc_feature 1..20: note = Description of Artificial Sequence: Synthetic oligonucleotide
  misc_feature 1..20: note = Target: SCN10A; (+) strand; PAM type: NNGRRT; PAM sequence: GAGAGT
  source 1..20: mol_type = other DNA
aggaatgaagtagagtctgt

SEQ ID NO: 9610 - DNA, 20 bp, synthetic construct
  misc_feature 1..20: note = Description of Artificial Sequence: Synthetic oligonucleotide
  misc_feature 1..20: note = Target: SCN10A; (+) strand; PAM type: NNGRRT; PAM sequence: TTGAAT
  source 1..20: mol_type = other DNA
gatttagtgtgctggctttc

SEQ ID NO: 9611 - DNA, 20 bp, synthetic construct
  misc_feature 1..20: note = Description of Artificial Sequence: Synthetic oligonucleotide
  misc_feature 1..20: note = Target: SCN10A; (+) strand; PAM type: NNGRRT; PAM sequence: CAGGAT
  source 1..20: mol_type = other DNA
actcaggacgtctggttagc

SEQ ID NO: 9612 - DNA, 20 bp, synthetic construct
  misc_feature 1..20: note = Description of Artificial Sequence: Synthetic oligonucleotide
  misc_feature 1..20: note = Target: SCN10A; (+) strand; PAM type: NNGRRT; PAM sequence: TGGGAT
  source 1..20: mol_type = other DNA
ggttgttgttttctttttcc

SEQ ID NO: 9613 - DNA, 20 bp, synthetic construct
  misc_feature 1..20: note = Description of Artificial Sequence: Synthetic oligonucleotide
  misc_feature 1..20: note = Target: SCN10A; (+) strand; PAM type: NNGRRT; PAM sequence: ATGAGT
  source 1..20: mol_type = other DNA
gggatcaaagttattctgtc

SEQ ID NO: 9614 - DNA, 20 bp, synthetic construct
  misc_feature 1..20: note = Description of Artificial Sequence: Synthetic oligonucleotide
  misc_feature 1..20: note = Target: SCN10A; (+) strand; PAM type: NNGRRT; PAM sequence: GGGGAT
  source 1..20: mol_type = other DNA
cactagtgcattagtagaag

SEQ ID NO: 9615 - DNA, 20 bp, synthetic construct
  misc_feature 1..20: note = Description of Artificial Sequence: Synthetic oligonucleotide
  misc_feature 1..20: note = Target: SCN10A; (+) strand; PAM type: NNGRRT; PAM sequence: CAGGGT
  source 1..20: mol_type = other DNA
taagctcaccctaagttggc

SEQ ID NO: 9616 - DNA, 20 bp, synthetic construct
  misc_feature 1..20: note = Description of Artificial Sequence: Synthetic oligonucleotide
  misc_feature 1..20: note = Target: SCN10A; (+) strand; PAM type: NNGRRT; PAM sequence: GAGAGT
  source 1..20: mol_type = other DNA
agcagggccataaagcttcc

SEQ ID NO: 9617 - DNA, 20 bp, synthetic construct
  misc_feature 1..20: note = Description of Artificial Sequence: Synthetic oligonucleotide
  misc_feature 1..20: note = Target: SCN10A; (+) strand; PAM type: NNGRRT; PAM sequence: CTGGGT
  source 1..20: mol_type = other DNA
cataaagcttccgagagttt

SEQ ID NO: 9618 - DNA, 20 bp, synthetic construct
  misc_feature 1..20: note = Description of Artificial Sequence: Synthetic oligonucleotide
  misc_feature 1..20: note = Target: SCN10A; (+) strand; PAM type: NNGRRT; PAM sequence: AGGGGT
  source 1..20: mol_type = other DNA
aaataccatcaggtgggggc

SEQ ID NO: 9619 - DNA, 20 bp, synthetic construct
  misc_feature 1..20: note = Description of Artificial Sequence: Synthetic oligonucleotide
  misc_feature 1..20: note = Target: SCN10A; (+) strand; PAM type: NNGRRT; PAM sequence: GTGAGT
  source 1..20: mol_type = other DNA
tcaggtgggggcaggggtag

SEQ ID NO: 9620 - DNA, 20 bp, synthetic construct
  misc_feature 1..20: note = Description of Artificial Sequence: Synthetic oligonucleotide
  misc_feature 1..20: note = Target: SCN10A; (+) strand; PAM type: NNGRRT; PAM sequence: TTGGGT
  source 1..20: mol_type = other DNA
agtctagactcagacccttc

SEQ ID NO: 9621 - DNA, 20 bp, synthetic construct
  misc_feature 1..20: note = Description of Artificial Sequence: Synthetic oligonucleotide
  misc_feature 1..20: note = Target: SCN10A; (+) strand; PAM type: NNGRRT; PAM sequence: AGGGAT
  source 1..20: mol_type = other DNA
gactcagacccttcttgggt

SEQ ID NO: 9622 - DNA, 20 bp, synthetic construct
  misc_feature 1..20: note = Description of Artificial Sequence: Synthetic oligonucleotide
  misc_feature 1..20: note = Target: SCN10A; (+) strand; PAM type: NNGRRT; PAM sequence: GTGGAT
  source 1..20: mol_type = other DNA
ggattgctgtggccactgtg

SEQ ID NO: 9623 - DNA, 20 bp, synthetic construct
  misc_feature 1..20: note = Description of Artificial Sequence: Synthetic oligonucleotide
  misc_feature 1..20: note = Target: SCN10A; (+) strand; PAM type: NNGRRT; PAM sequence: GGGGGT
  source 1..20: mol_type = other DNA
ctgtggccactgtggtggat

SEQ ID NO: 9624 - DNA, 20 bp, synthetic construct
  misc_feature 1..20: note = Description of Artificial Sequence: Synthetic oligonucleotide
  misc_feature 1..20: note = Target: SCN10A; (+) strand; PAM type: NNGRRT; PAM sequence: TGGGGT
  source 1..20: mol_type = other DNA
ggggttggttctcaggccag

SEQ ID NO: 9625 - DNA, 20 bp, synthetic construct
  misc_feature 1..20: note = Description of Artificial Sequence: Synthetic oligonucleotide
  misc_feature 1..20: note = Target: SCN10A; (+) strand; PAM type: NNGRRT; PAM sequence: GGGAAT
  source 1..20: mol_type = other DNA
cagtggggttgtgttccaga

SEQ ID NO: 9626 - DNA, 20 bp, synthetic construct
  misc_feature 1..20: note = Description of Artificial Sequence: Synthetic oligonucleotide
  misc_feature 1..20: note = Target: SCN10A; (+) strand; PAM type: NNGRRT; PAM sequence: TAGAGT
  source 1..20: mol_type = other DNA
tggctgcctctgctgtgcca

SEQ ID NO: 9627 - DNA, 20 bp, synthetic construct
  misc_feature 1..20: note = Description of Artificial Sequence: Synthetic oligonucleotide
  misc_feature 1..20: note = Target: SCN10A; (+) strand; PAM type: NNGRRT; PAM sequence: GGGGAT
  source 1..20: mol_type = other DNA
tagagttctccagggaagtg

SEQ ID NO: 9628 - DNA, 20 bp, synthetic construct
  misc_feature 1..20: note = Description of Artificial Sequence: Synthetic oligonucleotide
  misc_feature 1..20: note = Target: SCN10A; (+) strand; PAM type: NNGRRT; PAM sequence: CTGGAT
  source 1..20: mol_type = other DNA
ttgcagttcccatttgcccc

SEQ ID NO: 9629 - DNA, 20 bp, synthetic construct
  misc_feature 1..20: note = Description of Artificial Sequence: Synthetic oligonucleotide
  misc_feature 1..20: note = Target: SCN10A; (+) strand; PAM type: NNGRRT; PAM sequence: AAGGGT
  source 1..20: mol_type = other DNA
ttccactggctgccttcccc

SEQ ID NO: 9630 - DNA, 20 bp, synthetic construct
  misc_feature 1..20: note = Description of Artificial Sequence: Synthetic oligonucleotide
  misc_feature 1..20: note = Target: SCN10A; (+) strand; PAM type: NNGRRT; PAM sequence: AGGGAT
  source 1..20: mol_type = other DNA
ggtgcctgtgagacatagtc

SEQ ID NO: 9631 - DNA, 20 bp, synthetic construct
  misc_feature 1..20: note = Description of Artificial Sequence: Synthetic oligonucleotide
  misc_feature 1..20: note = Target: SCN10A; (+) strand; PAM type: NNGRRT; PAM sequence: ATGGAT
  source 1..20: mol_type = other DNA
cctgtgagacatagtcaggg

SEQ ID NO: 9632 - DNA, 20 bp, synthetic construct
  misc_feature 1..20: note = Description of Artificial Sequence: Synthetic oligonucleotide
  misc_feature 1..20: note = Target: SCN10A; (+) strand; PAM type: NNGRRT; PAM sequence: GGGAGT
  source 1..20: mol_type = other DNA
ctggtctcaagctggagact

SEQ ID NO: 9633 - DNA, 20 bp, synthetic construct
  misc_feature 1..20: note = Description of Artificial Sequence: Synthetic oligonucleotide
  misc_feature 1..20: note = Target: SCN10A; (+) strand; PAM type: NNGRRT; PAM sequence: AAGGGT
  source 1..20: mol_type = other DNA
aatttatttacattccaggt

SEQ ID NO: 9634 - DNA, 20 bp, synthetic construct
  misc_feature 1..20: note = Description of Artificial Sequence: Synthetic oligonucleotide
  misc_feature 1..20: note = Target: SCN10A; (+) strand; PAM type: NNGRRT; PAM sequence: CTGGAT
  source 1..20: mol_type = other DNA
gtaaattcttctcctgtgat

SEQ ID NO: 9635 - DNA, 20 bp, synthetic construct
  misc_feature 1..20: note = Description of Artificial Sequence: Synthetic oligonucleotide
  misc_feature 1..20: note = Target: SCN10A; (+) strand; PAM type: NNGRRT; PAM sequence: TGGGAT
  source 1..20: mol_type = other DNA
ggattttcagattacccagt

SEQ ID NO: 9636 - DNA, 20 bp, synthetic construct
  misc_feature 1..20: note = Description of Artificial Sequence: Synthetic oligonucleotide
  misc_feature 1..20: note = Target: SCN10A; (+) strand; PAM type: NNGRRT; PAM sequence: CAGAAT
  source 1..20: mol_type = other DNA
acagtttttcacctgtcttg

SEQ ID NO: 9637 - DNA, 20 bp, synthetic construct
  misc_feature 1..20: note = Description of Artificial Sequence: Synthetic oligonucleotide
  misc_feature 1..20: note = Target: SCN10A; (+) strand; PAM type: NNGRRT; PAM sequence: AAGGAT
  source 1..20: mol_type = other DNA
gcagtgtgccacttatttaa

SEQ ID NO: 9638 - DNA, 20 bp, synthetic construct
  misc_feature 1..20: note = Description of Artificial Sequence: Synthetic oligonucleotide
  misc_feature 1..20: note = Target: SCN10A; (+) strand; PAM type: NNGRRT; PAM sequence: ATGAAT
  source 1..20: mol_type = other DNA
ccacttatttaaaaggatct

SEQ ID NO: 9639 - DNA, 20 bp, synthetic construct
  misc_feature 1..20: note = Description of Artificial Sequence: Synthetic oligonucleotide
  misc_feature 1..20: note = Target: SCN10A; (+) strand; PAM type: NNGRRT; PAM sequence: GTGAGT
  source 1..20: mol_type = other DNA
ttggagcaaacgttcatggt

SEQ ID NO: 9640 - DNA, 20 bp, synthetic construct
  misc_feature 1..20: note = Description of Artificial Sequence: Synthetic oligonucleotide
  misc_feature 1..20: note = Target: SCN10A; (+) strand; PAM type: NNGRRT; PAM sequence: CAGGGT
  source 1..20: mol_type = other DNA
gcatagagatatactcacgc

SEQ ID NO: 9641 - DNA, 20 bp, synthetic construct
  misc_feature 1..20: note = Description of Artificial Sequence: Synthetic oligonucleotide
  misc_feature 1..20: note = Target: SCN10A; (+) strand; PAM type: NNGRRT; PAM sequence: AAGGAT
  source 1..20: mol_type = other DNA
gctaaaatccagccagttcc

SEQ ID NO: 9642 - DNA, 20 bp, synthetic construct
  misc_feature 1..20: note = Description of Artificial Sequence: Synthetic oligonucleotide
  misc_feature 1..20: note = Target: SCN10A; (+) strand; PAM type: NNGRRT; PAM sequence: GAGGGT
  source 1..20: mol_type = other DNA
gtgaagacatatctgggaag

SEQ ID NO: 9643 - DNA, 20 bp, synthetic construct
  misc_feature 1..20: note = Description of Artificial Sequence: Synthetic oligonucleotide
  misc_feature 1..20: note = Target: SCN10A; (+) strand; PAM type: NNGRRT; PAM sequence: AGGAGT
  source 1..20: mol_type = other DNA
tctgggaaggagggtagaaa

SEQ ID NO: 9644 - DNA, 20 bp, synthetic construct
  misc_feature 1..20: note = Description of Artificial Sequence: Synthetic oligonucleotide
  misc_feature 1..20: note = Target: SCN10A; (+) strand; PAM type: NNGRRT; PAM sequence: TGGAGT
  source 1..20: mol_type = other DNA
aaggagtgtcaactgtgcca

SEQ ID NO: 9645 - DNA, 20 bp, synthetic construct
  misc_feature 1..20: note = Description of Artificial Sequence: Synthetic oligonucleotide
  misc_feature 1..20: note = Target: SCN10A; (+) strand; PAM type: NNGRRT; PAM sequence: GGGGGT
  source 1..20: mol_type = other DNA
tgtgccatggagtgtactca

SEQ ID NO: 9646 - DNA, 20 bp, synthetic construct
  misc_feature 1..20: note = Description of Artificial Sequence: Synthetic oligonucleotide
  misc_feature 1..20: note = Target: SCN10A; (+) strand; PAM type: NNGRRT; PAM sequence: AGGGAT
  source 1..20: mol_type = other DNA
ggttccttcttccaggaggg

SEQ ID NO: 9647 - DNA, 20 bp, synthetic construct
  misc_feature 1..20: note = Description of Artificial Sequence: Synthetic oligonucleotide
  misc_feature 1..20: note = Target: SCN10A; (+) strand; PAM type: NNGRRT; PAM sequence: AAGAAT
  source 1..20: mol_type = other DNA
gctccaagaaaaaacatgca

SEQ ID NO: 9648 - DNA, 20 bp, synthetic construct
  misc_feature 1..20: note = Description of Artificial Sequence: Synthetic oligonucleotide
  misc_feature 1..20: note = Target: SCN10A; (+) strand; PAM type: NNGRRT; PAM sequence: TGGAGT
  source 1..20: mol_type = other DNA
agaagggccacacaaataga

SEQ ID NO: 9649 - DNA, 20 bp, synthetic construct
  misc_feature 1..20: note = Description of Artificial Sequence: Synthetic oligonucleotide
  misc_feature 1..20: note = Target: SCN10A; (+) strand; PAM type: NNGRRT; PAM sequence: AGGGAT
  source 1..20: mol_type = other DNA
cacaaatagatggagtgggg

SEQ ID NO: 9650 - DNA, 20 bp, synthetic construct
  misc_feature 1..20: note = Description of Artificial Sequence: Synthetic oligonucleotide
  misc_feature 1..20: note = Target: SCN10A; (+) strand; PAM type: NNGRRT; PAM sequence: TGGGGT
  source 1..20: mol_type = other DNA
gccagcagcttctgctgttc

SEQ ID NO: 9651 - DNA, 20 bp, synthetic construct
  misc_feature 1..20: note = Description of Artificial Sequence: Synthetic oligonucleotide
  misc_feature 1..20: note = Target: SCN10A; (+) strand; PAM type: NNGRRT; PAM sequence: GCGGGT
  source 1..20: mol_type = other DNA
gggttaggcagagggcagta

SEQ ID NO: 9652 - DNA, 20 bp, synthetic construct
  misc_feature 1..20: note = Description of Artificial Sequence: Synthetic oligonucleotide
  misc_feature 1..20: note = Target: SCN10A; (+) strand; PAM type: NNGRRT; PAM sequence: AAGGAT
  source 1..20: mol_type = other DNA
ggcagtagcgggtgaagagc

SEQ ID NO: 9653 - DNA, 20 bp, synthetic construct
  misc_feature 1..20: note = Description of Artificial Sequence: Synthetic oligonucleotide
  misc_feature 1..20: note = Target: SCN10A; (+) strand; PAM type: NNGRRT; PAM sequence: TGGAGT
  source 1..20: mol_type = other DNA
aactcccagtttttagaaac

SEQ ID NO: 9654 - DNA, 20 bp, synthetic construct
  misc_feature 1..20: note = Description of Artificial Sequence: Synthetic oligonucleotide
  misc_feature 1..20: note = Target: SCN10A; (+) strand; PAM type: NNGRRT; PAM sequence: ATGAGT
  source 1..20: mol_type = other DNA
agaaactggagtgcagactg

SEQ ID NO: 9655 - DNA, 20 bp, synthetic construct
  misc_feature 1..20: note = Description of Artificial Sequence: Synthetic oligonucleotide
  misc_feature 1..20: note = Target: SCN10A; (+) strand; PAM type: NNGRRT; PAM sequence: GGGAAT
  source 1..20: mol_type = other DNA
gctgaaaactggctgaagca

SEQ ID NO: 9656 - DNA, 20 bp, synthetic construct
  misc_feature 1..20: note = Description of Artificial Sequence: Synthetic oligonucleotide
  misc_feature 1..20: note = Target: SCN10A; (+) strand; PAM type: NNGRRT; PAM sequence: GAGGGT
  source 1..20: mol_type = other DNA
tctgaaagcaaggtttgggg

SEQ ID NO: 9657 - DNA, 20 bp, synthetic construct
  misc_feature 1..20: note = Description of Artificial Sequence: Synthetic oligonucleotide
  misc_feature 1..20: note = Target: SCN10A; (+) strand; PAM type: NNGRRT; PAM sequence: AAGAAT
  source 1..20: mol_type = other DNA
agggtgataagtagggctga

SEQ ID NO: 9658 - DNA, 20 bp, synthetic construct
  misc_feature 1..20: note = Description of Artificial Sequence: Synthetic oligonucleotide
  misc_feature 1..20: note = Target: SCN10A; (+) strand; PAM type: NNGRRT; PAM sequence: ATGGAT
  source 1..20: mol_type = other DNA
aaactgtttctgctccagaa

SEQ ID NO: 9659 - DNA, 20 bp, synthetic construct
  misc_feature 1..20: note = Description of Artificial Sequence: Synthetic oligonucleotide
  misc_feature 1..20: note = Target: SCN10A; (+) strand; PAM type: NNGRRT; PAM sequence: TTGGAT
  source 1..20: mol_type = other DNA
gtttctgctccagaaatgga

SEQ ID NO: 9660 - DNA, 20 bp, synthetic construct
  misc_feature 1..20: note = Description of Artificial Sequence: Synthetic oligonucleotide
  misc_feature 1..20: note = Target: SCN10A; (+) strand; PAM type: NNGRRT; PAM sequence: AAGAGT
  source 1..20: mol_type = other DNA
gattggatgctcattttctt

SEQ ID NO: 9661 - DNA, 20 bp, synthetic construct
  misc_feature 1..20: note = Description of Artificial Sequence: Synthetic oligonucleotide
  misc_feature 1..20: note = Target: SCN10A; (+) strand; PAM type: NNGRRT; PAM sequence: AGGAAT
  source 1..20: mol_type = other DNA
acagccagccaaggagcatc

SEQ ID NO: 9662 - DNA, 20 bp, synthetic construct
  misc_feature 1..20: note = Description of Artificial Sequence: Synthetic oligonucleotide
  misc_feature 1..20: note = Target: SCN10A; (+) strand; PAM type: NNGRRT; PAM sequence: AAGGAT
  source 1..20: mol_type = other DNA
caaggagcatcaggaatttg

SEQ ID NO: 9663 - DNA, 20 bp, synthetic construct
  misc_feature 1..20: note = Description of Artificial Sequence: Synthetic oligonucleotide
  misc_feature 1..20: note = Target: SCN10A; (+) strand; PAM type: NNGRRT; PAM sequence: AAGAGT
  source 1..20: mol_type = other DNA
gacaataaagagggcagaag

SEQ ID NO: 9664 - DNA, 20 bp, synthetic construct
  misc_feature 1..20: note = Description of Artificial Sequence: Synthetic oligonucleotide
  misc_feature 1..20: note = Target: SCN10A; (+) strand; PAM type: NNGRRT; PAM sequence: GAGAAT
  source 1..20: mol_type = other DNA
tactccggaggctgaggcgg

SEQ ID NO: 9665 - DNA, 20 bp, synthetic construct
  misc_feature 1..20: note = Description of Artificial Sequence: Synthetic oligonucleotide
  misc_feature 1..20: note = Target: SCN10A; (+) strand; PAM type: NNGRRT; PAM sequence: CTGGGT
  source 1..20: mol_type = other DNA
tcgcgtcactgcactccagt

SEQ ID NO: 9666 - DNA, 20 bp, synthetic construct
  misc_feature 1..20: note = Description of Artificial Sequence: Synthetic oligonucleotide
  misc_feature 1..20: note = Target: SCN10A; (+) strand; PAM type: NNGRRT; PAM sequence: GAGAGT
  source 1..20: mol_type = other DNA
aacctgtactaatattttta

SEQ ID NO: 9667 - DNA, 20 bp, synthetic construct
  misc_feature 1..20: note = Description of Artificial Sequence: Synthetic oligonucleotide
  misc_feature 1..20: note = Target: SCN10A; (+) strand; PAM type: NNGRRT; PAM sequence: AAGGAT
  source 1..20: mol_type = other DNA
cacgtatagaacaagagcag

SEQ ID NO: 9668 - DNA, 20 bp, synthetic construct
  misc_feature 1..20: note = Description of Artificial Sequence: Synthetic oligonucleotide
  misc_feature 1..20: note = Target: SCN10A; (+) strand; PAM type: NNGRRT; PAM sequence: TGGAAT
  source 1..20: mol_type = other DNA
aagtaccttcaaagacaaaa

SEQ ID NO: 9669 - DNA, 20 bp, synthetic construct
  misc_feature 1..20: note = Description of Artificial Sequence: Synthetic oligonucleotide
  misc_feature 1..20: note = Target: SCN10A; (+) strand; PAM type: NNGRRT; PAM sequence: ATGGAT
  source 1..20: mol_type = other DNA
agtggaacaaaaaagcagaa

SEQ ID NO: 9670 - DNA, 20 bp, synthetic construct
  misc_feature 1..20: note = Description of Artificial Sequence: Synthetic oligonucleotide
  misc_feature 1..20: note = Target: SCN10A; (+) strand; PAM type: NNGRRT; PAM sequence: GAGAAT
  source 1..20: mol_type = other DNA
gataaaaagtttgaaaatta

SEQ ID NO: 9671 - DNA, 20 bp, synthetic construct
  misc_feature 1..20: note = Description of Artificial Sequence: Synthetic oligonucleotide
  misc_feature 1..20: note = Target: SCN10A; (+) strand; PAM type: NNGRRT; PAM sequence: TAGAAT
  source 1..20: mol_type = other DNA
agccaaactgtcaaagaagg

SEQ ID NO: 9672 - DNA, 20 bp, synthetic construct
  misc_feature 1..20: note = Description of Artificial Sequence: Synthetic oligonucleotide
  misc_feature 1..20: note = Target: SCN10A; (+) strand; PAM type: NNGRRT; PAM sequence: GAGGAT
  source 1..20: mol_type = other DNA
tacttgggaggttgaggcag

SEQ ID NO: 9673 - DNA, 20 bp, synthetic construct
  misc_feature 1..20: note = Description of Artificial Sequence: Synthetic oligonucleotide
  misc_feature 1..20: note = Target: SCN10A; (+) strand; PAM type: NNGRRT; PAM sequence: AGGAGT
  source 1..20: mol_type = other DNA
caggaggatcacttgaaccc

SEQ ID NO: 9674 - DNA, 20 bp, synthetic construct
  misc_feature 1..20: note = Description of Artificial Sequence: Synthetic oligonucleotide
  misc_feature 1..20: note = Target: SCN10A; (+) strand; PAM type: NNGRRT; PAM sequence: GAGGAT
  source 1..20: mol_type = other DNA
cttaaaaaaaaatgttacta

SEQ ID NO: 9675 - DNA, 20 bp, synthetic construct
  misc_feature 1..20: note = Description of Artificial Sequence: Synthetic oligonucleotide
  misc_feature 1..20: note = Target: SCN10A; (+) strand; PAM type: NNGRRT; PAM sequence: AGGAAT
  source 1..20: mol_type = other DNA
cgatccagggaagaggcaaa

SEQ ID NO: 9676 - DNA, 20 bp, synthetic construct
  misc_feature 1..20: note = Description of Artificial Sequence: Synthetic oligonucleotide
  misc_feature 1..20: note = Target: SCN10A; (+) strand; PAM type: NNGRRT; PAM sequence: AAGAAT
  source 1..20: mol_type = other DNA
aggcaaaaggaatccaaaaa

SEQ ID NO: 9677 - DNA, 20 bp, synthetic construct
  misc_feature 1..20: note = Description of Artificial Sequence: Synthetic oligonucleotide
  misc_feature 1..20: note = Target: SCN10A; (+) strand; PAM type: NNGRRT; PAM sequence: CAGAAT
  source 1..20: mol_type = other DNA
ggcctagaaaacatctaggt

SEQ ID NO: 9678 - DNA, 20 bp, synthetic construct
  misc_feature 1..20: note = Description of Artificial Sequence: Synthetic oligonucleotide
  misc_feature 1..20: note = Target: SCN10A; (+) strand; PAM type: NNGRRT; PAM sequence: AAGAGT
  source 1..20: mol_type = other DNA
caacaattaaacatctggag

SEQ ID NO: 9679 - DNA, 20 bp, synthetic construct
  misc_feature 1..20: note = Description of Artificial Sequence: Synthetic oligonucleotide
  misc_feature 1..20: note = Target: SCN10A; (+) strand; PAM type: NNGRRT; PAM sequence: AGGGAT
  source 1..20: mol_type = other DNA
gaagagtttgggaacaaatt

SEQ ID NO: 9680 - DNA, 20 bp, synthetic construct
  misc_feature 1..20: note = Description of Artificial Sequence: Synthetic oligonucleotide
  misc_feature 1..20: note = Target: SCN10A; (+) strand; PAM type: NNGRRT; PAM sequence: ATGGAT
  source 1..20: mol_type = other DNA
attatatatgtagtcataca

SEQ ID NO: 9681 - DNA, 20 bp, synthetic construct
  misc_feature 1..20: note = Description of Artificial Sequence: Synthetic oligonucleotide
  misc_feature 1..20: note = Target: SCN10A; (+) strand; PAM type: NNGRRT; PAM sequence: GAGGGT
  source 1..20: mol_type = other DNA
tataactgtaacaggaagat

SEQ ID NO: 9682 - DNA, 20 bp, synthetic construct
  misc_feature 1..20: note = Description of Artificial Sequence: Synthetic oligonucleotide
  misc_feature 1..20: note = Target: SCN10A; (+) strand; PAM type: NNGRRT; PAM sequence: ATGAGT
  source 1..20: mol_type = other DNA
gaagatgagggtgagaggaa

SEQ ID NO: 9683 - DNA, 20 bp, synthetic construct
  misc_feature 1..20: note = Description of Artificial Sequence: Synthetic oligonucleotide
  misc_feature 1..20: note = Target: SCN10A; (+) strand; PAM type: NNGRRT; PAM sequence: GTGGAT
  source 1..20: mol_type = other DNA
gggtgagaggaaatgagttt

SEQ ID NO: 9684 - DNA, 20 bp, synthetic construct
  misc_feature 1..20: note = Description of Artificial Sequence: Synthetic oligonucleotide
  misc_feature 1..20: note = Target: SCN10A; (+) strand; PAM type: NNGRRT; PAM sequence: ATGAGT
  source 1..20: mol_type = other DNA
aaaaattaaaaattagtatt

SEQ ID NO: 9685 - DNA, 20 bp, synthetic construct
  misc_feature 1..20: note = Description of Artificial Sequence: Synthetic oligonucleotide
  misc_feature 1..20: note = Target: SCN10A; (+) strand; PAM type: NNGRRT; PAM sequence: CAGAAT
  source 1..20: mol_type = other DNA
gaaattgctgttttttttgt

SEQ ID NO: 9686 - DNA, 20 bp, synthetic construct
  misc_feature 1..20: note = Description of Artificial Sequence: Synthetic oligonucleotide
  misc_feature 1..20: note = Target: SCN10A; (+) strand; PAM type: NNGRRT; PAM sequence: GTGAAT
  source 1..20: mol_type = other DNA
agtaaaagtcaagttaaaaa

SEQ ID NO: 9687 - DNA, 20 bp, synthetic construct
  misc_feature 1..20: note = Description of Artificial Sequence: Synthetic oligonucleotide
  misc_feature 1..20: note = Target: SCN10A; (+) strand; PAM type: NNGRRT; PAM sequence: AGGAAT
  source 1..20: mol_type = other DNA
aatcgtgtttgaaatcattt

SEQ ID NO: 9688 - DNA, 20 bp, synthetic construct
  misc_feature 1..20: note = Description of Artificial Sequence: Synthetic oligonucleotide
  misc_feature 1..20: note = Target: SCN10A; (+) strand; PAM type: NNGRRT; PAM sequence: CAGAAT
  source 1..20: mol_type = other DNA
taaattagaaaatcttaact

SEQ ID NO: 9689 - DNA, 20 bp, synthetic construct
  misc_feature 1..20: note = Description of Artificial Sequence: Synthetic oligonucleotide
  misc_feature 1..20: note = Target: SCN10A; (+) strand; PAM type: NNGRRT; PAM sequence: ATGGAT
  source 1..20: mol_type = other DNA
taggttgttgggaagctttg

SEQ ID NO: 9690 - DNA, 20 bp, synthetic construct
  misc_feature 1..20: note = Description of Artificial Sequence: Synthetic oligonucleotide
  misc_feature 1..20: note = Target: SCN10A; (+) strand; PAM type: NNGRRT; PAM sequence: GAGAGT
  source 1..20: mol_type = other DNA
acagacccagaaattatgga

SEQ ID NO: 9691 - DNA, 20 bp, synthetic construct
  misc_feature 1..20: note = Description of Artificial Sequence: Synthetic oligonucleotide
  misc_feature 1..20: note = Target: SCN10A; (+) strand; PAM type: NNGRRT; PAM sequence: TGGAGT
  source 1..20: mol_type = other DNA
cccagctcaacagcagctaa

SEQ ID NO: 9692 - DNA, 20 bp, synthetic construct
  misc_feature 1..20: note = Description of Artificial Sequence: Synthetic oligonucleotide
  misc_feature 1..20: note = Target: SCN10A; (+) strand; PAM type: NNGRRT; PAM sequence: TTGGGT
  source 1..20: mol_type = other DNA
ctgcaaggtatttcttgatg

SEQ ID NO: 9693 - DNA, 20 bp, synthetic construct
  misc_feature 1..20: note = Description of Artificial Sequence: Synthetic oligonucleotide
  misc_feature 1..20: note = Target: SCN10A; (+) strand; PAM type: NNGRRT; PAM sequence: GTGAAT
  source 1..20: mol_type = other DNA
tttcctaagtgctttttctg

SEQ ID NO: 9694 - DNA, 20 bp, synthetic construct
  misc_feature 1..20: note = Description of Artificial Sequence: Synthetic oligonucleotide
  misc_feature 1..20: note = Target: SCN10A; (+) strand; PAM type: NNGRRT; PAM sequence: TTGGGT
  source 1..20: mol_type = other DNA
ctggtgaatgaagaaaatca

SEQ ID NO: 9695 - DNA, 20 bp, synthetic construct
  misc_feature 1..20: note = Description of Artificial Sequence: Synthetic oligonucleotide
  misc_feature 1..20: note = Target: SCN10A; (+) strand; PAM type: NNGRRT; PAM sequence: CTGAAT
  source 1..20: mol_type = other DNA
agattcataatattcaaatt

SEQ ID NO: 9696 - DNA, 20 bp, synthetic construct
  misc_feature 1..20: note = Description of Artificial Sequence: Synthetic oligonucleotide
  misc_feature 1..20: note = Target: SCN10A; (+) strand; PAM type: NNGRRT; PAM sequence: ATGGAT
  source 1..20: mol_type = other DNA
tcataatattcaaattctga

SEQ ID NO: 9697 - DNA, 20 bp, synthetic construct
  misc_feature 1..20: note = Description of Artificial Sequence: Synthetic oligonucleotide
  misc_feature 1..20: note = Target: SCN10A; (+) strand; PAM type: NNGRRT; PAM sequence: CAGAAT
  source 1..20: mol_type = other DNA
tgtgtacctcaacagcaaat

SEQ ID NO: 9698 - DNA, 20 bp, synthetic construct
  misc_feature 1..20: note = Description of Artificial Sequence: Synthetic oligonucleotide
  misc_feature 1..20: note = Target: SCN10A; (+) strand; PAM type: NNGRRT; PAM sequence: GTGAAT
  source 1..20: mol_type = other DNA
cagacccccagctgcgttcc

SEQ ID NO: 9699 - DNA, 20 bp, synthetic construct
  misc_feature 1..20: note = Description of Artificial Sequence: Synthetic oligonucleotide
  misc_feature 1..20: note = Target: SCN10A; (+) strand; PAM type: NNGRRT; PAM sequence: TGGGAT
  source 1..20: mol_type = other DNA
aataaggtatgcactagcat

SEQ ID NO: 9700 - DNA, 20 bp, synthetic construct
  misc_feature 1..20: note = Description of Artificial Sequence: Synthetic oligonucleotide
  misc_feature 1..20: note = Target: SCN10A; (+) strand; PAM type: NNGRRT; PAM sequence: CTGGAT
  source 1..20: mol_type = other DNA
ctgggagcagcatcttctat

SEQ ID NO: 9701 - DNA, 20 bp, synthetic construct
  misc_feature 1..20: note = Description of Artificial Sequence: Synthetic oligonucleotide
  misc_feature 1..20: note = Target: SCN10A; (+) strand; PAM type: NNGRRT; PAM sequence: TGGAGT
  source 1..20: mol_type = other DNA
ttccttgctgaccatgtggc

SEQ ID NO: 9702 - DNA, 20 bp, synthetic construct
  misc_feature 1..20: note = Description of Artificial Sequence: Synthetic oligonucleotide
  misc_feature 1..20: note = Target: SCN10A; (+) strand; PAM type: NNGRRT; PAM sequence: ATGAAT
  source 1..20: mol_type = other DNA
ccattctactttctgtctcc

SEQ ID NO: 9703 - DNA, 20 bp, synthetic construct
  misc_feature 1..20: note = Description of Artificial Sequence: Synthetic oligonucleotide
  misc_feature 1..20: note = Target: SCN10A; (+) strand; PAM type: NNGRRT; PAM sequence: TGGAAT
  source 1..20: mol_type = other DNA
ttctaggtacctactaaagg

SEQ ID NO: 9704 - DNA, 20 bp, synthetic construct
  misc_feature 1..20: note = Description of Artificial Sequence: Synthetic oligonucleotide
  misc_feature 1..20: note = Target: SCN10A; (+) strand; PAM type: NNGRRT; PAM sequence: TTGAGT
  source 1..20: mol_type = other DNA
caacatttgttcttttgcgt

SEQ ID NO: 9705 - DNA, 20 bp, synthetic construct
  misc_feature 1..20: note = Description of Artificial Sequence: Synthetic oligonucleotide
  misc_feature 1..20: note = Target: SCN10A; (+) strand; PAM type: NNGRRT; PAM sequence: CAGAAT
  source 1..20: mol_type = other DNA
gtcaatgttgtggcatgtat

SEQ ID NO: 9706 - DNA, 20 bp, synthetic construct
  misc_feature 1..20: note = Description of Artificial Sequence: Synthetic oligonucleotide
  misc_feature 1..20: note = Target: SCN10A; (+) strand; PAM type: NNGRRT; PAM sequence: CTGAAT
  source 1..20: mol_type = other DNA
aatctcattcatttttaaaa

SEQ ID NO: 9707 - DNA, 20 bp, synthetic construct
  misc_feature 1..20: note = Description of Artificial Sequence: Synthetic oligonucleotide
  misc_feature 1..20: note = Target: SCN10A; (+) strand; PAM type: NNGRRT; PAM sequence: GTGAAT
  source 1..20: mol_type = other DNA
gatggacatatttggctatt

SEQ ID NO: 9708 - DNA, 20 bp, synthetic construct
  misc_feature 1..20: note = Description of Artificial Sequence: Synthetic oligonucleotide
  misc_feature 1..20: note = Target: SCN10A; (+) strand; PAM type: NNGRRT; PAM sequence: CTGAGT
  source 1..20: mol_type = other DNA
ataaatagaacaaaaagtca

SEQ ID NO: 9709 - DNA, 20 bp, synthetic construct
  misc_feature 1..20: note = Description of Artificial Sequence: Synthetic oligonucleotide
  misc_feature 1..20: note = Target: SCN10A; (+) strand; PAM type: NNGRRT; PAM sequence: AGGAAT
  source 1..20: mol_type = other DNA
taaatgccagtcacattata

SEQ ID NO: 9710 - DNA, 20 bp, synthetic construct
  misc_feature 1..20: note = Description of Artificial Sequence: Synthetic oligonucleotide
  misc_feature 1..20: note = Target: SCN10A; (+) strand; PAM type: NNGRRT; PAM sequence: AGGAAT
  source 1..20: mol_type = other DNA
gaatgcaatacttctaatta

SEQ ID NO: 9711 - DNA, 20 bp, synthetic construct
  misc_feature 1..20: note = Description of Artificial Sequence: Synthetic oligonucleotide
  misc_feature 1..20: note = Target: SCN10A; (+) strand; PAM type: NNGRRT; PAM sequence: AGGAGT
  source 1..20: mol_type = other DNA
tggttttgtatcttaccagc

SEQ ID NO: 9712 - DNA, 20 bp, synthetic construct
  misc_feature 1..20: note = Description of Artificial Sequence: Synthetic oligonucleotide
  misc_feature 1..20: note = Target: SCN10A; (+) strand; PAM type: NNGRRT; PAM sequence: GAGGAT
  source 1..20: mol_type = other DNA
attgtgcttatttttgatat

SEQ ID NO: 9713 - DNA, 20 bp, synthetic construct
  misc_feature 1..20: note = Description of Artificial Sequence: Synthetic oligonucleotide
  misc_feature 1..20: note = Target: SCN10A; (+) strand; PAM type: NNGRRT; PAM sequence: ATGAAT
  source 1..20: mol_type = other DNA
tgcttatttttgatatgagg

SEQ ID NO: 9714 - DNA, 20 bp, synthetic construct
  misc_feature 1..20: note = Description of Artificial Sequence: Synthetic oligonucleotide
  misc_feature 1..20: note = Target: SCN10A; (+) strand; PAM type: NNGRRT; PAM sequence: TGGGGT
  source 1..20: mol_type = other DNA
atattcaattggtttaaaag

SEQ ID NO: 9715 - DNA, 20 bp, synthetic construct
  misc_feature 1..20: note = Description of Artificial Sequence: Synthetic oligonucleotide
  misc_feature 1..20: note = Target: SCN10A; (+) strand; PAM type: NNGRRT; PAM sequence: TTGGGT
  source 1..20: mol_type = other DNA
aaacgttagcagataataaa

SEQ ID NO: 9716 - DNA, 20 bp, synthetic construct
  misc_feature 1..20: note = Description of Artificial Sequence: Synthetic oligonucleotide
  misc_feature 1..20: note = Target: SCN10A; (+) strand; PAM type: NNGRRT; PAM sequence: AAGGAT
  source 1..20: mol_type = other DNA
taaattgggtactaggacaa

SEQ ID NO: 9717 - DNA, 20 bp, synthetic construct
  misc_feature 1..20: note = Description of Artificial Sequence: Synthetic oligonucleotide
  misc_feature 1..20: note = Target: SCN10A; (+) strand; PAM type: NNGRRT; PAM sequence: TAGGAT
  source 1..20: mol_type = other DNA
tgtgaccttatttcacattg

SEQ ID NO: 9718 - DNA, 20 bp, synthetic construct
  misc_feature 1..20: note = Description of Artificial Sequence: Synthetic oligonucleotide
  misc_feature 1..20: note = Target: SCN10A; (+) strand; PAM type: NNGRRT; PAM sequence: TTGAAT
  source 1..20: mol_type = other DNA
cgaagtgatgactctttttt

SEQ ID NO: 9719 - DNA, 20 bp, synthetic construct
  misc_feature 1..20: note = Description of Artificial Sequence: Synthetic oligonucleotide
  misc_feature 1..20: note = Target: SCN10A; (+) strand; PAM type: NNGRRT; PAM sequence: ATGAAT
  source 1..20: mol_type = other DNA
ttaactccatgttaaccatt

SEQ ID NO: 9720 - DNA, 20 bp, synthetic construct
  misc_feature 1..20: note = Description of Artificial Sequence: Synthetic oligonucleotide
  misc_feature 1..20: note = Target: SCN10A; (+) strand; PAM type: NNGRRT; PAM sequence: ATGAAT
  source 1..20: mol_type = other DNA
cataaaaagttagaaattct

SEQ ID NO: 9721 - DNA, 20 bp, synthetic construct
  misc_feature 1..20: note = Description of Artificial Sequence: Synthetic oligonucleotide
  misc_feature 1..20: note = Target: SCN10A; (+) strand; PAM type: NNGRRT; PAM sequence: ATGAAT
  source 1..20: mol_type = other DNA
attgtaggagatggagagag

SEQ ID NO: 9722 - DNA, 20 bp, synthetic construct
  misc_feature 1..20: note = Description of Artificial Sequence: Synthetic oligonucleotide
  misc_feature 1..20: note = Target: SCN10A; (+) strand; PAM type: NNGRRT; PAM sequence: AAGAAT
  source 1..20: mol_type = other DNA
attgctctgctaaacaaagt

SEQ ID NO: 9723 - DNA, 20 bp, synthetic construct
  misc_feature 1..20: note = Description of Artificial Sequence: Synthetic oligonucleotide
  misc_feature 1..20: note = Target: SCN10A; (+) strand; PAM type: NNGRRT; PAM sequence: TGGAGT
  source 1..20: mol_type = other DNA
taaacaaagtaagaataagt

SEQ ID NO: 9724 - DNA, 20 bp, synthetic construct
  misc_feature 1..20: note = Description of Artificial Sequence: Synthetic oligonucleotide
  misc_feature 1..20: note = Target: SCN10A; (+) strand; PAM type: NNGRRT; PAM sequence: GAGAGT
  source 1..20: mol_type = other DNA
ttcccagggacaattgagga

SEQ ID NO: 9725 - DNA, 20 bp, synthetic construct
  misc_feature 1..20: note = Description of Artificial Sequence: Synthetic oligonucleotide
  misc_feature 1..20: note = Target: SCN10A; (+) strand; PAM type: NNGRRT; PAM sequence: TTGAAT
  source 1..20: mol_type = other DNA
ataaaatgaaatacacctaa

SEQ ID NO: 9726 - DNA, 20 bp, synthetic construct
  misc_feature 1..20: note = Description of Artificial Sequence: Synthetic oligonucleotide
  misc_feature 1..20: note = Target: SCN10A; (+) strand; PAM type: NNGRRT; PAM sequence: TTGAAT
  source 1..20: mol_type = other DNA
atatgctcactgtcatagct

SEQ ID NO: 9727 - DNA, 20 bp, synthetic construct
  misc_feature 1..20: note = Description of Artificial Sequence: Synthetic oligonucleotide
  misc_feature 1..20: note = Target: SCN10A; (+) strand; PAM type: NNGRRT; PAM sequence: AAGAAT
  source 1..20: mol_type = other DNA
gaaaaataaaaaagtggtat

SEQ ID NO: 9728 - DNA, 20 bp, synthetic construct
  misc_feature 1..20: note = Description of Artificial Sequence: Synthetic oligonucleotide
  misc_feature 1..20: note = Target: SCN10A; (+) strand; PAM type: NNGRRT; PAM sequence: GGGAAT
  source 1..20: mol_type = other DNA
tgtctaaataggaagtccaa

SEQ ID NO: 9729 - DNA, 20 bp, synthetic construct
  misc_feature 1..20: note = Description of Artificial Sequence: Synthetic oligonucleotide
  misc_feature 1..20: note = Target: SCN10A; (+) strand; PAM type: NNGRRT; PAM sequence: CAGGGT
  source 1..20: mol_type = other DNA
tttaactttaaggagctcag

SEQ ID NO: 9730 - DNA, 20 bp, synthetic construct
  misc_feature 1..20: note = Description of Artificial Sequence: Synthetic oligonucleotide
  misc_feature 1..20: note = Target: SCN10A; (+) strand; PAM type: NNGRRT; PAM sequence: CTGGAT
  source 1..20: mol_type = other DNA
taaggagctcagcagggttg

SEQ ID NO: 9731 - DNA, 20 bp, synthetic construct
  misc_feature 1..20: note = Description of Artificial Sequence: Synthetic oligonucleotide
  misc_feature 1..20: note = Target: SCN10A; (+) strand; PAM type: NNGRRT; PAM sequence: CAGAGT
  source 1..20: mol_type = other DNA
attaccaaacaaagtttcca

SEQ ID NO: 9732 - DNA, 20 bp, synthetic construct
  misc_feature 1..20: note = Description of Artificial Sequence: Synthetic oligonucleotide
  misc_feature 1..20: note = Target: SCN10A; (+) strand; PAM type: NNGRRT; PAM sequence: GTGAAT
  source 1..20: mol_type = other DNA
agacaaataaggaggggcat

SEQ ID NO: 9733 - DNA, 20 bp, synthetic construct
  misc_feature 1..20: note = Description of Artificial Sequence: Synthetic oligonucleotide
  misc_feature 1..20: note = Target: SCN10A; (+) strand; PAM type: NNGRRT; PAM sequence: CAGGAT
  source 1..20: mol_type = other DNA
aaatccacgtggtgttgact

SEQ ID NO: 9734 - DNA, 20 bp, synthetic construct
  misc_feature 1..20: note = Description of Artificial Sequence: Synthetic oligonucleotide
  misc_feature 1..20: note = Target: SCN10A; (+) strand; PAM type: NNGRRT; PAM sequence: GGGAAT
  source 1..20: mol_type = other DNA
gaaacagattcagtagacat

SEQ ID NO: 9735 - DNA, 20 bp, synthetic construct
  misc_feature 1..20: note = Description of Artificial Sequence: Synthetic oligonucleotide
  misc_feature 1..20: note = Target: SCN10A; (+) strand; PAM type: NNGRRT; PAM sequence: TGGAAT
  source 1..20: mol_type = other DNA
tgatgtattgaaaaaaatgt

SEQ ID NO: 9736 - DNA, 20 bp, synthetic construct
  misc_feature 1..20: note = Description of Artificial Sequence: Synthetic oligonucleotide
  misc_feature 1..20: note = Target: SCN10A; (+) strand; PAM type: NNGRRT; PAM sequence: CAGGAT
  source 1..20: mol_type = other DNA
gtaactttgaggagaaaaca

SEQ ID NO: 9737 - DNA, 20 bp, synthetic construct
  misc_feature 1..20: note = Description of Artificial Sequence: Synthetic oligonucleotide
  misc_feature 1..20: note = Target: SCN10A; (+) strand; PAM type: NNGRRT; PAM sequence: TGGAAT
  source 1..20: mol_type = other DNA
aacacaggataatatcttta

SEQ ID NO: 9738 - DNA, 20 bp, synthetic construct
  misc_feature 1..20: note = Description of Artificial Sequence: Synthetic oligonucleotide
  misc_feature 1..20: note = Target: SCN10A; (+) strand; PAM type: NNGRRT; PAM sequence: ATGAAT
  source 1..20: mol_type = other DNA
atactatatggcaataaaaa

SEQ ID NO: 9739 - DNA, 20 bp, synthetic construct
  misc_feature 1..20: note = Description of Artificial Sequence: Synthetic oligonucleotide
  misc_feature 1..20: note = Target: SCN10A; (+) strand; PAM type: NNGRRT; PAM sequence: ATGAAT
  source 1..20: mol_type = other DNA
tatatggcaataaaaaatga

SEQ ID NO: 9740 - DNA, 20 bp, synthetic construct
  misc_feature 1..20: note = Description of Artificial Sequence: Synthetic oligonucleotide
  misc_feature 1..20: note = Target: SCN10A; (+) strand; PAM type: NNGRRT; PAM sequence: CAGAAT
  source 1..20: mol_type = other DNA
ataatttgtcaaaggttttc

SEQ ID NO: 9741 - DNA, 20 bp, synthetic construct
  misc_feature 1..20: note = Description of Artificial Sequence: Synthetic oligonucleotide
  misc_feature 1..20: note = Target: SCN10A; (+) strand; PAM type: NNGRRT; PAM sequence: GTGAGT
  source 1..20: mol_type = other DNA
gaatattgttatgcttagag

SEQ ID NO: 9742 - DNA, 20 bp, synthetic construct
  misc_feature 1..20: note = Description of Artificial Sequence: Synthetic oligonucleotide
  misc_feature 1..20: note = Target: SCN10A; (+) strand; PAM type: NNGRRT; PAM sequence: TAGGGT
  source 1..20: mol_type = other DNA
atgcttagaggtgagtgtcc

SEQ ID NO: 9743 - DNA, 20 bp, synthetic construct
  misc_feature 1..20: note = Description of Artificial Sequence: Synthetic oligonucleotide
  misc_feature 1..20: note = Target: SCN10A; (+) strand; PAM type: NNGRRT; PAM sequence: GAGAGT
  source 1..20: mol_type = other DNA
ctctgaaaccagggcatggg

SEQ ID NO: 9744 - DNA, 20 bp, synthetic construct
  misc_feature 1..20: note = Description of Artificial Sequence: Synthetic oligonucleotide
  misc_feature 1..20: note = Target: SCN10A; (+) strand; PAM type: NNGRRT; PAM sequence: GGGGAT
  source 1..20: mol_type = other DNA
gtttcttcccaagcaaaaga

SEQ ID NO: 9745 - DNA, 20 bp, synthetic construct
  misc_feature 1..20: note = Description of Artificial Sequence: Synthetic oligonucleotide
  misc_feature 1..20: note = Target: SCN10A; (+) strand; PAM type: NNGRRT; PAM sequence: TGGAAT
  source 1..20: mol_type = other DNA
caaaagaggggattagaaaa

SEQ ID NO: 9746 - DNA, 20 bp, synthetic construct
  misc_feature 1..20: note = Description of Artificial Sequence: Synthetic oligonucleotide
  misc_feature 1..20: note = Target: SCN10A; (+) strand; PAM type: NNGRRT; PAM sequence: AGGAAT
  source 1..20: mol_type = other DNA
gcaaagctaatgtttcagca

SEQ ID NO: 9747 - DNA, 20 bp, synthetic construct
  misc_feature 1..20: note = Description of Artificial Sequence: Synthetic oligonucleotide
  misc_feature 1..20: note = Target: SCN10A; (+) strand; PAM type: NNGRRT; PAM sequence: CTGGGT
  source 1..20: mol_type = other DNA
aggacatttattatcttcct

SEQ ID NO: 9748 - DNA, 20 bp, synthetic construct
  misc_feature 1..20: note = Description of Artificial Sequence: Synthetic oligonucleotide
  misc_feature 1..20: note = Target: SCN10A; (+) strand; PAM type: NNGRRT; PAM sequence: AAGGAT
  source 1..20: mol_type = other DNA
ctgattatttccacgaggcc

SEQ ID NO: 9749 - DNA, 20 bp, synthetic construct
  misc_feature 1..20: note = Description of Artificial Sequence: Synthetic oligonucleotide
  misc_feature 1..20: note = Target: SCN10A; (+) strand; PAM type: NNGRRT; PAM sequence: CAGGAT
  source 1..20: mol_type = other DNA
atacctgtcacataaattcc

SEQ ID NO: 9750 - DNA, 20 bp, synthetic construct
  misc_feature 1..20: note = Description of Artificial Sequence: Synthetic oligonucleotide
  misc_feature 1..20: note = Target: SCN10A; (+) strand; PAM type: NNGRRT; PAM sequence: GGGAAT
  source 1..20: mol_type = other DNA
tttcatagtgtgcatataaa

SEQ ID NO: 9751 - DNA, 20 bp, synthetic construct
  misc_feature 1..20: note = Description of Artificial Sequence: Synthetic oligonucleotide
  misc_feature 1..20: note = Target: SCN10A; (+) strand; PAM type: NNGRRT; PAM sequence: AAGAAT
  source 1..20: mol_type = other DNA
agttaatacaaaatctccta

SEQ ID NO: 9752 - DNA, 20 bp, synthetic construct
  misc_feature 1..20: note = Description of Artificial Sequence: Synthetic oligonucleotide
  misc_feature 1..20: note = Target: SCN10A; (+) strand; PAM type: NNGRRT; PAM sequence: ATGGAT
  source 1..20: mol_type = other DNA
aatacaaaatctcctaaaga

SEQ ID NO: 9753 - DNA, 20 bp, synthetic construct
  misc_feature 1..20: note = Description of Artificial Sequence: Synthetic oligonucleotide
  misc_feature 1..20: note = Target: SCN10A; (+) strand; PAM type: NNGRRT; PAM sequence: GGGAAT
  source 1..20: mol_type = other DNA
gaatggatttgataattact

SEQ ID NO: 9754 - DNA, 20 bp, synthetic construct
  misc_feature 1..20: note = Description of Artificial Sequence: Synthetic oligonucleotide
  misc_feature 1..20: note = Target: SCN10A; (+) strand; PAM type: NNGRRT; PAM sequence: AAGGAT
  source 1..20: mol_type = other DNA
tgataattactgggaatgga

SEQ ID NO: 9755 - DNA, 20 bp, synthetic construct
  misc_feature 1..20: note = Description of Artificial Sequence: Synthetic oligonucleotide
  misc_feature 1..20: note = Target: SCN10A; (+) strand; PAM type: NNGRRT; PAM sequence: AAGGAT
  source 1..20: mol_type = other DNA
gtgtacaaagatacatgtgt

SEQ ID NO: 9756 - DNA, 20 bp, synthetic construct
  misc_feature 1..20: note = Description of Artificial Sequence: Synthetic oligonucleotide
  misc_feature 1..20: note = Target: SCN10A; (+) strand; PAM type: NNGRRT; PAM sequence: GAGGAT
  source 1..20: mol_type = other DNA
aatatgtggtggcaaaatat

SEQ ID NO: 9757 - DNA, 20 bp, synthetic construct
  misc_feature 1..20: note = Description of Artificial Sequence: Synthetic oligonucleotide
  misc_feature 1..20: note = Target: SCN10A; (+) strand; PAM type: NNGRRT; PAM sequence: GTGAAT
  source 1..20: mol_type = other DNA
ttatgttaattatgataaat

SEQ ID NO: 9758 - DNA, 20 bp, synthetic construct
  misc_feature 1..20: note = Description of Artificial Sequence: Synthetic oligonucleotide
  misc_feature 1..20: note = Target: SCN10A; (+) strand; PAM type: NNGRRT; PAM sequence: TGGGAT
  source 1..20: mol_type = other DNA
ttctataaaacagctgctgc

SEQ ID NO: 9759 - DNA, 20 bp, synthetic construct
  misc_feature 1..20: note = Description of Artificial Sequence: Synthetic oligonucleotide
  misc_feature 1..20: note = Target: SCN10A; (+) strand; PAM type: NNGRRT; PAM sequence: GGGGAT
  source 1..20: mol_type = other DNA
gctgctgctgggattttttt

SEQ ID NO: 9760 - DNA, 20 bp, synthetic construct
  misc_feature 1..20: note = Description of Artificial Sequence: Synthetic oligonucleotide
  misc_feature 1..20: note = Target: SCN10A; (+) strand; PAM type: NNGRRT; PAM sequence: TTGAAT
  source 1..20: mol_type = other DNA
ggatttttttggggatgtca

SEQ ID NO: 9761 - DNA, 20 bp, synthetic construct
  misc_feature 1..20: note = Description of Artificial Sequence: Synthetic oligonucleotide
  misc_feature 1..20: note = Target: SCN10A; (+) strand; PAM type: NNGRRT; PAM sequence: ATGAAT
  source 1..20: mol_type = other DNA
gcactgacattctaacaatt

SEQ ID NO: 9762 - DNA, 20 bp, synthetic construct
  misc_feature 1..20: note = Description of Artificial Sequence: Synthetic oligonucleotide
  misc_feature 1..20: note = Target: SCN10A; (+) strand; PAM type: NNGRRT; PAM sequence: TTGGAT
  source 1..20: mol_type = other DNA
gcatatttttacaacagcat

SEQ ID NO: 9763 - DNA, 20 bp, synthetic construct
  misc_feature 1..20: note = Description of Artificial Sequence: Synthetic oligonucleotide
  misc_feature 1..20: note = Target: SCN10A; (+) strand; PAM type: NNGRRT; PAM sequence: CTGAAT
  source 1..20: mol_type = other DNA
tccatgctgtgacttattcc

SEQ ID NO: 9764 - DNA, 20 bp, synthetic construct
  misc_feature 1..20: note = Description of Artificial Sequence: Synthetic oligonucleotide
  misc_feature 1..20: note = Target: SCN10A; (+) strand; PAM type: NNGRRT; PAM sequence: AAGAAT
  source 1..20: mol_type = other DNA
ttatagtttgtcttttgtcc

SEQ ID NO: 9765 - DNA, 20 bp, synthetic construct
  misc_feature 1..20: note = Description of Artificial Sequence: Synthetic oligonucleotide
  misc_feature 1..20: note = Target: SCN10A; (+) strand; PAM type: NNGRRT; PAM sequence: GAGAAT
  source 1..20: mol_type = other DNA
actctatttcattatgatca

SEQ ID NO: 9766 - DNA, 20 bp, synthetic construct
  misc_feature 1..20: note = Description of Artificial Sequence: Synthetic oligonucleotide
  misc_feature 1..20: note = Target: SCN10A; (+) strand; PAM type: NNGRRT; PAM sequence: ATGGAT
  source 1..20: mol_type = other DNA
ctttctctgatattaaaatc

SEQ ID NO: 9767 - DNA, 20 bp, synthetic construct
  misc_feature 1..20: note = Description of Artificial Sequence: Synthetic oligonucleotide
  misc_feature 1..20: note = Target: SCN10A; (+) strand; PAM type: NNGRRT; PAM sequence: TTGAAT
  source 1..20: mol_type = other DNA
tttgcctttgcttatgtctt

SEQ ID NO: 9768 - DNA, 20 bp, synthetic construct
  misc_feature 1..20: note = Description of Artificial Sequence: Synthetic oligonucleotide
  misc_feature 1..20: note = Target: SCN10A; (+) strand; PAM type: NNGRRT; PAM sequence: AGGAGT
  source 1..20: mol_type = other DNA
agcctttctgtatcaccgtg

SEQ ID NO: 9769 - DNA, 20 bp, synthetic construct
  misc_feature 1..20: note = Description of Artificial Sequence: Synthetic oligonucleotide
  misc_feature 1..20: note = Target: SCN10A; (+) strand; PAM type: NNGRRT; PAM sequence: TAGAGT
  source 1..20: mol_type = other DNA
agtattttttttattcaaca

SEQ ID NO: 9770 - DNA, 20 bp, synthetic construct
  misc_feature 1..20: note = Description of Artificial Sequence: Synthetic oligonucleotide
  misc_feature 1..20: note = Target: SCN10A; (+) strand; PAM type: NNGRRT; PAM sequence: TTGGGT
  source 1..20: mol_type = other DNA
tttttttattcaacatagag

SEQ ID NO: 9771 - DNA, 20 bp, synthetic construct
  misc_feature 1..20: note = Description of Artificial Sequence: Synthetic oligonucleotide
  misc_feature 1..20: note = Target: SCN10A; (+) strand; PAM type: NNGRRT; PAM sequence: GTGAGT
  source 1..20: mol_type = other DNA
ataggcatttttaaaaatag

SEQ ID NO: 9772 - DNA, 20 bp, synthetic construct
  misc_feature 1..20: note = Description of Artificial Sequence: Synthetic oligonucleotide
  misc_feature 1..20: note = Target: SCN10A; (+) strand; PAM type: NNGRRT; PAM sequence: TGGAAT
  source 1..20: mol_type = other DNA
tgaaatttgccgtttgatat

SEQ ID NO: 9773 - DNA, 20 bp, synthetic construct
  misc_feature 1..20: note = Description of Artificial Sequence: Synthetic oligonucleotide
  misc_feature 1..20: note = Target: SCN10A; (+) strand; PAM type: NNGRRT; PAM sequence: TTGAGT
  source 1..20: mol_type = other DNA
aattcgagcgattttcttat

SEQ ID NO: 9774 - DNA, 20 bp, synthetic construct
  misc_feature 1..20: note = Description of Artificial Sequence: Synthetic oligonucleotide
  misc_feature 1..20: note = Target: SCN10A; (+) strand; PAM type: NNGRRT; PAM sequence: ATGGGT
  source 1..20: mol_type = other DNA
ttttcttatttgagttcaaa

SEQ ID NO: 9775 - DNA, 20 bp, synthetic construct
  misc_feature 1..20: note = Description of Artificial Sequence: Synthetic oligonucleotide
  misc_feature 1..20: note = Target: SCN10A; (+) strand; PAM type: NNGRRT; PAM sequence: AGGGAT
  source 1..20: mol_type = other DNA
atcaacaacgcatttggccc

SEQ ID NO: 9776 - DNA, 20 bp, synthetic construct
  misc_feature 1..20: note = Description of Artificial Sequence: Synthetic oligonucleotide
  misc_feature 1..20: note = Target: SCN10A; (+) strand; PAM type: NNGRRT; PAM sequence: GAGAGT
  source 1..20: mol_type = other DNA
atgagaaccttgaagatgag

SEQ ID NO: 9777 - DNA, 20 bp, synthetic construct
  misc_feature 1..20: note = Description of Artificial Sequence: Synthetic oligonucleotide
  misc_feature 1..20: note = Target: SCN10A; (+) strand; PAM type: NNGRRT; PAM sequence: ATGGGT
  source 1..20: mol_type = other DNA
aaggtgaaacagctccataa

SEQ ID NO: 9778 - DNA, 20 bp, synthetic construct
  misc_feature 1..20: note = Description of Artificial Sequence: Synthetic oligonucleotide
  misc_feature 1..20: note = Target: SCN10A; (+) strand; PAM type: NNGRRT; PAM sequence: GTGAAT
  source 1..20: mol_type = other DNA
attgtgatgtgcgataaaaa

SEQ ID NO: 9779 - DNA, 20 bp, synthetic construct
  misc_feature 1..20: note = Description of Artificial Sequence: Synthetic oligonucleotide
  misc_feature 1..20: note = Target: SCN10A; (+) strand; PAM type: NNGRRT; PAM sequence: CTGAAT
  source 1..20: mol_type = other DNA
gtctgatctactacagcttt

SEQ ID NO: 9780 - DNA, 20 bp, synthetic construct
  misc_feature 1..20: note = Description of Artificial Sequence: Synthetic oligonucleotide
  misc_feature 1..20: note = Target: SCN10A; (+) strand; PAM type: NNGRRT; PAM sequence: TTGAAT
  source 1..20: mol_type = other DNA
accaacagttacttcaaaag

SEQ ID NO: 9781 - DNA, 20 bp, synthetic construct
  misc_feature 1..20: note = Description of Artificial Sequence: Synthetic oligonucleotide
  misc_feature 1..20: note = Target: SCN10A; (+) strand; PAM type: NNGRRT; PAM sequence: ATGAAT
  source 1..20: mol_type = other DNA
acagttacttcaaaagttga

SEQ ID NO: 9782 - DNA, 20 bp, synthetic construct
  misc_feature 1..20: note = Description of Artificial Sequence: Synthetic oligonucleotide
  misc_feature 1..20: note = Target: SCN10A; (+) strand; PAM type: NNGRRT; PAM sequence: CGGGAT
  source 1..20: mol_type = other DNA
tgaaacacttccataaccag

SEQ ID NO: 9783 - DNA, 20 bp, synthetic construct
  misc_feature 1..20: note = Description of Artificial Sequence: Synthetic oligonucleotide
  misc_feature 1..20: note = Target: SCN10A; (+) strand; PAM type: NNGRRT; PAM sequence: AAGAGT
  source 1..20: mol_type = other DNA
ggatgcagaaaatgccttcc

SEQ ID NO: 9784 - DNA, 20 bp, synthetic construct
  misc_feature 1..20: note = Description of Artificial Sequence: Synthetic oligonucleotide
  misc_feature 1..20: note = Target: SCN10A; (+) strand; PAM type: NNGRRT; PAM sequence: TTGAAT
  source 1..20: mol_type = other DNA
aaatgccttccaagagttca

SEQ ID NO: 9785 - DNA, 20 bp, synthetic construct
  misc_feature 1..20: note = Description of Artificial Sequence: Synthetic oligonucleotide
  misc_feature 1..20: note = Target: SCN10A; (+) strand; PAM type: NNGRRT; PAM sequence: ATGGAT
  source 1..20: mol_type = other DNA
agttcattgaatcccaaagc

SEQ ID NO: 9786 - DNA, 20 bp, synthetic construct
  misc_feature 1..20: note = Description of Artificial Sequence: Synthetic oligonucleotide
  misc_feature 1..20: note = Target: SCN10A; (+) strand; PAM type: NNGRRT; PAM sequence: AGGAAT
  source 1..20: mol_type = other DNA
agcatggatttttatgctac

SEQ ID NO: 9787 - DNA, 20 bp, synthetic construct
  misc_feature 1..20: note = Description of Artificial Sequence: Synthetic oligonucleotide
  misc_feature 1..20: note = Target: SCN10A; (+) strand; PAM type: NNGRRT; PAM sequence: TAGAGT
  source 1..20: mol_type = other DNA
tgtacaattcttccagtatt

SEQ ID NO: 9788 - DNA, 20 bp, synthetic construct
  misc_feature 1..20: note = Description of Artificial Sequence: Synthetic oligonucleotide
  misc_feature 1..20: note = Target: SCN10A; (+) strand; PAM type: NNGRRT; PAM sequence: AAGAGT
  source 1..20: mol_type = other DNA
tacaaatatatagattacta

SEQ ID NO: 9789 - DNA, 20 bp, synthetic construct
  misc_feature 1..20: note = Description of Artificial Sequence: Synthetic oligonucleotide
  misc_feature 1..20: note = Target: SCN10A; (+) strand; PAM type: NNGRRT; PAM sequence: GAGGGT
  source 1..20: mol_type = other DNA
tcattctattggcattttga

SEQ ID NO: 9790 - DNA, 20 bp, synthetic construct
  misc_feature 1..20: note = Description of Artificial Sequence: Synthetic oligonucleotide
  misc_feature 1..20: note = Target: SCN10A; (+) strand; PAM type: NNGRRT; PAM sequence: TGGGGT
  source 1..20: mol_type = other DNA
ctattggcattttgagaggg

SEQ ID NO: 9791 - DNA, 20 bp, synthetic construct
  misc_feature 1..20: note = Description of Artificial Sequence: Synthetic oligonucleotide
  misc_feature 1..20: note = Target: SCN10A; (+) strand; PAM type: NNGRRT; PAM sequence: TTGGGT
  source 1..20: mol_type = other DNA
tcatttattttaaaaaatta

SEQ ID NO: 9792 - DNA, 20 bp, synthetic construct
  misc_feature 1..20: note = Description of Artificial Sequence: Synthetic oligonucleotide
  misc_feature 1..20: note = Target: SCN10A; (+) strand; PAM type: NNGRRT; PAM sequence: CTGGGT
  source 1..20: mol_type = other DNA
ccttaacaaaataccataga

SEQ ID NO: 9793 - DNA, 20 bp, synthetic construct
  misc_feature 1..20: note = Description of Artificial Sequence: Synthetic oligonucleotide
  misc_feature 1..20: note = Target: SCN10A; (+) strand; PAM type: NNGRRT; PAM sequence: TGGGAT
  source 1..20: mol_type = other DNA
tggaggttgaagcctgagat

SEQ ID NO: 9794 - DNA, 20 bp, synthetic construct
  misc_feature 1..20: note = Description of Artificial Sequence: Synthetic oligonucleotide
  misc_feature 1..20: note = Target: SCN10A; (+) strand; PAM type: NNGRRT; PAM sequence: TTGGGT
  source 1..20: mol_type = other DNA
agattgggatgtcagcatag

SEQ ID NO: 9795 - DNA, 20 bp, synthetic construct
  misc_feature 1..20: note = Description of Artificial Sequence: Synthetic oligonucleotide
  misc_feature 1..20: note = Target: SCN10A; (+) strand; PAM type: NNGRRT; PAM sequence: GGGGGT
  source 1..20: mol_type = other DNA
atctccaacatagcaacatg

SEQ ID NO: 9796 - DNA, 20 bp, synthetic construct
  misc_feature 1..20: note = Description of Artificial Sequence: Synthetic oligonucleotide
  misc_feature 1..20: note = Target: SCN10A; (+) strand; PAM type: NNGRRT; PAM sequence: TTGAAT
  source 1..20: mol_type = other DNA
tggggggtttgtttcaacat

SEQ ID NO: 9797 - DNA, 20 bp, synthetic construct
  misc_feature 1..20: note = Description of Artificial Sequence: Synthetic oligonucleotide
  misc_feature 1..20: note = Target: SCN10A; (+) strand; PAM type: NNGRRT; PAM sequence: TAGAAT
  source 1..20: mol_type = other DNA
tgctgtaagttttctcattt

SEQ ID NO: 9798 - DNA, 20 bp, synthetic construct
  misc_feature 1..20: note = Description of Artificial Sequence: Synthetic oligonucleotide
  misc_feature 1..20: note = Target: SCN10A; (+) strand; PAM type: NNGRRT; PAM sequence: TTGAGT
  source 1..20: mol_type = other DNA
tactcaaagtttatggacat

SEQ ID NO: 9799 - DNA, 20 bp, synthetic construct
  misc_feature 1..20: note = Description of Artificial Sequence: Synthetic oligonucleotide
  misc_feature 1..20: note = Target: SCN10A; (+) strand; PAM type: NNGRRT; PAM sequence: TGGGGT
  source 1..20: mol_type = other DNA
catttgagtggtttccggtt

SEQ ID NO: 9800 - DNA, 20 bp, synthetic construct
  misc_feature 1..20: note = Description of Artificial Sequence: Synthetic oligonucleotide
  misc_feature 1..20: note = Target: SCN10A; (+) strand; PAM type: NNGRRT; PAM sequence: AAGGGT
  source 1..20: mol_type = other DNA
tctgttaaacataggtacct

SEQ ID NO: 9801 - DNA, 20 bp, synthetic construct
  misc_feature 1..20: note = Description of Artificial Sequence: Synthetic oligonucleotide
  misc_feature 1..20: note = Target: SCN10A; (+) strand; PAM type: NNGRRT; PAM sequence: AAGAAT
  source 1..20: mol_type = other DNA
ggtacctaagggtgtaatag

SEQ ID NO: 9802 - DNA, 20 bp, synthetic construct
  misc_feature 1..20: note = Description of Artificial Sequence: Synthetic oligonucleotide
  misc_feature 1..20: note = Target: SCN10A; (+) strand; PAM type: NNGRRT; PAM sequence: GTGAGT
  source 1..20: mol_type = other DNA
tacactcccaccagcagtgt

SEQ ID NO: 9803 - DNA, 20 bp, synthetic construct
  misc_feature 1..20: note = Description of Artificial Sequence: Synthetic oligonucleotide
  misc_feature 1..20: note = Target: SCN10A; (+) strand; PAM type: NNGRRT; PAM sequence: AAGAAT
  source 1..20: mol_type = other DNA
ctttgatttaaaaaaaggtt

SEQ ID NO: 9804 - DNA, 20 bp, synthetic construct
  misc_feature 1..20: note = Description of Artificial Sequence: Synthetic oligonucleotide
  misc_feature 1..20: note = Target: SCN10A; (+) strand; PAM type: NNGRRT; PAM sequence: TTGGAT
  source 1..20: mol_type = other DNA
tttcatatgtttatggccat

SEQ ID NO: 9805 - DNA, 20 bp, synthetic construct
  misc_feature 1..20: note = Description of Artificial Sequence: Synthetic oligonucleotide
  misc_feature 1..20: note = Target: SCN10A; (+) strand; PAM type: NNGRRT; PAM sequence: TAGAGT
  source 1..20: mol_type = other DNA
acatttttctaattgatttg

SEQ ID NO: 9806 - DNA, 20 bp, synthetic construct
  misc_feature 1..20: note = Description of Artificial Sequence: Synthetic oligonucleotide
  misc_feature 1..20: note = Target: SCN10A; (+) strand; PAM type: NNGRRT; PAM sequence: CTGAAT
  source 1..20: mol_type = other DNA
gatttgtagagttcattact

SEQ ID NO: 9807 - DNA, 20 bp, synthetic construct
  misc_feature 1..20: note = Description of Artificial Sequence: Synthetic oligonucleotide
  misc_feature 1..20: note = Target: SCN10A; (+) strand; PAM type: NNGRRT; PAM sequence: TGGGAT
  source 1..20: mol_type = other DNA
gatcaagtcggcttcatacc

SEQ ID NO: 9808 - DNA, 20 bp, synthetic construct
  misc_feature 1..20: note = Description of Artificial Sequence: Synthetic oligonucleotide
  misc_feature 1..20: note = Target: SCN10A; (+) strand; PAM type: NNGRRT; PAM sequence: TGGAAT
  source 1..20: mol_type = other DNA
ctcaataaactaggtattga

SEQ ID NO: 9809 - DNA, 20 bp, synthetic construct
  misc_feature 1..20: note = Description of Artificial Sequence: Synthetic oligonucleotide
  misc_feature 1..20: note = Target: SCN10A; (+) strand; PAM type: NNGRRT; PAM sequence: CTGAAT
  source 1..20: mol_type = other DNA
agcccccagccaatatcata

SEQ ID NO: 9810 - DNA, 20 bp, synthetic construct
  misc_feature 1..20: note = Description of Artificial Sequence: Synthetic oligonucleotide
  misc_feature 1..20: note = Target: SCN10A; (+) strand; PAM type: NNGRRT; PAM sequence: AAGAAT
  source 1..20: mol_type = other DNA
tttgaaaaccagcacaagac

SEQ ID NO: 9811 - DNA, 20 bp, synthetic construct
  misc_feature 1..20: note = Description of Artificial Sequence: Synthetic oligonucleotide
  misc_feature 1..20: note = Target: SCN10A; (+) strand; PAM type: NNGRRT; PAM sequence: AGGGGT
  source 1..20: mol_type = other DNA
tcaggcaagagaaagaaata

SEQ ID NO: 9812 - DNA, 20 bp, synthetic construct
  misc_feature 1..20: note = Description of Artificial Sequence: Synthetic oligonucleotide
  misc_feature 1..20: note = Target: SCN10A; (+) strand; PAM type: NNGRRT; PAM sequence: CAGGAT
  source 1..20: mol_type = other DNA
aagcaacttcagcaaagtct

SEQ ID NO: 9813 - DNA, 20 bp, synthetic construct
  misc_feature 1..20: note = Description of Artificial Sequence: Synthetic oligonucleotide
  misc_feature 1..20: note = Target: SCN10A; (+) strand; PAM type: NNGRRT; PAM sequence: ATGAGT
  source 1..20: mol_type = other DNA
gacaaaccgagagccaaatc

SEQ ID NO: 9814 - DNA, 20 bp, synthetic construct
  misc_feature 1..20: note = Description of Artificial Sequence: Synthetic oligonucleotide
  misc_feature 1..20: note = Target: SCN10A; (+) strand; PAM type: NNGRRT; PAM sequence: GAGAAT
  source 1..20: mol_type = other DNA
ccattcacaattgcaacaaa

SEQ ID NO: 9815 - DNA, 20 bp, synthetic construct
  misc_feature 1..20: note = Description of Artificial Sequence: Synthetic oligonucleotide
  misc_feature 1..20: note = Target: SCN10A; (+) strand; PAM type: NNGRRT; PAM sequence: AGGGAT
  source 1..20: mol_type = other DNA
atctagaaatacaacttaca

SEQ ID NO: 9816 - DNA, 20 bp, synthetic construct
  misc_feature 1..20: note = Description of Artificial Sequence: Synthetic oligonucleotide
  misc_feature 1..20: note = Target: SCN10A; (+) strand; PAM type: NNGRRT; PAM sequence: ATGGAT
  source 1..20: mol_type = other DNA
tggaaaaacattccatgctc

SEQ ID NO: 9817 - DNA, 20 bp, synthetic construct
  misc_feature 1..20: note = Description of Artificial Sequence: Synthetic oligonucleotide
  misc_feature 1..20: note = Target: SCN10A; (+) strand; PAM type: NNGRRT; PAM sequence: CAGAAT
  source 1..20: mol_type = other DNA
gctaccactgactttcttca

SEQ ID NO: 9818 - DNA, 20 bp, synthetic construct
  misc_feature 1..20: note = Description of Artificial Sequence: Synthetic oligonucleotide
  misc_feature 1..20: note = Target: SCN10A; (+) strand; PAM type: NNGRRT; PAM sequence: AAGGAT
  source 1..20: mol_type = other DNA
acaaaagcaagcaatgggga

SEQ ID NO: 9819 - DNA, 20 bp, synthetic construct
  misc_feature 1..20: note = Description of Artificial Sequence: Synthetic oligonucleotide
  misc_feature 1..20: note = Target: SCN10A; (+) strand; PAM type: NNGRRT; PAM sequence: TGGAAT
  source 1..20: mol_type = other DNA
caaaagccaaaattgacaaa

SEQ ID NO: 9820 - DNA, 20 bp, synthetic construct
  misc_feature 1..20: note = Description of Artificial Sequence: Synthetic oligonucleotide
  misc_feature 1..20: note = Target: SCN10A; (+) strand; PAM type: NNGRRT; PAM sequence: CAGAGT
  source 1..20: mol_type = other DNA
acagcaaaagaaactatcat

SEQ ID NO: 9821 - DNA, 20 bp, synthetic construct
  misc_feature 1..20: note = Description of Artificial Sequence: Synthetic oligonucleotide
  misc_feature 1..20: note = Target: SCN10A; (+) strand; PAM type: NNGRRT; PAM sequence: GTGAAT
  source 1..20: mol_type = other DNA
caaaagaaactatcatcaga

SEQ ID NO: 9822 - DNA, 20 bp, synthetic construct
  misc_feature 1..20: note = Description of Artificial Sequence: Synthetic oligonucleotide
  misc_feature 1..20: note = Target: SCN10A; (+) strand; PAM type: NNGRRT; PAM sequence: CAGAAT
  source 1..20: mol_type = other DNA
cagagtgaataggtaaccta

SEQ ID NO: 9823 - DNA, 20 bp, synthetic construct
  misc_feature 1..20: note = Description of Artificial Sequence: Synthetic oligonucleotide
  misc_feature 1..20: note = Target: SCN10A; (+) strand; PAM type: NNGRRT; PAM sequence: CAGAAT
  source 1..20: mol_type = other DNA
tctgacaaagggctaatatc

SEQ ID NO: 9824 - DNA, 20 bp, synthetic construct
  misc_feature 1..20: note = Description of Artificial Sequence: Synthetic oligonucleotide
  misc_feature 1..20: note = Target: SCN10A; (+) strand; PAM type: NNGRRT; PAM sequence: AAGGAT
  source 1..20: mol_type = other DNA
actccatcaaaaagtgggca

SEQ ID NO: 9825 - DNA, 20 bp, synthetic construct
  misc_feature 1..20: note = Description of Artificial Sequence: Synthetic oligonucleotide
  misc_feature 1..20: note = Target: SCN10A; (+) strand; PAM type: NNGRRT; PAM sequence: TGGAGT
  source 1..20: mol_type = other DNA
cagtcaaaaccacaatgaga

SEQ ID NO: 9826 - DNA, 20 bp, synthetic construct
  misc_feature 1..20: note = Description of Artificial Sequence: Synthetic oligonucleotide
  misc_feature 1..20: note = Target: SCN10A; (+) strand; PAM type: NNGRRT; PAM sequence: TAGAAT
  source 1..20: mol_type = other DNA
agatggagtctcataccagt

SEQ ID NO: 9827 - DNA, 20 bp, synthetic construct
  misc_feature 1..20: note = Description of Artificial Sequence: Synthetic oligonucleotide
  misc_feature 1..20: note = Target: SCN10A; (+) strand; PAM type: NNGRRT; PAM sequence: GAGGAT
  source 1..20: mol_type = other DNA
aggaaacaacagatgctgga

SEQ ID NO: 9828 - DNA, 20 bp, synthetic construct
  misc_feature 1..20: note = Description of Artificial Sequence: Synthetic oligonucleotide
  misc_feature 1..20: note = Target: SCN10A; (+) strand; PAM type: NNGRRT; PAM sequence: AGGAAT
  source 1..20: mol_type = other DNA
tggagaggatgtggagagat

SEQ ID NO: 9829 - DNA, 20 bp, synthetic construct
  misc_feature 1..20: note = Description of Artificial Sequence: Synthetic oligonucleotide
  misc_feature 1..20: note = Target: SCN10A; (+) strand; PAM type: NNGRRT; PAM sequence: GGGAGT
  source 1..20: mol_type = other DNA
aatgcttttacactgttggt

SEQ ID NO: 9830 - DNA, 20 bp, synthetic construct
  misc_feature 1..20: note = Description of Artificial Sequence: Synthetic oligonucleotide
  misc_feature 1..20: note = Target: SCN10A; (+) strand; PAM type: NNGRRT; PAM sequence: AAGGAT
  source 1..20: mol_type = other DNA
agacagtgtggtgattcctc

SEQ ID NO: 9831 - DNA, 20 bp, synthetic construct
  misc_feature 1..20: note = Description of Artificial Sequence: Synthetic oligonucleotide
  misc_feature 1..20: note = Target: SCN10A; (+) strand; PAM type: NNGRRT; PAM sequence: CTGGGT
  source 1..20: mol_type = other DNA
ttgacccagcaattccatta

SEQ ID NO: 9832 - DNA, 20 bp, synthetic construct
  misc_feature 1..20: note = Description of Artificial Sequence: Synthetic oligonucleotide
  misc_feature 1..20: note = Target: SCN10A; (+) strand; PAM type: NNGRRT; PAM sequence: AAGGAT
  source 1..20: mol_type = other DNA
cattactgggtatataccca

SEQ ID NO: 9833 - DNA, 20 bp, synthetic construct
  misc_feature 1..20: note = Description of Artificial Sequence: Synthetic oligonucleotide
  misc_feature 1..20: note = Target: SCN10A; (+) strand; PAM type: NNGRRT; PAM sequence: CTGGAT
  source 1..20: mol_type = other DNA
aaacgcccatcagtgataga

SEQ ID NO: 9834 - DNA, 20 bp, synthetic construct
  misc_feature 1..20: note = Description of Artificial Sequence: Synthetic oligonucleotide
  misc_feature 1..20: note = Target: SCN10A; (+) strand; PAM type: NNGRRT; PAM sequence: TGGAAT
  source 1..20: mol_type = other DNA
aatatggcacatatacacca

SEQ ID NO: 9835 - DNA, 20 bp, synthetic construct
  misc_feature 1..20: note = Description of Artificial Sequence: Synthetic oligonucleotide
  misc_feature 1..20: note = Target: SCN10A; (+) strand; PAM type: NNGRRT; PAM sequence: AAGGGT
  source 1..20: mol_type = other DNA
aatactatgcagccataaaa

SEQ ID NO: 9836 - DNA, 20 bp, synthetic construct
  misc_feature 1..20: note = Description of Artificial Sequence: Synthetic oligonucleotide
  misc_feature 1..20: note = Target: SCN10A; (+) strand; PAM type: NNGRRT; PAM sequence: GTGAGT
  source 1..20: mol_type = other DNA
ctatgcagccataaaaaagg

SEQ ID NO: 9837 - DNA, 20 bp, synthetic construct
  misc_feature 1..20: note = Description of Artificial Sequence: Synthetic oligonucleotide
  misc_feature 1..20: note = Target: SCN10A; (+) strand; PAM type: NNGRRT; PAM sequence: ATGGAT
  source 1..20: mol_type = other DNA
ttcatgttctttgcagggac

SEQ ID NO: 9838 - DNA, 20 bp, synthetic construct
  misc_feature 1..20: note = Description of Artificial Sequence: Synthetic oligonucleotide
  misc_feature 1..20: note = Target: SCN10A; (+) strand; PAM type: NNGRRT; PAM sequence: GTGGAT
  source 1..20: mol_type = other DNA
gagatgaacaatgagagcac

SEQ ID NO: 9839 - DNA, 20 bp, synthetic construct
  misc_feature 1..20: note = Description of Artificial Sequence: Synthetic oligonucleotide
  misc_feature 1..20: note = Target: SCN10A; (+) strand; PAM type: NNGRRT; PAM sequence: AGGGGT
  source 1..20: mol_type = other DNA
tcacacaccagggcctgttg

SEQ ID NO: 9840 - DNA, 20 bp, synthetic construct
  misc_feature 1..20: note = Description of Artificial Sequence: Synthetic oligonucleotide
  misc_feature 1..20: note = Target: SCN10A; (+) strand; PAM type: NNGRRT; PAM sequence: AGGGAT
  source 1..20: mol_type = other DNA
gaggggttgggggctagggg

SEQ ID NO: 9841 - DNA, 20 bp, synthetic construct
  misc_feature 1..20: note = Description of Artificial Sequence: Synthetic oligonucleotide
  misc_feature 1..20: note = Target: SCN10A; (+) strand; PAM type: NNGRRT; PAM sequence: ATGGGT
  source 1..20: mol_type = other DNA
agaaatacctaatgtagatg

SEQ ID NO: 9842 - DNA, 20 bp, synthetic construct
  misc_feature 1..20: note = Description of Artificial Sequence: Synthetic oligonucleotide
  misc_feature 1..20: note = Target: SCN10A; (+) strand; PAM type: NNGRRT; PAM sequence: ATGGGT
  source 1..20: mol_type = other DNA
ctaatgtagatgatgggttg

SEQ ID NO: 9843 - DNA, 20 bp, synthetic construct
  misc_feature 1..20: note = Description of Artificial Sequence: Synthetic oligonucleotide
  misc_feature 1..20: note = Target: SCN10A; (+) strand; PAM type: NNGRRT; PAM sequence: TAGAAT
  source 1..20: mol_type = other DNA
aagtgaggtgttgatccacc

SEQ ID NO: 9844 - DNA, 20 bp, synthetic construct
  misc_feature 1..20: note = Description of Artificial Sequence: Synthetic oligonucleotide
  misc_feature 1..20: note = Target: SCN10A; (+) strand; PAM type: NNGRRT; PAM sequence: TTGGAT
  source 1..20: mol_type = other DNA
ttcttgtgtgtggtgcaaag

SEQ ID NO: 9845 - DNA, 20 bp, synthetic construct
  misc_feature 1..20: note = Description of Artificial Sequence: Synthetic oligonucleotide
  misc_feature 1..20: note = Target: SCN10A; (+) strand; PAM type: NNGRRT; PAM sequence: TGGGGT
  source 1..20: mol_type = other DNA
ccgccttttccctgctgttc

SEQ ID NO: 9846 - DNA, 20 bp, synthetic construct
  misc_feature 1..20: note = Description of Artificial Sequence: Synthetic oligonucleotide
  misc_feature 1..20: note = Target: SCN10A; (+) strand; PAM type: NNGRRT; PAM sequence: TAGAAT
  source 1..20: mol_type = other DNA
tagtaaatctcgacatccag

SEQ ID NO: 9847 - DNA, 20 bp, synthetic construct
  misc_feature 1..20: note = Description of Artificial Sequence: Synthetic oligonucleotide
  misc_feature 1..20: note = Target: SCN10A; (+) strand; PAM type: NNGRRT; PAM sequence: ATGAGT
  source 1..20: mol_type = other DNA
aaatctcgacatccagtaga

SEQ ID NO: 9848 - DNA, 20 bp, synthetic construct
  misc_feature 1..20: note = Description of Artificial Sequence: Synthetic oligonucleotide
  misc_feature 1..20: note = Target: SCN10A; (+) strand; PAM type: NNGRRT; PAM sequence: GAGGAT
  source 1..20: mol_type = other DNA
gcctgttgaaatattgattt

SEQ ID NO: 9849 - DNA, 20 bp, synthetic construct
  misc_feature 1..20: note = Description of Artificial Sequence: Synthetic oligonucleotide
  misc_feature 1..20: note = Target: SCN10A; (+) strand; PAM type: NNGRRT; PAM sequence: GGGAGT
  source 1..20: mol_type = other DNA
taaatttattaatcattttt

SEQ ID NO: 9850 - DNA, 20 bp, synthetic construct
  misc_feature 1..20: note = Description of Artificial Sequence: Synthetic oligonucleotide
  misc_feature 1..20: note = Target: SCN10A; (+) strand; PAM type: NNGRRT; PAM sequence: TTGAAT
  source 1..20: mol_type = other DNA
gtctttacaatattgagact

SEQ ID NO: 9851 - DNA, 20 bp, synthetic construct
  misc_feature 1..20: note = Description of Artificial Sequence: Synthetic oligonucleotide
  misc_feature 1..20: note = Target: SCN10A; (+) strand; PAM type: NNGRRT; PAM sequence: TTGGAT
  source 1..20: mol_type = other DNA
ctgtttatctctaggttatg

SEQ ID NO: 9852 - DNA, 20 bp, synthetic construct
  misc_feature 1..20: note = Description of Artificial Sequence: Synthetic oligonucleotide
  misc_feature 1..20: note = Target: SCN10A; (+) strand; PAM type: NNGRRT; PAM sequence: ATGAAT
  source 1..20: mol_type = other DNA
acgcttgatactttaaaaca

SEQ ID NO: 9853 - DNA, 20 bp, synthetic construct
  misc_feature 1..20: note = Description of Artificial Sequence: Synthetic oligonucleotide
  misc_feature 1..20: note = Target: SCN10A; (+) strand; PAM type: NNGRRT; PAM sequence: CAGAGT
  source 1..20: mol_type = other DNA
aaacaatgaataccctttat

SEQ ID NO: 9854 - DNA, 20 bp, synthetic construct
  misc_feature 1..20: note = Description of Artificial Sequence: Synthetic oligonucleotide
  misc_feature 1..20: note = Target: SCN10A; (+) strand; PAM type: NNGRRT; PAM sequence: TGGGGT
  source 1..20: mol_type = other DNA
aattattatactttaagttc

SEQ ID NO: 9855 - DNA, 20 bp, synthetic construct
  misc_feature 1..20: note = Description of Artificial Sequence: Synthetic oligonucleotide
  misc_feature 1..20: note = Target: SCN10A; (+) strand; PAM type: NNGRRT; PAM sequence: ATGAGT
  source 1..20: mol_type = other DNA
tcattgttcaactcccactt

SEQ ID NO: 9856 - DNA, 20 bp, synthetic construct
  misc_feature 1..20: note = Description of Artificial Sequence: Synthetic oligonucleotide
  misc_feature 1..20: note = Target: SCN10A; (+) strand; PAM type: NNGRRT; PAM sequence: GAGAAT
  source 1..20: mol_type = other DNA
tgttcttgtgttagtttgct

SEQ ID NO: 9857 - DNA, 20 bp, synthetic construct
  misc_feature 1..20: note = Description of Artificial Sequence: Synthetic oligonucleotide
  misc_feature 1..20: note = Target: SCN10A; (+) strand; PAM type: NNGRRT; PAM sequence: AAGAAT
  source 1..20: mol_type = other DNA
ccttctatttcaacttttct

SEQ ID NO: 9858 - DNA, 20 bp, synthetic construct
  misc_feature 1..20: note = Description of Artificial Sequence: Synthetic oligonucleotide
  misc_feature 1..20: note = Target: SCN10A; (+) strand; PAM type: NNGRRT; PAM sequence: TGGAGT
  source 1..20: mol_type = other DNA
aaggtatgttaggttcaagc

SEQ ID NO: 9859 - DNA, 20 bp, synthetic construct
  misc_feature 1..20: note = Description of Artificial Sequence: Synthetic oligonucleotide
  misc_feature 1..20: note = Target: SCN10A; (+) strand; PAM type: NNGRRT; PAM sequence: GTGGAT
  source 1..20: mol_type = other DNA
gaagcatccctcccagatgt

SEQ ID NO: 9860 - DNA, 20 bp, synthetic construct
  misc_feature 1..20: note = Description of Artificial Sequence: Synthetic oligonucleotide
  misc_feature 1..20: note = Target: SCN10A; (+) strand; PAM type: NNGRRT; PAM sequence: TGGAAT
  source 1..20: mol_type = other DNA
ccctcccagatgtgtggata

SEQ ID NO: 9861 - DNA, 20 bp, synthetic construct
  misc_feature 1..20: note = Description of Artificial Sequence: Synthetic oligonucleotide
  misc_feature 1..20: note = Target: SCN10A; (+) strand; PAM type: NNGRRT; PAM sequence: AGGGGT
  source 1..20: mol_type = other DNA
ctcccagattctgaaactat

SEQ ID NO: 9862 - DNA, 20 bp, synthetic construct
  misc_feature 1..20: note = Description of Artificial Sequence: Synthetic oligonucleotide
  misc_feature 1..20: note = Target: SCN10A; (+) strand; PAM type: NNGRRT; PAM sequence: TAGAAT
  source 1..20: mol_type = other DNA
cacccactaacctagggaaa

SEQ ID NO: 9863 - DNA, 20 bp, synthetic construct
  misc_feature 1..20: note = Description of Artificial Sequence: Synthetic oligonucleotide
  misc_feature 1..20: note = Target: SCN10A; (+) strand; PAM type: NNGRRT; PAM sequence: AGGAAT
  source 1..20: mol_type = other DNA
tagggaaatagaataacttc

SEQ ID NO: 9864 - DNA, 20 bp, synthetic construct
  misc_feature 1..20: note = Description of Artificial Sequence: Synthetic oligonucleotide
  misc_feature 1..20: note = Target: SCN10A; (+) strand; PAM type: NNGRRT; PAM sequence: ATGAGT
  source 1..20: mol_type = other DNA
taacttaaacagcttcattt

SEQ ID NO: 9865 - DNA, 20 bp, synthetic construct
  misc_feature 1..20: note = Description of Artificial Sequence: Synthetic oligonucleotide
  misc_feature 1..20: note = Target: SCN10A; (+) strand; PAM type: NNGRRT; PAM sequence: GTGAGT
  source 1..20: mol_type = other DNA
tttgtgtgtgcatctagcag

SEQ ID NO: 9866 - DNA, 20 bp, synthetic construct
  misc_feature 1..20: note = Description of Artificial Sequence: Synthetic oligonucleotide
  misc_feature 1..20: note = Target: SCN10A; (+) strand; PAM type: NNGRRT; PAM sequence: GTGAGT
  source 1..20: mol_type = other DNA
tgtgtgcatctagcaggtga

SEQ ID NO: 9867 - DNA, 20 bp, synthetic construct
  misc_feature 1..20: note = Description of Artificial Sequence: Synthetic oligonucleotide
  misc_feature 1..20: note = Target: SCN10A; (+) strand; PAM type: NNGRRT; PAM sequence: GGGGGT
  source 1..20: mol_type = other DNA
tgagtgtgtgtgtgttgggg

SEQ ID NO: 9868 - DNA, 20 bp, synthetic construct
  misc_feature 1..20: note = Description of Artificial Sequence: Synthetic oligonucleotide
  misc_feature 1..20: note = Target: SCN10A; (+) strand; PAM type: NNGRRT; PAM sequence: CAGGAT
  source 1..20: mol_type = other DNA
attacccacatgaggcatgg

SEQ ID NO: 9869 - DNA, 20 bp, synthetic construct
  misc_feature 1..20: note = Description of Artificial Sequence: Synthetic oligonucleotide
  misc_feature 1..20: note = Target: SCN10A; (+) strand; PAM type: NNGRRT; PAM sequence: TCGGGT
  source 1..20: mol_type = other DNA
attttctctggaaggtcagt

SEQ ID NO: 9870 - DNA, 20 bp, synthetic construct
  misc_feature 1..20: note = Description of Artificial Sequence: Synthetic oligonucleotide
  misc_feature 1..20: note = Target: SCN10A; (+) strand; PAM type: NNGRRT; PAM sequence: TAGGAT
  source 1..20: mol_type = other DNA
caagtctctgtgatgtcatc

SEQ ID NO: 9871 - DNA, 20 bp, synthetic construct
  misc_feature 1..20: note = Description of Artificial Sequence: Synthetic oligonucleotide
  misc_feature 1..20: note = Target: SCN10A; (+) strand; PAM type: NNGRRT; PAM sequence: CTGAAT
  source 1..20: mol_type = other DNA
catctaggatcaccttgatg

SEQ ID NO: 9872 - DNA, 20 bp, synthetic construct
  misc_feature 1..20: note = Description of Artificial Sequence: Synthetic oligonucleotide
  misc_feature 1..20: note = Target: SCN10A; (+) strand; PAM type: NNGRRT; PAM sequence: CTGAGT
  source 1..20: mol_type = other DNA
ataataaccactaacattta

SEQ ID NO: 9873 - DNA, 20 bp, synthetic construct
  misc_feature 1..20: note = Description of Artificial Sequence: Synthetic oligonucleotide
  misc_feature 1..20: note = Target: SCN10A; (+) strand; PAM type: NNGRRT; PAM sequence: CTGAGT
  source 1..20: mol_type = other DNA
tactgagtgcctaagctagg

SEQ ID NO: 9874 - DNA, 20 bp, synthetic construct
  misc_feature 1..20: note = Description of Artificial Sequence: Synthetic oligonucleotide
  misc_feature 1..20: note = Target: SCN10A; (+) strand; PAM type: NNGRRT; PAM sequence: GTGGGT
  source 1..20: mol_type = other DNA
ctaatacaactgatctacag

SEQ ID NO: 9875 - DNA, 20 bp, synthetic construct
  misc_feature 1..20: note = Description of Artificial Sequence: Synthetic oligonucleotide
  misc_feature 1..20: note = Target: SCN10A; (+) strand; PAM type: NNGRRT; PAM sequence: GGGAAT
  source 1..20: mol_type = other DNA
gaagaggtacaaactttcat

SEQ ID NO: 9876 - DNA, 20 bp, synthetic construct
  misc_feature 1..20: note = Description of Artificial Sequence: Synthetic oligonucleotide
  misc_feature 1..20: note = Target: SCN10A; (+) strand; PAM type: NNGRRT; PAM sequence: TTGGGT
  source 1..20: mol_type = other DNA
aattagtttcatcagattgt

SEQ ID NO: 9877 - DNA, 20 bp, synthetic construct
  misc_feature 1..20: note = Description of Artificial Sequence: Synthetic oligonucleotide
  misc_feature 1..20: note = Target: SCN10A; (+) strand; PAM type: NNGRRT; PAM sequence: CTGGGT
  source 1..20: mol_type = other DNA
tccaccgaggaaatggtctt

SEQ ID NO: 9878 - DNA, 20 bp, synthetic construct
  misc_feature 1..20: note = Description of Artificial Sequence: Synthetic oligonucleotide
  misc_feature 1..20: note = Target: SCN10A; (+) strand; PAM type: NNGRRT; PAM sequence: TAGGAT
  source 1..20: mol_type = other DNA
ctcaggaagaaaaccccaag

SEQ ID NO: 9879 - DNA, 20 bp, synthetic construct
  misc_feature 1..20: note = Description of Artificial Sequence: Synthetic oligonucleotide
  misc_feature 1..20: note = Target: SCN10A; (+) strand; PAM type: NNGRRT; PAM sequence: TGGAGT
  source 1..20: mol_type = other DNA
aaccccaagtaggattaggc

SEQ ID NO: 9880 - DNA, 20 bp, synthetic construct
  misc_feature 1..20: note = Description of Artificial Sequence: Synthetic oligonucleotide
  misc_feature 1..20: note = Target: SCN10A; (+) strand; PAM type: NNGRRT; PAM sequence: CTGAAT
  source 1..20: mol_type = other DNA
ttaggctggagtggagaact

SEQ ID NO: 9881 - DNA, 20 bp, synthetic construct
  misc_feature 1..20: note = Description of Artificial Sequence: Synthetic oligonucleotide
  misc_feature 1..20: note = Target: SCN10A; (+) strand; PAM type: NNGRRT; PAM sequence: TAGAGT
  source 1..20: mol_type = other DNA
agtggagaactctgaatagc

SEQ ID NO: 9882 - DNA, 20 bp, synthetic construct
  misc_feature 1..20: note = Description of Artificial Sequence: Synthetic oligonucleotide
  misc_feature 1..20: note = Target: SCN10A; (+) strand; PAM type: NNGRRT; PAM sequence: GAGAAT
  source 1..20: mol_type = other DNA
aactctgaatagctagagtg

SEQ ID NO: 9883 - DNA, 20 bp, synthetic construct
  misc_feature 1..20: note = Description of Artificial Sequence: Synthetic oligonucleotide
  misc_feature 1..20: note = Target: SCN10A; (+) strand; PAM type: NNGRRT; PAM sequence: AGGGAT
  source 1..20: mol_type = other DNA
tgacagcagactatgggcaa

SEQ ID NO: 9884 - DNA, 20 bp, synthetic construct
  misc_feature 1..20: note = Description of Artificial Sequence: Synthetic oligonucleotide
  misc_feature 1..20: note = Target: SCN10A; (+) strand; PAM type: NNGRRT; PAM sequence: GTGGGT
  source 1..20: mol_type = other DNA
agggagacattgaaaggaag

SEQ ID NO: 9885 - DNA, 20 bp, synthetic construct
  misc_feature 1..20: note = Description of Artificial Sequence: Synthetic oligonucleotide
  misc_feature 1..20: note = Target: SCN10A; (+) strand; PAM type: NNGRRT; PAM sequence: GAGAAT
  source 1..20: mol_type = other DNA
agggaagaaatgttggtggg

SEQ ID NO: 9886 - DNA, 20 bp, synthetic construct
  misc_feature 1..20: note = Description of Artificial Sequence: Synthetic oligonucleotide
  misc_feature 1..20: note = Target: SCN10A; (+) strand; PAM type: NNGRRT; PAM sequence: AGGAAT
  source 1..20: mol_type = other DNA
cccacttggacatttttctt

SEQ ID NO: 9887 - DNA, 20 bp, synthetic construct
  misc_feature 1..20: note = Description of Artificial Sequence: Synthetic oligonucleotide
  misc_feature 1..20: note = Target: SCN10A; (+) strand; PAM type: NNGRRT; PAM sequence: GAGAGT
  source 1..20: mol_type = other DNA
agataaacttgacctacaga

SEQ ID NO: 9888 - DNA, 20 bp, synthetic construct
  misc_feature 1..20: note = Description of Artificial Sequence: Synthetic oligonucleotide
  misc_feature 1..20: note = Target: SCN10A; (+) strand; PAM type: NNGRRT; PAM sequence: AAGGAT
  source 1..20: mol_type = other DNA
atggggggaaatgttaatcc

SEQ ID NO: 9889 - DNA, 20 bp, synthetic construct
  misc_feature 1..20: note = Description of Artificial Sequence: Synthetic oligonucleotide
  misc_feature 1..20: note = Target: SCN10A; (+) strand; PAM type: NNGRRT; PAM sequence: TAGAAT
  source 1..20: mol_type = other DNA
acattcatagcaaatgtgat

SEQ ID NO: 9890 - DNA, 20 bp, synthetic construct
  misc_feature 1..20: note = Description of Artificial Sequence: Synthetic oligonucleotide
  misc_feature 1..20: note = Target: SCN10A; (+) strand; PAM type: NNGRRT; PAM sequence: GAGAAT
  source 1..20: mol_type = other DNA
aatattaataatagggccct

SEQ ID NO: 9891 - DNA, 20 bp, synthetic construct
  misc_feature 1..20: note = Description of Artificial Sequence: Synthetic oligonucleotide
  misc_feature 1..20: note = Target: SCN10A; (+) strand; PAM type: NNGRRT; PAM sequence: TGGAGT
  source 1..20: mol_type = other DNA
attctagtatcttttggggc

SEQ ID NO: 9892 - DNA, 20 bp, synthetic construct
  misc_feature 1..20: note = Description of Artificial Sequence: Synthetic oligonucleotide
  misc_feature 1..20: note = Target: SCN10A; (+) strand; PAM type: NNGRRT; PAM sequence: GAGAAT
  source 1..20: mol_type = other DNA
tcatcaaatctcaagatgaa

SEQ ID NO: 9893 - DNA, 20 bp, synthetic construct
  misc_feature 1..20: note = Description of Artificial Sequence: Synthetic oligonucleotide
  misc_feature 1..20: note = Target: SCN10A; (+) strand; PAM type: NNGRRT; PAM sequence: GGGGAT
  source 1..20: mol_type = other DNA
tggtcacttggttcttttta

SEQ ID NO: 9894 - DNA, 20 bp, synthetic construct
  misc_feature 1..20: note = Description of Artificial Sequence: Synthetic oligonucleotide
  misc_feature 1..20: note = Target: SCN10A; (+) strand; PAM type: NNGRRT; PAM sequence: CAGAAT
  source 1..20: mol_type = other DNA
ttatccagatgtaattcaac

SEQ ID NO: 9895 - DNA, 20 bp, synthetic construct
  misc_feature 1..20: note = Description of Artificial Sequence: Synthetic oligonucleotide
  misc_feature 1..20: note = Target: SCN10A; (+) strand; PAM type: NNGRRT; PAM sequence: AGGAGT
  source 1..20: mol_type = other DNA
ttcaaccagaatccataaag

SEQ ID NO: 9896 - DNA, 20 bp, synthetic construct
  misc_feature 1..20: note = Description of Artificial Sequence: Synthetic oligonucleotide
  misc_feature 1..20: note = Target: SCN10A; (+) strand; PAM type: NNGRRT; PAM sequence: GAGAAT
  source 1..20: mol_type = other DNA
aagcagagacgacacattga

SEQ ID NO: 9897 - DNA, 20 bp, synthetic construct
  misc_feature 1..20: note = Description of Artificial Sequence: Synthetic oligonucleotide
  misc_feature 1..20: note = Target: SCN10A; (+) strand; PAM type: NNGRRT; PAM sequence: CAGGAT
  source 1..20: mol_type = other DNA
actgtagatactgctctacg

SEQ ID NO: 9898 - DNA, 20 bp, synthetic construct
  misc_feature 1..20: note = Description of Artificial Sequence: Synthetic oligonucleotide
  misc_feature 1..20: note = Target: SCN10A; (+) strand; PAM type: NNGRRT; PAM sequence: TTGGAT
  source 1..20: mol_type = other DNA
tcttaactagctacatggtc

SEQ ID NO: 9899 - DNA, 20 bp, synthetic construct
  misc_feature 1..20: note = Description of Artificial Sequence: Synthetic oligonucleotide
  misc_feature 1..20: note = Target: SCN10A; (+) strand; PAM type: NNGRRT; PAM sequence: GGGGAT
  source 1..20: mol_type = other DNA
agtttcattatctgtaaaat

SEQ ID NO: 9900 - DNA, 20 bp, synthetic construct
  misc_feature 1..20: note = Description of Artificial Sequence: Synthetic oligonucleotide
  misc_feature 1..20: note = Target: SCN10A; (+) strand; PAM type: NNGRRT; PAM sequence: TAGAAT
  source 1..20: mol_type = other DNA
tgtcattaaatatccttctg

SEQ ID NO: 9901 - DNA, 20 bp, synthetic construct
  misc_feature 1..20: note = Description of Artificial Sequence: Synthetic oligonucleotide
  misc_feature 1..20: note = Target: SCN10A; (+) strand; PAM type: NNGRRT; PAM sequence: TTGAGT
  source 1..20: mol_type = other DNA
tcaagctgtgcagcttcatg

SEQ ID NO: 9902 - DNA, 20 bp, synthetic construct
  misc_feature 1..20: note = Description of Artificial Sequence: Synthetic oligonucleotide
  misc_feature 1..20: note = Target: SCN10A; (+) strand; PAM type: NNGRRT; PAM sequence: CAGAGT
  source 1..20: mol_type = other DNA
agaaatccaacaatctgcct

SEQ ID NO: 9903 - DNA, 20 bp, synthetic construct
  misc_feature 1..20: note = Description of Artificial Sequence: Synthetic oligonucleotide
  misc_feature 1..20: note = Target: SCN10A; (+) strand; PAM type: NNGRRT; PAM sequence: CAGGGT
  source 1..20: mol_type = other DNA
tctgcctcagagttagggag

SEQ ID NO: 9904 - DNA, 20 bp, synthetic construct
  misc_feature 1..20: note = Description of Artificial Sequence: Synthetic oligonucleotide
  misc_feature 1..20: note = Target: SCN10A; (+) strand; PAM type: NNGRRT; PAM sequence: AAGGAT
  source 1..20: mol_type = other DNA
ttccaatccttccgatgacc

SEQ ID NO: 9905 - DNA, 20 bp, synthetic construct
  misc_feature 1..20: note = Description of Artificial Sequence: Synthetic oligonucleotide
  misc_feature 1..20: note = Target: SCN10A; (+) strand; PAM type: NNGRRT; PAM sequence: TAGGAT
  source 1..20: mol_type = other DNA
gaccaaggatcttaggtcat

SEQ ID NO: 9906 - DNA, 20 bp, synthetic construct
  misc_feature 1..20: note = Description of Artificial Sequence: Synthetic oligonucleotide
  misc_feature 1..20: note = Target: SCN10A; (+) strand; PAM type: NNGRRT; PAM sequence: TAGGAT
  source 1..20: mol_type = other DNA
ggtcattaggatctttccat

SEQ ID NO: 9907 - DNA, 20 bp, synthetic construct
  misc_feature 1..20: note = Description of Artificial Sequence: Synthetic oligonucleotide
  misc_feature 1..20: note = Target: SCN10A; (+) strand; PAM type: NNGRRT; PAM sequence: TTGAGT
  source 1..20: mol_type = other DNA
tttaaacctgctagtagttt

SEQ ID NO: 9908 - DNA, 20 bp, synthetic construct
  misc_feature 1..20: note = Description of Artificial Sequence: Synthetic oligonucleotide
  misc_feature 1..20: note = Target: SCN10A; (+) strand; PAM type: NNGRRT; PAM sequence: GAGAAT
  source 1..20: mol_type = other DNA
agcggaccacacaccgtggt

SEQ ID NO: 9909 - DNA, 20 bp, synthetic construct
  misc_feature 1..20: note = Description of Artificial Sequence: Synthetic oligonucleotide
  misc_feature 1..20: note = Target: SCN10A; (+) strand; PAM type: NNGRRT; PAM sequence: GAGGAT
  source 1..20: mol_type = other DNA
agcaaacctcccctcataaa

SEQ ID NO: 9910 - DNA, 20 bp, synthetic construct
  misc_feature 1..20: note = Description of Artificial Sequence: Synthetic oligonucleotide
  misc_feature 1..20: note = Target: SCN10A; (+) strand; PAM type: NNGRRT; PAM sequence: GTGAAT
  source 1..20: mol_type = other DNA
tgtgtctagattagtctgag

SEQ ID NO: 9911 - DNA, 20 bp, synthetic construct
  misc_feature 1..20: note = Description of Artificial Sequence: Synthetic oligonucleotide
  misc_feature 1..20: note = Target: SCN10A; (+) strand; PAM type: NNGRRT; PAM sequence: TGGGGT
  source 1..20: mol_type = other DNA
tctgtgtcttgggactgctt

SEQ ID NO: 9912 - DNA, 20 bp, synthetic construct
  misc_feature 1..20: note = Description of Artificial Sequence: Synthetic oligonucleotide
  misc_feature 1..20: note = Target: SCN10A; (+) strand; PAM type: NNGRRT; PAM sequence: TGGGAT
  source 1..20: mol_type = other DNA
taatgacctcattgtacttt

SEQ ID NO: 9913 - DNA, 20 bp, synthetic construct
  misc_feature 1..20: note = Description of Artificial Sequence: Synthetic oligonucleotide
  misc_feature 1..20: note = Target: SCN10A; (+) strand; PAM type: NNGRRT; PAM sequence: TTGGAT
  source 1..20: mol_type = other DNA
attgtacttttgggattcaa

SEQ ID NO: 9914 - DNA, 20 bp, synthetic construct
  misc_feature 1..20: note = Description of Artificial Sequence: Synthetic oligonucleotide
  misc_feature 1..20: note = Target: SCN10A; (+) strand; PAM type: NNGRRT; PAM sequence: AAGGAT
  source 1..20: mol_type = other DNA
gtggaagaggcaatcgtgca

SEQ ID NO: 9915 - DNA, 20 bp, synthetic construct
  misc_feature 1..20: note = Description of Artificial Sequence: Synthetic oligonucleotide
  misc_feature 1..20: note = Target: SCN10A; (+) strand; PAM type: NNGRRT; PAM sequence: ATGAGT
  source 1..20: mol_type = other DNA
gaggcaatcgtgcaaaggat

SEQ ID NO: 9916 - DNA, 20 bp, synthetic construct
  misc_feature 1..20: note = Description of Artificial Sequence: Synthetic oligonucleotide
  misc_feature 1..20: note = Target: SCN10A; (+) strand; PAM type: NNGRRT; PAM sequence: CTGAAT
  source 1..20: mol_type = other DNA
ttctgatcaggttgaaagga

SEQ ID NO: 9917 - DNA, 20 bp, synthetic construct
  misc_feature 1..20: note = Description of Artificial Sequence: Synthetic oligonucleotide
  misc_feature 1..20: note = Target: SCN10A; (+) strand; PAM type: NNGRRT; PAM sequence: CCGAGT
  source 1..20: mol_type = other DNA
ggactgaatagccacagggc

SEQ ID NO: 9918 - DNA, 20 bp, synthetic construct
  misc_feature 1..20: note = Description of Artificial Sequence: Synthetic oligonucleotide
  misc_feature 1..20: note = Target: SCN10A; (+) strand; PAM type: NNGRRT; PAM sequence: GAGAGT
  source 1..20: mol_type = other DNA
tctgggaactacaggtcaat

SEQ ID NO: 9919 - DNA, 20 bp, synthetic construct
  misc_feature 1..20: note = Description of Artificial Sequence: Synthetic oligonucleotide
  misc_feature 1..20: note = Target: SCN10A; (+) strand; PAM type: NNGRRT; PAM sequence: GAGGAT
  source 1..20: mol_type = other DNA
tgcaggtacagagaggcaga

SEQ ID NO: 9920 - DNA, 20 bp, synthetic construct
  misc_feature 1..20: note = Description of Artificial Sequence: Synthetic oligonucleotide
  misc_feature 1..20: note = Target: SCN10A; (+) strand; PAM type: NNGRRT; PAM sequence: GAGGGT
  source 1..20: mol_type = other DNA
tgcaccaagatgagcccact

SEQ ID NO: 9921 - DNA, 20 bp, synthetic construct
  misc_feature 1..20: note = Description of Artificial Sequence: Synthetic oligonucleotide
  misc_feature 1..20: note = Target: SCN10A; (+) strand; PAM type: NNGRRT; PAM sequence: CAGGAT
  source 1..20: mol_type = other DNA
ccaggggaggactctggcaa

SEQ ID NO: 9922 - DNA, 20 bp, synthetic construct
  misc_feature 1..20: note = Description of Artificial Sequence: Synthetic oligonucleotide
  misc_feature 1..20: note = Target: SCN10A; (+) strand; PAM type: NNGRRT; PAM sequence: GAGGAT
  source 1..20: mol_type = other DNA
ctctcctggtttctccctct

SEQ ID NO: 9923 - DNA, 20 bp, synthetic construct
  misc_feature 1..20: note = Description of Artificial Sequence: Synthetic oligonucleotide
  misc_feature 1..20: note = Target: SCN10A; (+) strand; PAM type: NNGRRT; PAM sequence: GAGGAT
  source 1..20: mol_type = other DNA
ttctccctctgaggatttag

SEQ ID NO: 9924 - DNA, 20 bp, synthetic construct
  misc_feature 1..20: note = Description of Artificial Sequence: Synthetic oligonucleotide
  misc_feature 1..20: note = Target: SCN10A; (+) strand; PAM type: NNGRRT; PAM sequence: AGGGAT
  source 1..20: mol_type = other DNA
ttctcaaactttttgatttc

SEQ ID NO: 9925 - DNA, 20 bp, synthetic construct
  misc_feature 1..20: note = Description of Artificial Sequence: Synthetic oligonucleotide
  misc_feature 1..20: note = Target: SCN10A; (+) strand; PAM type: NNGRRT; PAM sequence: GGGAAT
  source 1..20: mol_type = other DNA
ctcaggaaattttaaaacac

SEQ ID NO: 9926 - DNA, 20 bp, synthetic construct
  misc_feature 1..20: note = Description of Artificial Sequence: Synthetic oligonucleotide
  misc_feature 1..20: note = Target: SCN10A; (+) strand; PAM type: NNGRRT; PAM sequence: TAGAGT
  source 1..20: mol_type = other DNA
gcacacattccagtagcttt

SEQ ID NO: 9927 - DNA, 20 bp, synthetic construct
  misc_feature 1..20: note = Description of Artificial Sequence: Synthetic oligonucleotide
  misc_feature 1..20: note = Target: SCN10A; (+) strand; PAM type: NNGRRT; PAM sequence: AGGGGT
  source 1..20: mol_type = other DNA
aaaacagttttggggacacc

SEQ ID NO: 9928 - DNA, 20 bp, synthetic construct
  misc_feature 1..20: note = Description of Artificial Sequence: Synthetic oligonucleotide
  misc_feature 1..20: note = Target: SCN10A; (+) strand; PAM type: NNGRRT; PAM sequence: GTGGGT
  source 1..20: mol_type = other DNA
agttatctgcttttgaagat

SEQ ID NO: 9929 - DNA, 20 bp, synthetic construct
  misc_feature 1..20: note = Description of Artificial Sequence: Synthetic oligonucleotide
  misc_feature 1..20: note = Target: SCN10A; (+) strand; PAM type: NNGRRT; PAM sequence: CGGAAT
  source 1..20: mol_type = other DNA
atattttttttggttgttaa

SEQ ID NO: 9930 - DNA, 20 bp, synthetic construct
  misc_feature 1..20: note = Description of Artificial Sequence: Synthetic oligonucleotide
  misc_feature 1..20: note = Target: SCN10A; (+) strand; PAM type: NNGRRT; PAM sequence: CTGGGT
  source 1..20: mol_type = other DNA
gccaaggaggactttctggg

SEQ ID NO: 9931 - DNA, 20 bp, synthetic construct
  misc_feature 1..20: note = Description of Artificial Sequence: Synthetic oligonucleotide
  misc_feature 1..20: note = Target: SCN10A; (+) strand; PAM type: NNGRRT; PAM sequence: ACGGAT
  source 1..20: mol_type = other DNA
tacccggtgtgtgctgtaga

SEQ ID NO: 9932 - DNA, 20 bp, synthetic construct
  misc_feature 1..20: note = Description of Artificial Sequence: Synthetic oligonucleotide
  misc_feature 1..20: note = Target: SCN10A; (+) strand; PAM type: NNGRRT; PAM sequence: CGGAGT
  source 1..20: mol_type = other DNA
tctatctccaccagtgactc

SEQ ID NO: 9933 - DNA, 20 bp, synthetic construct
  misc_feature 1..20: note = Description of Artificial Sequence: Synthetic oligonucleotide
  misc_feature 1..20: note = Target: SCN10A; (+) strand; PAM type: NNGRRT; PAM sequence: AGGGAT
  source 1..20: mol_type = other DNA
gacggaagttgttagtttcg

SEQ ID NO: 9934 - DNA, 20 bp, synthetic construct
  misc_feature 1..20: note = Description of Artificial Sequence: Synthetic oligonucleotide
  misc_feature 1..20: note = Target: SCN10A; (+) strand; PAM type: NNGRRT; PAM sequence: GGGAAT
  source 1..20: mol_type = other DNA
tagtttcgagggatccaatg

SEQ ID NO: 9935 - DNA, 20 bp, synthetic construct
  misc_feature 1..20: note = Description of Artificial Sequence: Synthetic oligonucleotide
  misc_feature 1..20: note = Target: SCN10A; (+) strand; PAM type: NNGRRT; PAM sequence: AAGAGT
  source 1..20: mol_type = other DNA
ggaagtatttatactcttat

SEQ ID NO: 9936 - DNA, 20 bp, synthetic construct
  misc_feature 1..20: note = Description of Artificial Sequence: Synthetic oligonucleotide
  misc_feature 1..20: note = Target: SCN10A; (+) strand; PAM type: NNGRRT; PAM sequence: CAGGGT
  source 1..20: mol_type = other DNA
caaccctcctccaggtgcct

SEQ ID NO: 9937 - DNA, 20 bp, synthetic construct
  misc_feature 1..20: note = Description of Artificial Sequence: Synthetic oligonucleotide
  misc_feature 1..20: note = Target: SCN10A; (+) strand; PAM type: NNGRRT; PAM sequence: CTGAGT
  source 1..20: mol_type = other DNA
tctcctcatttccaggacca

SEQ ID NO: 9938 - DNA, 20 bp, synthetic construct
  misc_feature 1..20: note = Description of Artificial Sequence: Synthetic oligonucleotide
  misc_feature 1..20: note = Target: SCN10A; (+) strand; PAM type: NNGRRT; PAM sequence: TTGAAT
  source 1..20: mol_type = other DNA
gtcaacatttctccacctgt

SEQ ID NO: 9939 - DNA, 20 bp, synthetic construct
  misc_feature 1..20: note = Description of Artificial Sequence: Synthetic oligonucleotide
  misc_feature 1..20: note = Target: SCN10A; (+) strand; PAM type: NNGRRT; PAM sequence: GAGAAT
  source 1..20: mol_type = other DNA
tggagaactccagattattg

SEQ ID NO: 9940 - DNA, 20 bp, synthetic construct
  misc_feature 1..20: note = Description of Artificial Sequence: Synthetic oligonucleotide
  misc_feature 1..20: note = Target: SCN10A; (+) strand; PAM type: NNGRRT; PAM sequence: AGGGGT
  source 1..20: mol_type = other DNA
acagttcccctgaactgctg

SEQ ID NO: 9941 - DNA, 20 bp, synthetic construct
  misc_feature 1..20: note = Description of Artificial Sequence: Synthetic oligonucleotide
  misc_feature 1..20: note = Target: SCN10A; (+) strand; PAM type: NNGRRT; PAM sequence: GGGAAT
  source 1..20: mol_type = other DNA
ggggaacctcagtattgcct

SEQ ID NO: 9942 - DNA, 20 bp, synthetic construct
  misc_feature 1..20: note = Description of Artificial Sequence: Synthetic oligonucleotide
  misc_feature 1..20: note = Target: SCN10A; (+) strand; PAM type: NNGRRT; PAM sequence: TAGGAT
  source 1..20: mol_type = other DNA
accattcctttccctctgct

SEQ ID NO: 9943 - DNA, 20 bp, synthetic construct
  misc_feature 1..20: note = Description of Artificial Sequence: Synthetic oligonucleotide
  misc_feature 1..20: note = Target: SCN10A; (+) strand; PAM type: NNGRRT; PAM sequence: TTGGAT
  source 1..20: mol_type = other DNA
cacttttcagtctttgaagc

SEQ ID NO: 9944 - DNA, 20 bp, synthetic construct
  misc_feature 1..20: note = Description of Artificial Sequence: Synthetic oligonucleotide
  misc_feature 1..20: note = Target: SCN10A; (+) strand; PAM type: NNGRRT; PAM sequence: AGGGAT
  source 1..20: mol_type = other DNA
tcactaaaatgcttccttgc

SEQ ID NO: 9945 - DNA, 20 bp, synthetic construct
  misc_feature 1..20: note = Description of Artificial Sequence: Synthetic oligonucleotide
  misc_feature 1..20: note = Target: SCN10A; (+) strand; PAM type: NNGRRT; PAM sequence: CAGGGT
  source 1..20: mol_type = other DNA
ttctttttttttttttgaga

SEQ ID NO: 9946 - DNA, 20 bp, synthetic construct
  misc_feature 1..20: note = Description of Artificial Sequence: Synthetic oligonucleotide
  misc_feature 1..20: note = Target: SCN10A; (+) strand; PAM type: NNGRRT; PAM sequence: TAGAGT
  source 1..20: mol_type = other DNA
ggtatcactgtcacccggac

SEQ ID NO: 9947 - DNA, 20 bp, synthetic construct
  misc_feature 1..20: note = Description of Artificial Sequence: Synthetic oligonucleotide
  misc_feature 1..20: note = Target: SCN10A; (+) strand; PAM type: NNGRRT; PAM sequence: CCGAAT
  source 1..20: mol_type = other DNA
aattctcccacctcagcctc

SEQ ID NO: 9948 - DNA, 20 bp, synthetic construct
  misc_feature 1..20: note = Description of Artificial Sequence: Synthetic oligonucleotide
  misc_feature 1..20: note = Target: SCN10A; (+) strand; PAM type: NNGRRT; PAM sequence: GTGAAT
  source 1..20: mol_type = other DNA
agcttttcccatacatgatt

SEQ ID NO: 9949 - DNA, 20 bp, synthetic construct
  misc_feature 1..20: note = Description of Artificial Sequence: Synthetic oligonucleotide
  misc_feature 1..20: note = Target: SCN10A; (+) strand; PAM type: NNGRRT; PAM sequence: CAGAAT
  source 1..20: mol_type = other DNA
ggcactctatcttttgtttt

SEQ ID NO: 9950 - DNA, 20 bp, synthetic construct
  misc_feature 1..20: note = Description of Artificial Sequence: Synthetic oligonucleotide
  misc_feature 1..20: note = Target: SCN10A; (+) strand; PAM type: NNGRRT; PAM sequence: CTGGAT
  source 1..20: mol_type = other DNA
attccactgtatttcagact

SEQ ID NO: 9951 - DNA, 20 bp, synthetic construct
  misc_feature 1..20: note = Description of Artificial Sequence: Synthetic oligonucleotide
  misc_feature 1..20: note = Target: SCN10A; (+) strand; PAM type: NNGRRT; PAM sequence: ATGAGT
  source 1..20: mol_type = other DNA
tttccaagatcacattacta

SEQ ID NO: 9952 - DNA, 20 bp, synthetic construct
  misc_feature 1..20: note = Description of Artificial Sequence: Synthetic oligonucleotide
  misc_feature 1..20: note = Target: SCN10A; (+) strand; PAM type: NNGRRT; PAM sequence: CTGAGT
  source 1..20: mol_type = other DNA
tctcatttatatgcagatga

SEQ ID NO: 9953 - DNA, 20 bp, synthetic construct
  misc_feature 1..20: note = Description of Artificial Sequence: Synthetic oligonucleotide
  misc_feature 1..20: note = Target: SCN10A; (+) strand; PAM type: NNGRRT; PAM sequence: CTGGGT
  source 1..20: mol_type = other DNA
tttctgtgtctgtccacaac

SEQ ID NO: 9954 - DNA, 20 bp, synthetic construct
  misc_feature 1..20: note = Description of Artificial Sequence: Synthetic oligonucleotide
  misc_feature 1..20: note = Target: SCN10A; (+) strand; PAM type: NNGRRT; PAM sequence: TTGAAT
  source 1..20: mol_type = other DNA
ctacttttataagtttatcc

SEQ ID NO: 9955 - DNA, 20 bp, synthetic construct
  misc_feature 1..20: note = Description of Artificial Sequence: Synthetic oligonucleotide
  misc_feature 1..20: note = Target: SCN10A; (+) strand; PAM type: NNGRRT; PAM sequence: TAGGAT
  source 1..20: mol_type = other DNA
gacctatatgaagtctatgt

SEQ ID NO: 9956 - DNA, 20 bp, synthetic construct
  misc_feature 1..20: note = Description of Artificial Sequence: Synthetic oligonucleotide
  misc_feature 1..20: note = Target: SCN10A; (+) strand; PAM type: NNGRRT; PAM sequence: CAGAAT
  source 1..20: mol_type = other DNA
tgcctggaactaactagata

SEQ ID NO: 9957 - DNA, 20 bp, synthetic construct
  misc_feature 1..20: note = Description of Artificial Sequence: Synthetic oligonucleotide
  misc_feature 1..20: note = Target: SCN10A; (+) strand; PAM type: NNGRRT; PAM sequence: ATGAAT
  source 1..20: mol_type = other DNA
acagaatagatagttgttgc

SEQ ID NO: 9958 - DNA, 20 bp, synthetic construct
  misc_feature 1..20: note = Description of Artificial Sequence: Synthetic oligonucleotide
  misc_feature 1..20: note = Target: SCN10A; (+) strand; PAM type: NNGRRT; PAM sequence: AGGAAT
  source 1..20: mol_type = other DNA
aaaatcacagatccaataat

SEQ ID NO: 9959 - DNA, 20 bp, synthetic construct
  misc_feature 1..20: note = Description of Artificial Sequence: Synthetic oligonucleotide
  misc_feature 1..20: note = Target: SCN10A; (+) strand; PAM type: NNGRRT; PAM sequence: TTGAGT
  source 1..20: mol_type = other DNA
ataaggaaccaaagagatta

SEQ ID NO: 9960 - DNA, 20 bp, synthetic construct
  misc_feature 1..20: note = Description of Artificial Sequence: Synthetic oligonucleotide
  misc_feature 1..20: note = Target: SCN10A; (+) strand; PAM type: NNGRRT; PAM sequence: TTGAAT
  source 1..20: mol_type = other DNA
accatacctagaggtatttc

SEQ ID NO: 9961 - DNA, 20 bp, synthetic construct
  misc_feature 1..20: note = Description of Artificial Sequence: Synthetic oligonucleotide
  misc_feature 1..20: note = Target: SCN10A; (+) strand; PAM type: NNGRRT; PAM sequence: TTGAAT
  source 1..20: mol_type = other DNA
cttatagtttggaaccaaat

SEQ ID NO: 9962 - DNA, 20 bp, synthetic construct
  misc_feature 1..20: note = Description of Artificial Sequence: Synthetic oligonucleotide
  misc_feature 1..20: note = Target: SCN10A; (+) strand; PAM type: NNGRRT; PAM sequence: AAGAAT
  source 1..20: mol_type = other DNA
cagttgtttagtaacaatgc

SEQ ID NO: 9963 - DNA, 20 bp, synthetic construct
  misc_feature 1..20: note = Description of Artificial Sequence: Synthetic oligonucleotide
  misc_feature 1..20: note = Target: SCN10A; (+) strand; PAM type: NNGRRT; PAM sequence: TGGAAT
  source 1..20: mol_type = other DNA
aagaattctctcagtgacac

SEQ ID NO: 9964 - DNA, 20 bp, synthetic construct
  misc_feature 1..20: note = Description of Artificial Sequence: Synthetic oligonucleotide
  misc_feature 1..20: note = Target: SCN10A; (+) strand; PAM type: NNGRRT; PAM sequence: GAGGAT
  source 1..20: mol_type = other DNA
tgacactggaatgcaatgtt

SEQ ID NO: 9965 - DNA, 20 bp, synthetic construct
  misc_feature 1..20: note = Description of Artificial Sequence: Synthetic oligonucleotide
  misc_feature 1..20: note = Target: SCN10A; (+) strand; PAM type: NNGRRT; PAM sequence: CAGAAT
  source 1..20: mol_type = other DNA
gattgagaacaggactaagc

SEQ ID NO: 9966 - DNA, 20 bp, synthetic construct
  misc_feature 1..20: note = Description of Artificial Sequence: Synthetic oligonucleotide
  misc_feature 1..20: note = Target: SCN10A; (+) strand; PAM type: NNGRRT; PAM sequence: TGGGGT
  source 1..20: mol_type = other DNA
gacaaaattgttttcaacat

SEQ ID NO: 9967 - DNA, 20 bp, synthetic construct
  misc_feature 1..20: note = Description of Artificial Sequence: Synthetic oligonucleotide
  misc_feature 1..20: note = Target: SCN10A; (+) strand; PAM type: NNGRRT; PAM sequence: GGGAAT
  source 1..20: mol_type = other DNA
attgttttcaacattggggt

SEQ ID NO: 9968 - DNA, 20 bp, synthetic construct
  misc_feature 1..20: note = Description of Artificial Sequence: Synthetic oligonucleotide
  misc_feature 1..20: note = Target: SCN10A; (+) strand; PAM type: NNGRRT; PAM sequence: TGGGAT
  source 1..20: mol_type = other DNA
agaagtgatagctctggact

SEQ ID NO: 9969 - DNA, 20 bp, synthetic construct
  misc_feature 1..20: note = Description of Artificial Sequence: Synthetic oligonucleotide
  misc_feature 1..20: note = Target: SCN10A; (+) strand; PAM type: NNGRRT; PAM sequence: TGGGGT
  source 1..20: mol_type = other DNA
tgacattctgagaaaactat

SEQ ID NO: 9970 - DNA, 20 bp, synthetic construct
  misc_feature 1..20: note = Description of Artificial Sequence: Synthetic oligonucleotide
  misc_feature 1..20: note = Target: SCN10A; (+) strand; PAM type: NNGRRT; PAM sequence: AGGAAT
  source 1..20: mol_type = other DNA
tttatctgagagctatttct

SEQ ID NO: 9971 - DNA, 20 bp, synthetic construct
  misc_feature 1..20: note = Description of Artificial Sequence: Synthetic oligonucleotide
  misc_feature 1..20: note = Target: SCN10A; (+) strand; PAM type: NNGRRT; PAM sequence: CAGAAT
  source 1..20: mol_type = other DNA
tcttatgggcaaactgggct

SEQ ID NO: 9972 - DNA, 20 bp, synthetic construct
  misc_feature 1..20: note = Description of Artificial Sequence: Synthetic oligonucleotide
  misc_feature 1..20: note = Target: SCN10A; (+) strand; PAM type: NNGRRT; PAM sequence: AGGGGT
  source 1..20: mol_type = other DNA
ggctcagaattgtttcactg

SEQ ID NO: 9973 - DNA, 20 bp, synthetic construct
  misc_feature 1..20: note = Description of Artificial Sequence: Synthetic oligonucleotide
  misc_feature 1..20: note = Target: SCN10A; (+) strand; PAM type: NNGRRT; PAM sequence: AAGGAT
  source 1..20: mol_type = other DNA
gaattgtttcactgaggggt

SEQ ID NO: 9974 - DNA, 20 bp, synthetic construct
  misc_feature 1..20: note = Description of Artificial Sequence: Synthetic oligonucleotide
  misc_feature 1..20: note = Target: SCN10A; (+) strand; PAM type: NNGRRT; PAM sequence: TAGGGT
  source 1..20: mol_type = other DNA
tcactgaggggtaaggatac

SEQ ID NO: 9975 - DNA, 20 bp, synthetic construct
  misc_feature 1..20: note = Description of Artificial Sequence: Synthetic oligonucleotide
  misc_feature 1..20: note = Target: SCN10A; (+) strand; PAM type: NNGRRT; PAM sequence: TGGGAT
  source 1..20: mol_type = other DNA
ttattggttgacggttgtcc

SEQ ID NO: 9976 - DNA, 20 bp, synthetic construct
  misc_feature 1..20: note = Description of Artificial Sequence: Synthetic oligonucleotide
  misc_feature 1..20: note = Target: SCN10A; (+) strand; PAM type: NNGRRT; PAM sequence: GGGAAT
  source 1..20: mol_type = other DNA
tagtccttgcaaccttaatt

SEQ ID NO: 9977 - DNA, 20 bp, synthetic construct
  misc_feature 1..20: note = Description of Artificial Sequence: Synthetic oligonucleotide
  misc_feature 1..20: note = Target: SCN10A; (+) strand; PAM type: NNGRRT; PAM sequence: TAGAGT
  source 1..20: mol_type = other DNA
ttaattgggaatccctattt

SEQ ID NO: 9978 - DNA, 20 bp, synthetic construct
  misc_feature 1..20: note = Description of Artificial Sequence: Synthetic oligonucleotide
  misc_feature 1..20: note = Target: SCN10A; (+) strand; PAM type: NNGRRT; PAM sequence: TTGAAT
  source 1..20: mol_type = other DNA
atccctattttagagtctag

SEQ ID NO: 9979 - DNA, 20 bp, synthetic construct
  misc_feature 1..20: note = Description of Artificial Sequence: Synthetic oligonucleotide
  misc_feature 1..20: note = Target: SCN10A; (+) strand; PAM type: NNGRRT; PAM sequence: TAGGAT
  source 1..20: mol_type = other DNA
catatcaaatgtatgtgtta

SEQ ID NO: 9980 - DNA, 20 bp, synthetic construct
  misc_feature 1..20: note = Description of Artificial Sequence: Synthetic oligonucleotide
  misc_feature 1..20: note = Target: SCN10A; (+) strand; PAM type: NNGRRT; PAM sequence: TTGGAT
  source 1..20: mol_type = other DNA
ctgggcctgatactcacttc

SEQ ID NO: 9981 - DNA, 20 bp, synthetic construct
  misc_feature 1..20: note = Description of Artificial Sequence: Synthetic oligonucleotide
  misc_feature 1..20: note = Target: SCN10A; (+) strand; PAM type: NNGRRT; PAM sequence: ATGAGT
  source 1..20: mol_type = other DNA
ctggctttcaaacagtctgc

SEQ ID NO: 9982 - DNA, 20 bp, synthetic construct
  misc_feature 1..20: note = Description of Artificial Sequence: Synthetic oligonucleotide
  misc_feature 1..20: note = Target: SCN10A; (+) strand; PAM type: NNGRRT; PAM sequence: TGGAGT
  source 1..20: mol_type = other DNA
tctcactctgttgtccaggc

SEQ ID NO: 9983 - DNA, 20 bp, synthetic construct
  misc_feature 1..20: note = Description of Artificial Sequence: Synthetic oligonucleotide
  misc_feature 1..20: note = Target: SCN10A; (+) strand; PAM type: NNGRRT; PAM sequence: TGGGGT
  source 1..20: mol_type = other DNA
gctaatcttcatatttttga

SEQ ID NO: 9984 - DNA, 20 bp, synthetic construct
  misc_feature 1..20: note = Description of Artificial Sequence: Synthetic oligonucleotide
  misc_feature 1..20: note = Target: SCN10A; (-) strand; PAM type: NNNNGHTT; PAM sequence: TTCTGTTT
  source 1..20: mol_type = other DNA
tttttaaaaattcaaataaa

SEQ ID NO: 9985 - DNA, 20 bp, synthetic construct
  misc_feature 1..20: note = Description of Artificial Sequence: Synthetic oligonucleotide
  misc_feature 1..20: note = Target: SCN10A; (-) strand; PAM type: NNNNGHTT; PAM sequence: TCAAGATT
  source 1..20: mol_type = other DNA
tctgggaaaaagagtgtcag

SEQ ID NO: 9986 - DNA, 20 bp, synthetic construct
  misc_feature 1..20: note = Description of Artificial Sequence: Synthetic oligonucleotide
  misc_feature 1..20: note = Target: SCN10A; (-) strand; PAM type: NNNNGHTT; PAM sequence: ACTGGATT
  source 1..20: mol_type = other DNA
caaatgtccaacagtgatag

SEQ ID NO: 9987 - DNA, 20 bp, synthetic construct
  misc_feature 1..20: note = Description of Artificial Sequence: Synthetic oligonucleotide
  misc_feature 1..20: note = Target: SCN10A; (-) strand; PAM type: NNNNGHTT; PAM sequence: GTATGTTT
  source 1..20: mol_type = other DNA
ctataaagacacatgcacac

SEQ ID NO: 9988 - DNA, 20 bp, synthetic construct
  misc_feature 1..20: note = Description of Artificial Sequence: Synthetic oligonucleotide
  misc_feature 1..20: note = Target: SCN10A; (-) strand; PAM type: NNNNGHTT; PAM sequence: AAAGGATT
  source 1..20: mol_type = other DNA
ccattactgggtatataccc

SEQ ID NO: 9989 - DNA, 20 bp, synthetic construct
  misc_feature 1..20: note = Description of Artificial Sequence: Synthetic oligonucleotide
  misc_feature 1..20: note = Target: SCN10A; (-) strand; PAM type: NNNNGHTT; PAM sequence: AAGAGCTT
  source 1..20: mol_type = other DNA
aatgggatctcattaaacta

SEQ ID NO: 9990 - DNA, 20 bp, synthetic construct
  misc_feature 1..20: note = Description of Artificial Sequence: Synthetic oligonucleotide
  misc_feature 1..20: note = Target: SCN10A; (-) strand; PAM type: NNNNGHTT; PAM sequence: GATGGATT
  source 1..20: mol_type = other DNA
ttatacaaaaattaattcaa

SEQ ID NO: 9991 - DNA, 20 bp, synthetic construct
  misc_feature 1..20: note = Description of Artificial Sequence: Synthetic oligonucleotide
  misc_feature 1..20: note = Target: SCN10A; (-) strand; PAM type: NNNNGHTT; PAM sequence: AAAGGATT
  source 1..20: mol_type = other DNA
gacaaaaacaagaaatgggg

SEQ ID NO: 9992 - DNA, 20 bp, synthetic construct
  misc_feature 1..20: note = Description of Artificial Sequence: Synthetic oligonucleotide
  misc_feature 1..20: note = Target: SCN10A; (-) strand; PAM type: NNNNGHTT; PAM sequence: CTCTGTTT
  source 1..20: mol_type = other DNA
agttcactcatgatttggct

SEQ ID NO: 9993 - DNA, 20 bp, synthetic construct
  misc_feature 1..20: note = Description of Artificial Sequence: Synthetic oligonucleotide
  misc_feature 1..20: note = Target: SCN10A; (-) strand; PAM type: NNNNGHTT; PAM sequence: TCATGATT
  source 1..20: mol_type = other DNA
aattgtgaatgggagttcac

SEQ ID NO: 9994 - DNA, 20 bp, synthetic construct
  misc_feature 1..20: note = Description of Artificial Sequence: Synthetic oligonucleotide
  misc_feature 1..20: note = Target: SCN10A; (-) strand; PAM type: NNNNGHTT; PAM sequence: AGTGGTTT
  source 1..20: mol_type = other DNA
cctcttttatttcactgagc

SEQ ID NO: 9995 - DNA, 20 bp, synthetic construct
  misc_feature 1..20: note = Description of Artificial Sequence: Synthetic oligonucleotide
  misc_feature 1..20: note = Target: SCN10A; (-) strand; PAM type: NNNNGHTT; PAM sequence: ATTTGTTT
  source 1..20: mol_type = other DNA
tgagcatggagtattcttcc

SEQ ID NO: 9996 - DNA, 20 bp, synthetic construct
  misc_feature 1..20: note = Description of Artificial Sequence: Synthetic oligonucleotide
  misc_feature 1..20: note = Target: SCN10A; (-) strand; PAM type: NNNNGHTT; PAM sequence: TATTGATT
  source 1..20: mol_type = other DNA
cagtatggccattttcaaga

SEQ ID NO: 9997 - DNA, 20 bp, synthetic construct
  misc_feature 1..20: note = Description of Artificial Sequence: Synthetic oligonucleotide
  misc_feature 1..20: note = Target: SCN10A; (-) strand; PAM type: NNNNGHTT; PAM sequence: GGTAGCTT
  source 1..20: mol_type = other DNA
attctgagaagaaagtcatt

SEQ ID NO: 9998 - DNA, 20 bp, synthetic construct
  misc_feature 1..20: note = Description of Artificial Sequence: Synthetic oligonucleotide
  misc_feature 1..20: note = Target: SCN10A; (-) strand; PAM type: NNNNGHTT; PAM sequence: AGTAGTTT
  source 1..20: mol_type = other DNA
tggttccgtatgaactttaa

SEQ ID NO: 9999 - DNA, 20 bp, synthetic construct
  misc_feature 1..20: note = Description of Artificial Sequence: Synthetic oligonucleotide
  misc_feature 1..20: note = Target: SCN10A; (-) strand; PAM type: NNNNGHTT; PAM sequence: TTAGGATT
  source 1..20: mol_type = other DNA
aggttaaaaaaaaaacagga

SEQ ID NO: 10000 - DNA, 20 bp, synthetic construct
  misc_feature 1..20: note = Description of Artificial Sequence: Synthetic oligonucleotide
  misc_feature 1..20: note = Target: SCN10A; (-) strand; PAM type: NNNNGHTT; PAM sequence: ACAGGATT
  source 1..20: mol_type = other DNA
aaagtaaggttaaaaaaaaa

SEQ ID NO: 10001 - DNA, 20 bp, synthetic construct
  misc_feature 1..20: note = Description of Artificial Sequence: Synthetic oligonucleotide
  misc_feature 1..20: note = Target: SCN10A; (-) strand; PAM type: NNNNGHTT; PAM sequence: AAAGGTTT
  source 1..20: mol_type = other DNA
gctaaaaagtaaaaaaaagt

SEQ ID NO: 10002 - DNA, 20 bp, synthetic construct
  misc_feature 1..20: note = Description of Artificial Sequence: Synthetic oligonucleotide
  misc_feature 1..20: note = Target: SCN10A; (-) strand; PAM type: NNNNGHTT; PAM sequence: GTTGGTTT
  source 1..20: mol_type = other DNA
tataggtatacatgtgccat

SEQ ID NO: 10003 - DNA, 20 bp, synthetic construct
  misc_feature 1..20: note = Description of Artificial Sequence: Synthetic oligonucleotide
  misc_feature 1..20: note = Target: SCN10A; (-) strand; PAM type: NNNNGHTT; PAM sequence: ACATGTTT
  source 1..20: mol_type = other DNA
agggtacatgtgcacaatgt

SEQ ID NO: 10004 - DNA, 20 bp, synthetic construct
  misc_feature 1..20: note = Description of Artificial Sequence: Synthetic oligonucleotide
  misc_feature 1..20: note = Target: SCN10A; (-) strand; PAM type: NNNNGHTT; PAM sequence: GAAGGTTT
  source 1..20: mol_type = other DNA
tctggagctgaacacaggct

SEQ ID NO: 10005 - DNA, 20 bp, synthetic construct
  misc_feature 1..20: note = Description of Artificial Sequence: Synthetic oligonucleotide
  misc_feature 1..20: note = Target: SCN10A; (-) strand; PAM type: NNNNGHTT; PAM sequence: ATTTGCTT
  source 1..20: mol_type = other DNA
gagccctggtgtgctggagc

SEQ ID NO: 10006 - DNA, 20 bp, synthetic construct
  misc_feature 1..20: note = Description of Artificial Sequence: Synthetic oligonucleotide
  misc_feature 1..20: note = Target: SCN10A; (-) strand; PAM type: NNNNGHTT; PAM sequence: ACTAGATT
  source 1..20: mol_type = other DNA
ggtacaattacaaggtagaa

SEQ ID NO: 10007 - DNA, 20 bp, synthetic construct
  misc_feature 1..20: note = Description of Artificial Sequence: Synthetic oligonucleotide
  misc_feature 1..20: note = Target: SCN10A; (-) strand; PAM type: NNNNGHTT; PAM sequence: GCCAGTTT
  source 1..20: mol_type = other DNA
cttttgaaaatttcactaga

SEQ ID NO: 10008 - DNA, 20 bp, synthetic construct
  misc_feature 1..20: note = Description of Artificial Sequence: Synthetic oligonucleotide
  misc_feature 1..20: note = Target: SCN10A; (-) strand; PAM type: NNNNGHTT; PAM sequence: GCAAGATT
  source 1..20: mol_type = other DNA
ttttggaaatgtatccaaat

SEQ ID NO: 10009 - DNA, 20 bp, synthetic construct
  misc_feature 1..20: note = Description of Artificial Sequence: Synthetic oligonucleotide
  misc_feature 1..20: note = Target: SCN10A; (-) strand; PAM type: NNNNGHTT; PAM sequence: CGGAGTTT
  source 1..20: mol_type = other DNA
tatacacatcttgcatgaca

SEQ ID NO: 10010 - DNA, 20 bp, synthetic construct
  misc_feature 1..20: note = Description of Artificial Sequence: Synthetic oligonucleotide
  misc_feature 1..20: note = Target: SCN10A; (-) strand; PAM type: NNNNGHTT; PAM sequence: CCTAGTTT
  source 1..20: mol_type = other DNA
atttctattattgtcatcta

SEQ ID NO: 10011 - DNA, 20 bp, synthetic construct
  misc_feature 1..20: note = Description of Artificial Sequence: Synthetic oligonucleotide
  misc_feature 1..20: note = Target: SCN10A; (-) strand; PAM type: NNNNGHTT; PAM sequence: CCTTGATT
  source 1..20: mol_type = other DNA
ggaacatggctctgccaata

SEQ ID NO: 10012 - DNA, 20 bp, synthetic construct
  misc_feature 1..20: note = Description of Artificial Sequence: Synthetic oligonucleotide
  misc_feature 1..20: note = Target: SCN10A; (-) strand; PAM type: NNNNGHTT; PAM sequence: GCGGGCTT
  source 1..20: mol_type = other DNA
gaaggcaacggttctcacct

SEQ ID NO: 10013 - DNA, 20 bp, synthetic construct
  misc_feature 1..20: note = Description of Artificial Sequence: Synthetic oligonucleotide
  misc_feature 1..20: note = Target: SCN10A; (-) strand; PAM type: NNNNGHTT; PAM sequence: CAAAGATT
  source 1..20: mol_type = other DNA
atgtgcaggccaaggaatgg

SEQ ID NO: 10014 - DNA, 20 bp, synthetic construct
  misc_feature 1..20: note = Description of Artificial Sequence: Synthetic oligonucleotide
  misc_feature 1..20: note = Target: SCN10A; (-) strand; PAM type: NNNNGHTT; PAM sequence: TAAGGTTT
  source 1..20: mol_type = other DNA
attgtgaccttatttgacat

SEQ ID NO: 10015 - DNA, 20 bp, synthetic construct
  misc_feature 1..20: note = Description of Artificial Sequence: Synthetic oligonucleotide
  misc_feature 1..20: note = Target: SCN10A; (-) strand; PAM type: NNNNGHTT; PAM sequence: CTGTGATT
  source 1..20: mol_type = other DNA
gaagttctaaccaatagtac

SEQ ID NO: 10016 - DNA, 20 bp, synthetic construct
  misc_feature 1..20: note = Description of Artificial Sequence: Synthetic oligonucleotide
  misc_feature 1..20: note = Target: SCN10A; (-) strand; PAM type: NNNNGHTT; PAM sequence: TTATGCTT
  source 1..20: mol_type = other DNA
taattcaactttatgttgaa

SEQ ID NO: 10017 - DNA, 20 bp, synthetic construct
  misc_feature 1..20: note = Description of Artificial Sequence: Synthetic oligonucleotide
  misc_feature 1..20: note = Target: SCN10A; (-) strand; PAM type: NNNNGHTT; PAM sequence: ACAGGTTT
  source 1..20: mol_type = other DNA
agtggacagagagtttgggc

SEQ ID NO: 10018 - DNA, 20 bp, synthetic construct
  misc_feature 1..20: note = Description of Artificial Sequence: Synthetic oligonucleotide
  misc_feature 1..20: note = Target: SCN10A; (-) strand; PAM type: NNNNGHTT; PAM sequence: GAGAGTTT
  source 1..20: mol_type = other DNA
ataagacagctaagtggaca

SEQ ID NO: 10019 - DNA, 20 bp, synthetic construct
  misc_feature 1..20: note = Description of Artificial Sequence: Synthetic oligonucleotide
  misc_feature 1..20: note = Target: SCN10A; (-) strand; PAM type: NNNNGHTT; PAM sequence: AAGTGTTT
  source 1..20: mol_type = other DNA
gccatctgagatactagccc

SEQ ID NO: 10020 - DNA, 20 bp, synthetic construct
  misc_feature 1..20: note = Description of Artificial Sequence: Synthetic oligonucleotide
  misc_feature 1..20: note = Target: SCN10A; (-) strand; PAM type: NNNNGHTT; PAM sequence: TGCAGCTT
  source 1..20: mol_type = other DNA
gggagcacagatactgactg

SEQ ID NO: 10021 - DNA, 20 bp, synthetic construct
  misc_feature 1..20: note = Description of Artificial Sequence: Synthetic oligonucleotide
  misc_feature 1..20: note = Target: SCN10A; (-) strand; PAM type: NNNNGHTT; PAM sequence: GCCTGATT
  source 1..20: mol_type = other DNA
aaatcagctattctctgaat

SEQ ID NO: 10022 - DNA, 20 bp, synthetic construct
  misc_feature 1..20: note = Description of Artificial Sequence: Synthetic oligonucleotide
  misc_feature 1..20: note = Target: SCN10A; (-) strand; PAM type: NNNNGHTT; PAM sequence: AGATGCTT
  source 1..20: mol_type = other DNA
agaagtcaaagaggctctca

SEQ ID NO: 10023 - DNA, 20 bp, synthetic construct
  misc_feature 1..20: note = Description of Artificial Sequence: Synthetic oligonucleotide
  misc_feature 1..20: note = Target: SCN10A; (-) strand; PAM type: NNNNGHTT; PAM sequence: TACAGATT
  source 1..20: mol_type = other DNA
catctcacatgcctcaagaa

SEQ ID NO: 10024 - DNA, 20 bp, synthetic construct
  misc_feature 1..20: note = Description of Artificial Sequence: Synthetic oligonucleotide
  misc_feature 1..20: note = Target: SCN10A; (-) strand; PAM type: NNNNGHTT; PAM sequence: ATAAGATT
  source 1..20: mol_type = other DNA
tctatatatttgatcatttc

SEQ ID NO: 10025 - DNA, 20 bp, synthetic construct
  misc_feature 1..20: note = Description of Artificial Sequence: Synthetic oligonucleotide
  misc_feature 1..20: note = Target: SCN10A; (-) strand; PAM type: NNNNGHTT; PAM sequence: CAAAGATT
  source 1..20: mol_type = other DNA
cccattcccagccacaatca

SEQ ID NO: 10026 - DNA, 20 bp, synthetic construct
  misc_feature 1..20: note = Description of Artificial Sequence: Synthetic oligonucleotide
  misc_feature 1..20: note = Target: SCN10A; (-) strand; PAM type: NNNNGHTT; PAM sequence: TAGGGATT
  source 1..20: mol_type = other DNA
ccctataacaacataggaca

SEQ ID NO: 10027 - DNA, 20 bp, synthetic construct
  misc_feature 1..20: note = Description of Artificial Sequence: Synthetic oligonucleotide
  misc_feature 1..20: note = Target: SCN10A; (-) strand; PAM type: NNNNGHTT; PAM sequence: TGCAGATT
  source 1..20: mol_type = other DNA
tatttaggccaaaggcatgt

SEQ ID NO: 10028 - DNA, 20 bp, synthetic construct
  misc_feature 1..20: note = Description of Artificial Sequence: Synthetic oligonucleotide
  misc_feature 1..20: note = Target: SCN10A; (-) strand; PAM type: NNNNGHTT; PAM sequence: AGGAGTTT
  source 1..20: mol_type = other DNA
aatggagtaagaattgtcag

SEQ ID NO: 10029 - DNA, 20 bp, synthetic construct
  misc_feature 1..20: note = Description of Artificial Sequence: Synthetic oligonucleotide
  misc_feature 1..20: note = Target: SCN10A; (-) strand; PAM type: NNNNGHTT; PAM sequence: AAAAGATT
  source 1..20: mol_type = other DNA
aaaataggaattaagccccc

SEQ ID NO: 10030 - DNA, 20 bp, synthetic construct
  misc_feature 1..20: note = Description of Artificial Sequence: Synthetic oligonucleotide
  misc_feature 1..20: note = Target: SCN10A; (-) strand; PAM type: NNNNGHTT; PAM sequence: AGTAGTTT
  source 1..20: mol_type = other DNA
agtagataaaaggtatggcc

SEQ ID NO: 10031 - DNA, 20 bp, synthetic construct
  misc_feature 1..20: note = Description of Artificial Sequence: Synthetic oligonucleotide
  misc_feature 1..20: note = Target: SCN10A; (-) strand; PAM type: NNNNGHTT; PAM sequence: GAGAGTTT
  source 1..20: mol_type = other DNA
cataatcagacattaaggag

SEQ ID NO: 10032 - DNA, 20 bp, synthetic construct
  misc_feature 1..20: note = Description of Artificial Sequence: Synthetic oligonucleotide
  misc_feature 1..20: note = Target: SCN10A; (-) strand; PAM type: NNNNGHTT; PAM sequence: GGCAGCTT
  source 1..20: mol_type = other DNA
ttctgttgtgtagctaaaga

SEQ ID NO: 10033 - DNA, 20 bp, synthetic construct
  misc_feature 1..20: note = Description of Artificial Sequence: Synthetic oligonucleotide
  misc_feature 1..20: note = Target: SCN10A; (-) strand; PAM type: NNNNGHTT; PAM sequence: GAATGCTT
  source 1..20: mol_type = other DNA
tggtgggaagggaagaaaat

SEQ ID NO: 10034 - DNA, 20 bp, synthetic construct
  misc_feature 1..20: note = Description of Artificial Sequence: Synthetic oligonucleotide
  misc_feature 1..20: note = Target: SCN10A; (-) strand; PAM type: NNNNGHTT; PAM sequence: TTGAGATT
  source 1..20: mol_type = other DNA
ggatcctgatatttttcagt

SEQ ID NO: 10035 - DNA, 20 bp, synthetic construct
  misc_feature 1..20: note = Description of Artificial Sequence: Synthetic oligonucleotide
  misc_feature 1..20: note = Target: SCN10A; (-) strand; PAM type: NNNNGHTT; PAM sequence: TTCAGTTT
  source 1..20: mol_type = other DNA
tttctgggatcctgatattt

SEQ ID NO: 10036 - DNA, 20 bp, synthetic construct
  misc_feature 1..20: note = Description of Artificial Sequence: Synthetic oligonucleotide
  misc_feature 1..20: note = Target: SCN10A; (-) strand; PAM type: NNNNGHTT; PAM sequence: TTAGGATT
  source 1..20: mol_type = other DNA
acagagattggcaatattat

SEQ ID NO: 10037 - DNA, 20 bp, synthetic construct
  misc_feature 1..20: note = Description of Artificial Sequence: Synthetic oligonucleotide
  misc_feature 1..20: note = Target: SCN10A; (-) strand; PAM type: NNNNGHTT; PAM sequence: CAGAGATT
  source 1..20: mol_type = other DNA
gtcctctgtggagcaccata

SEQ ID NO: 10038 - DNA, 20 bp, synthetic construct
  misc_feature 1..20: note = Description of Artificial Sequence: Synthetic oligonucleotide
  misc_feature 1..20: note = Target: SCN10A; (-) strand; PAM type: NNNNGHTT; PAM sequence: ATCAGATT
  source 1..20: mol_type = other DNA
gtccttttatttttgttgta

SEQ ID NO: 10039 - DNA, 20 bp, synthetic construct
  misc_feature 1..20: note = Description of Artificial Sequence: Synthetic oligonucleotide
  misc_feature 1..20: note = Target: SCN10A; (-) strand; PAM type: NNNNGHTT; PAM sequence: CTGTGATT
  source 1..20: mol_type = other DNA
agaagctaagagcacttcca

SEQ ID NO: 10040 - DNA, 20 bp, synthetic construct
  misc_feature 1..20: note = Description of Artificial Sequence: Synthetic oligonucleotide
  misc_feature 1..20: note = Target: SCN10A; (-) strand; PAM type: NNNNGHTT; PAM sequence: AGCTGATT
  source 1..20: mol_type = other DNA
agatgaagccaccagtatgg

SEQ ID NO: 10041 - DNA, 20 bp, synthetic construct
  misc_feature 1..20: note = Description of Artificial Sequence: Synthetic oligonucleotide
  misc_feature 1..20: note = Target: SCN10A; (-) strand; PAM type: NNNNGHTT; PAM sequence: AACTGCTT
  source 1..20: mol_type = other DNA
gtactcccagacaaatctga

SEQ ID NO: 10042 - DNA, 20 bp, synthetic construct
  misc_feature 1..20: note = Description of Artificial Sequence: Synthetic oligonucleotide
  misc_feature 1..20: note = Target: SCN10A; (-) strand; PAM type: NNNNGHTT; PAM sequence: GAAGGTTT
  source 1..20: mol_type = other DNA
aggctgcatcactcccagat

SEQ ID NO: 10043 - DNA, 20 bp, synthetic construct
  misc_feature 1..20: note = Description of Artificial Sequence: Synthetic oligonucleotide
  misc_feature 1..20: note = Target: SCN10A; (-) strand; PAM type: NNNNGHTT; PAM sequence: AGAAGTTT
  source 1..20: mol_type = other DNA
tctgaaggcaaatatggagg

SEQ ID NO: 10044 - DNA, 20 bp, synthetic construct
  misc_feature 1..20: note = Description of Artificial Sequence: Synthetic oligonucleotide
  misc_feature 1..20: note = Target: SCN10A; (-) strand; PAM type: NNNNGHTT; PAM sequence: GTTGGATT
  source 1..20: mol_type = other DNA
gtcctaggagaatccgggga

SEQ ID NO: 10045 - DNA, 20 bp, synthetic construct
  misc_feature 1..20: note = Description of Artificial Sequence: Synthetic oligonucleotide
  misc_feature 1..20: note = Target: SCN10A; (-) strand; PAM type: NNNNGHTT; PAM sequence: TTTTGCTT
  source 1..20: mol_type = other DNA
atccactgcttggacatcct

SEQ ID NO: 10046 - DNA, 20 bp, synthetic construct
  misc_feature 1..20: note = Description of Artificial Sequence: Synthetic oligonucleotide
  misc_feature 1..20: note = Target: SCN10A; (-) strand; PAM type: NNNNGHTT; PAM sequence: CACTGCTT
  source 1..20: mol_type = other DNA
tggtccctggagataagatc

SEQ ID NO: 10047 - DNA, 20 bp, synthetic construct
  misc_feature 1..20: note = Description of Artificial Sequence: Synthetic oligonucleotide
  misc_feature 1..20: note = Target: SCN10A; (-) strand; PAM type: NNNNGHTT; PAM sequence: CTCAGTTT
  source 1..20: mol_type = other DNA
gaagtttgacccagaggcca

SEQ ID NO: 10048 - DNA, 20 bp, synthetic construct
  misc_feature 1..20: note = Description of Artificial Sequence: Synthetic oligonucleotide
  misc_feature 1..20: note = Target: SCN10A; (-) strand; PAM type: NNNNGHTT; PAM sequence: AGAAGTTT
  source 1..20: mol_type = other DNA
catgttctatgagacctggg

SEQ ID NO: 10049 - DNA, 20 bp, synthetic construct
  misc_feature 1..20: note = Description of Artificial Sequence: Synthetic oligonucleotide
  misc_feature 1..20: note = Target: SCN10A; (-) strand; PAM type: NNNNGHTT; PAM sequence: CAGTGATT
  source 1..20: mol_type = other DNA
catggtcaacatgtacattg

SEQ ID NO: 10050 - DNA, 20 bp, synthetic construct
  misc_feature 1..20: note = Description of Artificial Sequence: Synthetic oligonucleotide
  misc_feature 1..20: note = Target: SCN10A; (-) strand; PAM type: NNNNGHTT; PAM sequence: TCCAGATT
  source 1..20: mol_type = other DNA
caacagcatgctgtgcctct

SEQ ID NO: 10051 - DNA, 20 bp, synthetic construct
  misc_feature 1..20: note = Description of Artificial Sequence: Synthetic oligonucleotide
  misc_feature 1..20: note = Target: SCN10A; (-) strand; PAM type: NNNNGHTT; PAM sequence: TCCAGCTT
  source 1..20: mol_type = other DNA
tctactctatcttcggtatg

SEQ ID NO: 10052 - DNA, 20 bp, synthetic construct
  misc_feature 1..20: note = Description of Artificial Sequence: Synthetic oligonucleotide
  misc_feature 1..20: note = Target: SCN10A; (-) strand; PAM type: NNNNGHTT; PAM sequence: GCCTGATT
  source 1..20: mol_type = other DNA
atttcttccttcttttaaag

SEQ ID NO: 10053 - DNA, 20 bp, synthetic construct
  misc_feature 1..20: note = Description of Artificial Sequence: Synthetic oligonucleotide
  misc_feature 1..20: note = Target: SCN10A; (-) strand; PAM type: NNNNGHTT; PAM sequence: ATAAGTTT
  source 1..20: mol_type = other DNA
gctgaacttggctgcagaag

SEQ ID NO: 10054 - DNA, 20 bp, synthetic construct
  misc_feature 1..20: note = Description of Artificial Sequence: Synthetic oligonucleotide
  misc_feature 1..20: note = Target: SCN10A; (-) strand; PAM type: NNNNGHTT; PAM sequence: TTATGCTT
  source 1..20: mol_type = other DNA
cagctggtcattcaaatccc

SEQ ID NO: 10055 - DNA, 20 bp, synthetic construct
  misc_feature 1..20: note = Description of Artificial Sequence: Synthetic oligonucleotide
  misc_feature 1..20: note = Target: SCN10A; (-) strand; PAM type: NNNNGHTT; PAM sequence: GAGAGCTT
  source 1..20: mol_type = other DNA
cagggaacctggcaaggagc

SEQ ID NO: 10056 - DNA, 20 bp, synthetic construct
  misc_feature 1..20: note = Description of Artificial Sequence: Synthetic oligonucleotide
  misc_feature 1..20: note = Target: SCN10A; (-) strand; PAM type: NNNNGHTT; PAM sequence: CAAAGATT
  source 1..20: mol_type = other DNA
aattcacagaaggtcttcca

SEQ ID NO: 10057 - DNA, 20 bp, synthetic construct
  misc_feature 1..20: note = Description of Artificial Sequence: Synthetic oligonucleotide
  misc_feature 1..20: note = Target: SCN10A; (-) strand; PAM type: NNNNGHTT; PAM sequence: AGGTGATT
  source 1..20: mol_type = other DNA
tcttctttcccaccaacaag

SEQ ID NO: 10058 - DNA, 20 bp, synthetic construct
  misc_feature 1..20: note = Description of Artificial Sequence: Synthetic oligonucleotide
  misc_feature 1..20: note = Target: SCN10A; (-) strand; PAM type: NNNNGHTT; PAM sequence: TGTGGCTT
  source 1..20: mol_type = other DNA
atatcttaactaccagttcc

SEQ ID NO: 10059 - DNA, 20 bp, synthetic construct
  misc_feature 1..20: note = Description of Artificial Sequence: Synthetic oligonucleotide
  misc_feature 1..20: note = Target: SCN10A; (-) strand; PAM type: NNNNGHTT; PAM sequence: GCTTGTTT
  source 1..20: mol_type = other DNA
attttatattaaagaaggga

SEQ ID NO: 10060 - DNA, 20 bp, synthetic construct
  misc_feature 1..20: note = Description of Artificial Sequence: Synthetic oligonucleotide
  misc_feature 1..20: note = Target: SCN10A; (-) strand; PAM type: NNNNGHTT; PAM sequence: GGGAGCTT
  source 1..20: mol_type = other DNA
tttgattttatattaaagaa

SEQ ID NO: 10061 - DNA, 20 bp, synthetic construct
  misc_feature 1..20: note = Description of Artificial Sequence: Synthetic oligonucleotide
  misc_feature 1..20: note = Target: SCN10A; (-) strand; PAM type: NNNNGHTT; PAM sequence: TTTTGATT
  source 1..20: mol_type = other DNA
atgaaagattccaaaggcta

SEQ ID NO: 10062 - DNA, 20 bp, synthetic construct
  misc_feature 1..20: note = Description of Artificial Sequence: Synthetic oligonucleotide
  misc_feature 1..20: note = Target: SCN10A; (-) strand; PAM type: NNNNGHTT; PAM sequence: GAAAGATT
  source 1..20: mol_type = other DNA
ttttgtttgtcttccaaaat

SEQ ID NO: 10063 - DNA, 20 bp, synthetic construct
  misc_feature 1..20: note = Description of Artificial Sequence: Synthetic oligonucleotide
  misc_feature 1..20: note = Target: SCN10A; (-) strand; PAM type: NNNNGHTT; PAM sequence: TTTTGTTT
  source 1..20: mol_type = other DNA
ttgttttcatttttgttttg

SEQ ID NO: 10064 - DNA, 20 bp, synthetic construct
  misc_feature 1..20: note = Description of Artificial Sequence: Synthetic oligonucleotide
  misc_feature 1..20: note = Target: SCN10A; (-) strand; PAM type: NNNNGHTT; PAM sequence: TTTTGTTT
  source 1..20: mol_type = other DNA
gttagttgttttcatttttg

SEQ ID NO: 10065 - DNA, 20 bp, synthetic construct
  misc_feature 1..20: note = Description of Artificial Sequence: Synthetic oligonucleotide
  misc_feature 1..20: note = Target: SCN10A; (-) strand; PAM type: NNNNGHTT; PAM sequence: TTTTGTTT
  source 1..20: mol_type = other DNA
ggttggttagttgttttcat

SEQ ID NO: 10066 - DNA, 20 bp, synthetic construct
  misc_feature 1..20: note = Description of Artificial Sequence: Synthetic oligonucleotide
  misc_feature 1..20: note = Target: SCN10A; (-) strand; PAM type: NNNNGHTT; PAM sequence: AGTTGTTT
  source 1..20: mol_type = other DNA
tttttgttggttggttggtt

SEQ ID NO: 10067 - DNA, 20 bp, synthetic construct
  misc_feature 1..20: note = Description of Artificial Sequence: Synthetic oligonucleotide
  misc_feature 1..20: note = Target: SCN10A; (-) strand; PAM type: NNNNGHTT; PAM sequence: AGGAGTTT
  source 1..20: mol_type = other DNA
cttatctcacttagcataat

SEQ ID NO: 10068 - DNA, 20 bp, synthetic construct
  misc_feature 1..20: note = Description of Artificial Sequence: Synthetic oligonucleotide
  misc_feature 1..20: note = Target: SCN10A; (-) strand; PAM type: NNNNGHTT; PAM sequence: TCTGGCTT
  source 1..20: mol_type = other DNA
gtcgtttttgtccttctgtg

SEQ ID NO: 10069 - DNA, 20 bp, synthetic construct
  misc_feature 1..20: note = Description of Artificial Sequence: Synthetic oligonucleotide
  misc_feature 1..20: note = Target: SCN10A; (-) strand; PAM type: NNNNGHTT; PAM sequence: TGTCGTTT
  source 1..20: mol_type = other DNA
tccttatataaatgcaatca

SEQ ID NO: 10070 - DNA, 20 bp, synthetic construct
  misc_feature 1..20: note = Description of Artificial Sequence: Synthetic oligonucleotide
  misc_feature 1..20: note = Target: SCN10A; (-) strand; PAM type: NNNNGHTT; PAM sequence: TTTAGATT
  source 1..20: mol_type = other DNA
gctcccatgagtttgactat

SEQ ID NO: 10071 - DNA, 20 bp, synthetic construct
  misc_feature 1..20: note = Description of Artificial Sequence: Synthetic oligonucleotide
  misc_feature 1..20: note = Target: SCN10A; (-) strand; PAM type: NNNNGHTT; PAM sequence: ATGAGTTT
  source 1..20: mol_type = other DNA
ccattctattctctgctccc

SEQ ID NO: 10072 - DNA, 20 bp, synthetic construct
  misc_feature 1..20: note = Description of Artificial Sequence: Synthetic oligonucleotide
  misc_feature 1..20: note = Target: SCN10A; (-) strand; PAM type: NNNNGHTT; PAM sequence: GGAAGTTT
  source 1..20: mol_type = other DNA
tttattcatgtcacataact

SEQ ID NO: 10073 - DNA, 20 bp, synthetic construct
  misc_feature 1..20: note = Description of Artificial Sequence: Synthetic oligonucleotide
  misc_feature 1..20: note = Target: SCN10A; (-) strand; PAM type: NNNNGHTT; PAM sequence: CTAGGATT
  source 1..20: mol_type = other DNA
actatgctataagtagagct

SEQ ID NO: 10074 - DNA, 20 bp, synthetic construct
  misc_feature 1..20: note = Description of Artificial Sequence: Synthetic oligonucleotide
  misc_feature 1..20: note = Target: SCN10A; (-) strand; PAM type: NNNNGHTT; PAM sequence: TTAAGATT
  source 1..20: mol_type = other DNA
ttattgggtgctaggaacac

SEQ ID NO: 10075 - DNA, 20 bp, synthetic construct
  misc_feature 1..20: note = Description of Artificial Sequence: Synthetic oligonucleotide
  misc_feature 1..20: note = Target: SCN10A; (-) strand; PAM type: NNNNGHTT; PAM sequence: ATGAGTTT
  source 1..20: mol_type = other DNA
tgtttaatgtacacaacttt

SEQ ID NO: 10076 - DNA, 20 bp, synthetic construct
  misc_feature 1..20: note = Description of Artificial Sequence: Synthetic oligonucleotide
  misc_feature 1..20: note = Target: SCN10A; (-) strand; PAM type: NNNNGHTT; PAM sequence: ACATGTTT
  source 1..20: mol_type = other DNA
atccacatgtaaaaagctat

SEQ ID NO: 10077 - DNA, 20 bp, synthetic construct
  misc_feature 1..20: note = Description of Artificial Sequence: Synthetic oligonucleotide
  misc_feature 1..20: note = Target: SCN10A; (-) strand; PAM type: NNNNGHTT; PAM sequence: CTCTGTTT
  source 1..20: mol_type = other DNA
gttttattttgatattgctg

SEQ ID NO: 10078 - DNA, 20 bp, synthetic construct
  misc_feature 1..20: note = Description of Artificial Sequence: Synthetic oligonucleotide
  misc_feature 1..20: note = Target: SCN10A; (-) strand; PAM type: NNNNGHTT; PAM sequence: TCTTGTTT
  source 1..20: mol_type = other DNA
ggatttcagtttgtttttgt

SEQ ID NO: 10079 - DNA, 20 bp, synthetic construct
  misc_feature 1..20: note = Description of Artificial Sequence: Synthetic oligonucleotide
  misc_feature 1..20: note = Target: SCN10A; (-) strand; PAM type: NNNNGHTT; PAM sequence: GTTTGTTT
  source 1..20: mol_type = other DNA
gtgtatttccggggatttca

SEQ ID NO: 10080 - DNA, 20 bp, synthetic construct
  misc_feature 1..20: note = Description of Artificial Sequence: Synthetic oligonucleotide
  misc_feature 1..20: note = Target: SCN10A; (-) strand; PAM type: NNNNGHTT; PAM sequence: TTCAGTTT
  source 1..20: mol_type = other DNA
ttgcgtgtatttccggggat

SEQ ID NO: 10081 - DNA, 20 bp, synthetic construct
  misc_feature 1..20: note = Description of Artificial Sequence: Synthetic oligonucleotide
  misc_feature 1..20: note = Target: SCN10A; (-) strand; PAM type: NNNNGHTT; PAM sequence: CGGGGATT
  source 1..20: mol_type = other DNA
ccttgggttgcgtgtatttc

SEQ ID NO: 10082 - DNA, 20 bp, synthetic construct
  misc_feature 1..20: note = Description of Artificial Sequence: Synthetic oligonucleotide
  misc_feature 1..20: note = Target: SCN10A; (-) strand; PAM type: NNNNGHTT; PAM sequence: CACTGATT
  source 1..20: mol_type = other DNA
tagctgtagatttaatttgc

SEQ ID NO: 10083 - DNA, 20 bp, synthetic construct
  misc_feature 1..20: note = Description of Artificial Sequence: Synthetic oligonucleotide
  misc_feature 1..20: note = Target: SCN10A; (-) strand; PAM type: NNNNGHTT; PAM sequence: TGTAGATT
  source 1..20: mol_type = other DNA
ttttcatgtcggggtgtagc

SEQ ID NO: 10084 - DNA, 20 bp, synthetic construct
  misc_feature 1..20: note = Description of Artificial Sequence: Synthetic oligonucleotide
  misc_feature 1..20: note = Target: SCN10A; (-) strand; PAM type: NNNNGHTT; PAM sequence: ACCTGCTT
  source 1..20: mol_type = other DNA
tcttgattggttatatcctg

SEQ ID NO: 10085 - DNA, 20 bp, synthetic construct
  misc_feature 1..20: note = Description of Artificial Sequence: Synthetic oligonucleotide
  misc_feature 1..20: note = Target: SCN10A; (-) strand; PAM type: NNNNGHTT; PAM sequence: TCTTGATT
  source 1..20: mol_type = other DNA
cacctggcattataaatgta

SEQ ID NO: 10086 - DNA, 20 bp, synthetic construct
  misc_feature 1..20: note = Description of Artificial Sequence: Synthetic oligonucleotide
  misc_feature 1..20: note = Target: SCN10A; (-) strand; PAM type: NNNNGHTT; PAM sequence: ACCAGCTT
  source 1..20: mol_type = other DNA
ataaaggccaaatcatgctc

SEQ ID NO: 10087 - DNA, 20 bp, synthetic construct
  misc_feature 1..20: note = Description of Artificial Sequence: Synthetic oligonucleotide
  misc_feature 1..20: note = Target: SCN10A; (-) strand; PAM type: NNNNGHTT; PAM sequence: TGAAGTTT
  source 1..20: mol_type = other DNA
ccctgggcttatgggttagc

SEQ ID NO: 10088 - DNA, 20 bp, synthetic construct
  misc_feature 1..20: note = Description of Artificial Sequence: Synthetic oligonucleotide
  misc_feature 1..20: note = Target: SCN10A; (-) strand; PAM type: NNNNGHTT; PAM sequence: CTGGGCTT
  source 1..20: mol_type = other DNA
caacagccaagagactgtcc

SEQ ID NO: 10089 - DNA, 20 bp, synthetic construct
  misc_feature 1..20: note = Description of Artificial Sequence: Synthetic oligonucleotide
  misc_feature 1..20: note = Target: SCN10A; (-) strand; PAM type: NNNNGHTT; PAM sequence: CTGAGTTT
  source 1..20: mol_type = other DNA
agagtttccaagggttgaag

SEQ ID NO: 10090 - DNA, 20 bp, synthetic construct
  misc_feature 1..20: note = Description of Artificial Sequence: Synthetic oligonucleotide
  misc_feature 1..20: note = Target: SCN10A; (-) strand; PAM type: NNNNGHTT; PAM sequence: CAGAGTTT
  source 1..20: mol_type = other DNA
aagaatattatgcagggtca

SEQ ID NO: 10091 - DNA, 20 bp, synthetic construct
  misc_feature 1..20: note = Description of Artificial Sequence: Synthetic oligonucleotide
  misc_feature 1..20: note = Target: SCN10A; (-) strand; PAM type: NNNNGHTT; PAM sequence: AGGAGATT
  source 1..20: mol_type = other DNA
actgggaggagattgttcaa

SEQ ID NO: 10092 - DNA, 20 bp, synthetic construct
  misc_feature 1..20: note = Description of Artificial Sequence: Synthetic oligonucleotide
  misc_feature 1..20: note = Target: SCN10A; (-) strand; PAM type: NNNNGHTT; PAM sequence: AGGAGATT
  source 1..20: mol_type = other DNA
caaagtgaggaaagactggg

SEQ ID NO: 10093 - DNA, 20 bp, synthetic construct
  misc_feature 1..20: note = Description of Artificial Sequence: Synthetic oligonucleotide
  misc_feature 1..20: note = Target: SCN10A; (-) strand; PAM type: NNNNGHTT; PAM sequence: GATGGATT
  source 1..20: mol_type = other DNA
aaatctgttctggaaaagga

SEQ ID NO: 10094 - DNA, 20 bp, synthetic construct
  misc_feature 1..20: note = Description of Artificial Sequence: Synthetic oligonucleotide
  misc_feature 1..20: note = Target: SCN10A; (-) strand; PAM type: NNNNGHTT; PAM sequence: AAGTGTTT
  source 1..20: mol_type = other DNA
gccttctccatgctcacacg

SEQ ID NO: 10095 - DNA, 20 bp, synthetic construct
  misc_feature 1..20: note = Description of Artificial Sequence: Synthetic oligonucleotide
  misc_feature 1..20: note = Target: SCN10A; (-) strand; PAM type: NNNNGHTT; PAM sequence: GCAAGTTT
  source 1..20: mol_type = other DNA
tttgcagctttccaagagta

SEQ ID NO: 10096 - DNA, 20 bp, synthetic construct
  misc_feature 1..20: note = Description of Artificial Sequence: Synthetic oligonucleotide
  misc_feature 1..20: note = Target: SCN10A; (-) strand; PAM type: NNNNGHTT; PAM sequence: TGCAGCTT
  source 1..20: mol_type = other DNA
tgttagaagaaccctgtatt

SEQ ID NO: 10097 - DNA, 20 bp, synthetic construct
  misc_feature 1..20: note = Description of Artificial Sequence: Synthetic oligonucleotide
  misc_feature 1..20: note = Target: SCN10A; (-) strand; PAM type: NNNNGHTT; PAM sequence: ACGTGTTT
  source 1..20: mol_type = other DNA
accaaccaactttttgaaat

SEQ ID NO: 10098 - DNA, 20 bp, synthetic construct
  misc_feature 1..20: note = Description of Artificial Sequence: Synthetic oligonucleotide
  misc_feature 1..20: note = Target: SCN10A; (-) strand; PAM type: NNNNGHTT; PAM sequence: CTCTGTTT
  source 1..20: mol_type = other DNA
acgtggtggggaagccccac

SEQ ID NO: 10099 - DNA, 20 bp, synthetic construct
  misc_feature 1..20: note = Description of Artificial Sequence: Synthetic oligonucleotide
  misc_feature 1..20: note = Target: SCN10A; (-) strand; PAM type: NNNNGHTT; PAM sequence: ATGTGTTT
  source 1..20: mol_type = other DNA
ctacttcacaaatggctgga

SEQ ID NO: 10100 - DNA, 20 bp, synthetic construct
  misc_feature 1..20: note = Description of Artificial Sequence: Synthetic oligonucleotide
  misc_feature 1..20: note = Target: SCN10A; (-) strand; PAM type: NNNNGHTT; PAM sequence: GTTCGCTT
  source 1..20: mol_type = other DNA
ggcgaatgtgtcatgaagat

SEQ ID NO: 10101 - DNA, 20 bp, synthetic construct
  misc_feature 1..20: note = Description of Artificial Sequence: Synthetic oligonucleotide
  misc_feature 1..20: note = Target: SCN10A; (-) strand; PAM type: NNNNGHTT; PAM sequence: ACAAGCTT
  source 1..20: mol_type = other DNA
gtctttgacatcgtgaccag

SEQ ID NO: 10102 - DNA, 20 bp, synthetic construct
  misc_feature 1..20: note = Description of Artificial Sequence: Synthetic oligonucleotide
  misc_feature 1..20: note = Target: SCN10A; (-) strand; PAM type: NNNNGHTT; PAM sequence: CAGGGTTT
  source 1..20: mol_type = other DNA
tgttttctcagaacaagttc

SEQ ID NO: 10103 - DNA, 20 bp, synthetic construct
  misc_feature 1..20: note = Description of Artificial Sequence: Synthetic oligonucleotide
  misc_feature 1..20: note = Target: SCN10A; (-) strand; PAM type: NNNNGHTT; PAM sequence: TCTTGTTT
  source 1..20: mol_type = other DNA
aaggccctgatgccactatc

SEQ ID NO: 10104 - DNA, 20 bp, synthetic construct
  misc_feature 1..20: note = Description of Artificial Sequence: Synthetic oligonucleotide
  misc_feature 1..20: note = Target: SCN10A; (-) strand; PAM type: NNNNGHTT; PAM sequence: CCTGGTTT
  source 1..20: mol_type = other DNA
atctacagataacacagatg

SEQ ID NO: 10105 - DNA, 20 bp, synthetic construct
  misc_feature 1..20: note = Description of Artificial Sequence: Synthetic oligonucleotide
  misc_feature 1..20: note = Target: SCN10A; (-) strand; PAM type: NNNNGHTT; PAM sequence: TTTCGCTT
  source 1..20: mol_type = other DNA
tggaagaggtaaggatagta

SEQ ID NO: 10106 - DNA, 20 bp, synthetic construct
  misc_feature 1..20: note = Description of Artificial Sequence: Synthetic oligonucleotide
  misc_feature 1..20: note = Target: SCN10A; (-) strand; PAM type: NNNNGHTT; PAM sequence: GATGGATT
  source 1..20: mol_type = other DNA
agtaagtggagcttaaaaga

SEQ ID NO: 10107 - DNA, 20 bp, synthetic construct
  misc_feature 1..20: note = Description of Artificial Sequence: Synthetic oligonucleotide
  misc_feature 1..20: note = Target: SCN10A; (-) strand; PAM type: NNNNGHTT; PAM sequence: TGGAGCTT
  source 1..20: mol_type = other DNA
gggacactccatgcagtaag

SEQ ID NO: 10108 - DNA, 20 bp, synthetic construct
  misc_feature 1..20: note = Description of Artificial Sequence: Synthetic oligonucleotide
  misc_feature 1..20: note = Target: SCN10A; (-) strand; PAM type: NNNNGHTT; PAM sequence: ATAAGTTT
  source 1..20: mol_type = other DNA
cagagggaacatttccaaga

SEQ ID NO: 10109 - DNA, 20 bp, synthetic construct
  misc_feature 1..20: note = Description of Artificial Sequence: Synthetic oligonucleotide
  misc_feature 1..20: note = Target: SCN10A; (-) strand; PAM type: NNNNGHTT; PAM sequence: ATTTGCTT
  source 1..20: mol_type = other DNA
accctacgccctatacctgc

SEQ ID NO: 10110 - DNA, 20 bp, synthetic construct
  misc_feature 1..20: note = Description of Artificial Sequence: Synthetic oligonucleotide
  misc_feature 1..20: note = Target: SCN10A; (-) strand; PAM type: NNNNGHTT; PAM sequence: AGGAGCTT
  source 1..20: mol_type = other DNA
aaagaagagaagatcacagt

SEQ ID NO: 10111 - DNA, 20 bp, synthetic construct
  misc_feature 1..20: note = Description of Artificial Sequence: Synthetic oligonucleotide
  misc_feature 1..20: note = Target: SCN10A; (-) strand; PAM type: NNNNGHTT; PAM sequence: AGAAGTTT
  source 1..20: mol_type = other DNA
tgagctccatagaggtcagg

SEQ ID NO: 10112 - DNA, 20 bp, synthetic construct
  misc_feature 1..20: note = Description of Artificial Sequence: Synthetic oligonucleotide
  misc_feature 1..20: note = Target: SCN10A; (-) strand; PAM type: NNNNGHTT; PAM sequence: AGGGGTTT
  source 1..20: mol_type = other DNA
ggcaaagcttcaaagcaaga

SEQ ID NO: 10113 - DNA, 20 bp, synthetic construct
  misc_feature 1..20: note = Description of Artificial Sequence: Synthetic oligonucleotide
  misc_feature 1..20: note = Target: SCN10A; (-) strand; PAM type: NNNNGHTT; PAM sequence: CAAAGCTT
  source 1..20: mol_type = other DNA
gaagtgacaaaactaggtgg

SEQ ID NO: 10114 - DNA, 20 bp, synthetic construct
  misc_feature 1..20: note = Description of Artificial Sequence: Synthetic oligonucleotide
  misc_feature 1..20: note = Target: SCN10A; (-) strand; PAM type: NNNNGHTT; PAM sequence: AAGAGTTT
  source 1..20: mol_type = other DNA
attactgaggcagagggacc

SEQ ID NO: 10115 - DNA, 20 bp, synthetic construct
  misc_feature 1..20: note = Description of Artificial Sequence: Synthetic oligonucleotide
  misc_feature 1..20: note = Target: SCN10A; (-) strand; PAM type: NNNNGHTT; PAM sequence: TAGAGATT
  source 1..20: mol_type = other DNA
gttaggagaaactaggtcat

SEQ ID NO: 10116 - DNA, 20 bp, synthetic construct
  misc_feature 1..20: note = Description of Artificial Sequence: Synthetic oligonucleotide
  misc_feature 1..20: note = Target: SCN10A; (-) strand; PAM type: NNNNGHTT; PAM sequence: TTCTGCTT
  source 1..20: mol_type = other DNA
agatgtaagtttctgaaata

SEQ ID NO: 10117 - DNA, 20 bp, synthetic construct
  misc_feature 1..20: note = Description of Artificial Sequence: Synthetic oligonucleotide
  misc_feature 1..20: note = Target: SCN10A; (-) strand; PAM type: NNNNGHTT; PAM sequence: GTAAGTTT
  source 1..20: mol_type = other DNA
gatggtagctggagggagat

SEQ ID NO: 10118 - DNA, 20 bp, synthetic construct
  misc_feature 1..20: note = Description of Artificial Sequence: Synthetic oligonucleotide
  misc_feature 1..20: note = Target: SCN10A; (-) strand; PAM type: NNNNGHTT; PAM sequence: TTTTGCTT
  source 1..20: mol_type = other DNA
tacacaactctttcaagaaa

SEQ ID NO: 10119 - DNA, 20 bp, synthetic construct
  misc_feature 1..20: note = Description of Artificial Sequence: Synthetic oligonucleotide
  misc_feature 1..20: note = Target: SCN10A; (-) strand; PAM type: NNNNGHTT; PAM sequence: CACTGATT
  source 1..20: mol_type = other DNA
gctgaggagtgaatgaggga

SEQ ID NO: 10120 - DNA, 20 bp, synthetic construct
  misc_feature 1..20: note = Description of Artificial Sequence: Synthetic oligonucleotide
  misc_feature 1..20: note = Target: SCN10A; (-) strand; PAM type: NNNNGHTT; PAM sequence: TACAGTTT
  source 1..20: mol_type = other DNA
acagacaaagttcctactct

SEQ ID NO: 10121 - DNA, 20 bp, synthetic construct
  misc_feature 1..20: note = Description of Artificial Sequence: Synthetic oligonucleotide
  misc_feature 1..20: note = Target: SCN10A; (-) strand; PAM type: NNNNGHTT; PAM sequence: AGAGGCTT
  source 1..20: mol_type = other DNA
tccctcatagccactcatgc

SEQ ID NO: 10122 - DNA, 20 bp, synthetic construct
  misc_feature 1..20: note = Description of Artificial Sequence: Synthetic oligonucleotide
  misc_feature 1..20: note = Target: SCN10A; (-) strand; PAM type: NNNNGHTT; PAM sequence: CTCTGCTT
  source 1..20: mol_type = other DNA
cctcatcacagcacttcccc

SEQ ID NO: 10123 - DNA, 20 bp, synthetic construct
  misc_feature 1..20: note = Description of Artificial Sequence: Synthetic oligonucleotide
  misc_feature 1..20: note = Target: SCN10A; (-) strand; PAM type: NNNNGHTT; PAM sequence: GTCTGATT
  source 1..20: mol_type = other DNA
catgagcaaaggccactttg

SEQ ID NO: 10124 - DNA, 20 bp, synthetic construct
  misc_feature 1..20: note = Description of Artificial Sequence: Synthetic oligonucleotide
  misc_feature 1..20: note = Target: SCN10A; (-) strand; PAM type: NNNNGHTT; PAM sequence: AAGGGATT
  source 1..20: mol_type = other DNA
cattttcagtgatgaaatgg

SEQ ID NO: 10125 - DNA, 20 bp, synthetic construct
  misc_feature 1..20: note = Description of Artificial Sequence: Synthetic oligonucleotide
  misc_feature 1..20: note = Target: SCN10A; (-) strand; PAM type: NNNNGHTT; PAM sequence: CTCTGTTT
  source 1..20: mol_type = other DNA
cttaacgatgccgttgcctg

SEQ ID NO: 10126 - DNA, 20 bp, synthetic construct
  misc_feature 1..20: note = Description of Artificial Sequence: Synthetic oligonucleotide
  misc_feature 1..20: note = Target: SCN10A; (-) strand; PAM type: NNNNGHTT; PAM sequence: TAAGGATT
  source 1..20: mol_type = other DNA
gtttcttccataggaaaagt

SEQ ID NO: 10127 - DNA, 20 bp, synthetic construct
  misc_feature 1..20: note = Description of Artificial Sequence: Synthetic oligonucleotide
  misc_feature 1..20: note = Target: SCN10A; (-) strand; PAM type: NNNNGHTT; PAM sequence: TCTTGTTT
  source 1..20: mol_type = other DNA
gatgatgctcaggctctaaa

SEQ ID NO: 10128 - DNA, 20 bp, synthetic construct
  misc_feature 1..20: note = Description of Artificial Sequence: Synthetic oligonucleotide
  misc_feature 1..20: note = Target: SCN10A; (-) strand; PAM type: NNNNGHTT; PAM sequence: CAGAGCTT
  source 1..20: mol_type = other DNA
gcatgggtgccatttcatga

SEQ ID NO: 10129 - DNA, 20 bp, synthetic construct
  misc_feature 1..20: note = Description of Artificial Sequence: Synthetic oligonucleotide
  misc_feature 1..20: note = Target: SCN10A; (-) strand; PAM type: NNNNGHTT; PAM sequence: ACAGGATT
  source 1..20: mol_type = other DNA
cataccagcaaagcactgac

SEQ ID NO: 10130 - DNA, 20 bp, synthetic construct
  misc_feature 1..20: note = Description of Artificial Sequence: Synthetic oligonucleotide
  misc_feature 1..20: note = Target: SCN10A; (-) strand; PAM type: NNNNGHTT; PAM sequence: GCCAGATT
  source 1..20: mol_type = other DNA
ccaggcccagcttgcttttg

SEQ ID NO: 10131 - DNA, 20 bp, synthetic construct
  misc_feature 1..20: note = Description of Artificial Sequence: Synthetic oligonucleotide
  misc_feature 1..20: note = Target: SCN10A; (-) strand; PAM type: NNNNGHTT; PAM sequence: GCTTGCTT
  source 1..20: mol_type = other DNA
gacccttcttcccaggccca

SEQ ID NO: 10132 - DNA, 20 bp, synthetic construct
  misc_feature 1..20: note = Description of Artificial Sequence: Synthetic oligonucleotide
  misc_feature 1..20: note = Target: SCN10A; (-) strand; PAM type: NNNNGHTT; PAM sequence: CCCAGCTT
  source 1..20: mol_type = other DNA
ctaagacccttcttcccagg

SEQ ID NO: 10133 - DNA, 20 bp, synthetic construct
  misc_feature 1..20: note = Description of Artificial Sequence: Synthetic oligonucleotide
  misc_feature 1..20: note = Target: SCN10A; (-) strand; PAM type: NNNNGHTT; PAM sequence: AGTGGATT
  source 1..20: mol_type = other DNA
catcctttgaatggaagaag

SEQ ID NO: 10134 - DNA, 20 bp, synthetic construct
  misc_feature 1..20: note = Description of Artificial Sequence: Synthetic oligonucleotide
  misc_feature 1..20: note = Target: SCN10A; (-) strand; PAM type: NNNNGHTT; PAM sequence: CTGAGATT
  source 1..20: mol_type = other DNA
cctcataaccaattctgttc

SEQ ID NO: 10135 - DNA, 20 bp, synthetic construct
  misc_feature 1..20: note = Description of Artificial Sequence: Synthetic oligonucleotide
  misc_feature 1..20: note = Target: SCN10A; (-) strand; PAM type: NNNNGHTT; PAM sequence: GAAAGCTT
  source 1..20: mol_type = other DNA
caaccccataggctgccaaa

SEQ ID NO: 10136 - DNA, 20 bp, synthetic construct
  misc_feature 1..20: note = Description of Artificial Sequence: Synthetic oligonucleotide
  misc_feature 1..20: note = Target: SCN10A; (-) strand; PAM type: NNNNGHTT; PAM sequence: CCCAGCTT
  source 1..20: mol_type = other DNA
actcaatctctctttgacat

SEQ ID NO: 10137 - DNA, 20 bp, synthetic construct
  misc_feature 1..20: note = Description of Artificial Sequence: Synthetic oligonucleotide
  misc_feature 1..20: note = Target: SCN10A; (-) strand; PAM type: NNNNGHTT; PAM sequence: GAAAGTTT
  source 1..20: mol_type = other DNA
acaacccttggcaaaaacat

SEQ ID NO: 10138 - DNA, 20 bp, synthetic construct
  misc_feature 1..20: note = Description of Artificial Sequence: Synthetic oligonucleotide
  misc_feature 1..20: note = Target: SCN10A; (-) strand; PAM type: NNNNGHTT; PAM sequence: GTAAGATT
  source 1..20: mol_type = other DNA
ggcctttacttgtggctgga

SEQ ID NO: 10139 - DNA, 20 bp, synthetic construct
  misc_feature 1..20: note = Description of Artificial Sequence: Synthetic oligonucleotide
  misc_feature 1..20: note = Target: SCN10A; (-) strand; PAM type: NNNNGHTT; PAM sequence: ACTGGATT
  source 1..20: mol_type = other DNA
tcacccatacaatcaagata

SEQ ID NO: 10140 - DNA, 20 bp, synthetic construct
  misc_feature 1..20: note = Description of Artificial Sequence: Synthetic oligonucleotide
  misc_feature 1..20: note = Target: SCN10A; (-) strand; PAM type: NNNNGHTT; PAM sequence: CACAGCTT
  source 1..20: mol_type = other DNA
ggttcagacctctgtagggg

SEQ ID NO: 10141 - DNA, 20 bp, synthetic construct
  misc_feature 1..20: note = Description of Artificial Sequence: Synthetic oligonucleotide
  misc_feature 1..20: note = Target: SCN10A; (-) strand; PAM type: NNNNGHTT; PAM sequence: TCTAGATT
  source 1..20: mol_type = other DNA
ggtcatgaatttattactag

SEQ ID NO: 10142 - DNA, 20 bp, synthetic construct
  misc_feature 1..20: note = Description of Artificial Sequence: Synthetic oligonucleotide
  misc_feature 1..20: note = Target: SCN10A; (-) strand; PAM type: NNNNGHTT; PAM sequence: ATAGGATT
  source 1..20: mol_type = other DNA
agatttttttaaatcaaggt

SEQ ID NO: 10143 - DNA, 20 bp, synthetic construct
  misc_feature 1..20: note = Description of Artificial Sequence: Synthetic oligonucleotide
  misc_feature 1..20: note = Target: SCN10A; (-) strand; PAM type: NNNNGHTT; PAM sequence: ATTAGATT
  source 1..20: mol_type = other DNA
tgcattctgttagccaagct

SEQ ID NO: 10144 - DNA, 20 bp, synthetic construct
  misc_feature 1..20: note = Description of Artificial Sequence: Synthetic oligonucleotide
  misc_feature 1..20: note = Target: SCN10A; (-) strand; PAM type: NNNNGHTT; PAM sequence: ACAGGTTT
  source 1..20: mol_type = other DNA
acttttttgggaatggatga

SEQ ID NO: 10145 - DNA, 20 bp, synthetic construct
  misc_feature 1..20: note = Description of Artificial Sequence: Synthetic oligonucleotide
  misc_feature 1..20: note = Target: SCN10A; (-) strand; PAM type: NNNNGHTT; PAM sequence: CATGGCTT
  source 1..20: mol_type = other DNA
ttcataaagatctcaagaga

SEQ ID NO: 10146 - DNA, 20 bp, synthetic construct
  misc_feature 1..20: note = Description of Artificial Sequence: Synthetic oligonucleotide
  misc_feature 1..20: note = Target: SCN10A; (-) strand; PAM type: NNNNGHTT; PAM sequence: TCTAGTTT
  source 1..20: mol_type = other DNA
ggcaaaaattagggccagac

SEQ ID NO: 10147 - DNA, 20 bp, synthetic construct
  misc_feature 1..20: note = Description of Artificial Sequence: Synthetic oligonucleotide
  misc_feature 1..20: note = Target: SCN10A; (-) strand; PAM type: NNNNGHTT; PAM sequence: TAAAGATT
  source 1..20: mol_type = other DNA
aaagttatcccactcgagtt

SEQ ID NO: 10148 - DNA, 20 bp, synthetic construct
  misc_feature 1..20: note = Description of Artificial Sequence: Synthetic oligonucleotide
  misc_feature 1..20: note = Target: SCN10A; (-) strand; PAM type: NNNNGHTT; PAM sequence: TCGAGTTT
  source 1..20: mol_type = other DNA
ggaaccaaaagttatcccac

SEQ ID NO: 10149 - DNA, 20 bp, synthetic construct
  misc_feature 1..20: note = Description of Artificial Sequence: Synthetic oligonucleotide
  misc_feature 1..20: note = Target: SCN10A; (-) strand; PAM type: NNNNGHTT; PAM sequence: CAGGGATT
  source 1..20: mol_type = other DNA
cagtaagggtagttagaacc

SEQ ID NO: 10150 - DNA, 20 bp, synthetic construct
  misc_feature 1..20: note = Description of Artificial Sequence: Synthetic oligonucleotide
  misc_feature 1..20: note = Target: SCN10A; (-) strand; PAM type: NNNNGHTT; PAM sequence: ACAGGATT
  source 1..20: mol_type = other DNA
aacagttttagagttcaagt

SEQ ID NO: 10151 - DNA, 20 bp, synthetic construct
  misc_feature 1..20: note = Description of Artificial Sequence: Synthetic oligonucleotide
  misc_feature 1..20: note = Target: SCN10A; (-) strand; PAM type: NNNNGHTT; PAM sequence: AACAGTTT
  source 1..20: mol_type = other DNA
gggaagcactgagtttctcc

SEQ ID NO: 10152 - DNA, 20 bp, synthetic construct
  misc_feature 1..20: note = Description of Artificial Sequence: Synthetic oligonucleotide
  misc_feature 1..20: note = Target: SCN10A; (-) strand; PAM type: NNNNGHTT; PAM sequence: CTGAGTTT
  source 1..20: mol_type = other DNA
tgaatctgttgggggaagca

SEQ ID NO: 10153 - DNA, 20 bp, synthetic construct
  misc_feature 1..20: note = Description of Artificial Sequence: Synthetic oligonucleotide
  misc_feature 1..20: note = Target: SCN10A; (-) strand; PAM type: NNNNGHTT; PAM sequence: TGCTGTTT
  source 1..20: mol_type = other DNA
caggcaggggcctgagggag

SEQ ID NO: 10154 - DNA, 20 bp, synthetic construct
  misc_feature 1..20: note = Description of Artificial Sequence: Synthetic oligonucleotide
  misc_feature 1..20: note = Target: SCN10A; (-) strand; PAM type: NNNNGHTT; PAM sequence: AGAGGTTT
  source 1..20: mol_type = other DNA
cacggcccctggtgagcccc

SEQ ID NO: 10155 - DNA, 20 bp, synthetic construct
  misc_feature 1..20: note = Description of Artificial Sequence: Synthetic oligonucleotide
  misc_feature 1..20: note = Target: SCN10A; (-) strand; PAM type: NNNNGHTT; PAM sequence: TCTTGCTT
  source 1..20: mol_type = other DNA
tggtatccgtagggggttcc

SEQ ID NO: 10156 - DNA, 20 bp, synthetic construct
  misc_feature 1..20: note = Description of Artificial Sequence: Synthetic oligonucleotide
  misc_feature 1..20: note = Target: SCN10A; (-) strand; PAM type: NNNNGHTT; PAM sequence: TTCTGATT
  source 1..20: mol_type = other DNA
gatcctttctctcctgcctg

SEQ ID NO: 10157 - DNA, 20 bp, synthetic construct
  misc_feature 1..20: note = Description of Artificial Sequence: Synthetic oligonucleotide
  misc_feature 1..20: note = Target: SCN10A; (-) strand; PAM type: NNNNGHTT; PAM sequence: CTTGGTTT
  source 1..20: mol_type = other DNA
agacactccttgatgctggg

SEQ ID NO: 10158 - DNA, 20 bp, synthetic construct
  misc_feature 1..20: note = Description of Artificial Sequence: Synthetic oligonucleotide
  misc_feature 1..20: note = Target: SCN10A; (-) strand; PAM type: NNNNGHTT; PAM sequence: CTGGGCTT
  source 1..20: mol_type = other DNA
tggcaagacactccttgatg

SEQ ID NO: 10159 - DNA, 20 bp, synthetic construct
  misc_feature 1..20: note = Description of Artificial Sequence: Synthetic oligonucleotide
  misc_feature 1..20: note = Target: SCN10A; (-) strand; PAM type: NNNNGHTT; PAM sequence: CTTTGCTT
  source 1..20: mol_type = other DNA
ccctggagaacagaaactgg

SEQ ID NO: 10160 - DNA, 20 bp, synthetic construct
  misc_feature 1..20: note = Description of Artificial Sequence: Synthetic oligonucleotide
  misc_feature 1..20: note = Target: SCN10A; (-) strand; PAM type: NNNNGHTT; PAM sequence: ACTGGCTT
  source 1..20: mol_type = other DNA
tggatccctggagaacagaa

SEQ ID NO: 10161 - DNA, 20 bp, synthetic construct
  misc_feature 1..20: note = Description of Artificial Sequence: Synthetic oligonucleotide
  misc_feature 1..20: note = Target: SCN10A; (-) strand; PAM type: NNNNGHTT; PAM sequence: TCCTGTTT
  source 1..20: mol_type = other DNA
acatgtaccttctccttgag

SEQ ID NO: 10162 - DNA, 20 bp, synthetic construct
  misc_feature 1..20: note = Description of Artificial Sequence: Synthetic oligonucleotide
  misc_feature 1..20: note = Target: SCN10A; (-) strand; PAM type: NNNNGHTT; PAM sequence: CTCAGATT
  source 1..20: mol_type = other DNA
tgaacaggctagatccaagg

SEQ ID NO: 10163 - DNA, 20 bp, synthetic construct
  misc_feature 1..20: note = Description of Artificial Sequence: Synthetic oligonucleotide
  misc_feature 1..20: note = Target: SCN10A; (-) strand; PAM type: NNNNGHTT; PAM sequence: CTTTGCTT
  source 1..20: mol_type = other DNA
gcttctgtccctcccagagt

SEQ ID NO: 10164 - DNA, 20 bp, synthetic construct
  misc_feature 1..20: note = Description of Artificial Sequence: Synthetic oligonucleotide
  misc_feature 1..20: note = Target: SCN10A; (-) strand; PAM type: NNNNGHTT; PAM sequence: GAGGGCTT
  source 1..20: mol_type = other DNA
ctcctctccagaaaagattt

SEQ ID NO: 10165 - DNA, 20 bp, synthetic construct
  misc_feature 1..20: note = Description of Artificial Sequence: Synthetic oligonucleotide
  misc_feature 1..20: note = Target: SCN10A; (-) strand; PAM type: NNNNGHTT; PAM sequence: AAAAGATT
  source 1..20: mol_type = other DNA
cctcatctcctcctctccag

SEQ ID NO: 10166 - DNA, 20 bp, synthetic construct
  misc_feature 1..20: note = Description of Artificial Sequence: Synthetic oligonucleotide
  misc_feature 1..20: note = Target: SCN10A; (-) strand; PAM type: NNNNGHTT; PAM sequence: TGCAGTTT
  source 1..20: mol_type = other DNA
gaggaaaacatcttcgttgg

SEQ ID NO: 10167 - DNA, 20 bp, synthetic construct
  misc_feature 1..20: note = Description of Artificial Sequence: Synthetic oligonucleotide
  misc_feature 1..20: note = Target: SCN10A; (-) strand; PAM type: NNNNGHTT; PAM sequence: GAGAGTTT
  source 1..20: mol_type = other DNA
tatgtcaggaagctaaaggt

SEQ ID NO: 10168 - DNA, 20 bp, synthetic construct
  misc_feature 1..20: note = Description of Artificial Sequence: Synthetic oligonucleotide
  misc_feature 1..20: note = Target: SCN10A; (-) strand; PAM type: NNNNGHTT; PAM sequence: GGTGGCTT
  source 1..20: mol_type = other DNA
ataaacatgttattaaaata

SEQ ID NO: 10169 - DNA, 20 bp, synthetic construct
  misc_feature 1..20: note = Description of Artificial Sequence: Synthetic oligonucleotide
  misc_feature 1..20: note = Target: SCN10A; (-) strand; PAM type: NNNNGHTT; PAM sequence: CCCAGTTT
  source 1..20: mol_type = other DNA
tcaaattccacagatctcag

SEQ ID NO: 10170 - DNA, 20 bp, synthetic construct
  misc_feature 1..20: note = Description of Artificial Sequence: Synthetic oligonucleotide
  misc_feature 1..20: note = Target: SCN10A; (-) strand; PAM type: NNNNGHTT; PAM sequence: AACAGATT
  source 1..20: mol_type = other DNA
tgagaaaactgaggtcaaga

SEQ ID NO: 10171 - DNA, 20 bp, synthetic construct
  misc_feature 1..20: note = Description of Artificial Sequence: Synthetic oligonucleotide
  misc_feature 1..20: note = Target: SCN10A; (-) strand; PAM type: NNNNGHTT; PAM sequence: TTGAGATT
  source 1..20: mol_type = other DNA
atttagtaccctggggaggt

SEQ ID NO: 10172 - DNA, 20 bp, synthetic construct
  misc_feature 1..20: note = Description of Artificial Sequence: Synthetic oligonucleotide
  misc_feature 1..20: note = Target: SCN10A; (-) strand; PAM type: NNNNGHTT; PAM sequence: GGAGGTTT
  source 1..20: mol_type = other DNA
agtgctatttagtaccctgg

SEQ ID NO: 10173 - DNA, 20 bp, synthetic construct
  misc_feature 1..20: note = Description of Artificial Sequence: Synthetic oligonucleotide
  misc_feature 1..20: note = Target: SCN10A; (-) strand; PAM type: NNNNGHTT; PAM sequence: TGCAGTTT
  source 1..20: mol_type = other DNA
gcataagacaactttggtgg

SEQ ID NO: 10174 - DNA, 20 bp, synthetic construct
  misc_feature 1..20: note = Description of Artificial Sequence: Synthetic oligonucleotide
  misc_feature 1..20: note = Target: SCN10A; (-) strand; PAM type: NNNNGHTT; PAM sequence: TCTGGATT
  source 1..20: mol_type = other DNA
ggggctaataatacctactc

SEQ ID NO: 10175 - DNA, 20 bp, synthetic construct
  misc_feature 1..20: note = Description of Artificial Sequence: Synthetic oligonucleotide
  misc_feature 1..20: note = Target: SCN10A; (-) strand; PAM type: NNNNGHTT; PAM sequence: CTCAGTTT
  source 1..20: mol_type = other DNA
tattttaaacccctctgagt

SEQ ID NO: 10176 - DNA, 20 bp, synthetic construct
  misc_feature 1..20: note = Description of Artificial Sequence: Synthetic oligonucleotide
  misc_feature 1..20: note = Target: SCN10A; (-) strand; PAM type: NNNNGHTT; PAM sequence: CTGGGTTT
  source 1..20: mol_type = other DNA
gtcacagagtacatgcaaac

SEQ ID NO: 10177 - DNA, 20 bp, synthetic construct
  misc_feature 1..20: note = Description of Artificial Sequence: Synthetic oligonucleotide
  misc_feature 1..20: note = Target: SCN10A; (-) strand; PAM type: NNNNGHTT; PAM sequence: TCTAGATT
  source 1..20: mol_type = other DNA
ctgaggtagataggcgctgt

SEQ ID NO: 10178 - DNA, 20 bp, synthetic construct
  misc_feature 1..20: note = Description of Artificial Sequence: Synthetic oligonucleotide
  misc_feature 1..20: note = Target: SCN10A; (-) strand; PAM type: NNNNGHTT; PAM sequence: TCATGTTT
  source 1..20: mol_type = other DNA
atcgaatcccagataacctc

SEQ ID NO: 10179 - DNA, 20 bp, synthetic construct
  misc_feature 1..20: note = Description of Artificial Sequence: Synthetic oligonucleotide
  misc_feature 1..20: note = Target: SCN10A; (-) strand; PAM type: NNNNGHTT; PAM sequence: CTCTGATT
  source 1..20: mol_type = other DNA
tgtgcctccaagggtgccga

SEQ ID NO: 10180 - DNA, 20 bp, synthetic construct
  misc_feature 1..20: note = Description of Artificial Sequence: Synthetic oligonucleotide
  misc_feature 1..20: note = Target: SCN10A; (-) strand; PAM type: NNNNGHTT; PAM sequence: GAAGGCTT
  source 1..20: mol_type = other DNA
accctccttgggatggggag

SEQ ID NO: 10181 - DNA, 20 bp, synthetic construct
  misc_feature 1..20: note = Description of Artificial Sequence: Synthetic oligonucleotide
  misc_feature 1..20: note = Target: SCN10A; (-) strand; PAM type: NNNNGHTT; PAM sequence: TCAGGATT
  source 1..20: mol_type = other DNA
tgccccactaacatcctcac

SEQ ID NO: 10182 - DNA, 20 bp, synthetic construct
  misc_feature 1..20: note = Description of Artificial Sequence: Synthetic oligonucleotide
  misc_feature 1..20: note = Target: SCN10A; (-) strand; PAM type: NNNNGHTT; PAM sequence: CTGTGATT
  source 1..20: mol_type = other DNA
tatcagtgctaacccttgcc

SEQ ID NO: 10183 - DNA, 20 bp, synthetic construct
  misc_feature 1..20: note = Description of Artificial Sequence: Synthetic oligonucleotide
  misc_feature 1..20: note = Target: SCN10A; (-) strand; PAM type: NNNNGHTT; PAM sequence: TCTGGTTT
  source 1..20: mol_type = other DNA
ataagtggtgctcaggagtt

SEQ ID NO: 10184 - DNA, 20 bp, synthetic construct
  misc_feature 1..20: note = Description of Artificial Sequence: Synthetic oligonucleotide
  misc_feature 1..20: note = Target: SCN10A; (-) strand; PAM type: NNNNGHTT; PAM sequence: AGGAGTTT
  source 1..20: mol_type = other DNA
aaaaaagataagtggtgctc

SEQ ID NO: 10185 - DNA, 20 bp, synthetic construct
  misc_feature 1..20: note = Description of Artificial Sequence: Synthetic oligonucleotide
  misc_feature 1..20: note = Target: SCN10A; (-) strand; PAM type: NNNNGHTT; PAM sequence: GGAGGCTT
  source 1..20: mol_type = other DNA
ttgtcatcttcatcattttt

SEQ ID NO: 10186 - DNA, 20 bp, synthetic construct
  misc_feature 1..20: note = Description of Artificial Sequence: Synthetic oligonucleotide
  misc_feature 1..20: note = Target: SCN10A; (-) strand; PAM type: NNNNGHTT; PAM sequence: CTTGGCTT
  source 1..20: mol_type = other DNA
acccaggtccatgtcttagg

SEQ ID NO: 10187 - DNA, 20 bp, synthetic construct
  misc_feature 1..20: note = Description of Artificial Sequence: Synthetic oligonucleotide
  misc_feature 1..20: note = Target: SCN10A; (-) strand; PAM type: NNNNGHTT; PAM sequence: TTAGGCTT
  source 1..20: mol_type = other DNA
cctgcacccaggtccatgtc

SEQ ID NO: 10188 - DNA, 20 bp, synthetic construct
  misc_feature 1..20: note = Description of Artificial Sequence: Synthetic oligonucleotide
  misc_feature 1..20: note = Target: SCN10A; (-) strand; PAM type: NNNNGHTT; PAM sequence: TCCTGCTT
  source 1..20: mol_type = other DNA
attcttccccactccctcat

SEQ ID NO: 10189 - DNA, 20 bp, synthetic construct
  misc_feature 1..20: note = Description of Artificial Sequence: Synthetic oligonucleotide
  misc_feature 1..20: note = Target: SCN10A; (-) strand; PAM type: NNNNGHTT; PAM sequence: TCCCGCTT
  source 1..20: mol_type = other DNA
ttcacaggctcttctcccat

SEQ ID NO: 10190 - DNA, 20 bp, synthetic construct
  misc_feature 1..20: note = Description of Artificial Sequence: Synthetic oligonucleotide
  misc_feature 1..20: note = Target: SCN10A; (-) strand; PAM type: NNNNGHTT; PAM sequence: CCCTGCTT
  source 1..20: mol_type = other DNA
ttcagttgcccacaatgatg

SEQ ID NO: 10191 - DNA, 20 bp, synthetic construct
  misc_feature 1..20: note = Description of Artificial Sequence: Synthetic oligonucleotide
  misc_feature 1..20: note = Target: SCN10A; (-) strand; PAM type: NNNNGHTT; PAM sequence: TTGCGCTT
  source 1..20: mol_type = other DNA
ctcagaggaccccagtagga

SEQ ID NO: 10192 - DNA, 20 bp, synthetic construct
  misc_feature 1..20: note = Description of Artificial Sequence: Synthetic oligonucleotide
  misc_feature 1..20: note = Target: SCN10A; (-) strand; PAM type: NNNNGHTT; PAM sequence: GTAGGATT
  source 1..20: mol_type = other DNA
cagttactcagaggacccca

SEQ ID NO: 10193 - DNA, 20 bp, synthetic construct
  misc_feature 1..20: note = Description of Artificial Sequence: Synthetic oligonucleotide
  misc_feature 1..20: note = Target: SCN10A; (-) strand; PAM type: NNNNGHTT; PAM sequence: TCCAGTTT
  source 1..20: mol_type = other DNA
gggagtctgaggataaatac

SEQ ID NO: 10194 - DNA, 20 bp, synthetic construct
  misc_feature 1..20: note = Description of Artificial Sequence: Synthetic oligonucleotide
  misc_feature 1..20: note = Target: SCN10A; (-) strand; PAM type: NNNNGHTT; PAM sequence: ATAAGTTT
  source 1..20: mol_type = other DNA
cctaggggcaacccttacca

SEQ ID NO: 10195 - DNA, 20 bp, synthetic construct
  misc_feature 1..20: note = Description of Artificial Sequence: Synthetic oligonucleotide
  misc_feature 1..20: note = Target: SCN10A; (-) strand; PAM type: NNNNGHTT; PAM sequence: CAGGGATT
  source 1..20: mol_type = other DNA
gcaacttctcccccaagtac

SEQ ID NO: 10196 - DNA, 20 bp, synthetic construct
  misc_feature 1..20: note = Description of Artificial Sequence: Synthetic oligonucleotide
  misc_feature 1..20: note = Target: SCN10A; (-) strand; PAM type: NNNNGHTT; PAM sequence: AGGAGCTT
  source 1..20: mol_type = other DNA
gtataaagactccagggctt

SEQ ID NO: 10197 - DNA, 20 bp, synthetic construct
  misc_feature 1..20: note = Description of Artificial Sequence: Synthetic oligonucleotide
  misc_feature 1..20: note = Target: SCN10A; (-) strand; PAM type: NNNNGHTT; PAM sequence: CAGGGCTT
  source 1..20: mol_type = other DNA
gattctctgtataaagactc

SEQ ID NO: 10198 - DNA, 20 bp, synthetic construct
  misc_feature 1..20: note = Description of Artificial Sequence: Synthetic oligonucleotide
  misc_feature 1..20: note = Target: SCN10A; (-) strand; PAM type: NNNNGHTT; PAM sequence: TTCTGATT
  source 1..20: mol_type = other DNA
atttcacctgcaggctgcac

SEQ ID NO: 10199 - DNA, 20 bp, synthetic construct
  misc_feature 1..20: note = Description of Artificial Sequence: Synthetic oligonucleotide
  misc_feature 1..20: note = Target: SCN10A; (-) strand; PAM type: NNNNGHTT; PAM sequence: TTCTGATT
  source 1..20: mol_type = other DNA
cacctcttcccttagcccac

SEQ ID NO: 10200 - DNA, 20 bp, synthetic construct
  misc_feature 1..20: note = Description of Artificial Sequence: Synthetic oligonucleotide
  misc_feature 1..20: note = Target: SCN10A; (-) strand; PAM type: NNNNGHTT; PAM sequence: TCCAGCTT
  source 1..20: mol_type = other DNA
ctgagattgcgtcactgcac

SEQ ID NO: 10201 - DNA, 20 bp, synthetic construct
  misc_feature 1..20: note = Description of Artificial Sequence: Synthetic oligonucleotide
  misc_feature 1..20: note = Target: SCN10A; (-) strand; PAM type: NNNNGHTT; PAM sequence: CTGAGATT
  source 1..20: mol_type = other DNA
gaggcagaagttgcagtgag

SEQ ID NO: 10202 - DNA, 20 bp, synthetic construct
  misc_feature 1..20: note = Description of Artificial Sequence: Synthetic oligonucleotide
  misc_feature 1..20: note = Target: SCN10A; (-) strand; PAM type: NNNNGHTT; PAM sequence: GGCGGCTT
  source 1..20: mol_type = other DNA
gaaagaaattagcagggcat

SEQ ID NO: 10203 - DNA, 20 bp, synthetic construct
  misc_feature 1..20: note = Description of Artificial Sequence: Synthetic oligonucleotide
  misc_feature 1..20: note = Target: SCN10A; (-) strand; PAM type: NNNNGHTT; PAM sequence: GGCAGATT
  source 1..20: mol_type = other DNA
cactttgggaggccgaggtg

SEQ ID NO: 10204 - DNA, 20 bp, synthetic construct
  misc_feature 1..20: note = Description of Artificial Sequence: Synthetic oligonucleotide
  misc_feature 1..20: note = Target: SCN10A; (-) strand; PAM type: NNNNGHTT; PAM sequence: CGAGGTTT
  source 1..20: mol_type = other DNA
tctacactccccaggcttct

SEQ ID NO: 10205 - DNA, 20 bp, synthetic construct
  misc_feature 1..20: note = Description of Artificial Sequence: Synthetic oligonucleotide
  misc_feature 1..20: note = Target: SCN10A; (-) strand; PAM type: NNNNGHTT; PAM sequence: CCAGGCTT
  source 1..20: mol_type = other DNA
ccccctttcatctacactcc

SEQ ID NO: 10206 - DNA, 20 bp, synthetic construct
  misc_feature 1..20: note = Description of Artificial Sequence: Synthetic oligonucleotide
  misc_feature 1..20: note = Target: SCN10A; (-) strand; PAM type: NNNNGHTT; PAM sequence: CGAGGCTT
  source 1..20: mol_type = other DNA
ctgttgagtgtttcagccac

SEQ ID NO: 10207 - DNA, 20 bp, synthetic construct
  misc_feature 1..20: note = Description of Artificial Sequence: Synthetic oligonucleotide
  misc_feature 1..20: note = Target: SCN10A; (-) strand; PAM type: NNNNGHTT; PAM sequence: GAGTGTTT
  source 1..20: mol_type = other DNA
tgtccagctggctctctgtt

SEQ ID NO: 10208 - DNA, 20 bp, synthetic construct
  misc_feature 1..20: note = Description of Artificial Sequence: Synthetic oligonucleotide
  misc_feature 1..20: note = Target: SCN10A; (-) strand; PAM type: NNNNGHTT; PAM sequence: TGTTGATT
  source 1..20: mol_type = other DNA
atggacattatgtatgcagc

SEQ ID NO: 10209 - DNA, 20 bp, synthetic construct
  misc_feature 1..20: note = Description of Artificial Sequence: Synthetic oligonucleotide
  misc_feature 1..20: note = Target: SCN10A; (-) strand; PAM type: NNNNGHTT; PAM sequence: CATGGCTT
  source 1..20: mol_type = other DNA
ctcctctctcactgggccac

SEQ ID NO: 10210 - DNA, 20 bp, synthetic construct
  misc_feature 1..20: note = Description of Artificial Sequence: Synthetic oligonucleotide
  misc_feature 1..20: note = Target: SCN10A; (-) strand; PAM type: NNNNGHTT; PAM sequence: ATGAGATT
  source 1..20: mol_type = other DNA
ggattactttaaatcatcat

SEQ ID NO: 10211 - DNA, 20 bp, synthetic construct
  misc_feature 1..20: note = Description of Artificial Sequence: Synthetic oligonucleotide
  misc_feature 1..20: note = Target: SCN10A; (-) strand; PAM type: NNNNGHTT; PAM sequence: GTGGGATT
  source 1..20: mol_type = other DNA
ctattcttaaacagccacat

SEQ ID NO: 10212 - DNA, 20 bp, synthetic construct
  misc_feature 1..20: note = Description of Artificial Sequence: Synthetic oligonucleotide
  misc_feature 1..20: note = Target: SCN10A; (-) strand; PAM type: NNNNGHTT; PAM sequence: CCCAGTTT
  source 1..20: mol_type = other DNA
tgaacatgctggaaggcaca

SEQ ID NO: 10213 - DNA, 20 bp, synthetic construct
  misc_feature 1..20: note = Description of Artificial Sequence: Synthetic oligonucleotide
  misc_feature 1..20: note = Target: SCN10A; (-) strand; PAM type: NNNNGHTT; PAM sequence: CTGGGCTT
  source 1..20: mol_type = other DNA
cctgggagatacagtcagaa

SEQ ID NO: 10214 - DNA, 20 bp, synthetic construct
  misc_feature 1..20: note = Description of Artificial Sequence: Synthetic oligonucleotide
  misc_feature 1..20: note = Target: SCN10A; (-) strand; PAM type: NNNNGHTT; PAM sequence: ATGGGATT
  source 1..20: mol_type = other DNA
cataaagggatgggcctgcc

SEQ ID NO: 10215 - DNA, 20 bp, synthetic construct
  misc_feature 1..20: note = Description of Artificial Sequence: Synthetic oligonucleotide
  misc_feature 1..20: note = Target: SCN10A; (-) strand; PAM type: NNNNGHTT; PAM sequence: TCTTGCTT
  source 1..20: mol_type = other DNA
accatgagatcaaccatatc

SEQ ID NO: 10216 - DNA, 20 bp, synthetic construct
  misc_feature 1..20: note = Description of Artificial Sequence: Synthetic oligonucleotide
  misc_feature 1..20: note = Target: SCN10A; (-) strand; PAM type: NNNNGHTT; PAM sequence: GGCAGCTT
  source 1..20: mol_type = other DNA
gcaagattcaaaactccact

SEQ ID NO: 10217 - DNA, 20 bp, synthetic construct
  misc_feature 1..20: note = Description of Artificial Sequence: Synthetic oligonucleotide
  misc_feature 1..20: note = Target: SCN10A; (-) strand; PAM type: NNNNGHTT; PAM sequence: GCAAGATT
  source 1..20: mol_type = other DNA
tgtgaataacaagtctgact

SEQ ID NO: 10218 - DNA, 20 bp, synthetic construct
  misc_feature 1..20: note = Description of Artificial Sequence: Synthetic oligonucleotide
  misc_feature 1..20: note = Target: SCN10A; (-) strand; PAM type: NNNNGHTT; PAM sequence: TGTCGATT
  source 1..20: mol_type = other DNA
agagttttcccttgtacctt

SEQ ID NO: 10219 - DNA, 20 bp, synthetic construct
  misc_feature 1..20: note = Description of Artificial Sequence: Synthetic oligonucleotide
  misc_feature 1..20: note = Target: SCN10A; (-) strand; PAM type: NNNNGHTT; PAM sequence: GAGAGTTT
  source 1..20: mol_type = other DNA
gtgcatcaactataccgatg

SEQ ID NO: 10220 - DNA, 20 bp, synthetic construct
  misc_feature 1..20: note = Description of Artificial Sequence: Synthetic oligonucleotide
  misc_feature 1..20: note = Target: SCN10A; (-) strand; PAM type: NNNNGHTT; PAM sequence: GGAAGTTT
  source 1..20: mol_type = other DNA
gggtgtgaacctcttcgcag

SEQ ID NO: 10221 - DNA, 20 bp, synthetic construct
  misc_feature 1..20: note = Description of Artificial Sequence: Synthetic oligonucleotide
  misc_feature 1..20: note = Target: SCN10A; (-) strand; PAM type: NNNNGHTT; PAM sequence: TCTTGCTT
  source 1..20: mol_type = other DNA
tgcactaattaacccacttc

SEQ ID NO: 10222 - DNA, 20 bp, synthetic construct
  misc_feature 1..20: note = Description of Artificial Sequence: Synthetic oligonucleotide
  misc_feature 1..20: note = Target: SCN10A; (-) strand; PAM type: NNNNGHTT; PAM sequence: GTATGCTT
  source 1..20: mol_type = other DNA
cacacttctaaatgagtgca

SEQ ID NO: 10223 - DNA, 20 bp, synthetic construct
  misc_feature 1..20: note = Description of Artificial Sequence: Synthetic oligonucleotide
  misc_feature 1..20: note = Target: SCN10A; (-) strand; PAM type: NNNNGHTT; PAM sequence: TTGTGTTT
  source 1..20: mol_type = other DNA
aaattgtatttaaattgtgt

SEQ ID NO: 10224 - DNA, 20 bp, synthetic construct
  misc_feature 1..20: note = Description of Artificial Sequence: Synthetic oligonucleotide
  misc_feature 1..20: note = Target: SCN10A; (-) strand; PAM type: NNNNGHTT; PAM sequence: TTGTGTTT
  source 1..20: mol_type = other DNA
tactttaaattgtatttaaa

SEQ ID NO: 10225 - DNA, 20 bp, synthetic construct
  misc_feature 1..20: note = Description of Artificial Sequence: Synthetic oligonucleotide
  misc_feature 1..20: note = Target: SCN10A; (-) strand; PAM type: NNNNGHTT; PAM sequence: TTAGGTTT
  source 1..20: mol_type = other DNA
gctattttgtgaatatggat

SEQ ID NO: 10226 - DNA, 20 bp, synthetic construct
  misc_feature 1..20: note = Description of Artificial Sequence: Synthetic oligonucleotide
  misc_feature 1..20: note = Target: SCN10A; (-) strand; PAM type: NNNNGHTT; PAM sequence: TATGGATT
  source 1..20: mol_type = other DNA
caaataagctattttgtgaa

SEQ ID NO: 10227 - DNA, 20 bp, synthetic construct
  misc_feature 1..20: note = Description of Artificial Sequence: Synthetic oligonucleotide
  misc_feature 1..20: note = Target: SCN10A; (-) strand; PAM type: NNNNGHTT; PAM sequence: ATTTGCTT
  source 1..20: mol_type = other DNA
tttgtatctaatagattctc

SEQ ID NO: 10228 - DNA, 20 bp, synthetic construct
  misc_feature 1..20: note = Description of Artificial Sequence: Synthetic oligonucleotide
  misc_feature 1..20: note = Target: SCN10A; (-) strand; PAM type: NNNNGHTT; PAM sequence: AATAGATT
  source 1..20: mol_type = other DNA
atttattctattttgtatct

SEQ ID NO: 10229 - DNA, 20 bp, synthetic construct
  misc_feature 1..20: note = Description of Artificial Sequence: Synthetic oligonucleotide
  misc_feature 1..20: note = Target: SCN10A; (-) strand; PAM type: NNNNGHTT; PAM sequence: AATAGTTT
  source 1..20: mol_type = other DNA
cactaggacccgaagattga

SEQ ID NO: 10230 - DNA, 20 bp, synthetic construct
  misc_feature 1..20: note = Description of Artificial Sequence: Synthetic oligonucleotide
  misc_feature 1..20: note = Target: SCN10A; (-) strand; PAM type: NNNNGHTT; PAM sequence: CGAAGATT
  source 1..20: mol_type = other DNA
cctttacaaacactaggacc

SEQ ID NO: 10231 - DNA, 20 bp, synthetic construct
  misc_feature 1..20: note = Description of Artificial Sequence: Synthetic oligonucleotide
  misc_feature 1..20: note = Target: SCN10A; (-) strand; PAM type: NNNNGHTT; PAM sequence: GTGGGCTT
  source 1..20: mol_type = other DNA
tcatagcttcaaaaacaaaa

SEQ ID NO: 10232 - DNA, 20 bp, synthetic construct
  misc_feature 1..20: note = Description of Artificial Sequence: Synthetic oligonucleotide
  misc_feature 1..20: note = Target: SCN10A; (-) strand; PAM type: NNNNGHTT; PAM sequence: CATAGCTT
  source 1..20: mol_type = other DNA
cattggctggaagtagtcat

SEQ ID NO: 10233 - DNA, 20 bp, synthetic construct
  misc_feature 1..20: note = Description of Artificial Sequence: Synthetic oligonucleotide
  misc_feature 1..20: note = Target: SCN10A; (-) strand; PAM type: NNNNGHTT; PAM sequence: TTTTGCTT
  source 1..20: mol_type = other DNA
ctccccagcagaaagtaagg

SEQ ID NO: 10234 - DNA, 20 bp, synthetic construct
  misc_feature 1..20: note = Description of Artificial Sequence: Synthetic oligonucleotide
  misc_feature 1..20: note = Target: SCN10A; (-) strand; PAM type: NNNNGHTT; PAM sequence: TAAGGTTT
  source 1..20: mol_type = other DNA
aatggctccccagcagaaag

SEQ ID NO: 10235 - DNA, 20 bp, synthetic construct
  misc_feature 1..20: note = Description of Artificial Sequence: Synthetic oligonucleotide
  misc_feature 1..20: note = Target: SCN10A; (-) strand; PAM type: NNNNGHTT; PAM sequence: TGCTGATT
  source 1..20: mol_type = other DNA
cagagccttgtcttagagat

SEQ ID NO: 10236 - DNA, 20 bp, synthetic construct
  misc_feature 1..20: note = Description of Artificial Sequence: Synthetic oligonucleotide
  misc_feature 1..20: note = Target: SCN10A; (-) strand; PAM type: NNNNGHTT; PAM sequence: TAGAGATT
  source 1..20: mol_type = other DNA
tcacagccagagccttgtct

SEQ ID NO: 10237 - DNA, 20 bp, synthetic construct
  misc_feature 1..20: note = Description of Artificial Sequence: Synthetic oligonucleotide
  misc_feature 1..20: note = Target: SCN10A; (-) strand; PAM type: NNNNGHTT; PAM sequence: GAATGCTT
  source 1..20: mol_type = other DNA
acctcagctgccacccactg

SEQ ID NO: 10238 - DNA, 20 bp, synthetic construct
  misc_feature 1..20: note = Description of Artificial Sequence: Synthetic oligonucleotide
  misc_feature 1..20: note = Target: SCN10A; (-) strand; PAM type: NNNNGHTT; PAM sequence: GCAGGTTT
  source 1..20: mol_type = other DNA
acaaaaaacttctctggtct

SEQ ID NO: 10239 - DNA, 20 bp, synthetic construct
  misc_feature 1..20: note = Description of Artificial Sequence: Synthetic oligonucleotide
  misc_feature 1..20: note = Target: SCN10A; (-) strand; PAM type: NNNNGHTT; PAM sequence: CCGAGATT
  source 1..20: mol_type = other DNA
cgaggtgtggtggtagtgag

SEQ ID NO: 10240 - DNA, 20 bp, synthetic construct
  misc_feature 1..20: note = Description of Artificial Sequence: Synthetic oligonucleotide
  misc_feature 1..20: note = Target: SCN10A; (-) strand; PAM type: NNNNGHTT; PAM sequence: TCTCGATT
  source 1..20: mol_type = other DNA
tgcggccactgcgggctctt

SEQ ID NO: 10241 - DNA, 20 bp, synthetic construct
  misc_feature 1..20: note = Description of Artificial Sequence: Synthetic oligonucleotide
  misc_feature 1..20: note = Target: SCN10A; (-) strand; PAM type: NNNNGHTT; PAM sequence: CGAAGATT
  source 1..20: mol_type = other DNA
ctcactgataagtctcacag

SEQ ID NO: 10242 - DNA, 20 bp, synthetic construct
  misc_feature 1..20: note = Description of Artificial Sequence: Synthetic oligonucleotide
  misc_feature 1..20: note = Target: SCN10A; (-) strand; PAM type: NNNNGHTT; PAM sequence: TGATGTTT
  source 1..20: mol_type = other DNA
gcctttctggaaacctagag

SEQ ID NO: 10243 - DNA, 20 bp, synthetic construct
  misc_feature 1..20: note = Description of Artificial Sequence: Synthetic oligonucleotide
  misc_feature 1..20: note = Target: SCN10A; (-) strand; PAM type: NNNNGHTT; PAM sequence: GATGGCTT
  source 1..20: mol_type = other DNA
aataaggtgggagctaggat

SEQ ID NO: 10244 - DNA, 20 bp, synthetic construct
  misc_feature 1..20: note = Description of Artificial Sequence: Synthetic oligonucleotide
  misc_feature 1..20: note = Target: SCN10A; (-) strand; PAM type: NNNNGHTT; PAM sequence: GATTGTTT
  source 1..20: mol_type = other DNA
gactgagtttttcttgccca

SEQ ID NO: 10245 - DNA, 20 bp, synthetic construct
  misc_feature 1..20: note = Description of Artificial Sequence: Synthetic oligonucleotide
  misc_feature 1..20: note = Target: SCN10A; (-) strand; PAM type: NNNNGHTT; PAM sequence: CCCAGATT
  source 1..20: mol_type = other DNA
tagagactgagtttttcttg

SEQ ID NO: 10246 - DNA, 20 bp, synthetic construct
  misc_feature 1..20: note = Description of Artificial Sequence: Synthetic oligonucleotide
  misc_feature 1..20: note = Target: SCN10A; (-) strand; PAM type: NNNNGHTT; PAM sequence: CTGAGTTT
  source 1..20: mol_type = other DNA
gaggttggtgatgttagaga

SEQ ID NO: 10247 - DNA, 20 bp, synthetic construct
  misc_feature 1..20: note = Description of Artificial Sequence: Synthetic oligonucleotide
  misc_feature 1..20: note = Target: SCN10A; (-) strand; PAM type: NNNNGHTT; PAM sequence: GGAAGCTT
  source 1..20: mol_type = other DNA
aagagttgatttaatacact

SEQ ID NO: 10248 - DNA, 20 bp, synthetic construct
  misc_feature 1..20: note = Description of Artificial Sequence: Synthetic oligonucleotide
  misc_feature 1..20: note = Target: SCN10A; (-) strand; PAM type: NNNNGHTT; PAM sequence: AGTTGATT
  source 1..20: mol_type = other DNA
cccctagaaggaaaaggaag

SEQ ID NO: 10249 - DNA, 20 bp, synthetic construct
  misc_feature 1..20: note = Description of Artificial Sequence: Synthetic oligonucleotide
  misc_feature 1..20: note = Target: SCN10A; (-) strand; PAM type: NNNNGHTT; PAM sequence: ATCAGTTT
  source 1..20: mol_type = other DNA
atgtctccaagtctctgaaa

SEQ ID NO: 10250 - DNA, 20 bp, synthetic construct
  misc_feature 1..20: note = Description of Artificial Sequence: Synthetic oligonucleotide
  misc_feature 1..20: note = Target: SCN10A; (-) strand; PAM type: NNNNGHTT; PAM sequence: TTCAGATT
  source 1..20: mol_type = other DNA
acttctctgagcaaatataa

SEQ ID NO: 10251 - DNA, 20 bp, synthetic construct
  misc_feature 1..20: note = Description of Artificial Sequence: Synthetic oligonucleotide
  misc_feature 1..20: note = Target: SCN10A; (-) strand; PAM type: NNNNGHTT; PAM sequence: GTAAGTTT
  source 1..20: mol_type = other DNA
agcaggggaacttttttcat

SEQ ID NO: 10252 - DNA, 20 bp, synthetic construct
  misc_feature 1..20: note = Description of Artificial Sequence: Synthetic oligonucleotide
  misc_feature 1..20: note = Target: SCN10A; (-) strand; PAM type: NNNNGHTT; PAM sequence: CATTGCTT
  source 1..20: mol_type = other DNA
ccactcatccaaagaatgga

SEQ ID NO: 10253 - DNA, 20 bp, synthetic construct
  misc_feature 1..20: note = Description of Artificial Sequence: Synthetic oligonucleotide
  misc_feature 1..20: note = Target: SCN10A; (-) strand; PAM type: NNNNGHTT; PAM sequence: TGCAGATT
  source 1..20: mol_type = other DNA
cagcacctgtctgccccagc

SEQ ID NO: 10254 - DNA, 20 bp, synthetic construct
  misc_feature 1..20: note = Description of Artificial Sequence: Synthetic oligonucleotide
  misc_feature 1..20: note = Target: SCN10A; (-) strand; PAM type: NNNNGHTT; PAM sequence: GTGGGCTT
  source 1..20: mol_type = other DNA
gctgagcagtgggaatggag

SEQ ID NO: 10255 - DNA, 20 bp, synthetic construct
  misc_feature 1..20: note = Description of Artificial Sequence: Synthetic oligonucleotide
  misc_feature 1..20: note = Target: SCN10A; (-) strand; PAM type: NNNNGHTT; PAM sequence: ATCAGATT
  source 1..20: mol_type = other DNA
aagagaaagacatgatcata

SEQ ID NO: 10256 - DNA, 20 bp, synthetic construct
  misc_feature 1..20: note = Description of Artificial Sequence: Synthetic oligonucleotide
  misc_feature 1..20: note = Target: SCN10A; (-) strand; PAM type: NNNNGHTT; PAM sequence: TGATGTTT
  source 1..20: mol_type = other DNA
tgagggtgataaagtaccag

SEQ ID NO: 10257 - DNA, 20 bp, synthetic construct
  misc_feature 1..20: note = Description of Artificial Sequence: Synthetic oligonucleotide
  misc_feature 1..20: note = Target: SCN10A; (-) strand; PAM type: NNNNGHTT; PAM sequence: TGGAGTTT
  source 1..20: mol_type = other DNA
atgacacaggctacagagta

SEQ ID NO: 10258 - DNA, 20 bp, synthetic construct
  misc_feature 1..20: note = Description of Artificial Sequence: Synthetic oligonucleotide
  misc_feature 1..20: note = Target: SCN10A; (-) strand; PAM type: NNNNGHTT; PAM sequence: ATTTGATT
  source 1..20: mol_type = other DNA
acaagtatgctcagggaaca

SEQ ID NO: 10259 - DNA, 20 bp, synthetic construct
  misc_feature 1..20: note = Description of Artificial Sequence: Synthetic oligonucleotide
  misc_feature 1..20: note = Target: SCN10A; (-) strand; PAM type: NNNNGHTT; PAM sequence: AAGTGCTT
  source 1..20: mol_type = other DNA
gaatacaggattgtcttatg

SEQ ID NO: 10260 - DNA, 20 bp, synthetic construct
  misc_feature 1..20: note = Description of Artificial Sequence: Synthetic oligonucleotide
  misc_feature 1..20: note = Target: SCN10A; (-) strand; PAM type: NNNNGHTT; PAM sequence: ACAGGATT
  source 1..20: mol_type = other DNA
tatacatctaactattgaat

SEQ ID NO: 10261 - DNA, 20 bp, synthetic construct
  misc_feature 1..20: note = Description of Artificial Sequence: Synthetic oligonucleotide
  misc_feature 1..20: note = Target: SCN10A; (-) strand; PAM type: NNNNGHTT; PAM sequence: AAATGATT
  source 1..20: mol_type = other DNA
tataagatatatatatatat

SEQ ID NO: 10262 - DNA, 20 bp, synthetic construct
  misc_feature 1..20: note = Description of Artificial Sequence: Synthetic oligonucleotide
  misc_feature 1..20: note = Target: SCN10A; (-) strand; PAM type: NNNNGHTT; PAM sequence: ATAAGATT
  source 1..20: mol_type = other DNA
acaacacatgggaattcaag

SEQ ID NO: 10263 - DNA, 20 bp, synthetic construct
  misc_feature 1..20: note = Description of Artificial Sequence: Synthetic oligonucleotide
  misc_feature 1..20: note = Target: SCN10A; (-) strand; PAM type: NNNNGHTT; PAM sequence: CCATGATT
  source 1..20: mol_type = other DNA
agcatgggaaagacctgctc

SEQ ID NO: 10264 - DNA, 20 bp, synthetic construct
  misc_feature 1..20: note = Description of Artificial Sequence: Synthetic oligonucleotide
  misc_feature 1..20: note = Target: SCN10A; (-) strand; PAM type: NNNNGHTT; PAM sequence: TACAGCTT
  source 1..20: mol_type = other DNA
gaaagaggtttaattggact

SEQ ID NO: 10265 - DNA, 20 bp, synthetic construct
  misc_feature 1..20: note = Description of Artificial Sequence: Synthetic oligonucleotide
  misc_feature 1..20: note = Target: SCN10A; (-) strand; PAM type: NNNNGHTT; PAM sequence: AGAGGTTT
  source 1..20: mol_type = other DNA
ctgggcaatttataaaagaa

SEQ ID NO: 10266 - DNA, 20 bp, synthetic construct
  misc_feature 1..20: note = Description of Artificial Sequence: Synthetic oligonucleotide
  misc_feature 1..20: note = Target: SCN10A; (-) strand; PAM type: NNNNGHTT; PAM sequence: GTTTGTTT
  source 1..20: mol_type = other DNA
tttcatacttttcctttctt

SEQ ID NO: 10267 - DNA, 20 bp, synthetic construct
  misc_feature 1..20: note = Description of Artificial Sequence: Synthetic oligonucleotide
  misc_feature 1..20: note = Target: SCN10A; (-) strand; PAM type: NNNNGHTT; PAM sequence: TCTTGTTT
  source 1..20: mol_type = other DNA
ctgctttcatacttttcctt

SEQ ID NO: 10268 - DNA, 20 bp, synthetic construct
  misc_feature 1..20: note = Description of Artificial Sequence: Synthetic oligonucleotide
  misc_feature 1..20: note = Target: SCN10A; (-) strand; PAM type: NNNNGHTT; PAM sequence: CCCTGCTT
  source 1..20: mol_type = other DNA
tcatctatccattcactatt

SEQ ID NO: 10269 - DNA, 20 bp, synthetic construct
  misc_feature 1..20: note = Description of Artificial Sequence: Synthetic oligonucleotide
  misc_feature 1..20: note = Target: SCN10A; (-) strand; PAM type: NNNNGHTT; PAM sequence: TCTTGTTT
  source 1..20: mol_type = other DNA
tcattcttctatctttccat

SEQ ID NO: 10270 - DNA, 20 bp, synthetic construct
  misc_feature 1..20: note = Description of Artificial Sequence: Synthetic oligonucleotide
  misc_feature 1..20: note = Target: SCN10A; (-) strand; PAM type: NNNNGHTT; PAM sequence: GCATGCTT
  source 1..20: mol_type = other DNA
ttcacgcatcttccatccaa

SEQ ID NO: 10271 - DNA, 20 bp, synthetic construct
  misc_feature 1..20: note = Description of Artificial Sequence: Synthetic oligonucleotide
  misc_feature 1..20: note = Target: SCN10A; (-) strand; PAM type: NNNNGHTT; PAM sequence: TTTTGATT
  source 1..20: mol_type = other DNA
aacccttatatctttctatc

SEQ ID NO: 10272 - DNA, 20 bp, synthetic construct
  misc_feature 1..20: note = Description of Artificial Sequence: Synthetic oligonucleotide
  misc_feature 1..20: note = Target: SCN10A; (-) strand; PAM type: NNNNGHTT; PAM sequence: TACTGATT
  source 1..20: mol_type = other DNA
actcatttcatccatcttcc

SEQ ID NO: 10273 - DNA, 20 bp, synthetic construct
  misc_feature 1..20: note = Description of Artificial Sequence: Synthetic oligonucleotide
  misc_feature 1..20: note = Target: SCN10A; (-) strand; PAM type: NNNNGHTT; PAM sequence: TCCTGCTT
  source 1..20: mol_type = other DNA
ccctttgggggcacagtcac

SEQ ID NO: 10274 - DNA, 20 bp, synthetic construct
  misc_feature 1..20: note = Description of Artificial Sequence: Synthetic oligonucleotide
  misc_feature 1..20: note = Target: SCN10A; (-) strand; PAM type: NNNNGHTT; PAM sequence: CAAGGATT
  source 1..20: mol_type = other DNA
agcttcaggccactgtacca

SEQ ID NO: 10275 - DNA, 20 bp, synthetic construct
  misc_feature 1..20: note = Description of Artificial Sequence: Synthetic oligonucleotide
  misc_feature 1..20: note = Target: SCN10A; (-) strand; PAM type: NNNNGHTT; PAM sequence: AGCAGCTT
  source 1..20: mol_type = other DNA
ttccctgatgccaatgcact

SEQ ID NO: 10276 - DNA, 20 bp, synthetic construct
  misc_feature 1..20: note = Description of Artificial Sequence: Synthetic oligonucleotide
  misc_feature 1..20: note = Target: SCN10A; (-) strand; PAM type: NNNNGHTT; PAM sequence: TGGTGCTT
  source 1..20: mol_type = other DNA
tcaggaaatgtgtctgtatt

SEQ ID NO: 10277 - DNA, 20 bp, synthetic construct
  misc_feature 1..20: note = Description of Artificial Sequence: Synthetic oligonucleotide
  misc_feature 1..20: note = Target: SCN10A; (-) strand; PAM type: NNNNGHTT; PAM sequence: GAGGGTTT
  source 1..20: mol_type = other DNA
ctgttcactgccgcatagct

SEQ ID NO: 10278 - DNA, 20 bp, synthetic construct
  misc_feature 1..20: note = Description of Artificial Sequence: Synthetic oligonucleotide
  misc_feature 1..20: note = Target: SCN10A; (-) strand; PAM type: NNNNGHTT; PAM sequence: CTTTGCTT
  source 1..20: mol_type = other DNA
actgtctaggccactacctt

SEQ ID NO: 10279 - DNA, 20 bp, synthetic construct
  misc_feature 1..20: note = Description of Artificial Sequence: Synthetic oligonucleotide
  misc_feature 1..20: note = Target: SCN10A; (-) strand; PAM type: NNNNGHTT; PAM sequence: ATGTGATT
  source 1..20: mol_type = other DNA
gtgcttctcacacatcagac

SEQ ID NO: 10280 - DNA, 20 bp, synthetic construct
  misc_feature 1..20: note = Description of Artificial Sequence: Synthetic oligonucleotide
  misc_feature 1..20: note = Target: SCN10A; (-) strand; PAM type: NNNNGHTT; PAM sequence: GTGTGCTT
  source 1..20: mol_type = other DNA
cctgcattagagaattgact

SEQ ID NO: 10281 - DNA, 20 bp, synthetic construct
  misc_feature 1..20: note = Description of Artificial Sequence: Synthetic oligonucleotide
  misc_feature 1..20: note = Target: SCN10A; (-) strand; PAM type: NNNNGHTT; PAM sequence: CTGAGCTT
  source 1..20: mol_type = other DNA
gcagccatggcttagaacca

SEQ ID NO: 10282 - DNA, 20 bp, synthetic construct
  misc_feature 1..20: note = Description of Artificial Sequence: Synthetic oligonucleotide
  misc_feature 1..20: note = Target: SCN10A; (-) strand; PAM type: NNNNGHTT; PAM sequence: CATGGCTT
  source 1..20: mol_type = other DNA
aggcatttccaaggtgcagc

SEQ ID NO: 10283 - DNA, 20 bp, synthetic construct
  misc_feature 1..20: note = Description of Artificial Sequence: Synthetic oligonucleotide
  misc_feature 1..20: note = Target: SCN10A; (-) strand; PAM type: NNNNGHTT; PAM sequence: CAGAGATT
  source 1..20: mol_type = other DNA
gtgaccgaccaccactaccc

SEQ ID NO: 10284 - DNA, 20 bp, synthetic construct
  misc_feature 1..20: note = Description of Artificial Sequence: Synthetic oligonucleotide
  misc_feature 1..20: note = Target: SCN10A; (-) strand; PAM type: NNNNGHTT; PAM sequence: AAAAGTTT
  source 1..20: mol_type = other DNA
cctcaagggctactccaaag

SEQ ID NO: 10285 - DNA, 20 bp, synthetic construct
  misc_feature 1..20: note = Description of Artificial Sequence: Synthetic oligonucleotide
  misc_feature 1..20: note = Target: SCN10A; (-) strand; PAM type: NNNNGHTT; PAM sequence: TGGGGTTT
  source 1..20: mol_type = other DNA
agtggctcagtgggaacacg

SEQ ID NO: 10286 - DNA, 20 bp, synthetic construct
  misc_feature 1..20: note = Description of Artificial Sequence: Synthetic oligonucleotide
  misc_feature 1..20: note = Target: SCN10A; (-) strand; PAM type: NNNNGHTT; PAM sequence: TATGGCTT
  source 1..20: mol_type = other DNA
tgctgcttaagtgggtggcc

SEQ ID NO: 10287 - DNA, 20 bp, synthetic construct
  misc_feature 1..20: note = Description of Artificial Sequence: Synthetic oligonucleotide
  misc_feature 1..20: note = Target: SCN10A; (-) strand; PAM type: NNNNGHTT; PAM sequence: TGCTGCTT
  source 1..20: mol_type = other DNA
ctttatctttgtgttcgaga

SEQ ID NO: 10288 - DNA, 20 bp, synthetic construct
  misc_feature 1..20: note = Description of Artificial Sequence: Synthetic oligonucleotide
  misc_feature 1..20: note = Target: SCN10A; (-) strand; PAM type: NNNNGHTT; PAM sequence: GAAAGCTT
  source 1..20: mol_type = other DNA
ctggaccagaagcccacggt

SEQ ID NO: 10289 - DNA, 20 bp, synthetic construct
  misc_feature 1..20: note = Description of Artificial Sequence: Synthetic oligonucleotide
  misc_feature 1..20: note = Target: SCN10A; (-) strand; PAM type: NNNNGHTT; PAM sequence: TCATGCTT
  source 1..20: mol_type = other DNA
ccccattggccctgaagaag

SEQ ID NO: 10290 - DNA, 20 bp, synthetic construct
  misc_feature 1..20: note = Description of Artificial Sequence: Synthetic oligonucleotide
  misc_feature 1..20: note = Target: SCN10A; (-) strand; PAM type: NNNNGHTT; PAM sequence: GGCTGTTT
  source 1..20: mol_type = other DNA
atccctgcaagtatcagcag

SEQ ID NO: 10291 - DNA, 20 bp, synthetic construct
  misc_feature 1..20: note = Description of Artificial Sequence: Synthetic oligonucleotide
  misc_feature 1..20: note = Target: SCN10A; (-) strand; PAM type: NNNNGHTT; PAM sequence: GAAGGTTT
  source 1..20: mol_type = other DNA
acttccaaaatccaatttga

SEQ ID NO: 10292 - DNA, 20 bp, synthetic construct
  misc_feature 1..20: note = Description of Artificial Sequence: Synthetic oligonucleotide
  misc_feature 1..20: note = Target: SCN10A; (-) strand; PAM type: NNNNGHTT; PAM sequence: TGATGCTT
  source 1..20: mol_type = other DNA
aactgcctgtgaacatccgt

SEQ ID NO: 10293 - DNA, 20 bp, synthetic construct
  misc_feature 1..20: note = Description of Artificial Sequence: Synthetic oligonucleotide
  misc_feature 1..20: note = Target: SCN10A; (-) strand; PAM type: NNNNGHTT; PAM sequence: TGGCGATT
  source 1..20: mol_type = other DNA
attctttttcagaggtgtgt

SEQ ID NO: 10294 - DNA, 20 bp, synthetic construct
  misc_feature 1..20: note = Description of Artificial Sequence: Synthetic oligonucleotide
  misc_feature 1..20: note = Target: SCN10A; (-) strand; PAM type: NNNNGHTT; PAM sequence: CCTTGATT
  source 1..20: mol_type = other DNA
tcttcttttaatttgaattt

SEQ ID NO: 10295 - DNA, 20 bp, synthetic construct
  misc_feature 1..20: note = Description of Artificial Sequence: Synthetic oligonucleotide
  misc_feature 1..20: note = Target: SCN10A; (-) strand; PAM type: NNNNGHTT; PAM sequence: TAGGGTTT
  source 1..20: mol_type = other DNA
cccccacagccacagcatcc

SEQ ID NO: 10296 - DNA, 20 bp, synthetic construct
  misc_feature 1..20: note = Description of Artificial Sequence: Synthetic oligonucleotide
  misc_feature 1..20: note = Target: SCN10A; (-) strand; PAM type: NNNNGHTT; PAM sequence: CAGAGCTT
  source 1..20: mol_type = other DNA
aatggcgtgaacctgggagg

SEQ ID NO: 10297 - DNA, 20 bp, synthetic construct
  misc_feature 1..20: note = Description of Artificial Sequence: Synthetic oligonucleotide
  misc_feature 1..20: note = Target: SCN10A; (-) strand; PAM type: NNNNGHTT; PAM sequence: CCAGGTTT
  source 1..20: mol_type = other DNA
ttggcttcacacaggactgg

SEQ ID NO: 10298 - DNA, 20 bp, synthetic construct
  misc_feature 1..20: note = Description of Artificial Sequence: Synthetic oligonucleotide
  misc_feature 1..20: note = Target: SCN10A; (-) strand; PAM type: NNNNGHTT; PAM sequence: TTTGGCTT
  source 1..20: mol_type = other DNA
cctctgagtcacattgccaa

SEQ ID NO: 10299 - DNA, 20 bp, synthetic construct
  misc_feature 1..20: note = Description of Artificial Sequence: Synthetic oligonucleotide
  misc_feature 1..20: note = Target: SCN10A; (-) strand; PAM type: NNNNGHTT; PAM sequence: TAGTGCTT
  source 1..20: mol_type = other DNA
gcctccagtgtccttaggat

SEQ ID NO: 10300 - DNA, 20 bp, synthetic construct
  misc_feature 1..20: note = Description of Artificial Sequence: Synthetic oligonucleotide
  misc_feature 1..20: note = Target: SCN10A; (-) strand; PAM type: NNNNGHTT; PAM sequence: TTAGGATT
  source 1..20: mol_type = other DNA
accaacagcctccagtgtcc

SEQ ID NO: 10301 - DNA, 20 bp, synthetic construct
  misc_feature 1..20: note = Description of Artificial Sequence: Synthetic oligonucleotide
  misc_feature 1..20: note = Target: SCN10A; (-) strand; PAM type: NNNNGHTT; PAM sequence: CACAGTTT
  source 1..20: mol_type = other DNA
taagcatttcccaaggtgga

SEQ ID NO: 10302 - DNA, 20 bp, synthetic construct
  misc_feature 1..20: note = Description of Artificial Sequence: Synthetic oligonucleotide
  misc_feature 1..20: note = Target: SCN10A; (-) strand; PAM type: NNNNGHTT; PAM sequence: TCCGGCTT
  source 1..20: mol_type = other DNA
agatgtgggttcagttgaaa

SEQ ID NO: 10303 - DNA, 20 bp, synthetic construct
  misc_feature 1..20: note = Description of Artificial Sequence: Synthetic oligonucleotide
  misc_feature 1..20: note = Target: SCN10A; (-) strand; PAM type: NNNNGHTT; PAM sequence: CTATGTTT
  source 1..20: mol_type = other DNA
ataatttactcaaccaatct

SEQ ID NO: 10304 - DNA, 20 bp, synthetic construct
  misc_feature 1..20: note = Description of Artificial Sequence: Synthetic oligonucleotide
  misc_feature 1..20: note = Target: SCN10A; (-) strand; PAM type: NNNNGHTT; PAM sequence: TCTTGCTT
  source 1..20: mol_type = other DNA
gctggtatacctctttctca

SEQ ID NO: 10305 - DNA, 20 bp, synthetic construct
  misc_feature 1..20: note = Description of Artificial Sequence: Synthetic oligonucleotide
  misc_feature 1..20: note = Target: SCN10A; (-) strand; PAM type: NNNNGHTT; PAM sequence: TTAGGCTT
  source 1..20: mol_type = other DNA
ggcaccaaatttagccttct

SEQ ID NO: 10306 - DNA, 20 bp, synthetic construct
  misc_feature 1..20: note = Description of Artificial Sequence: Synthetic oligonucleotide
  misc_feature 1..20: note = Target: SCN10A; (-) strand; PAM type: NNNNGHTT; PAM sequence: TTTTGCTT
  source 1..20: mol_type = other DNA
ttgtgggccttctctcctca

SEQ ID NO: 10307 - DNA, 20 bp, synthetic construct
  misc_feature 1..20: note = Description of Artificial Sequence: Synthetic oligonucleotide
  misc_feature 1..20: note = Target: SCN10A; (-) strand; PAM type: NNNNGHTT; PAM sequence: ATTGGCTT
  source 1..20: mol_type = other DNA
ggtgctctcctcactacgtc

SEQ ID NO: 10308 - DNA, 20 bp, synthetic construct
  misc_feature 1..20: note = Description of Artificial Sequence: Synthetic oligonucleotide
  misc_feature 1..20: note = Target: SCN10A; (-) strand; PAM type: NNNNGHTT; PAM sequence: GCTGGATT
  source 1..20: mol_type = other DNA
gctcttctccttccagtcct

SEQ ID NO: 10309 - DNA, 20 bp, synthetic construct
  misc_feature 1..20: note = Description of Artificial Sequence: Synthetic oligonucleotide
  misc_feature 1..20: note = Target: SCN10A; (-) strand; PAM type: NNNNGHTT; PAM sequence: CAGTGCTT
  source 1..20: mol_type = other DNA
aggggcaagagagggctggg

SEQ ID NO: 10310 - DNA, 20 bp, synthetic construct
  misc_feature 1..20: note = Description of Artificial Sequence: Synthetic oligonucleotide
  misc_feature 1..20: note = Target: SCN10A; (-) strand; PAM type: NNNNGHTT; PAM sequence: CAGTGATT
  source 1..20: mol_type = other DNA
cccagtgccctggcacaggg

SEQ ID NO: 10311 - DNA, 20 bp, synthetic construct
  misc_feature 1..20: note = Description of Artificial Sequence: Synthetic oligonucleotide
  misc_feature 1..20: note = Target: SCN10A; (-) strand; PAM type: NNNNGHTT; PAM sequence: GAGAGTTT
  source 1..20: mol_type = other DNA
gacgcaaagccaagggagaa

SEQ ID NO: 10312 - DNA, 20 bp, synthetic construct
  misc_feature 1..20: note = Description of Artificial Sequence: Synthetic oligonucleotide
  misc_feature 1..20: note = Target: SCN10A; (-) strand; PAM type: NNNNGHTT; PAM sequence: CTCAGCTT
  source 1..20: mol_type = other DNA
aaaactgctcggtgcatggc

SEQ ID NO: 10313 - DNA, 20 bp, synthetic construct
  misc_feature 1..20: note = Description of Artificial Sequence: Synthetic oligonucleotide
  misc_feature 1..20: note = Target: SCN10A; (-) strand; PAM type: NNNNGHTT; PAM sequence: GCCAGATT
  source 1..20: mol_type = other DNA
atctaggcctccatctaaat

SEQ ID NO: 10314 - DNA, 20 bp, synthetic construct
  misc_feature 1..20: note = Description of Artificial Sequence: Synthetic oligonucleotide
  misc_feature 1..20: note = Target: SCN10A; (-) strand; PAM type: NNNNGHTT; PAM sequence: CAGTGTTT
  source 1..20: mol_type = other DNA
gctcttccgattcacggctg

SEQ ID NO: 10315 - DNA, 20 bp, synthetic construct
  misc_feature 1..20: note = Description of Artificial Sequence: Synthetic oligonucleotide
  misc_feature 1..20: note = Target: SCN10A; (-) strand; PAM type: NNNNGHTT; PAM sequence: TTCCGATT
  source 1..20: mol_type = other DNA
ctaggactacagtcccgctc

SEQ ID NO: 10316 - DNA, 20 bp, synthetic construct
  misc_feature 1..20: note = Description of Artificial Sequence: Synthetic oligonucleotide
  misc_feature 1..20: note = Target: SCN10A; (-) strand; PAM type: NNNNGHTT; PAM sequence: AGGGGCTT
  source 1..20: mol_type = other DNA
agtcaaagcccaaaggcatg

SEQ ID NO: 10317 - DNA, 20 bp, synthetic construct
  misc_feature 1..20: note = Description of Artificial Sequence: Synthetic oligonucleotide
  misc_feature 1..20: note = Target: SCN10A; (-) strand; PAM type: NNNNGHTT; PAM sequence: AGTTGTTT
  source 1..20: mol_type = other DNA
ggaaggaacttaacatcctc

SEQ ID NO: 10318 - DNA, 20 bp, synthetic construct
  misc_feature 1..20: note = Description of Artificial Sequence: Synthetic oligonucleotide
  misc_feature 1..20: note = Target: SCN10A; (-) strand; PAM type: NNNNGHTT; PAM sequence: TGTGGCTT
  source 1..20: mol_type = other DNA
aaggaaggttctctctgtac

SEQ ID NO: 10319 - DNA, 20 bp, synthetic construct
  misc_feature 1..20: note = Description of Artificial Sequence: Synthetic oligonucleotide
  misc_feature 1..20: note = Target: SCN10A; (-) strand; PAM type: NNNNGHTT; PAM sequence: CTGGGCTT
  source 1..20: mol_type = other DNA
tctaaggccctggctgaata

SEQ ID NO: 10320 - DNA, 20 bp, synthetic construct
  misc_feature 1..20: note = Description of Artificial Sequence: Synthetic oligonucleotide
  misc_feature 1..20: note = Target: SCN10A; (-) strand; PAM type: NNNNGHTT; PAM sequence: TAGAGATT
  source 1..20: mol_type = other DNA
ataacaaggccttatgggaa

SEQ ID NO: 10321 - DNA, 20 bp, synthetic construct
  misc_feature 1..20: note = Description of Artificial Sequence: Synthetic oligonucleotide
  misc_feature 1..20: note = Target: SCN10A; (-) strand; PAM type: NNNNGHTT; PAM sequence: TGATGCTT
  source 1..20: mol_type = other DNA
atttctaacaagctcccagg

SEQ ID NO: 10322 - DNA, 20 bp, synthetic construct
  misc_feature 1..20: note = Description of Artificial Sequence: Synthetic oligonucleotide
  misc_feature 1..20: note = Target: SCN10A; (-) strand; PAM type: NNNNGHTT; PAM sequence: TGCAGATT
  source 1..20: mol_type = other DNA
ctcccaggagcttgttcaaa

SEQ ID NO: 10323 - DNA, 20 bp, synthetic construct
  misc_feature 1..20: note = Description of Artificial Sequence: Synthetic oligonucleotide
  misc_feature 1..20: note = Target: SCN10A; (-) strand; PAM type: NNNNGHTT; PAM sequence: AGGAGCTT
  source 1..20: mol_type = other DNA
ttctcaaaatttaatctccc

SEQ ID NO: 10324 - DNA, 20 bp, synthetic construct
  misc_feature 1..20: note = Description of Artificial Sequence: Synthetic oligonucleotide
  misc_feature 1..20: note = Target: SCN10A; (-) strand; PAM type: NNNNGHTT; PAM sequence: CCTGGCTT
  source 1..20: mol_type = other DNA
ccttatttaatcccgaagcc

SEQ ID NO: 10325 - DNA, 20 bp, synthetic construct
  misc_feature 1..20: note = Description of Artificial Sequence: Synthetic oligonucleotide
  misc_feature 1..20: note = Target: SCN10A; (-) strand; PAM type: NNNNGHTT; PAM sequence: CCCAGCTT
  source 1..20: mol_type = other DNA
ccaacttgtcagtagcaaaa

SEQ ID NO: 10326 - DNA, 20 bp, synthetic construct
  misc_feature 1..20: note = Description of Artificial Sequence: Synthetic oligonucleotide
  misc_feature 1..20: note = Target: SCN10A; (-) strand; PAM type: NNNNGHTT; PAM sequence: AAAGGCTT
  source 1..20: mol_type = other DNA
actgacactcaaaatgttta

SEQ ID NO: 10327 - DNA, 20 bp, synthetic construct
  misc_feature 1..20: note = Description of Artificial Sequence: Synthetic oligonucleotide
  misc_feature 1..20: note = Target: SCN10A; (-) strand; PAM type: NNNNGHTT; PAM sequence: AAATGTTT
  source 1..20: mol_type = other DNA
gatggggaaactgacactca

SEQ ID NO: 10328 - DNA, 20 bp, synthetic construct
  misc_feature 1..20: note = Description of Artificial Sequence: Synthetic oligonucleotide
  misc_feature 1..20: note = Target: SCN10A; (-) strand; PAM type: NNNNGHTT; PAM sequence: GAGAGCTT
  source 1..20: mol_type = other DNA
tcgtggagcacagctggttt

SEQ ID NO: 10329 - DNA, 20 bp, synthetic construct
  misc_feature 1..20: note = Description of Artificial Sequence: Synthetic oligonucleotide
  misc_feature 1..20: note = Target: SCN10A; (-) strand; PAM type: NNNNGHTT; PAM sequence: GCTGGTTT
  source 1..20: mol_type = other DNA
ctaccgtatcgtggagcaca

SEQ ID NO: 10330 - DNA, 20 bp, synthetic construct
  misc_feature 1..20: note = Description of Artificial Sequence: Synthetic oligonucleotide
  misc_feature 1..20: note = Target: SCN10A; (-) strand; PAM type: NNNNGHTT; PAM sequence: AATGGTTT
  source 1..20: mol_type = other DNA
acaagtgggtttcctagcag

SEQ ID NO: 10331 - DNA, 20 bp, synthetic construct
  misc_feature 1..20: note = Description of Artificial Sequence: Synthetic oligonucleotide
  misc_feature 1..20: note = Target: SCN10A; (-) strand; PAM type: NNNNGHTT; PAM sequence: GTGGGTTT
  source 1..20: mol_type = other DNA
tttttccaagggcatgacaa

SEQ ID NO: 10332 - DNA, 20 bp, synthetic construct
  misc_feature 1..20: note = Description of Artificial Sequence: Synthetic oligonucleotide
  misc_feature 1..20: note = Target: SCN10A; (-) strand; PAM type: NNNNGHTT; PAM sequence: TCTGGATT
  source 1..20: mol_type = other DNA
tggagaggaacacctgttgg

SEQ ID NO: 10333 - DNA, 20 bp, synthetic construct
  misc_feature 1..20: note = Description of Artificial Sequence: Synthetic oligonucleotide
  misc_feature 1..20: note = Target: SCN10A; (-) strand; PAM type: NNNNGHTT; PAM sequence: GTCTGTTT
  source 1..20: mol_type = other DNA
aggctcatacgccgtagctt

SEQ ID NO: 10334 - DNA, 20 bp, synthetic construct
  misc_feature 1..20: note = Description of Artificial Sequence: Synthetic oligonucleotide
  misc_feature 1..20: note = Target: SCN10A; (-) strand; PAM type: NNNNGHTT; PAM sequence: CGTAGCTT
  source 1..20: mol_type = other DNA
gcacccccaggctcatacgc

SEQ ID NO: 10335 - DNA, 20 bp, synthetic construct
  misc_feature 1..20: note = Description of Artificial Sequence: Synthetic oligonucleotide
  misc_feature 1..20: note = Target: SCN10A; (-) strand; PAM type: NNNNGHTT; PAM sequence: TTGGGCTT
  source 1..20: mol_type = other DNA
gtcgtggccctcagttcagc

SEQ ID NO: 10336 - DNA, 20 bp, synthetic construct
  misc_feature 1..20: note = Description of Artificial Sequence: Synthetic oligonucleotide
  misc_feature 1..20: note = Target: SCN10A; (-) strand; PAM type: NNNNGHTT; PAM sequence: TTCAGCTT
  source 1..20: mol_type = other DNA
agccacgtcgtggccctcag

SEQ ID NO: 10337 - DNA, 20 bp, synthetic construct
  misc_feature 1..20: note = Description of Artificial Sequence: Synthetic oligonucleotide
  misc_feature 1..20: note = Target: SCN10A; (-) strand; PAM type: NNNNGHTT; PAM sequence: AATAGTTT
  source 1..20: mol_type = other DNA
taaatacttgagtttttatt

SEQ ID NO: 10338 - DNA, 20 bp, synthetic construct
  misc_feature 1..20: note = Description of Artificial Sequence: Synthetic oligonucleotide
  misc_feature 1..20: note = Target: SCN10A; (-) strand; PAM type: NNNNGHTT; PAM sequence: TTGAGTTT
  source 1..20: mol_type = other DNA
aagaaaaattttttaaatac

SEQ ID NO: 10339 - DNA, 20 bp, synthetic construct
  misc_feature 1..20: note = Description of Artificial Sequence: Synthetic oligonucleotide
  misc_feature 1..20: note = Target: SCN10A; (-) strand; PAM type: NNNNGHTT; PAM sequence: CAATGCTT
  source 1..20: mol_type = other DNA
tataaagggaattgtggcct

SEQ ID NO: 10340 - DNA, 20 bp, synthetic construct
  misc_feature 1..20: note = Description of Artificial Sequence: Synthetic oligonucleotide
  misc_feature 1..20: note = Target: SCN10A; (-) strand; PAM type: NNNNGHTT; PAM sequence: CAGTGTTT
  source 1..20: mol_type = other DNA
gtcttagtcatctttcctct

SEQ ID NO: 10341 - DNA, 20 bp, synthetic construct
  misc_feature 1..20: note = Description of Artificial Sequence: Synthetic oligonucleotide
  misc_feature 1..20: note = Target: SCN10A; (-) strand; PAM type: NNNNGHTT; PAM sequence: TTTTGTTT
  source 1..20: mol_type = other DNA
tgtatctgcttccctcaatc

SEQ ID NO: 10342 - DNA, 20 bp, synthetic construct
  misc_feature 1..20: note = Description of Artificial Sequence: Synthetic oligonucleotide
  misc_feature 1..20: note = Target: SCN10A; (-) strand; PAM type: NNNNGHTT; PAM sequence: ATCTGCTT
  source 1..20: mol_type = other DNA
ccagaggaaggccatgatgt

SEQ ID NO: 10343 - DNA, 20 bp, synthetic construct
  misc_feature 1..20: note = Description of Artificial Sequence: Synthetic oligonucleotide
  misc_feature 1..20: note = Target: SCN10A; (-) strand; PAM type: NNNNGHTT; PAM sequence: TCTTGATT
  source 1..20: mol_type = other DNA
ccataaacaccactgaaaac

SEQ ID NO: 10344 - DNA, 20 bp, synthetic construct
  misc_feature 1..20: note = Description of Artificial Sequence: Synthetic oligonucleotide
  misc_feature 1..20: note = Target: SCN10A; (-) strand; PAM type: NNNNGHTT; PAM sequence: CCAGGCTT
  source 1..20: mol_type = other DNA
gcccacttgctgcctcactc

SEQ ID NO: 10345 - DNA, 20 bp, synthetic construct
  misc_feature 1..20: note = Description of Artificial Sequence: Synthetic oligonucleotide
  misc_feature 1..20: note = Target: SCN10A; (-) strand; PAM type: NNNNGHTT; PAM sequence: GACTGCTT
  source 1..20: mol_type = other DNA
atgacctggaagaaccagat

SEQ ID NO: 10346 - DNA, 20 bp, synthetic construct
  misc_feature 1..20: note = Description of Artificial Sequence: Synthetic oligonucleotide
  misc_feature 1..20: note = Target: SCN10A; (-) strand; PAM type: NNNNGHTT; PAM sequence: CTGGGCTT
  source 1..20: mol_type = other DNA
ggagagacgagttcactgcc

SEQ ID NO: 10347 - DNA, 20 bp, synthetic construct
  misc_feature 1..20: note = Description of Artificial Sequence: Synthetic oligonucleotide
  misc_feature 1..20: note = Target: SCN10A; (-) strand; PAM type: NNNNGHTT; PAM sequence: GAAGGTTT
  source 1..20: mol_type = other DNA
agcactccatcaggggcccc

SEQ ID NO: 10348 - DNA, 20 bp, synthetic construct
  misc_feature 1..20: note = Description of Artificial Sequence: Synthetic oligonucleotide
  misc_feature 1..20: note = Target: SCN10A; (-) strand; PAM type: NNNNGHTT; PAM sequence: CCATGATT
  source 1..20: mol_type = other DNA
caggcccctgcagcattact

SEQ ID NO: 10349 - DNA, 20 bp, synthetic construct
  misc_feature 1..20: note = Description of Artificial Sequence: Synthetic oligonucleotide
  misc_feature 1..20: note = Target: SCN10A; (-) strand; PAM type: NNNNGHTT; PAM sequence: TCAGGTTT
  source 1..20: mol_type = other DNA
tgggtccattagcaaagcta

SEQ ID NO: 10350 - DNA, 20 bp, synthetic construct
  misc_feature 1..20: note = Description of Artificial Sequence: Synthetic oligonucleotide
  misc_feature 1..20: note = Target: SCN10A; (-) strand; PAM type: NNNNGHTT; PAM sequence: TTTTGTTT
  source 1..20: mol_type = other DNA
tctgggtgttggttttttgt

SEQ ID NO: 10351 - DNA, 20 bp, synthetic construct
  misc_feature 1..20: note = Description of Artificial Sequence: Synthetic oligonucleotide
  misc_feature 1..20: note = Target: SCN10A; (-) strand; PAM type: NNNNGHTT; PAM sequence: TTTTGTTT
  source 1..20: mol_type = other DNA
acaacttctgggtgttggtt

SEQ ID NO: 10352 - DNA, 20 bp, synthetic construct
  misc_feature 1..20: note = Description of Artificial Sequence: Synthetic oligonucleotide
  misc_feature 1..20: note = Target: SCN10A; (-) strand; PAM type: NNNNGHTT; PAM sequence: GTTGGTTT
  source 1..20: mol_type = other DNA
tcagtacacaacttctgggt

SEQ ID NO: 10353 - DNA, 20 bp, synthetic construct
  misc_feature 1..20: note = Description of Artificial Sequence: Synthetic oligonucleotide
  misc_feature 1..20: note = Target: SCN10A; (-) strand; PAM type: NNNNGHTT; PAM sequence: CAATGTTT
  source 1..20: mol_type = other DNA
cctggctagttgtccctact

SEQ ID NO: 10354 - DNA, 20 bp, synthetic construct
  misc_feature 1..20: note = Description of Artificial Sequence: Synthetic oligonucleotide
  misc_feature 1..20: note = Target: SCN10A; (-) strand; PAM type: NNNNGHTT; PAM sequence: TCATGCTT
  source 1..20: mol_type = other DNA
tcacattctgcacgtggatg

SEQ ID NO: 10355 - DNA, 20 bp, synthetic construct
  misc_feature 1..20: note = Description of Artificial Sequence: Synthetic oligonucleotide
  misc_feature 1..20: note = Target: SCN10A; (-) strand; PAM type: NNNNGHTT; PAM sequence: AGCCGCTT
  source 1..20: mol_type = other DNA
gggggctgtgggtgaacaga

SEQ ID NO: 10356 - DNA, 20 bp, synthetic construct
  misc_feature 1..20: note = Description of Artificial Sequence: Synthetic oligonucleotide
  misc_feature 1..20: note = Target: SCN10A; (-) strand; PAM type: NNNNGHTT; PAM sequence: ACGGGATT
  source 1..20: mol_type = other DNA
agataagagggagggctggg

SEQ ID NO: 10357 - DNA, 20 bp, synthetic construct
  misc_feature 1..20: note = Description of Artificial Sequence: Synthetic oligonucleotide
  misc_feature 1..20: note = Target: SCN10A; (-) strand; PAM type: NNNNGHTT; PAM sequence: TTCAGCTT
  source 1..20: mol_type = other DNA
tccccaaagttatcaagccc

SEQ ID NO: 10358 - DNA, 20 bp, synthetic construct
  misc_feature 1..20: note = Description of Artificial Sequence: Synthetic oligonucleotide
  misc_feature 1..20: note = Target: SCN10A; (-) strand; PAM type: NNNNGHTT; PAM sequence: AAAAGTTT
  source 1..20: mol_type = other DNA
atagggaaagaggcatctat

SEQ ID NO: 10359 - DNA, 20 bp, synthetic construct
  misc_feature 1..20: note = Description of Artificial Sequence: Synthetic oligonucleotide
  misc_feature 1..20: note = Target: SCN10A; (-) strand; PAM type: NNNNGHTT; PAM sequence: TGTGGTTT
  source 1..20: mol_type = other DNA
ttatacaaggtaaaaataaa

SEQ ID NO: 10360 - DNA, 20 bp, synthetic construct
  misc_feature 1..20: note = Description of Artificial Sequence: Synthetic oligonucleotide
  misc_feature 1..20: note = Target: SCN10A; (-) strand; PAM type: NNNNGHTT; PAM sequence: TTAGGATT
  source 1..20: mol_type = other DNA
tgagctggaagattagaggt

SEQ ID NO: 10361 - DNA, 20 bp, synthetic construct
  misc_feature 1..20: note = Description of Artificial Sequence: Synthetic oligonucleotide
  misc_feature 1..20: note = Target: SCN10A; (-) strand; PAM type: NNNNGHTT; PAM sequence: AGAGGTTT
  source 1..20: mol_type = other DNA
agagactgagctggaagatt

SEQ ID NO: 10362 - DNA, 20 bp, synthetic construct
  misc_feature 1..20: note = Description of Artificial Sequence: Synthetic oligonucleotide
  misc_feature 1..20: note = Target: SCN10A; (-) strand; PAM type: NNNNGHTT; PAM sequence: GGAAGATT
  source 1..20: mol_type = other DNA
agcctcacagagactgagct

SEQ ID NO: 10363 - DNA, 20 bp, synthetic construct
  misc_feature 1..20: note = Description of Artificial Sequence: Synthetic oligonucleotide
  misc_feature 1..20: note = Target: SCN10A; (-) strand; PAM type: NNNNGHTT; PAM sequence: TTGTGATT
  source 1..20: mol_type = other DNA
acagatgaagaagttttccc

SEQ ID NO: 10364 - DNA, 20 bp, synthetic construct
  misc_feature 1..20: note = Description of Artificial Sequence: Synthetic oligonucleotide
  misc_feature 1..20: note = Target: SCN10A; (-) strand; PAM type: NNNNGHTT; PAM sequence: AGAAGTTT
  source 1..20: mol_type = other DNA
ttggaggtgctcacagatga

SEQ ID NO: 10365 - DNA, 20 bp, synthetic construct
  misc_feature 1..20: note = Description of Artificial Sequence: Synthetic oligonucleotide
  misc_feature 1..20: note = Target: SCN10A; (-) strand; PAM type: NNNNGHTT; PAM sequence: AAATGTTT
  source 1..20: mol_type = other DNA
taaatgagatgctgcttgtc

SEQ ID NO: 10366 - DNA, 20 bp, synthetic construct
  misc_feature 1..20: note = Description of Artificial Sequence: Synthetic oligonucleotide
  misc_feature 1..20: note = Target: SCN10A; (-) strand; PAM type: NNNNGHTT; PAM sequence: TGCTGCTT
  source 1..20: mol_type = other DNA
attttgaagcttaaatgaga

SEQ ID NO: 10367 - DNA, 20 bp, synthetic construct
  misc_feature 1..20: note = Description of Artificial Sequence: Synthetic oligonucleotide
  misc_feature 1..20: note = Target: SCN10A; (-) strand; PAM type: NNNNGHTT; PAM sequence: TGAAGCTT
  source 1..20: mol_type = other DNA
cctacttggtaggattattt

SEQ ID NO: 10368 - DNA, 20 bp, synthetic construct
  misc_feature 1..20: note = Description of Artificial Sequence: Synthetic oligonucleotide
  misc_feature 1..20: note = Target: SCN10A; (-) strand; PAM type: NNNNGHTT; PAM sequence: GTAGGATT
  source 1..20: mol_type = other DNA
tgaatggtaatgcctacttg

SEQ ID NO: 10369 - DNA, 20 bp, synthetic construct
  misc_feature 1..20: note = Description of Artificial Sequence: Synthetic oligonucleotide
  misc_feature 1..20: note = Target: SCN10A; (-) strand; PAM type: NNNNGHTT; PAM sequence: GTCAGCTT
  source 1..20: mol_type = other DNA
gtccctgctgaggtaggtat

SEQ ID NO: 10370 - DNA, 20 bp, synthetic construct
  misc_feature 1..20: note = Description of Artificial Sequence: Synthetic oligonucleotide
  misc_feature 1..20: note = Target: SCN10A; (-) strand; PAM type: NNNNGHTT; PAM sequence: TGAAGATT
  source 1..20: mol_type = other DNA
aattttgaagctgggaaaaa

SEQ ID NO: 10371 - DNA, 20 bp, synthetic construct
  misc_feature 1..20: note = Description of Artificial Sequence: Synthetic oligonucleotide
  misc_feature 1..20: note = Target: SCN10A; (-) strand; PAM type: NNNNGHTT; PAM sequence: AAGTGTTT
  source 1..20: mol_type = other DNA
tgagccaagcacttcgtgca

SEQ ID NO: 10372 - DNA, 20 bp, synthetic construct
  misc_feature 1..20: note = Description of Artificial Sequence: Synthetic oligonucleotide
  misc_feature 1..20: note = Target: SCN10A; (-) strand; PAM type: NNNNGHTT; PAM sequence: CTGTGCTT
  source 1..20: mol_type = other DNA
tactaagtggtccagaaaag

SEQ ID NO: 10373 - DNA, 20 bp, synthetic construct
  misc_feature 1..20: note = Description of Artificial Sequence: Synthetic oligonucleotide
  misc_feature 1..20: note = Target: SCN10A; (-) strand; PAM type: NNNNGHTT; PAM sequence: GCCAGCTT
  source 1..20: mol_type = other DNA
attcttatgtgactcattta

SEQ ID NO: 10374 - DNA, 20 bp, synthetic construct
  misc_feature 1..20: note = Description of Artificial Sequence: Synthetic oligonucleotide
  misc_feature 1..20: note = Target: SCN10A; (-) strand; PAM type: NNNNGHTT; PAM sequence: TCCTGATT
  source 1..20: mol_type = other DNA
tttaccagcatcctaagaag

SEQ ID NO: 10375 - DNA, 20 bp, synthetic construct
  misc_feature 1..20: note = Description of Artificial Sequence: Synthetic oligonucleotide
  misc_feature 1..20: note = Target: SCN10A; (-) strand; PAM type: NNNNGHTT; PAM sequence: ATGAGATT
  source 1..20: mol_type = other DNA
gctctgtgcatgagatgcta

SEQ ID NO: 10376 - DNA, 20 bp, synthetic construct
  misc_feature 1..20: note = Description of Artificial Sequence: Synthetic oligonucleotide
  misc_feature 1..20: note = Target: SCN10A; (-) strand; PAM type: NNNNGHTT; PAM sequence: TGGGGATT
  source 1..20: mol_type = other DNA
aaaggccaccttgaggtgct

SEQ ID NO: 10377 - DNA, 20 bp, synthetic construct
  misc_feature 1..20: note = Description of Artificial Sequence: Synthetic oligonucleotide
  misc_feature 1..20: note = Target: SCN10A; (-) strand; PAM type: NNNNGHTT; PAM sequence: AGGTGCTT
  source 1..20: mol_type = other DNA
gtgagcaaaaggccaccttg

SEQ ID NO: 10378 - DNA, 20 bp, synthetic construct
  misc_feature 1..20: note = Description of Artificial Sequence: Synthetic oligonucleotide
  misc_feature 1..20: note = Target: SCN10A; (-) strand; PAM type: NNNNGHTT; PAM sequence: TGGCGTTT
  source 1..20: mol_type = other DNA
gccaagctttccagaggagt

SEQ ID NO: 10379 - DNA, 20 bp, synthetic construct
  misc_feature 1..20: note = Description of Artificial Sequence: Synthetic oligonucleotide
  misc_feature 1..20: note = Target: SCN10A; (-) strand; PAM type: NNNNGHTT; PAM sequence: CCAAGCTT
  source 1..20: mol_type = other DNA
ataaagaagtttaaaccatg

SEQ ID NO: 10380 - DNA, 20 bp, synthetic construct
  misc_feature 1..20: note = Description of Artificial Sequence: Synthetic oligonucleotide
  misc_feature 1..20: note = Target: SCN10A; (-) strand; PAM type: NNNNGHTT; PAM sequence: AGAAGTTT
  source 1..20: mol_type = other DNA
cagaggagaccttgacataa

SEQ ID NO: 10381 - DNA, 20 bp, synthetic construct
  misc_feature 1..20: note = Description of Artificial Sequence: Synthetic oligonucleotide
  misc_feature 1..20: note = Target: SCN10A; (-) strand; PAM type: NNNNGHTT; PAM sequence: CAGGGCTT
  source 1..20: mol_type = other DNA
caggcagtggggaggggctt

SEQ ID NO: 10382 - DNA, 20 bp, synthetic construct
  misc_feature 1..20: note = Description of Artificial Sequence: Synthetic oligonucleotide
  misc_feature 1..20: note = Target: SCN10A; (-) strand; PAM type: NNNNGHTT; PAM sequence: AGGGGCTT
  source 1..20: mol_type = other DNA
gacagccacaggcagtgggg

SEQ ID NO: 10383 - DNA, 20 bp, synthetic construct
  misc_feature 1..20: note = Description of Artificial Sequence: Synthetic oligonucleotide
  misc_feature 1..20: note = Target: SCN10A; (-) strand; PAM type: NNNNGHTT; PAM sequence: CAGAGCTT
  source 1..20: mol_type = other DNA
atgatggtggggaagatgct

SEQ ID NO: 10384 - DNA, 20 bp, synthetic construct
  misc_feature 1..20: note = Description of Artificial Sequence: Synthetic oligonucleotide
  misc_feature 1..20: note = Target: SCN10A; (-) strand; PAM type: NNNNGHTT; PAM sequence: TGCAGCTT
  source 1..20: mol_type = other DNA
atcgtaccaaacaggctctt

SEQ ID NO: 10385 - DNA, 20 bp, synthetic construct
  misc_feature 1..20: note = Description of Artificial Sequence: Synthetic oligonucleotide
  misc_feature 1..20: note = Target: SCN10A; (-) strand; PAM type: NNNNGHTT; PAM sequence: AGGTGCTT
  source 1..20: mol_type = other DNA
cccttccattccttctcttc

SEQ ID NO: 10386 - DNA, 20 bp, synthetic construct
  misc_feature 1..20: note = Description of Artificial Sequence: Synthetic oligonucleotide
  misc_feature 1..20: note = Target: SCN10A; (-) strand; PAM type: NNNNGHTT; PAM sequence: TAGAGATT
  source 1..20: mol_type = other DNA
ggccaatgtggggctcagct

SEQ ID NO: 10387 - DNA, 20 bp, synthetic construct
  misc_feature 1..20: note = Description of Artificial Sequence: Synthetic oligonucleotide
  misc_feature 1..20: note = Target: SCN10A; (-) strand; PAM type: NNNNGHTT; PAM sequence: CTCAGCTT
  source 1..20: mol_type = other DNA
cccggtaggccaatgtgggg

SEQ ID NO: 10388 - DNA, 20 bp, synthetic construct
  misc_feature 1..20: note = Description of Artificial Sequence: Synthetic oligonucleotide
  misc_feature 1..20: note = Target: SCN10A; (-) strand; PAM type: NNNNGHTT; PAM sequence: ATATGCTT
  source 1..20: mol_type = other DNA
ctcctcctttatggtggaaa

SEQ ID NO: 10389 - DNA, 20 bp, synthetic construct
  misc_feature 1..20: note = Description of Artificial Sequence: Synthetic oligonucleotide
  misc_feature 1..20: note = Target: SCN10A; (-) strand; PAM type: NNNNGHTT; PAM sequence: CAGGGCTT
  source 1..20: mol_type = other DNA
ccagagtcaggaacagagcc

SEQ ID NO: 10390 - DNA, 20 bp, synthetic construct
  misc_feature 1..20: note = Description of Artificial Sequence: Synthetic oligonucleotide
  misc_feature 1..20: note = Target: SCN10A; (-) strand; PAM type: NNNNGHTT; PAM sequence: CCAGGATT
  source 1..20: mol_type = other DNA
ctggaagcagcaagatgtgc

SEQ ID NO: 10391 - DNA, 20 bp, synthetic construct
  misc_feature 1..20: note = Description of Artificial Sequence: Synthetic oligonucleotide
  misc_feature 1..20: note = Target: SCN10A; (-) strand; PAM type: NNNNGHTT; PAM sequence: GGAAGTTT
  source 1..20: mol_type = other DNA
atgcccctcaccctcagaca

SEQ ID NO: 10392 - DNA, 20 bp, synthetic construct
  misc_feature 1..20: note = Description of Artificial Sequence: Synthetic oligonucleotide
  misc_feature 1..20: note = Target: SCN10A; (-) strand; PAM type: NNNNGHTT; PAM sequence: ATGAGTTT
  source 1..20: mol_type = other DNA
ccaacttgggttctttcctc

SEQ ID NO: 10393 - DNA, 20 bp, synthetic construct
  misc_feature 1..20: note = Description of Artificial Sequence: Synthetic oligonucleotide
  misc_feature 1..20: note = Target: SCN10A; (-) strand; PAM type: NNNNGHTT; PAM sequence: CTCAGCTT
  source 1..20: mol_type = other DNA
ccccagcctggccccctgcc

SEQ ID NO: 10394 - DNA, 20 bp, synthetic construct
  misc_feature 1..20: note = Description of Artificial Sequence: Synthetic oligonucleotide
  misc_feature 1..20: note = Target: SCN10A; (-) strand; PAM type: NNNNGHTT; PAM sequence: CCATGTTT
  source 1..20: mol_type = other DNA
aaataataacaaaatctact

SEQ ID NO: 10395 - DNA, 20 bp, synthetic construct
  misc_feature 1..20: note = Description of Artificial Sequence: Synthetic oligonucleotide
  misc_feature 1..20: note = Target: SCN10A; (-) strand; PAM type: NNNNGHTT; PAM sequence: GACTGATT
  source 1..20: mol_type = other DNA
tattcagggaagtaagagct

SEQ ID NO: 10396 - DNA, 20 bp, synthetic construct
  misc_feature 1..20: note = Description of Artificial Sequence: Synthetic oligonucleotide
  misc_feature 1..20: note = Target: SCN10A; (-) strand; PAM type: NNNNGHTT; PAM sequence: ATGGGTTT
  source 1..20: mol_type = other DNA
caagaaaataatgcttactc

SEQ ID NO: 10397 - DNA, 20 bp, synthetic construct
  misc_feature 1..20: note = Description of Artificial Sequence: Synthetic oligonucleotide
  misc_feature 1..20: note = Target: SCN10A; (-) strand; PAM type: NNNNGHTT; PAM sequence: TAATGCTT
  source 1..20: mol_type = other DNA
tttccttaaaatcaagaaaa

SEQ ID NO: 10398 - DNA, 20 bp, synthetic construct
  misc_feature 1..20: note = Description of Artificial Sequence: Synthetic oligonucleotide
  misc_feature 1..20: note = Target: SCN10A; (-) strand; PAM type: NNNNGHTT; PAM sequence: ATATGATT
  source 1..20: mol_type = other DNA
tgacttgcaggaatgagaac

SEQ ID NO: 10399 - DNA, 20 bp, synthetic construct
  misc_feature 1..20: note = Description of Artificial Sequence: Synthetic oligonucleotide
  misc_feature 1..20: note = Target: SCN10A; (-) strand; PAM type: NNNNGHTT; PAM sequence: GTGGGATT
  source 1..20: mol_type = other DNA
ttcaaacttttcaaattcat

SEQ ID NO: 10400 - DNA, 20 bp, synthetic construct
  misc_feature 1..20: note = Description of Artificial Sequence: Synthetic oligonucleotide
  misc_feature 1..20: note = Target: SCN10A; (-) strand; PAM type: NNNNGHTT; PAM sequence: CCCAGATT
  source 1..20: mol_type = other DNA
ctttgatctgcatttttatg

SEQ ID NO: 10401 - DNA, 20 bp, synthetic construct
  misc_feature 1..20: note = Description of Artificial Sequence: Synthetic oligonucleotide
  misc_feature 1..20: note = Target: SCN10A; (-) strand; PAM type: NNNNGHTT; PAM sequence: AAAAGCTT
  source 1..20: mol_type = other DNA
aaggcttctgggttatctga

SEQ ID NO: 10402 - DNA, 20 bp, synthetic construct
  misc_feature 1..20: note = Description of Artificial Sequence: Synthetic oligonucleotide
  misc_feature 1..20: note = Target: SCN10A; (-) strand; PAM type: NNNNGHTT; PAM sequence: GAAGGCTT
  source 1..20: mol_type = other DNA
actgtctcctggggaaagga

SEQ ID NO: 10403 - DNA, 20 bp, synthetic construct
  misc_feature 1..20: note = Description of Artificial Sequence: Synthetic oligonucleotide
  misc_feature 1..20: note = Target: SCN10A; (-) strand; PAM type: NNNNGHTT; PAM sequence: AGTGGATT
  source 1..20: mol_type = other DNA
cttccgtatcctctgtggag

SEQ ID NO: 10404 - DNA, 20 bp, synthetic construct
  misc_feature 1..20: note = Description of Artificial Sequence: Synthetic oligonucleotide
  misc_feature 1..20: note = Target: SCN10A; (-) strand; PAM type: NNNNGHTT; PAM sequence: CTCTGTTT
  source 1..20: mol_type = other DNA
agctaccaaaacctgacggt

SEQ ID NO: 10405 - DNA, 20 bp, synthetic construct
  misc_feature 1..20: note = Description of Artificial Sequence: Synthetic oligonucleotide
  misc_feature 1..20: note = Target: SCN10A; (-) strand; PAM type: NNNNGHTT; PAM sequence: TTTGGTTT
  source 1..20: mol_type = other DNA
ccttgtgtttttcccagatc

SEQ ID NO: 10406 - DNA, 20 bp, synthetic construct
  misc_feature 1..20: note = Description of Artificial Sequence: Synthetic oligonucleotide
  misc_feature 1..20: note = Target: SCN10A; (-) strand; PAM type: NNNNGHTT; PAM sequence: TTGTGTTT
  source 1..20: mol_type = other DNA
gtttaatgggatgagaggcc

SEQ ID NO: 10407 - DNA, 20 bp, synthetic construct
  misc_feature 1..20: note = Description of Artificial Sequence: Synthetic oligonucleotide
  misc_feature 1..20: note = Target: SCN10A; (-) strand; PAM type: NNNNGHTT; PAM sequence: CCTGGTTT
  source 1..20: mol_type = other DNA
aagcagtgtccagaaaacgc

SEQ ID NO: 10408 - DNA, 20 bp, synthetic construct
  misc_feature 1..20: note = Description of Artificial Sequence: Synthetic oligonucleotide
  misc_feature 1..20: note = Target: SCN10A; (-) strand; PAM type: NNNNGHTT; PAM sequence: ATAAGCTT
  source 1..20: mol_type = other DNA
tggtctctcttcagtcataa

SEQ ID NO: 10409 - DNA, 20 bp, synthetic construct
  misc_feature 1..20: note = Description of Artificial Sequence: Synthetic oligonucleotide
  misc_feature 1..20: note = Target: SCN10A; (-) strand; PAM type: NNNNGHTT; PAM sequence: AGATGTTT
  source 1..20: mol_type = other DNA
aagatgagaaatgccctaag

SEQ ID NO: 10410 - DNA, 20 bp, synthetic construct
  misc_feature 1..20: note = Description of Artificial Sequence: Synthetic oligonucleotide
  misc_feature 1..20: note = Target: SCN10A; (-) strand; PAM type: NNNNGHTT; PAM sequence: TGCAGTTT
  source 1..20: mol_type = other DNA
tccatgaaatcatggacatt

SEQ ID NO: 10411 - DNA, 20 bp, synthetic construct
  misc_feature 1..20: note = Description of Artificial Sequence: Synthetic oligonucleotide
  misc_feature 1..20: note = Target: SCN10A; (-) strand; PAM type: NNNNGHTT; PAM sequence: TTGAGTTT
  source 1..20: mol_type = other DNA
tcttgtgggacttagcatat

SEQ ID NO: 10412 - DNA, 20 bp, synthetic construct
  misc_feature 1..20: note = Description of Artificial Sequence: Synthetic oligonucleotide
  misc_feature 1..20: note = Target: SCN10A; (-) strand; PAM type: NNNNGHTT; PAM sequence: TGATGATT
  source 1..20: mol_type = other DNA
aacacatacatttttatgct

SEQ ID NO: 10413 - DNA, 20 bp, synthetic construct
  misc_feature 1..20: note = Description of Artificial Sequence: Synthetic oligonucleotide
  misc_feature 1..20: note = Target: SCN10A; (-) strand; PAM type: NNNNGHTT; PAM sequence: TTATGCTT
  source 1..20: mol_type = other DNA
attttaaaacacatacattt

SEQ ID NO: 10414 - DNA, 20 bp, synthetic construct
  misc_feature 1..20: note = Description of Artificial Sequence: Synthetic oligonucleotide
  misc_feature 1..20: note = Target: SCN10A; (-) strand; PAM type: NNNNGHTT; PAM sequence: CTCAGATT
  source 1..20: mol_type = other DNA
ctgacagactgacagttgag

SEQ ID NO: 10415 - DNA, 20 bp, synthetic construct
  misc_feature 1..20: note = Description of Artificial Sequence: Synthetic oligonucleotide
  misc_feature 1..20: note = Target: SCN10A; (-) strand; PAM type: NNNNGHTT; PAM sequence: GTGGGATT
  source 1..20: mol_type = other DNA
acaggattaaacctcctccc

SEQ ID NO: 10416 - DNA, 20 bp, synthetic construct
  misc_feature 1..20: note = Description of Artificial Sequence: Synthetic oligonucleotide
  misc_feature 1..20: note = Target: SCN10A; (-) strand; PAM type: NNNNGHTT; PAM sequence: ACAGGATT
  source 1..20: mol_type = other DNA
catacagcacttactgtata

SEQ ID NO: 10417 - DNA, 20 bp, synthetic construct
  misc_feature 1..20: note = Description of Artificial Sequence: Synthetic oligonucleotide
  misc_feature 1..20: note = Target: SCN10A; (-) strand; PAM type: NNNNGHTT; PAM sequence: TCCAGATT
  source 1..20: mol_type = other DNA
cccatatgaggagagtaact

SEQ ID NO: 10418 - DNA, 20 bp, synthetic construct
  misc_feature 1..20: note = Description of Artificial Sequence: Synthetic oligonucleotide
  misc_feature 1..20: note = Target: SCN10A; (-) strand; PAM type: NNNNGHTT; PAM sequence: CTCTGCTT
  source 1..20: mol_type = other DNA
cacagagttgttgttttaag

SEQ ID NO: 10419 - DNA, 20 bp, synthetic construct
  misc_feature 1..20: note = Description of Artificial Sequence: Synthetic oligonucleotide
  misc_feature 1..20: note = Target: SCN10A; (-) strand; PAM type: NNNNGHTT; PAM sequence: TGTTGTTT
  source 1..20: mol_type = other DNA
ctgtgaccagtccacagagt

SEQ ID NO: 10420 - DNA, 20 bp, synthetic construct
  misc_feature 1..20: note = Description of Artificial Sequence: Synthetic oligonucleotide
  misc_feature 1..20: note = Target: SCN10A; (-) strand; PAM type: NNNNGHTT; PAM sequence: TTGTGTTT
  source 1..20: mol_type = other DNA
tactaatgctcagtttttat

SEQ ID NO: 10421 - DNA, 20 bp, synthetic construct
  misc_feature 1..20: note = Description of Artificial Sequence: Synthetic oligonucleotide
  misc_feature 1..20: note = Target: SCN10A; (-) strand; PAM type: NNNNGHTT; PAM sequence: CTCAGTTT
  source 1..20: mol_type = other DNA
ccccatactagttactaatg

SEQ ID NO: 10422 - DNA, 20 bp, synthetic construct
  misc_feature 1..20: note = Description of Artificial Sequence: Synthetic oligonucleotide
  misc_feature 1..20: note = Target: SCN10A; (-) strand; PAM type: NNNNGHTT; PAM sequence: CTACGTTT
  source 1..20: mol_type = other DNA
aaccttcggcaggccatgga

SEQ ID NO: 10423 - DNA, 20 bp, synthetic construct
  misc_feature 1..20: note = Description of Artificial Sequence: Synthetic oligonucleotide
  misc_feature 1..20: note = Target: SCN10A; (-) strand; PAM type: NNNNGHTT; PAM sequence: CTAGGCTT
  source 1..20: mol_type = other DNA
aaagcagggagaaattcctg

SEQ ID NO: 10424 - DNA, 20 bp, synthetic construct
  misc_feature 1..20: note = Description of Artificial Sequence: Synthetic oligonucleotide
  misc_feature 1..20: note = Target: SCN10A; (-) strand; PAM type: NNNNGHTT; PAM sequence: GATTGTTT
  source 1..20: mol_type = other DNA
ttttccttgcattctcctgg

SEQ ID NO: 10425 - DNA, 20 bp, synthetic construct
  misc_feature 1..20: note = Description of Artificial Sequence: Synthetic oligonucleotide
  misc_feature 1..20: note = Target: SCN10A; (-) strand; PAM type: NNNNGHTT; PAM sequence: CTGGGATT
  source 1..20: mol_type = other DNA
tcaattttccttgcattctc

SEQ ID NO: 10426 - DNA, 20 bp, synthetic construct
  misc_feature 1..20: note = Description of Artificial Sequence: Synthetic oligonucleotide
  misc_feature 1..20: note = Target: SCN10A; (-) strand; PAM type: NNNNGHTT; PAM sequence: TGTTGTTT
  source 1..20: mol_type = other DNA
atcctatatgagcaccactt

SEQ ID NO: 10427 - DNA, 20 bp, synthetic construct
  misc_feature 1..20: note = Description of Artificial Sequence: Synthetic oligonucleotide
  misc_feature 1..20: note = Target: SCN10A; (-) strand; PAM type: NNNNGHTT; PAM sequence: AATAGTTT
  source 1..20: mol_type = other DNA
tcttaaacaatttttgaggg

SEQ ID NO: 10428 - DNA, 20 bp, synthetic construct
  misc_feature 1..20: note = Description of Artificial Sequence: Synthetic oligonucleotide
  misc_feature 1..20: note = Target: SCN10A; (-) strand; PAM type: NNNNGHTT; PAM sequence: GTTTGTTT
  source 1..20: mol_type = other DNA
gactcattccttctgttttt

SEQ ID NO: 10429 - DNA, 20 bp, synthetic construct
  misc_feature 1..20: note = Description of Artificial Sequence: Synthetic oligonucleotide
  misc_feature 1..20: note = Target: SCN10A; (-) strand; PAM type: NNNNGHTT; PAM sequence: TTTTGTTT
  source 1..20: mol_type = other DNA
tgatgactcattccttctgt

SEQ ID NO: 10430 - DNA, 20 bp, synthetic construct
  misc_feature 1..20: note = Description of Artificial Sequence: Synthetic oligonucleotide
  misc_feature 1..20: note = Target: SCN10A; (-) strand; PAM type: NNNNGHTT; PAM sequence: TTCTGTTT
  source 1..20: mol_type = other DNA
cactcttgatgactcattcc

SEQ ID NO: 10431 - DNA, 20 bp, synthetic construct
  misc_feature 1..20: note = Description of Artificial Sequence: Synthetic oligonucleotide
  misc_feature 1..20: note = Target: SCN10A; (-) strand; PAM type: NNNNGHTT; PAM sequence: TGTGGTTT
  source 1..20: mol_type = other DNA
ggaatgactatttccacatc

SEQ ID NO: 10432 - DNA, 20 bp, synthetic construct
  misc_feature 1..20: note = Description of Artificial Sequence: Synthetic oligonucleotide
  misc_feature 1..20: note = Target: SCN10A; (-) strand; PAM type: NNNNGHTT; PAM sequence: CATAGTTT
  source 1..20: mol_type = other DNA
tagtttttttattctctgca

SEQ ID NO: 10433 - DNA, 20 bp, synthetic construct
  misc_feature 1..20: note = Description of Artificial Sequence: Synthetic oligonucleotide
  misc_feature 1..20: note = Target: SCN10A; (-) strand; PAM type: NNNNGHTT; PAM sequence: TATAGTTT
  source 1..20: mol_type = other DNA
cacaacttgttattgttatc

SEQ ID NO: 10434 - DNA, 20 bp, synthetic construct
  misc_feature 1..20: note = Description of Artificial Sequence: Synthetic oligonucleotide
  misc_feature 1..20: note = Target: SCN10A; (-) strand; PAM type: NNNNGHTT; PAM sequence: TTTAGTTT
  source 1..20: mol_type = other DNA
atatactgacttcttgaatc

SEQ ID NO: 10435 - DNA, 20 bp, synthetic construct
  misc_feature 1..20: note = Description of Artificial Sequence: Synthetic oligonucleotide
  misc_feature 1..20: note = Target: SCN10A; (-) strand; PAM type: NNNNGHTT; PAM sequence: TAATGCTT
  source 1..20: mol_type = other DNA
tgtggacttctttccattta

SEQ ID NO: 10436 - DNA, 20 bp, synthetic construct
  misc_feature 1..20: note = Description of Artificial Sequence: Synthetic oligonucleotide
  misc_feature 1..20: note = Target: SCN10A; (-) strand; PAM type: NNNNGHTT; PAM sequence: TGCAGTTT
  source 1..20: mol_type = other DNA
tctatccatctttggtgttc

SEQ ID NO: 10437 - DNA, 20 bp, synthetic construct
  misc_feature 1..20: note = Description of Artificial Sequence: Synthetic oligonucleotide
  misc_feature 1..20: note = Target: SCN10A; (-) strand; PAM type: NNNNGHTT; PAM sequence: GGATGCTT
  source 1..20: mol_type = other DNA
actgttattccttcctttct

SEQ ID NO: 10438 - DNA, 20 bp, synthetic construct
  misc_feature 1..20: note = Description of Artificial Sequence: Synthetic oligonucleotide
  misc_feature 1..20: note = Target: SCN10A; (-) strand; PAM type: NNNNGHTT; PAM sequence: GTCAGCTT
  source 1..20: mol_type = other DNA
tccattgttgctaatgagca

SEQ ID NO: 10439 - DNA, 20 bp, synthetic construct
  misc_feature 1..20: note = Description of Artificial Sequence: Synthetic oligonucleotide
  misc_feature 1..20: note = Target: SCN10A; (-) strand; PAM type: NNNNGHTT; PAM sequence: TTCAGTTT
  source 1..20: mol_type = other DNA
tgtttatctgaaatttgctc

SEQ ID NO: 10440 - DNA, 20 bp, synthetic construct
  misc_feature 1..20: note = Description of Artificial Sequence: Synthetic oligonucleotide
  misc_feature 1..20: note = Target: SCN10A; (-) strand; PAM type: NNNNGHTT; PAM sequence: CTTTGTTT
  source 1..20: mol_type = other DNA
gtgccttctggccataacct

SEQ ID NO: 10441 - DNA, 20 bp, synthetic construct
  misc_feature 1..20: note = Description of Artificial Sequence: Synthetic oligonucleotide
  misc_feature 1..20: note = Target: SCN10A; (-) strand; PAM type: NNNNGHTT; PAM sequence: CACAGTTT
  source 1..20: mol_type = other DNA
atttcttcaaccctttggag

SEQ ID NO: 10442 - DNA, 20 bp, synthetic construct
  misc_feature 1..20: note = Description of Artificial Sequence: Synthetic oligonucleotide
  misc_feature 1..20: note = Target: SCN10A; (-) strand; PAM type: NNNNGHTT; PAM sequence: TATTGATT
  source 1..20: mol_type = other DNA
tgtaagcctaaaaatttagt

SEQ ID NO: 10443 - DNA, 20 bp, synthetic construct
  misc_feature 1..20: note = Description of Artificial Sequence: Synthetic oligonucleotide
  misc_feature 1..20: note = Target: SCN10A; (-) strand; PAM type: NNNNGHTT; PAM sequence: TTCAGATT
  source 1..20: mol_type = other DNA
ctttggaacacagtttgagt

SEQ ID NO: 10444 - DNA, 20 bp, synthetic construct
  misc_feature 1..20: note = Description of Artificial Sequence: Synthetic oligonucleotide
  misc_feature 1..20: note = Target: SCN10A; (-) strand; PAM type: NNNNGHTT; PAM sequence: TTGAGTTT
  source 1..20: mol_type = other DNA
cttactctttggaacacagt

SEQ ID NO: 10445 - DNA, 20 bp, synthetic construct
  misc_feature 1..20: note = Description of Artificial Sequence: Synthetic oligonucleotide
  misc_feature 1..20: note = Target: SCN10A; (-) strand; PAM type: NNNNGHTT; PAM sequence: CACAGTTT
  source 1..20: mol_type = other DNA
tgatttcttactctttggaa

SEQ ID NO: 10446 - DNA, 20 bp, synthetic construct
  misc_feature 1..20: note = Description of Artificial Sequence: Synthetic oligonucleotide
  misc_feature 1..20: note = Target: SCN10A; (-) strand; PAM type: NNNNGHTT; PAM sequence: TACTGATT
  source 1..20: mol_type = other DNA
actcaagaatttttgtaagt

SEQ ID NO: 10447 - DNA, 20 bp, synthetic construct
  misc_feature 1..20: note = Description of Artificial Sequence: Synthetic oligonucleotide
  misc_feature 1..20: note = Target: SCN10A; (-) strand; PAM type: NNNNGHTT; PAM sequence: AGTTGTTT
  source 1..20: mol_type = other DNA
ggagtttcagtgtctcagca

SEQ ID NO: 10448 - DNA, 20 bp, synthetic construct
  misc_feature 1..20: note = Description of Artificial Sequence: Synthetic oligonucleotide
  misc_feature 1..20: note = Target: SCN10A; (-) strand; PAM type: NNNNGHTT; PAM sequence: GGGAGTTT
  source 1..20: mol_type = other DNA
ttcatcatcacacaagggga

SEQ ID NO: 10449 - DNA, 20 bp, synthetic construct
  misc_feature 1..20: note = Description of Artificial Sequence: Synthetic oligonucleotide
  misc_feature 1..20: note = Target: SCN10A; (-) strand; PAM type: NNNNGHTT; PAM sequence: GCCTGTTT
  source 1..20: mol_type = other DNA
cctggttccaattgatttca

SEQ ID NO: 10450 - DNA, 20 bp, synthetic construct
  misc_feature 1..20: note = Description of Artificial Sequence: Synthetic oligonucleotide
  misc_feature 1..20: note = Target: SCN10A; (-) strand; PAM type: NNNNGHTT; PAM sequence: AATTGATT
  source 1..20: mol_type = other DNA
cagtcggccatcctggttcc

SEQ ID NO: 10451 - DNA, 20 bp, synthetic construct
  misc_feature 1..20: note = Description of Artificial Sequence: Synthetic oligonucleotide
  misc_feature 1..20: note = Target: SCN10A; (-) strand; PAM type: NNNNGHTT; PAM sequence: TCATGCTT
  source 1..20: mol_type = other DNA
gggcctgcacagttatctct

SEQ ID NO: 10452 - DNA, 20 bp, synthetic construct
  misc_feature 1..20: note = Description of Artificial Sequence: Synthetic oligonucleotide
  misc_feature 1..20: note = Target: SCN10A; (-) strand; PAM type: NNNNGHTT; PAM sequence: GGAGGTTT
  source 1..20: mol_type = other DNA
gtgattggtggaaggaaagg

SEQ ID NO: 10453 - DNA, 20 bp, synthetic construct
  misc_feature 1..20: note = Description of Artificial Sequence: Synthetic oligonucleotide
  misc_feature 1..20: note = Target: SCN10A; (-) strand; PAM type: NNNNGHTT; PAM sequence: AGGTGATT
  source 1..20: mol_type = other DNA
gggtggataccgggatttgc

SEQ ID NO: 10454 - DNA, 20 bp, synthetic construct
  misc_feature 1..20: note = Description of Artificial Sequence: Synthetic oligonucleotide
  misc_feature 1..20: note = Target: SCN10A; (-) strand; PAM type: NNNNGHTT; PAM sequence: CCGGGATT
  source 1..20: mol_type = other DNA
aaatgtttagtgggtggata

SEQ ID NO: 10455 - DNA, 20 bp, synthetic construct
  misc_feature 1..20: note = Description of Artificial Sequence: Synthetic oligonucleotide
  misc_feature 1..20: note = Target: SCN10A; (-) strand; PAM type: NNNNGHTT; PAM sequence: AAATGTTT
  source 1..20: mol_type = other DNA
aaggcagtatttttattaga

SEQ ID NO: 10456 - DNA, 20 bp, synthetic construct
  misc_feature 1..20: note = Description of Artificial Sequence: Synthetic oligonucleotide
  misc_feature 1..20: note = Target: SCN10A; (-) strand; PAM type: NNNNGHTT; PAM sequence: AAAAGCTT
  source 1..20: mol_type = other DNA
caccaggcttttgagaaaag

SEQ ID NO: 10457 - DNA, 20 bp, synthetic construct
  misc_feature 1..20: note = Description of Artificial Sequence: Synthetic oligonucleotide
  misc_feature 1..20: note = Target: SCN10A; (-) strand; PAM type: NNNNGHTT; PAM sequence: CCAGGCTT
  source 1..20: mol_type = other DNA
tggaagccaagacgaggaca

SEQ ID NO: 10458 - DNA, 20 bp, synthetic construct
  misc_feature 1..20: note = Description of Artificial Sequence: Synthetic oligonucleotide
  misc_feature 1..20: note = Target: SCN10A; (-) strand; PAM type: NNNNGHTT; PAM sequence: TCATGCTT
  source 1..20: mol_type = other DNA
atgtttatttagattcactc

SEQ ID NO: 10459 - DNA, 20 bp, synthetic construct
  misc_feature 1..20: note = Description of Artificial Sequence: Synthetic oligonucleotide
  misc_feature 1..20: note = Target: SCN10A; (-) strand; PAM type: NNNNGHTT; PAM sequence: TTTAGATT
  source 1..20: mol_type = other DNA
ttgtgtccactcaatgttta

SEQ ID NO: 10460 - DNA, 20 bp, synthetic construct
  misc_feature 1..20: note = Description of Artificial Sequence: Synthetic oligonucleotide
  misc_feature 1..20: note = Target: SCN10A; (-) strand; PAM type: NNNNGHTT; PAM sequence: CAATGTTT
  source 1..20: mol_type = other DNA
acattgttgttgtgtccact

SEQ ID NO: 10461 - DNA, 20 bp, synthetic construct
  misc_feature 1..20: note = Description of Artificial Sequence: Synthetic oligonucleotide
  misc_feature 1..20: note = Target: SCN10A; (-) strand; PAM type: NNNNGHTT; PAM sequence: GGGGGTTT
  source 1..20: mol_type = other DNA
aaagggaaagaaaaagttca

SEQ ID NO: 10462 - DNA, 20 bp, synthetic construct
  misc_feature 1..20: note = Description of Artificial Sequence: Synthetic oligonucleotide
  misc_feature 1..20: note = Target: SCN10A; (-) strand; PAM type: NNNNGHTT; PAM sequence: CTAGGATT
  source 1..20: mol_type = other DNA
tcaagtagcgcctcaaggat

SEQ ID NO: 10463 - DNA, 20 bp, synthetic construct
  misc_feature 1..20: note = Description of Artificial Sequence: Synthetic oligonucleotide
  misc_feature 1..20: note = Target: SCN10A; (-) strand; PAM type: NNNNGHTT; PAM sequence: CAGTGCTT
  source 1..20: mol_type = other DNA
tgtatgtctcacagcacatt

SEQ ID NO: 10464 - DNA, 20 bp, synthetic construct
  misc_feature 1..20: note = Description of Artificial Sequence: Synthetic oligonucleotide
  misc_feature 1..20: note = Target: SCN10A; (-) strand; PAM type: NNNNGHTT; PAM sequence: TGATGCTT
  source 1..20: mol_type = other DNA
ttaagccagtgccacatagt

SEQ ID NO: 10465 - DNA, 20 bp, synthetic construct
  misc_feature 1..20: note = Description of Artificial Sequence: Synthetic oligonucleotide
  misc_feature 1..20: note = Target: SCN10A; (-) strand; PAM type: NNNNGHTT; PAM sequence: ATCAGCTT
  source 1..20: mol_type = other DNA
gacattccaagccttctcct

SEQ ID NO: 10466 - DNA, 20 bp, synthetic construct
  misc_feature 1..20: note = Description of Artificial Sequence: Synthetic oligonucleotide
  misc_feature 1..20: note = Target: SCN10A; (-) strand; PAM type: NNNNGHTT; PAM sequence: CATAGATT
  source 1..20: mol_type = other DNA
atatttttgtcactgaataa

SEQ ID NO: 10467 - DNA, 20 bp, synthetic construct
  misc_feature 1..20: note = Description of Artificial Sequence: Synthetic oligonucleotide
  misc_feature 1..20: note = Target: SCN10A; (-) strand; PAM type: NNNNGHTT; PAM sequence: TAAGGTTT
  source 1..20: mol_type = other DNA
ttacaactgacccacaatac

SEQ ID NO: 10468 - DNA, 20 bp, synthetic construct
  misc_feature 1..20: note = Description of Artificial Sequence: Synthetic oligonucleotide
  misc_feature 1..20: note = Target: SCN10A; (-) strand; PAM type: NNNNGHTT; PAM sequence: TCTGGATT
  source 1..20: mol_type = other DNA
aatcgtcaaggctctaaact

SEQ ID NO: 10469 - DNA, 20 bp, synthetic construct
  misc_feature 1..20: note = Description of Artificial Sequence: Synthetic oligonucleotide
  misc_feature 1..20: note = Target: SCN10A; (-) strand; PAM type: NNNNGHTT; PAM sequence: AGTTGTTT
  source 1..20: mol_type = other DNA
ttactacaagctttgctaag

SEQ ID NO: 10470 - DNA, 20 bp, synthetic construct
  misc_feature 1..20: note = Description of Artificial Sequence: Synthetic oligonucleotide
  misc_feature 1..20: note = Target: SCN10A; (-) strand; PAM type: NNNNGHTT; PAM sequence: ACAAGCTT
  source 1..20: mol_type = other DNA
acagtggctacaccattact

SEQ ID NO: 10471 - DNA, 20 bp, synthetic construct
  misc_feature 1..20: note = Description of Artificial Sequence: Synthetic oligonucleotide
  misc_feature 1..20: note = Target: SCN10A; (-) strand; PAM type: NNNNGHTT; PAM sequence: CTTTGCTT
  source 1..20: mol_type = other DNA
ttctcaattgttctttattt

SEQ ID NO: 10472 - DNA, 20 bp, synthetic construct
  misc_feature 1..20: note = Description of Artificial Sequence: Synthetic oligonucleotide
  misc_feature 1..20: note = Target: SCN10A; (-) strand; PAM type: NNNNGHTT; PAM sequence: AAGTGCTT
  source 1..20: mol_type = other DNA
agacctctcattgccacaca

SEQ ID NO: 10473 - DNA, 20 bp, synthetic construct
  misc_feature 1..20: note = Description of Artificial Sequence: Synthetic oligonucleotide
  misc_feature 1..20: note = Target: SCN10A; (-) strand; PAM type: NNNNGHTT; PAM sequence: GATGGCTT
  source 1..20: mol_type = other DNA
acaattacttcaaaaactta

SEQ ID NO: 10474 - DNA, 20 bp, synthetic construct
  misc_feature 1..20: note = Description of Artificial Sequence: Synthetic oligonucleotide
  misc_feature 1..20: note = Target: SCN10A; (-) strand; PAM type: NNNNGHTT; PAM sequence: TTTTGATT
  source 1..20: mol_type = other DNA
aaggctttttcagtcaggga

SEQ ID NO: 10475 - DNA, 20 bp, synthetic construct
  misc_feature 1..20: note = Description of Artificial Sequence: Synthetic oligonucleotide
  misc_feature 1..20: note = Target: SCN10A; (-) strand; PAM type: NNNNGHTT; PAM sequence: CAGGGATT
  source 1..20: mol_type = other DNA
cagtgaaaggctttttcagt

SEQ ID NO: 10476 - DNA, 20 bp, synthetic construct
  misc_feature 1..20: note = Description of Artificial Sequence: Synthetic oligonucleotide
  misc_feature 1..20: note = Target: SCN10A; (-) strand; PAM type: NNNNGHTT; PAM sequence: AAAGGCTT
  source 1..20: mol_type = other DNA
gttttaaggtttaaacagtg

SEQ ID NO: 10477 - DNA, 20 bp, synthetic construct
  misc_feature 1..20: note = Description of Artificial Sequence: Synthetic oligonucleotide
  misc_feature 1..20: note = Target: SCN10A; (-) strand; PAM type: NNNNGHTT; PAM sequence: TAAGGTTT
  source 1..20: mol_type = other DNA
tggaaagccaaggtttgttt

SEQ ID NO: 10478 - DNA, 20 bp, synthetic construct
  misc_feature 1..20: note = Description of Artificial Sequence: Synthetic oligonucleotide
  misc_feature 1..20: note = Target: SCN10A; (-) strand; PAM type: NNNNGHTT; PAM sequence: GTTTGTTT
  source 1..20: mol_type = other DNA
tgggaaaatggaaagccaag

SEQ ID NO: 10479 - DNA, 20 bp, synthetic construct
  misc_feature 1..20: note = Description of Artificial Sequence: Synthetic oligonucleotide
  misc_feature 1..20: note = Target: SCN10A; (-) strand; PAM type: NNNNGHTT; PAM sequence: CAAGGTTT
  source 1..20: mol_type = other DNA
cttgtgggaaaatggaaagc

SEQ ID NO: 10480 - DNA, 20 bp, synthetic construct
  misc_feature 1..20: note = Description of Artificial Sequence: Synthetic oligonucleotide
  misc_feature 1..20: note = Target: SCN10A; (-) strand; PAM type: NNNNGHTT; PAM sequence: TCCTGCTT
  source 1..20: mol_type = other DNA
atataacttcaaagtttgcc

SEQ ID NO: 10481 - DNA, 20 bp, synthetic construct
  misc_feature 1..20: note = Description of Artificial Sequence: Synthetic oligonucleotide
  misc_feature 1..20: note = Target: SCN10A; (-) strand; PAM type: NNNNGHTT; PAM sequence: CAAAGTTT
  source 1..20: mol_type = other DNA
gaaggaggccaatataactt

SEQ ID NO: 10482 - DNA, 20 bp, synthetic construct
  misc_feature 1..20: note = Description of Artificial Sequence: Synthetic oligonucleotide
  misc_feature 1..20: note = Target: SCN10A; (-) strand; PAM type: NNNNGHTT; PAM sequence: AAAGGTTT
  source 1..20: mol_type = other DNA
actgagtaactgaccccaat

SEQ ID NO: 10483 - DNA, 20 bp, synthetic construct
  misc_feature 1..20: note = Description of Artificial Sequence: Synthetic oligonucleotide
  misc_feature 1..20: note = Target: SCN10A; (-) strand; PAM type: NNNNGHTT; PAM sequence: TCTTGTTT
  source 1..20: mol_type = other DNA
tgataagtattttaatttta

SEQ ID NO: 10484 - DNA, 20 bp, synthetic construct
  misc_feature 1..20: note = Description of Artificial Sequence: Synthetic oligonucleotide
  misc_feature 1..20: note = Target: SCN10A; (-) strand; PAM type: NNNNGHTT; PAM sequence: CTGAGATT
  source 1..20: mol_type = other DNA
gaggcggaggttgcggtgag

SEQ ID NO: 10485 - DNA, 20 bp, synthetic construct
  misc_feature 1..20: note = Description of Artificial Sequence: Synthetic oligonucleotide
  misc_feature 1..20: note = Target: SCN10A; (-) strand; PAM type: NNNNGHTT; PAM sequence: AATTGCTT
  source 1..20: mol_type = other DNA
ttgggaggctgagggaggag

SEQ ID NO: 10486 - DNA, 20 bp, synthetic construct
  misc_feature 1..20: note = Description of Artificial Sequence: Synthetic oligonucleotide
  misc_feature 1..20: note = Target: SCN10A; (-) strand; PAM type: NNNNGHTT; PAM sequence: AATTGCTT
  source 1..20: mol_type = other DNA
tcaggagggtgaggcatgag

SEQ ID NO: 10487 - DNA, 20 bp, synthetic construct
  misc_feature 1..20: note = Description of Artificial Sequence: Synthetic oligonucleotide
  misc_feature 1..20: note = Target: SCN10A; (-) strand; PAM type: NNNNGHTT; PAM sequence: GATTGCTT
  source 1..20: mol_type = other DNA
ttgggaggccaaggtgggag

SEQ ID NO: 10488 - DNA, 20 bp, synthetic construct
  misc_feature 1..20: note = Description of Artificial Sequence: Synthetic oligonucleotide
  misc_feature 1..20: note = Target: SCN10A; (-) strand; PAM type: NNNNGHTT; PAM sequence: GGAGGATT
  source 1..20: mol_type = other DNA
aattttgggaggccaaggtg

SEQ ID NO: 10489 - DNA, 20 bp, synthetic construct
  misc_feature 1..20: note = Description of Artificial Sequence: Synthetic oligonucleotide
  misc_feature 1..20: note = Target: SCN10A; (-) strand; PAM type: NNNNGHTT; PAM sequence: CCAAGATT
  source 1..20: mol_type = other DNA
caggttttggtatcaaggtt

SEQ ID NO: 10490 - DNA, 20 bp, synthetic construct
  misc_feature 1..20: note = Description of Artificial Sequence: Synthetic oligonucleotide
  misc_feature 1..20: note = Target: SCN10A; (-) strand; PAM type: NNNNGHTT; PAM sequence: CCAGGTTT
  source 1..20: mol_type = other DNA
cctgactttcattgtccttg

SEQ ID NO: 10491 - DNA, 20 bp, synthetic construct
  misc_feature 1..20: note = Description of Artificial Sequence: Synthetic oligonucleotide
  misc_feature 1..20: note = Target: SCN10A; (-) strand; PAM type: NNNNGHTT; PAM sequence: TTAAGATT
  source 1..20: mol_type = other DNA
ttagtttgctaaaaatttgc

SEQ ID NO: 10492 - DNA, 20 bp, synthetic construct
  misc_feature 1..20: note = Description of Artificial Sequence: Synthetic oligonucleotide
  misc_feature 1..20: note = Target: SCN10A; (-) strand; PAM type: NNNNGHTT; PAM sequence: ATTTGCTT
  source 1..20: mol_type = other DNA
gaagatttagtttgctaaaa

SEQ ID NO: 10493 - DNA, 20 bp, synthetic construct
  misc_feature 1..20: note = Description of Artificial Sequence: Synthetic oligonucleotide
  misc_feature 1..20: note = Target: SCN10A; (-) strand; PAM type: NNNNGHTT; PAM sequence: TTTAGTTT
  source 1..20: mol_type = other DNA
ttttttaatacattggaaga

SEQ ID NO: 10494 - DNA, 20 bp, synthetic construct
  misc_feature 1..20: note = Description of Artificial Sequence: Synthetic oligonucleotide
  misc_feature 1..20: note = Target: SCN10A; (-) strand; PAM type: NNNNGHTT; PAM sequence: GGAAGATT
  source 1..20: mol_type = other DNA
gatgcattttttaatacatt

SEQ ID NO: 10495 - DNA, 20 bp, synthetic construct
  misc_feature 1..20: note = Description of Artificial Sequence: Synthetic oligonucleotide
  misc_feature 1..20: note = Target: SCN10A; (-) strand; PAM type: NNNNGHTT; PAM sequence: CCTAGCTT
  source 1..20: mol_type = other DNA
ctttacattcccagctcaaa

SEQ ID NO: 10496 - DNA, 20 bp, synthetic construct
  misc_feature 1..20: note = Description of Artificial Sequence: Synthetic oligonucleotide
  misc_feature 1..20: note = Target: SCN10A; (-) strand; PAM type: NNNNGHTT; PAM sequence: AATTGATT
  source 1..20: mol_type = other DNA
ttaaagtggtgaattatatt

SEQ ID NO: 10497 - DNA, 20 bp, synthetic construct
  misc_feature 1..20: note = Description of Artificial Sequence: Synthetic oligonucleotide
  misc_feature 1..20: note = Target: SCN10A; (-) strand; PAM type: NNNNGHTT; PAM sequence: GGATGTTT
  source 1..20: mol_type = other DNA
caagaatatttatcatgaat

SEQ ID NO: 10498 - DNA, 20 bp, synthetic construct
  misc_feature 1..20: note = Description of Artificial Sequence: Synthetic oligonucleotide
  misc_feature 1..20: note = Target: SCN10A; (-) strand; PAM type: NNNNGHTT; PAM sequence: GCAGGCTT
  source 1..20: mol_type = other DNA
caccacctctaacaattgtg

SEQ ID NO: 10499 - DNA, 20 bp, synthetic construct
  misc_feature 1..20: note = Description of Artificial Sequence: Synthetic oligonucleotide
  misc_feature 1..20: note = Target: SCN10A; (-) strand; PAM type: NNNNGHTT; PAM sequence: CTGGGATT
  source 1..20: mol_type = other DNA
tgccttggcctcctaaagtg

SEQ ID NO: 10500 - DNA, 20 bp, synthetic construct
  misc_feature 1..20: note = Description of Artificial Sequence: Synthetic oligonucleotide
  misc_feature 1..20: note = Target: SCN10A; (-) strand; PAM type: NNNNGHTT; PAM sequence: CGGGGTTT
  source 1..20: mol_type = other DNA
ctttgtatttttagtagaga

SEQ ID NO: 10501 - DNA, 20 bp, synthetic construct
  misc_feature 1..20: note = Description of Artificial Sequence: Synthetic oligonucleotide
  misc_feature 1..20: note = Target: SCN10A; (-) strand; PAM type: NNNNGHTT; PAM sequence: ATGAGTTT
  source 1..20: mol_type = other DNA
cacatcatgtgaaaataaca

SEQ ID NO: 10502 - DNA, 20 bp, synthetic construct
  misc_feature 1..20: note = Description of Artificial Sequence: Synthetic oligonucleotide
  misc_feature 1..20: note = Target: SCN10A; (-) strand; PAM type: NNNNGHTT; PAM sequence: CAATGTTT
  source 1..20: mol_type = other DNA
attctaataatttatctata

SEQ ID NO: 10503 - DNA, 20 bp, synthetic construct
  misc_feature 1..20: note = Description of Artificial Sequence: Synthetic oligonucleotide
  misc_feature 1..20: note = Target: SCN10A; (-) strand; PAM type: NNNNGHTT; PAM sequence: TGAGGTTT
  source 1..20: mol_type = other DNA
aaagtttaaaaatgtttcca

SEQ ID NO: 10504 - DNA, 20 bp, synthetic construct
  misc_feature 1..20: note = Description of Artificial Sequence: Synthetic oligonucleotide
  misc_feature 1..20: note = Target: SCN10A; (-) strand; PAM type: NNNNGHTT; PAM sequence: AAATGTTT
  source 1..20: mol_type = other DNA
agtctttcaataaagtttaa

SEQ ID NO: 10505 - DNA, 20 bp, synthetic construct
  misc_feature 1..20: note = Description of Artificial Sequence: Synthetic oligonucleotide
  misc_feature 1..20: note = Target: SCN10A; (-) strand; PAM type: NNNNGHTT; PAM sequence: TAAAGTTT
  source 1..20: mol_type = other DNA
gctgtataccagtctttcaa

SEQ ID NO: 10506 - DNA, 20 bp, synthetic construct
  misc_feature 1..20: note = Description of Artificial Sequence: Synthetic oligonucleotide
  misc_feature 1..20: note = Target: SCN10A; (-) strand; PAM type: NNNNGHTT; PAM sequence: TATTGTTT
  source 1..20: mol_type = other DNA
ccacatacacacaaaactgc

SEQ ID NO: 10507 - DNA, 20 bp, synthetic construct
  misc_feature 1..20: note = Description of Artificial Sequence: Synthetic oligonucleotide
  misc_feature 1..20: note = Target: SCN10A; (-) strand; PAM type: NNNNGHTT; PAM sequence: GGCAGCTT
  source 1..20: mol_type = other DNA
ccaatatcagtcttaattat

SEQ ID NO: 10508 - DNA, 20 bp, synthetic construct
  misc_feature 1..20: note = Description of Artificial Sequence: Synthetic oligonucleotide
  misc_feature 1..20: note = Target: SCN10A; (-) strand; PAM type: NNNNGHTT; PAM sequence: CATTGCTT
  source 1..20: mol_type = other DNA
ttccttctctcccaaaatag

SEQ ID NO: 10509 - DNA, 20 bp, synthetic construct
  misc_feature 1..20: note = Description of Artificial Sequence: Synthetic oligonucleotide
  misc_feature 1..20: note = Target: SCN10A; (-) strand; PAM type: NNNNGHTT; PAM sequence: GATTGATT
  source 1..20: mol_type = other DNA
gaactcaataaacacctgtt

SEQ ID NO: 10510 - DNA, 20 bp, synthetic construct
  misc_feature 1..20: note = Description of Artificial Sequence: Synthetic oligonucleotide
  misc_feature 1..20: note = Target: SCN10A; (-) strand; PAM type: NNNNGHTT; PAM sequence: TGTTGATT
  source 1..20: mol_type = other DNA
ataggaactcaataaacacc

SEQ ID NO: 10511 - DNA, 20 bp, synthetic construct
  misc_feature 1..20: note = Description of Artificial Sequence: Synthetic oligonucleotide
  misc_feature 1..20: note = Target: SCN10A; (-) strand; PAM type: NNNNGHTT; PAM sequence: TACCGTTT
  source 1..20: mol_type = other DNA
aaaaaccagagtttcttgtc

SEQ ID NO: 10512 - DNA, 20 bp, synthetic construct
  misc_feature 1..20: note = Description of Artificial Sequence: Synthetic oligonucleotide
  misc_feature 1..20: note = Target: SCN10A; (-) strand; PAM type: NNNNGHTT; PAM sequence: CAGAGTTT
  source 1..20: mol_type = other DNA
ctatcccatgaggcaaaaac

SEQ ID NO: 10513 - DNA, 20 bp, synthetic construct
  misc_feature 1..20: note = Description of Artificial Sequence: Synthetic oligonucleotide
  misc_feature 1..20: note = Target: SCN10A; (-) strand; PAM type: NNNNGHTT; PAM sequence: GTTGGATT
  source 1..20: mol_type = other DNA
ccccaaccacactatctaaa

SEQ ID NO: 10514 - DNA, 20 bp, synthetic construct
  misc_feature 1..20: note = Description of Artificial Sequence: Synthetic oligonucleotide
  misc_feature 1..20: note = Target: SCN10A; (-) strand; PAM type: NNNNGHTT; PAM sequence: TGAAGTTT
  source 1..20: mol_type = other DNA
acttcttggctttgggcctt

SEQ ID NO: 10515 - DNA, 20 bp, synthetic construct
  misc_feature 1..20: note = Description of Artificial Sequence: Synthetic oligonucleotide
  misc_feature 1..20: note = Target: SCN10A; (-) strand; PAM type: NNNNGHTT; PAM sequence: CTTGGCTT
  source 1..20: mol_type = other DNA
tcacacataacagagaactt

SEQ ID NO: 10516 - DNA, 20 bp, synthetic construct
  misc_feature 1..20: note = Description of Artificial Sequence: Synthetic oligonucleotide
  misc_feature 1..20: note = Target: SCN10A; (-) strand; PAM type: NNNNGHTT; PAM sequence: ACTGGTTT
  source 1..20: mol_type = other DNA
catttgttacaaataacttc

SEQ ID NO: 10517 - DNA, 20 bp, synthetic construct
  misc_feature 1..20: note = Description of Artificial Sequence: Synthetic oligonucleotide
  misc_feature 1..20: note = Target: SCN10A; (-) strand; PAM type: NNNNGHTT; PAM sequence: CAGAGTTT
  source 1..20: mol_type = other DNA
cacacacacacacacacaca

SEQ ID NO: 10518 - DNA, 20 bp, synthetic construct
  misc_feature 1..20: note = Description of Artificial Sequence: Synthetic oligonucleotide
  misc_feature 1..20: note = Target: SCN10A; (-) strand; PAM type: NNNNGHTT; PAM sequence: GAAAGCTT
  source 1..20: mol_type = other DNA
aaactggagcagattgaaca

SEQ ID NO: 10519 - DNA, 20 bp, synthetic construct
  misc_feature 1..20: note = Description of Artificial Sequence: Synthetic oligonucleotide
  misc_feature 1..20: note = Target: SCN10A; (-) strand; PAM type: NNNNGHTT; PAM sequence: AGCAGATT
  source 1..20: mol_type = other DNA
ttcagttttcagaaaactgg

SEQ ID NO: 10520 - DNA, 20 bp, synthetic construct
  misc_feature 1..20: note = Description of Artificial Sequence: Synthetic oligonucleotide
  misc_feature 1..20: note = Target: SCN10A; (-) strand; PAM type: NNNNGHTT; PAM sequence: TTCAGTTT
  source 1..20: mol_type = other DNA
actttattttcaggacagtt

SEQ ID NO: 10521 - DNA, 20 bp, synthetic construct
  misc_feature 1..20: note = Description of Artificial Sequence: Synthetic oligonucleotide
  misc_feature 1..20: note = Target: SCN10A; (-) strand; PAM type: NNNNGHTT; PAM sequence: GACAGTTT
  source 1..20: mol_type = other DNA
ttaatagactttattttcag

SEQ ID NO: 10522 - DNA, 20 bp, synthetic construct
  misc_feature 1..20: note = Description of Artificial Sequence: Synthetic oligonucleotide
  misc_feature 1..20: note = Target: SCN10A; (-) strand; PAM type: NNNNGHTT; PAM sequence: CCTGGTTT
  source 1..20: mol_type = other DNA
caccgccagctggtcagttt

SEQ ID NO: 10523 - DNA, 20 bp, synthetic construct
  misc_feature 1..20: note = Description of Artificial Sequence: Synthetic oligonucleotide
  misc_feature 1..20: note = Target: SCN10A; (-) strand; PAM type: NNNNGHTT; PAM sequence: GTCAGTTT
  source 1..20: mol_type = other DNA
agaaaaatcaccgccagctg

SEQ ID NO: 10524 - DNA, 20 bp, synthetic construct
  misc_feature 1..20: note = Description of Artificial Sequence: Synthetic oligonucleotide
  misc_feature 1..20: note = Target: SCN10A; (-) strand; PAM type: NNNNGHTT; PAM sequence: TTGTGTTT
  source 1..20: mol_type = other DNA
ccctctgcctctttgcgttt

SEQ ID NO: 10525 - DNA, 20 bp, synthetic construct
  misc_feature 1..20: note = Description of Artificial Sequence: Synthetic oligonucleotide
  misc_feature 1..20: note = Target: SCN10A; (-) strand; PAM type: NNNNGHTT; PAM sequence: TTGCGTTT
  source 1..20: mol_type = other DNA
caccttttccctctgcctct

SEQ ID NO: 10526 - DNA, 20 bp, synthetic construct
  misc_feature 1..20: note = Description of Artificial Sequence: Synthetic oligonucleotide
  misc_feature 1..20: note = Target: SCN10A; (-) strand; PAM type: NNNNGHTT; PAM sequence: CTTAGATT
  source 1..20: mol_type = other DNA
ccacttccctcatgacctag

SEQ ID NO: 10527 - DNA, 20 bp, synthetic construct
  misc_feature 1..20: note = Description of Artificial Sequence: Synthetic oligonucleotide
  misc_feature 1..20: note = Target: SCN10A; (-) strand; PAM type: NNNNGHTT; PAM sequence: CCTAGCTT
  source 1..20: mol_type = other DNA
ctattccacttccctcatga

SEQ ID NO: 10528 - DNA, 20 bp, synthetic construct
  misc_feature 1..20: note = Description of Artificial Sequence: Synthetic oligonucleotide
  misc_feature 1..20: note = Target: SCN10A; (-) strand; PAM type: NNNNGHTT; PAM sequence: CGCTGATT
  source 1..20: mol_type = other DNA
atgctaccctgtccccacct

SEQ ID NO: 10529 - DNA, 20 bp, synthetic construct
  misc_feature 1..20: note = Description of Artificial Sequence: Synthetic oligonucleotide
  misc_feature 1..20: note = Target: SCN10A; (-) strand; PAM type: NNNNGHTT; PAM sequence: ACAGGATT
  source 1..20: mol_type = other DNA
ttacttcacagtctgcccct

SEQ ID NO: 10530 - DNA, 20 bp, synthetic construct
  misc_feature 1..20: note = Description of Artificial Sequence: Synthetic oligonucleotide
  misc_feature 1..20: note = Target: SCN10A; (-) strand; PAM type: NNNNGHTT; PAM sequence: GCAAGTTT
  source 1..20: mol_type = other DNA
tcccaaacaaccaaaaatag

SEQ ID NO: 10531 - DNA, 20 bp, synthetic construct
  misc_feature 1..20: note = Description of Artificial Sequence: Synthetic oligonucleotide
  misc_feature 1..20: note = Target: SCN10A; (-) strand; PAM type: NNNNGHTT; PAM sequence: TAGTGTTT
  source 1..20: mol_type = other DNA
cacttggggaagcagaagct

SEQ ID NO: 10532 - DNA, 20 bp, synthetic construct
  misc_feature 1..20: note = Description of Artificial Sequence: Synthetic oligonucleotide
  misc_feature 1..20: note = Target: SCN10A; (-) strand; PAM type: NNNNGHTT; PAM sequence: AGAAGCTT
  source 1..20: mol_type = other DNA
tctgctacacttggggaagc

SEQ ID NO: 10533 - DNA, 20 bp, synthetic construct
  misc_feature 1..20: note = Description of Artificial Sequence: Synthetic oligonucleotide
  misc_feature 1..20: note = Target: SCN10A; (-) strand; PAM type: NNNNGHTT; PAM sequence: CCGAGATT
  source 1..20: mol_type = other DNA
gaggcggagcttacagtgag

SEQ ID NO: 10534 - DNA, 20 bp, synthetic construct
  misc_feature 1..20: note = Description of Artificial Sequence: Synthetic oligonucleotide
  misc_feature 1..20: note = Target: SCN10A; (-) strand; PAM type: NNNNGHTT; PAM sequence: CGGAGCTT
  source 1..20: mol_type = other DNA
aatggcgtgaacctgggagg

SEQ ID NO: 10535 - DNA, 20 bp, synthetic construct
  misc_feature 1..20: note = Description of Artificial Sequence: Synthetic oligonucleotide
  misc_feature 1..20: note = Target: SCN10A; (-) strand; PAM type: NNNNGHTT; PAM sequence: GTTAGTTT
  source 1..20: mol_type = other DNA
cataccctggcaggcccaca

SEQ ID NO: 10536 - DNA, 20 bp, synthetic construct
  misc_feature 1..20: note = Description of Artificial Sequence: Synthetic oligonucleotide
  misc_feature 1..20: note = Target: SCN10A; (-) strand; PAM type: NNNNGHTT; PAM sequence: GACAGATT
  source 1..20: mol_type = other DNA
ttaaatcacatttttagaag

SEQ ID NO: 10537 - DNA, 20 bp, synthetic construct
  misc_feature 1..20: note = Description of Artificial Sequence: Synthetic oligonucleotide
  misc_feature 1..20: note = Target: SCN10A; (-) strand; PAM type: NNNNGHTT; PAM sequence: TCCAGTTT
  source 1..20: mol_type = other DNA
tctttaatattggctactaa

SEQ ID NO: 10538 - DNA, 20 bp, synthetic construct
  misc_feature 1..20: note = Description of Artificial Sequence: Synthetic oligonucleotide
  misc_feature 1..20: note = Target: SCN10A; (-) strand; PAM type: NNNNGHTT; PAM sequence: TCCAGATT
  source 1..20: mol_type = other DNA
ttttccaaaaaagtcagaaa

SEQ ID NO: 10539 - DNA, 20 bp, synthetic construct
  misc_feature 1..20: note = Description of Artificial Sequence: Synthetic oligonucleotide
  misc_feature 1..20: note = Target: SCN10A; (-) strand; PAM type: NNNNGHTT; PAM sequence: GATCGCTT
  source 1..20: mol_type = other DNA
ttgggaggccgaggcaggca

SEQ ID NO: 10540 - DNA, 20 bp, synthetic construct
  misc_feature 1..20: note = Description of Artificial Sequence: Synthetic oligonucleotide
  misc_feature 1..20: note = Target: SCN10A; (-) strand; PAM type: NNNNGHTT; PAM sequence: GGATGTTT
  source 1..20: mol_type = other DNA
cagtgcacaactcctgggag

SEQ ID NO: 10541 - DNA, 20 bp, synthetic construct
  misc_feature 1..20: note = Description of Artificial Sequence: Synthetic oligonucleotide
  misc_feature 1..20: note = Target: SCN10A; (-) strand; PAM type: NNNNGHTT; PAM sequence: CCTGGATT
  source 1..20: mol_type = other DNA
gagcccctgaacttggcgta

SEQ ID NO: 10542 - DNA, 20 bp, synthetic construct
  misc_feature 1..20: note = Description of Artificial Sequence: Synthetic oligonucleotide
  misc_feature 1..20: note = Target: SCN10A; (-) strand; PAM type: NNNNGHTT; PAM sequence: ATCTGCTT
  source 1..20: mol_type = other DNA
gcaacgagactctaggacag

SEQ ID NO: 10543 - DNA, 20 bp, synthetic construct
  misc_feature 1..20: note = Description of Artificial Sequence: Synthetic oligonucleotide
  misc_feature 1..20: note = Target: SCN10A; (-) strand; PAM type: NNNNGHTT; PAM sequence: CACGGCTT
  source 1..20: mol_type = other DNA
aaagaggcctgaagaaatgt

SEQ ID NO: 10544 - DNA, 20 bp, synthetic construct
  misc_feature 1..20: note = Description of Artificial Sequence: Synthetic oligonucleotide
  misc_feature 1..20: note = Target: SCN10A; (-) strand; PAM type: NNNNGHTT; PAM sequence: GGAAGCTT
  source 1..20: mol_type = other DNA
aggtctccaggccatctgga

SEQ ID NO: 10545 - DNA, 20 bp, synthetic construct
  misc_feature 1..20: note = Description of Artificial Sequence: Synthetic oligonucleotide
  misc_feature 1..20: note = Target: SCN10A; (-) strand; PAM type: NNNNGHTT; PAM sequence: GTCAGATT
  source 1..20: mol_type = other DNA
caggtttgtcagccaaacct

SEQ ID NO: 10546 - DNA, 20 bp, synthetic construct
  misc_feature 1..20: note = Description of Artificial Sequence: Synthetic oligonucleotide
  misc_feature 1..20: note = Target: SCN10A; (-) strand; PAM type: NNNNGHTT; PAM sequence: ACAGGTTT
  source 1..20: mol_type = other DNA
cacccacttttatcagagcc

SEQ ID NO: 10547 - DNA, 20 bp, synthetic construct
  misc_feature 1..20: note = Description of Artificial Sequence: Synthetic oligonucleotide
  misc_feature 1..20: note = Target: SCN10A; (-) strand; PAM type: NNNNGHTT; PAM sequence: CTCTGATT
  source 1..20: mol_type = other DNA
ccagcctcaaggaagtcatt

SEQ ID NO: 10548 - DNA, 20 bp, synthetic construct
  misc_feature 1..20: note = Description of Artificial Sequence: Synthetic oligonucleotide
  misc_feature 1..20: note = Target: SCN10A; (-) strand; PAM type: NNNNGHTT; PAM sequence: AGTCGTTT
  source 1..20: mol_type = other DNA
tcacaacaaccctgagagat

SEQ ID NO: 10549 - DNA, 20 bp, synthetic construct
  misc_feature 1..20: note = Description of Artificial Sequence: Synthetic oligonucleotide
  misc_feature 1..20: note = Target: SCN10A; (-) strand; PAM type: NNNNGHTT; PAM sequence: CCCAGCTT
  source 1..20: mol_type = other DNA
tggagacttgggtctgtggc

SEQ ID NO: 10550 - DNA, 20 bp, synthetic construct
  misc_feature 1..20: note = Description of Artificial Sequence: Synthetic oligonucleotide
  misc_feature 1..20: note = Target: SCN10A; (-) strand; PAM type: NNNNGHTT; PAM sequence: CCCAGATT
  source 1..20: mol_type = other DNA
atggcttggggaaactccca

SEQ ID NO: 10551 - DNA, 20 bp, synthetic construct
  misc_feature 1..20: note = Description of Artificial Sequence: Synthetic oligonucleotide
  misc_feature 1..20: note = Target: SCN10A; (-) strand; PAM type: NNNNGHTT; PAM sequence: GATGGCTT
  source 1..20: mol_type = other DNA
cttggtaatgtttttctctt

SEQ ID NO: 10552 - DNA, 20 bp, synthetic construct
  misc_feature 1..20: note = Description of Artificial Sequence: Synthetic oligonucleotide
  misc_feature 1..20: note = Target: SCN10A; (-) strand; PAM type: NNNNGHTT; PAM sequence: TAATGTTT
  source 1..20: mol_type = other DNA
gctgcggagcttccgcttgg

SEQ ID NO: 10553 - DNA, 20 bp, synthetic construct
  misc_feature 1..20: note = Description of Artificial Sequence: Synthetic oligonucleotide
  misc_feature 1..20: note = Target: SCN10A; (-) strand; PAM type: NNNNGHTT; PAM sequence: TTCCGCTT
  source 1..20: mol_type = other DNA
gcctgtctgtgctgcggagc

SEQ ID NO: 10554 - DNA, 20 bp, synthetic construct
  misc_feature 1..20: note = Description of Artificial Sequence: Synthetic oligonucleotide
  misc_feature 1..20: note = Target: SCN10A; (-) strand; PAM type: NNNNGHTT; PAM sequence: CGGAGCTT
  source 1..20: mol_type = other DNA
agggaagcctgtctgtgctg

SEQ ID NO: 10555 - DNA, 20 bp, synthetic construct
  misc_feature 1..20: note = Description of Artificial Sequence: Synthetic oligonucleotide
  misc_feature 1..20: note = Target: SCN10A; (-) strand; PAM type: NNNNGHTT; PAM sequence: GCTTGTTT
  source 1..20: mol_type = other DNA
cagatcccactgtgatgaaa

SEQ ID NO: 10556 - DNA, 20 bp, synthetic construct
  misc_feature 1..20: note = Description of Artificial Sequence: Synthetic oligonucleotide
  misc_feature 1..20: note = Target: SCN10A; (-) strand; PAM type: NNNNGHTT; PAM sequence: GAAAGCTT
  source 1..20: mol_type = other DNA
cccacagatcccactgtgat

SEQ ID NO: 10557 - DNA, 20 bp, synthetic construct
  misc_feature 1..20: note = Description of Artificial Sequence: Synthetic oligonucleotide
  misc_feature 1..20: note = Target: SCN10A; (-) strand; PAM type: NNNNGHTT; PAM sequence: AAAGGATT
  source 1..20: mol_type = other DNA
catagcaactgaacaaaaca

SEQ ID NO: 10558 - DNA, 20 bp, synthetic construct
  misc_feature 1..20: note = Description of Artificial Sequence: Synthetic oligonucleotide
  misc_feature 1..20: note = Target: SCN10A; (-) strand; PAM type: NNNNGHTT; PAM sequence: ATCCGCTT
  source 1..20: mol_type = other DNA
taataatgatcttaaagact

SEQ ID NO: 10559 - DNA, 20 bp, synthetic construct
  misc_feature 1..20: note = Description of Artificial Sequence: Synthetic oligonucleotide
  misc_feature 1..20: note = Target: SCN10A; (-) strand; PAM type: NNNNGHTT; PAM sequence: ACACGTTT
  source 1..20: mol_type = other DNA
tctgtgatgtcccacaaccc

SEQ ID NO: 10560 - DNA, 20 bp, synthetic construct
  misc_feature 1..20: note = Description of Artificial Sequence: Synthetic oligonucleotide
  misc_feature 1..20: note = Target: SCN10A; (-) strand; PAM type: NNNNGHTT; PAM sequence: CTGGGATT
  source 1..20: mol_type = other DNA
taagctaggaaatgtctggg

SEQ ID NO: 10561 - DNA, 20 bp, synthetic construct
  misc_feature 1..20: note = Description of Artificial Sequence: Synthetic oligonucleotide
  misc_feature 1..20: note = Target: SCN10A; (-) strand; PAM type: NNNNGHTT; PAM sequence: CCAAGCTT
  source 1..20: mol_type = other DNA
aggaaggatgcattatttgt

SEQ ID NO: 10562 - DNA, 20 bp, synthetic construct
  misc_feature 1..20: note = Description of Artificial Sequence: Synthetic oligonucleotide
  misc_feature 1..20: note = Target: SCN10A; (-) strand; PAM type: NNNNGHTT; PAM sequence: CGTTGCTT
  source 1..20: mol_type = other DNA
gaaaagcacctgaccctggt

SEQ ID NO: 10563 - DNA, 20 bp, synthetic construct
  misc_feature 1..20: note = Description of Artificial Sequence: Synthetic oligonucleotide
  misc_feature 1..20: note = Target: SCN10A; (-) strand; PAM type: NNNNGHTT; PAM sequence: GTCTGTTT
  source 1..20: mol_type = other DNA
ctccataagaaggatgcatt

SEQ ID NO: 10564 - DNA, 20 bp, synthetic construct
  misc_feature 1..20: note = Description of Artificial Sequence: Synthetic oligonucleotide
  misc_feature 1..20: note = Target: SCN10A; (-) strand; PAM type: NNNNGHTT; PAM sequence: GCCTGTTT
  source 1..20: mol_type = other DNA
gaaagtcacttaaactctca

SEQ ID NO: 10565 - DNA, 20 bp, synthetic construct
  misc_feature 1..20: note = Description of Artificial Sequence: Synthetic oligonucleotide
  misc_feature 1..20: note = Target: SCN10A; (-) strand; PAM type: NNNNGHTT; PAM sequence: AGGTGCTT
  source 1..20: mol_type = other DNA
cttggtgcctgcaatgagtc

SEQ ID NO: 10566 - DNA, 20 bp, synthetic construct
  misc_feature 1..20: note = Description of Artificial Sequence: Synthetic oligonucleotide
  misc_feature 1..20: note = Target: SCN10A; (-) strand; PAM type: NNNNGHTT; PAM sequence: ATGTGCTT
  source 1..20: mol_type = other DNA
ttttttaaagcaagaaagtc

SEQ ID NO: 10567 - DNA, 20 bp, synthetic construct
  misc_feature 1..20: note = Description of Artificial Sequence: Synthetic oligonucleotide
  misc_feature 1..20: note = Target: SCN10A; (-) strand; PAM type: NNNNGHTT; PAM sequence: GAATGCTT
  source 1..20: mol_type = other DNA
ggaaaaatggaaagagaaga

SEQ ID NO: 10568 - DNA, 20 bp, synthetic construct
  misc_feature 1..20: note = Description of Artificial Sequence: Synthetic oligonucleotide
  misc_feature 1..20: note = Target: SCN10A; (-) strand; PAM type: NNNNGHTT; PAM sequence: TCATGTTT
  source 1..20: mol_type = other DNA
catggtggaatcagcatgcc

SEQ ID NO: 10569 - DNA, 20 bp, synthetic construct
  misc_feature 1..20: note = Description of Artificial Sequence: Synthetic oligonucleotide
  misc_feature 1..20: note = Target: SCN10A; (-) strand; PAM type: NNNNGHTT; PAM sequence: TCCAGCTT
  source 1..20: mol_type = other DNA
agaactgtctggctttgggg

SEQ ID NO: 10570 - DNA, 20 bp, synthetic construct
  misc_feature 1..20: note = Description of Artificial Sequence: Synthetic oligonucleotide
  misc_feature 1..20: note = Target: SCN10A; (-) strand; PAM type: NNNNGHTT; PAM sequence: TCTGGCTT
  source 1..20: mol_type = other DNA
tactggattcaccagaactg

SEQ ID NO: 10571 - DNA, 20 bp, synthetic construct
  misc_feature 1..20: note = Description of Artificial Sequence: Synthetic oligonucleotide
  misc_feature 1..20: note = Target: SCN10A; (-) strand; PAM type: NNNNGHTT; PAM sequence: ACTGGATT
  source 1..20: mol_type = other DNA
caccaagctggaggtgacct

SEQ ID NO: 10572 - DNA, 20 bp, synthetic construct
  misc_feature 1..20: note = Description of Artificial Sequence: Synthetic oligonucleotide
  misc_feature 1..20: note = Target: SCN10A; (-) strand; PAM type: NNNNGHTT; PAM sequence: GCCCGCTT
  source 1..20: mol_type = other DNA
ccagacagaccggctgccaa

SEQ ID NO: 10573 - DNA, 20 bp, synthetic construct
  misc_feature 1..20: note = Description of Artificial Sequence: Synthetic oligonucleotide
  misc_feature 1..20: note = Target: SCN10A; (-) strand; PAM type: NNNNGHTT; PAM sequence: TTGAGTTT
  source 1..20: mol_type = other DNA
atcttcccaagatcatagag

SEQ ID NO: 10574 - DNA, 20 bp, synthetic construct
  misc_feature 1..20: note = Description of Artificial Sequence: Synthetic oligonucleotide
  misc_feature 1..20: note = Target: SCN10A; (-) strand; PAM type: NNNNGHTT; PAM sequence: CATGGATT
  source 1..20: mol_type = other DNA
aataatactcagatgcttct

SEQ ID NO: 10575 - DNA, 20 bp, synthetic construct
  misc_feature 1..20: note = Description of Artificial Sequence: Synthetic oligonucleotide
  misc_feature 1..20: note = Target: SCN10A; (-) strand; PAM type: NNNNGHTT; PAM sequence: AGATGCTT
  source 1..20: mol_type = other DNA
caggaatagtaataatactc

SEQ ID NO: 10576 - DNA, 20 bp, synthetic construct
  misc_feature 1..20: note = Description of Artificial Sequence: Synthetic oligonucleotide
  misc_feature 1..20: note = Target: SCN10A; (-) strand; PAM type: NNNNGHTT; PAM sequence: ACTGGATT
  source 1..20: mol_type = other DNA
cttaacaagatacaatccat

SEQ ID NO: 10577 - DNA, 20 bp, synthetic construct
  misc_feature 1..20: note = Description of Artificial Sequence: Synthetic oligonucleotide
  misc_feature 1..20: note = Target: SCN10A; (-) strand; PAM type: NNNNGHTT; PAM sequence: TGCTGCTT
  source 1..20: mol_type = other DNA
ggcatctagtttagacatca

SEQ ID NO: 10578 - DNA, 20 bp, synthetic construct
  misc_feature 1..20: note = Description of Artificial Sequence: Synthetic oligonucleotide
  misc_feature 1..20: note = Target: SCN10A; (-) strand; PAM type: NNNNGHTT; PAM sequence: TCTAGTTT
  source 1..20: mol_type = other DNA
gtcggaacttttctttggca

SEQ ID NO: 10579 - DNA, 20 bp, synthetic construct
  misc_feature 1..20: note = Description of Artificial Sequence: Synthetic oligonucleotide
  misc_feature 1..20: note = Target: SCN10A; (-) strand; PAM type: NNNNGHTT; PAM sequence: CCACGATT
  source 1..20: mol_type = other DNA
atgaccacaattaacagtag

SEQ ID NO: 10580 - DNA, 20 bp, synthetic construct
  misc_feature 1..20: note = Description of Artificial Sequence: Synthetic oligonucleotide
  misc_feature 1..20: note = Target: SCN10A; (-) strand; PAM type: NNNNGHTT; PAM sequence: GTCTGTTT
  source 1..20: mol_type = other DNA
taaagacaatctttggactt

SEQ ID NO: 10581 - DNA, 20 bp, synthetic construct
  misc_feature 1..20: note = Description of Artificial Sequence: Synthetic oligonucleotide
  misc_feature 1..20: note = Target: SCN10A; (-) strand; PAM type: NNNNGHTT; PAM sequence: AATGGCTT
  source 1..20: mol_type = other DNA
acccaggctgagctggtggg

SEQ ID NO: 10582 - DNA, 20 bp, synthetic construct
  misc_feature 1..20: note = Description of Artificial Sequence: Synthetic oligonucleotide
  misc_feature 1..20: note = Target: SCN10A; (-) strand; PAM type: NNNNGHTT; PAM sequence: TTGGGCTT
  source 1..20: mol_type = other DNA
gaagctcaagacaattctct

SEQ ID NO: 10583 - DNA, 20 bp, synthetic construct
  misc_feature 1..20: note = Description of Artificial Sequence: Synthetic oligonucleotide
  misc_feature 1..20: note = Target: SCN10A; (-) strand; PAM type: NNNNGHTT; PAM sequence: CTGGGATT
  source 1..20: mol_type = other DNA
ttgtctcagaagtatctgat

SEQ ID NO: 10584 - DNA, 20 bp, synthetic construct
  misc_feature 1..20: note = Description of Artificial Sequence: Synthetic oligonucleotide
  misc_feature 1..20: note = Target: SCN10A; (-) strand; PAM type: NNNNGHTT; PAM sequence: ACCAGCTT
  source 1..20: mol_type = other DNA
agaagtgcccaccctgcttg

SEQ ID NO: 10585 - DNA, 20 bp, synthetic construct
  misc_feature 1..20: note = Description of Artificial Sequence: Synthetic oligonucleotide
  misc_feature 1..20: note = Target: SCN10A; (-) strand; PAM type: NNNNGHTT; PAM sequence: CCCTGCTT
  source 1..20: mol_type = other DNA
agtctgaacagaagtgccca

SEQ ID NO: 10586 - DNA, 20 bp, synthetic construct
  misc_feature 1..20: note = Description of Artificial Sequence: Synthetic oligonucleotide
  misc_feature 1..20: note = Target: SCN10A; (-) strand; PAM type: NNNNGHTT; PAM sequence: AGCAGTTT
  source 1..20: mol_type = other DNA
cagtaaaaatatgtaatgtc

SEQ ID NO: 10587 - DNA, 20 bp, synthetic construct
  misc_feature 1..20: note = Description of Artificial Sequence: Synthetic oligonucleotide
  misc_feature 1..20: note = Target: SCN10A; (-) strand; PAM type: NNNNGHTT; PAM sequence: TCAGGTTT
  source 1..20: mol_type = other DNA
aaattgggtctattcacagt

SEQ ID NO: 10588 - DNA, 20 bp, synthetic construct
  misc_feature 1..20: note = Description of Artificial Sequence: Synthetic oligonucleotide
  misc_feature 1..20: note = Target: SCN10A; (-) strand; PAM type: NNNNGHTT; PAM sequence: GCCAGATT
  source 1..20: mol_type = other DNA
gaatataatatagaaacaca

SEQ ID NO: 10589 - DNA, 20 bp, synthetic construct
  misc_feature 1..20: note = Description of Artificial Sequence: Synthetic oligonucleotide
  misc_feature 1..20: note = Target: SCN10A; (-) strand; PAM type: NNNNGHTT; PAM sequence: CAGAGATT
  source 1..20: mol_type = other DNA
aggtggacttgcagatatgc

SEQ ID NO: 10590 - DNA, 20 bp, synthetic construct
  misc_feature 1..20: note = Description of Artificial Sequence: Synthetic oligonucleotide
  misc_feature 1..20: note = Target: SCN10A; (-) strand; PAM type: NNNNGHTT; PAM sequence: GCATGTTT
  source 1..20: mol_type = other DNA
aaagccgcgagataattaaa

SEQ ID NO: 10591 - DNA, 20 bp, synthetic construct
  misc_feature 1..20: note = Description of Artificial Sequence: Synthetic oligonucleotide
  misc_feature 1..20: note = Target: SCN10A; (-) strand; PAM type: NNNNGHTT; PAM sequence: GTCAGATT
  source 1..20: mol_type = other DNA
tgaatttggaagcagttaaa

SEQ ID NO: 10592 - DNA, 20 bp, synthetic construct
  misc_feature 1..20: note = Description of Artificial Sequence: Synthetic oligonucleotide
  misc_feature 1..20: note = Target: SCN10A; (-) strand; PAM type: NNNNGHTT; PAM sequence: ACTGGTTT
  source 1..20: mol_type = other DNA
gtccccagagccaaatgaac

SEQ ID NO: 10593 - DNA, 20 bp, synthetic construct
  misc_feature 1..20: note = Description of Artificial Sequence: Synthetic oligonucleotide
  misc_feature 1..20: note = Target: SCN10A; (-) strand; PAM type: NNNNGHTT; PAM sequence: GAATGCTT
  source 1..20: mol_type = other DNA
acacagagaagctaaggtga

SEQ ID NO: 10594 - DNA, 20 bp, synthetic construct
  misc_feature 1..20: note = Description of Artificial Sequence: Synthetic oligonucleotide
  misc_feature 1..20: note = Target: SCN10A; (-) strand; PAM type: NNNNGHTT; PAM sequence: ATGAGATT
  source 1..20: mol_type = other DNA
agagatggttttttagggct

SEQ ID NO: 10595 - DNA, 20 bp, synthetic construct
  misc_feature 1..20: note = Description of Artificial Sequence: Synthetic oligonucleotide
  misc_feature 1..20: note = Target: SCN10A; (-) strand; PAM type: NNNNGHTT; PAM sequence: GATGGTTT
  source 1..20: mol_type = other DNA
ttggtgggaattggcataga

SEQ ID NO: 10596 - DNA, 20 bp, synthetic construct
  misc_feature 1..20: note = Description of Artificial Sequence: Synthetic oligonucleotide
  misc_feature 1..20: note = Target: SCN10A; (-) strand; PAM type: NNNNGHTT; PAM sequence: TGGAGATT
  source 1..20: mol_type = other DNA
aacacagttacacatccaca

SEQ ID NO: 10597 - DNA, 20 bp, synthetic construct
  misc_feature 1..20: note = Description of Artificial Sequence: Synthetic oligonucleotide
  misc_feature 1..20: note = Target: SCN10A; (-) strand; PAM type: NNNNGHTT; PAM sequence: TGTTGTTT
  source 1..20: mol_type = other DNA
atgtattatgctttatcagt

SEQ ID NO: 10598 - DNA, 20 bp, synthetic construct
  misc_feature 1..20: note = Description of Artificial Sequence: Synthetic oligonucleotide
  misc_feature 1..20: note = Target: SCN10A; (-) strand; PAM type: NNNNGHTT; PAM sequence: TTATGCTT
  source 1..20: mol_type = other DNA
tcattctttttcacaatgta

SEQ ID NO: 10599 - DNA, 20 bp, synthetic construct
  misc_feature 1..20: note = Description of Artificial Sequence: Synthetic oligonucleotide
  misc_feature 1..20: note = Target: SCN10A; (-) strand; PAM type: NNNNGHTT; PAM sequence: TCCAGTTT
  source 1..20: mol_type = other DNA
ctggtgcacccccctcccac

SEQ ID NO: 10600 - DNA, 20 bp, synthetic construct
  misc_feature 1..20: note = Description of Artificial Sequence: Synthetic oligonucleotide
  misc_feature 1..20: note = Target: SCN10A; (-) strand; PAM type: NNNNGHTT; PAM sequence: AACTGATT
  source 1..20: mol_type = other DNA
ggcacacagttatttctcta

SEQ ID NO: 10601 - DNA, 20 bp, synthetic construct
  misc_feature 1..20: note = Description of Artificial Sequence: Synthetic oligonucleotide
  misc_feature 1..20: note = Target: SCN10A; (-) strand; PAM type: NNNNGHTT; PAM sequence: AAAAGCTT
  source 1..20: mol_type = other DNA
tttccaagccttgtagtgag

SEQ ID NO: 10602 - DNA, 20 bp, synthetic construct
  misc_feature 1..20: note = Description of Artificial Sequence: Synthetic oligonucleotide
  misc_feature 1..20: note = Target: SCN10A; (-) strand; PAM type: NNNNGHTT; PAM sequence: CAAAGTTT
  source 1..20: mol_type = other DNA
aaaataaatttcaaatgcac

SEQ ID NO: 10603 - DNA, 20 bp, synthetic construct
  misc_feature 1..20: note = Description of Artificial Sequence: Synthetic oligonucleotide
  misc_feature 1..20: note = Target: SCN10A; (-) strand; PAM type: NNNNGHTT; PAM sequence: CAGTGATT
  source 1..20: mol_type = other DNA
tgtagtttctaaaatccagt

SEQ ID NO: 10604 - DNA, 20 bp, synthetic construct
  misc_feature 1..20: note = Description of Artificial Sequence: Synthetic oligonucleotide
  misc_feature 1..20: note = Target: SCN10A; (-) strand; PAM type: NNNNGHTT; PAM sequence: TGTAGTTT
  source 1..20: mol_type = other DNA
gctttgccagtttggacatc

SEQ ID NO: 10605 - DNA, 20 bp, synthetic construct
  misc_feature 1..20: note = Description of Artificial Sequence: Synthetic oligonucleotide
  misc_feature 1..20: note = Target: SCN10A; (-) strand; PAM type: NNNNGHTT; PAM sequence: GCCAGTTT
  source 1..20: mol_type = other DNA
tctttagagaactatgcttt

SEQ ID NO: 10606 - DNA, 20 bp, synthetic construct
  misc_feature 1..20: note = Description of Artificial Sequence: Synthetic oligonucleotide
  misc_feature 1..20: note = Target: SCN10A; (-) strand; PAM type: NNNNGHTT; PAM sequence: CTATGCTT
  source 1..20: mol_type = other DNA
gtgccaacttctttagagaa

SEQ ID NO: 10607 - DNA, 20 bp, synthetic construct
  misc_feature 1..20: note = Description of Artificial Sequence: Synthetic oligonucleotide
  misc_feature 1..20: note = Target: SCN10A; (-) strand; PAM type: NNNNGHTT; PAM sequence: TGTTGATT
  source 1..20: mol_type = other DNA
cttttgttccaaacagggat

SEQ ID NO: 10608 - DNA, 20 bp, synthetic construct
  misc_feature 1..20: note = Description of Artificial Sequence: Synthetic oligonucleotide
  misc_feature 1..20: note = Target: SCN10A; (-) strand; PAM type: NNNNGHTT; PAM sequence: CAGGGATT
  source 1..20: mol_type = other DNA
gttcttgcttttgttccaaa

SEQ ID NO: 10609 - DNA, 20 bp, synthetic construct
  misc_feature 1..20: note = Description of Artificial Sequence: Synthetic oligonucleotide
  misc_feature 1..20: note = Target: SCN10A; (-) strand; PAM type: NNNNGHTT; PAM sequence: TCTTGCTT
  source 1..20: mol_type = other DNA
caaaataggtccagggaagt

SEQ ID NO: 10610 - DNA, 20 bp, synthetic construct
  misc_feature 1..20: note = Description of Artificial Sequence: Synthetic oligonucleotide
  misc_feature 1..20: note = Target: SCN10A; (-) strand; PAM type: NNNNGHTT; PAM sequence: CTGTGCTT
  source 1..20: mol_type = other DNA
tcctcattcatgactacttc

SEQ ID NO: 10611 - DNA, 20 bp, synthetic construct
  misc_feature 1..20: note = Description of Artificial Sequence: Synthetic oligonucleotide
  misc_feature 1..20: note = Target: SCN10A; (-) strand; PAM type: NNNNGHTT; PAM sequence: GGCTGCTT
  source 1..20: mol_type = other DNA
tcccatcatgcctcacaggt

SEQ ID NO: 10612 - DNA, 20 bp, synthetic construct
  misc_feature 1..20: note = Description of Artificial Sequence: Synthetic oligonucleotide
  misc_feature 1..20: note = Target: SCN10A; (-) strand; PAM type: NNNNGHTT; PAM sequence: GGCTGTTT
  source 1..20: mol_type = other DNA
atcaagttcaacaatgtcaa

SEQ ID NO: 10613 - DNA, 20 bp, synthetic construct
  misc_feature 1..20: note = Description of Artificial Sequence: Synthetic oligonucleotide
  misc_feature 1..20: note = Target: SCN10A; (-) strand; PAM type: NNNNGHTT; PAM sequence: TCATGTTT
  source 1..20: mol_type = other DNA
cttttgaggtggggccatgg

SEQ ID NO: 10614 - DNA, 20 bp, synthetic construct
  misc_feature 1..20: note = Description of Artificial Sequence: Synthetic oligonucleotide
  misc_feature 1..20: note = Target: SCN10A; (-) strand; PAM type: NNNNGHTT; PAM sequence: TGAAGATT
  source 1..20: mol_type = other DNA
tctgggagaataagagagac

SEQ ID NO: 10615 - DNA, 20 bp, synthetic construct
  misc_feature 1..20: note = Description of Artificial Sequence: Synthetic oligonucleotide
  misc_feature 1..20: note = Target: SCN10A; (-) strand; PAM type: NNNNGHTT; PAM sequence: GTTTGTTT
  source 1..20: mol_type = other DNA
gggggagtttttgtttgttt

SEQ ID NO: 10616 - DNA, 20 bp, synthetic construct
  misc_feature 1..20: note = Description of Artificial Sequence: Synthetic oligonucleotide
  misc_feature 1..20: note = Target: SCN10A; (-) strand; PAM type: NNNNGHTT; PAM sequence: GTTTGTTT
  source 1..20: mol_type = other DNA
gtttgggggagtttttgttt

SEQ ID NO: 10617 - DNA, 20 bp, synthetic construct
  misc_feature 1..20: note = Description of Artificial Sequence: Synthetic oligonucleotide
  misc_feature 1..20: note = Target: SCN10A; (-) strand; PAM type: NNNNGHTT; PAM sequence: GTTTGTTT
  source 1..20: mol_type = other DNA
ttgtgtttgggggagttttt

SEQ ID NO: 10618 - DNA, 20 bp, synthetic construct
  misc_feature 1..20: note = Description of Artificial Sequence: Synthetic oligonucleotide
  misc_feature 1..20: note = Target: SCN10A; (-) strand; PAM type: NNNNGHTT; PAM sequence: TTTTGTTT
  source 1..20: mol_type = other DNA
gtttttgtgtttgggggagt

SEQ ID NO: 10619 - DNA, 20 bp, synthetic construct
  misc_feature 1..20: note = Description of Artificial Sequence: Synthetic oligonucleotide
  misc_feature 1..20: note = Target: SCN10A; (-) strand; PAM type: NNNNGHTT; PAM sequence: GGGAGTTT
  source 1..20: mol_type = other DNA
tttttggtttttgtgtttgg

SEQ ID NO: 10620 - DNA, 20 bp, synthetic construct
  misc_feature 1..20: note = Description of Artificial Sequence: Synthetic oligonucleotide
  misc_feature 1..20: note = Target: SCN10A; (-) strand; PAM type: NNNNGHTT; PAM sequence: TTGTGTTT
  source 1..20: mol_type = other DNA
gaaagaagactttttggttt

SEQ ID NO: 10621 - DNA, 20 bp, synthetic construct
  misc_feature 1..20: note = Description of Artificial Sequence: Synthetic oligonucleotide
  misc_feature 1..20: note = Target: SCN10A; (-) strand; PAM type: NNNNGHTT; PAM sequence: TTTGGTTT
  source 1..20: mol_type = other DNA
ggagaattgaaagaagactt

SEQ ID NO: 10622 - DNA, 20 bp, synthetic construct
  misc_feature 1..20: note = Description of Artificial Sequence: Synthetic oligonucleotide
  misc_feature 1..20: note = Target: SCN10A; (-) strand; PAM type: NNNNGHTT; PAM sequence: AGAAGTTT
  source 1..20: mol_type = other DNA
gtgtacagacaattttttca

SEQ ID NO: 10623 - DNA, 20 bp, synthetic construct
  misc_feature 1..20: note = Description of Artificial Sequence: Synthetic oligonucleotide
  misc_feature 1..20: note = Target: SCN10A; (-) strand; PAM type: NNNNGHTT; PAM sequence: AGGGGCTT
  source 1..20: mol_type = other DNA
gtaggcagaggtcatattga

SEQ ID NO: 10624 - DNA, 20 bp, synthetic construct
  misc_feature 1..20: note = Description of Artificial Sequence: Synthetic oligonucleotide
  misc_feature 1..20: note = Target: SCN10A; (-) strand; PAM type: NNNNGHTT; PAM sequence: AGAGGATT
  source 1..20: mol_type = other DNA
tctttggtgatctaagcaaa

SEQ ID NO: 10625 - DNA, 20 bp, synthetic construct
  misc_feature 1..20: note = Description of Artificial Sequence: Synthetic oligonucleotide
  misc_feature 1..20: note = Target: SCN10A; (-) strand; PAM type: NNNNGHTT; PAM sequence: AGGGGCTT
  source 1..20: mol_type = other DNA
aatgaaacatgaaaaggtcc

SEQ ID NO: 10626 - DNA, 20 bp, synthetic construct
  misc_feature 1..20: note = Description of Artificial Sequence: Synthetic oligonucleotide
  misc_feature 1..20: note = Target: SCN10A; (-) strand; PAM type: NNNNGHTT; PAM sequence: AAATGTTT
  source 1..20: mol_type = other DNA
agacacagttctaacaaact

SEQ ID NO: 10627 - DNA, 20 bp, synthetic construct
  misc_feature 1..20: note = Description of Artificial Sequence: Synthetic oligonucleotide
  misc_feature 1..20: note = Target: SCN10A; (-) strand; PAM type: NNNNGHTT; PAM sequence: AGCAGTTT
  source 1..20: mol_type = other DNA
tgtatatatatatatttgaa

SEQ ID NO: 10628 - DNA, 20 bp, synthetic construct
  misc_feature 1..20: note = Description of Artificial Sequence: Synthetic oligonucleotide
  misc_feature 1..20: note = Target: SCN10A; (-) strand; PAM type: NNNNGHTT; PAM sequence: TTGGGTTT
  source 1..20: mol_type = other DNA
tgagttgagtctgggatata

SEQ ID NO: 10629 - DNA, 20 bp, synthetic construct
  misc_feature 1..20: note = Description of Artificial Sequence: Synthetic oligonucleotide
  misc_feature 1..20: note = Target: SCN10A; (-) strand; PAM type: NNNNGHTT; PAM sequence: AGAAGATT
  source 1..20: mol_type = other DNA
ctttaatggggaaagatgaa

SEQ ID NO: 10630 - DNA, 20 bp, synthetic construct
  misc_feature 1..20: note = Description of Artificial Sequence: Synthetic oligonucleotide
  misc_feature 1..20: note = Target: SCN10A; (-) strand; PAM type: NNNNGHTT; PAM sequence: GGGGGCTT
  source 1..20: mol_type = other DNA
ggagcattttaggggaagaa

SEQ ID NO: 10631 - DNA, 20 bp, synthetic construct
  misc_feature 1..20: note = Description of Artificial Sequence: Synthetic oligonucleotide
  misc_feature 1..20: note = Target: SCN10A; (-) strand; PAM type: NNNNGHTT; PAM sequence: ATAAGATT
  source 1..20: mol_type = other DNA
atgagagctatctaaggggc

SEQ ID NO: 10632 - DNA, 20 bp, synthetic construct
  misc_feature 1..20: note = Description of Artificial Sequence: Synthetic oligonucleotide
  misc_feature 1..20: note = Target: SCN10A; (-) strand; PAM type: NNNNGHTT; PAM sequence: CAGTGCTT
  source 1..20: mol_type = other DNA
ggaagccaagtacaagatgg

SEQ ID NO: 10633 - DNA, 20 bp, synthetic construct
  misc_feature 1..20: note = Description of Artificial Sequence: Synthetic oligonucleotide
  misc_feature 1..20: note = Target: SCN10A; (-) strand; PAM type: NNNNGHTT; PAM sequence: AAAGGATT
  source 1..20: mol_type = other DNA
aagaggagtgaggtgccatt

SEQ ID NO: 10634 - DNA, 20 bp, synthetic construct
  misc_feature 1..20: note = Description of Artificial Sequence: Synthetic oligonucleotide
  misc_feature 1..20: note = Target: SCN10A; (-) strand; PAM type: NNNNGHTT; PAM sequence: GTAAGATT
  source 1..20: mol_type = other DNA
aggatactaagtgaaatatg

SEQ ID NO: 10635 - DNA, 20 bp, synthetic construct
  misc_feature 1..20: note = Description of Artificial Sequence: Synthetic oligonucleotide
  misc_feature 1..20: note = Target: SCN10A; (-) strand; PAM type: NNNNGHTT; PAM sequence: GTGAGCTT
  source 1..20: mol_type = other DNA
ccagaagctgggtcacagca

SEQ ID NO: 10636 - DNA, 20 bp, synthetic construct
  misc_feature 1..20: note = Description of Artificial Sequence: Synthetic oligonucleotide
  misc_feature 1..20: note = Target: SCN10A; (-) strand; PAM type: NNNNGHTT; PAM sequence: CTGAGATT
  source 1..20: mol_type = other DNA
ttctatgcttggcatgcaag

SEQ ID NO: 10637 - DNA, 20 bp, synthetic construct
  misc_feature 1..20: note = Description of Artificial Sequence: Synthetic oligonucleotide
  misc_feature 1..20: note = Target: SCN10A; (-) strand; PAM type: NNNNGHTT; PAM sequence: CTATGCTT
  source 1..20: mol_type = other DNA
actcaaagcatgtgaacctt

SEQ ID NO: 10638 - DNA, 20 bp, synthetic construct
  misc_feature 1..20: note = Description of Artificial Sequence: Synthetic oligonucleotide
  misc_feature 1..20: note = Target: SCN10A; (-) strand; PAM type: NNNNGHTT; PAM sequence: AGGAGTTT
  source 1..20: mol_type = other DNA
aaagtttggcccaaaccaac

SEQ ID NO: 10639 - DNA, 20 bp, synthetic construct
  misc_feature 1..20: note = Description of Artificial Sequence: Synthetic oligonucleotide
  misc_feature 1..20: note = Target: SCN10A; (-) strand; PAM type: NNNNGHTT; PAM sequence: GAAAGTTT
  source 1..20: mol_type = other DNA
ttaagagggattatgcttaa

SEQ ID NO: 10640 - DNA, 20 bp, synthetic construct
  misc_feature 1..20: note = Description of Artificial Sequence: Synthetic oligonucleotide
  misc_feature 1..20: note = Target: SCN10A; (-) strand; PAM type: NNNNGHTT; PAM sequence: TTATGCTT
  source 1..20: mol_type = other DNA
ggccacctctttaagaggga

SEQ ID NO: 10641 - DNA, 20 bp, synthetic construct
  misc_feature 1..20: note = Description of Artificial Sequence: Synthetic oligonucleotide
  misc_feature 1..20: note = Target: SCN10A; (-) strand; PAM type: NNNNGHTT; PAM sequence: GAGGGATT
  source 1..20: mol_type = other DNA
tataaaggccacctctttaa

SEQ ID NO: 10642 - DNA, 20 bp, synthetic construct
  misc_feature 1..20: note = Description of Artificial Sequence: Synthetic oligonucleotide
  misc_feature 1..20: note = Target: SCN10A; (-) strand; PAM type: NNNNGHTT; PAM sequence: ATAGGATT
  source 1..20: mol_type = other DNA
ttcatgctgccagagtcgta

SEQ ID NO: 10643 - DNA, 20 bp, synthetic construct
  misc_feature 1..20: note = Description of Artificial Sequence: Synthetic oligonucleotide
  misc_feature 1..20: note = Target: SCN10A; (-) strand; PAM type: NNNNGHTT; PAM sequence: GGATGCTT
  source 1..20: mol_type = other DNA
acacacatgagacacctgaa

SEQ ID NO: 10644 - DNA, 20 bp, synthetic construct
  misc_feature 1..20: note = Description of Artificial Sequence: Synthetic oligonucleotide
  misc_feature 1..20: note = Target: SCN10A; (-) strand; PAM type: NNNNGHTT; PAM sequence: CAAAGTTT
  source 1..20: mol_type = other DNA
ttaggttaaataaaagaggt

SEQ ID NO: 10645 - DNA, 20 bp, synthetic construct
  misc_feature 1..20: note = Description of Artificial Sequence: Synthetic oligonucleotide
  misc_feature 1..20: note = Target: SCN10A; (-) strand; PAM type: NNNNGHTT; PAM sequence: TGATGTTT
  source 1..20: mol_type = other DNA
aagaaaggccagagaaacaa

SEQ ID NO: 10646 - DNA, 20 bp, synthetic construct
  misc_feature 1..20: note = Description of Artificial Sequence: Synthetic oligonucleotide
  misc_feature 1..20: note = Target: SCN10A; (-) strand; PAM type: NNNNGHTT; PAM sequence: GTCTGTTT
  source 1..20: mol_type = other DNA
atctatgagggcggagatgt

SEQ ID NO: 10647 - DNA, 20 bp, synthetic construct
  misc_feature 1..20: note = Description of Artificial Sequence: Synthetic oligonucleotide
  misc_feature 1..20: note = Target: SCN10A; (-) strand; PAM type: NNNNGHTT; PAM sequence: TTATGATT
  source 1..20: mol_type = other DNA
atactcatcacatttggcta

SEQ ID NO: 10648 - DNA, 20 bp, synthetic construct
  misc_feature 1..20: note = Description of Artificial Sequence: Synthetic oligonucleotide
  misc_feature 1..20: note = Target: SCN10A; (-) strand; PAM type: NNNNGHTT; PAM sequence: AAATGCTT
  source 1..20: mol_type = other DNA
taaatgagtcaggtcaagca

SEQ ID NO: 10649 - DNA, 20 bp, synthetic construct
  misc_feature 1..20: note = Description of Artificial Sequence: Synthetic oligonucleotide
  misc_feature 1..20: note = Target: SCN10A; (-) strand; PAM type: NNNNGHTT; PAM sequence: TGAGGATT
  source 1..20: mol_type = other DNA
acttatcttgtagagttttg

SEQ ID NO: 10650 - DNA, 20 bp, synthetic construct
  misc_feature 1..20: note = Description of Artificial Sequence: Synthetic oligonucleotide
  misc_feature 1..20: note = Target: SCN10A; (-) strand; PAM type: NNNNGHTT; PAM sequence: TAGAGTTT
  source 1..20: mol_type = other DNA
gtgagaatatacttatcttg

SEQ ID NO: 10651 - DNA, 20 bp, synthetic construct
  misc_feature 1..20: note = Description of Artificial Sequence: Synthetic oligonucleotide
  misc_feature 1..20: note = Target: SCN10A; (-) strand; PAM type: NNNNGHTT; PAM sequence: CTCAGATT
  source 1..20: mol_type = other DNA
cttcagtaacttttctgtgc

SEQ ID NO: 10652 - DNA, 20 bp, synthetic construct
  misc_feature 1..20: note = Description of Artificial Sequence: Synthetic oligonucleotide
  misc_feature 1..20: note = Target: SCN10A; (-) strand; PAM type: NNNNGHTT; PAM sequence: TGGAGCTT
  source 1..20: mol_type = other DNA
tatggtacacagtgtgacct

SEQ ID NO: 10653 - DNA, 20 bp, synthetic construct
  misc_feature 1..20: note = Description of Artificial Sequence: Synthetic oligonucleotide
  misc_feature 1..20: note = Target: SCN10A; (-) strand; PAM type: NNNNGHTT; PAM sequence: CTGGGTTT
  source 1..20: mol_type = other DNA
ctgctctggaacccggctgc

SEQ ID NO: 10654 - DNA, 20 bp, synthetic construct
  misc_feature 1..20: note = Description of Artificial Sequence: Synthetic oligonucleotide
  misc_feature 1..20: note = Target: SCN10A; (-) strand; PAM type: NNNNGHTT; PAM sequence: ATAAGCTT
  source 1..20: mol_type = other DNA
ggattcagtggtgaactgat

SEQ ID NO: 10655 - DNA, 20 bp, synthetic construct
  misc_feature 1..20: note = Description of Artificial Sequence: Synthetic oligonucleotide
  misc_feature 1..20: note = Target: SCN10A; (-) strand; PAM type: NNNNGHTT; PAM sequence: CTGGGATT
  source 1..20: mol_type = other DNA
gtgtggcattgcttcaggtg

SEQ ID NO: 10656 - DNA, 20 bp, synthetic construct
  misc_feature 1..20: note = Description of Artificial Sequence: Synthetic oligonucleotide
  misc_feature 1..20: note = Target: SCN10A; (-) strand; PAM type: NNNNGHTT; PAM sequence: CATTGCTT
  source 1..20: mol_type = other DNA
agcccctgttgtgtgtgtgg

SEQ ID NO: 10657 - DNA, 20 bp, synthetic construct
  misc_feature 1..20: note = Description of Artificial Sequence: Synthetic oligonucleotide
  misc_feature 1..20: note = Target: SCN10A; (-) strand; PAM type: NNNNGHTT; PAM sequence: TTAAGCTT
  source 1..20: mol_type = other DNA
tcatttattctcgaaaactg

SEQ ID NO: 10658 - DNA, 20 bp, synthetic construct
  misc_feature 1..20: note = Description of Artificial Sequence: Synthetic oligonucleotide
  misc_feature 1..20: note = Target: SCN10A; (-) strand; PAM type: NNNNGHTT; PAM sequence: GTTTGTTT
  source 1..20: mol_type = other DNA
gcaaacattgaatacaaaca

SEQ ID NO: 10659 - DNA, 20 bp, synthetic construct
  misc_feature 1..20: note = Description of Artificial Sequence: Synthetic oligonucleotide
  misc_feature 1..20: note = Target: SCN10A; (-) strand; PAM type: NNNNGHTT; PAM sequence: AACAGTTT
  source 1..20: mol_type = other DNA
aacagcaaacattgaataca

SEQ ID NO: 10660 - DNA, 20 bp, synthetic construct
  misc_feature 1..20: note = Description of Artificial Sequence: Synthetic oligonucleotide
  misc_feature 1..20: note = Target: SCN10A; (-) strand; PAM type: NNNNGHTT; PAM sequence: TTTTGTTT
  source 1..20: mol_type = other DNA
ttttgtttgtttgttttggt

SEQ ID NO: 10661 - DNA, 20 bp, synthetic construct
  misc_feature 1..20: note = Description of Artificial Sequence: Synthetic oligonucleotide
  misc_feature 1..20: note = Target: SCN10A; (-) strand; PAM type: NNNNGHTT; PAM sequence: TTTGGTTT
  source 1..20: mol_type = other DNA
cttggtttttgtttgtttgt

SEQ ID NO: 10662 - DNA, 20 bp, synthetic construct
  misc_feature 1..20: note = Description of Artificial Sequence: Synthetic oligonucleotide
  misc_feature 1..20: note = Target: SCN10A; (-) strand; PAM type: NNNNGHTT; PAM sequence: GTTTGTTT
  source 1..20: mol_type = other DNA
aggtttcttggtttttgttt

SEQ ID NO: 10663 - DNA, 20 bp, synthetic construct
  misc_feature 1..20: note = Description of Artificial Sequence: Synthetic oligonucleotide
  misc_feature 1..20: note = Target: SCN10A; (-) strand; PAM type: NNNNGHTT; PAM sequence: GTTTGTTT
  source 1..20: mol_type = other DNA
agataggtttcttggttttt

SEQ ID NO: 10664 - DNA, 20 bp, synthetic construct
  misc_feature 1..20: note = Description of Artificial Sequence: Synthetic oligonucleotide
  misc_feature 1..20: note = Target: SCN10A; (-) strand; PAM type: NNNNGHTT; PAM sequence: TTTTGTTT
  source 1..20: mol_type = other DNA
ggccagataggtttcttggt

SEQ ID NO: 10665 - DNA, 20 bp, synthetic construct
  misc_feature 1..20: note = Description of Artificial Sequence: Synthetic oligonucleotide
  misc_feature 1..20: note = Target: SCN10A; (-) strand; PAM type: NNNNGHTT; PAM sequence: CTTGGTTT
  source 1..20: mol_type = other DNA
tttcttggccagataggttt

SEQ ID NO: 10666 - DNA, 20 bp, synthetic construct
  misc_feature 1..20: note = Description of Artificial Sequence: Synthetic oligonucleotide
  misc_feature 1..20: note = Target: SCN10A; (-) strand; PAM type: NNNNGHTT; PAM sequence: ATAGGTTT
  source 1..20: mol_type = other DNA
acaatttctttcttggccag

SEQ ID NO: 10667 - DNA, 20 bp, synthetic construct
  misc_feature 1..20: note = Description of Artificial Sequence: Synthetic oligonucleotide
  misc_feature 1..20: note = Target: SCN10A; (-) strand; PAM type: NNNNGHTT; PAM sequence: TTGTGCTT
  source 1..20: mol_type = other DNA
catttcttgcatacctgagt

SEQ ID NO: 10668 - DNA, 20 bp, synthetic construct
  misc_feature 1..20: note = Description of Artificial Sequence: Synthetic oligonucleotide
  misc_feature 1..20: note = Target: SCN10A; (-) strand; PAM type: NNNNGHTT; PAM sequence: CTGAGTTT
  source 1..20: mol_type = other DNA
aagttacatttcttgcatac

SEQ ID NO: 10669 - DNA, 20 bp, synthetic construct
  misc_feature 1..20: note = Description of Artificial Sequence: Synthetic oligonucleotide
  misc_feature 1..20: note = Target: SCN10A; (-) strand; PAM type: NNNNGHTT; PAM sequence: CCAGGTTT
  source 1..20: mol_type = other DNA
aggaccagctcaactctcct

SEQ ID NO: 10670 - DNA, 20 bp, synthetic construct
  misc_feature 1..20: note = Description of Artificial Sequence: Synthetic oligonucleotide
  misc_feature 1..20: note = Target: SCN10A; (-) strand; PAM type: NNNNGHTT; PAM sequence: ATACGCTT
  source 1..20: mol_type = other DNA
ggagctacaactcaggcaaa

SEQ ID NO: 10671 - DNA, 20 bp, synthetic construct
  misc_feature 1..20: note = Description of Artificial Sequence: Synthetic oligonucleotide
  misc_feature 1..20: note = Target: SCN10A; (-) strand; PAM type: NNNNGHTT; PAM sequence: CTTAGCTT
  source 1..20: mol_type = other DNA
aaaatctggggaaaggcaac

SEQ ID NO: 10672 - DNA, 20 bp, synthetic construct
  misc_feature 1..20: note = Description of Artificial Sequence: Synthetic oligonucleotide
  misc_feature 1..20: note = Target: SCN10A; (-) strand; PAM type: NNNNGHTT; PAM sequence: AGACGTTT
  source 1..20: mol_type = other DNA
aagaaaggcaggagaaacaa

SEQ ID NO: 10673 - DNA, 20 bp, synthetic construct
  misc_feature 1..20: note = Description of Artificial Sequence: Synthetic oligonucleotide
  misc_feature 1..20: note = Target: SCN10A; (-) strand; PAM type: NNNNGHTT; PAM sequence: ATCTGTTT
  source 1..20: mol_type = other DNA
taccagatatgcagagatgt

SEQ ID NO: 10674 - DNA, 20 bp, synthetic construct
  misc_feature 1..20: note = Description of Artificial Sequence: Synthetic oligonucleotide
  misc_feature 1..20: note = Target: SCN10A; (-) strand; PAM type: NNNNGHTT; PAM sequence: GAGAGATT
  source 1..20: mol_type = other DNA
cagaggtggcaagccttaga

SEQ ID NO: 10675 - DNA, 20 bp, synthetic construct
  misc_feature 1..20: note = Description of Artificial Sequence: Synthetic oligonucleotide
  misc_feature 1..20: note = Target: SCN10A; (-) strand; PAM type: NNNNGHTT; PAM sequence: GAGGGATT
  source 1..20: mol_type = other DNA
tagaaaccaaaaaaatgttt

SEQ ID NO: 10676 - DNA, 20 bp, synthetic construct
  misc_feature 1..20: note = Description of Artificial Sequence: Synthetic oligonucleotide
  misc_feature 1..20: note = Target: SCN10A; (-) strand; PAM type: NNNNGHTT; PAM sequence: AAATGTTT
  source 1..20: mol_type = other DNA
gtgagcaatagaaaccaaaa

SEQ ID NO: 10677 - DNA, 20 bp, synthetic construct
  misc_feature 1..20: note = Description of Artificial Sequence: Synthetic oligonucleotide
  misc_feature 1..20: note = Target: SCN10A; (-) strand; PAM type: NNNNGHTT; PAM sequence: GTGTGTTT
  source 1..20: mol_type = other DNA
tgcccctgagaaggagtcct

SEQ ID NO: 10678 - DNA, 20 bp, synthetic construct
  misc_feature 1..20: note = Description of Artificial Sequence: Synthetic oligonucleotide
  misc_feature 1..20: note = Target: SCN10A; (-) strand; PAM type: NNNNGHTT; PAM sequence: GGGAGCTT
  source 1..20: mol_type = other DNA
ctaggctggaggagttgtaa

SEQ ID NO: 10679 - DNA, 20 bp, synthetic construct
  misc_feature 1..20: note = Description of Artificial Sequence: Synthetic oligonucleotide
  misc_feature 1..20: note = Target: SCN10A; (-) strand; PAM type: NNNNGHTT; PAM sequence: GCGTGATT
  source 1..20: mol_type = other DNA
tccacacactttgccataga

SEQ ID NO: 10680 - DNA, 20 bp, synthetic construct
  misc_feature 1..20: note = Description of Artificial Sequence: Synthetic oligonucleotide
  misc_feature 1..20: note = Target: SCN10A; (-) strand; PAM type: NNNNGHTT; PAM sequence: CATGGTTT
  source 1..20: mol_type = other DNA
catggcaaaattatcctttt

SEQ ID NO: 10681 - DNA, 20 bp, synthetic construct
  misc_feature 1..20: note = Description of Artificial Sequence: Synthetic oligonucleotide
  misc_feature 1..20: note = Target: SCN10A; (-) strand; PAM type: NNNNGHTT; PAM sequence: ACTAGATT
  source 1..20: mol_type = other DNA
tgctttgcatgcatcacaaa

SEQ ID NO: 10682 - DNA, 20 bp, synthetic construct
  misc_feature 1..20: note = Description of Artificial Sequence: Synthetic oligonucleotide
  misc_feature 1..20: note = Target: SCN10A; (-) strand; PAM type: NNNNGHTT; PAM sequence: ATCTGCTT
  source 1..20: mol_type = other DNA
catctcttgttcaaattagc

SEQ ID NO: 10683 - DNA, 20 bp, synthetic construct
  misc_feature 1..20: note = Description of Artificial Sequence: Synthetic oligonucleotide
  misc_feature 1..20: note = Target: SCN10A; (-) strand; PAM type: NNNNGHTT; PAM sequence: TGTGGTTT
  source 1..20: mol_type = other DNA
gccccaccatcttttatcaa

SEQ ID NO: 10684 - DNA, 20 bp, synthetic construct
  misc_feature 1..20: note = Description of Artificial Sequence: Synthetic oligonucleotide
  misc_feature 1..20: note = Target: SCN10A; (-) strand; PAM type: NNNNGHTT; PAM sequence: CTCTGTTT
  source 1..20: mol_type = other DNA
aggttaaaggagcgtcctga

SEQ ID NO: 10685 - DNA, 20 bp, synthetic construct
  misc_feature 1..20: note = Description of Artificial Sequence: Synthetic oligonucleotide
  misc_feature 1..20: note = Target: SCN10A; (-) strand; PAM type: NNNNGHTT; PAM sequence: ATGAGATT
  source 1..20: mol_type = other DNA
taagtgacatatgactatat

SEQ ID NO: 10686 - DNA, 20 bp, synthetic construct
  misc_feature 1..20: note = Description of Artificial Sequence: Synthetic oligonucleotide
  misc_feature 1..20: note = Target: SCN10A; (-) strand; PAM type: NNNNGHTT; PAM sequence: ATTTGTTT
  source 1..20: mol_type = other DNA
gatgtatagaaggctatagc

SEQ ID NO: 10687 - DNA, 20 bp, synthetic construct
  misc_feature 1..20: note = Description of Artificial Sequence: Synthetic oligonucleotide
  misc_feature 1..20: note = Target: SCN10A; (-) strand; PAM type: NNNNGHTT; PAM sequence: TACAGATT
  source 1..20: mol_type = other DNA
tattcagcaataacatgctg

SEQ ID NO: 10688 - DNA, 20 bp, synthetic construct
  misc_feature 1..20: note = Description of Artificial Sequence: Synthetic oligonucleotide
  misc_feature 1..20: note = Target: SCN10A; (-) strand; PAM type: NNNNGHTT; PAM sequence: AACTGTTT
  source 1..20: mol_type = other DNA
aaactttctttatgtttatt

SEQ ID NO: 10689 - DNA, 20 bp, synthetic construct
  misc_feature 1..20: note = Description of Artificial Sequence: Synthetic oligonucleotide
  misc_feature 1..20: note = Target: SCN10A; (-) strand; PAM type: NNNNGHTT; PAM sequence: TTATGTTT
  source 1..20: mol_type = other DNA
ggaagctttataaactttct

SEQ ID NO: 10690 - DNA, 20 bp, synthetic construct
  misc_feature 1..20: note = Description of Artificial Sequence: Synthetic oligonucleotide
  misc_feature 1..20: note = Target: SCN10A; (-) strand; PAM type: NNNNGHTT; PAM sequence: GGAAGCTT
  source 1..20: mol_type = other DNA
tttgcttagtcctcatggtt

SEQ ID NO: 10691 - DNA, 20 bp, synthetic construct
  misc_feature 1..20: note = Description of Artificial Sequence: Synthetic oligonucleotide
  misc_feature 1..20: note = Target: SCN10A; (-) strand; PAM type: NNNNGHTT; PAM sequence: ATTTGCTT
  source 1..20: mol_type = other DNA
aaatagtgactactagtatc

SEQ ID NO: 10692 - DNA, 20 bp, synthetic construct
  misc_feature 1..20: note = Description of Artificial Sequence: Synthetic oligonucleotide
  misc_feature 1..20: note = Target: SCN10A; (-) strand; PAM type: NNNNGHTT; PAM sequence: AAAGGTTT
  source 1..20: mol_type = other DNA
ctccttatctccccttgtaa

SEQ ID NO: 10693 - DNA, 20 bp, synthetic construct
  misc_feature 1..20: note = Description of Artificial Sequence: Synthetic oligonucleotide
  misc_feature 1..20: note = Target: SCN10A; (-) strand; PAM type: NNNNGHTT; PAM sequence: TTCTGTTT
  source 1..20: mol_type = other DNA
aagattgactctttaggccc

SEQ ID NO: 10694 - DNA, 20 bp, synthetic construct
  misc_feature 1..20: note = Description of Artificial Sequence: Synthetic oligonucleotide
  misc_feature 1..20: note = Target: SCN10A; (-) strand; PAM type: NNNNGHTT; PAM sequence: GAAAGATT
  source 1..20: mol_type = other DNA
agttaaattaccaggctagt

SEQ ID NO: 10695 - DNA, 20 bp, synthetic construct
  misc_feature 1..20: note = Description of Artificial Sequence: Synthetic oligonucleotide
  misc_feature 1..20: note = Target: SCN10A; (-) strand; PAM type: NNNNGHTT; PAM sequence: CCTTGATT
  source 1..20: mol_type = other DNA
catgtgtctagatattctga

SEQ ID NO: 10696 - DNA, 20 bp, synthetic construct
  misc_feature 1..20: note = Description of Artificial Sequence: Synthetic oligonucleotide
  misc_feature 1..20: note = Target: SCN10A; (-) strand; PAM type: NNNNGHTT; PAM sequence: CTGAGATT
  source 1..20: mol_type = other DNA
ccaccctcctttctctgttc

SEQ ID NO: 10697 - DNA, 20 bp, synthetic construct
  misc_feature 1..20: note = Description of Artificial Sequence: Synthetic oligonucleotide
  misc_feature 1..20: note = Target: SCN10A; (-) strand; PAM type: NNNNGHTT; PAM sequence: CTGGGCTT
  source 1..20: mol_type = other DNA
agtatttacagaggtgtggg

SEQ ID NO: 10698 - DNA, 20 bp, synthetic construct
  misc_feature 1..20: note = Description of Artificial Sequence: Synthetic oligonucleotide
  misc_feature 1..20: note = Target: SCN10A; (-) strand; PAM type: NNNNGHTT; PAM sequence: GAGAGTTT
  source 1..20: mol_type = other DNA
cactccgatgggctaataga

SEQ ID NO: 10699 - DNA, 20 bp, synthetic construct
  misc_feature 1..20: note = Description of Artificial Sequence: Synthetic oligonucleotide
  misc_feature 1..20: note = Target: SCN10A; (-) strand; PAM type: NNNNGHTT; PAM sequence: ATGTGATT
  source 1..20: mol_type = other DNA
tcagtctctgactcaatgtc

SEQ ID NO: 10700 - DNA, 20 bp, synthetic construct
  misc_feature 1..20: note = Description of Artificial Sequence: Synthetic oligonucleotide
  misc_feature 1..20: note = Target: SCN10A; (-) strand; PAM type: NNNNGHTT; PAM sequence: TAGTGTTT
  source 1..20: mol_type = other DNA
agtttcagcaatgatgtttc

SEQ ID NO: 10701 - DNA, 20 bp, synthetic construct
  misc_feature 1..20: note = Description of Artificial Sequence: Synthetic oligonucleotide
  misc_feature 1..20: note = Target: SCN10A; (-) strand; PAM type: NNNNGHTT; PAM sequence: TGATGTTT
  source 1..20: mol_type = other DNA
ctcccctccagtttcagcaa

SEQ ID NO: 10702 - DNA, 20 bp, synthetic construct
  misc_feature 1..20: note = Description of Artificial Sequence: Synthetic oligonucleotide
  misc_feature 1..20: note = Target: SCN10A; (-) strand; PAM type: NNNNGHTT; PAM sequence: TCCAGTTT
  source 1..20: mol_type = other DNA
agttaatgtgagctctcccc

SEQ ID NO: 10703 - DNA, 20 bp, synthetic construct
  misc_feature 1..20: note = Description of Artificial Sequence: Synthetic oligonucleotide
  misc_feature 1..20: note = Target: SCN10A; (-) strand; PAM type: NNNNGHTT; PAM sequence: ATTGGATT
  source 1..20: mol_type = other DNA
tggcaagtcagggattcctc

SEQ ID NO: 10704 - DNA, 20 bp, synthetic construct
  misc_feature 1..20: note = Description of Artificial Sequence: Synthetic oligonucleotide
  misc_feature 1..20: note = Target: SCN10A; (-) strand; PAM type: NNNNGHTT; PAM sequence: CAGGGATT
  source 1..20: mol_type = other DNA
cgcagagtgtaatggcaagt

SEQ ID NO: 10705 - DNA, 20 bp, synthetic construct
  misc_feature 1..20: note = Description of Artificial Sequence: Synthetic oligonucleotide
  misc_feature 1..20: note = Target: SCN10A; (-) strand; PAM type: NNNNGHTT; PAM sequence: CCTTGCTT
  source 1..20: mol_type = other DNA
ctgaatagaagcacagtatt

SEQ ID NO: 10706 - DNA, 20 bp, synthetic construct
  misc_feature 1..20: note = Description of Artificial Sequence: Synthetic oligonucleotide
  misc_feature 1..20: note = Target: SCN10A; (-) strand; PAM type: NNNNGHTT; PAM sequence: GGAAGTTT
  source 1..20: mol_type = other DNA
atggcacccagagaaattca

SEQ ID NO: 10707 - DNA, 20 bp, synthetic construct
  misc_feature 1..20: note = Description of Artificial Sequence: Synthetic oligonucleotide
  misc_feature 1..20: note = Target: SCN10A; (-) strand; PAM type: NNNNGHTT; PAM sequence: TCCTGCTT
  source 1..20: mol_type = other DNA
aaactgaaggacccttctct

SEQ ID NO: 10708 - DNA, 20 bp, synthetic construct
  misc_feature 1..20: note = Description of Artificial Sequence: Synthetic oligonucleotide
  misc_feature 1..20: note = Target: SCN10A; (-) strand; PAM type: NNNNGHTT; PAM sequence: GCCTGCTT
  source 1..20: mol_type = other DNA
catcactgcctcagtgatag

SEQ ID NO: 10709 - DNA, 20 bp, synthetic construct
  misc_feature 1..20: note = Description of Artificial Sequence: Synthetic oligonucleotide
  misc_feature 1..20: note = Target: SCN10A; (-) strand; PAM type: NNNNGHTT; PAM sequence: CAGTGCTT
  source 1..20: mol_type = other DNA
tttgaccccatatttcttat

SEQ ID NO: 10710 - DNA, 20 bp, synthetic construct
  misc_feature 1..20: note = Description of Artificial Sequence: Synthetic oligonucleotide
  misc_feature 1..20: note = Target: SCN10A; (-) strand; PAM type: NNNNGHTT; PAM sequence: CCTGGTTT
  source 1..20: mol_type = other DNA
gcctgaggtcaaacaggttt

SEQ ID NO: 10711 - DNA, 20 bp, synthetic construct
  misc_feature 1..20: note = Description of Artificial Sequence: Synthetic oligonucleotide
  misc_feature 1..20: note = Target: SCN10A; (-) strand; PAM type: NNNNGHTT; PAM sequence: ACAGGTTT
  source 1..20: mol_type = other DNA
ttgagttggcctgaggtcaa

SEQ ID NO: 10712 - DNA, 20 bp, synthetic construct
  misc_feature 1..20: note = Description of Artificial Sequence: Synthetic oligonucleotide
  misc_feature 1..20: note = Target: SCN10A; (-) strand; PAM type: NNNNGHTT; PAM sequence: GAGAGATT
  source 1..20: mol_type = other DNA
agatgagacccagagagaga

SEQ ID NO: 10713 - DNA, 20 bp, synthetic construct
  misc_feature 1..20: note = Description of Artificial Sequence: Synthetic oligonucleotide
  misc_feature 1..20: note = Target: SCN10A; (-) strand; PAM type: NNNNGHTT; PAM sequence: GAATGCTT
  source 1..20: mol_type = other DNA
cgatgtctcggtgagtttgt

SEQ ID NO: 10714 - DNA, 20 bp, synthetic construct
  misc_feature 1..20: note = Description of Artificial Sequence: Synthetic oligonucleotide
  misc_feature 1..20: note = Target: SCN10A; (-) strand; PAM type: NNNNGHTT; PAM sequence: GTGAGTTT
  source 1..20: mol_type = other DNA
ctggagctgtcgatgtctcg

SEQ ID NO: 10715 - DNA, 20 bp, synthetic construct
  misc_feature 1..20: note = Description of Artificial Sequence: Synthetic oligonucleotide
  misc_feature 1..20: note = Target: SCN10A; (-) strand; PAM type: NNNNGHTT; PAM sequence: GTGAGCTT
  source 1..20: mol_type = other DNA
acaccaaccgccgcccacta

SEQ ID NO: 10716 - DNA, 20 bp, synthetic construct
  misc_feature 1..20: note = Description of Artificial Sequence: Synthetic oligonucleotide
  misc_feature 1..20: note = Target: SCN10A; (-) strand; PAM type: NNNNGHTT; PAM sequence: ACCAGTTT
  source 1..20: mol_type = other DNA
ggctctagatttcccagagg

SEQ ID NO: 10717 - DNA, 20 bp, synthetic construct
  misc_feature 1..20: note = Description of Artificial Sequence: Synthetic oligonucleotide
  misc_feature 1..20: note = Target: SCN10A; (-) strand; PAM type: NNNNGHTT; PAM sequence: TCTAGATT
  source 1..20: mol_type = other DNA
ggtagagggaagtgttgggc

SEQ ID NO: 10718 - DNA, 20 bp, synthetic construct
  misc_feature 1..20: note = Description of Artificial Sequence: Synthetic oligonucleotide
  misc_feature 1..20: note = Target: SCN10A; (-) strand; PAM type: NNNNGHTT; PAM sequence: CTTAGATT
  source 1..20: mol_type = other DNA
catgcatacctagaataccc

SEQ ID NO: 10719 - DNA, 20 bp, synthetic construct
  misc_feature 1..20: note = Description of Artificial Sequence: Synthetic oligonucleotide
  misc_feature 1..20: note = Target: SCN10A; (-) strand; PAM type: NNNNGHTT; PAM sequence: CAAGGTTT
  source 1..20: mol_type = other DNA
caactgaactatccaggtga

SEQ ID NO: 10720 - DNA, 20 bp, synthetic construct
  misc_feature 1..20: note = Description of Artificial Sequence: Synthetic oligonucleotide
  misc_feature 1..20: note = Target: SCN10A; (-) strand; PAM type: NNNNGHTT; PAM sequence: GACAGCTT
  source 1..20: mol_type = other DNA
atgtggaaaagtgaacttag

SEQ ID NO: 10721 - DNA, 20 bp, synthetic construct
  misc_feature 1..20: note = Description of Artificial Sequence: Synthetic oligonucleotide
  misc_feature 1..20: note = Target: SCN10A; (-) strand; PAM type: NNNNGHTT; PAM sequence: TATTGATT
  source 1..20: mol_type = other DNA
agattttgatgggaaatgtt

SEQ ID NO: 10722 - DNA, 20 bp, synthetic construct
  misc_feature 1..20: note = Description of Artificial Sequence: Synthetic oligonucleotide
  misc_feature 1..20: note = Target: SCN10A; (-) strand; PAM type: NNNNGHTT; PAM sequence: AAATGTTT
  source 1..20: mol_type = other DNA
caatggaagattttgatggg

SEQ ID NO: 10723 - DNA, 20 bp, synthetic construct
  misc_feature 1..20: note = Description of Artificial Sequence: Synthetic oligonucleotide
  misc_feature 1..20: note = Target: SCN10A; (-) strand; PAM type: NNNNGHTT; PAM sequence: GGAAGATT
  source 1..20: mol_type = other DNA
agccacacagttccctcaat

SEQ ID NO: 10724 - DNA, 20 bp, synthetic construct
  misc_feature 1..20: note = Description of Artificial Sequence: Synthetic oligonucleotide
  misc_feature 1..20: note = Target: SCN10A; (-) strand; PAM type: NNNNGHTT; PAM sequence: CTGGGTTT
  source 1..20: mol_type = other DNA
acactaattctctgagggct

SEQ ID NO: 10725 - DNA, 20 bp, synthetic construct
  misc_feature 1..20: note = Description of Artificial Sequence: Synthetic oligonucleotide
  misc_feature 1..20: note = Target: SCN10A; (-) strand; PAM type: NNNNGHTT; PAM sequence: TCAAGTTT
  source 1..20: mol_type = other DNA
caaatgatggtttattatgg

SEQ ID NO: 10726 - DNA, 20 bp, synthetic construct
  misc_feature 1..20: note = Description of Artificial Sequence: Synthetic oligonucleotide
  misc_feature 1..20: note = Target: SCN10A; (-) strand; PAM type: NNNNGHTT; PAM sequence: GATGGTTT
  source 1..20: mol_type = other DNA
gaccacctgaggacacaaat

SEQ ID NO: 10727 - DNA, 20 bp, synthetic construct
  misc_feature 1..20: note = Description of Artificial Sequence: Synthetic oligonucleotide
  misc_feature 1..20: note = Target: SCN10A; (-) strand; PAM type: NNNNGHTT; PAM sequence: TTTAGATT
  source 1..20: mol_type = other DNA
agtttggtatgaagtcaatg

SEQ ID NO: 10728 - DNA, 20 bp, synthetic construct
  misc_feature 1..20: note = Description of Artificial Sequence: Synthetic oligonucleotide
  misc_feature 1..20: note = Target: SCN10A; (-) strand; PAM type: NNNNGHTT; PAM sequence: CAATGTTT
  source 1..20: mol_type = other DNA
atcagagtttggtatgaagt

SEQ ID NO: 10729 - DNA, 20 bp, synthetic construct
  misc_feature 1..20: note = Description of Artificial Sequence: Synthetic oligonucleotide
  misc_feature 1..20: note = Target: SCN10A; (-) strand; PAM type: NNNNGHTT; PAM sequence: CAGAGTTT
  source 1..20: mol_type = other DNA
gtggaataaatcggtatgat

SEQ ID NO: 10730 - DNA, 20 bp, synthetic construct
  misc_feature 1..20: note = Description of Artificial Sequence: Synthetic oligonucleotide
  misc_feature 1..20: note = Target: SCN10A; (-) strand; PAM type: NNNNGHTT; PAM sequence: AGTAGCTT
  source 1..20: mol_type = other DNA
ttggcaagattctccacttt

SEQ ID NO: 10731 - DNA, 20 bp, synthetic construct
  misc_feature 1..20: note = Description of Artificial Sequence: Synthetic oligonucleotide
  misc_feature 1..20: note = Target: SCN10A; (-) strand; PAM type: NNNNGHTT; PAM sequence: GCAAGATT
  source 1..20: mol_type = other DNA
agtaaggagaaccccaattg

SEQ ID NO: 10732 - DNA, 20 bp, synthetic construct
  misc_feature 1..20: note = Description of Artificial Sequence: Synthetic oligonucleotide
  misc_feature 1..20: note = Target: SCN10A; (-) strand; PAM type: NNNNGHTT; PAM sequence: AGGGGATT
  source 1..20: mol_type = other DNA
aacttcagttctgtgagata

SEQ ID NO: 10733 - DNA, 20 bp, synthetic construct
  misc_feature 1..20: note = Description of Artificial Sequence: Synthetic oligonucleotide
  misc_feature 1..20: note = Target: SCN10A; (-) strand; PAM type: NNNNGHTT; PAM sequence: TCAGGCTT
  source 1..20: mol_type = other DNA
ataatggttgctaaacagga

SEQ ID NO: 10734 - DNA, 20 bp, synthetic construct
  misc_feature 1..20: note = Description of Artificial Sequence: Synthetic oligonucleotide
  misc_feature 1..20: note = Target: SCN10A; (-) strand; PAM type: NNNNGHTT; PAM sequence: CTGAGCTT
  source 1..20: mol_type = other DNA
agagtactctatttataata

SEQ ID NO: 10735 - DNA, 20 bp, synthetic construct
  misc_feature 1..20: note = Description of Artificial Sequence: Synthetic oligonucleotide
  misc_feature 1..20: note = Target: SCN10A; (-) strand; PAM type: NNNNGHTT; PAM sequence: GAAGGATT
  source 1..20: mol_type = other DNA
ctcatttgcttcaaaaattg

SEQ ID NO: 10736 - DNA, 20 bp, synthetic construct
  misc_feature 1..20: note = Description of Artificial Sequence: Synthetic oligonucleotide
  misc_feature 1..20: note = Target: SCN10A; (-) strand; PAM type: NNNNGHTT; PAM sequence: ATTTGCTT
  source 1..20: mol_type = other DNA
tggatgtgtcaatttttctc

SEQ ID NO: 10737 - DNA, 20 bp, synthetic construct
  misc_feature 1..20: note = Description of Artificial Sequence: Synthetic oligonucleotide
  misc_feature 1..20: note = Target: SCN10A; (-) strand; PAM type: NNNNGHTT; PAM sequence: GTTTGCTT
  source 1..20: mol_type = other DNA
tcttctcagtttcttcattg

SEQ ID NO: 10738 - DNA, 20 bp, synthetic construct
  misc_feature 1..20: note = Description of Artificial Sequence: Synthetic oligonucleotide
  misc_feature 1..20: note = Target: SCN10A; (-) strand; PAM type: NNNNGHTT; PAM sequence: ATTGGTTT
  source 1..20: mol_type = other DNA
attttcttctcagtttcttc

SEQ ID NO: 10739 - DNA, 20 bp, synthetic construct
  misc_feature 1..20: note = Description of Artificial Sequence: Synthetic oligonucleotide
  misc_feature 1..20: note = Target: SCN10A; (-) strand; PAM type: NNNNGHTT; PAM sequence: CTCAGTTT
  source 1..20: mol_type = other DNA
tatgcaaccaaaattttctt

SEQ ID NO: 10740 - DNA, 20 bp, synthetic construct
  misc_feature 1..20: note = Description of Artificial Sequence: Synthetic oligonucleotide
  misc_feature 1..20: note = Target: SCN10A; (-) strand; PAM type: NNNNGHTT; PAM sequence: TAATGCTT
  source 1..20: mol_type = other DNA
gatgaattttaaagcaattc

SEQ ID NO: 10741 - DNA, 20 bp, synthetic construct
  misc_feature 1..20: note = Description of Artificial Sequence: Synthetic oligonucleotide
  misc_feature 1..20: note = Target: SCN10A; (-) strand; PAM type: NNNNGHTT; PAM sequence: GAGGGTTT
  source 1..20: mol_type = other DNA
aatatatagaagagacccag

SEQ ID NO: 10742 - DNA, 20 bp, synthetic construct
  misc_feature 1..20: note = Description of Artificial Sequence: Synthetic oligonucleotide
  misc_feature 1..20: note = Target: SCN10A; (-) strand; PAM type: NNNNGHTT; PAM sequence: TGCAGTTT
  source 1..20: mol_type = other DNA
catgtggtaaatagacctaa

SEQ ID NO: 10743 - DNA, 20 bp, synthetic construct
  misc_feature 1..20: note = Description of Artificial Sequence: Synthetic oligonucleotide
  misc_feature 1..20: note = Target: SCN10A; (-) strand; PAM type: NNNNGHTT; PAM sequence: AATTGATT
  source 1..20: mol_type = other DNA
ttaagtacttctttaatgct

SEQ ID NO: 10744 - DNA, 20 bp, synthetic construct
  misc_feature 1..20: note = Description of Artificial Sequence: Synthetic oligonucleotide
  misc_feature 1..20: note = Target: SCN10A; (-) strand; PAM type: NNNNGHTT; PAM sequence: GAGAGTTT
  source 1..20: mol_type = other DNA
tctagtaattgaagacttga

SEQ ID NO: 10745 - DNA, 20 bp, synthetic construct
  misc_feature 1..20: note = Description of Artificial Sequence: Synthetic oligonucleotide
  misc_feature 1..20: note = Target: SCN10A; (-) strand; PAM type: NNNNGHTT; PAM sequence: AAAGGCTT
  source 1..20: mol_type = other DNA
ggggctggataggtatcaga

SEQ ID NO: 10746 - DNA, 20 bp, synthetic construct
  misc_feature 1..20: note = Description of Artificial Sequence: Synthetic oligonucleotide
  misc_feature 1..20: note = Target: SCN10A; (-) strand; PAM type: NNNNGHTT; PAM sequence: TGGTGTTT
  source 1..20: mol_type = other DNA
gtgtattagagacacataca

SEQ ID NO: 10747 - DNA, 20 bp, synthetic construct
  misc_feature 1..20: note = Description of Artificial Sequence: Synthetic oligonucleotide
  misc_feature 1..20: note = Target: SCN10A; (-) strand; PAM type: NNNNGHTT; PAM sequence: TAAGGATT
  source 1..20: mol_type = other DNA
ctagaacatgttcttttccc

SEQ ID NO: 10748 - DNA, 20 bp, synthetic construct
  misc_feature 1..20: note = Description of Artificial Sequence: Synthetic oligonucleotide
  misc_feature 1..20: note = Target: SCN10A; (-) strand; PAM type: NNNNGHTT; PAM sequence: AGGTGCTT
  source 1..20: mol_type = other DNA
cttgttcattcaacaatact

SEQ ID NO: 10749 - DNA, 20 bp, synthetic construct
  misc_feature 1..20: note = Description of Artificial Sequence: Synthetic oligonucleotide
  misc_feature 1..20: note = Target: SCN10A; (-) strand; PAM type: NNNNGHTT; PAM sequence: TGATGCTT
  source 1..20: mol_type = other DNA
atgtgtgcttgtctctccag

SEQ ID NO: 10750 - DNA, 20 bp, synthetic construct
  misc_feature 1..20: note = Description of Artificial Sequence: Synthetic oligonucleotide
  misc_feature 1..20: note = Target: SCN10A; (-) strand; PAM type: NNNNGHTT; PAM sequence: GTGTGCTT
  source 1..20: mol_type = other DNA
ggatgtccaataattggtat

SEQ ID NO: 10751 - DNA, 20 bp, synthetic construct
  misc_feature 1..20: note = Description of Artificial Sequence: Synthetic oligonucleotide
  misc_feature 1..20: note = Target: SCN10A; (-) strand; PAM type: NNNNGHTT; PAM sequence: CACAGATT
  source 1..20: mol_type = other DNA
cccccattctgtcagcccca

SEQ ID NO: 10752 - DNA, 20 bp, synthetic construct
  misc_feature 1..20: note = Description of Artificial Sequence: Synthetic oligonucleotide
  misc_feature 1..20: note = Target: SCN10A; (-) strand; PAM type: NNNNGHTT; PAM sequence: TTGGGCTT
  source 1..20: mol_type = other DNA
gaaatgtcaatgacactgaa

SEQ ID NO: 10753 - DNA, 20 bp, synthetic construct
  misc_feature 1..20: note = Description of Artificial Sequence: Synthetic oligonucleotide
  misc_feature 1..20: note = Target: SCN10A; (-) strand; PAM type: NNNNGHTT; PAM sequence: CACAGCTT
  source 1..20: mol_type = other DNA
aatcacagaacaggatgaat

SEQ ID NO: 10754 - DNA, 20 bp, synthetic construct
  misc_feature 1..20: note = Description of Artificial Sequence: Synthetic oligonucleotide
  misc_feature 1..20: note = Target: SCN10A; (-) strand; PAM type: NNNNGHTT; PAM sequence: TCTTGCTT
  source 1..20: mol_type = other DNA
tgcatctgtgccctcctctt

SEQ ID NO: 10755 - DNA, 20 bp, synthetic construct
  misc_feature 1..20: note = Description of Artificial Sequence: Synthetic oligonucleotide
  misc_feature 1..20: note = Target: SCN10A; (-) strand; PAM type: NNNNGHTT; PAM sequence: CTCAGATT
  source 1..20: mol_type = other DNA
gcaataccatctctccaacc

SEQ ID NO: 10756 - DNA, 20 bp, synthetic construct
  misc_feature 1..20: note = Description of Artificial Sequence: Synthetic oligonucleotide
  misc_feature 1..20: note = Target: SCN10A; (-) strand; PAM type: NNNNGHTT; PAM sequence: TTATGCTT
  source 1..20: mol_type = other DNA
ggatcaacatggctattttt

SEQ ID NO: 10757 - DNA, 20 bp, synthetic construct
  misc_feature 1..20: note = Description of Artificial Sequence: Synthetic oligonucleotide
  misc_feature 1..20: note = Target: SCN10A; (-) strand; PAM type: NNNNGHTT; PAM sequence: CCACGCTT
  source 1..20: mol_type = other DNA
ttgcactgcaactttcctcg

SEQ ID NO: 10758 - DNA, 20 bp, synthetic construct
  misc_feature 1..20: note = Description of Artificial Sequence: Synthetic oligonucleotide
  misc_feature 1..20: note = Target: SCN10A; (-) strand; PAM type: NNNNGHTT; PAM sequence: AATGGCTT
  source 1..20: mol_type = other DNA
gtgacacaatccagcctggg

SEQ ID NO: 10759 - DNA, 20 bp, synthetic construct
  misc_feature 1..20: note = Description of Artificial Sequence: Synthetic oligonucleotide
  misc_feature 1..20: note = Target: SCN10A; (-) strand; PAM type: NNNNGHTT; PAM sequence: AAAAGTTT
  source 1..20: mol_type = other DNA
ctgtcacctgttgttatcag

SEQ ID NO: 10760 - DNA, 20 bp, synthetic construct
  misc_feature 1..20: note = Description of Artificial Sequence: Synthetic oligonucleotide
  misc_feature 1..20: note = Target: SCN10A; (-) strand; PAM type: NNNNGHTT; PAM sequence: CTTAGTTT
  source 1..20: mol_type = other DNA
aggtggtttttattttttta

SEQ ID NO: 10761 - DNA, 20 bp, synthetic construct
  misc_feature 1..20: note = Description of Artificial Sequence: Synthetic oligonucleotide
  misc_feature 1..20: note = Target: SCN10A; (-) strand; PAM type: NNNNGHTT; PAM sequence: GGTGGTTT
  source 1..20: mol_type = other DNA
ttttttttctgatgcgtcga

SEQ ID NO: 10762 - DNA, 20 bp, synthetic construct
  misc_feature 1..20: note = Description of Artificial Sequence: Synthetic oligonucleotide
  misc_feature 1..20: note = Target: SCN10A; (-) strand; PAM type: NNNNGHTT; PAM sequence: GTCAGCTT
  source 1..20: mol_type = other DNA
ggtgtctgcggacatcaaag

SEQ ID NO: 10763 - DNA, 20 bp, synthetic construct
  misc_feature 1..20: note = Description of Artificial Sequence: Synthetic oligonucleotide
  misc_feature 1..20: note = Target: SCN10A; (-) strand; PAM type: NNNNGHTT; PAM sequence: CCCGGTTT
  source 1..20: mol_type = other DNA
gaggacactggaggaagaac

SEQ ID NO: 10764 - DNA, 20 bp, synthetic construct
  misc_feature 1..20: note = Description of Artificial Sequence: Synthetic oligonucleotide
  misc_feature 1..20: note = Target: SCN10A; (-) strand; PAM type: NNNNGHTT; PAM sequence: TGGTGATT
  source 1..20: mol_type = other DNA
ggattgggcaatcaaatggg

SEQ ID NO: 10765 - DNA, 20 bp, synthetic construct
  misc_feature 1..20: note = Description of Artificial Sequence: Synthetic oligonucleotide
  misc_feature 1..20: note = Target: SCN10A; (-) strand; PAM type: NNNNGHTT; PAM sequence: TCAGGATT
  source 1..20: mol_type = other DNA
tccaatttgactcccaggtt

SEQ ID NO: 10766 - DNA, 20 bp, synthetic construct
  misc_feature 1..20: note = Description of Artificial Sequence: Synthetic oligonucleotide
  misc_feature 1..20: note = Target: SCN10A; (-) strand; PAM type: NNNNGHTT; PAM sequence: CCAGGTTT
  source 1..20: mol_type = other DNA
aggggagtccaatttgactc

SEQ ID NO: 10767 - DNA, 20 bp, synthetic construct
  misc_feature 1..20: note = Description of Artificial Sequence: Synthetic oligonucleotide
  misc_feature 1..20: note = Target: SCN10A; (-) strand; PAM type: NNNNGHTT; PAM sequence: TTGGGATT
  source 1..20: mol_type = other DNA
agggaagtggatcaacaaga

SEQ ID NO: 10768 - DNA, 20 bp, synthetic construct
  misc_feature 1..20: note = Description of Artificial Sequence: Synthetic oligonucleotide
  misc_feature 1..20: note = Target: SCN10A; (-) strand; PAM type: NNNNGHTT; PAM sequence: ACAAGATT
  source 1..20: mol_type = other DNA
caccttagggaagtggatca

SEQ ID NO: 10769 - DNA, 20 bp, synthetic construct
  misc_feature 1..20: note = Description of Artificial Sequence: Synthetic oligonucleotide
  misc_feature 1..20: note = Target: SCN10A; (-) strand; PAM type: NNNNGHTT; PAM sequence: TAAAGATT
  source 1..20: mol_type = other DNA
agaggctcaggtttgtgctc

SEQ ID NO: 10770 - DNA, 20 bp, synthetic construct
  misc_feature 1..20: note = Description of Artificial Sequence: Synthetic oligonucleotide
  misc_feature 1..20: note = Target: SCN10A; (-) strand; PAM type: NNNNGHTT; PAM sequence: TCAGGTTT
  source 1..20: mol_type = other DNA
agcgcaggatggtaagaggc

SEQ ID NO: 10771 - DNA, 20 bp, synthetic construct
  misc_feature 1..20: note = Description of Artificial Sequence: Synthetic oligonucleotide
  misc_feature 1..20: note = Target: SCN10A; (-) strand; PAM type: NNNNGHTT; PAM sequence: TAGGGATT
  source 1..20: mol_type = other DNA
ttcgcaggtgctagcagcac

SEQ ID NO: 10772 - DNA, 20 bp, synthetic construct
  misc_feature 1..20: note = Description of Artificial Sequence: Synthetic oligonucleotide
  misc_feature 1..20: note = Target: SCN10A; (-) strand; PAM type: NNNNGHTT; PAM sequence: CTCTGTTT
  source 1..20: mol_type = other DNA
tggtcctaacccttcagctt

SEQ ID NO: 10773 - DNA, 20 bp, synthetic construct
  misc_feature 1..20: note = Description of Artificial Sequence: Synthetic oligonucleotide
  misc_feature 1..20: note = Target: SCN10A; (-) strand; PAM type: NNNNGHTT; PAM sequence: TTCAGCTT
  source 1..20: mol_type = other DNA
caccaccctggtcctaaccc

SEQ ID NO: 10774 - DNA, 20 bp, synthetic construct
  misc_feature 1..20: note = Description of Artificial Sequence: Synthetic oligonucleotide
  misc_feature 1..20: note = Target: SCN10A; (-) strand; PAM type: NNNNGHTT; PAM sequence: GCCAGCTT
  source 1..20: mol_type = other DNA
tcctaccttgaggcaagggg

SEQ ID NO: 10775 - DNA, 20 bp, synthetic construct
  misc_feature 1..20: note = Description of Artificial Sequence: Synthetic oligonucleotide
  misc_feature 1..20: note = Target: SCN10A; (-) strand; PAM type: NNNNGHTT; PAM sequence: TTCAGCTT
  source 1..20: mol_type = other DNA
gttctcagctagagaccagc

SEQ ID NO: 10776 - DNA, 20 bp, synthetic construct
  misc_feature 1..20: note = Description of Artificial Sequence: Synthetic oligonucleotide
  misc_feature 1..20: note = Target: SCN10A; (-) strand; PAM type: NNNNGHTT; PAM sequence: ACCAGCTT
  source 1..20: mol_type = other DNA
aggagtgttctcagctagag

SEQ ID NO: 10777 - DNA, 20 bp, synthetic construct
  misc_feature 1..20: note = Description of Artificial Sequence: Synthetic oligonucleotide
  misc_feature 1..20: note = Target: SCN10A; (-) strand; PAM type: NNNNGHTT; PAM sequence: TGAGGATT
  source 1..20: mol_type = other DNA
ttctcaaagaagaagctaag

SEQ ID NO: 10778 - DNA, 20 bp, synthetic construct
  misc_feature 1..20: note = Description of Artificial Sequence: Synthetic oligonucleotide
  misc_feature 1..20: note = Target: SCN10A; (-) strand; PAM type: NNNNGHTT; PAM sequence: TCAGGTTT
  source 1..20: mol_type = other DNA
gcctcagggaccatattaga

SEQ ID NO: 10779 - DNA, 20 bp, synthetic construct
  misc_feature 1..20: note = Description of Artificial Sequence: Synthetic oligonucleotide
  misc_feature 1..20: note = Target: SCN10A; (-) strand; PAM type: NNNNGHTT; PAM sequence: CACCGTTT
  source 1..20: mol_type = other DNA
actagccacttcaattaggg

SEQ ID NO: 10780 - DNA, 20 bp, synthetic construct
  misc_feature 1..20: note = Description of Artificial Sequence: Synthetic oligonucleotide
  misc_feature 1..20: note = Target: SCN10A; (-) strand; PAM type: NNNNGHTT; PAM sequence: GGAAGCTT
  source 1..20: mol_type = other DNA
gcaggaggtttgtgaggagt

SEQ ID NO: 10781 - DNA, 20 bp, synthetic construct
  misc_feature 1..20: note = Description of Artificial Sequence: Synthetic oligonucleotide
  misc_feature 1..20: note = Target: SCN10A; (-) strand; PAM type: NNNNGHTT; PAM sequence: GGAGGTTT
  source 1..20: mol_type = other DNA
gagatgctccggaaggagca

SEQ ID NO: 10782 - DNA, 20 bp, synthetic construct
  misc_feature 1..20: note = Description of Artificial Sequence: Synthetic oligonucleotide
  misc_feature 1..20: note = Target: SCN10A; (-) strand; PAM type: NNNNGHTT; PAM sequence: ACAGGTTT
  source 1..20: mol_type = other DNA
ggggtccatgtgctatgggt

SEQ ID NO: 10783 - DNA, 20 bp, synthetic construct
  misc_feature 1..20: note = Description of Artificial Sequence: Synthetic oligonucleotide
  misc_feature 1..20: note = Target: SCN10A; (-) strand; PAM type: NNNNGHTT; PAM sequence: CTGTGCTT
  source 1..20: mol_type = other DNA
ctggtgggtcagctgcatgg

SEQ ID NO: 10784 - DNA, 20 bp, synthetic construct
  misc_feature 1..20: note = Description of Artificial Sequence: Synthetic oligonucleotide
  misc_feature 1..20: note = Target: SCN10A; (-) strand; PAM type: NNNNGHTT; PAM sequence: ACAGGATT
  source 1..20: mol_type = other DNA
tcactgttccgcctcatgac

SEQ ID NO: 10785 - DNA, 20 bp, synthetic construct
  misc_feature 1..20: note = Description of Artificial Sequence: Synthetic oligonucleotide
  misc_feature 1..20: note = Target: SCN10A; (-) strand; PAM type: NNNNGHTT; PAM sequence: TTGGGCTT
  source 1..20: mol_type = other DNA
accagctttgattcctttgc

SEQ ID NO: 10786 - DNA, 20 bp, synthetic construct
  misc_feature 1..20: note = Description of Artificial Sequence: Synthetic oligonucleotide
  misc_feature 1..20: note = Target: SCN10A; (-) strand; PAM type: NNNNGHTT; PAM sequence: CTTTGCTT
  source 1..20: mol_type = other DNA
aactacaccagctttgattc

SEQ ID NO: 10787 - DNA, 20 bp, synthetic construct
  misc_feature 1..20: note = Description of Artificial Sequence: Synthetic oligonucleotide
  misc_feature 1..20: note = Target: SCN10A; (-) strand; PAM type: NNNNGHTT; PAM sequence: CTTTGATT
  source 1..20: mol_type = other DNA
ccggattttaactacaccag

SEQ ID NO: 10788 - DNA, 20 bp, synthetic construct
  misc_feature 1..20: note = Description of Artificial Sequence: Synthetic oligonucleotide
  misc_feature 1..20: note = Target: SCN10A; (-) strand; PAM type: NNNNGHTT; PAM sequence: ACCAGCTT
  source 1..20: mol_type = other DNA
acaacccggattttaactac

SEQ ID NO: 10789 - DNA, 20 bp, synthetic construct
  misc_feature 1..20: note = Description of Artificial Sequence: Synthetic oligonucleotide
  misc_feature 1..20: note = Target: SCN10A; (-) strand; PAM type: NNNNGHTT; PAM sequence: CCCGGATT
  source 1..20: mol_type = other DNA
tgccttaaaacttctgacaa

SEQ ID NO: 10790 - DNA, 20 bp, synthetic construct
  misc_feature 1..20: note = Description of Artificial Sequence: Synthetic oligonucleotide
  misc_feature 1..20: note = Target: SCN10A; (-) strand; PAM type: NNNNGHTT; PAM sequence: CCCCGTTT
  source 1..20: mol_type = other DNA
tgacgtgaaagtattagcgt

SEQ ID NO: 10791 - DNA, 20 bp, synthetic construct
  misc_feature 1..20: note = Description of Artificial Sequence: Synthetic oligonucleotide
  misc_feature 1..20: note = Target: SCN10A; (-) strand; PAM type: NNNNGHTT; PAM sequence: AAGAGCTT
  source 1..20: mol_type = other DNA
ttccctggtatgaactggca

SEQ ID NO: 10792 - DNA, 20 bp, synthetic construct
  misc_feature 1..20: note = Description of Artificial Sequence: Synthetic oligonucleotide
  misc_feature 1..20: note = Target: SCN10A; (-) strand; PAM type: NNNNGHTT; PAM sequence: TCAGGTTT
  source 1..20: mol_type = other DNA
tgcagatgatgccaacaggc

SEQ ID NO: 10793 - DNA, 20 bp, synthetic construct
  misc_feature 1..20: note = Description of Artificial Sequence: Synthetic oligonucleotide
  misc_feature 1..20: note = Target: SCN10A; (-) strand; PAM type: NNNNGHTT; PAM sequence: TAGTGTTT
  source 1..20: mol_type = other DNA
aacattgagtgattaaatta

SEQ ID NO: 10794 - DNA, 20 bp, synthetic construct
  misc_feature 1..20: note = Description of Artificial Sequence: Synthetic oligonucleotide
  misc_feature 1..20: note = Target: SCN10A; (-) strand; PAM type: NNNNGHTT; PAM sequence: GAGTGATT
  source 1..20: mol_type = other DNA
atctgtaaagaaagaacatt

SEQ ID NO: 10795 - DNA, 20 bp, synthetic construct
  misc_feature 1..20: note = Description of Artificial Sequence: Synthetic oligonucleotide
  misc_feature 1..20: note = Target: SCN10A; (-) strand; PAM type: NNNNGHTT; PAM sequence: CCCAGATT
  source 1..20: mol_type = other DNA
caactgacttctttctgacc

SEQ ID NO: 10796 - DNA, 20 bp, synthetic construct
  misc_feature 1..20: note = Description of Artificial Sequence: Synthetic oligonucleotide
  misc_feature 1..20: note = Target: SCN10A; (-) strand; PAM type: NNNNGHTT; PAM sequence: CGTAGTTT
  source 1..20: mol_type = other DNA
aataaatatattgacacctg

SEQ ID NO: 10797 - DNA, 20 bp, synthetic construct
  misc_feature 1..20: note = Description of Artificial Sequence: Synthetic oligonucleotide
  misc_feature 1..20: note = Target: SCN10A; (-) strand; PAM type: NNNNGHTT; PAM sequence: AGATGCTT
  source 1..20: mol_type = other DNA
tttacgctccctgagctgac

SEQ ID NO: 10798 - DNA, 20 bp, synthetic construct
  misc_feature 1..20: note = Description of Artificial Sequence: Synthetic oligonucleotide
  misc_feature 1..20: note = Target: SCN10A; (-) strand; PAM type: NNNNGHTT; PAM sequence: TGCTGTTT
  source 1..20: mol_type = other DNA
ctggacttcaaacgaggcat

SEQ ID NO: 10799 - DNA, 20 bp, synthetic construct
  misc_feature 1..20: note = Description of Artificial Sequence: Synthetic oligonucleotide
  misc_feature 1..20: note = Target: SCN10A; (-) strand; PAM type: NNNNGHTT; PAM sequence: AACTGATT
  source 1..20: mol_type = other DNA
cgaagtggagatagacttgg

SEQ ID NO: 10800 - DNA, 20 bp, synthetic construct
  misc_feature 1..20: note = Description of Artificial Sequence: Synthetic oligonucleotide
  misc_feature 1..20: note = Target: SCN10A; (-) strand; PAM type: NNNNGHTT; PAM sequence: GGTGGATT
  source 1..20: mol_type = other DNA
tgtttatatgcagtggctat

SEQ ID NO: 10801 - DNA, 20 bp, synthetic construct
  misc_feature 1..20: note = Description of Artificial Sequence: Synthetic oligonucleotide
  misc_feature 1..20: note = Target: SCN10A; (-) strand; PAM type: NNNNGHTT; PAM sequence: AACTGTTT
  source 1..20: mol_type = other DNA
atttaatcctcagagcagtg

SEQ ID NO: 10802 - DNA, 20 bp, synthetic construct
  misc_feature 1..20: note = Description of Artificial Sequence: Synthetic oligonucleotide
  misc_feature 1..20: note = Target: SCN10A; (-) strand; PAM type: NNNNGHTT; PAM sequence: TGCAGTTT
  source 1..20: mol_type = other DNA
aaacaataggaattttcctt

SEQ ID NO: 10803 - DNA, 20 bp, synthetic construct
  misc_feature 1..20: note = Description of Artificial Sequence: Synthetic oligonucleotide
  misc_feature 1..20: note = Target: SCN10A; (-) strand; PAM type: NNNNGHTT; PAM sequence: AGCAGCTT
  source 1..20: mol_type = other DNA
ttattccagtttatcctttc

SEQ ID NO: 10804 - DNA, 20 bp, synthetic construct
  misc_feature 1..20: note = Description of Artificial Sequence: Synthetic oligonucleotide
  misc_feature 1..20: note = Target: SCN10A; (-) strand; PAM type: NNNNGHTT; PAM sequence: TCCAGTTT
  source 1..20: mol_type = other DNA
tgttcttccacatatattat

SEQ ID NO: 10805 - DNA, 20 bp, synthetic construct
  misc_feature 1..20: note = Description of Artificial Sequence: Synthetic oligonucleotide
  misc_feature 1..20: note = Target: SCN10A; (-) strand; PAM type: NNNNGHTT; PAM sequence: ATCAGTTT
  source 1..20: mol_type = other DNA
catgagagggttgttctgac

SEQ ID NO: 10806 - DNA, 20 bp, synthetic construct
  misc_feature 1..20: note = Description of Artificial Sequence: Synthetic oligonucleotide
  misc_feature 1..20: note = Target: SCN10A; (-) strand; PAM type: NNNNGHTT; PAM sequence: GAGAGCTT
  source 1..20: mol_type = other DNA
tctcacccacctccatggct

SEQ ID NO: 10807 - DNA, 20 bp, synthetic construct
  misc_feature 1..20: note = Description of Artificial Sequence: Synthetic oligonucleotide
  misc_feature 1..20: note = Target: SCN10A; (-) strand; PAM type: NNNNGHTT; PAM sequence: TGCTGCTT
  source 1..20: mol_type = other DNA
gaggacccctcagctctgcc

SEQ ID NO: 10808 - DNA, 20 bp, synthetic construct
  misc_feature 1..20: note = Description of Artificial Sequence: Synthetic oligonucleotide
  misc_feature 1..20: note = Target: SCN10A; (-) strand; PAM type: NNNNGHTT; PAM sequence: GATAGTTT
  source 1..20: mol_type = other DNA
tccaggctgggtgaatacga

SEQ ID NO: 10809 - DNA, 20 bp, synthetic construct
  misc_feature 1..20: note = Description of Artificial Sequence: Synthetic oligonucleotide
  misc_feature 1..20: note = Target: SCN10A; (-) strand; PAM type: NNNNGHTT; PAM sequence: GTGAGCTT
  source 1..20: mol_type = other DNA
tcctggaggtggtgtttgag

SEQ ID NO: 10810 - DNA, 20 bp, synthetic construct
  misc_feature 1..20: note = Description of Artificial Sequence: Synthetic oligonucleotide
  misc_feature 1..20: note = Target: SCN10A; (-) strand; PAM type: NNNNGHTT; PAM sequence: TGGTGTTT
  source 1..20: mol_type = other DNA
tagggaaggcttcctggagg

SEQ ID NO: 10811 - DNA, 20 bp, synthetic construct
  misc_feature 1..20: note = Description of Artificial Sequence: Synthetic oligonucleotide
  misc_feature 1..20: note = Target: SCN10A; (-) strand; PAM type: NNNNGHTT; PAM sequence: GAAGGCTT
  source 1..20: mol_type = other DNA
gaggcaagagagaaagtagg

SEQ ID NO: 10812 - DNA, 20 bp, synthetic construct
  misc_feature 1..20: note = Description of Artificial Sequence: Synthetic oligonucleotide
  misc_feature 1..20: note = Target: SCN10A; (-) strand; PAM type: NNNNGHTT; PAM sequence: AGAGGCTT
  source 1..20: mol_type = other DNA
tggaaaacaagttctttact

SEQ ID NO: 10813 - DNA, 20 bp, synthetic construct
  misc_feature 1..20: note = Description of Artificial Sequence: Synthetic oligonucleotide
  misc_feature 1..20: note = Target: SCN10A; (-) strand; PAM type: NNNNGHTT; PAM sequence: GCTAGTTT
  source 1..20: mol_type = other DNA
ccaaatccagcctataagct

SEQ ID NO: 10814 - DNA, 20 bp, synthetic construct
  misc_feature 1..20: note = Description of Artificial Sequence: Synthetic oligonucleotide
  misc_feature 1..20: note = Target: SCN10A; (-) strand; PAM type: NNNNGHTT; PAM sequence: TTTAGATT
  source 1..20: mol_type = other DNA
tttaaaatagagataggaaa

SEQ ID NO: 10815 - DNA, 20 bp, synthetic construct
  misc_feature 1..20: note = Description of Artificial Sequence: Synthetic oligonucleotide
  misc_feature 1..20: note = Target: SCN10A; (-) strand; PAM type: NNNNGHTT; PAM sequence: CACTGTTT
  source 1..20: mol_type = other DNA
gccatgtggaaatgtgggtt

SEQ ID NO: 10816 - DNA, 20 bp, synthetic construct
  misc_feature 1..20: note = Description of Artificial Sequence: Synthetic oligonucleotide
  misc_feature 1..20: note = Target: SCN10A; (-) strand; PAM type: NNNNGHTT; PAM sequence: TCCAGCTT
  source 1..20: mol_type = other DNA
gggacagccccactgctcgg

SEQ ID NO: 10817 - DNA, 20 bp, synthetic construct
  misc_feature 1..20: note = Description of Artificial Sequence: Synthetic oligonucleotide
  misc_feature 1..20: note = Target: SCN10A; (-) strand; PAM type: NNNNGHTT; PAM sequence: GCCAGATT
  source 1..20: mol_type = other DNA
aatttcgaattcttacagag

SEQ ID NO: 10818 - DNA, 20 bp, synthetic construct
  misc_feature 1..20: note = Description of Artificial Sequence: Synthetic oligonucleotide
  misc_feature 1..20: note = Target: SCN10A; (-) strand; PAM type: NNNNGHTT; PAM sequence: CTAGGCTT
  source 1..20: mol_type = other DNA
tttgcaaggcttcttcaggc

SEQ ID NO: 10819 - DNA, 20 bp, synthetic construct
  misc_feature 1..20: note = Description of Artificial Sequence: Synthetic oligonucleotide
  misc_feature 1..20: note = Target: SCN10A; (-) strand; PAM type: NNNNGHTT; PAM sequence: CAAGGCTT
  source 1..20: mol_type = other DNA
agaaaaacagtggaagtttg

SEQ ID NO: 10820 - DNA, 20 bp, synthetic construct
  misc_feature 1..20: note = Description of Artificial Sequence: Synthetic oligonucleotide
  misc_feature 1..20: note = Target: SCN10A; (-) strand; PAM type: NNNNGHTT; PAM sequence: GGAAGTTT
  source 1..20: mol_type = other DNA
agtgttcccagaaaaacagt

SEQ ID NO: 10821 - DNA, 20 bp, synthetic construct
  misc_feature 1..20: note = Description of Artificial Sequence: Synthetic oligonucleotide
  misc_feature 1..20: note = Target: SCN10A; (-) strand; PAM type: NNNNGHTT; PAM sequence: TCATGATT
  source 1..20: mol_type = other DNA
aaaacaacaatgtatttaat

SEQ ID NO: 10822 - DNA, 20 bp, synthetic construct
  misc_feature 1..20: note = Description of Artificial Sequence: Synthetic oligonucleotide
  misc_feature 1..20: note = Target: SCN10A; (-) strand; PAM type: NNNNGHTT; PAM sequence: GTTAGCTT
  source 1..20: mol_type = other DNA
catggggagggaatgtatga

SEQ ID NO: 10823 - DNA, 20 bp, synthetic construct
  misc_feature 1..20: note = Description of Artificial Sequence: Synthetic oligonucleotide
  misc_feature 1..20: note = Target: SCN10A; (-) strand; PAM type: NNNNGHTT; PAM sequence: TGAGGCTT
  source 1..20: mol_type = other DNA
ggagggttcagaaccatctg

SEQ ID NO: 10824 - DNA, 20 bp, synthetic construct
  misc_feature 1..20: note = Description of Artificial Sequence: Synthetic oligonucleotide
  misc_feature 1..20: note = Target: SCN10A; (-) strand; PAM type: NNNNGHTT; PAM sequence: CAAGGCTT
  source 1..20: mol_type = other DNA
ggaatattgcattcaccaca

SEQ ID NO: 10825 - DNA, 20 bp, synthetic construct
  misc_feature 1..20: note = Description of Artificial Sequence: Synthetic oligonucleotide
  misc_feature 1..20: note = Target: SCN10A; (-) strand; PAM type: NNNNGHTT; PAM sequence: CACTGCTT
  source 1..20: mol_type = other DNA
gggagattgagagccgaagt

SEQ ID NO: 10826 - DNA, 20 bp, synthetic construct
  misc_feature 1..20: note = Description of Artificial Sequence: Synthetic oligonucleotide
  misc_feature 1..20: note = Target: SCN10A; (-) strand; PAM type: NNNNGHTT; PAM sequence: GGGAGATT
  source 1..20: mol_type = other DNA
agtcattctacctctgctgg

SEQ ID NO: 10827 - DNA, 20 bp, synthetic construct
  misc_feature 1..20: note = Description of Artificial Sequence: Synthetic oligonucleotide
  misc_feature 1..20: note = Target: SCN10A; (-) strand; PAM type: NNNNGHTT; PAM sequence: TTGTGTTT
  source 1..20: mol_type = other DNA
gccaaaatggttctcttgag

SEQ ID NO: 10828 - DNA, 20 bp, synthetic construct
  misc_feature 1..20: note = Description of Artificial Sequence: Synthetic oligonucleotide
  misc_feature 1..20: note = Target: SCN10A; (-) strand; PAM type: NNNNGHTT; PAM sequence: AAGTGTTT
  source 1..20: mol_type = other DNA
atcctcaccatcttctgcct

SEQ ID NO: 10829 - DNA, 20 bp, synthetic construct
  misc_feature 1..20: note = Description of Artificial Sequence: Synthetic oligonucleotide
  misc_feature 1..20: note = Target: SCN10A; (-) strand; PAM type: NNNNGHTT; PAM sequence: CCCTGATT
  source 1..20: mol_type = other DNA
cctgaaggtcattgtggggg

SEQ ID NO: 10830 - DNA, 20 bp, synthetic construct
  misc_feature 1..20: note = Description of Artificial Sequence: Synthetic oligonucleotide
  misc_feature 1..20: note = Target: SCN10A; (-) strand; PAM type: NNNNGHTT; PAM sequence: GCAAGCTT
  source 1..20: mol_type = other DNA
gcctgcctctcagagtaaat

SEQ ID NO: 10831 - DNA, 20 bp, synthetic construct
  misc_feature 1..20: note = Description of Artificial Sequence: Synthetic oligonucleotide
  misc_feature 1..20: note = Target: SCN10A; (-) strand; PAM type: NNNNGHTT; PAM sequence: AGTAGCTT
  source 1..20: mol_type = other DNA
caaattactggggtgaagtt

SEQ ID NO: 10832 - DNA, 20 bp, synthetic construct
  misc_feature 1..20: note = Description of Artificial Sequence: Synthetic oligonucleotide
  misc_feature 1..20: note = Target: SCN10A; (-) strand; PAM type: NNNNGHTT; PAM sequence: TTTTGTTT
  source 1..20: mol_type = other DNA
ttttctttctcttggtctat

SEQ ID NO: 10833 - DNA, 20 bp, synthetic construct
  misc_feature 1..20: note = Description of Artificial Sequence: Synthetic oligonucleotide
  misc_feature 1..20: note = Target: SCN10A; (-) strand; PAM type: NNNNGHTT; PAM sequence: CTCTGTTT
  source 1..20: mol_type = other DNA
ttctattgctaaactcacct

SEQ ID NO: 10834 - DNA, 20 bp, synthetic construct
  misc_feature 1..20: note = Description of Artificial Sequence: Synthetic oligonucleotide
  misc_feature 1..20: note = Target: SCN10A; (-) strand; PAM type: NNNNGHTT; PAM sequence: CAGTGTTT
  source 1..20: mol_type = other DNA
ttatgccccagtgactgtct

SEQ ID NO: 10835 - DNA, 20 bp, synthetic construct
  misc_feature 1..20: note = Description of Artificial Sequence: Synthetic oligonucleotide
  misc_feature 1..20: note = Target: SCN10A; (-) strand; PAM type: NNNNGHTT; PAM sequence: CTGTGCTT
  source 1..20: mol_type = other DNA
gtatccttctttgctgccag

SEQ ID NO: 10836 - DNA, 20 bp, synthetic construct
  misc_feature 1..20: note = Description of Artificial Sequence: Synthetic oligonucleotide
  misc_feature 1..20: note = Target: SCN10A; (-) strand; PAM type: NNNNGHTT; PAM sequence: AGTTGATT
  source 1..20: mol_type = other DNA
cgaagctgctctcccaaaga

SEQ ID NO: 10837 - DNA, 20 bp, synthetic construct
  misc_feature 1..20: note = Description of Artificial Sequence: Synthetic oligonucleotide
  misc_feature 1..20: note = Target: SCN10A; (-) strand; PAM type: NNNNGHTT; PAM sequence: GATTGCTT
  source 1..20: mol_type = other DNA
ctaaccaaaaataaatccta

SEQ ID NO: 10838 - DNA, 20 bp, synthetic construct
  misc_feature 1..20: note = Description of Artificial Sequence: Synthetic oligonucleotide
  misc_feature 1..20: note = Target: SCN10A; (-) strand; PAM type: NNNNGHTT; PAM sequence: CCTAGATT
  source 1..20: mol_type = other DNA
atgactaaccaaaaataaat

SEQ ID NO: 10839 - DNA, 20 bp, synthetic construct
  misc_feature 1..20: note = Description of Artificial Sequence: Synthetic oligonucleotide
  misc_feature 1..20: note = Target: SCN10A; (-) strand; PAM type: NNNNGHTT; PAM sequence: AGTGGATT
  source 1..20: mol_type = other DNA
gactgacacatgtagtgctc

SEQ ID NO: 10840 - DNA, 20 bp, synthetic construct
  misc_feature 1..20: note = Description of Artificial Sequence: Synthetic oligonucleotide
  misc_feature 1..20: note = Target: SCN10A; (-) strand; PAM type: NNNNGHTT; PAM sequence: CCTGGTTT
  source 1..20: mol_type = other DNA
tgccaaggttttacctcctc

SEQ ID NO: 10841 - DNA, 20 bp, synthetic construct
  misc_feature 1..20: note = Description of Artificial Sequence: Synthetic oligonucleotide
  misc_feature 1..20: note = Target: SCN10A; (-) strand; PAM type: NNNNGHTT; PAM sequence: CAAGGTTT
  source 1..20: mol_type = other DNA
ctcattcctcagggctctgc

SEQ ID NO: 10842 - DNA, 20 bp, synthetic construct
  misc_feature 1..20: note = Description of Artificial Sequence: Synthetic oligonucleotide
  misc_feature 1..20: note = Target: SCN10A; (-) strand; PAM type: NNNNGHTT; PAM sequence: TGATGCTT
  source 1..20: mol_type = other DNA
aaactttctgaaatgggact

SEQ ID NO: 10843 - DNA, 20 bp, synthetic construct
  misc_feature 1..20: note = Description of Artificial Sequence: Synthetic oligonucleotide
  misc_feature 1..20: note = Target: SCN10A; (-) strand; PAM type: NNNNGHTT; PAM sequence: TCTTGATT
  source 1..20: mol_type = other DNA
ggaaaaaagaattaggcaat

SEQ ID NO: 10844 - DNA, 20 bp, synthetic construct
  misc_feature 1..20: note = Description of Artificial Sequence: Synthetic oligonucleotide
  misc_feature 1..20: note = Target: SCN10A; (-) strand; PAM type: NNNNGHTT; PAM sequence: CACTGTTT
  source 1..20: mol_type = other DNA
gaaagcagtcccagtatctt

SEQ ID NO: 10845 - DNA, 20 bp, synthetic construct
  misc_feature 1..20: note = Description of Artificial Sequence: Synthetic oligonucleotide
  misc_feature 1..20: note = Target: SCN10A; (-) strand; PAM type: NNNNGHTT; PAM sequence: AAAGGATT
  source 1..20: mol_type = other DNA
ttttatttataccttaaact

SEQ ID NO: 10846 - DNA, 20 bp, synthetic construct
  misc_feature 1..20: note = Description of Artificial Sequence: Synthetic oligonucleotide
  misc_feature 1..20: note = Target: SCN10A; (-) strand; PAM type: NNNNGHTT; PAM sequence: GTGGGATT
  source 1..20: mol_type = other DNA
cttcactttctgttctggtt

SEQ ID NO: 10847 - DNA, 20 bp, synthetic construct
  misc_feature 1..20: note = Description of Artificial Sequence: Synthetic oligonucleotide
  misc_feature 1..20: note = Target: SCN10A; (-) strand; PAM type: NNNNGHTT; PAM sequence: GTTGGTTT
  source 1..20: mol_type = other DNA
catttattcacagagcatat

SEQ ID NO: 10848 - DNA, 20 bp, synthetic construct
  misc_feature 1..20: note = Description of Artificial Sequence: Synthetic oligonucleotide
  misc_feature 1..20: note = Target: SCN10A; (-) strand; PAM type: NNNNGHTT; PAM sequence: AACAGTTT
  source 1..20: mol_type = other DNA
agagttcttagagcattaaa

SEQ ID NO: 10849 - DNA, 20 bp, synthetic construct
  misc_feature 1..20: note = Description of Artificial Sequence: Synthetic oligonucleotide
  misc_feature 1..20: note = Target: SCN10A; (-) strand; PAM type: NNNNGHTT; PAM sequence: CCTTGCTT
  source 1..20: mol_type = other DNA
gctgcatgcatccccaggac

SEQ ID NO: 10850 - DNA, 20 bp, synthetic construct
  misc_feature 1..20: note = Description of Artificial Sequence: Synthetic oligonucleotide
  misc_feature 1..20: note = Target: SCN10A; (-) strand; PAM type: NNNNGHTT; PAM sequence: ACTAGATT
  source 1..20: mol_type = other DNA
agtctatagatggcagtgtc

SEQ ID NO: 10851 - DNA, 20 bp, synthetic construct
  misc_feature 1..20: note = Description of Artificial Sequence: Synthetic oligonucleotide
  misc_feature 1..20: note = Target: SCN10A; (-) strand; PAM type: NNNNGHTT; PAM sequence: CTGTGTTT
  source 1..20: mol_type = other DNA
gagactggttggtcaaactc

SEQ ID NO: 10852 - DNA, 20 bp, synthetic construct
  misc_feature 1..20: note = Description of Artificial Sequence: Synthetic oligonucleotide
  misc_feature 1..20: note = Target: SCN10A; (-) strand; PAM type: NNNNGHTT; PAM sequence: CCAAGATT
  source 1..20: mol_type = other DNA
accgcttcgggggttgcttt

SEQ ID NO: 10853 - DNA, 20 bp, synthetic construct
  misc_feature 1..20: note = Description of Artificial Sequence: Synthetic oligonucleotide
  misc_feature 1..20: note = Target: SCN10A; (-) strand; PAM type: NNNNGHTT; PAM sequence: GGTTGCTT
  source 1..20: mol_type = other DNA
ccacagagtaccgcttcggg

SEQ ID NO: 10854 - DNA, 20 bp, synthetic construct
  misc_feature 1..20: note = Description of Artificial Sequence: Synthetic oligonucleotide
  misc_feature 1..20: note = Target: SCN10A; (-) strand; PAM type: NNNNGHTT; PAM sequence: TACCGCTT
  source 1..20: mol_type = other DNA
ctggggttcttgccacagag

SEQ ID NO: 10855 - DNA, 20 bp, synthetic construct
  misc_feature 1..20: note = Description of Artificial Sequence: Synthetic oligonucleotide
  misc_feature 1..20: note = Target: SCN10A; (-) strand; PAM type: NNNNGHTT; PAM sequence: TTCAGCTT
  source 1..20: mol_type = other DNA
aagaaggttcttcatctcag

SEQ ID NO: 10856 - DNA, 20 bp, synthetic construct
  misc_feature 1..20: note = Description of Artificial Sequence: Synthetic oligonucleotide
  misc_feature 1..20: note = Target: SCN10A; (-) strand; PAM type: NNNNGHTT; PAM sequence: TGGGGCTT
  source 1..20: mol_type = other DNA
gatttgcatgggtgtccatg

SEQ ID NO: 10857 - DNA, 20 bp, synthetic construct
  misc_feature 1..20: note = Description of Artificial Sequence: Synthetic oligonucleotide
  misc_feature 1..20: note = Target: SCN10A; (-) strand; PAM type: NNNNGHTT; PAM sequence: AAAAGATT
  source 1..20: mol_type = other DNA
tattgaaataaaataaaata

SEQ ID NO: 10858 - DNA, 20 bp, synthetic construct
  misc_feature 1..20: note = Description of Artificial Sequence: Synthetic oligonucleotide
  misc_feature 1..20: note = Target: SCN10A; (-) strand; PAM type: NNNNGHTT; PAM sequence: ACCTGTTT
  source 1..20: mol_type = other DNA
tttctgtgcaacccaacacc

SEQ ID NO: 10859 - DNA, 20 bp, synthetic construct
  misc_feature 1..20: note = Description of Artificial Sequence: Synthetic oligonucleotide
  misc_feature 1..20: note = Target: SCN10A; (-) strand; PAM type: NNNNGHTT; PAM sequence: CACAGTTT
  source 1..20: mol_type = other DNA
catatgcatgcttatagcag

SEQ ID NO: 10860 - DNA, 20 bp, synthetic construct
  misc_feature 1..20: note = Description of Artificial Sequence: Synthetic oligonucleotide
  misc_feature 1..20: note = Target: SCN10A; (-) strand; PAM type: NNNNGHTT; PAM sequence: GCATGCTT
  source 1..20: mol_type = other DNA
ttaaaaagacacttgcatat

SEQ ID NO: 10861 - DNA, 20 bp, synthetic construct
  misc_feature 1..20: note = Description of Artificial Sequence: Synthetic oligonucleotide
  misc_feature 1..20: note = Target: SCN10A; (-) strand; PAM type: NNNNGHTT; PAM sequence: TGGAGATT
  source 1..20: mol_type = other DNA
aaccactaaggaaaacgtta

SEQ ID NO: 10862 - DNA, 20 bp, synthetic construct
  misc_feature 1..20: note = Description of Artificial Sequence: Synthetic oligonucleotide
  misc_feature 1..20: note = Target: SCN10A; (-) strand; PAM type: NNNNGHTT; PAM sequence: CTATGCTT
  source 1..20: mol_type = other DNA
gagagaaaaatctttgttat

SEQ ID NO: 10863 - DNA, 20 bp, synthetic construct
  misc_feature 1..20: note = Description of Artificial Sequence: Synthetic oligonucleotide
  misc_feature 1..20: note = Target: SCN10A; (-) strand; PAM type: NNNNGHTT; PAM sequence: ATTGGCTT
  source 1..20: mol_type = other DNA
ttggaaaaactcttctagac

SEQ ID NO: 10864 - DNA, 20 bp, synthetic construct
  misc_feature 1..20: note = Description of Artificial Sequence: Synthetic oligonucleotide
  misc_feature 1..20: note = Target: SCN10A; (-) strand; PAM type: NNNNGHTT; PAM sequence: AAAGGCTT
  source 1..20: mol_type = other DNA
aaatcaattcaagatggata

SEQ ID NO: 10865 - DNA, 20 bp, synthetic construct
  misc_feature 1..20: note = Description of Artificial Sequence: Synthetic oligonucleotide
  misc_feature 1..20: note = Target: SCN10A; (-) strand; PAM type: NNNNGHTT; PAM sequence: AGCTGATT
  source 1..20: mol_type = other DNA
aaatctggaggcatcacctt

SEQ ID NO: 10866 - DNA, 20 bp, synthetic construct
  misc_feature 1..20: note = Description of Artificial Sequence: Synthetic oligonucleotide
  misc_feature 1..20: note = Target: SCN10A; (-) strand; PAM type: NNNNGHTT; PAM sequence: TACAGATT
  source 1..20: mol_type = other DNA
ccttactgccaaaagcaata

SEQ ID NO: 10867 - DNA, 20 bp, synthetic construct
  misc_feature 1..20: note = Description of Artificial Sequence: Synthetic oligonucleotide
  misc_feature 1..20: note = Target: SCN10A; (-) strand; PAM type: NNNNGHTT; PAM sequence: GAAAGATT
  source 1..20: mol_type = other DNA
atatacctaaccaaaaaggt

SEQ ID NO: 10868 - DNA, 20 bp, synthetic construct
  misc_feature 1..20: note = Description of Artificial Sequence: Synthetic oligonucleotide
  misc_feature 1..20: note = Target: SCN10A; (-) strand; PAM type: NNNNGHTT; PAM sequence: TAAAGTTT
  source 1..20: mol_type = other DNA
gatctaataaatgaattcag

SEQ ID NO: 10869 - DNA, 20 bp, synthetic construct
  misc_feature 1..20: note = Description of Artificial Sequence: Synthetic oligonucleotide
  misc_feature 1..20: note = Target: SCN10A; (-) strand; PAM type: NNNNGHTT; PAM sequence: TTATGATT
  source 1..20: mol_type = other DNA
tgacaaaatccagcatccca

SEQ ID NO: 10870 - DNA, 20 bp, synthetic construct
  misc_feature 1..20: note = Description of Artificial Sequence: Synthetic oligonucleotide
  misc_feature 1..20: note = Target: SCN10A; (-) strand; PAM type: NNNNGHTT; PAM sequence: GGATGATT
  source 1..20: mol_type = other DNA
gtttcataccagggaggtag

SEQ ID NO: 10871 - DNA, 20 bp, synthetic construct
  misc_feature 1..20: note = Description of Artificial Sequence: Synthetic oligonucleotide
  misc_feature 1..20: note = Target: SCN10A; (-) strand; PAM type: NNNNGHTT; PAM sequence: GGGGGTTT
  source 1..20: mol_type = other DNA
agataacacaccatgatcaa

SEQ ID NO: 10872 - DNA, 20 bp, synthetic construct
  misc_feature 1..20: note = Description of Artificial Sequence: Synthetic oligonucleotide
  misc_feature 1..20: note = Target: SCN10A; (-) strand; PAM type: NNNNGHTT; PAM sequence: ACTGGATT
  source 1..20: mol_type = other DNA
gaaaaaaagtccaggagcag

SEQ ID NO: 10873 - DNA, 20 bp, synthetic construct
  misc_feature 1..20: note = Description of Artificial Sequence: Synthetic oligonucleotide
  misc_feature 1..20: note = Target: SCN10A; (-) strand; PAM type: NNNNGHTT; PAM sequence: GCGAGATT
  source 1..20: mol_type = other DNA
aaacagaccaataacaagta

SEQ ID NO: 10874 - DNA, 20 bp, synthetic construct
  misc_feature 1..20: note = Description of Artificial Sequence: Synthetic oligonucleotide
  misc_feature 1..20: note = Target: SCN10A; (-) strand; PAM type: NNNNGHTT; PAM sequence: CTTAGATT
  source 1..20: mol_type = other DNA
tcctggaaatatacaactgt

SEQ ID NO: 10875 - DNA, 20 bp, synthetic construct
  misc_feature 1..20: note = Description of Artificial Sequence: Synthetic oligonucleotide
  misc_feature 1..20: note = Target: SCN10A; (-) strand; PAM type: NNNNGHTT; PAM sequence: GCAAGATT
  source 1..20: mol_type = other DNA
agaaaattgattgaccattg

SEQ ID NO: 10876 - DNA, 20 bp, synthetic construct
  misc_feature 1..20: note = Description of Artificial Sequence: Synthetic oligonucleotide
  misc_feature 1..20: note = Target: SCN10A; (-) strand; PAM type: NNNNGHTT; PAM sequence: AATTGATT
  source 1..20: mol_type = other DNA
ttctttaaaaagatatagaa

SEQ ID NO: 10877 - DNA, 20 bp, synthetic construct
  misc_feature 1..20: note = Description of Artificial Sequence: Synthetic oligonucleotide
  misc_feature 1..20: note = Target: SCN10A; (-) strand; PAM type: NNNNGHTT; PAM sequence: GGAAGTTT
  source 1..20: mol_type = other DNA
gtcaacaatgaaatcaagat

SEQ ID NO: 10878 - DNA, 20 bp, synthetic construct
  misc_feature 1..20: note = Description of Artificial Sequence: Synthetic oligonucleotide
  misc_feature 1..20: note = Target: SCN10A; (-) strand; PAM type: NNNNGHTT; PAM sequence: TAAAGTTT
  source 1..20: mol_type = other DNA
cttcataagtgaagacaaga

SEQ ID NO: 10879 - DNA, 20 bp, synthetic construct
  misc_feature 1..20: note = Description of Artificial Sequence: Synthetic oligonucleotide
  misc_feature 1..20: note = Target: SCN10A; (-) strand; PAM type: NNNNGHTT; PAM sequence: CTAAGCTT
  source 1..20: mol_type = other DNA
gaatattgtatgaagagaaa

SEQ ID NO: 10880 - DNA, 20 bp, synthetic construct
  misc_feature 1..20: note = Description of Artificial Sequence: Synthetic oligonucleotide
  misc_feature 1..20: note = Target: SCN10A; (-) strand; PAM type: NNNNGHTT; PAM sequence: AAGGGATT
  source 1..20: mol_type = other DNA
actgaaaccttgcaagccag

SEQ ID NO: 10881 - DNA, 20 bp, synthetic construct
  misc_feature 1..20: note = Description of Artificial Sequence: Synthetic oligonucleotide
  misc_feature 1..20: note = Target: SCN10A; (-) strand; PAM type: NNNNGHTT; PAM sequence: AGCAGATT
  source 1..20: mol_type = other DNA
ctgatttacataagattaac

SEQ ID NO: 10882 - DNA, 20 bp, synthetic construct
  misc_feature 1..20: note = Description of Artificial Sequence: Synthetic oligonucleotide
  misc_feature 1..20: note = Target: SCN10A; (-) strand; PAM type: NNNNGHTT; PAM sequence: ATAAGATT
  source 1..20: mol_type = other DNA
ggaaaggttatctgatttac

SEQ ID NO: 10883 - DNA, 20 bp, synthetic construct
  misc_feature 1..20: note = Description of Artificial Sequence: Synthetic oligonucleotide
  misc_feature 1..20: note = Target: SCN10A; (-) strand; PAM type: NNNNGHTT; PAM sequence: ATCTGATT
  source 1..20: mol_type = other DNA
taacctataaaggaaaggtt

SEQ ID NO: 10884 - DNA, 20 bp, synthetic construct
  misc_feature 1..20: note = Description of Artificial Sequence: Synthetic oligonucleotide
  misc_feature 1..20: note = Target: SCN10A; (-) strand; PAM type: NNNNGHTT; PAM sequence: AAAAGTTT
  source 1..20: mol_type = other DNA
ccaaggaagaatagaaatct

SEQ ID NO: 10885 - DNA, 20 bp, synthetic construct
  misc_feature 1..20: note = Description of Artificial Sequence: Synthetic oligonucleotide
  misc_feature 1..20: note = Target: SCN10A; (-) strand; PAM type: NNNNGHTT; PAM sequence: CAAAGCTT
  source 1..20: mol_type = other DNA
agaacttcagagctcgaaga

SEQ ID NO: 10886 - DNA, 20 bp, synthetic construct
  misc_feature 1..20: note = Description of Artificial Sequence: Synthetic oligonucleotide
  misc_feature 1..20: note = Target: SCN10A; (-) strand; PAM type: NNNNGHTT; PAM sequence: GAAAGTTT
  source 1..20: mol_type = other DNA
gagaaatacaaaatgcagtg

SEQ ID NO: 10887 - DNA, 20 bp, synthetic construct
  misc_feature 1..20: note = Description of Artificial Sequence: Synthetic oligonucleotide
  misc_feature 1..20: note = Target: SCN10A; (-) strand; PAM type: NNNNGHTT; PAM sequence: AAGTGATT
  source 1..20: mol_type = other DNA
aattcagaaggctgattatt

SEQ ID NO: 10888 - DNA, 20 bp, synthetic construct
  misc_feature 1..20: note = Description of Artificial Sequence: Synthetic oligonucleotide
  misc_feature 1..20: note = Target: SCN10A; (-) strand; PAM type: NNNNGHTT; PAM sequence: GGCTGATT
  source 1..20: mol_type = other DNA
aaaaaaaaaagaattcagaa

SEQ ID NO: 10889 - DNA, 20 bp, synthetic construct
  misc_feature 1..20: note = Description of Artificial Sequence: Synthetic oligonucleotide
  misc_feature 1..20: note = Target: SCN10A; (-) strand; PAM type: NNNNGHTT; PAM sequence: AATTGCTT
  source 1..20: mol_type = other DNA
tcaggagactgaggcaggag

SEQ ID NO: 10890 - DNA, 20 bp, synthetic construct
  misc_feature 1..20: note = Description of Artificial Sequence: Synthetic oligonucleotide
  misc_feature 1..20: note = Target: SCN10A; (-) strand; PAM type: NNNNGHTT; PAM sequence: AGGGGATT
  source 1..20: mol_type = other DNA
tctcaggaagccccatcccc

SEQ ID NO: 10891 - DNA, 20 bp, synthetic construct
  misc_feature 1..20: note = Description of Artificial Sequence: Synthetic oligonucleotide
  misc_feature 1..20: note = Target: SCN10A; (-) strand; PAM type: NNNNGHTT; PAM sequence: GTGAGCTT
  source 1..20: mol_type = other DNA
tttaccctggccaacttagg

SEQ ID NO: 10892 - DNA, 20 bp, synthetic construct
  misc_feature 1..20: note = Description of Artificial Sequence: Synthetic oligonucleotide
  misc_feature 1..20: note = Target: SCN10A; (-) strand; PAM type: NNNNGHTT; PAM sequence: GGAAGCTT
  source 1..20: mol_type = other DNA
cacaaaacccagaaactctc

SEQ ID NO: 10893 - DNA, 20 bp, synthetic construct
  misc_feature 1..20: note = Description of Artificial Sequence: Synthetic oligonucleotide
  misc_feature 1..20: note = Target: SCN10A; (-) strand; PAM type: NNNNGHTT; PAM sequence: TCATGCTT
  source 1..20: mol_type = other DNA
tgagggatgcggtccaaaag

SEQ ID NO: 10894 - DNA, 20 bp, synthetic construct
  misc_feature 1..20: note = Description of Artificial Sequence: Synthetic oligonucleotide
  misc_feature 1..20: note = Target: SCN10A; (-) strand; PAM type: NNNNGHTT; PAM sequence: AGAAGTTT
  source 1..20: mol_type = other DNA
gggaggggtcacaggatgaa

SEQ ID NO: 10895 - DNA, 20 bp, synthetic construct
  misc_feature 1..20: note = Description of Artificial Sequence: Synthetic oligonucleotide
  misc_feature 1..20: note = Target: SCN10A; (-) strand; PAM type: NNNNGHTT; PAM sequence: TCCAGCTT
  source 1..20: mol_type = other DNA
ccttgtaggcactcccagtc

SEQ ID NO: 10896 - DNA, 20 bp, synthetic construct
  misc_feature 1..20: note = Description of Artificial Sequence: Synthetic oligonucleotide
  misc_feature 1..20: note = Target: SCN10A; (-) strand; PAM type: NNNNGHTT; PAM sequence: GAACGTTT
  source 1..20: mol_type = other DNA
agtgtggagactcacaccat

SEQ ID NO: 10897 - DNA, 20 bp, synthetic construct
  misc_feature 1..20: note = Description of Artificial Sequence: Synthetic oligonucleotide
  misc_feature 1..20: note = Target: SCN10A; (-) strand; PAM type: NNNNGHTT; PAM sequence: GCTGGATT
  source 1..20: mol_type = other DNA
ctgagagatccttggaactg

SEQ ID NO: 10898 - DNA, 20 bp, synthetic construct
  misc_feature 1..20: note = Description of Artificial Sequence: Synthetic oligonucleotide
  misc_feature 1..20: note = Target: SCN10A; (-) strand; PAM type: NNNNGHTT; PAM sequence: AGAGGATT
  source 1..20: mol_type = other DNA
ccttgataaagatactggca

SEQ ID NO: 10899 - DNA, 20 bp, synthetic construct
  misc_feature 1..20: note = Description of Artificial Sequence: Synthetic oligonucleotide
  misc_feature 1..20: note = Target: SCN10A; (-) strand; PAM type: NNNNGHTT; PAM sequence: GCATGTTT
  source 1..20: mol_type = other DNA
tcaccttggtgatattcttt

SEQ ID NO: 10900 - DNA, 20 bp, synthetic construct
  misc_feature 1..20: note = Description of Artificial Sequence: Synthetic oligonucleotide
  misc_feature 1..20: note = Target: SCN10A; (-) strand; PAM type: NNNNGHTT; PAM sequence: TCTTGTTT
  source 1..20: mol_type = other DNA
tctttttccctcagtctgtg

SEQ ID NO: 10901 - DNA, 20 bp, synthetic construct
  misc_feature 1..20: note = Description of Artificial Sequence: Synthetic oligonucleotide
  misc_feature 1..20: note = Target: SCN10A; (-) strand; PAM type: NNNNGHTT; PAM sequence: TCCAGCTT
  source 1..20: mol_type = other DNA
tgggagtttttagatgagcc

SEQ ID NO: 10902 - DNA, 20 bp, synthetic construct
  misc_feature 1..20: note = Description of Artificial Sequence: Synthetic oligonucleotide
  misc_feature 1..20: note = Target: SCN10A; (-) strand; PAM type: NNNNGHTT; PAM sequence: GGGAGTTT
  source 1..20: mol_type = other DNA
cactccagtttctaaaaact

SEQ ID NO: 10903 - DNA, 20 bp, synthetic construct
  misc_feature 1..20: note = Description of Artificial Sequence: Synthetic oligonucleotide
  misc_feature 1..20: note = Target: SCN10A; (-) strand; PAM type: NNNNGHTT; PAM sequence: TCCAGTTT
  source 1..20: mol_type = other DNA
taccactcatcagtctgcac

SEQ ID NO: 10904 - DNA, 20 bp, synthetic construct
  misc_feature 1..20: note = Description of Artificial Sequence: Synthetic oligonucleotide
  misc_feature 1..20: note = Target: SCN10A; (-) strand; PAM type: NNNNGHTT; PAM sequence: TTCAGCTT
  source 1..20: mol_type = other DNA
attccctgcttcagccagtt

SEQ ID NO: 10905 - DNA, 20 bp, synthetic construct
  misc_feature 1..20: note = Description of Artificial Sequence: Synthetic oligonucleotide
  misc_feature 1..20: note = Target: SCN10A; (-) strand; PAM type: NNNNGHTT; PAM sequence: GCCAGTTT
  source 1..20: mol_type = other DNA
tctgggtattccctgcttca

SEQ ID NO: 10906 - DNA, 20 bp, synthetic construct
  misc_feature 1..20: note = Description of Artificial Sequence: Synthetic oligonucleotide
  misc_feature 1..20: note = Target: SCN10A; (-) strand; PAM type: NNNNGHTT; PAM sequence: CCCTGCTT
  source 1..20: mol_type = other DNA
ttggcttgcttctgggtatt

SEQ ID NO: 10907 - DNA, 20 bp, synthetic construct
  misc_feature 1..20: note = Description of Artificial Sequence: Synthetic oligonucleotide
  misc_feature 1..20: note = Target: SCN10A; (-) strand; PAM type: NNNNGHTT; PAM sequence: GCTTGCTT
  source 1..20: mol_type = other DNA
gggctctgcagcatagcttg

SEQ ID NO: 10908 - DNA, 20 bp, synthetic construct
  misc_feature 1..20: note = Description of Artificial Sequence: Synthetic oligonucleotide
  misc_feature 1..20: note = Target: SCN10A; (-) strand; PAM type: NNNNGHTT; PAM sequence: CTTGGCTT
  source 1..20: mol_type = other DNA
tctggggctctgcagcatag

SEQ ID NO: 10909 - DNA, 20 bp, synthetic construct
  misc_feature 1..20: note = Description of Artificial Sequence: Synthetic oligonucleotide
  misc_feature 1..20: note = Target: SCN10A; (-) strand; PAM type: NNNNGHTT; PAM sequence: CATAGCTT
  source 1..20: mol_type = other DNA
gcagttctggggctctgcag

SEQ ID NO: 10910 - DNA, 20 bp, synthetic construct
  misc_feature 1..20: note = Description of Artificial Sequence: Synthetic oligonucleotide
  misc_feature 1..20: note = Target: SCN10A; (-) strand; PAM type: NNNNGHTT; PAM sequence: CCTTGCTT
  source 1..20: mol_type = other DNA
acttatcaccctcccccaaa

SEQ ID NO: 10911 - DNA, 20 bp, synthetic construct
  misc_feature 1..20: note = Description of Artificial Sequence: Synthetic oligonucleotide
  misc_feature 1..20: note = Target: SCN10A; (-) strand; PAM type: NNNNGHTT; PAM sequence: AACAGTTT
  source 1..20: mol_type = other DNA
caatccatttctggagcaga

SEQ ID NO: 10912 - DNA, 20 bp, synthetic construct
  misc_feature 1..20: note = Description of Artificial Sequence: Synthetic oligonucleotide
  misc_feature 1..20: note = Target: SCN10A; (-) strand; PAM type: NNNNGHTT; PAM sequence: AACTGTTT
  source 1..20: mol_type = other DNA
atatgcatttttcagtatgc

SEQ ID NO: 10913 - DNA, 20 bp, synthetic construct
  misc_feature 1..20: note = Description of Artificial Sequence: Synthetic oligonucleotide
  misc_feature 1..20: note = Target: SCN10A; (-) strand; PAM type: NNNNGHTT; PAM sequence: AGTTGTTT
  source 1..20: mol_type = other DNA
cagaagtgaatagggagggg

SEQ ID NO: 10914 - DNA, 20 bp, synthetic construct
  misc_feature 1..20: note = Description of Artificial Sequence: Synthetic oligonucleotide
  misc_feature 1..20: note = Target: SCN10A; (-) strand; PAM type: NNNNGHTT; PAM sequence: ACCAGATT
  source 1..20: mol_type = other DNA
agcatcttcatgggctctaa

SEQ ID NO: 10915 - DNA, 20 bp, synthetic construct
  misc_feature 1..20: note = Description of Artificial Sequence: Synthetic oligonucleotide
  misc_feature 1..20: note = Target: SCN10A; (-) strand; PAM type: NNNNGHTT; PAM sequence: TTTGGTTT
  source 1..20: mol_type = other DNA
tttttcagttgtttggttgc

SEQ ID NO: 10916 - DNA, 20 bp, synthetic construct
  misc_feature 1..20: note = Description of Artificial Sequence: Synthetic oligonucleotide
  misc_feature 1..20: note = Target: SCN10A; (-) strand; PAM type: NNNNGHTT; PAM sequence: GGTTGCTT
  source 1..20: mol_type = other DNA
tttttttttttcagttgttt

SEQ ID NO: 10917 - DNA, 20 bp, synthetic construct
  misc_feature 1..20: note = Description of Artificial Sequence: Synthetic oligonucleotide
  misc_feature 1..20: note = Target: SCN10A; (-) strand; PAM type: NNNNGHTT; PAM sequence: AGTTGTTT
  source 1..20: mol_type = other DNA
ttcttttttttttttttttc

SEQ ID NO: 10918 - DNA, 20 bp, synthetic construct
  misc_feature 1..20: note = Description of Artificial Sequence: Synthetic oligonucleotide
  misc_feature 1..20: note = Target: SCN10A; (-) strand; PAM type: NNNNGHTT; PAM sequence: TACAGTTT
  source 1..20: mol_type = other DNA
gagccacagcgcctggccaa

SEQ ID NO: 10919 - DNA, 20 bp, synthetic construct
  misc_feature 1..20: note = Description of Artificial Sequence: Synthetic oligonucleotide
  misc_feature 1..20: note = Target: SCN10A; (-) strand; PAM type: NNNNGHTT; PAM sequence: CTGCGATT
  source 1..20: mol_type = other DNA
cgcctcggcctcccaaagtg

SEQ ID NO: 10920 - DNA, 20 bp, synthetic construct
  misc_feature 1..20: note = Description of Artificial Sequence: Synthetic oligonucleotide
  misc_feature 1..20: note = Target: SCN10A; (-) strand; PAM type: NNNNGHTT; PAM sequence: CGGGGTTT
  source 1..20: mol_type = other DNA
ttttgtatttttagtagaga

SEQ ID NO: 10921 - DNA, 20 bp, synthetic construct
  misc_feature 1..20: note = Description of Artificial Sequence: Synthetic oligonucleotide
  misc_feature 1..20: note = Target: SCN10A; (-) strand; PAM type: NNNNGHTT; PAM sequence: TGTTGTTT
  source 1..20: mol_type = other DNA
gttgttgttgctgttgttgt

SEQ ID NO: 10922 - DNA, 20 bp, synthetic construct
  misc_feature 1..20: note = Description of Artificial Sequence: Synthetic oligonucleotide
  misc_feature 1..20: note = Target: SCN10A; (-) strand; PAM type: NNNNGHTT; PAM sequence: TTTTGTTT
  source 1..20: mol_type = other DNA
acaggtttttttttttttgt

SEQ ID NO: 10923 - DNA, 20 bp, synthetic construct
  misc_feature 1..20: note = Description of Artificial Sequence: Synthetic oligonucleotide
  misc_feature 1..20: note = Target: SCN10A; (-) strand; PAM type: NNNNGHTT; PAM sequence: TTTTGTTT
  source 1..20: mol_type = other DNA
attagtacaggttttttttt

SEQ ID NO: 10924 - DNA, 20 bp, synthetic construct
  misc_feature 1..20: note = Description of Artificial Sequence: Synthetic oligonucleotide
  misc_feature 1..20: note = Target: SCN10A; (-) strand; PAM type: NNNNGHTT; PAM sequence: ACAGGTTT
  source 1..20: mol_type = other DNA
aactctctaaaaatattagt

SEQ ID NO: 10925 - DNA, 20 bp, synthetic construct
  misc_feature 1..20: note = Description of Artificial Sequence: Synthetic oligonucleotide
  misc_feature 1..20: note = Target: SCN10A; (-) strand; PAM type: NNNNGHTT; PAM sequence: TTTTGTTT
  source 1..20: mol_type = other DNA
ttttacttttgctatcatat

SEQ ID NO: 10926 - DNA, 20 bp, synthetic construct
  misc_feature 1..20: note = Description of Artificial Sequence: Synthetic oligonucleotide
  misc_feature 1..20: note = Target: SCN10A; (-) strand; PAM type: NNNNGHTT; PAM sequence: TAGTGTTT
  source 1..20: mol_type = other DNA
ttatttacaagtccgcctat

SEQ ID NO: 10927 - DNA, 20 bp, synthetic construct
  misc_feature 1..20: note = Description of Artificial Sequence: Synthetic oligonucleotide
  misc_feature 1..20: note = Target: SCN10A; (-) strand; PAM type: NNNNGHTT; PAM sequence: GTGAGATT
  source 1..20: mol_type = other DNA
gcttttttgttccacttcct

SEQ ID NO: 10928 - DNA, 20 bp, synthetic construct
  misc_feature 1..20: note = Description of Artificial Sequence: Synthetic oligonucleotide
  misc_feature 1..20: note = Target: SCN10A; (-) strand; PAM type: NNNNGHTT; PAM sequence: TTCTGCTT
  source 1..20: mol_type = other DNA
ttttatcacttcctatccat

SEQ ID NO: 10929 - DNA, 20 bp, synthetic construct
  misc_feature 1..20: note = Description of Artificial Sequence: Synthetic oligonucleotide
  misc_feature 1..20: note = Target: SCN10A; (-) strand; PAM type: NNNNGHTT; PAM sequence: GTCTGATT
  source 1..20: mol_type = other DNA
gtcaaacaatatacctccta

SEQ ID NO: 10930 - DNA, 20 bp, synthetic construct
  misc_feature 1..20: note = Description of Artificial Sequence: Synthetic oligonucleotide
  misc_feature 1..20: note = Target: SCN10A; (-) strand; PAM type: NNNNGHTT; PAM sequence: GACAGTTT
  source 1..20: mol_type = other DNA
tcatatattctaccttcttt

SEQ ID NO: 10931 - DNA, 20 bp, synthetic construct
  misc_feature 1..20: note = Description of Artificial Sequence: Synthetic oligonucleotide
  misc_feature 1..20: note = Target: SCN10A; (-) strand; PAM type: NNNNGHTT; PAM sequence: CCCAGCTT
  source 1..20: mol_type = other DNA
tacaggtacataccaccatg

SEQ ID NO: 10932 - DNA, 20 bp, synthetic construct
  misc_feature 1..20: note = Description of Artificial Sequence: Synthetic oligonucleotide
  misc_feature 1..20: note = Target: SCN10A; (-) strand; PAM type: NNNNGHTT; PAM sequence: TCTTGTTT
  source 1..20: mol_type = other DNA
ccctggatcgcatatatgtt

SEQ ID NO: 10933 - DNA, 20 bp, synthetic construct
  misc_feature 1..20: note = Description of Artificial Sequence: Synthetic oligonucleotide
  misc_feature 1..20: note = Target: SCN10A; (-) strand; PAM type: NNNNGHTT; PAM sequence: ATATGTTT
  source 1..20: mol_type = other DNA
gcctcttccctggatcgcat

SEQ ID NO: 10934 - DNA, 20 bp, synthetic construct
  misc_feature 1..20: note = Description of Artificial Sequence: Synthetic oligonucleotide
  misc_feature 1..20: note = Target: SCN10A; (-) strand; PAM type: NNNNGHTT; PAM sequence: TTTGGATT
  source 1..20: mol_type = other DNA
tttttcttcttcattctttt

SEQ ID NO: 10935 - DNA, 20 bp, synthetic construct
  misc_feature 1..20: note = Description of Artificial Sequence: Synthetic oligonucleotide
  misc_feature 1..20: note = Target: SCN10A; (-) strand; PAM type: NNNNGHTT; PAM sequence: TAGAGATT
  source 1..20: mol_type = other DNA
cctgatgcacagctgttttc

SEQ ID NO: 10936 - DNA, 20 bp, synthetic construct
  misc_feature 1..20: note = Description of Artificial Sequence: Synthetic oligonucleotide
  misc_feature 1..20: note = Target: SCN10A; (-) strand; PAM type: NNNNGHTT; PAM sequence: AGCTGTTT
  source 1..20: mol_type = other DNA
gttttctaggcctgatgcac

SEQ ID NO: 10937 - DNA, 20 bp, synthetic construct
  misc_feature 1..20: note = Description of Artificial Sequence: Synthetic oligonucleotide
  misc_feature 1..20: note = Target: SCN10A; (-) strand; PAM type: NNNNGHTT; PAM sequence: AGATGTTT
  source 1..20: mol_type = other DNA
cttctgcctcattctgacct

SEQ ID NO: 10938 - DNA, 20 bp, synthetic construct
  misc_feature 1..20: note = Description of Artificial Sequence: Synthetic oligonucleotide
  misc_feature 1..20: note = Target: SCN10A; (-) strand; PAM type: NNNNGHTT; PAM sequence: TGTTGCTT
  source 1..20: mol_type = other DNA
ctcttctccagatgtttaat

SEQ ID NO: 10939 - DNA, 20 bp, synthetic construct
  misc_feature 1..20: note = Description of Artificial Sequence: Synthetic oligonucleotide
  misc_feature 1..20: note = Target: SCN10A; (-) strand; PAM type: NNNNGHTT; PAM sequence: AGATGTTT
  source 1..20: mol_type = other DNA
ttgttcccaaactcttctcc

SEQ ID NO: 10940 - DNA, 20 bp, synthetic construct
  misc_feature 1..20: note = Description of Artificial Sequence: Synthetic oligonucleotide
  misc_feature 1..20: note = Target: SCN10A; (-) strand; PAM type: NNNNGHTT; PAM sequence: CTCAGTTT
  source 1..20: mol_type = other DNA
ggattttatttttttgtttg

SEQ ID NO: 10941 - DNA, 20 bp, synthetic construct
  misc_feature 1..20: note = Description of Artificial Sequence: Synthetic oligonucleotide
  misc_feature 1..20: note = Target: SCN10A; (-) strand; PAM type: NNNNGHTT; PAM sequence: TTTTGTTT
  source 1..20: mol_type = other DNA
agttaataaggattttattt

SEQ ID NO: 10942 - DNA, 20 bp, synthetic construct
  misc_feature 1..20: note = Description of Artificial Sequence: Synthetic oligonucleotide
  misc_feature 1..20: note = Target: SCN10A; (-) strand; PAM type: NNNNGHTT; PAM sequence: TAAGGATT
  source 1..20: mol_type = other DNA
tttgctttccttggagttaa

SEQ ID NO: 10943 - DNA, 20 bp, synthetic construct
  misc_feature 1..20: note = Description of Artificial Sequence: Synthetic oligonucleotide
  misc_feature 1..20: note = Target: SCN10A; (-) strand; PAM type: NNNNGHTT; PAM sequence: TTTTGCTT
  source 1..20: mol_type = other DNA
atttcctttttgcacaatgt

SEQ ID NO: 10944 - DNA, 20 bp, synthetic construct
  misc_feature 1..20: note = Description of Artificial Sequence: Synthetic oligonucleotide
  misc_feature 1..20: note = Target: SCN10A; (-) strand; PAM type: NNNNGHTT; PAM sequence: CAATGTTT
  source 1..20: mol_type = other DNA
gactatatttcctttttgca

SEQ ID NO: 10945 - DNA, 20 bp, synthetic construct
  misc_feature 1..20: note = Description of Artificial Sequence: Synthetic oligonucleotide
  misc_feature 1..20: note = Target: SCN10A; (-) strand; PAM type: NNNNGHTT; PAM sequence: CACTGTTT
  source 1..20: mol_type = other DNA
acattacattgctaagtaaa

SEQ ID NO: 10946 - DNA, 20 bp, synthetic construct
  misc_feature 1..20: note = Description of Artificial Sequence: Synthetic oligonucleotide
  misc_feature 1..20: note = Target: SCN10A; (-) strand; PAM type: NNNNGHTT; PAM sequence: ATTGGCTT
  source 1..20: mol_type = other DNA
ttcaatttctgatgttattt

SEQ ID NO: 10947 - DNA, 20 bp, synthetic construct
  misc_feature 1..20: note = Description of Artificial Sequence: Synthetic oligonucleotide
  misc_feature 1..20: note = Target: SCN10A; (-) strand; PAM type: NNNNGHTT; PAM sequence: TTTAGCTT
  source 1..20: mol_type = other DNA
tctttccagaggccaccact

SEQ ID NO: 10948 - DNA, 20 bp, synthetic construct
  misc_feature 1..20: note = Description of Artificial Sequence: Synthetic oligonucleotide
  misc_feature 1..20: note = Target: SCN10A; (-) strand; PAM type: NNNNGHTT; PAM sequence: TAAAGATT
  source 1..20: mol_type = other DNA
taaaaggtcacagagtttta

SEQ ID NO: 10949 - DNA, 20 bp, synthetic construct
  misc_feature 1..20: note = Description of Artificial Sequence: Synthetic oligonucleotide
  misc_feature 1..20: note = Target: SCN10A; (-) strand; PAM type: NNNNGHTT; PAM sequence: CAGAGTTT
  source 1..20: mol_type = other DNA
gttcataatttaaaaggtca

SEQ ID NO: 10950 - DNA, 20 bp, synthetic construct
  misc_feature 1..20: note = Description of Artificial Sequence: Synthetic oligonucleotide
  misc_feature 1..20: note = Target: SCN10A; (-) strand; PAM type: NNNNGHTT; PAM sequence: ACACGATT
  source 1..20: mol_type = other DNA
agattcctaaatgatttcaa

SEQ ID NO: 10951 - DNA, 20 bp, synthetic construct
  misc_feature 1..20: note = Description of Artificial Sequence: Synthetic oligonucleotide
  misc_feature 1..20: note = Target: SCN10A; (-) strand; PAM type: NNNNGHTT; PAM sequence: AAATGATT
  source 1..20: mol_type = other DNA
gcaaccagatatagattcct

SEQ ID NO: 10952 - DNA, 20 bp, synthetic construct
  misc_feature 1..20: note = Description of Artificial Sequence: Synthetic oligonucleotide
  misc_feature 1..20: note = Target: SCN10A; (-) strand; PAM type: NNNNGHTT; PAM sequence: TATAGATT
  source 1..20: mol_type = other DNA
caagcagctatgcaaccaga

SEQ ID NO: 10953 - DNA, 20 bp, synthetic construct
  misc_feature 1..20: note = Description of Artificial Sequence: Synthetic oligonucleotide
  misc_feature 1..20: note = Target: SCN10A; (-) strand; PAM type: NNNNGHTT; PAM sequence: TTAAGATT
  source 1..20: mol_type = other DNA
caacaacctataattctgag

SEQ ID NO: 10954 - DNA, 20 bp, synthetic construct
  misc_feature 1..20: note = Description of Artificial Sequence: Synthetic oligonucleotide
  misc_feature 1..20: note = Target: SCN10A; (-) strand; PAM type: NNNNGHTT; PAM sequence: CAAAGCTT
  source 1..20: mol_type = other DNA
gacaaaccagaaatatccat

SEQ ID NO: 10955 - DNA, 20 bp, synthetic construct
  misc_feature 1..20: note = Description of Artificial Sequence: Synthetic oligonucleotide
  misc_feature 1..20: note = Target: SCN10A; (-) strand; PAM type: NNNNGHTT; PAM sequence: GTTTGATT
  source 1..20: mol_type = other DNA
tccataatttctgggtctgt

SEQ ID NO: 10956 - DNA, 20 bp, synthetic construct
  misc_feature 1..20: note = Description of Artificial Sequence: Synthetic oligonucleotide
  misc_feature 1..20: note = Target: SCN10A; (-) strand; PAM type: NNNNGHTT; PAM sequence: CTGTGTTT
  source 1..20: mol_type = other DNA
tctctccataatttctgggt

SEQ ID NO: 10957 - DNA, 20 bp, synthetic construct
  misc_feature 1..20: note = Description of Artificial Sequence: Synthetic oligonucleotide
  misc_feature 1..20: note = Target: SCN10A; (-) strand; PAM type: NNNNGHTT; PAM sequence: TTGGGCTT
  source 1..20: mol_type = other DNA
agcacttaggaaataacaca

SEQ ID NO: 10958 - DNA, 20 bp, synthetic construct
  misc_feature 1..20: note = Description of Artificial Sequence: Synthetic oligonucleotide
  misc_feature 1..20: note = Target: SCN10A; (-) strand; PAM type: NNNNGHTT; PAM sequence: CAATGATT
  source 1..20: mol_type = other DNA
cttgactttttcccaatacc

SEQ ID NO: 10959 - DNA, 20 bp, synthetic construct
  misc_feature 1..20: note = Description of Artificial Sequence: Synthetic oligonucleotide
  misc_feature 1..20: note = Target: SCN10A; (-) strand; PAM type: NNNNGHTT; PAM sequence: TCGGGATT
  source 1..20: mol_type = other DNA
ttgttttcagagcctgaata

SEQ ID NO: 10960 - DNA, 20 bp, synthetic construct
  misc_feature 1..20: note = Description of Artificial Sequence: Synthetic oligonucleotide
  misc_feature 1..20: note = Target: SCN10A; (-) strand; PAM type: NNNNGHTT; PAM sequence: CTTTGTTT
  source 1..20: mol_type = other DNA
agaatttgaatattatgaat

SEQ ID NO: 10961 - DNA, 20 bp, synthetic construct
  misc_feature 1..20: note = Description of Artificial Sequence: Synthetic oligonucleotide
  misc_feature 1..20: note = Target: SCN10A; (-) strand; PAM type: NNNNGHTT; PAM sequence: AAATGTTT
  source 1..20: mol_type = other DNA
agttttaaaaataaggaatg

SEQ ID NO: 10962 - DNA, 20 bp, synthetic construct
  misc_feature 1..20: note = Description of Artificial Sequence: Synthetic oligonucleotide
  misc_feature 1..20: note = Target: SCN10A; (-) strand; PAM type: NNNNGHTT; PAM sequence: CAGAGTTT
  source 1..20: mol_type = other DNA
gcaaatgggaagggcttaca

SEQ ID NO: 10963 - DNA, 20 bp, synthetic construct
  misc_feature 1..20: note = Description of Artificial Sequence: Synthetic oligonucleotide
  misc_feature 1..20: note = Target: SCN10A; (-) strand; PAM type: NNNNGHTT; PAM sequence: AAGGGCTT
  source 1..20: mol_type = other DNA
tgctttggctggcaaatggg

SEQ ID NO: 10964 - DNA, 20 bp, synthetic construct
  misc_feature 1..20: note = Description of Artificial Sequence: Synthetic oligonucleotide
  misc_feature 1..20: note = Target: SCN10A; (-) strand; PAM type: NNNNGHTT; PAM sequence: AATTGCTT
  source 1..20: mol_type = other DNA
gaggctgctctcccacactg

SEQ ID NO: 10965 - DNA, 20 bp, synthetic construct
  misc_feature 1..20: note = Description of Artificial Sequence: Synthetic oligonucleotide
  misc_feature 1..20: note = Target: SCN10A; (-) strand; PAM type: NNNNGHTT; PAM sequence: AACTGATT
  source 1..20: mol_type = other DNA
cagtggaaattgtgaataca

SEQ ID NO: 10966 - DNA, 20 bp, synthetic construct
  misc_feature 1..20: note = Description of Artificial Sequence: Synthetic oligonucleotide
  misc_feature 1..20: note = Target: SCN10A; (-) strand; PAM type: NNNNGHTT; PAM sequence: TTCTGATT
  source 1..20: mol_type = other DNA
gtctgtaatatgcctccaga

SEQ ID NO: 10967 - DNA, 20 bp, synthetic construct
  misc_feature 1..20: note = Description of Artificial Sequence: Synthetic oligonucleotide
  misc_feature 1..20: note = Target: SCN10A; (-) strand; PAM type: NNNNGHTT; PAM sequence: TCCAGATT
  source 1..20: mol_type = other DNA
ctgggggtctgtaatatgcc

SEQ ID NO: 10968 - DNA, 20 bp, synthetic construct
  misc_feature 1..20: note = Description of Artificial Sequence: Synthetic oligonucleotide
  misc_feature 1..20: note = Target: SCN10A; (-) strand; PAM type: NNNNGHTT; PAM sequence: AAAAGTTT
  source 1..20: mol_type = other DNA
atttctgttcgggattataa

SEQ ID NO: 10969 - DNA, 20 bp, synthetic construct
  misc_feature 1..20: note = Description of Artificial Sequence: Synthetic oligonucleotide
  misc_feature 1..20: note = Target: SCN10A; (-) strand; PAM type: NNNNGHTT; PAM sequence: TCGGGATT
  source 1..20: mol_type = other DNA
tttaatgggtacatttctgt

SEQ ID NO: 10970 - DNA, 20 bp, synthetic construct
  misc_feature 1..20: note = Description of Artificial Sequence: Synthetic oligonucleotide
  misc_feature 1..20: note = Target: SCN10A; (-) strand; PAM type: NNNNGHTT; PAM sequence: GCATGATT
  source 1..20: mol_type = other DNA
aacgcaaaagaacaaatgtt

SEQ ID NO: 10971 - DNA, 20 bp, synthetic construct
  misc_feature 1..20: note = Description of Artificial Sequence: Synthetic oligonucleotide
  misc_feature 1..20: note = Target: SCN10A; (-) strand; PAM type: NNNNGHTT; PAM sequence: ATGAGATT
  source 1..20: mol_type = other DNA
tcattcagttttaaaaatga

SEQ ID NO: 10972 - DNA, 20 bp, synthetic construct
  misc_feature 1..20: note = Description of Artificial Sequence: Synthetic oligonucleotide
  misc_feature 1..20: note = Target: SCN10A; (-) strand; PAM type: NNNNGHTT; PAM sequence: TTCAGTTT
  source 1..20: mol_type = other DNA
atgtaaacaattgaatatca

SEQ ID NO: 10973 - DNA, 20 bp, synthetic construct
  misc_feature 1..20: note = Description of Artificial Sequence: Synthetic oligonucleotide
  misc_feature 1..20: note = Target: SCN10A; (-) strand; PAM type: NNNNGHTT; PAM sequence: TAATGTTT
  source 1..20: mol_type = other DNA
aggtatgttggcttatgcac

SEQ ID NO: 10974 - DNA, 20 bp, synthetic construct
  misc_feature 1..20: note = Description of Artificial Sequence: Synthetic oligonucleotide
  misc_feature 1..20: note = Target: SCN10A; (-) strand; PAM type: NNNNGHTT; PAM sequence: GTTGGCTT
  source 1..20: mol_type = other DNA
aaacagactttaaaaggtat

SEQ ID NO: 10975 - DNA, 20 bp, synthetic construct
  misc_feature 1..20: note = Description of Artificial Sequence: Synthetic oligonucleotide
  misc_feature 1..20: note = Target: SCN10A; (-) strand; PAM type: NNNNGHTT; PAM sequence: ATTAGTTT
  source 1..20: mol_type = other DNA
gctctctggtttaattaaaa

SEQ ID NO: 10976 - DNA, 20 bp, synthetic construct
  misc_feature 1..20: note = Description of Artificial Sequence: Synthetic oligonucleotide
  misc_feature 1..20: note = Target: SCN10A; (-) strand; PAM type: NNNNGHTT; PAM sequence: TCTGGTTT
  source 1..20: mol_type = other DNA
taattttaaaagaagagctc

SEQ ID NO: 10977 - DNA, 20 bp, synthetic construct
  misc_feature 1..20: note = Description of Artificial Sequence: Synthetic oligonucleotide
  misc_feature 1..20: note = Target: SCN10A; (-) strand; PAM type: NNNNGHTT; PAM sequence: ACCAGTTT
  source 1..20: mol_type = other DNA
tcctgctggtaagatacaaa

SEQ ID NO: 10978 - DNA, 20 bp, synthetic construct
  misc_feature 1..20: note = Description of Artificial Sequence: Synthetic oligonucleotide
  misc_feature 1..20: note = Target: SCN10A; (-) strand; PAM type: NNNNGHTT; PAM sequence: TAAGGCTT
  source 1..20: mol_type = other DNA
tctctactacaagcacaaaa

SEQ ID NO: 10979 - DNA, 20 bp, synthetic construct
  misc_feature 1..20: note = Description of Artificial Sequence: Synthetic oligonucleotide
  misc_feature 1..20: note = Target: SCN10A; (-) strand; PAM type: NNNNGHTT; PAM sequence: TAAAGTTT
  source 1..20: mol_type = other DNA
acttccatattattttccaa

SEQ ID NO: 10980 - DNA, 20 bp, synthetic construct
  misc_feature 1..20: note = Description of Artificial Sequence: Synthetic oligonucleotide
  misc_feature 1..20: note = Target: SCN10A; (-) strand; PAM type: NNNNGHTT; PAM sequence: TAACGTTT
  source 1..20: mol_type = other DNA
gtacccaatttattatctgc

SEQ ID NO: 10981 - DNA, 20 bp, synthetic construct
  misc_feature 1..20: note = Description of Artificial Sequence: Synthetic oligonucleotide
  misc_feature 1..20: note = Target: SCN10A; (-) strand; PAM type: NNNNGHTT; PAM sequence: ATCTGTTT
  source 1..20: mol_type = other DNA
tgtaaaaatacaaagcatga

SEQ ID NO: 10982 - DNA, 20 bp, synthetic construct
  misc_feature 1..20: note = Description of Artificial Sequence: Synthetic oligonucleotide
  misc_feature 1..20: note = Target: SCN10A; (-) strand; PAM type: NNNNGHTT; PAM sequence: AGTGGTTT
  source 1..20: mol_type = other DNA
aaaagagtcatcacttcgaa

SEQ ID NO: 10983 - DNA, 20 bp, synthetic construct
  misc_feature 1..20: note = Description of Artificial Sequence: Synthetic oligonucleotide
  misc_feature 1..20: note = Target: SCN10A; (-) strand; PAM type: NNNNGHTT; PAM sequence: TGTCGCTT
  source 1..20: mol_type = other DNA
cttgcatttgccattattac

SEQ ID NO: 10984 - DNA, 20 bp, synthetic construct
  misc_feature 1..20: note = Description of Artificial Sequence: Synthetic oligonucleotide
  misc_feature 1..20: note = Target: SCN10A; (-) strand; PAM type: NNNNGHTT; PAM sequence: GGCAGTTT
  source 1..20: mol_type = other DNA
ttaacatggagttaatcata

SEQ ID NO: 10985 - DNA, 20 bp, synthetic construct
  misc_feature 1..20: note = Description of Artificial Sequence: Synthetic oligonucleotide
  misc_feature 1..20: note = Target: SCN10A; (-) strand; PAM type: NNNNGHTT; PAM sequence: AACTGATT
  source 1..20: mol_type = other DNA
aacagtgtatgtgcttcaaa

SEQ ID NO: 10986 - DNA, 20 bp, synthetic construct
  misc_feature 1..20: note = Description of Artificial Sequence: Synthetic oligonucleotide
  misc_feature 1..20: note = Target: SCN10A; (-) strand; PAM type: NNNNGHTT; PAM sequence: ATGTGCTT
  source 1..20: mol_type = other DNA
tatgttttcaaaaacagtgt

SEQ ID NO: 10987 - DNA, 20 bp, synthetic construct
  misc_feature 1..20: note = Description of Artificial Sequence: Synthetic oligonucleotide
  misc_feature 1..20: note = Target: SCN10A; (-) strand; PAM type: NNNNGHTT; PAM sequence: TTATGTTT
  source 1..20: mol_type = other DNA
ttcatagaatttctaacttt

SEQ ID NO: 10988 - DNA, 20 bp, synthetic construct
  misc_feature 1..20: note = Description of Artificial Sequence: Synthetic oligonucleotide
  misc_feature 1..20: note = Target: SCN10A; (-) strand; PAM type: NNNNGHTT; PAM sequence: GTAAGATT
  source 1..20: mol_type = other DNA
ataattttaaaatctaacat

SEQ ID NO: 10989 - DNA, 20 bp, synthetic construct
  misc_feature 1..20: note = Description of Artificial Sequence: Synthetic oligonucleotide
  misc_feature 1..20: note = Target: SCN10A; (-) strand; PAM type: NNNNGHTT; PAM sequence: CAATGTTT
  source 1..20: mol_type = other DNA
tcatctctctccatctccta

SEQ ID NO: 10990 - DNA, 20 bp, synthetic construct
  misc_feature 1..20: note = Description of Artificial Sequence: Synthetic oligonucleotide
  misc_feature 1..20: note = Target: SCN10A; (-) strand; PAM type: NNNNGHTT; PAM sequence: CTTTGTTT
  source 1..20: mol_type = other DNA
ggaactccaacttattctta

SEQ ID NO: 10991 - DNA, 20 bp, synthetic construct
  misc_feature 1..20: note = Description of Artificial Sequence: Synthetic oligonucleotide
  misc_feature 1..20: note = Target: SCN10A; (-) strand; PAM type: NNNNGHTT; PAM sequence: GCTGGATT
  source 1..20: mol_type = other DNA
tggttccagctgatcatttt

SEQ ID NO: 10992 - DNA, 20 bp, synthetic construct
  misc_feature 1..20: note = Description of Artificial Sequence: Synthetic oligonucleotide
  misc_feature 1..20: note = Target: SCN10A; (-) strand; PAM type: NNNNGHTT; PAM sequence: ACAGGTTT
  source 1..20: mol_type = other DNA
tatagtaaatctgtaaacta

SEQ ID NO: 10993 - DNA, 20 bp, synthetic construct
  misc_feature 1..20: note = Description of Artificial Sequence: Synthetic oligonucleotide
  misc_feature 1..20: note = Target: SCN10A; (-) strand; PAM type: NNNNGHTT; PAM sequence: GTTGGCTT
  source 1..20: mol_type = other DNA
gactttcatcatgaatgggt

SEQ ID NO: 10994 - DNA, 20 bp, synthetic construct
  misc_feature 1..20: note = Description of Artificial Sequence: Synthetic oligonucleotide
  misc_feature 1..20: note = Target: SCN10A; (-) strand; PAM type: NNNNGHTT; PAM sequence: TCTTGTTT
  source 1..20: mol_type = other DNA
ttatatcaattttttccatt

SEQ ID NO: 10995 - DNA, 20 bp, synthetic construct
  misc_feature 1..20: note = Description of Artificial Sequence: Synthetic oligonucleotide
  misc_feature 1..20: note = Target: SCN10A; (-) strand; PAM type: NNNNGHTT; PAM sequence: TGATGTTT
  source 1..20: mol_type = other DNA
cttctaatgtttcactatta

SEQ ID NO: 10996 - DNA, 20 bp, synthetic construct
  misc_feature 1..20: note = Description of Artificial Sequence: Synthetic oligonucleotide
  misc_feature 1..20: note = Target: SCN10A; (-) strand; PAM type: NNNNGHTT; PAM sequence: TAATGTTT
  source 1..20: mol_type = other DNA
gattttaaagtgtgtgcttc

SEQ ID NO: 10997 - DNA, 20 bp, synthetic construct
  misc_feature 1..20: note = Description of Artificial Sequence: Synthetic oligonucleotide
  misc_feature 1..20: note = Target: SCN10A; (-) strand; PAM type: NNNNGHTT; PAM sequence: GTGTGCTT
  source 1..20: mol_type = other DNA
tttgctcttgattttaaagt

SEQ ID NO: 10998 - DNA, 20 bp, synthetic construct
  misc_feature 1..20: note = Description of Artificial Sequence: Synthetic oligonucleotide
  misc_feature 1..20: note = Target: SCN10A; (-) strand; PAM type: NNNNGHTT; PAM sequence: TCTTGATT
  source 1..20: mol_type = other DNA
agtgagcatatttattttgc

SEQ ID NO: 10999 - DNA, 20 bp, synthetic construct
  misc_feature 1..20: note = Description of Artificial Sequence: Synthetic oligonucleotide
  misc_feature 1..20: note = Target: SCN10A; (-) strand; PAM type: NNNNGHTT; PAM sequence: TTATGATT
  source 1..20: mol_type = other DNA
tgacaaacttgtttcttcct

SEQ ID NO: 11000 - DNA, 20 bp, synthetic construct
  misc_feature 1..20: note = Description of Artificial Sequence: Synthetic oligonucleotide
  misc_feature 1..20: note = Target: SCN10A; (-) strand; PAM type: NNNNGHTT; PAM sequence: ACTTGTTT
  source 1..20: mol_type = other DNA
ttatctgcaaataatgacaa

SEQ ID NO: 11001 - DNA, 20 bp, synthetic construct
  misc_feature 1..20: note = Description of Artificial Sequence: Synthetic oligonucleotide
  misc_feature 1..20: note = Target: SCN10A; (-) strand; PAM type: NNNNGHTT; PAM sequence: TGTAGATT
  source 1..20: mol_type = other DNA
tccttaaagttaaatttttc

SEQ ID NO: 11002 - DNA, 20 bp, synthetic construct
  misc_feature 1..20: note = Description of Artificial Sequence: Synthetic oligonucleotide
  misc_feature 1..20: note = Target: SCN10A; (-) strand; PAM type: NNNNGHTT; PAM sequence: TAGTGATT
  source 1..20: mol_type = other DNA
taatattattaatttctata

SEQ ID NO: 11003 - DNA, 20 bp, synthetic construct
  misc_feature 1..20: note = Description of Artificial Sequence: Synthetic oligonucleotide
  misc_feature 1..20: note = Target: SCN10A; (-) strand; PAM type: NNNNGHTT; PAM sequence: AATTGATT
  source 1..20: mol_type = other DNA
ctttgtttggtaatgcactg

SEQ ID NO: 11004 - DNA, 20 bp, synthetic construct
  misc_feature 1..20: note = Description of Artificial Sequence: Synthetic oligonucleotide
  misc_feature 1..20: note = Target: SCN10A; (-) strand; PAM type: NNNNGHTT; PAM sequence: CTTTGTTT
  source 1..20: mol_type = other DNA
ttcttacaactctgtggaaa

SEQ ID NO: 11005 - DNA, 20 bp, synthetic construct
  misc_feature 1..20: note = Description of Artificial Sequence: Synthetic oligonucleotide
  misc_feature 1..20: note = Target: SCN10A; (-) strand; PAM type: NNNNGHTT; PAM sequence: ATCAGTTT
  source 1..20: mol_type = other DNA
ttgtttctttacttttccat

SEQ ID NO: 11006 - DNA, 20 bp, synthetic construct
  misc_feature 1..20: note = Description of Artificial Sequence: Synthetic oligonucleotide
  misc_feature 1..20: note = Target: SCN10A; (-) strand; PAM type: NNNNGHTT; PAM sequence: TCTTGTTT
  source 1..20: mol_type = other DNA
ttcttgaaaattattttggt

SEQ ID NO: 11007 - DNA, 20 bp, synthetic construct
  misc_feature 1..20: note = Description of Artificial Sequence: Synthetic oligonucleotide
  misc_feature 1..20: note = Target: SCN10A; (-) strand; PAM type: NNNNGHTT; PAM sequence: GGTCGATT
  source 1..20: mol_type = other DNA
tctatagtaagatttgacct

SEQ ID NO: 11008 - DNA, 20 bp, synthetic construct
  misc_feature 1..20: note = Description of Artificial Sequence: Synthetic oligonucleotide
  misc_feature 1..20: note = Target: SCN10A; (-) strand; PAM type: NNNNGHTT; PAM sequence: GTAAGATT
  source 1..20: mol_type = other DNA
gtggatttaaatgctctata

SEQ ID NO: 11009 - DNA, 20 bp, synthetic construct
  misc_feature 1..20: note = Description of Artificial Sequence: Synthetic oligonucleotide
  misc_feature 1..20: note = Target: SCN10A; (-) strand; PAM type: NNNNGHTT; PAM sequence: CGTGGATT
  source 1..20: mol_type = other DNA
cacatcctgagtcaacacca

SEQ ID NO: 11010 - DNA, 20 bp, synthetic construct
  misc_feature 1..20: note = Description of Artificial Sequence: Synthetic oligonucleotide
  misc_feature 1..20: note = Target: SCN10A; (-) strand; PAM type: NNNNGHTT; PAM sequence: ATCTGTTT
  source 1..20: mol_type = other DNA
cagattcccatgtctactga

SEQ ID NO: 11011 - DNA, 20 bp, synthetic construct
  misc_feature 1..20: note = Description of Artificial Sequence: Synthetic oligonucleotide
  misc_feature 1..20: note = Target: SCN10A; (-) strand; PAM type: NNNNGHTT; PAM sequence: ACCAGATT
  source 1..20: mol_type = other DNA
taccactgcttctgccatgc

SEQ ID NO: 11012 - DNA, 20 bp, synthetic construct
  misc_feature 1..20: note = Description of Artificial Sequence: Synthetic oligonucleotide
  misc_feature 1..20: note = Target: SCN10A; (-) strand; PAM type: NNNNGHTT; PAM sequence: CACTGCTT
  source 1..20: mol_type = other DNA
atttcccaagtggttcctac

SEQ ID NO: 11013 - DNA, 20 bp, synthetic construct
  misc_feature 1..20: note = Description of Artificial Sequence: Synthetic oligonucleotide
  misc_feature 1..20: note = Target: SCN10A; (-) strand; PAM type: NNNNGHTT; PAM sequence: TATGGATT
  source 1..20: mol_type = other DNA
aggcttccaatatttttcca

SEQ ID NO: 11014 - DNA, 20 bp, synthetic construct
  misc_feature 1..20: note = Description of Artificial Sequence: Synthetic oligonucleotide
  misc_feature 1..20: note = Target: SCN10A; (-) strand; PAM type: NNNNGHTT; PAM sequence: ATAGGCTT
  source 1..20: mol_type = other DNA
ttgtatgtgtgtggtatgag

SEQ ID NO: 11015 - DNA, 20 bp, synthetic construct
  misc_feature 1..20: note = Description of Artificial Sequence: Synthetic oligonucleotide
  misc_feature 1..20: note = Target: SCN10A; (-) strand; PAM type: NNNNGHTT; PAM sequence: TACAGTTT
  source 1..20: mol_type = other DNA
ctgtgttttctcctcaaagt

SEQ ID NO: 11016 - DNA, 20 bp, synthetic construct
  misc_feature 1..20: note = Description of Artificial Sequence: Synthetic oligonucleotide
  misc_feature 1..20: note = Target: SCN10A; (-) strand; PAM type: NNNNGHTT; PAM sequence: CTGTGTTT
  source 1..20: mol_type = other DNA
tattccataaagatattatc

SEQ ID NO: 11017 - DNA, 20 bp, synthetic construct
  misc_feature 1..20: note = Description of Artificial Sequence: Synthetic oligonucleotide
  misc_feature 1..20: note = Target: SCN10A; (-) strand; PAM type: NNNNGHTT; PAM sequence: TTGGGATT
  source 1..20: mol_type = other DNA
gatgttttaaaattatgttt

SEQ ID NO: 11018 - DNA, 20 bp, synthetic construct
  misc_feature 1..20: note = Description of Artificial Sequence: Synthetic oligonucleotide
  misc_feature 1..20: note = Target: SCN10A; (-) strand; PAM type: NNNNGHTT; PAM sequence: TTATGTTT
  source 1..20: mol_type = other DNA
ctttatctgatgttttaaaa

SEQ ID NO: 11019 - DNA, 20 bp, synthetic construct
  misc_feature 1..20: note = Description of Artificial Sequence: Synthetic oligonucleotide
  misc_feature 1..20: note = Target: SCN10A; (-) strand; PAM type: NNNNGHTT; PAM sequence: TGATGTTT
  source 1..20: mol_type = other DNA
ttttatatgtgtgctttatc

SEQ ID NO: 11020 - DNA, 20 bp, synthetic construct
  misc_feature 1..20: note = Description of Artificial Sequence: Synthetic oligonucleotide
  misc_feature 1..20: note = Target: SCN10A; (-) strand; PAM type: NNNNGHTT; PAM sequence: GTGTGCTT
  source 1..20: mol_type = other DNA
gaactgttatcattttatat

SEQ ID NO: 11021 - DNA, 20 bp, synthetic construct
  misc_feature 1..20: note = Description of Artificial Sequence: Synthetic oligonucleotide
  misc_feature 1..20: note = Target: SCN10A; (-) strand; PAM type: NNNNGHTT; PAM sequence: TATTGATT
  source 1..20: mol_type = other DNA
ttaacactgcatgcataaag

SEQ ID NO: 11022 - DNA, 20 bp, synthetic construct
  misc_feature 1..20: note = Description of Artificial Sequence: Synthetic oligonucleotide
  misc_feature 1..20: note = Target: SCN10A; (-) strand; PAM type: NNNNGHTT; PAM sequence: GGGTGTTT
  source 1..20: mol_type = other DNA
tctactgcaaacggggaagt

SEQ ID NO: 11023 - DNA, 20 bp, synthetic construct
  misc_feature 1..20: note = Description of Artificial Sequence: Synthetic oligonucleotide
  misc_feature 1..20: note = Target: SCN10A; (-) strand; PAM type: NNNNGHTT; PAM sequence: AAATGTTT
  source 1..20: mol_type = other DNA
aatttggttgtagagaagat

SEQ ID NO: 11024 - DNA, 20 bp, synthetic construct
  misc_feature 1..20: note = Description of Artificial Sequence: Synthetic oligonucleotide
  misc_feature 1..20: note = Target: SCN10A; (-) strand; PAM type: NNNNGHTT; PAM sequence: CCTGGTTT
  source 1..20: mol_type = other DNA
ctttcctactctccccatgc

SEQ ID NO: 11025 - DNA, 20 bp, synthetic construct
  misc_feature 1..20: note = Description of Artificial Sequence: Synthetic oligonucleotide
  misc_feature 1..20: note = Target: SCN10A; (-) strand; PAM type: NNNNGHTT; PAM sequence: CTCAGATT
  source 1..20: mol_type = other DNA
gaagaaactagaggttcttc

SEQ ID NO: 11026 - DNA, 20 bp, synthetic construct
  misc_feature 1..20: note = Description of Artificial Sequence: Synthetic oligonucleotide
  misc_feature 1..20: note = Target: SCN10A; (-) strand; PAM type: NNNNGHTT; PAM sequence: TTTTGCTT
  source 1..20: mol_type = other DNA
ttccattttctaatcccctc

SEQ ID NO: 11027 - DNA, 20 bp, synthetic construct
  misc_feature 1..20: note = Description of Artificial Sequence: Synthetic oligonucleotide
  misc_feature 1..20: note = Target: SCN10A; (-) strand; PAM type: NNNNGHTT; PAM sequence: GTCTGCTT
  source 1..20: mol_type = other DNA
ttctgcgtgcctgcctatct

SEQ ID NO: 11028 - DNA, 20 bp, synthetic construct
  misc_feature 1..20: note = Description of Artificial Sequence: Synthetic oligonucleotide
  misc_feature 1..20: note = Target: SCN10A; (-) strand; PAM type: NNNNGHTT; PAM sequence: ATTAGCTT
  source 1..20: mol_type = other DNA
ccattattccttgctgaaac

SEQ ID NO: 11029 - DNA, 20 bp, synthetic construct
  misc_feature 1..20: note = Description of Artificial Sequence: Synthetic oligonucleotide
  misc_feature 1..20: note = Target: SCN10A; (-) strand; PAM type: NNNNGHTT; PAM sequence: AGTTGTTT
  source 1..20: mol_type = other DNA
gcaaattgataatagccatt

SEQ ID NO: 11030 - DNA, 20 bp, synthetic construct
  misc_feature 1..20: note = Description of Artificial Sequence: Synthetic oligonucleotide
  misc_feature 1..20: note = Target: SCN10A; (-) strand; PAM type: NNNNGHTT; PAM sequence: ACTAGATT
  source 1..20: mol_type = other DNA
ggcctcgtggaaataatcag

SEQ ID NO: 11031 - DNA, 20 bp, synthetic construct
  misc_feature 1..20: note = Description of Artificial Sequence: Synthetic oligonucleotide
  misc_feature 1..20: note = Target: SCN10A; (-) strand; PAM type: NNNNGHTT; PAM sequence: AGGAGATT
  source 1..20: mol_type = other DNA
aattatcaaatccattcttt

SEQ ID NO: 11032 - DNA, 20 bp, synthetic construct
  misc_feature 1..20: note = Description of Artificial Sequence: Synthetic oligonucleotide
  misc_feature 1..20: note = Target: SCN10A; (-) strand; PAM type: NNNNGHTT; PAM sequence: TGAAGTTT
  source 1..20: mol_type = other DNA
tttcatttgcatggatgaag

SEQ ID NO: 11033 - DNA, 20 bp, synthetic construct
  misc_feature 1..20: note = Description of Artificial Sequence: Synthetic oligonucleotide
  misc_feature 1..20: note = Target: SCN10A; (-) strand; PAM type: NNNNGHTT; PAM sequence: AACAGATT
  source 1..20: mol_type = other DNA
tgttttatagaaattagctg

SEQ ID NO: 11034 - DNA, 20 bp, synthetic construct
  misc_feature 1..20: note = Description of Artificial Sequence: Synthetic oligonucleotide
  misc_feature 1..20: note = Target: SCN10A; (-) strand; PAM type: NNNNGHTT; PAM sequence: AGCTGTTT
  source 1..20: mol_type = other DNA
cccaaaaaaatcccagcagc

SEQ ID NO: 11035 - DNA, 20 bp, synthetic construct
  misc_feature 1..20: note = Description of Artificial Sequence: Synthetic oligonucleotide
  misc_feature 1..20: note = Target: SCN10A; (-) strand; PAM type: NNNNGHTT; PAM sequence: AGAAGATT
  source 1..20: mol_type = other DNA
atgtctcatgtgactggatt

SEQ ID NO: 11036 - DNA, 20 bp, synthetic construct
  misc_feature 1..20: note = Description of Artificial Sequence: Synthetic oligonucleotide
  misc_feature 1..20: note = Target: SCN10A; (-) strand; PAM type: NNNNGHTT; PAM sequence: ACTGGATT
  source 1..20: mol_type = other DNA
attaaaggatgtctcatgtg

SEQ ID NO: 11037 - DNA, 20 bp, synthetic construct
  misc_feature 1..20: note = Description of Artificial Sequence: Synthetic oligonucleotide
  misc_feature 1..20: note = Target: SCN10A; (-) strand; PAM type: NNNNGHTT; PAM sequence: AACAGTTT
  source 1..20: mol_type = other DNA
cgagggaaggaaagataaaa

SEQ ID NO: 11038 - DNA, 20 bp, synthetic construct
  misc_feature 1..20: note = Description of Artificial Sequence: Synthetic oligonucleotide
  misc_feature 1..20: note = Target: SCN10A; (-) strand; PAM type: NNNNGHTT; PAM sequence: ATCTGATT
  source 1..20: mol_type = other DNA
taatataattaatataatgt

SEQ ID NO: 11039 - DNA, 20 bp, synthetic construct
  misc_feature 1..20: note = Description of Artificial Sequence: Synthetic oligonucleotide
  misc_feature 1..20: note = Target: SCN10A; (-) strand; PAM type: NNNNGHTT; PAM sequence: CCATGATT
  source 1..20: mol_type = other DNA
gcaaacaaagaaagcaggat

SEQ ID NO: 11040 - DNA, 20 bp, synthetic construct
  misc_feature 1..20: note = Description of Artificial Sequence: Synthetic oligonucleotide
  misc_feature 1..20: note = Target: SCN10A; (-) strand; PAM type: NNNNGHTT; PAM sequence: AATGGATT
  source 1..20: mol_type = other DNA
ctgtcatgtcactaaatata

SEQ ID NO: 11041 - DNA, 20 bp, synthetic construct
  misc_feature 1..20: note = Description of Artificial Sequence: Synthetic oligonucleotide
  misc_feature 1..20: note = Target: SCN10A; (-) strand; PAM type: NNNNGHTT; PAM sequence: ATTTGCTT
  source 1..20: mol_type = other DNA
caaataagaaaatcgctcga

SEQ ID NO: 11042 - DNA, 20 bp, synthetic construct
  misc_feature 1..20: note = Description of Artificial Sequence: Synthetic oligonucleotide
  misc_feature 1..20: note = Target: SCN10A; (-) strand; PAM type: NNNNGHTT; PAM sequence: TGCTGCTT
  source 1..20: mol_type = other DNA
tgttgatgttgagttgtctc

SEQ ID NO: 11043 - DNA, 20 bp, synthetic construct
  misc_feature 1..20: note = Description of Artificial Sequence: Synthetic oligonucleotide
  misc_feature 1..20: note = Target: SCN10A; (-) strand; PAM type: NNNNGHTT; PAM sequence: CGATGATT
  source 1..20: mol_type = other DNA
agttgtaagaggatcaactt

SEQ ID NO: 11044 - DNA, 20 bp, synthetic construct
  misc_feature 1..20: note = Description of Artificial Sequence: Synthetic oligonucleotide
  misc_feature 1..20: note = Target: SCN10A; (-) strand; PAM type: NNNNGHTT; PAM sequence: CTCAGCTT
  source 1..20: mol_type = other DNA
tggtcaacgatgagttcttc

SEQ ID NO: 11045 - DNA, 20 bp, synthetic construct
  misc_feature 1..20: note = Description of Artificial Sequence: Synthetic oligonucleotide
  misc_feature 1..20: note = Target: SCN10A; (-) strand; PAM type: NNNNGHTT; PAM sequence: ATTTGCTT
  source 1..20: mol_type = other DNA
ggagctgtttcacctttcca

SEQ ID NO: 11046 - DNA, 20 bp, synthetic construct
  misc_feature 1..20: note = Description of Artificial Sequence: Synthetic oligonucleotide
  misc_feature 1..20: note = Target: SCN10A; (-) strand; PAM type: NNNNGHTT; PAM sequence: AGCTGTTT
  source 1..20: mol_type = other DNA
tatgaggcacccatttatgg

SEQ ID NO: 11047 - DNA, 20 bp, synthetic construct
  misc_feature 1..20: note = Description of Artificial Sequence: Synthetic oligonucleotide
  misc_feature 1..20: note = Target: SCN10A; (-) strand; PAM type: NNNNGHTT; PAM sequence: CTTAGCTT
  source 1..20: mol_type = other DNA
cgattttttaaacatttttc

SEQ ID NO: 11048 - DNA, 20 bp, synthetic construct
  misc_feature 1..20: note = Description of Artificial Sequence: Synthetic oligonucleotide
  misc_feature 1..20: note = Target: SCN10A; (-) strand; PAM type: NNNNGHTT; PAM sequence: TGACGATT
  source 1..20: mol_type = other DNA
gagacgacaacacttcaaaa

SEQ ID NO: 11049 - DNA, 20 bp, synthetic construct
  misc_feature 1..20: note = Description of Artificial Sequence: Synthetic oligonucleotide
  misc_feature 1..20: note = Target: SCN10A; (-) strand; PAM type: NNNNGHTT; PAM sequence: ATCTGATT
  source 1..20: mol_type = other DNA
actttttatcgcacatcaca

SEQ ID NO: 11050 - DNA, 20 bp, synthetic construct
  misc_feature 1..20: note = Description of Artificial Sequence: Synthetic oligonucleotide
  misc_feature 1..20: note = Target: SCN10A; (-) strand; PAM type: NNNNGHTT; PAM sequence: TGGAGCTT
  source 1..20: mol_type = other DNA
ttgggttttgggaagtgctt

SEQ ID NO: 11051 - DNA, 20 bp, synthetic construct
  misc_feature 1..20: note = Description of Artificial Sequence: Synthetic oligonucleotide
  misc_feature 1..20: note = Target: SCN10A; (-) strand; PAM type: NNNNGHTT; PAM sequence: AAGTGCTT
  source 1..20: mol_type = other DNA
ggtgcaagttgggttttggg

SEQ ID NO: 11052 - DNA, 20 bp, synthetic construct
  misc_feature 1..20: note = Description of Artificial Sequence: Synthetic oligonucleotide
  misc_feature 1..20: note = Target: SCN10A; (-) strand; PAM type: NNNNGHTT; PAM sequence: TTGGGTTT
  source 1..20: mol_type = other DNA
acgactttttttggtgcaag

SEQ ID NO: 11053 - DNA, 20 bp, synthetic construct
  misc_feature 1..20: note = Description of Artificial Sequence: Synthetic oligonucleotide
  misc_feature 1..20: note = Target: SCN10A; (-) strand; PAM type: NNNNGHTT; PAM sequence: CTGGGATT
  source 1..20: mol_type = other DNA
tctcagatgtaatggctttg

SEQ ID NO: 11054 - DNA, 20 bp, synthetic construct
  misc_feature 1..20: note = Description of Artificial Sequence: Synthetic oligonucleotide
  misc_feature 1..20: note = Target: SCN10A; (-) strand; PAM type: NNNNGHTT; PAM sequence: AATGGCTT
  source 1..20: mol_type = other DNA
tgaacatatttctcagatgt

SEQ ID NO: 11055 - DNA, 20 bp, synthetic construct
  misc_feature 1..20: note = Description of Artificial Sequence: Synthetic oligonucleotide
  misc_feature 1..20: note = Target: SCN10A; (-) strand; PAM type: NNNNGHTT; PAM sequence: CATCGATT
  source 1..20: mol_type = other DNA
ttgcagttttctgtgcatct

SEQ ID NO: 11056 - DNA, 20 bp, synthetic construct
  misc_feature 1..20: note = Description of Artificial Sequence: Synthetic oligonucleotide
  misc_feature 1..20: note = Target: SCN10A; (-) strand; PAM type: NNNNGHTT; PAM sequence: TGCAGTTT
  source 1..20: mol_type = other DNA
ccaatgccagctgcaggcct

SEQ ID NO: 11057 - DNA, 20 bp, synthetic construct
  misc_feature 1..20: note = Description of Artificial Sequence: Synthetic oligonucleotide
  misc_feature 1..20: note = Target: SCN10A; (-) strand; PAM type: NNNNGHTT; PAM sequence: AGATGCTT
  source 1..20: mol_type = other DNA
tcacctgcaaaaagttgttc

SEQ ID NO: 11058 - DNA, 20 bp, synthetic construct
  misc_feature 1..20: note = Description of Artificial Sequence: Synthetic oligonucleotide
  misc_feature 1..20: note = Target: SCN10A; (-) strand; PAM type: NNNNGHTT; PAM sequence: AAGTGTTT
  source 1..20: mol_type = other DNA
ctgcatcccgctggttatgg

SEQ ID NO: 11059 - DNA, 20 bp, synthetic construct
  misc_feature 1..20: note = Description of Artificial Sequence: Synthetic oligonucleotide
  misc_feature 1..20: note = Target: SCN10A; (-) strand; PAM type: NNNNGHTT; PAM sequence: TTGGGATT
  source 1..20: mol_type = other DNA
gtagcataaaaatccatgct

SEQ ID NO: 11060 - DNA, 20 bp, synthetic construct
  misc_feature 1..20: note = Description of Artificial Sequence: Synthetic oligonucleotide
  misc_feature 1..20: note = Target: SCN10A; (-) strand; PAM type: NNNNGHTT; PAM sequence: CCATGCTT
  source 1..20: mol_type = other DNA
tattcctgtagcataaaaat

SEQ ID NO: 11061 - DNA, 20 bp, synthetic construct
  misc_feature 1..20: note = Description of Artificial Sequence: Synthetic oligonucleotide
  misc_feature 1..20: note = Target: SCN10A; (-) strand; PAM type: NNNNGHTT; PAM sequence: GTTTGTTT
  source 1..20: mol_type = other DNA
tttttgccaatgagaaatga

SEQ ID NO: 11062 - DNA, 20 bp, synthetic construct
  misc_feature 1..20: note = Description of Artificial Sequence: Synthetic oligonucleotide
  misc_feature 1..20: note = Target: SCN10A; (-) strand; PAM type: NNNNGHTT; PAM sequence: ATGAGTTT
  source 1..20: mol_type = other DNA
cacatttttgccaatgagaa

SEQ ID NO: 11063 - DNA, 20 bp, synthetic construct
  misc_feature 1..20: note = Description of Artificial Sequence: Synthetic oligonucleotide
  misc_feature 1..20: note = Target: SCN10A; (-) strand; PAM type: NNNNGHTT; PAM sequence: TGGGGTTT
  source 1..20: mol_type = other DNA
tgaaaaggtacaaaagtaat

SEQ ID NO: 11064 - DNA, 20 bp, synthetic construct
  misc_feature 1..20: note = Description of Artificial Sequence: Synthetic oligonucleotide
  misc_feature 1..20: note = Target: SCN10A; (-) strand; PAM type: NNNNGHTT; PAM sequence: ATAAGTTT
  source 1..20: mol_type = other DNA
attataattataaatttata

SEQ ID NO: 11065 - DNA, 20 bp, synthetic construct
  misc_feature 1..20: note = Description of Artificial Sequence: Synthetic oligonucleotide
  misc_feature 1..20: note = Target: SCN10A; (-) strand; PAM type: NNNNGHTT; PAM sequence: CACGGTTT
  source 1..20: mol_type = other DNA
acactaaggacaatgtatta

SEQ ID NO: 11066 - DNA, 20 bp, synthetic construct
  misc_feature 1..20: note = Description of Artificial Sequence: Synthetic oligonucleotide
  misc_feature 1..20: note = Target: SCN10A; (-) strand; PAM type: NNNNGHTT; PAM sequence: TTTTGATT
  source 1..20: mol_type = other DNA
caccaaatggaaatgagaga

SEQ ID NO: 11067 - DNA, 20 bp, synthetic construct
  misc_feature 1..20: note = Description of Artificial Sequence: Synthetic oligonucleotide
  misc_feature 1..20: note = Target: SCN10A; (-) strand; PAM type: NNNNGHTT; PAM sequence: GAGAGATT
  source 1..20: mol_type = other DNA
aggaatcaccaaatggaaat

SEQ ID NO: 11068 - DNA, 20 bp, synthetic construct
  misc_feature 1..20: note = Description of Artificial Sequence: Synthetic oligonucleotide
  misc_feature 1..20: note = Target: SCN10A; (-) strand; PAM type: NNNNGHTT; PAM sequence: TGCTGCTT
  source 1..20: mol_type = other DNA
agcagagtatgttcacttac

SEQ ID NO: 11069 - DNA, 20 bp, synthetic construct
  misc_feature 1..20: note = Description of Artificial Sequence: Synthetic oligonucleotide
  misc_feature 1..20: note = Target: SCN10A; (-) strand; PAM type: NNNNGHTT; PAM sequence: CAGGGTTT
  source 1..20: mol_type = other DNA
tggtaaatcacttagcagat

SEQ ID NO: 11070 - DNA, 20 bp, synthetic construct
  misc_feature 1..20: note = Description of Artificial Sequence: Synthetic oligonucleotide
  misc_feature 1..20: note = Target: SCN10A; (-) strand; PAM type: NNNNGHTT; PAM sequence: ATATGTTT
  source 1..20: mol_type = other DNA
aaatatggaagatagaatgc

SEQ ID NO: 11071 - DNA, 20 bp, synthetic construct
  misc_feature 1..20: note = Description of Artificial Sequence: Synthetic oligonucleotide
  misc_feature 1..20: note = Target: SCN10A; (-) strand; PAM type: NNNNGHTT; PAM sequence: TGGAGATT
  source 1..20: mol_type = other DNA
tgagttatttgggagttatt

SEQ ID NO: 11072 - DNA, 20 bp, synthetic construct
  misc_feature 1..20: note = Description of Artificial Sequence: Synthetic oligonucleotide
  misc_feature 1..20: note = Target: SCN10A; (-) strand; PAM type: NNNNGHTT; PAM sequence: TGGAGTTT
  source 1..20: mol_type = other DNA
taaaatgtctatgcttcttt

SEQ ID NO: 11073 - DNA, 20 bp, synthetic construct
  misc_feature 1..20: note = Description of Artificial Sequence: Synthetic oligonucleotide
  misc_feature 1..20: note = Target: SCN10A; (-) strand; PAM type: NNNNGHTT; PAM sequence: CTATGCTT
  source 1..20: mol_type = other DNA
tcatatagcatgtaaaatgt

SEQ ID NO: 11074 - DNA, 20 bp, synthetic construct
  misc_feature 1..20: note = Description of Artificial Sequence: Synthetic oligonucleotide
  misc_feature 1..20: note = Target: SCN10A; (-) strand; PAM type: NNNNGHTT; PAM sequence: TTATGTTT
  source 1..20: mol_type = other DNA
tttgttttaaaataattaat

SEQ ID NO: 11075 - DNA, 20 bp, synthetic construct
  misc_feature 1..20: note = Description of Artificial Sequence: Synthetic oligonucleotide
  misc_feature 1..20: note = Target: SCN10A; (-) strand; PAM type: NNNNGHTT; PAM sequence: ATTTGTTT
  source 1..20: mol_type = other DNA
aggctgactaatacacaaac

SEQ ID NO: 11076 - DNA, 20 bp, synthetic construct
  misc_feature 1..20: note = Description of Artificial Sequence: Synthetic oligonucleotide
  misc_feature 1..20: note = Target: SCN10A; (-) strand; PAM type: NNNNGHTT; PAM sequence: TCCAGATT
  source 1..20: mol_type = other DNA
cccaatctcaggcttcaacc

SEQ ID NO: 11077 - DNA, 20 bp, synthetic construct
  misc_feature 1..20: note = Description of Artificial Sequence: Synthetic oligonucleotide
  misc_feature 1..20: note = Target: SCN10A; (-) strand; PAM type: NNNNGHTT; PAM sequence: TCAGGCTT
  source 1..20: mol_type = other DNA
actatgctgacatcccaatc

SEQ ID NO: 11078 - DNA, 20 bp, synthetic construct
  misc_feature 1..20: note = Description of Artificial Sequence: Synthetic oligonucleotide
  misc_feature 1..20: note = Target: SCN10A; (-) strand; PAM type: NNNNGHTT; PAM sequence: GACAGCTT
  source 1..20: mol_type = other DNA
gtgtccttataagagaaaga

SEQ ID NO: 11079 - DNA, 20 bp, synthetic construct
  misc_feature 1..20: note = Description of Artificial Sequence: Synthetic oligonucleotide
  misc_feature 1..20: note = Target: SCN10A; (-) strand; PAM type: NNNNGHTT; PAM sequence: AGGTGATT
  source 1..20: mol_type = other DNA
tggagattgggcctctaagg

SEQ ID NO: 11080 - DNA, 20 bp, synthetic construct
  misc_feature 1..20: note = Description of Artificial Sequence: Synthetic oligonucleotide
  misc_feature 1..20: note = Target: SCN10A; (-) strand; PAM type: NNNNGHTT; PAM sequence: TGGAGATT
  source 1..20: mol_type = other DNA
aaccccccatgttgctatgt

SEQ ID NO: 11081 - DNA, 20 bp, synthetic construct
  misc_feature 1..20: note = Description of Artificial Sequence: Synthetic oligonucleotide
  misc_feature 1..20: note = Target: SCN10A; (-) strand; PAM type: NNNNGHTT; PAM sequence: TTTTGTTT
  source 1..20: mol_type = other DNA
aatcaagcaaaactaaacta

SEQ ID NO: 11082 - DNA, 20 bp, synthetic construct
  misc_feature 1..20: note = Description of Artificial Sequence: Synthetic oligonucleotide
  misc_feature 1..20: note = Target: SCN10A; (-) strand; PAM type: NNNNGHTT; PAM sequence: TAAAGTTT
  source 1..20: mol_type = other DNA
ataaacaaggttcatttata

SEQ ID NO: 11083 - DNA, 20 bp, synthetic construct
  misc_feature 1..20: note = Description of Artificial Sequence: Synthetic oligonucleotide
  misc_feature 1..20: note = Target: SCN10A; (-) strand; PAM type: NNNNGHTT; PAM sequence: AAAGGATT
  source 1..20: mol_type = other DNA
gaacaaaaaaagccaaatgc

SEQ ID NO: 11084 - DNA, 20 bp, synthetic construct
  misc_feature 1..20: note = Description of Artificial Sequence: Synthetic oligonucleotide
  misc_feature 1..20: note = Target: SCN10A; (-) strand; PAM type: NNNNGHTT; PAM sequence: GAAAGTTT
  source 1..20: mol_type = other DNA
acaccagattacagctacaa

SEQ ID NO: 11085 - DNA, 20 bp, synthetic construct
  misc_feature 1..20: note = Description of Artificial Sequence: Synthetic oligonucleotide
  misc_feature 1..20: note = Target: SCN10A; (-) strand; PAM type: NNNNGHTT; PAM sequence: ACCAGATT
  source 1..20: mol_type = other DNA
agaaatatgtacttgtggac

SEQ ID NO: 11086 - DNA, 20 bp, synthetic construct
  misc_feature 1..20: note = Description of Artificial Sequence: Synthetic oligonucleotide
  misc_feature 1..20: note = Target: SCN10A; (-) strand; PAM type: NNNNGHTT; PAM sequence: CTATGTTT
  source 1..20: mol_type = other DNA
tctattacacccttaggtac

SEQ ID NO: 11087 - DNA, 20 bp, synthetic construct
  misc_feature 1..20: note = Description of Artificial Sequence: Synthetic oligonucleotide
  misc_feature 1..20: note = Target: SCN10A; (-) strand; PAM type: NNNNGHTT; PAM sequence: CTGAGATT
  source 1..20: mol_type = other DNA
agttgcaaattaaaatcaca

SEQ ID NO: 11088 - DNA, 20 bp, synthetic construct
  misc_feature 1..20: note = Description of Artificial Sequence: Synthetic oligonucleotide
  misc_feature 1..20: note = Target: SCN10A; (-) strand; PAM type: NNNNGHTT; PAM sequence: AAGTGCTT
  source 1..20: mol_type = other DNA
ctttaagagcatgaaaaagc

SEQ ID NO: 11089 - DNA, 20 bp, synthetic construct
  misc_feature 1..20: note = Description of Artificial Sequence: Synthetic oligonucleotide
  misc_feature 1..20: note = Target: SCN10A; (-) strand; PAM type: NNNNGHTT; PAM sequence: ATAAGCTT
  source 1..20: mol_type = other DNA
agccgacttgatcgtggtgg

SEQ ID NO: 11090 - DNA, 20 bp, synthetic construct
  misc_feature 1..20: note = Description of Artificial Sequence: Synthetic oligonucleotide
  misc_feature 1..20: note = Target: SCN10A; (-) strand; PAM type: NNNNGHTT; PAM sequence: ACCAGCTT
  source 1..20: mol_type = other DNA
tattgacttgcgtatgttga

SEQ ID NO: 11091 - DNA, 20 bp, synthetic construct
  misc_feature 1..20: note = Description of Artificial Sequence: Synthetic oligonucleotide
  misc_feature 1..20: note = Target: SCN10A; (-) strand; PAM type: NNNNGHTT; PAM sequence: TTACGTTT
  source 1..20: mol_type = other DNA
ggttctgtttgtgtgatgga

SEQ ID NO: 11092 - DNA, 20 bp, synthetic construct
  misc_feature 1..20: note = Description of Artificial Sequence: Synthetic oligonucleotide
  misc_feature 1..20: note = Target: SCN10A; (-) strand; PAM type: NNNNGHTT; PAM sequence: GATGGATT
  source 1..20: mol_type = other DNA
gtcattggttctgtttgtgt

SEQ ID NO: 11093 - DNA, 20 bp, synthetic construct
  misc_feature 1..20: note = Description of Artificial Sequence: Synthetic oligonucleotide
  misc_feature 1..20: note = Target: SCN10A; (-) strand; PAM type: NNNNGHTT; PAM sequence: TTCTGTTT
  source 1..20: mol_type = other DNA
cacgtggtttttgtcattgg

SEQ ID NO: 11094 - DNA, 20 bp, synthetic construct
  misc_feature 1..20: note = Description of Artificial Sequence: Synthetic oligonucleotide
  misc_feature 1..20: note = Target: SCN10A; (-) strand; PAM type: NNNNGHTT; PAM sequence: CGTGGTTT
  source 1..20: mol_type = other DNA
tgcatctattgagataatca

SEQ ID NO: 11095 - DNA, 20 bp, synthetic construct
  misc_feature 1..20: note = Description of Artificial Sequence: Synthetic oligonucleotide
  misc_feature 1..20: note = Target: SCN10A; (-) strand; PAM type: NNNNGHTT; PAM sequence: GAGAGCTT
  source 1..20: mol_type = other DNA
ccatcaatacctagtttatt

SEQ ID NO: 11096 - DNA, 20 bp, synthetic construct
  misc_feature 1..20: note = Description of Artificial Sequence: Synthetic oligonucleotide
  misc_feature 1..20: note = Target: SCN10A; (-) strand; PAM type: NNNNGHTT; PAM sequence: CCTAGTTT
  source 1..20: mol_type = other DNA
tgagatacattccatcaata

SEQ ID NO: 11097 - DNA, 20 bp, synthetic construct
  misc_feature 1..20: note = Description of Artificial Sequence: Synthetic oligonucleotide
  misc_feature 1..20: note = Target: SCN10A; (-) strand; PAM type: NNNNGHTT; PAM sequence: GGGGGCTT
  source 1..20: mol_type = other DNA
cattcagtatgatattggct

SEQ ID NO: 11098 - DNA, 20 bp, synthetic construct
  misc_feature 1..20: note = Description of Artificial Sequence: Synthetic oligonucleotide
  misc_feature 1..20: note = Target: SCN10A; (-) strand; PAM type: NNNNGHTT; PAM sequence: TCCAGTTT
  source 1..20: mol_type = other DNA
tggttttcaaaggaaatgct

SEQ ID NO: 11099 - DNA, 20 bp, synthetic construct
  misc_feature 1..20: note = Description of Artificial Sequence: Synthetic oligonucleotide
  misc_feature 1..20: note = Target: SCN10A; (-) strand; PAM type: NNNNGHTT; PAM sequence: AAATGCTT
  source 1..20: mol_type = other DNA
cttgtgctggttttcaaagg

SEQ ID NO: 11100 - DNA, 20 bp, synthetic construct
  misc_feature 1..20: note = Description of Artificial Sequence: Synthetic oligonucleotide
  misc_feature 1..20: note = Target: SCN10A; (-) strand; PAM type: NNNNGHTT; PAM sequence: GCTGGTTT
  source 1..20: mol_type = other DNA
atagggcattcttgtcttgt

SEQ ID NO: 11101 - DNA, 20 bp, synthetic construct
  misc_feature 1..20: note = Description of Artificial Sequence: Synthetic oligonucleotide
  misc_feature 1..20: note = Target: SCN10A; (-) strand; PAM type: NNNNGHTT; PAM sequence: TGGGGTTT
  source 1..20: mol_type = other DNA
gagattttgggctgagatga

SEQ ID NO: 11102 - DNA, 20 bp, synthetic construct
  misc_feature 1..20: note = Description of Artificial Sequence: Synthetic oligonucleotide
  misc_feature 1..20: note = Target: SCN10A; (-) strand; PAM type: NNNNGHTT; PAM sequence: AGGAGATT
  source 1..20: mol_type = other DNA
tgaagttgcttatcagctta

SEQ ID NO: 11103 - DNA, 20 bp, synthetic construct
  misc_feature 1..20: note = Description of Artificial Sequence: Synthetic oligonucleotide
  misc_feature 1..20: note = Target: SCN10A; (-) strand; PAM type: NNNNGHTT; PAM sequence: ATCAGCTT
  source 1..20: mol_type = other DNA
agactttgctgaagttgctt

SEQ ID NO: 11104 - DNA, 20 bp, synthetic construct
  misc_feature 1..20: note = Description of Artificial Sequence: Synthetic oligonucleotide
  misc_feature 1..20: note = Target: SCN10A; (-) strand; PAM type: NNNNGHTT; PAM sequence: AGTTGCTT
  source 1..20: mol_type = other DNA
gtatcctgagactttgctga

SEQ ID NO: 11105 - DNA, 20 bp, synthetic construct
  misc_feature 1..20: note = Description of Artificial Sequence: Synthetic oligonucleotide
  misc_feature 1..20: note = Target: SCN10A; (-) strand; PAM type: NNNNGHTT; PAM sequence: CATTGATT
  source 1..20: mol_type = other DNA
gaatgcttgtgatttttgca

SEQ ID NO: 11106 - DNA, 20 bp, synthetic construct
  misc_feature 1..20: note = Description of Artificial Sequence: Synthetic oligonucleotide
  misc_feature 1..20: note = Target: SCN10A; (-) strand; PAM type: NNNNGHTT; PAM sequence: TTGTGATT
  source 1..20: mol_type = other DNA
ttattggtgtatgggaatgc

SEQ ID NO: 11107 - DNA, 20 bp, synthetic construct
  misc_feature 1..20: note = Description of Artificial Sequence: Synthetic oligonucleotide
  misc_feature 1..20: note = Target: SCN10A; (-) strand; PAM type: NNNNGHTT; PAM sequence: GAATGCTT
  source 1..20: mol_type = other DNA
tgtctgttattggtgtatgg

SEQ ID NO: 11108 - DNA, 20 bp, synthetic construct
  misc_feature 1..20: note = Description of Artificial Sequence: Synthetic oligonucleotide
  misc_feature 1..20: note = Target: SCN10A; (-) strand; PAM type: NNNNGHTT; PAM sequence: CTCGGTTT
  source 1..20: mol_type = other DNA
agttcactcatgatttggct

SEQ ID NO: 11109 - DNA, 20 bp, synthetic construct
  misc_feature 1..20: note = Description of Artificial Sequence: Synthetic oligonucleotide
  misc_feature 1..20: note = Target: SCN10A; (-) strand; PAM type: NNNNGHTT; PAM sequence: TCATGATT
  source 1..20: mol_type = other DNA
aattgtgaatgggagttcac

SEQ ID NO: 11110 - DNA, 20 bp, synthetic construct
  misc_feature 1..20: note = Description of Artificial Sequence: Synthetic oligonucleotide
  misc_feature 1..20: note = Target: SCN10A; (-) strand; PAM type: NNNNGHTT; PAM sequence: CAGTGATT
  source 1..20: mol_type = other DNA
tcctctcttatttccttgag

SEQ ID NO: 11111 - DNA, 20 bp, synthetic construct
  misc_feature 1..20: note = Description of Artificial Sequence: Synthetic oligonucleotide
  misc_feature 1..20: note = Target: SCN10A; (-) strand; PAM type: NNNNGHTT; PAM sequence: GAATGTTT
  source 1..20: mol_type = other DNA
ttttcctatccatgagcatg

SEQ ID NO: 11112 - DNA, 20 bp, synthetic construct
  misc_feature 1..20: note = Description of Artificial Sequence: Synthetic oligonucleotide
  misc_feature 1..20: note = Target: SCN10A; (-) strand; PAM type: NNNNGHTT; PAM sequence: TATTGATT
  source 1..20: mol_type = other DNA
cagtatggccattttcacaa

SEQ ID NO: 11113 - DNA, 20 bp, synthetic construct
  misc_feature 1..20: note = Description of Artificial Sequence: Synthetic oligonucleotide
  misc_feature 1..20: note = Target: SCN10A; (-) strand; PAM type: NNNNGHTT; PAM sequence: GGTAGCTT
  source 1..20: mol_type = other DNA
attctgtgaagaaagtcagt

SEQ ID NO: 11114 - DNA, 20 bp, synthetic construct
  misc_feature 1..20: note = Description of Artificial Sequence: Synthetic oligonucleotide
  misc_feature 1..20: note = Target: SCN10A; (-) strand; PAM type: NNNNGHTT; PAM sequence: AGTAGATT
  source 1..20: mol_type = other DNA
ttgttccacatgaaatttaa

SEQ ID NO: 11115 - DNA, 20 bp, synthetic construct
  misc_feature 1..20: note = Description of Artificial Sequence: Synthetic oligonucleotide
  misc_feature 1..20: note = Target: SCN10A; (-) strand; PAM type: NNNNGHTT; PAM sequence: TTTTGCTT
  source 1..20: mol_type = other DNA
gatgcctccaactttcttct

SEQ ID NO: 11116 - DNA, 20 bp, synthetic construct
  misc_feature 1..20: note = Description of Artificial Sequence: Synthetic oligonucleotide
  misc_feature 1..20: note = Target: SCN10A; (-) strand; PAM type: NNNNGHTT; PAM sequence: TATAGCTT
  source 1..20: mol_type = other DNA
tggttactgtagctttgtag

SEQ ID NO: 11117 - DNA, 20 bp, synthetic construct
  misc_feature 1..20: note = Description of Artificial Sequence: Synthetic oligonucleotide
  misc_feature 1..20: note = Target: SCN10A; (-) strand; PAM type: NNNNGHTT; PAM sequence: TGTAGCTT
  source 1..20: mol_type = other DNA
tacctcgctgttttggttac

SEQ ID NO: 11118 - DNA, 20 bp, synthetic construct
  misc_feature 1..20: note = Description of Artificial Sequence: Synthetic oligonucleotide
  misc_feature 1..20: note = Target: SCN10A; (-) strand; PAM type: NNNNGHTT; PAM sequence: CGCTGTTT
  source 1..20: mol_type = other DNA
ctgttttggtaccagtacct

SEQ ID NO: 11119 - DNA, 20 bp, synthetic construct
  misc_feature 1..20: note = Description of Artificial Sequence: Synthetic oligonucleotide
  misc_feature 1..20: note = Target: SCN10A; (-) strand; PAM type: NNNNGHTT; PAM sequence: ATCTGTTT
  source 1..20: mol_type = other DNA
tctgttccattggtctagat

SEQ ID NO: 11120 - DNA, 20 bp, synthetic construct
  misc_feature 1..20: note = Description of Artificial Sequence: Synthetic oligonucleotide
  misc_feature 1..20: note = Target: SCN10A; (-) strand; PAM type: NNNNGHTT; PAM sequence: TCAAGTTT
  source 1..20: mol_type = other DNA
ttccccattgcttgcttttg

SEQ ID NO: 11121 - DNA, 20 bp, synthetic construct
  misc_feature 1..20: note = Description of Artificial Sequence: Synthetic oligonucleotide
  misc_feature 1..20: note = Target: SCN10A; (-) strand; PAM type: NNNNGHTT; PAM sequence: GCTTGCTT
  source 1..20: mol_type = other DNA
tagggaatcctttccccatt

SEQ ID NO: 11122 - DNA, 20 bp, synthetic construct
  misc_feature 1..20: note = Description of Artificial Sequence: Synthetic oligonucleotide
  misc_feature 1..20: note = Target: SCN10A; (-) strand; PAM type: NNNNGHTT; PAM sequence: CATTGCTT
  source 1..20: mol_type = other DNA
taaatagggaatcctttccc

SEQ ID NO: 11123 - DNA, 20 bp, synthetic construct
  misc_feature 1..20: note = Description of Artificial Sequence: Synthetic oligonucleotide
  misc_feature 1..20: note = Target: SCN10A; (-) strand; PAM type: NNNNGHTT; PAM sequence: GCCAGTTT
  source 1..20: mol_type = other DNA
caattttctgcctaaggcta

SEQ ID NO: 11124 - DNA, 20 bp, synthetic construct
  misc_feature 1..20: note = Description of Artificial Sequence: Synthetic oligonucleotide
  misc_feature 1..20: note = Target: SCN10A; (-) strand; PAM type: NNNNGHTT; PAM sequence: TCTAGTTT
  source 1..20: mol_type = other DNA
tgtaaggtataaggaaggga

SEQ ID NO: 11125 - DNA, 20 bp, synthetic construct
  misc_feature 1..20: note = Description of Artificial Sequence: Synthetic oligonucleotide
  misc_feature 1..20: note = Target: SCN10A; (-) strand; PAM type: NNNNGHTT; PAM sequence: TTATGTTT
  source 1..20: mol_type = other DNA
ggtttttatggttttaggtc

SEQ ID NO: 11126 - DNA, 20 bp, synthetic construct
  misc_feature 1..20: note = Description of Artificial Sequence: Synthetic oligonucleotide
  misc_feature 1..20: note = Target: SCN10A; (-) strand; PAM type: NNNNGHTT; PAM sequence: TATGGTTT
  source 1..20: mol_type = other DNA
aggttttcttctagggtttt

SEQ ID NO: 11127 - DNA, 20 bp, synthetic construct
  misc_feature 1..20: note = Description of Artificial Sequence: Synthetic oligonucleotide
  misc_feature 1..20: note = Target: SCN10A; (-) strand; PAM type: NNNNGHTT; PAM sequence: TAGGGTTT
  source 1..20: mol_type = other DNA
gtattgcctaggttttcttc

SEQ ID NO: 11128 - DNA, 20 bp, synthetic construct
  misc_feature 1..20: note = Description of Artificial Sequence: Synthetic oligonucleotide
  misc_feature 1..20: note = Target: SCN10A; (-) strand; PAM type: NNNNGHTT; PAM sequence: CTAGGTTT
  source 1..20: mol_type = other DNA
tatgtcctgaagggtattgc

SEQ ID NO: 11129 - DNA, 20 bp, synthetic construct
  misc_feature 1..20: note = Description of Artificial Sequence: Synthetic oligonucleotide
  misc_feature 1..20: note = Target: SCN10A; (-) strand; PAM type: NNNNGHTT; PAM sequence: CATTGCTT
  source 1..20: mol_type = other DNA
tcaattttggcttttgtcac

SEQ ID NO: 11130 - DNA, 20 bp, synthetic construct
  misc_feature 1..20: note = Description of Artificial Sequence: Synthetic oligonucleotide
  misc_feature 1..20: note = Target: SCN10A; (-) strand; PAM type: NNNNGHTT; PAM sequence: TTTGGCTT
  source 1..20: mol_type = other DNA
attggattccatttgtcaat

SEQ ID NO: 11131 - DNA, 20 bp, synthetic construct
  misc_feature 1..20: note = Description of Artificial Sequence: Synthetic oligonucleotide
  misc_feature 1..20: note = Target: SCN10A; (-) strand; PAM type: NNNNGHTT; PAM sequence: ATTGGATT
  source 1..20: mol_type = other DNA
tgcagaagctctttagttta

SEQ ID NO: 11132 - DNA, 20 bp, synthetic construct
  misc_feature 1..20: note = Description of Artificial Sequence: Synthetic oligonucleotide
  misc_feature 1..20: note = Target: SCN10A; (-) strand; PAM type: NNNNGHTT; PAM sequence: TTTAGTTT
  source 1..20: mol_type = other DNA
cttttgctgtgcagaagctc

SEQ ID NO: 11133 - DNA, 20 bp, synthetic construct
  misc_feature 1..20: note = Description of Artificial Sequence: Synthetic oligonucleotide
  misc_feature 1..20: note = Target: SCN10A; (-) strand; PAM type: NNNNGHTT; PAM sequence: GATAGTTT
  source 1..20: mol_type = other DNA
ggttacctattcactctgat

SEQ ID NO: 11134 - DNA, 20 bp, synthetic construct
  misc_feature 1..20: note = Description of Artificial Sequence: Synthetic oligonucleotide
  misc_feature 1..20: note = Target: SCN10A; (-) strand; PAM type: NNNNGHTT; PAM sequence: GATAGATT
  source 1..20: mol_type = other DNA
tattagccctttgtcagatt

SEQ ID NO: 11135 - DNA, 20 bp, synthetic construct
  misc_feature 1..20: note = Description of Artificial Sequence: Synthetic oligonucleotide
  misc_feature 1..20: note = Target: SCN10A; (-) strand; PAM type: NNNNGHTT; PAM sequence: GTCAGATT
  source 1..20: mol_type = other DNA
attctggatattagcccttt

SEQ ID NO: 11136 - DNA, 20 bp, synthetic construct
  misc_feature 1..20: note = Description of Artificial Sequence: Synthetic oligonucleotide
  misc_feature 1..20: note = Target: SCN10A; (-) strand; PAM type: NNNNGHTT; PAM sequence: TGTAGATT
  source 1..20: mol_type = other DNA
gtaaatttgtttaagttttt

SEQ ID NO: 11137 - DNA, 20 bp, synthetic construct
  misc_feature 1..20: note = Description of Artificial Sequence: Synthetic oligonucleotide
  misc_feature 1..20: note = Target: SCN10A; (-) strand; PAM type: NNNNGHTT; PAM sequence: TTAAGTTT
  source 1..20: mol_type = other DNA
gttttttcttgtaaatttgt

SEQ ID NO: 11138 - DNA, 20 bp, synthetic construct
  misc_feature 1..20: note = Description of Artificial Sequence: Synthetic oligonucleotide
  misc_feature 1..20: note = Target: SCN10A; (-) strand; PAM type: NNNNGHTT; PAM sequence: ATTTGTTT
  source 1..20: mol_type = other DNA
ggagttgttttttcttgtaa

SEQ ID NO: 11139 - DNA, 20 bp, synthetic construct
  misc_feature 1..20: note = Description of Artificial Sequence: Synthetic oligonucleotide
  misc_feature 1..20: note = Target: SCN10A; (-) strand; PAM type: NNNNGHTT; PAM sequence: AGTTGTTT
  source 1..20: mol_type = other DNA
ctttgcccactttttgatgg

SEQ ID NO: 11140 - DNA, 20 bp, synthetic construct
  misc_feature 1..20: note = Description of Artificial Sequence: Synthetic oligonucleotide
  misc_feature 1..20: note = Target: SCN10A; (-) strand; PAM type: NNNNGHTT; PAM sequence: ATATGTTT
  source 1..20: mol_type = other DNA
gtgatgatgagctttttatc

SEQ ID NO: 11141 - DNA, 20 bp, synthetic construct
  misc_feature 1..20: note = Description of Artificial Sequence: Synthetic oligonucleotide
  misc_feature 1..20: note = Target: SCN10A; (-) strand; PAM type: NNNNGHTT; PAM sequence: ATGAGCTT
  source 1..20: mol_type = other DNA
ttctctaatgaccagtgatg

SEQ ID NO: 11142 - DNA, 20 bp, synthetic construct
  misc_feature 1..20: note = Description of Artificial Sequence: Synthetic oligonucleotide
  misc_feature 1..20: note = Target: SCN10A; (-) strand; PAM type: NNNNGHTT; PAM sequence: TGTGGTTT
  source 1..20: mol_type = other DNA
ggtatgagactccatctcat

SEQ ID NO: 11143 - DNA, 20 bp, synthetic construct
  misc_feature 1..20: note = Description of Artificial Sequence: Synthetic oligonucleotide
  misc_feature 1..20: note = Target: SCN10A; (-) strand; PAM type: NNNNGHTT; PAM sequence: TGTTGTTT
  source 1..20: mol_type = other DNA
tccacatcctctccagcatc

SEQ ID NO: 11144 - DNA, 20 bp, synthetic construct
  misc_feature 1..20: note = Description of Artificial Sequence: Synthetic oligonucleotide
  misc_feature 1..20: note = Target: SCN10A; (-) strand; PAM type: NNNNGHTT; PAM sequence: TGGTGTTT
  source 1..20: mol_type = other DNA
aatggaattgctgggtcaaa

SEQ ID NO: 11145 - DNA, 20 bp, synthetic construct
  misc_feature 1..20: note = Description of Artificial Sequence: Synthetic oligonucleotide
  misc_feature 1..20: note = Target: SCN10A; (-) strand; PAM type: NNNNGHTT; PAM sequence: GCATGCTT
  source 1..20: mol_type = other DNA
tagtgccacaataaacatac

SEQ ID NO: 11146 - DNA, 20 bp, synthetic construct
  misc_feature 1..20: note = Description of Artificial Sequence: Synthetic oligonucleotide
  misc_feature 1..20: note = Target: SCN10A; (-) strand; PAM type: NNNNGHTT; PAM sequence: GGGCGTTT
  source 1..20: mol_type = other DNA
ttatccagtctatcactgat

SEQ ID NO: 11147 - DNA, 20 bp, synthetic construct
  misc_feature 1..20: note = Description of Artificial Sequence: Synthetic oligonucleotide
  misc_feature 1..20: note = Target: SCN10A; (-) strand; PAM type: NNNNGHTT; PAM sequence: TCCAGCTT
  source 1..20: mol_type = other DNA
gtttgctgagaatgatggtt

SEQ ID NO: 11148 - DNA, 20 bp, synthetic construct
  misc_feature 1..20: note = Description of Artificial Sequence: Synthetic oligonucleotide
  misc_feature 1..20: note = Target: SCN10A; (-) strand; PAM type: NNNNGHTT; PAM sequence: GATGGTTT
  source 1..20: mol_type = other DNA
tatgtcagtttgctgagaat

SEQ ID NO: 11149 - DNA, 20 bp, synthetic construct
  misc_feature 1..20: note = Description of Artificial Sequence: Synthetic oligonucleotide
  misc_feature 1..20: note = Target: SCN10A; (-) strand; PAM type: NNNNGHTT; PAM sequence: GTCAGTTT
  source 1..20: mol_type = other DNA
gtttggttttctgttcttat

SEQ ID NO: 11150 - DNA, 20 bp, synthetic construct
  misc_feature 1..20: note = Description of Artificial Sequence: Synthetic oligonucleotide
  misc_feature 1..20: note = Target: SCN10A; (-) strand; PAM type: NNNNGHTT; PAM sequence: TTTGGTTT
  source 1..20: mol_type = other DNA
atgagtgagaacatgcggtg

SEQ ID NO: 11151 - DNA, 20 bp, synthetic construct
  misc_feature 1..20: note = Description of Artificial Sequence: Synthetic oligonucleotide
  misc_feature 1..20: note = Target: SCN10A; (-) strand; PAM type: NNNNGHTT; PAM sequence: CGGTGTTT
  source 1..20: mol_type = other DNA
cacctatgagtgagaacatg

SEQ ID NO: 11152 - DNA, 20 bp, synthetic construct
  misc_feature 1..20: note = Description of Artificial Sequence: Synthetic oligonucleotide
  misc_feature 1..20: note = Target: SCN10A; (-) strand; PAM type: NNNNGHTT; PAM sequence: GGTGGTTT
  source 1..20: mol_type = other DNA
cataggtatacacatgtcat

SEQ ID NO: 11153 - DNA, 20 bp, synthetic construct
  misc_feature 1..20: note = Description of Artificial Sequence: Synthetic oligonucleotide
  misc_feature 1..20: note = Target: SCN10A; (-) strand; PAM type: NNNNGHTT; PAM sequence: GCAGGTTT
  source 1..20: mol_type = other DNA
ggggtacatgtgcagaaagt

SEQ ID NO: 11154 - DNA, 20 bp, synthetic construct
  misc_feature 1..20: note = Description of Artificial Sequence: Synthetic oligonucleotide
  misc_feature 1..20: note = Target: SCN10A; (-) strand; PAM type: NNNNGHTT; PAM sequence: ACTTGCTT
  source 1..20: mol_type = other DNA
tctaggtggatcaacacctc

SEQ ID NO: 11155 - DNA, 20 bp, synthetic construct
  misc_feature 1..20: note = Description of Artificial Sequence: Synthetic oligonucleotide
  misc_feature 1..20: note = Target: SCN10A; (-) strand; PAM type: NNNNGHTT; PAM sequence: GTAAGATT
  source 1..20: mol_type = other DNA
tgaagcagtgtgccattggt

SEQ ID NO: 11156 - DNA, 20 bp, synthetic construct
  misc_feature 1..20: note = Description of Artificial Sequence: Synthetic oligonucleotide
  misc_feature 1..20: note = Target: SCN10A; (-) strand; PAM type: NNNNGHTT; PAM sequence: TCGAGATT
  source 1..20: mol_type = other DNA
agaactcattctactggatg

SEQ ID NO: 11157 - DNA, 20 bp, synthetic construct
  misc_feature 1..20: note = Description of Artificial Sequence: Synthetic oligonucleotide
  misc_feature 1..20: note = Target: SCN10A; (-) strand; PAM type: NNNNGHTT; PAM sequence: AAAAGTTT
  source 1..20: mol_type = other DNA
aactttaaattttcttcctc

SEQ ID NO: 11158 - DNA, 20 bp, synthetic construct
  misc_feature 1..20: note = Description of Artificial Sequence: Synthetic oligonucleotide
  misc_feature 1..20: note = Target: SCN10A; (-) strand; PAM type: NNNNGHTT; PAM sequence: ACAGGCTT
  source 1..20: mol_type = other DNA
atcctcaaatcaatatttca

SEQ ID NO: 11159 - DNA, 20 bp, synthetic construct
  misc_feature 1..20: note = Description of Artificial Sequence: Synthetic oligonucleotide
  misc_feature 1..20: note = Target: SCN10A; (-) strand; PAM type: NNNNGHTT; PAM sequence: AAATGATT
  source 1..20: mol_type = other DNA
aatattgtaaagactcccaa

SEQ ID NO: 11160 - DNA, 20 bp, synthetic construct
  misc_feature 1..20: note = Description of Artificial Sequence: Synthetic oligonucleotide
  misc_feature 1..20: note = Target: SCN10A; (-) strand; PAM type: NNNNGHTT; PAM sequence: CTCAGATT
  source 1..20: mol_type = other DNA
aatcagtggggagacatgtt

SEQ ID NO: 11161 - DNA, 20 bp, synthetic construct
  misc_feature 1..20: note = Description of Artificial Sequence: Synthetic oligonucleotide
  misc_feature 1..20: note = Target: SCN10A; (-) strand; PAM type: NNNNGHTT; PAM sequence: TAAAGTTT
  source 1..20: mol_type = other DNA
aaattataataagtattgtg

SEQ ID NO: 11162 - DNA, 20 bp, synthetic construct
  misc_feature 1..20: note = Description of Artificial Sequence: Synthetic oligonucleotide
  misc_feature 1..20: note = Target: SCN10A; (-) strand; PAM type: NNNNGHTT; PAM sequence: ATAAGATT
  source 1..20: mol_type = other DNA
aaaatgtcaagtatctagga

SEQ ID NO: 11163 - DNA, 20 bp, synthetic construct
  misc_feature 1..20: note = Description of Artificial Sequence: Synthetic oligonucleotide
  misc_feature 1..20: note = Target: SCN10A; (-) strand; PAM type: NNNNGHTT; PAM sequence: AATAGTTT
  source 1..20: mol_type = other DNA
gacactagcaacaaacagaa

SEQ ID NO: 11164 - DNA, 20 bp, synthetic construct
  misc_feature 1..20: note = Description of Artificial Sequence: Synthetic oligonucleotide
  misc_feature 1..20: note = Target: SCN10A; (-) strand; PAM type: NNNNGHTT; PAM sequence: ATAAGATT
  source 1..20: mol_type = other DNA
gaagatgtaatttacagata

SEQ ID NO: 11165 - DNA, 20 bp, synthetic construct
  misc_feature 1..20: note = Description of Artificial Sequence: Synthetic oligonucleotide
  misc_feature 1..20: note = Target: SCN10A; (-) strand; PAM type: NNNNGHTT; PAM sequence: GAAAGCTT
  source 1..20: mol_type = other DNA
catacttaattgtgaacatg

SEQ ID NO: 11166 - DNA, 20 bp, synthetic construct
  misc_feature 1..20: note = Description of Artificial Sequence: Synthetic oligonucleotide
  misc_feature 1..20: note = Target: SCN10A; (-) strand; PAM type: NNNNGHTT; PAM sequence: CATTGTTT
  source 1..20: mol_type = other DNA
tcactctgataaagggtatt

SEQ ID NO: 11167 - DNA, 20 bp, synthetic construct
  misc_feature 1..20: note = Description of Artificial Sequence: Synthetic oligonucleotide
  misc_feature 1..20: note = Target: SCN10A; (-) strand; PAM type: NNNNGHTT; PAM sequence: AGGGGATT
  source 1..20: mol_type = other DNA
aaagtataataattttaaaa

SEQ ID NO: 11168 - DNA, 20 bp, synthetic construct
  misc_feature 1..20: note = Description of Artificial Sequence: Synthetic oligonucleotide
  misc_feature 1..20: note = Target: SCN10A; (-) strand; PAM type: NNNNGHTT; PAM sequence: TAAAGTTT
  source 1..20: mol_type = other DNA
ttgatgctaaaatcatttga

SEQ ID NO: 11169 - DNA, 20 bp, synthetic construct
  misc_feature 1..20: note = Description of Artificial Sequence: Synthetic oligonucleotide
  misc_feature 1..20: note = Target: SCN10A; (-) strand; PAM type: NNNNGHTT; PAM sequence: AATAGATT
  source 1..20: mol_type = other DNA
aaatacgttatatttttatt

SEQ ID NO: 11170 - DNA, 20 bp, synthetic construct
  misc_feature 1..20: note = Description of Artificial Sequence: Synthetic oligonucleotide
  misc_feature 1..20: note = Target: SCN10A; (-) strand; PAM type: NNNNGHTT; PAM sequence: CAGAGCTT
  source 1..20: mol_type = other DNA
ttataataacaggtgctttg

SEQ ID NO: 11171 - DNA, 20 bp, synthetic construct
  misc_feature 1..20: note = Description of Artificial Sequence: Synthetic oligonucleotide
  misc_feature 1..20: note = Target: SCN10A; (-) strand; PAM type: NNNNGHTT; PAM sequence: AGGTGCTT
  source 1..20: mol_type = other DNA
atacctttggttataataac

SEQ ID NO: 11172 - DNA, 20 bp, synthetic construct
  misc_feature 1..20: note = Description of Artificial Sequence: Synthetic oligonucleotide
  misc_feature 1..20: note = Target: SCN10A; (-) strand; PAM type: NNNNGHTT; PAM sequence: TCCAGCTT
  source 1..20: mol_type = other DNA
tctgggagggatgcttccac

SEQ ID NO: 11173 - DNA, 20 bp, synthetic construct
  misc_feature 1..20: note = Description of Artificial Sequence: Synthetic oligonucleotide
  misc_feature 1..20: note = Target: SCN10A; (-) strand; PAM type: NNNNGHTT; PAM sequence: GGATGCTT
  source 1..20: mol_type = other DNA
catatccacacatctgggag

SEQ ID NO: 11174 - DNA, 20 bp, synthetic construct
  misc_feature 1..20: note = Description of Artificial Sequence: Synthetic oligonucleotide
  misc_feature 1..20: note = Target: SCN10A; (-) strand; PAM type: NNNNGHTT; PAM sequence: GGGAGTTT
  source 1..20: mol_type = other DNA
cccctatagtttcagaatct

SEQ ID NO: 11175 - DNA, 20 bp, synthetic construct
  misc_feature 1..20: note = Description of Artificial Sequence: Synthetic oligonucleotide
  misc_feature 1..20: note = Target: SCN10A; (-) strand; PAM type: NNNNGHTT; PAM sequence: TATAGTTT
  source 1..20: mol_type = other DNA
aggttagtgggtgaaacccc

SEQ ID NO: 11176 - DNA, 20 bp, synthetic construct
  misc_feature 1..20: note = Description of Artificial Sequence: Synthetic oligonucleotide
  misc_feature 1..20: note = Target: SCN10A; (-) strand; PAM type: NNNNGHTT; PAM sequence: TCATGCTT
  source 1..20: mol_type = other DNA
aaatgaagctgtttaagtta

SEQ ID NO: 11177 - DNA, 20 bp, synthetic construct
  misc_feature 1..20: note = Description of Artificial Sequence: Synthetic oligonucleotide
  misc_feature 1..20: note = Target: SCN10A; (-) strand; PAM type: NNNNGHTT; PAM sequence: AGCTGTTT
  source 1..20: mol_type = other DNA
agaaaataactcataaatga

SEQ ID NO: 11178 - DNA, 20 bp, synthetic construct
  misc_feature 1..20: note = Description of Artificial Sequence: Synthetic oligonucleotide
  misc_feature 1..20: note = Target: SCN10A; (-) strand; PAM type: NNNNGHTT; PAM sequence: GTATGCTT
  source 1..20: mol_type = other DNA
aaatgtatgccttagagaag

SEQ ID NO: 11179 - DNA, 20 bp, synthetic construct
  misc_feature 1..20: note = Description of Artificial Sequence: Synthetic oligonucleotide
  misc_feature 1..20: note = Target: SCN10A; (-) strand; PAM type: NNNNGHTT; PAM sequence: GGGAGATT
  source 1..20: mol_type = other DNA
gctgcatattgcaatttttg

SEQ ID NO: 11180 - DNA, 20 bp, synthetic construct
  misc_feature 1..20: note = Description of Artificial Sequence: Synthetic oligonucleotide
  misc_feature 1..20: note = Target: SCN10A; (-) strand; PAM type: NNNNGHTT; PAM sequence: TACAGATT
  source 1..20: mol_type = other DNA
gattttcagtttcaaagaga

SEQ ID NO: 11181 - DNA, 20 bp, synthetic construct
  misc_feature 1..20: note = Description of Artificial Sequence: Synthetic oligonucleotide
  misc_feature 1..20: note = Target: SCN10A; (-) strand; PAM type: NNNNGHTT; PAM sequence: TTCAGTTT
  source 1..20: mol_type = other DNA
tttcataaacatacatgatt

SEQ ID NO: 11182 - DNA, 20 bp, synthetic construct
  misc_feature 1..20: note = Description of Artificial Sequence: Synthetic oligonucleotide
  misc_feature 1..20: note = Target: SCN10A; (-) strand; PAM type: NNNNGHTT; PAM sequence: ACATGATT
  source 1..20: mol_type = other DNA
gagatttgtttcataaacat

SEQ ID NO: 11183 - DNA, 20 bp, synthetic construct
  misc_feature 1..20: note = Description of Artificial Sequence: Synthetic oligonucleotide
  misc_feature 1..20: note = Target: SCN10A; (-) strand; PAM type: NNNNGHTT; PAM sequence: ATTTGTTT
  source 1..20: mol_type = other DNA
caggtctctccttctgtgag

SEQ ID NO: 11184 - DNA, 20 bp, synthetic construct
  misc_feature 1..20: note = Description of Artificial Sequence: Synthetic oligonucleotide
  misc_feature 1..20: note = Target: SCN10A; (-) strand; PAM type: NNNNGHTT; PAM sequence: GTGAGATT
  source 1..20: mol_type = other DNA
ataaccaggtctctccttct

SEQ ID NO: 11185 - DNA, 20 bp, synthetic construct
  misc_feature 1..20: note = Description of Artificial Sequence: Synthetic oligonucleotide
  misc_feature 1..20: note = Target: SCN10A; (-) strand; PAM type: NNNNGHTT; PAM sequence: TTTTGCTT
  source 1..20: mol_type = other DNA
atcattattgtaccatctct

SEQ ID NO: 11186 - DNA, 20 bp, synthetic construct
  misc_feature 1..20: note = Description of Artificial Sequence: Synthetic oligonucleotide
  misc_feature 1..20: note = Target: SCN10A; (-) strand; PAM type: NNNNGHTT; PAM sequence: AGTAGATT
  source 1..20: mol_type = other DNA
cttccagagaaaattgagtg

SEQ ID NO: 11187 - DNA, 20 bp, synthetic construct
  misc_feature 1..20: note = Description of Artificial Sequence: Synthetic oligonucleotide
  misc_feature 1..20: note = Target: SCN10A; (-) strand; PAM type: NNNNGHTT; PAM sequence: TTCAGTTT
  source 1..20: mol_type = other DNA
aacacaggcctttcaggtgg

SEQ ID NO: 11188 - DNA, 20 bp, synthetic construct
  misc_feature 1..20: note = Description of Artificial Sequence: Synthetic oligonucleotide
  misc_feature 1..20: note = Target: SCN10A; (-) strand; PAM type: NNNNGHTT; PAM sequence: CTCAGCTT
  source 1..20: mol_type = other DNA
catcacagagacttggtgat

SEQ ID NO: 11189 - DNA, 20 bp, synthetic construct
  misc_feature 1..20: note = Description of Artificial Sequence: Synthetic oligonucleotide
  misc_feature 1..20: note = Target: SCN10A; (-) strand; PAM type: NNNNGHTT; PAM sequence: CTAAGATT
  source 1..20: mol_type = other DNA
gatcataaagctaatattgg

SEQ ID NO: 11190 - DNA, 20 bp, synthetic construct
  misc_feature 1..20: note = Description of Artificial Sequence: Synthetic oligonucleotide
  misc_feature 1..20: note = Target: SCN10A; (-) strand; PAM type: NNNNGHTT; PAM sequence: CCTAGCTT
  source 1..20: mol_type = other DNA
aacatggacaaagtactcag

SEQ ID NO: 11191 - DNA, 20 bp, synthetic construct
  misc_feature 1..20: note = Description of Artificial Sequence: Synthetic oligonucleotide
  misc_feature 1..20: note = Target: SCN10A; (-) strand; PAM type: NNNNGHTT; PAM sequence: CTCAGCTT
  source 1..20: mol_type = other DNA
tattttttgtcagcctgttt

SEQ ID NO: 11192 - DNA, 20 bp, synthetic construct
  misc_feature 1..20: note = Description of Artificial Sequence: Synthetic oligonucleotide
  misc_feature 1..20: note = Target: SCN10A; (-) strand; PAM type: NNNNGHTT; PAM sequence: GCCTGTTT
  source 1..20: mol_type = other DNA
ttaacttttattttttgtca

SEQ ID NO: 11193 - DNA, 20 bp, synthetic construct
  misc_feature 1..20: note = Description of Artificial Sequence: Synthetic oligonucleotide
  misc_feature 1..20: note = Target: SCN10A; (-) strand; PAM type: NNNNGHTT; PAM sequence: CAGAGTTT
  source 1..20: mol_type = other DNA
ctgtttccttctatcttgct

SEQ ID NO: 11194 - DNA, 20 bp, synthetic construct
  misc_feature 1..20: note = Description of Artificial Sequence: Synthetic oligonucleotide
  misc_feature 1..20: note = Target: SCN10A; (-) strand; PAM type: NNNNGHTT; PAM sequence: GTCTGTTT
  source 1..20: mol_type = other DNA
aggacattttggaaaaggga

SEQ ID NO: 11195 - DNA, 20 bp, synthetic construct
  misc_feature 1..20: note = Description of Artificial Sequence: Synthetic oligonucleotide
  misc_feature 1..20: note = Target: SCN10A; (-) strand; PAM type: NNNNGHTT; PAM sequence: GAAGGCTT
  source 1..20: mol_type = other DNA
gccattttgtatactgaaat

SEQ ID NO: 11196 - DNA, 20 bp, synthetic construct
  misc_feature 1..20: note = Description of Artificial Sequence: Synthetic oligonucleotide
  misc_feature 1..20: note = Target: SCN10A; (-) strand; PAM type: NNNNGHTT; PAM sequence: CCAAGTTT
  source 1..20: mol_type = other DNA
ttgtacctcttcacttatct

SEQ ID NO: 11197 - DNA, 20 bp, synthetic construct
  misc_feature 1..20: note = Description of Artificial Sequence: Synthetic oligonucleotide
  misc_feature 1..20: note = Target: SCN10A; (-) strand; PAM type: NNNNGHTT; PAM sequence: GAAAGTTT
  source 1..20: mol_type = other DNA
ctgatgaaactaattcccat

SEQ ID NO: 11198 - DNA, 20 bp, synthetic construct
  misc_feature 1..20: note = Description of Artificial Sequence: Synthetic oligonucleotide
  misc_feature 1..20: note = Target: SCN10A; (-) strand; PAM type: NNNNGHTT; PAM sequence: TGGGGTTT
  source 1..20: mol_type = other DNA
cactccagcctaatcctact

SEQ ID NO: 11199 - DNA, 20 bp, synthetic construct
  misc_feature 1..20: note = Description of Artificial Sequence: Synthetic oligonucleotide
  misc_feature 1..20: note = Target: SCN10A; (-) strand; PAM type: NNNNGHTT; PAM sequence: TTTAGATT
  source 1..20: mol_type = other DNA
ccaagtgggaacaatttacc

SEQ ID NO: 11200 - DNA, 20 bp, synthetic construct
  misc_feature 1..20: note = Description of Artificial Sequence: Synthetic oligonucleotide
  misc_feature 1..20: note = Target: SCN10A; (-) strand; PAM type: NNNNGHTT; PAM sequence: TCAAGTTT
  source 1..20: mol_type = other DNA
tctgtaggtcaagtttatct

SEQ ID NO: 11201 - DNA, 20 bp, synthetic construct
  misc_feature 1..20: note = Description of Artificial Sequence: Synthetic oligonucleotide
  misc_feature 1..20: note = Target: SCN10A; (-) strand; PAM type: NNNNGHTT; PAM sequence: TCAAGTTT
  source 1..20: mol_type = other DNA
tgttgtactctctctgtagg

SEQ ID NO: 11202 - DNA, 20 bp, synthetic construct
  misc_feature 1..20: note = Description of Artificial Sequence: Synthetic oligonucleotide
  misc_feature 1..20: note = Target: SCN10A; (-) strand; PAM type: NNNNGHTT; PAM sequence: TGTGGTTT
  source 1..20: mol_type = other DNA
attgtaagtcagcaggaaaa

SEQ ID NO: 11203 - DNA, 20 bp, synthetic construct
  misc_feature 1..20: note = Description of Artificial Sequence: Synthetic oligonucleotide
  misc_feature 1..20: note = Target: SCN10A; (-) strand; PAM type: NNNNGHTT; PAM sequence: CTTGGATT
  source 1..20: mol_type = other DNA
gacacgattttagtttaatc

SEQ ID NO: 11204 - DNA, 20 bp, synthetic construct
  misc_feature 1..20: note = Description of Artificial Sequence: Synthetic oligonucleotide
  misc_feature 1..20: note = Target: SCN10A; (-) strand; PAM type: NNNNGHTT; PAM sequence: TTTAGTTT
  source 1..20: mol_type = other DNA
tgtagaattggagacacgat

SEQ ID NO: 11205 - DNA, 20 bp, synthetic construct
  misc_feature 1..20: note = Description of Artificial Sequence: Synthetic oligonucleotide
  misc_feature 1..20: note = Target: SCN10A; (-) strand; PAM type: NNNNGHTT; PAM sequence: ACACGATT
  source 1..20: mol_type = other DNA
aaatatttgtagaattggag

SEQ ID NO: 11206 - DNA, 20 bp, synthetic construct
  misc_feature 1..20: note = Description of Artificial Sequence: Synthetic oligonucleotide
  misc_feature 1..20: note = Target: SCN10A; (-) strand; PAM type: NNNNGHTT; PAM sequence: GAATGTTT
  source 1..20: mol_type = other DNA
attctaatcacatttgctat

SEQ ID NO: 11207 - DNA, 20 bp, synthetic construct
  misc_feature 1..20: note = Description of Artificial Sequence: Synthetic oligonucleotide
  misc_feature 1..20: note = Target: SCN10A; (-) strand; PAM type: NNNNGHTT; PAM sequence: AATTGCTT
  source 1..20: mol_type = other DNA
ttgagatttgatgagtaaat

SEQ ID NO: 11208 - DNA, 20 bp, synthetic construct
  misc_feature 1..20: note = Description of Artificial Sequence: Synthetic oligonucleotide
  misc_feature 1..20: note = Target: SCN10A; (-) strand; PAM type: NNNNGHTT; PAM sequence: TTGAGATT
  source 1..20: mol_type = other DNA
cagtgaatattctcttcatc

SEQ ID NO: 11209 - DNA, 20 bp, synthetic construct
  misc_feature 1..20: note = Description of Artificial Sequence: Synthetic oligonucleotide
  misc_feature 1..20: note = Target: SCN10A; (-) strand; PAM type: NNNNGHTT; PAM sequence: TATGGATT
  source 1..20: mol_type = other DNA
caaacatacaaactcctctt

SEQ ID NO: 11210 - DNA, 20 bp, synthetic construct
  misc_feature 1..20: note = Description of Artificial Sequence: Synthetic oligonucleotide
  misc_feature 1..20: note = Target: SCN10A; (-) strand; PAM type: NNNNGHTT; PAM sequence: TGTTGCTT
  source 1..20: mol_type = other DNA
gtcgtctctgcttgggtagt

SEQ ID NO: 11211 - DNA, 20 bp, synthetic construct
  misc_feature 1..20: note = Description of Artificial Sequence: Synthetic oligonucleotide
  misc_feature 1..20: note = Target: SCN10A; (-) strand; PAM type: NNNNGHTT; PAM sequence: CTCTGCTT
  source 1..20: mol_type = other DNA
ttattctctcaatgtgtcgt

SEQ ID NO: 11212 - DNA, 20 bp, synthetic construct
  misc_feature 1..20: note = Description of Artificial Sequence: Synthetic oligonucleotide
  misc_feature 1..20: note = Target: SCN10A; (-) strand; PAM type: NNNNGHTT; PAM sequence: TAGAGATT
  source 1..20: mol_type = other DNA
cagttcaaaagcctctgaag

SEQ ID NO: 11213 - DNA, 20 bp, synthetic construct
  misc_feature 1..20: note = Description of Artificial Sequence: Synthetic oligonucleotide
  misc_feature 1..20: note = Target: SCN10A; (-) strand; PAM type: NNNNGHTT; PAM sequence: TTCAGATT
  source 1..20: mol_type = other DNA
tctgagctgaatcttgaatt

SEQ ID NO: 11214 - DNA, 20 bp, synthetic construct
  misc_feature 1..20: note = Description of Artificial Sequence: Synthetic oligonucleotide
  misc_feature 1..20: note = Target: SCN10A; (-) strand; PAM type: NNNNGHTT; PAM sequence: TTACGTTT
  source 1..20: mol_type = other DNA
ttctggctggccagcaagaa

SEQ ID NO: 11215 - DNA, 20 bp, synthetic construct
  misc_feature 1..20: note = Description of Artificial Sequence: Synthetic oligonucleotide
  misc_feature 1..20: note = Target: SCN10A; (-) strand; PAM type: NNNNGHTT; PAM sequence: TTACGTTT
  source 1..20: mol_type = other DNA
cacagcttgatgaagttgca

SEQ ID NO: 11216 - DNA, 20 bp, synthetic construct
  misc_feature 1..20: note = Description of Artificial Sequence: Synthetic oligonucleotide
  misc_feature 1..20: note = Target: SCN10A; (-) strand; PAM type: NNNNGHTT; PAM sequence: CACAGCTT
  source 1..20: mol_type = other DNA
gcacactcaacatgaagctg

SEQ ID NO: 11217 - DNA, 20 bp, synthetic construct
  misc_feature 1..20: note = Description of Artificial Sequence: Synthetic oligonucleotide
  misc_feature 1..20: note = Target: SCN10A; (-) strand; PAM type: NNNNGHTT; PAM sequence: GTTGGATT
  source 1..20: mol_type = other DNA
ccctaactctgaggcagatt

SEQ ID NO: 11218 - DNA, 20 bp, synthetic construct
  misc_feature 1..20: note = Description of Artificial Sequence: Synthetic oligonucleotide
  misc_feature 1..20: note = Target: SCN10A; (-) strand; PAM type: NNNNGHTT; PAM sequence: GGCAGATT
  source 1..20: mol_type = other DNA
accctgctccctaactctga

SEQ ID NO: 11219 - DNA, 20 bp, synthetic construct
  misc_feature 1..20: note = Description of Artificial Sequence: Synthetic oligonucleotide
  misc_feature 1..20: note = Target: SCN10A; (-) strand; PAM type: NNNNGHTT; PAM sequence: GAAGGCTT
  source 1..20: mol_type = other DNA
tggtaaccagccttttctta

SEQ ID NO: 11220 - DNA, 20 bp, synthetic construct
  misc_feature 1..20: note = Description of Artificial Sequence: Synthetic oligonucleotide
  misc_feature 1..20: note = Target: SCN10A; (-) strand; PAM type: NNNNGHTT; PAM sequence: CCTGGCTT
  source 1..20: mol_type = other DNA
ttctttatgacaaatttagc

SEQ ID NO: 11221 - DNA, 20 bp, synthetic construct
  misc_feature 1..20: note = Description of Artificial Sequence: Synthetic oligonucleotide
  misc_feature 1..20: note = Target: SCN10A; (-) strand; PAM type: NNNNGHTT; PAM sequence: GAAGGATT
  source 1..20: mol_type = other DNA
cctaagatccttggtcatcg

SEQ ID NO: 11222 - DNA, 20 bp, synthetic construct
  misc_feature 1..20: note = Description of Artificial Sequence: Synthetic oligonucleotide
  misc_feature 1..20: note = Target: SCN10A; (-) strand; PAM type: NNNNGHTT; PAM sequence: TTTGGTTT
  source 1..20: mol_type = other DNA
gtagaaaaaagatactttgg

SEQ ID NO: 11223 - DNA, 20 bp, synthetic construct
  misc_feature 1..20: note = Description of Artificial Sequence: Synthetic oligonucleotide
  misc_feature 1..20: note = Target: SCN10A; (-) strand; PAM type: NNNNGHTT; PAM sequence: TTTGGTTT
  source 1..20: mol_type = other DNA
aactagtagaaaaaagatac

SEQ ID NO: 11224 - DNA, 20 bp, synthetic construct
  misc_feature 1..20: note = Description of Artificial Sequence: Synthetic oligonucleotide
  misc_feature 1..20: note = Target: SCN10A; (-) strand; PAM type: NNNNGHTT; PAM sequence: AGGGGATT
  source 1..20: mol_type = other DNA
taatgtcagaagctgctttc

SEQ ID NO: 11225 - DNA, 20 bp, synthetic construct
  misc_feature 1..20: note = Description of Artificial Sequence: Synthetic oligonucleotide
  misc_feature 1..20: note = Target: SCN10A; (-) strand; PAM type: NNNNGHTT; PAM sequence: AGCTGCTT
  source 1..20: mol_type = other DNA
ttgttttaggtaatgtcaga

SEQ ID NO: 11226 - DNA, 20 bp, synthetic construct
  misc_feature 1..20: note = Description of Artificial Sequence: Synthetic oligonucleotide
  misc_feature 1..20: note = Target: SCN10A; (-) strand; PAM type: NNNNGHTT; PAM sequence: AATTGTTT
  source 1..20: mol_type = other DNA
ggtcaaatgtctactatatg

SEQ ID NO: 11227 - DNA, 20 bp, synthetic construct
  misc_feature 1..20: note = Description of Artificial Sequence: Synthetic oligonucleotide
  misc_feature 1..20: note = Target: SCN10A; (-) strand; PAM type: NNNNGHTT; PAM sequence: TAATGATT
  source 1..20: mol_type = other DNA
gttcatgccatacaagactg

SEQ ID NO: 11228 - DNA, 20 bp, synthetic construct
  misc_feature 1..20: note = Description of Artificial Sequence: Synthetic oligonucleotide
  misc_feature 1..20: note = Target: SCN10A; (-) strand; PAM type: NNNNGHTT; PAM sequence: GCAGGTTT
  source 1..20: mol_type = other DNA
aaattactcaaaaactacta

SEQ ID NO: 11229 - DNA, 20 bp, synthetic construct
  misc_feature 1..20: note = Description of Artificial Sequence: Synthetic oligonucleotide
  misc_feature 1..20: note = Target: SCN10A; (-) strand; PAM type: NNNNGHTT; PAM sequence: GGCTGCTT
  source 1..20: mol_type = other DNA
ccatagccatgctgagaagt

SEQ ID NO: 11230 - DNA, 20 bp, synthetic construct
  misc_feature 1..20: note = Description of Artificial Sequence: Synthetic oligonucleotide
  misc_feature 1..20: note = Target: SCN10A; (-) strand; PAM type: NNNNGHTT; PAM sequence: GTCCGCTT
  source 1..20: mol_type = other DNA
cattctcaccacggtgtgtg

SEQ ID NO: 11231 - DNA, 20 bp, synthetic construct
  misc_feature 1..20: note = Description of Artificial Sequence: Synthetic oligonucleotide
  misc_feature 1..20: note = Target: SCN10A; (-) strand; PAM type: NNNNGHTT; PAM sequence: GGAGGTTT
  source 1..20: mol_type = other DNA
aaaacatcctctttatgagg

SEQ ID NO: 11232 - DNA, 20 bp, synthetic construct
  misc_feature 1..20: note = Description of Artificial Sequence: Synthetic oligonucleotide
  misc_feature 1..20: note = Target: SCN10A; (-) strand; PAM type: NNNNGHTT; PAM sequence: TTTGGATT
  source 1..20: mol_type = other DNA
tttatgcaacacacaggtgg

SEQ ID NO: 11233 - DNA, 20 bp, synthetic construct
  misc_feature 1..20: note = Description of Artificial Sequence: Synthetic oligonucleotide
  misc_feature 1..20: note = Target: SCN10A; (-) strand; PAM type: NNNNGHTT; PAM sequence: GGTGGTTT
  source 1..20: mol_type = other DNA
aagtgtttatgcaacacaca

SEQ ID NO: 11234 - DNA, 20 bp, synthetic construct
  misc_feature 1..20: note = Description of Artificial Sequence: Synthetic oligonucleotide
  misc_feature 1..20: note = Target: SCN10A; (-) strand; PAM type: NNNNGHTT; PAM sequence: AAGTGTTT
  source 1..20: mol_type = other DNA
gcagtcccaagacacagaag

SEQ ID NO: 11235 - DNA, 20 bp, synthetic construct
  misc_feature 1..20: note = Description of Artificial Sequence: Synthetic oligonucleotide
  misc_feature 1..20: note = Target: SCN10A; (-) strand; PAM type: NNNNGHTT; PAM sequence: AATGGCTT
  source 1..20: mol_type = other DNA
tgaggtcattagattgaaaa

SEQ ID NO: 11236 - DNA, 20 bp, synthetic construct
  misc_feature 1..20: note = Description of Artificial Sequence: Synthetic oligonucleotide
  misc_feature 1..20: note = Target: SCN10A; (-) strand; PAM type: NNNNGHTT; PAM sequence: ATTAGATT
  source 1..20: mol_type = other DNA
cccaaaagtacaatgaggtc

SEQ ID NO: 11237 - DNA, 20 bp, synthetic construct
  misc_feature 1..20: note = Description of Artificial Sequence: Synthetic oligonucleotide
  misc_feature 1..20: note = Target: SCN10A; (-) strand; PAM type: NNNNGHTT; PAM sequence: GCACGATT
  source 1..20: mol_type = other DNA
tctgtccactcatatccttt

SEQ ID NO: 11238 - DNA, 20 bp, synthetic construct
  misc_feature 1..20: note = Description of Artificial Sequence: Synthetic oligonucleotide
  misc_feature 1..20: note = Target: SCN10A; (-) strand; PAM type: NNNNGHTT; PAM sequence: CCCGGTTT
  source 1..20: mol_type = other DNA
gaacaaagggaggaccattt

SEQ ID NO: 11239 - DNA, 20 bp, synthetic construct
  misc_feature 1..20: note = Description of Artificial Sequence: Synthetic oligonucleotide
  misc_feature 1..20: note = Target: SCN10A; (-) strand; PAM type: NNNNGHTT; PAM sequence: TTTTGTTT
  source 1..20: mol_type = other DNA
gaggtccactttctgttttg

SEQ ID NO: 11240 - DNA, 20 bp, synthetic construct
  misc_feature 1..20: note = Description of Artificial Sequence: Synthetic oligonucleotide
  misc_feature 1..20: note = Target: SCN10A; (-) strand; PAM type: NNNNGHTT; PAM sequence: TTTTGTTT
  source 1..20: mol_type = other DNA
cattggaggtccactttctg

SEQ ID NO: 11241 - DNA, 20 bp, synthetic construct
  misc_feature 1..20: note = Description of Artificial Sequence: Synthetic oligonucleotide
  misc_feature 1..20: note = Target: SCN10A; (-) strand; PAM type: NNNNGHTT; PAM sequence: TTCTGTTT
  source 1..20: mol_type = other DNA
tttctcattggaggtccact

SEQ ID NO: 11242 - DNA, 20 bp, synthetic construct
  misc_feature 1..20: note = Description of Artificial Sequence: Synthetic oligonucleotide
  misc_feature 1..20: note = Target: SCN10A; (-) strand; PAM type: NNNNGHTT; PAM sequence: TCTTGTTT
  source 1..20: mol_type = other DNA
aaacatggttgtataaggaa

SEQ ID NO: 11243 - DNA, 20 bp, synthetic construct
  misc_feature 1..20: note = Description of Artificial Sequence: Synthetic oligonucleotide
  misc_feature 1..20: note = Target: SCN10A; (-) strand; PAM type: NNNNGHTT; PAM sequence: TCATGTTT
  source 1..20: mol_type = other DNA
taagcctgagataatgcctc

SEQ ID NO: 11244 - DNA, 20 bp, synthetic construct
  misc_feature 1..20: note = Description of Artificial Sequence: Synthetic oligonucleotide
  misc_feature 1..20: note = Target: SCN10A; (-) strand; PAM type: NNNNGHTT; PAM sequence: TATGGCTT
  source 1..20: mol_type = other DNA
tcttgctgagagggtgagga

SEQ ID NO: 11245 - DNA, 20 bp, synthetic construct
  misc_feature 1..20: note = Description of Artificial Sequence: Synthetic oligonucleotide
  misc_feature 1..20: note = Target: SCN10A; (-) strand; PAM type: NNNNGHTT; PAM sequence: TGAGGATT
  source 1..20: mol_type = other DNA
cataacacctcttaccagcc

SEQ ID NO: 11246 - DNA, 20 bp, synthetic construct
  misc_feature 1..20: note = Description of Artificial Sequence: Synthetic oligonucleotide
  misc_feature 1..20: note = Target: SCN10A; (-) strand; PAM type: NNNNGHTT; PAM sequence: AGAGGATT
  source 1..20: mol_type = other DNA
cctcagagggagaaaccagg

SEQ ID NO: 11247 - DNA, 20 bp, synthetic construct
  misc_feature 1..20: note = Description of Artificial Sequence: Synthetic oligonucleotide
  misc_feature 1..20: note = Target: SCN10A; (-) strand; PAM type: NNNNGHTT; PAM sequence: GCATGTTT
  source 1..20: mol_type = other DNA
cgagccaaaaaatggtgaat

SEQ ID NO: 11248 - DNA, 20 bp, synthetic construct
  misc_feature 1..20: note = Description of Artificial Sequence: Synthetic oligonucleotide
  misc_feature 1..20: note = Target: SCN10A; (-) strand; PAM type: NNNNGHTT; PAM sequence: AAGAGCTT
  source 1..20: mol_type = other DNA
tgagaatcagtagtttaaac

SEQ ID NO: 11249 - DNA, 20 bp, synthetic construct
  misc_feature 1..20: note = Description of Artificial Sequence: Synthetic oligonucleotide
  misc_feature 1..20: note = Target: SCN10A; (-) strand; PAM type: NNNNGHTT; PAM sequence: AGTAGTTT
  source 1..20: mol_type = other DNA
aatcaaaaagtttgagaatc

SEQ ID NO: 11250 - DNA, 20 bp, synthetic construct
  misc_feature 1..20: note = Description of Artificial Sequence: Synthetic oligonucleotide
  misc_feature 1..20: note = Target: SCN10A; (-) strand; PAM type: NNNNGHTT; PAM sequence: AAAAGTTT
  source 1..20: mol_type = other DNA
agtaataatccctgaaatca

SEQ ID NO: 11251 - DNA, 20 bp, synthetic construct
  misc_feature 1..20: note = Description of Artificial Sequence: Synthetic oligonucleotide
  misc_feature 1..20: note = Target: SCN10A; (-) strand; PAM type: NNNNGHTT; PAM sequence: TAAGGTTT
  source 1..20: mol_type = other DNA
aagttatttggggtcctcaa

SEQ ID NO: 11252 - DNA, 20 bp, synthetic construct
  misc_feature 1..20: note = Description of Artificial Sequence: Synthetic oligonucleotide
  misc_feature 1..20: note = Target: SCN10A; (-) strand; PAM type: NNNNGHTT; PAM sequence: CTGAGTTT
  source 1..20: mol_type = other DNA
ttcccgtgttttaaaatttc

SEQ ID NO: 11253 - DNA, 20 bp, synthetic construct
  misc_feature 1..20: note = Description of Artificial Sequence: Synthetic oligonucleotide
  misc_feature 1..20: note = Target: SCN10A; (-) strand; PAM type: NNNNGHTT; PAM sequence: CCGTGTTT
  source 1..20: mol_type = other DNA
gaatgtgtgcctgtatattc

SEQ ID NO: 11254 - DNA, 20 bp, synthetic construct
  misc_feature 1..20: note = Description of Artificial Sequence: Synthetic oligonucleotide
  misc_feature 1..20: note = Target: SCN10A; (-) strand; PAM type: NNNNGHTT; PAM sequence: GTGGGTTT
  source 1..20: mol_type = other DNA
gtgtccccaaaactgtttta

SEQ ID NO: 11255 - DNA, 20 bp, synthetic construct
  misc_feature 1..20: note = Description of Artificial Sequence: Synthetic oligonucleotide
  misc_feature 1..20: note = Target: SCN10A; (-) strand; PAM type: NNNNGHTT; PAM sequence: AACTGTTT
  source 1..20: mol_type = other DNA
ggaacccctggtgtccccaa

SEQ ID NO: 11256 - DNA, 20 bp, synthetic construct
  misc_feature 1..20: note = Description of Artificial Sequence: Synthetic oligonucleotide
  misc_feature 1..20: note = Target: SCN10A; (-) strand; PAM type: NNNNGHTT; PAM sequence: CAGAGCTT
  source 1..20: mol_type = other DNA
tcaaaagcagataactgctg

SEQ ID NO: 11257 - DNA, 20 bp, synthetic construct
  misc_feature 1..20: note = Description of Artificial Sequence: Synthetic oligonucleotide
  misc_feature 1..20: note = Target: SCN10A; (-) strand; PAM type: NNNNGHTT; PAM sequence: TAAAGATT
  source 1..20: mol_type = other DNA
tgggtgatgtggcagtctgc

SEQ ID NO: 11258 - DNA, 20 bp, synthetic construct
  misc_feature 1..20: note = Description of Artificial Sequence: Synthetic oligonucleotide
  misc_feature 1..20: note = Target: SCN10A; (-) strand; PAM type: NNNNGHTT; PAM sequence: CGTCGCTT
  source 1..20: mol_type = other DNA
ccctcgaaactaacaacttc

SEQ ID NO: 11259 - DNA, 20 bp, synthetic construct
  misc_feature 1..20: note = Description of Artificial Sequence: Synthetic oligonucleotide
  misc_feature 1..20: note = Target: SCN10A; (-) strand; PAM type: NNNNGHTT; PAM sequence: AAAAGATT
  source 1..20: mol_type = other DNA
tgttgacaatgtcaataaat

SEQ ID NO: 11260 - DNA, 20 bp, synthetic construct
  misc_feature 1..20: note = Description of Artificial Sequence: Synthetic oligonucleotide
  misc_feature 1..20: note = Target: SCN10A; (-) strand; PAM type: NNNNGHTT; PAM sequence: TTGGGATT
  source 1..20: mol_type = other DNA
tgttctagattgacttagcc

SEQ ID NO: 11261 - DNA, 20 bp, synthetic construct
  misc_feature 1..20: note = Description of Artificial Sequence: Synthetic oligonucleotide
  misc_feature 1..20: note = Target: SCN10A; (-) strand; PAM type: NNNNGHTT; PAM sequence: TCTAGATT
  source 1..20: mol_type = other DNA
cagcagttcaggggaactgt

SEQ ID NO: 11262 - DNA, 20 bp, synthetic construct
  misc_feature 1..20: note = Description of Artificial Sequence: Synthetic oligonucleotide
  misc_feature 1..20: note = Target: SCN10A; (-) strand; PAM type: NNNNGHTT; PAM sequence: ATATGATT
  source 1..20: mol_type = other DNA
aactgctgactagggatacc

SEQ ID NO: 11263 - DNA, 20 bp, synthetic construct
  misc_feature 1..20: note = Description of Artificial Sequence: Synthetic oligonucleotide
  misc_feature 1..20: note = Target: SCN10A; (-) strand; PAM type: NNNNGHTT; PAM sequence: ATTGGCTT
  source 1..20: mol_type = other DNA
atgaactaggaaatatggtc

SEQ ID NO: 11264 - DNA, 20 bp, synthetic construct
  misc_feature 1..20: note = Description of Artificial Sequence: Synthetic oligonucleotide
  misc_feature 1..20: note = Target: SCN10A; (-) strand; PAM type: NNNNGHTT; PAM sequence: TTCTGTTT
  source 1..20: mol_type = other DNA
atggtatgaagttggcagag

SEQ ID NO: 11265 - DNA, 20 bp, synthetic construct
  misc_feature 1..20: note = Description of Artificial Sequence: Synthetic oligonucleotide
  misc_feature 1..20: note = Target: SCN10A; (-) strand; PAM type: NNNNGHTT; PAM sequence: GGAGGTTT
  source 1..20: mol_type = other DNA
gctgcagacacaggtgagtt

SEQ ID NO: 11266 - DNA, 20 bp, synthetic construct
  misc_feature 1..20: note = Description of Artificial Sequence: Synthetic oligonucleotide
  misc_feature 1..20: note = Target: SCN10A; (-) strand; PAM type: NNNNGHTT; PAM sequence: GAAAGTTT
  source 1..20: mol_type = other DNA
ggatgggctctgcatcaagg

SEQ ID NO: 11267 - DNA, 20 bp, synthetic construct
  misc_feature 1..20: note = Description of Artificial Sequence: Synthetic oligonucleotide
  misc_feature 1..20: note = Target: SCN10A; (-) strand; PAM type: NNNNGHTT; PAM sequence: CCAAGCTT
  source 1..20: mol_type = other DNA
gtgagataggagggcaaaat

SEQ ID NO: 11268 - DNA, 20 bp, synthetic construct
  misc_feature 1..20: note = Description of Artificial Sequence: Synthetic oligonucleotide
  misc_feature 1..20: note = Target: SCN10A; (-) strand; PAM type: NNNNGHTT; PAM sequence: CAGAGATT
  source 1..20: mol_type = other DNA
gagacagaggttgcagtgag

SEQ ID NO: 11269 - DNA, 20 bp, synthetic construct
  misc_feature 1..20: note = Description of Artificial Sequence: Synthetic oligonucleotide
  misc_feature 1..20: note = Target: SCN10A; (-) strand; PAM type: NNNNGHTT; PAM sequence: AATTGCTT
  source 1..20: mol_type = other DNA
tcgggaggctgaggtgggag

SEQ ID NO: 11270 - DNA, 20 bp, synthetic construct
  misc_feature 1..20: note = Description of Artificial Sequence: Synthetic oligonucleotide
  misc_feature 1..20: note = Target: SCN10A; (-) strand; PAM type: NNNNGHTT; PAM sequence: AATTGCTT
  source 1..20: mol_type = other DNA
ttaatgtaataatgcatgaa

SEQ ID NO: 11271 - DNA, 20 bp, synthetic construct
  misc_feature 1..20: note = Description of Artificial Sequence: Synthetic oligonucleotide
  misc_feature 1..20: note = Target: SCN10A; (-) strand; PAM type: NNNNGHTT; PAM sequence: CTGAGTTT
  source 1..20: mol_type = other DNA
agagattgtggcaaacatac

SEQ ID NO: 11272 - DNA, 20 bp, synthetic construct
  misc_feature 1..20: note = Description of Artificial Sequence: Synthetic oligonucleotide
  misc_feature 1..20: note = Target: SCN10A; (-) strand; PAM type: NNNNGHTT; PAM sequence: AAGAGATT
  source 1..20: mol_type = other DNA
gggaatgatgagatgtttcc

SEQ ID NO: 11273 - DNA, 20 bp, synthetic construct
  misc_feature 1..20: note = Description of Artificial Sequence: Synthetic oligonucleotide
  misc_feature 1..20: note = Target: SCN10A; (-) strand; PAM type: NNNNGHTT; PAM sequence: AGATGTTT
  source 1..20: mol_type = other DNA
gtgaagatatgggaatgatg

SEQ ID NO: 11274 - DNA, 20 bp, synthetic construct
  misc_feature 1..20: note = Description of Artificial Sequence: Synthetic oligonucleotide
  misc_feature 1..20: note = Target: SCN10A; (-) strand; PAM type: NNNNGHTT; PAM sequence: CTGAGCTT
  source 1..20: mol_type = other DNA
tgagtttagtttggggcatg

SEQ ID NO: 11275 - DNA, 20 bp, synthetic construct
  misc_feature 1..20: note = Description of Artificial Sequence: Synthetic oligonucleotide
  misc_feature 1..20: note = Target: SCN10A; (-) strand; PAM type: NNNNGHTT; PAM sequence: TTTAGTTT
  source 1..20: mol_type = other DNA
agtgaggagataattatgag

SEQ ID NO: 11276 - DNA, 20 bp, synthetic construct
  misc_feature 1..20: note = Description of Artificial Sequence: Synthetic oligonucleotide
  misc_feature 1..20: note = Target: SCN10A; (-) strand; PAM type: NNNNGHTT; PAM sequence: ATGAGTTT
  source 1..20: mol_type = other DNA
aaagaagtgaggagataatt

SEQ ID NO: 11277 - DNA, 20 bp, synthetic construct
  misc_feature 1..20: note = Description of Artificial Sequence: Synthetic oligonucleotide
  misc_feature 1..20: note = Target: SCN10A; (-) strand; PAM type: NNNNGHTT; PAM sequence: GTTTGATT
  source 1..20: mol_type = other DNA
cagaagcaacagcactagat

SEQ ID NO: 11278 - DNA, 20 bp, synthetic construct
  misc_feature 1..20: note = Description of Artificial Sequence: Synthetic oligonucleotide
  misc_feature 1..20: note = Target: SCN10A; (-) strand; PAM type: NNNNGHTT; PAM sequence: AGATGTTT
  source 1..20: mol_type = other DNA
gaggcagaagcaacagcact

SEQ ID NO: 11279 - DNA, 20 bp, synthetic construct
  misc_feature 1..20: note = Description of Artificial Sequence: Synthetic oligonucleotide
  misc_feature 1..20: note = Target: SCN10A; (-) strand; PAM type: NNNNGHTT; PAM sequence: CAGTGATT
  source 1..20: mol_type = other DNA
atacgaggccagtgagatga

SEQ ID NO: 11280 - DNA, 20 bp, synthetic construct
  misc_feature 1..20: note = Description of Artificial Sequence: Synthetic oligonucleotide
  misc_feature 1..20: note = Target: SCN10A; (-) strand; PAM type: NNNNGHTT; PAM sequence: ACCAGATT
  source 1..20: mol_type = other DNA
ttaaataaagatatcacata

SEQ ID NO: 11281 - DNA, 20 bp, synthetic construct
  misc_feature 1..20: note = Description of Artificial Sequence: Synthetic oligonucleotide
  misc_feature 1..20: note = Target: SCN10A; (-) strand; PAM type: NNNNGHTT; PAM sequence: GAATGATT
  source 1..20: mol_type = other DNA
gagtgctatggagagcttta

SEQ ID NO: 11282 - DNA, 20 bp, synthetic construct
  misc_feature 1..20: note = Description of Artificial Sequence: Synthetic oligonucleotide
  misc_feature 1..20: note = Target: SCN10A; (-) strand; PAM type: NNNNGHTT; PAM sequence: GAGAGCTT
  source 1..20: mol_type = other DNA
gggttatcttgagtgctatg

SEQ ID NO: 11283 - DNA, 20 bp, synthetic construct
  misc_feature 1..20: note = Description of Artificial Sequence: Synthetic oligonucleotide
  misc_feature 1..20: note = Target: SCN10A; (-) strand; PAM type: NNNNGHTT; PAM sequence: CACAGTTT
  source 1..20: mol_type = other DNA
ccatgctggagaggtcagcg

SEQ ID NO: 11284 - DNA, 20 bp, synthetic construct
  misc_feature 1..20: note = Description of Artificial Sequence: Synthetic oligonucleotide
  misc_feature 1..20: note = Target: SCN10A; (-) strand; PAM type: NNNNGHTT; PAM sequence: AGAGGATT
  source 1..20: mol_type = other DNA
gccaagagtacaagaataag

SEQ ID NO: 11285 - DNA, 20 bp, synthetic construct
  misc_feature 1..20: note = Description of Artificial Sequence: Synthetic oligonucleotide
  misc_feature 1..20: note = Target: SCN10A; (-) strand; PAM type: NNNNGHTT; PAM sequence: AGATGTTT
  source 1..20: mol_type = other DNA
gcaaacagaaattacaaatc

SEQ ID NO: 11286 - DNA, 20 bp, synthetic construct
  misc_feature 1..20: note = Description of Artificial Sequence: Synthetic oligonucleotide
  misc_feature 1..20: note = Target: SCN10A; (-) strand; PAM type: NNNNGHTT; PAM sequence: CTGAGCTT
  source 1..20: mol_type = other DNA
agatgtgagtccagctctca

SEQ ID NO: 11287 - DNA, 20 bp, synthetic construct
  misc_feature 1..20: note = Description of Artificial Sequence: Synthetic oligonucleotide
  misc_feature 1..20: note = Target: SCN10A; (-) strand; PAM type: NNNNGHTT; PAM sequence: TTAAGTTT
  source 1..20: mol_type = other DNA
gttctttagtttttcagcta

SEQ ID NO: 11288 - DNA, 20 bp, synthetic construct
  misc_feature 1..20: note = Description of Artificial Sequence: Synthetic oligonucleotide
  misc_feature 1..20: note = Target: SCN10A; (-) strand; PAM type: NNNNGHTT; PAM sequence: TTTAGTTT
  source 1..20: mol_type = other DNA
tttttctgaacaaaatgttc

SEQ ID NO: 11289 - DNA, 20 bp, synthetic construct
  misc_feature 1..20: note = Description of Artificial Sequence: Synthetic oligonucleotide
  misc_feature 1..20: note = Target: SCN10A; (-) strand; PAM type: NNNNGHTT; PAM sequence: CTGTGATT
  source 1..20: mol_type = other DNA
ttatattcctattattggat

SEQ ID NO: 11290 - DNA, 20 bp, synthetic construct
  misc_feature 1..20: note = Description of Artificial Sequence: Synthetic oligonucleotide
  misc_feature 1..20: note = Target: SCN10A; (-) strand; PAM type: NNNNGHTT; PAM sequence: GTGAGCTT
  source 1..20: mol_type = other DNA
tctgcttgactttggggtgt

SEQ ID NO: 11291 - DNA, 20 bp, synthetic construct
  misc_feature 1..20: note = Description of Artificial Sequence: Synthetic oligonucleotide
  misc_feature 1..20: note = Target: SCN10A; (-) strand; PAM type: NNNNGHTT; PAM sequence: ATCTGCTT
  source 1..20: mol_type = other DNA
taagcactgcctctgccacc

SEQ ID NO: 11292 - DNA, 20 bp, synthetic construct
  misc_feature 1..20: note = Description of Artificial Sequence: Synthetic oligonucleotide
  misc_feature 1..20: note = Target: SCN10A; (-) strand; PAM type: NNNNGHTT; PAM sequence: ATTTGATT
  source 1..20: mol_type = other DNA
aggatctccatcataggggt

SEQ ID NO: 11293 - DNA, 20 bp, synthetic construct
  misc_feature 1..20: note = Description of Artificial Sequence: Synthetic oligonucleotide
  misc_feature 1..20: note = Target: SCN10A; (-) strand; PAM type: NNNNGHTT; PAM sequence: ATTGGATT
  source 1..20: mol_type = other DNA
agtgtctatatcacagaggt

SEQ ID NO: 11294 - DNA, 20 bp, synthetic construct
  misc_feature 1..20: note = Description of Artificial Sequence: Synthetic oligonucleotide
  misc_feature 1..20: note = Target: SCN10A; (-) strand; PAM type: NNNNGHTT; PAM sequence: CAGTGTTT
  source 1..20: mol_type = other DNA
attaaagacactgaagtcaa

SEQ ID NO: 11295 - DNA, 20 bp, synthetic construct
  misc_feature 1..20: note = Description of Artificial Sequence: Synthetic oligonucleotide
  misc_feature 1..20: note = Target: SCN10A; (-) strand; PAM type: NNNNGHTT; PAM sequence: CTTTGTTT
  source 1..20: mol_type = other DNA
gaagagaaagttaacttaat

SEQ ID NO: 11296 - DNA, 20 bp, synthetic construct
  misc_feature 1..20: note = Description of Artificial Sequence: Synthetic oligonucleotide
  misc_feature 1..20: note = Target: SCN10A; (-) strand; PAM type: NNNNGHTT; PAM sequence: CTGGGATT
  source 1..20: mol_type = other DNA
tgttactaaacaactgagtc

SEQ ID NO: 11297 - DNA, 20 bp, synthetic construct
  misc_feature 1..20: note = Description of Artificial Sequence: Synthetic oligonucleotide
  misc_feature 1..20: note = Target: SCN10A; (-) strand; PAM type: NNNNGHTT; PAM sequence: TCTGGCTT
  source 1..20: mol_type = other DNA
ccagctccaggacctggaat

SEQ ID NO: 11298 - DNA, 20 bp, synthetic construct
  misc_feature 1..20: note = Description of Artificial Sequence: Synthetic oligonucleotide
  misc_feature 1..20: note = Target: SCN10A; (-) strand; PAM type: NNNNGHTT; PAM sequence: GTCTGCTT
  source 1..20: mol_type = other DNA
gaagtcagtctcatagctga

SEQ ID NO: 11299 - DNA, 20 bp, synthetic construct
  misc_feature 1..20: note = Description of Artificial Sequence: Synthetic oligonucleotide
  misc_feature 1..20: note = Target: SCN10A; (-) strand; PAM type: NNNNGHTT; PAM sequence: GAGGGATT
  source 1..20: mol_type = other DNA
aacaattttgtccttagctg

SEQ ID NO: 11300 - DNA, 20 bp, synthetic construct
  misc_feature 1..20: note = Description of Artificial Sequence: Synthetic oligonucleotide
  misc_feature 1..20: note = Target: SCN10A; (-) strand; PAM type: NNNNGHTT; PAM sequence: AATAGTTT
  source 1..20: mol_type = other DNA
agataaactacttgcacccc

SEQ ID NO: 11301 - DNA, 20 bp, synthetic construct
  misc_feature 1..20: note = Description of Artificial Sequence: Synthetic oligonucleotide
  misc_feature 1..20: note = Target: SCN10A; (-) strand; PAM type: NNNNGHTT; PAM sequence: TACTGCTT
  source 1..20: mol_type = other DNA
gagtaaatggctcataaaaa

SEQ ID NO: 11302 - DNA, 20 bp, synthetic construct
  misc_feature 1..20: note = Description of Artificial Sequence: Synthetic oligonucleotide
  misc_feature 1..20: note = Target: SCN10A; (-) strand; PAM type: NNNNGHTT; PAM sequence: CCCAGTTT
  source 1..20: mol_type = other DNA
ctcagtgaaacaattctgag

SEQ ID NO: 11303 - DNA, 20 bp, synthetic construct
  misc_feature 1..20: note = Description of Artificial Sequence: Synthetic oligonucleotide
  misc_feature 1..20: note = Target: SCN10A; (-) strand; PAM type: NNNNGHTT; PAM sequence: CAGGGCTT
  source 1..20: mol_type = other DNA
acttcctgcctctgtctgcc

SEQ ID NO: 11304 - DNA, 20 bp, synthetic construct
  misc_feature 1..20: note = Description of Artificial Sequence: Synthetic oligonucleotide
  misc_feature 1..20: note = Target: SCN10A; (-) strand; PAM type: NNNNGHTT; PAM sequence: TAGGGATT
  source 1..20: mol_type = other DNA
cattcaactagactctaaaa

SEQ ID NO: 11305 - DNA, 20 bp, synthetic construct
  misc_feature 1..20: note = Description of Artificial Sequence: Synthetic oligonucleotide
  misc_feature 1..20: note = Target: SCN10A; (-) strand; PAM type: NNNNGHTT; PAM sequence: ATGTGCTT
  source 1..20: mol_type = other DNA
atatggctacctcacaaagg

SEQ ID NO: 11306 - DNA, 20 bp, synthetic construct
  misc_feature 1..20: note = Description of Artificial Sequence: Synthetic oligonucleotide
  misc_feature 1..20: note = Target: SCN10A; (-) strand; PAM type: NNNNGHTT; PAM sequence: CTTGGATT
  source 1..20: mol_type = other DNA
ctaaactagaatagatattt

SEQ ID NO: 11307 - DNA, 20 bp, synthetic construct
  misc_feature 1..20: note = Description of Artificial Sequence: Synthetic oligonucleotide
  misc_feature 1..20: note = Target: SCN10A; (-) strand; PAM type: NNNNGHTT; PAM sequence: CCGAGCTT
  source 1..20: mol_type = other DNA
agactgtttgaaagccaggg

SEQ ID NO: 11308 - DNA, 20 bp, synthetic construct
  misc_feature 1..20: note = Description of Artificial Sequence: Synthetic oligonucleotide
  misc_feature 1..20: note = Target: SCN10A; (-) strand; PAM type: NNNNGHTT; PAM sequence: GACTGTTT
  source 1..20: mol_type = other DNA
tacctgcaaaaactcatgca

SEQ ID NO: 11309 - DNA, 20 bp, synthetic construct
  misc_feature 1..20: note = Description of Artificial Sequence: Synthetic oligonucleotide
  misc_feature 1..20: note = Target: SCN10A; (-) strand; PAM type: NNNNGHTT; PAM sequence: GCTTGCTT
  source 1..20: mol_type = other DNA
aatgcccaccgaatagaaag

SEQ ID NO: 11310 - DNA, 20 bp, synthetic construct
  misc_feature 1..20: note = Description of Artificial Sequence: Synthetic oligonucleotide
  misc_feature 1..20: note = Target: SCN10A; (-) strand; PAM type: NNNNGHTT; PAM sequence: AAAGGCTT
  source 1..20: mol_type = other DNA
gctgaatgcccaccgaatag

SEQ ID NO: 11311 - DNA, 20 bp, synthetic construct
  misc_feature 1..20: note = Description of Artificial Sequence: Synthetic oligonucleotide
  misc_feature 1..20: note = Target: SCN10A; (-) strand; PAM type: NNNNGHTT; PAM sequence: CTGTGATT
  source 1..20: mol_type = other DNA
gaggtcaaggctgcaatgag

SEQ ID NO: 11312 - DNA, 20 bp, synthetic construct
  misc_feature 1..20: note = Description of Artificial Sequence: Synthetic oligonucleotide
  misc_feature 1..20: note = Target: SCN10A; (-) strand; PAM type: NNNNGHTT; PAM sequence: TGAAGATT
  source 1..20: mol_type = other DNA
gaaaaaccccatcaaaaata

SEQ ID NO: 11313 - DNA, 20 bp, synthetic construct
  misc_feature 1..20: note = Description of Artificial Sequence: Synthetic oligonucleotide
  misc_feature 1..20: note = Target: SCN10A; (+) strand; PAM type: NNNNGHTT; PAM sequence: TTAGGTTT
  source 1..20: mol_type = other DNA
tttgtacccttttggtaacc

SEQ ID NO: 11314 - DNA, 20 bp, synthetic construct
  misc_feature 1..20: note = Description of Artificial Sequence: Synthetic oligonucleotide
  misc_feature 1..20: note = Target: SCN10A; (+) strand; PAM type: NNNNGHTT; PAM sequence: TGTGGCTT
  source 1..20: mol_type = other DNA
tttggtaaccttaggttttg

SEQ ID NO: 11315 - DNA, 20 bp, synthetic construct
  misc_feature 1..20: note = Description of Artificial Sequence: Synthetic oligonucleotide
  misc_feature 1..20: note = Target: SCN10A; (+) strand; PAM type: NNNNGHTT; PAM sequence: TTTTGTTT
  source 1..20: mol_type = other DNA
ttaatgtaatttatgaatat

SEQ ID NO: 11316 - DNA, 20 bp, synthetic construct
  misc_feature 1..20: note = Description of Artificial Sequence: Synthetic oligonucleotide
  misc_feature 1..20: note = Target: SCN10A; (+) strand; PAM type: NNNNGHTT; PAM sequence: ATTTGTTT
  source 1..20: mol_type = other DNA
tactttactctgtcttttct

SEQ ID NO: 11317 - DNA, 20 bp, synthetic construct
  misc_feature 1..20: note = Description of Artificial Sequence: Synthetic oligonucleotide
  misc_feature 1..20: note = Target: SCN10A; (+) strand; PAM type: NNNNGHTT; PAM sequence: CCGGGTTT
  source 1..20: mol_type = other DNA
attctgtatgtctctatatc

SEQ ID NO: 11318 - DNA, 20 bp, synthetic construct
  misc_feature 1..20: note = Description of Artificial Sequence: Synthetic oligonucleotide
  misc_feature 1..20: note = Target: SCN10A; (+) strand; PAM type: NNNNGHTT; PAM sequence: TTAAGTTT
  source 1..20: mol_type = other DNA
tttttaattattattatact

SEQ ID NO: 11319 - DNA, 20 bp, synthetic construct
  misc_feature 1..20: note = Description of Artificial Sequence: Synthetic oligonucleotide
  misc_feature 1..20: note = Target: SCN10A; (+) strand; PAM type: NNNNGHTT; PAM sequence: GCAGGTTT
  source 1..20: mol_type = other DNA
aggatacatgagcacaacgt

SEQ ID NO: 11320 - DNA, 20 bp, synthetic construct
  misc_feature 1..20: note = Description of Artificial Sequence: Synthetic oligonucleotide
  misc_feature 1..20: note = Target: SCN10A; (+) strand; PAM type: NNNNGHTT; PAM sequence: CGGTGTTT
  source 1..20: mol_type = other DNA
cacctatgagtgagaacatg

SEQ ID NO: 11321 - DNA, 20 bp, synthetic construct
  misc_feature 1..20: note = Description of Artificial Sequence: Synthetic oligonucleotide
  misc_feature 1..20: note = Target: SCN10A; (+) strand; PAM type: NNNNGHTT; PAM sequence: TTTGGTTT
  source 1..20: mol_type = other DNA
atgagtgagaacatgcggtg

SEQ ID NO: 11322 - DNA, 20 bp, synthetic construct
  misc_feature 1..20: note = Description of Artificial Sequence: Synthetic oligonucleotide
  misc_feature 1..20: note = Target: SCN10A; (+) strand; PAM type: NNNNGHTT; PAM sequence: GATAGTTT
  source 1..20: mol_type = other DNA
ttggttttttttgtccttgc

SEQ ID NO: 11323 - DNA, 20 bp, synthetic construct
  misc_feature 1..20: note = Description of Artificial Sequence: Synthetic oligonucleotide
  misc_feature 1..20: note = Target: SCN10A; (+) strand; PAM type: NNNNGHTT; PAM sequence: GATGGTTT
  source 1..20: mol_type = other DNA
tgcgatagtttgctgagaat

SEQ ID NO: 11324 - DNA, 20 bp, synthetic construct
  misc_feature 1..20: note = Description of Artificial Sequence: Synthetic oligonucleotide
  misc_feature 1..20: note = Target: SCN10A; (+) strand; PAM type: NNNNGHTT; PAM sequence: TCCAGCTT
  source 1..20: mol_type = other DNA
gtttgctgagaatgatggtt

SEQ ID NO: 11325 - DNA, 20 bp, synthetic construct
  misc_feature 1..20: note = Description of Artificial Sequence: Synthetic oligonucleotide
  misc_feature 1..20: note = Target: SCN10A; (+) strand; PAM type: NNNNGHTT; PAM sequence: GTATGATT
  source 1..20: mol_type = other DNA
gtgcatgtgtctttatagca

SEQ ID NO: 11326 - DNA, 20 bp, synthetic construct
  misc_feature 1..20: note = Description of Artificial Sequence: Synthetic oligonucleotide
  misc_feature 1..20: note = Target: SCN10A; (+) strand; PAM type: NNNNGHTT; PAM sequence: CAATGATT
  source 1..20: mol_type = other DNA
aattgccacaccgacttcca

SEQ ID NO: 11327 - DNA, 20 bp, synthetic construct
  misc_feature 1..20: note = Description of Artificial Sequence: Synthetic oligonucleotide
  misc_feature 1..20: note = Target: SCN10A; (+) strand; PAM type: NNNNGHTT; PAM sequence: ACTAGTTT
  source 1..20: mol_type = other DNA
ccgacttccacaatgattga

SEQ ID NO: 11328 - DNA, 20 bp, synthetic construct
  misc_feature 1..20: note = Description of Artificial Sequence: Synthetic oligonucleotide
  misc_feature 1..20: note = Target: SCN10A; (+) strand; PAM type: NNNNGHTT; PAM sequence: TGTTGTTT
  source 1..20: mol_type = other DNA
tccacatcctctccagcacc

SEQ ID NO: 11329 - DNA, 20 bp, synthetic construct
  misc_feature 1..20: note = Description of Artificial Sequence: Synthetic oligonucleotide
  misc_feature 1..20: note = Target: SCN10A; (+) strand; PAM type: NNNNGHTT; PAM sequence: TGTGGTTT
  source 1..20: mol_type = other DNA
ggtgtgagatggtatctcat

SEQ ID NO: 11330 - DNA, 20 bp, synthetic construct
  misc_feature 1..20: note = Description of Artificial Sequence: Synthetic oligonucleotide
  misc_feature 1..20: note = Target: SCN10A; (+) strand; PAM type: NNNNGHTT; PAM sequence: TTTTGATT
  source 1..20: mol_type = other DNA
gagatggtatctcattgtgg

SEQ ID NO: 11331 - DNA, 20 bp, synthetic construct
  misc_feature 1..20: note = Description of Artificial Sequence: Synthetic oligonucleotide
  misc_feature 1..20: note = Target: SCN10A; (+) strand; PAM type: NNNNGHTT; PAM sequence: ATGTGTTT
  source 1..20: mol_type = other DNA
gtgatgatgagcattttttc

SEQ ID NO: 11332 - DNA, 20 bp, synthetic construct
  misc_feature 1..20: note = Description of Artificial Sequence: Synthetic oligonucleotide
  misc_feature 1..20: note = Target: SCN10A; (+) strand; PAM type: NNNNGHTT; PAM sequence: ATGGGATT
  source 1..20: mol_type = other DNA
tatccttcgcccactttttg

SEQ ID NO: 11333 - DNA, 20 bp, synthetic construct
  misc_feature 1..20: note = Description of Artificial Sequence: Synthetic oligonucleotide
  misc_feature 1..20: note = Target: SCN10A; (+) strand; PAM type: NNNNGHTT; PAM sequence: ATTTGTTT
  source 1..20: mol_type = other DNA
tgggatttttttccttgtaa

SEQ ID NO: 11334 - DNA, 20 bp, synthetic construct
  misc_feature 1..20: note = Description of Artificial Sequence: Synthetic oligonucleotide
  misc_feature 1..20: note = Target: SCN10A; (+) strand; PAM type: NNNNGHTT; PAM sequence: TGTAGATT
  source 1..20: mol_type = other DNA
gtaaatttgtttgagttcat

SEQ ID NO: 11335 - DNA, 20 bp, synthetic construct
  misc_feature 1..20: note = Description of Artificial Sequence: Synthetic oligonucleotide
  misc_feature 1..20: note = Target: SCN10A; (+) strand; PAM type: NNNNGHTT; PAM sequence: GTAGGTTT
  source 1..20: mol_type = other DNA
caaaaattttctcccatcct

SEQ ID NO: 11336 - DNA, 20 bp, synthetic construct
  misc_feature 1..20: note = Description of Artificial Sequence: Synthetic oligonucleotide
  misc_feature 1..20: note = Target: SCN10A; (+) strand; PAM type: NNNNGHTT; PAM sequence: GGTGGTTT
  source 1..20: mol_type = other DNA
aggtttctgttcactctgat

SEQ ID NO: 11337 - DNA, 20 bp, synthetic construct
  misc_feature 1..20: note = Description of Artificial Sequence: Synthetic oligonucleotide
  misc_feature 1..20: note = Target: SCN10A; (+) strand; PAM type: NNNNGHTT; PAM sequence: TTTAGTTT
  source 1..20: mol_type = other DNA
cttttgctgctcagaagctc

SEQ ID NO: 11338 - DNA, 20 bp, synthetic construct
  misc_feature 1..20: note = Description of Artificial Sequence: Synthetic oligonucleotide
  misc_feature 1..20: note = Target: SCN10A; (+) strand; PAM type: NNNNGHTT; PAM sequence: CATTGCTT
  source 1..20: mol_type = other DNA
tcaattttgacttttgttgc

SEQ ID NO: 11339 - DNA, 20 bp, synthetic construct
  misc_feature 1..20: note = Description of Artificial Sequence: Synthetic oligonucleotide
  misc_feature 1..20: note = Target: SCN10A; (+) strand; PAM type: NNNNGHTT; PAM sequence: TGGTGTTT
  source 1..20: mol_type = other DNA
acttttgttgccattgcttt

SEQ ID NO: 11340 - DNA, 20 bp, synthetic construct
  misc_feature 1..20: note = Description of Artificial Sequence: Synthetic oligonucleotide
  misc_feature 1..20: note = Target: SCN10A; (+) strand; PAM type: NNNNGHTT; PAM sequence: TAGGGTTT
  source 1..20: mol_type = other DNA
gtattgcctaggttctcttc

SEQ ID NO: 11341 - DNA, 20 bp, synthetic construct
  misc_feature 1..20: note = Description of Artificial Sequence: Synthetic oligonucleotide
  misc_feature 1..20: note = Target: SCN10A; (+) strand; PAM type: NNNNGHTT; PAM sequence: TATGGTTT
  source 1..20: mol_type = other DNA
aggttctcttctagggtttt

SEQ ID NO: 11342 - DNA, 20 bp, synthetic construct
  misc_feature 1..20: note = Description of Artificial Sequence: Synthetic oligonucleotide
  misc_feature 1..20: note = Target: SCN10A; (+) strand; PAM type: NNNNGHTT; PAM sequence: TCCAGTTT
  source 1..20: mol_type = other DNA
tataaggtgtaaggaaggga

SEQ ID NO: 11343 - DNA, 20 bp, synthetic construct
  misc_feature 1..20: note = Description of Artificial Sequence: Synthetic oligonucleotide
  misc_feature 1..20: note = Target: SCN10A; (+) strand; PAM type: NNNNGHTT; PAM sequence: TTCAGCTT
  source 1..20: mol_type = other DNA
gtgtaaggaagggatccagt

SEQ ID NO: 11344 - DNA, 20 bp, synthetic construct
  misc_feature 1..20: note = Description of Artificial Sequence: Synthetic oligonucleotide
  misc_feature 1..20: note = Target: SCN10A; (+) strand; PAM type: NNNNGHTT; PAM sequence: GCCAGTTT
  source 1..20: mol_type = other DNA
cagctttctccatatggcta

SEQ ID NO: 11345 - DNA, 20 bp, synthetic construct
  misc_feature 1..20: note = Description of Artificial Sequence: Synthetic oligonucleotide
  misc_feature 1..20: note = Target: SCN10A; (+) strand; PAM type: NNNNGHTT; PAM sequence: TCTTGTTT
  source 1..20: mol_type = other DNA
tagggaatcctttccccatt

SEQ ID NO: 11346 - DNA, 20 bp, synthetic construct
  misc_feature 1..20: note = Description of Artificial Sequence: Synthetic oligonucleotide
  misc_feature 1..20: note = Target: SCN10A; (+) strand; PAM type: NNNNGHTT; PAM sequence: TCAGGTTT
  source 1..20: mol_type = other DNA
ttccccatttcttgtttttg

SEQ ID NO: 11347 - DNA, 20 bp, synthetic construct
  misc_feature 1..20: note = Description of Artificial Sequence: Synthetic oligonucleotide
  misc_feature 1..20: note = Target: SCN10A; (+) strand; PAM type: NNNNGHTT; PAM sequence: CTCTGTTT
  source 1..20: mol_type = other DNA
tctgttccattggtctatat

SEQ ID NO: 11348 - DNA, 20 bp, synthetic construct
  misc_feature 1..20: note = Description of Artificial Sequence: Synthetic oligonucleotide
  misc_feature 1..20: note = Target: SCN10A; (+) strand; PAM type: NNNNGHTT; PAM sequence: TGCTGTTT
  source 1..20: mol_type = other DNA
ctgttttggtaccagtacca

SEQ ID NO: 11349 - DNA, 20 bp, synthetic construct
  misc_feature 1..20: note = Description of Artificial Sequence: Synthetic oligonucleotide
  misc_feature 1..20: note = Target: SCN10A; (+) strand; PAM type: NNNNGHTT; PAM sequence: TATAGTTT
  source 1..20: mol_type = other DNA
tggttactgtagccttgtaa

SEQ ID NO: 11350 - DNA, 20 bp, synthetic construct
  misc_feature 1..20: note = Description of Artificial Sequence: Synthetic oligonucleotide
  misc_feature 1..20: note = Target: SCN10A; (+) strand; PAM type: NNNNGHTT; PAM sequence: TCCAGCTT
  source 1..20: mol_type = other DNA
aagtcaggtagcgtgatgcc

SEQ ID NO: 11351 - DNA, 20 bp, synthetic construct
  misc_feature 1..20: note = Description of Artificial Sequence: Synthetic oligonucleotide
  misc_feature 1..20: note = Target: SCN10A; (+) strand; PAM type: NNNNGHTT; PAM sequence: AATTGCTT
  source 1..20: mol_type = other DNA
atgagtgaactcccattcac

SEQ ID NO: 11352 - DNA, 20 bp, synthetic construct
  misc_feature 1..20: note = Description of Artificial Sequence: Synthetic oligonucleotide
  misc_feature 1..20: note = Target: SCN10A; (+) strand; PAM type: NNNNGHTT; PAM sequence: TATAGATT
  source 1..20: mol_type = other DNA
ccatactgcccaaggtaatt

SEQ ID NO: 11353 - DNA, 20 bp, synthetic construct
  misc_feature 1..20: note = Description of Artificial Sequence: Synthetic oligonucleotide
  misc_feature 1..20: note = Target: SCN10A; (+) strand; PAM type: NNNNGHTT; PAM sequence: TCCTGTTT
  source 1..20: mol_type = other DNA
cattgccaagtcaatcctaa

SEQ ID NO: 11354 - DNA, 20 bp, synthetic construct
  misc_feature 1..20: note = Description of Artificial Sequence: Synthetic oligonucleotide
  misc_feature 1..20: note = Target: SCN10A; (+) strand; PAM type: NNNNGHTT; PAM sequence: TTTTGATT
  source 1..20: mol_type = other DNA
ttttttttttaaccttactt

SEQ ID NO: 11355 - DNA, 20 bp, synthetic construct
  misc_feature 1..20: note = Description of Artificial Sequence: Synthetic oligonucleotide
  misc_feature 1..20: note = Target: SCN10A; (+) strand; PAM type: NNNNGHTT; PAM sequence: AATTGTTT
  source 1..20: mol_type = other DNA
ccttacttttttgattggct

SEQ ID NO: 11356 - DNA, 20 bp, synthetic construct
  misc_feature 1..20: note = Description of Artificial Sequence: Synthetic oligonucleotide
  misc_feature 1..20: note = Target: SCN10A; (+) strand; PAM type: NNNNGHTT; PAM sequence: TTCTGATT
  source 1..20: mol_type = other DNA
ttggaaatgatatactctat

SEQ ID NO: 11357 - DNA, 20 bp, synthetic construct
  misc_feature 1..20: note = Description of Artificial Sequence: Synthetic oligonucleotide
  misc_feature 1..20: note = Target: SCN10A; (+) strand; PAM type: NNNNGHTT; PAM sequence: TGCAGTTT
  source 1..20: mol_type = other DNA
ccatctgtgtctatgtgtta

SEQ ID NO: 11358 - DNA, 20 bp, synthetic construct
  misc_feature 1..20: note = Description of Artificial Sequence: Synthetic oligonucleotide
  misc_feature 1..20: note = Target: SCN10A; (+) strand; PAM type: NNNNGHTT; PAM sequence: CGGTGTTT
  source 1..20: mol_type = other DNA
aatggtataaaaagttaggg

SEQ ID NO: 11359 - DNA, 20 bp, synthetic construct
  misc_feature 1..20: note = Description of Artificial Sequence: Synthetic oligonucleotide
  misc_feature 1..20: note = Target: SCN10A; (+) strand; PAM type: NNNNGHTT; PAM sequence: GAGAGATT
  source 1..20: mol_type = other DNA
tatcctcacattctgggcca

SEQ ID NO: 11360 - DNA, 20 bp, synthetic construct
  misc_feature 1..20: note = Description of Artificial Sequence: Synthetic oligonucleotide
  misc_feature 1..20: note = Target: SCN10A; (+) strand; PAM type: NNNNGHTT; PAM sequence: TCTAGTTT
  source 1..20: mol_type = other DNA
acattctgggccagagagat

SEQ ID NO: 11361 - DNA, 20 bp, synthetic construct
  misc_feature 1..20: note = Description of Artificial Sequence: Synthetic oligonucleotide
  misc_feature 1..20: note = Target: SCN10A; (+) strand; PAM type: NNNNGHTT; PAM sequence: TCTAGTTT
  source 1..20: mol_type = other DNA
caggttggctcccatggaaa

SEQ ID NO: 11362 - DNA, 20 bp, synthetic construct
  misc_feature 1..20: note = Description of Artificial Sequence: Synthetic oligonucleotide
  misc_feature 1..20: note = Target: SCN10A; (+) strand; PAM type: NNNNGHTT; PAM sequence: CAATGTTT
  source 1..20: mol_type = other DNA
tgtatattgcatcccttttc

SEQ ID NO: 11363 - DNA, 20 bp, synthetic construct
  misc_feature 1..20: note = Description of Artificial Sequence: Synthetic oligonucleotide
  misc_feature 1..20: note = Target: SCN10A; (+) strand; PAM type: NNNNGHTT; PAM sequence: AATGGATT
  source 1..20: mol_type = other DNA
tttgtgcagaaaaaatgaga

SEQ ID NO: 11364 - DNA, 20 bp, synthetic construct
  misc_feature 1..20: note = Description of Artificial Sequence: Synthetic oligonucleotide
  misc_feature 1..20: note = Target: SCN10A; (+) strand; PAM type: NNNNGHTT; PAM sequence: ATTAGTTT
  source 1..20: mol_type = other DNA
gcagaaaaaatgagaaatgg

SEQ ID NO: 11365 - DNA, 20 bp, synthetic construct
  misc_feature 1..20: note = Description of Artificial Sequence: Synthetic oligonucleotide
  misc_feature 1..20: note = Target: SCN10A; (+) strand; PAM type: NNNNGHTT; PAM sequence: CCTAGCTT
  source 1..20: mol_type = other DNA
cgttgccttccatgtctcct

SEQ ID NO: 11366 - DNA, 20 bp, synthetic construct
  misc_feature 1..20: note = Description of Artificial Sequence: Synthetic oligonucleotide
  misc_feature 1..20: note = Target: SCN10A; (+) strand; PAM type: NNNNGHTT; PAM sequence: CTCCGATT
  source 1..20: mol_type = other DNA
cttggcctgcacatgtatct

SEQ ID NO: 11367 - DNA, 20 bp, synthetic construct
  misc_feature 1..20: note = Description of Artificial Sequence: Synthetic oligonucleotide
  misc_feature 1..20: note = Target: SCN10A; (+) strand; PAM type: NNNNGHTT; PAM sequence: GTGTGTTT
  source 1..20: mol_type = other DNA
tacagctgtcttttctttgt

SEQ ID NO: 11368 - DNA, 20 bp, synthetic construct
  misc_feature 1..20: note = Description of Artificial Sequence: Synthetic oligonucleotide
  misc_feature 1..20: note = Target: SCN10A; (+) strand; PAM type: NNNNGHTT; PAM sequence: ATTGGATT
  source 1..20: mol_type = other DNA
atattttagcaacaccagtc

SEQ ID NO: 11369 - DNA, 20 bp, synthetic construct
  misc_feature 1..20: note = Description of Artificial Sequence: Synthetic oligonucleotide
  misc_feature 1..20: note = Target: SCN10A; (+) strand; PAM type: NNNNGHTT; PAM sequence: ATTTGTTT
  source 1..20: mol_type = other DNA
tagggctcaccttcatctga

SEQ ID NO: 11370 - DNA, 20 bp, synthetic construct
  misc_feature 1..20: note = Description of Artificial Sequence: Synthetic oligonucleotide
  misc_feature 1..20: note = Target: SCN10A; (+) strand; PAM type: NNNNGHTT; PAM sequence: CTATGTTT
  source 1..20: mol_type = other DNA
cataaagttgaattatgttc

SEQ ID NO: 11371 - DNA, 20 bp, synthetic construct
  misc_feature 1..20: note = Description of Artificial Sequence: Synthetic oligonucleotide
  misc_feature 1..20: note = Target: SCN10A; (+) strand; PAM type: NNNNGHTT; PAM sequence: ATCTGCTT
  source 1..20: mol_type = other DNA
atacttttgagaatagtatc

SEQ ID NO: 11372 - DNA, 20 bp, synthetic construct
  misc_feature 1..20: note = Description of Artificial Sequence: Synthetic oligonucleotide
  misc_feature 1..20: note = Target: SCN10A; (+) strand; PAM type: NNNNGHTT; PAM sequence: GATGGTTT
  source 1..20: mol_type = other DNA
tgctttaatagaaccagtct

SEQ ID NO: 11373 - DNA, 20 bp, synthetic construct
  misc_feature 1..20: note = Description of Artificial Sequence: Synthetic oligonucleotide
  misc_feature 1..20: note = Target: SCN10A; (+) strand; PAM type: NNNNGHTT; PAM sequence: GATGGCTT
  source 1..20: mol_type = other DNA
acacttgggctagtatctca

SEQ ID NO: 11374 - DNA, 20 bp, synthetic construct
  misc_feature 1..20: note = Description of Artificial Sequence: Synthetic oligonucleotide
  misc_feature 1..20: note = Target: SCN10A; (+) strand; PAM type: NNNNGHTT; PAM sequence: ATGGGATT
  source 1..20: mol_type = other DNA
atggctttttcatcatccac

SEQ ID NO: 11375 - DNA, 20 bp, synthetic construct
  misc_feature 1..20: note = Description of Artificial Sequence: Synthetic oligonucleotide
  misc_feature 1..20: note = Target: SCN10A; (+) strand; PAM type: NNNNGHTT; PAM sequence: AGCTGATT
  source 1..20: mol_type = other DNA
aaatcaggcattcagagaat

SEQ ID NO: 11376 - DNA, 20 bp, synthetic construct
  misc_feature 1..20: note = Description of Artificial Sequence: Synthetic oligonucleotide
  misc_feature 1..20: note = Target: SCN10A; (+) strand; PAM type: NNNNGHTT; PAM sequence: GATGGCTT
  source 1..20: mol_type = other DNA
tcagagaatagctgatttga

SEQ ID NO: 11377 - DNA, 20 bp, synthetic construct
  misc_feature 1..20: note = Description of Artificial Sequence: Synthetic oligonucleotide
  misc_feature 1..20: note = Target: SCN10A; (+) strand; PAM type: NNNNGHTT; PAM sequence: CTGTGCTT
  source 1..20: mol_type = other DNA
catgtgagatgtatcagcca

SEQ ID NO: 11378 - DNA, 20 bp, synthetic construct
  misc_feature 1..20: note = Description of Artificial Sequence: Synthetic oligonucleotide
  misc_feature 1..20: note = Target: SCN10A; (+) strand; PAM type: NNNNGHTT; PAM sequence: TTGTGATT
  source 1..20: mol_type = other DNA
ttggctatatatttgaatct

SEQ ID NO: 11379 - DNA, 20 bp, synthetic construct
  misc_feature 1..20: note = Description of Artificial Sequence: Synthetic oligonucleotide
  misc_feature 1..20: note = Target: SCN10A; (+) strand; PAM type: NNNNGHTT; PAM sequence: CTTTGCTT
  source 1..20: mol_type = other DNA
cctatgttgttatagggagt

SEQ ID NO: 11380 - DNA, 20 bp, synthetic construct
  misc_feature 1..20: note = Description of Artificial Sequence: Synthetic oligonucleotide
  misc_feature 1..20: note = Target: SCN10A; (+) strand; PAM type: NNNNGHTT; PAM sequence: GGGGGCTT
  source 1..20: mol_type = other DNA
gttcatacaattaatctttt

SEQ ID NO: 11381 - DNA, 20 bp, synthetic construct
  misc_feature 1..20: note = Description of Artificial Sequence: Synthetic oligonucleotide
  misc_feature 1..20: note = Target: SCN10A; (+) strand; PAM type: NNNNGHTT; PAM sequence: TCATGATT
  source 1..20: mol_type = other DNA
tatctactggatcatcattc

SEQ ID NO: 11382 - DNA, 20 bp, synthetic construct
  misc_feature 1..20: note = Description of Artificial Sequence: Synthetic oligonucleotide
  misc_feature 1..20: note = Target: SCN10A; (+) strand; PAM type: NNNNGHTT; PAM sequence: TTCTGATT
  source 1..20: mol_type = other DNA
tctcatgattatactttttc

SEQ ID NO: 11383 - DNA, 20 bp, synthetic construct
  misc_feature 1..20: note = Description of Artificial Sequence: Synthetic oligonucleotide
  misc_feature 1..20: note = Target: SCN10A; (+) strand; PAM type: NNNNGHTT; PAM sequence: GTCTGATT
  source 1..20: mol_type = other DNA
taaaaactctcctccttaat

SEQ ID NO: 11384 - DNA, 20 bp, synthetic construct
  misc_feature 1..20: note = Description of Artificial Sequence: Synthetic oligonucleotide
  misc_feature 1..20: note = Target: SCN10A; (+) strand; PAM type: NNNNGHTT; PAM sequence: GAGTGCTT
  source 1..20: mol_type = other DNA
gccatttcagcctcagaaaa

SEQ ID NO: 11385 - DNA, 20 bp, synthetic construct
  misc_feature 1..20: note = Description of Artificial Sequence: Synthetic oligonucleotide
  misc_feature 1..20: note = Target: SCN10A; (+) strand; PAM type: NNNNGHTT; PAM sequence: TTAGGATT
  source 1..20: mol_type = other DNA
ccagacaattggtggaaaag

SEQ ID NO: 11386 - DNA, 20 bp, synthetic construct
  misc_feature 1..20: note = Description of Artificial Sequence: Synthetic oligonucleotide
  misc_feature 1..20: note = Target: SCN10A; (+) strand; PAM type: NNNNGHTT; PAM sequence: TGATGCTT
  source 1..20: mol_type = other DNA
gaaataagagaaaaataaaa

SEQ ID NO: 11387 - DNA, 20 bp, synthetic construct
  misc_feature 1..20: note = Description of Artificial Sequence: Synthetic oligonucleotide
  misc_feature 1..20: note = Target: SCN10A; (+) strand; PAM type: NNNNGHTT; PAM sequence: AAAGGCTT
  source 1..20: mol_type = other DNA
ttaattttaatggatatctc

SEQ ID NO: 11388 - DNA, 20 bp, synthetic construct
  misc_feature 1..20: note = Description of Artificial Sequence: Synthetic oligonucleotide
  misc_feature 1..20: note = Target: SCN10A; (+) strand; PAM type: NNNNGHTT; PAM sequence: AGAAGTTT
  source 1..20: mol_type = other DNA
ctttggaagttctggtcctg

SEQ ID NO: 11389 - DNA, 20 bp, synthetic construct
  misc_feature 1..20: note = Description of Artificial Sequence: Synthetic oligonucleotide
  misc_feature 1..20: note = Target: SCN10A; (+) strand; PAM type: NNNNGHTT; PAM sequence: ATCTGATT
  source 1..20: mol_type = other DNA
agtttgtctcagtaaatata

SEQ ID NO: 11390 - DNA, 20 bp, synthetic construct
  misc_feature 1..20: note = Description of Artificial Sequence: Synthetic oligonucleotide
  misc_feature 1..20: note = Target: SCN10A; (+) strand; PAM type: NNNNGHTT; PAM sequence: CTTAGCTT
  source 1..20: mol_type = other DNA
gaaatcacagtggaagtgct

SEQ ID NO: 11391 - DNA, 20 bp, synthetic construct
  misc_feature 1..20: note = Description of Artificial Sequence: Synthetic oligonucleotide
  misc_feature 1..20: note = Target: SCN10A; (+) strand; PAM type: NNNNGHTT; PAM sequence: GATGGTTT
  source 1..20: mol_type = other DNA
tctgactcctatttgtgtat

SEQ ID NO: 11392 - DNA, 20 bp, synthetic construct
  misc_feature 1..20: note = Description of Artificial Sequence: Synthetic oligonucleotide
  misc_feature 1..20: note = Target: SCN10A; (+) strand; PAM type: NNNNGHTT; PAM sequence: GGTGGCTT
  source 1..20: mol_type = other DNA
ggggcaatcagctccatact

SEQ ID NO: 11393 - DNA, 20 bp, synthetic construct
  misc_feature 1..20: note = Description of Artificial Sequence: Synthetic oligonucleotide
  misc_feature 1..20: note = Target: SCN10A; (+) strand; PAM type: NNNNGHTT; PAM sequence: AGCAGTTT
  source 1..20: mol_type = other DNA
ggtgggaatgatgtggcaga

SEQ ID NO: 11394 - DNA, 20 bp, synthetic construct
  misc_feature 1..20: note = Description of Artificial Sequence: Synthetic oligonucleotide
  misc_feature 1..20: note = Target: SCN10A; (+) strand; PAM type: NNNNGHTT; PAM sequence: TTCAGATT
  source 1..20: mol_type = other DNA
aatgatgtggcagaagcagt

SEQ ID NO: 11395 - DNA, 20 bp, synthetic construct
  misc_feature 1..20: note = Description of Artificial Sequence: Synthetic oligonucleotide
  misc_feature 1..20: note = Target: SCN10A; (+) strand; PAM type: NNNNGHTT; PAM sequence: TCTTGCTT
  source 1..20: mol_type = other DNA
tgacagtggctgaaatgtct

SEQ ID NO: 11396 - DNA, 20 bp, synthetic construct
  misc_feature 1..20: note = Description of Artificial Sequence: Synthetic oligonucleotide
  misc_feature 1..20: note = Target: SCN10A; (+) strand; PAM type: NNNNGHTT; PAM sequence: GGATGATT
  source 1..20: mol_type = other DNA
gtggttgctattggttcata

SEQ ID NO: 11397 - DNA, 20 bp, synthetic construct
  misc_feature 1..20: note = Description of Artificial Sequence: Synthetic oligonucleotide
  misc_feature 1..20: note = Target: SCN10A; (+) strand; PAM type: NNNNGHTT; PAM sequence: GAAAGATT
  source 1..20: mol_type = other DNA
ttggttcataggatgatttt

SEQ ID NO: 11398 - DNA, 20 bp, synthetic construct
  misc_feature 1..20: note = Description of Artificial Sequence: Synthetic oligonucleotide
  misc_feature 1..20: note = Target: SCN10A; (+) strand; PAM type: NNNNGHTT; PAM sequence: CCCGGATT
  source 1..20: mol_type = other DNA
gccttcagagaatccaactc

SEQ ID NO: 11399 - DNA, 20 bp, synthetic construct
  misc_feature 1..20: note = Description of Artificial Sequence: Synthetic oligonucleotide
  misc_feature 1..20: note = Target: SCN10A; (+) strand; PAM type: NNNNGHTT; PAM sequence: TTTCGATT
  source 1..20: mol_type = other DNA
ggtccatctggatcagtata

SEQ ID NO: 11400 - DNA, 20 bp, synthetic construct
  misc_feature 1..20: note = Description of Artificial Sequence: Synthetic oligonucleotide
  misc_feature 1..20: note = Target: SCN10A; (+) strand; PAM type: NNNNGHTT; PAM sequence: TTGGGTTT
  source 1..20: mol_type = other DNA
tctggatcagtatatttcga

SEQ ID NO: 11401 - DNA, 20 bp, synthetic construct
  misc_feature 1..20: note = Description of Artificial Sequence: Synthetic oligonucleotide
  misc_feature 1..20: note = Target: SCN10A; (+) strand; PAM type: NNNNGHTT; PAM sequence: TTGGGATT
  source 1..20: mol_type = other DNA
cagtatatttcgattgggtt

SEQ ID NO: 11402 - DNA, 20 bp, synthetic construct
  misc_feature 1..20: note = Description of Artificial Sequence: Synthetic oligonucleotide
  misc_feature 1..20: note = Target: SCN10A; (+) strand; PAM type: NNNNGHTT; PAM sequence: GGCAGATT
  source 1..20: mol_type = other DNA
ctctggtgccattgctgttg

SEQ ID NO: 11403 - DNA, 20 bp, synthetic construct
  misc_feature 1..20: note = Description of Artificial Sequence: Synthetic oligonucleotide
  misc_feature 1..20: note = Target: SCN10A; (+) strand; PAM type: NNNNGHTT; PAM sequence: CTCTGCTT
  source 1..20: mol_type = other DNA
caaagttggctgtgatgaca

SEQ ID NO: 11404 - DNA, 20 bp, synthetic construct
  misc_feature 1..20: note = Description of Artificial Sequence: Synthetic oligonucleotide
  misc_feature 1..20: note = Target: SCN10A; (+) strand; PAM type: NNNNGHTT; PAM sequence: CTTTGCTT
  source 1..20: mol_type = other DNA
ttggctgtgatgacactctg

SEQ ID NO: 11405 - DNA, 20 bp, synthetic construct
  misc_feature 1..20: note = Description of Artificial Sequence: Synthetic oligonucleotide
  misc_feature 1..20: note = Target: SCN10A; (+) strand; PAM type: NNNNGHTT; PAM sequence: TGCAGTTT
  source 1..20: mol_type = other DNA
caagttcagctggaagtgac

SEQ ID NO: 11406 - DNA, 20 bp, synthetic construct
  misc_feature 1..20: note = Description of Artificial Sequence: Synthetic oligonucleotide
  misc_feature 1..20: note = Target: SCN10A; (+) strand; PAM type: NNNNGHTT; PAM sequence: GCCTGTTT
  source 1..20: mol_type = other DNA
ccacaggctcacagtctttg

SEQ ID NO: 11407 - DNA, 20 bp, synthetic construct
  misc_feature 1..20: note = Description of Artificial Sequence: Synthetic oligonucleotide
  misc_feature 1..20: note = Target: SCN10A; (+) strand; PAM type: NNNNGHTT; PAM sequence: TTATGATT
  source 1..20: mol_type = other DNA
tctgtgaaggccaggacccc

SEQ ID NO: 11408 - DNA, 20 bp, synthetic construct
  misc_feature 1..20: note = Description of Artificial Sequence: Synthetic oligonucleotide
  misc_feature 1..20: note = Target: SCN10A; (+) strand; PAM type: NNNNGHTT; PAM sequence: TGAAGATT
  source 1..20: mol_type = other DNA
cctctccctacctcctactg

SEQ ID NO: 11409 - DNA, 20 bp, synthetic construct
  misc_feature 1..20: note = Description of Artificial Sequence: Synthetic oligonucleotide
  misc_feature 1..20: note = Target: SCN10A; (+) strand; PAM type: NNNNGHTT; PAM sequence: CTCTGTTT
  source 1..20: mol_type = other DNA
cctcctactgtgaagattga

SEQ ID NO: 11410 - DNA, 20 bp, synthetic construct
  misc_feature 1..20: note = Description of Artificial Sequence: Synthetic oligonucleotide
  misc_feature 1..20: note = Target: SCN10A; (+) strand; PAM type: NNNNGHTT; PAM sequence: TGAGGATT
  source 1..20: mol_type = other DNA
gtgttaattacaagggggcc

SEQ ID NO: 11411 - DNA, 20 bp, synthetic construct
  misc_feature 1..20: note = Description of Artificial Sequence: Synthetic oligonucleotide
  misc_feature 1..20: note = Target: SCN10A; (+) strand; PAM type: NNNNGHTT; PAM sequence: AAGGGATT
  source 1..20: mol_type = other DNA
ctggctgacagctaaagcat

SEQ ID NO: 11412 - DNA, 20 bp, synthetic construct
  misc_feature 1..20: note = Description of Artificial Sequence: Synthetic oligonucleotide
  misc_feature 1..20: note = Target: SCN10A; (+) strand; PAM type: NNNNGHTT; PAM sequence: ATTTGTTT
  source 1..20: mol_type = other DNA
gctgtctgcacaatgcctta

SEQ ID NO: 11413 - DNA, 20 bp, synthetic construct
  misc_feature 1..20: note = Description of Artificial Sequence: Synthetic oligonucleotide
  misc_feature 1..20: note = Target: SCN10A; (+) strand; PAM type: NNNNGHTT; PAM sequence: AGCTGTTT
  source 1..20: mol_type = other DNA
tttttttttttttcggttcc

SEQ ID NO: 11414 - DNA, 20 bp, synthetic construct
  misc_feature 1..20: note = Description of Artificial Sequence: Synthetic oligonucleotide
  misc_feature 1..20: note = Target: SCN10A; (+) strand; PAM type: NNNNGHTT; PAM sequence: ATAGGTTT
  source 1..20: mol_type = other DNA
ctttatgttagggcctggag

SEQ ID NO: 11415 - DNA, 20 bp, synthetic construct
  misc_feature 1..20: note = Description of Artificial Sequence: Synthetic oligonucleotide
  misc_feature 1..20: note = Target: SCN10A; (+) strand; PAM type: NNNNGHTT; PAM sequence: AGATGTTT
  source 1..20: mol_type = other DNA
ctatatgatgtctaacttga

SEQ ID NO: 11416 - DNA, 20 bp, synthetic construct
  misc_feature 1..20: note = Description of Artificial Sequence: Synthetic oligonucleotide
  misc_feature 1..20: note = Target: SCN10A; (+) strand; PAM type: NNNNGHTT; PAM sequence: GTTTGATT
  source 1..20: mol_type = other DNA
atgatgtctaacttgaagat

SEQ ID NO: 11417 - DNA, 20 bp, synthetic construct
  misc_feature 1..20: note = Description of Artificial Sequence: Synthetic oligonucleotide
  misc_feature 1..20: note = Target: SCN10A; (+) strand; PAM type: NNNNGHTT; PAM sequence: TTTGGATT
  source 1..20: mol_type = other DNA
acttgggaaataattataat

SEQ ID NO: 11418 - DNA, 20 bp, synthetic construct
  misc_feature 1..20: note = Description of Artificial Sequence: Synthetic oligonucleotide
  misc_feature 1..20: note = Target: SCN10A; (+) strand; PAM type: NNNNGHTT; PAM sequence: TCCAGTTT
  source 1..20: mol_type = other DNA
tggaagaccttctgtgaatt

SEQ ID NO: 11419 - DNA, 20 bp, synthetic construct
  misc_feature 1..20: note = Description of Artificial Sequence: Synthetic oligonucleotide
  misc_feature 1..20: note = Target: SCN10A; (+) strand; PAM type: NNNNGHTT; PAM sequence: GAAAGATT
  source 1..20: mol_type = other DNA
ggaggtaaggagagagggta

SEQ ID NO: 11420 - DNA, 20 bp, synthetic construct
  misc_feature 1..20: note = Description of Artificial Sequence: Synthetic oligonucleotide
  misc_feature 1..20: note = Target: SCN10A; (+) strand; PAM type: NNNNGHTT; PAM sequence: GTGGGTTT
  source 1..20: mol_type = other DNA
gagggtagaaagattgatat

SEQ ID NO: 11421 - DNA, 20 bp, synthetic construct
  misc_feature 1..20: note = Description of Artificial Sequence: Synthetic oligonucleotide
  misc_feature 1..20: note = Target: SCN10A; (+) strand; PAM type: NNNNGHTT; PAM sequence: TTCTGCTT
  source 1..20: mol_type = other DNA
aagattgatatgtgggtttt

SEQ ID NO: 11422 - DNA, 20 bp, synthetic construct
  misc_feature 1..20: note = Description of Artificial Sequence: Synthetic oligonucleotide
  misc_feature 1..20: note = Target: SCN10A; (+) strand; PAM type: NNNNGHTT; PAM sequence: AAGGGATT
  source 1..20: mol_type = other DNA
tgcttattttccagctctat

SEQ ID NO: 11423 - DNA, 20 bp, synthetic construct
  misc_feature 1..20: note = Description of Artificial Sequence: Synthetic oligonucleotide
  misc_feature 1..20: note = Target: SCN10A; (+) strand; PAM type: NNNNGHTT; PAM sequence: CTATGTTT
  source 1..20: mol_type = other DNA
tcatagaactaagtacttgg

SEQ ID NO: 11424 - DNA, 20 bp, synthetic construct
  misc_feature 1..20: note = Description of Artificial Sequence: Synthetic oligonucleotide
  misc_feature 1..20: note = Target: SCN10A; (+) strand; PAM type: NNNNGHTT; PAM sequence: ACATGATT
  source 1..20: mol_type = other DNA
gacacagaaggacaaaaacg

SEQ ID NO: 11425 - DNA, 20 bp, synthetic construct
  misc_feature 1..20: note = Description of Artificial Sequence: Synthetic oligonucleotide
  misc_feature 1..20: note = Target: SCN10A; (+) strand; PAM type: NNNNGHTT; PAM sequence: GGTGGTTT
  source 1..20: mol_type = other DNA
atgggagcagagaatagaat

SEQ ID NO: 11426 - DNA, 20 bp, synthetic construct
  misc_feature 1..20: note = Description of Artificial Sequence: Synthetic oligonucleotide
  misc_feature 1..20: note = Target: SCN10A; (+) strand; PAM type: NNNNGHTT; PAM sequence: ACATGTTT
  source 1..20: mol_type = other DNA
gaaatatttggaggttatgg

SEQ ID NO: 11427 - DNA, 20 bp, synthetic construct
  misc_feature 1..20: note = Description of Artificial Sequence: Synthetic oligonucleotide
  misc_feature 1..20: note = Target: SCN10A; (+) strand; PAM type: NNNNGHTT; PAM sequence: GATGGTTT
  source 1..20: mol_type = other DNA
tttctggcattgatggtggt

SEQ ID NO: 11428 - DNA, 20 bp, synthetic construct
  misc_feature 1..20: note = Description of Artificial Sequence: Synthetic oligonucleotide
  misc_feature 1..20: note = Target: SCN10A; (+) strand; PAM type: NNNNGHTT; PAM sequence: TATAGCTT
  source 1..20: mol_type = other DNA
agttgtgtacattaaacatg

SEQ ID NO: 11429 - DNA, 20 bp, synthetic construct
  misc_feature 1..20: note = Description of Artificial Sequence: Synthetic oligonucleotide
  misc_feature 1..20: note = Target: SCN10A; (+) strand; PAM type: NNNNGHTT; PAM sequence: CTGTGTTT
  source 1..20: mol_type = other DNA
gaaatacacgcaacccaagg

SEQ ID NO: 11430 - DNA, 20 bp, synthetic construct
  misc_feature 1..20: note = Description of Artificial Sequence: Synthetic oligonucleotide
  misc_feature 1..20: note = Target: SCN10A; (+) strand; PAM type: NNNNGHTT; PAM sequence: GCATGATT
  source 1..20: mol_type = other DNA
atgccaggtgaagctggtga

SEQ ID NO: 11431 - DNA, 20 bp, synthetic construct
  misc_feature 1..20: note = Description of Artificial Sequence: Synthetic oligonucleotide
  misc_feature 1..20: note = Target: SCN10A; (+) strand; PAM type: NNNNGHTT; PAM sequence: AGAAGATT
  source 1..20: mol_type = other DNA
tgacaggcagcaagttcatt

SEQ ID NO: 11432 - DNA, 20 bp, synthetic construct
  misc_feature 1..20: note = Description of Artificial Sequence: Synthetic oligonucleotide
  misc_feature 1..20: note = Target: SCN10A; (+) strand; PAM type: NNNNGHTT; PAM sequence: CTCAGCTT
  source 1..20: mol_type = other DNA
agattggagcctgttctaaa

SEQ ID NO: 11433 - DNA, 20 bp, synthetic construct
  misc_feature 1..20: note = Description of Artificial Sequence: Synthetic oligonucleotide
  misc_feature 1..20: note = Target: SCN10A; (+) strand; PAM type: NNNNGHTT; PAM sequence: ACCTGCTT
  source 1..20: mol_type = other DNA
tataaaataaggataataac

SEQ ID NO: 11434 - DNA, 20 bp, synthetic construct
  misc_feature 1..20: note = Description of Artificial Sequence: Synthetic oligonucleotide
  misc_feature 1..20: note = Target: SCN10A; (+) strand; PAM type: NNNNGHTT; PAM sequence: TAGAGATT
  source 1..20: mol_type = other DNA
tccctaatagaacagttgtg

SEQ ID NO: 11435 - DNA, 20 bp, synthetic construct
  misc_feature 1..20: note = Description of Artificial Sequence: Synthetic oligonucleotide
  misc_feature 1..20: note = Target: SCN10A; (+) strand; PAM type: NNNNGHTT; PAM sequence: AACAGATT
  source 1..20: mol_type = other DNA
caatccatctccttttccag

SEQ ID NO: 11436 - DNA, 20 bp, synthetic construct
  misc_feature 1..20: note = Description of Artificial Sequence: Synthetic oligonucleotide
  misc_feature 1..20: note = Target: SCN10A; (+) strand; PAM type: NNNNGHTT; PAM sequence: CCCTGCTT
  source 1..20: mol_type = other DNA
ctcacattacaccacctgcc

SEQ ID NO: 11437 - DNA, 20 bp, synthetic construct
  misc_feature 1..20: note = Description of Artificial Sequence: Synthetic oligonucleotide
  misc_feature 1..20: note = Target: SCN10A; (+) strand; PAM type: NNNNGHTT; PAM sequence: GAGTGATT
  source 1..20: mol_type = other DNA
cggtctgaggttctcaggag

SEQ ID NO: 11438 - DNA, 20 bp, synthetic construct
  misc_feature 1..20: note = Description of Artificial Sequence: Synthetic oligonucleotide
  misc_feature 1..20: note = Target: SCN10A; (+) strand; PAM type: NNNNGHTT; PAM sequence: CTTGGTTT
  source 1..20: mol_type = other DNA
aaaagttggttggttatttc

SEQ ID NO: 11439 - DNA, 20 bp, synthetic construct
  misc_feature 1..20: note = Description of Artificial Sequence: Synthetic oligonucleotide
  misc_feature 1..20: note = Target: SCN10A; (+) strand; PAM type: NNNNGHTT; PAM sequence: TGGGGCTT
  source 1..20: mol_type = other DNA
caaagacccccaaacagagg

SEQ ID NO: 11440 - DNA, 20 bp, synthetic construct
  misc_feature 1..20: note = Description of Artificial Sequence: Synthetic oligonucleotide
  misc_feature 1..20: note = Target: SCN10A; (+) strand; PAM type: NNNNGHTT; PAM sequence: GGTTGATT
  source 1..20: mol_type = other DNA
gaagacggccacaaagaact

SEQ ID NO: 11441 - DNA, 20 bp, synthetic construct
  misc_feature 1..20: note = Description of Artificial Sequence: Synthetic oligonucleotide
  misc_feature 1..20: note = Target: SCN10A; (+) strand; PAM type: NNNNGHTT; PAM sequence: AAAAGCTT
  source 1..20: mol_type = other DNA
aggaccatgatggtgatgtc

SEQ ID NO: 11442 - DNA, 20 bp, synthetic construct
  misc_feature 1..20: note = Description of Artificial Sequence: Synthetic oligonucleotide
  misc_feature 1..20: note = Target: SCN10A; (+) strand; PAM type: NNNNGHTT; PAM sequence: ATGAGTTT
  source 1..20: mol_type = other DNA
ggcatctgtgttatctgtag

SEQ ID NO: 11443 - DNA, 20 bp, synthetic construct
  misc_feature 1..20: note = Description of Artificial Sequence: Synthetic oligonucleotide
  misc_feature 1..20: note = Target: SCN10A; (+) strand; PAM type: NNNNGHTT; PAM sequence: AGCTGTTT
  source 1..20: mol_type = other DNA
gtcttctctactagacaatg

SEQ ID NO: 11444 - DNA, 20 bp, synthetic construct
  misc_feature 1..20: note = Description of Artificial Sequence: Synthetic oligonucleotide
  misc_feature 1..20: note = Target: SCN10A; (+) strand; PAM type: NNNNGHTT; PAM sequence: CTTTGTTT
  source 1..20: mol_type = other DNA
aagggctataccttccttaa

SEQ ID NO: 11445 - DNA, 20 bp, synthetic construct
  misc_feature 1..20: note = Description of Artificial Sequence: Synthetic oligonucleotide
  misc_feature 1..20: note = Target: SCN10A; (+) strand; PAM type: NNNNGHTT; PAM sequence: AGCTGCTT
  source 1..20: mol_type = other DNA
gcacattgcaagagttcaag

SEQ ID NO: 11446 - DNA, 20 bp, synthetic construct
  misc_feature 1..20: note = Description of Artificial Sequence: Synthetic oligonucleotide
  misc_feature 1..20: note = Target: SCN10A; (+) strand; PAM type: NNNNGHTT; PAM sequence: GGTTGTTT
  source 1..20: mol_type = other DNA
agggcgtagggtcaagtctt

SEQ ID NO: 11447 - DNA, 20 bp, synthetic construct
  misc_feature 1..20: note = Description of Artificial Sequence: Synthetic oligonucleotide
  misc_feature 1..20: note = Target: SCN10A; (+) strand; PAM type: NNNNGHTT; PAM sequence: CCACGCTT
  source 1..20: mol_type = other DNA
cttgatcccaaccccattcc

SEQ ID NO: 11448 - DNA, 20 bp, synthetic construct
  misc_feature 1..20: note = Description of Artificial Sequence: Synthetic oligonucleotide
  misc_feature 1..20: note = Target: SCN10A; (+) strand; PAM type: NNNNGHTT; PAM sequence: TCTTGCTT
  source 1..20: mol_type = other DNA
ctgtgtcttgtaaaacccct

SEQ ID NO: 11449 - DNA, 20 bp, synthetic construct
  misc_feature 1..20: note = Description of Artificial Sequence: Synthetic oligonucleotide
  misc_feature 1..20: note = Target: SCN10A; (+) strand; PAM type: NNNNGHTT; PAM sequence: TGAAGCTT
  source 1..20: mol_type = other DNA
tgtaaaaccccttcttgctt

SEQ ID NO: 11450 - DNA, 20 bp, synthetic construct
  misc_feature 1..20: note = Description of Artificial Sequence: Synthetic oligonucleotide
  misc_feature 1..20: note = Target: SCN10A; (+) strand; PAM type: NNNNGHTT; PAM sequence: CCTAGTTT
  source 1..20: mol_type = other DNA
cttgctttgaagctttgcca

SEQ ID NO: 11451 - DNA, 20 bp, synthetic construct
  misc_feature 1..20: note = Description of Artificial Sequence: Synthetic oligonucleotide
  misc_feature 1..20: note = Target: SCN10A; (+) strand; PAM type: NNNNGHTT; PAM sequence: TGCCGCTT
  source 1..20: mol_type = other DNA
ttttgtcacttcttcattac

SEQ ID NO: 11452 - DNA, 20 bp, synthetic construct
  misc_feature 1..20: note = Description of Artificial Sequence: Synthetic oligonucleotide
  misc_feature 1..20: note = Target: SCN10A; (+) strand; PAM type: NNNNGHTT; PAM sequence: CTTGGTTT
  source 1..20: mol_type = other DNA
atgtgcattactctttgtct

SEQ ID NO: 11453 - DNA, 20 bp, synthetic construct
  misc_feature 1..20: note = Description of Artificial Sequence: Synthetic oligonucleotide
  misc_feature 1..20: note = Target: SCN10A; (+) strand; PAM type: NNNNGHTT; PAM sequence: CCTAGTTT
  source 1..20: mol_type = other DNA
attgcacaaatctctaatga

SEQ ID NO: 11454 - DNA, 20 bp, synthetic construct
  misc_feature 1..20: note = Description of Artificial Sequence: Synthetic oligonucleotide
  misc_feature 1..20: note = Target: SCN10A; (+) strand; PAM type: NNNNGHTT; PAM sequence: CAGAGCTT
  source 1..20: mol_type = other DNA
cactcctcagcccacatcaa

SEQ ID NO: 11455 - DNA, 20 bp, synthetic construct
  misc_feature 1..20: note = Description of Artificial Sequence: Synthetic oligonucleotide
  misc_feature 1..20: note = Target: SCN10A; (+) strand; PAM type: NNNNGHTT; PAM sequence: CAGAGATT
  source 1..20: mol_type = other DNA
agcttttgcctctatcctga

SEQ ID NO: 11456 - DNA, 20 bp, synthetic construct
  misc_feature 1..20: note = Description of Artificial Sequence: Synthetic oligonucleotide
  misc_feature 1..20: note = Target: SCN10A; (+) strand; PAM type: NNNNGHTT; PAM sequence: GGACGCTT
  source 1..20: mol_type = other DNA
tcccataatattagatccaa

SEQ ID NO: 11457 - DNA, 20 bp, synthetic construct
  misc_feature 1..20: note = Description of Artificial Sequence: Synthetic oligonucleotide
  misc_feature 1..20: note = Target: SCN10A; (+) strand; PAM type: NNNNGHTT; PAM sequence: TGTTGCTT
  source 1..20: mol_type = other DNA
agtacccttctaccttgaaa

SEQ ID NO: 11458 - DNA, 20 bp, synthetic construct
  misc_feature 1..20: note = Description of Artificial Sequence: Synthetic oligonucleotide
  misc_feature 1..20: note = Target: SCN10A; (+) strand; PAM type: NNNNGHTT; PAM sequence: TTCTGCTT
  source 1..20: mol_type = other DNA
gtctccaccatgccttacat

SEQ ID NO: 11459 - DNA, 20 bp, synthetic construct
  misc_feature 1..20: note = Description of Artificial Sequence: Synthetic oligonucleotide
  misc_feature 1..20: note = Target: SCN10A; (+) strand; PAM type: NNNNGHTT; PAM sequence: AACTGTTT
  source 1..20: mol_type = other DNA
tatatgtgcaacttttggcc

SEQ ID NO: 11460 - DNA, 20 bp, synthetic construct
  misc_feature 1..20: note = Description of Artificial Sequence: Synthetic oligonucleotide
  misc_feature 1..20: note = Target: SCN10A; (+) strand; PAM type: NNNNGHTT; PAM sequence: TTCTGCTT
  source 1..20: mol_type = other DNA
tgatgaggctgatccttgcc

SEQ ID NO: 11461 - DNA, 20 bp, synthetic construct
  misc_feature 1..20: note = Description of Artificial Sequence: Synthetic oligonucleotide
  misc_feature 1..20: note = Target: SCN10A; (+) strand; PAM type: NNNNGHTT; PAM sequence: GGGGGATT
  source 1..20: mol_type = other DNA
acatctttcctggggcagga

SEQ ID NO: 11462 - DNA, 20 bp, synthetic construct
  misc_feature 1..20: note = Description of Artificial Sequence: Synthetic oligonucleotide
  misc_feature 1..20: note = Target: SCN10A; (+) strand; PAM type: NNNNGHTT; PAM sequence: TGAAGTTT
  source 1..20: mol_type = other DNA
catcgttaagtggctgggtg

SEQ ID NO: 11463 - DNA, 20 bp, synthetic construct
  misc_feature 1..20: note = Description of Artificial Sequence: Synthetic oligonucleotide
  misc_feature 1..20: note = Target: SCN10A; (+) strand; PAM type: NNNNGHTT; PAM sequence: AGTAGCTT
  source 1..20: mol_type = other DNA
attctgactttagggaatgg

SEQ ID NO: 11464 - DNA, 20 bp, synthetic construct
  misc_feature 1..20: note = Description of Artificial Sequence: Synthetic oligonucleotide
  misc_feature 1..20: note = Target: SCN10A; (+) strand; PAM type: NNNNGHTT; PAM sequence: CTTGGATT
  source 1..20: mol_type = other DNA
ggagtagcttgctagctgct

SEQ ID NO: 11465 - DNA, 20 bp, synthetic construct
  misc_feature 1..20: note = Description of Artificial Sequence: Synthetic oligonucleotide
  misc_feature 1..20: note = Target: SCN10A; (+) strand; PAM type: NNNNGHTT; PAM sequence: GGGTGATT
  source 1..20: mol_type = other DNA
gctctcagagacgatgaagt

SEQ ID NO: 11466 - DNA, 20 bp, synthetic construct
  misc_feature 1..20: note = Description of Artificial Sequence: Synthetic oligonucleotide
  misc_feature 1..20: note = Target: SCN10A; (+) strand; PAM type: NNNNGHTT; PAM sequence: GATTGATT
  source 1..20: mol_type = other DNA
tcagagacgatgaagtgggt

SEQ ID NO: 11467 - DNA, 20 bp, synthetic construct
  misc_feature 1..20: note = Description of Artificial Sequence: Synthetic oligonucleotide
  misc_feature 1..20: note = Target: SCN10A; (+) strand; PAM type: NNNNGHTT; PAM sequence: AGCTGCTT
  source 1..20: mol_type = other DNA
tataaagtggagtatgtgag

SEQ ID NO: 11468 - DNA, 20 bp, synthetic construct
  misc_feature 1..20: note = Description of Artificial Sequence: Synthetic oligonucleotide
  misc_feature 1..20: note = Target: SCN10A; (+) strand; PAM type: NNNNGHTT; PAM sequence: TATTGATT
  source 1..20: mol_type = other DNA
gagtatgtgagagctgcttt

SEQ ID NO: 11469 - DNA, 20 bp, synthetic construct
  misc_feature 1..20: note = Description of Artificial Sequence: Synthetic oligonucleotide
  misc_feature 1..20: note = Target: SCN10A; (+) strand; PAM type: NNNNGHTT; PAM sequence: ACAAGATT
  source 1..20: mol_type = other DNA
taacttttcctatggaagaa

SEQ ID NO: 11470 - DNA, 20 bp, synthetic construct
  misc_feature 1..20: note = Description of Artificial Sequence: Synthetic oligonucleotide
  misc_feature 1..20: note = Target: SCN10A; (+) strand; PAM type: NNNNGHTT; PAM sequence: CAGTGCTT
  source 1..20: mol_type = other DNA
atggggcagaaatcctgtgt

SEQ ID NO: 11471 - DNA, 20 bp, synthetic construct
  misc_feature 1..20: note = Description of Artificial Sequence: Synthetic oligonucleotide
  misc_feature 1..20: note = Target: SCN10A; (+) strand; PAM type: NNNNGHTT; PAM sequence: ACCAGCTT
  source 1..20: mol_type = other DNA
gtcagtgctttgctggtatg

SEQ ID NO: 11472 - DNA, 20 bp, synthetic construct
  misc_feature 1..20: note = Description of Artificial Sequence: Synthetic oligonucleotide
  misc_feature 1..20: note = Target: SCN10A; (+) strand; PAM type: NNNNGHTT; PAM sequence: CTTGGATT
  source 1..20: mol_type = other DNA
gagtgggaatttccttttgc

SEQ ID NO: 11473 - DNA, 20 bp, synthetic construct
  misc_feature 1..20: note = Description of Artificial Sequence: Synthetic oligonucleotide
  misc_feature 1..20: note = Target: SCN10A; (+) strand; PAM type: NNNNGHTT; PAM sequence: TCCGGCTT
  source 1..20: mol_type = other DNA
actttgaagagggaagatga

SEQ ID NO: 11474 - DNA, 20 bp, synthetic construct
  misc_feature 1..20: note = Description of Artificial Sequence: Synthetic oligonucleotide
  misc_feature 1..20: note = Target: SCN10A; (+) strand; PAM type: NNNNGHTT; PAM sequence: TGCTGCTT
  source 1..20: mol_type = other DNA
ggagtgcagccatctgcagg

SEQ ID NO: 11475 - DNA, 20 bp, synthetic construct
  misc_feature 1..20: note = Description of Artificial Sequence: Synthetic oligonucleotide
  misc_feature 1..20: note = Target: SCN10A; (+) strand; PAM type: NNNNGHTT; PAM sequence: CTCTGCTT
  source 1..20: mol_type = other DNA
atctgcaggtgctgcttgga

SEQ ID NO: 11476 - DNA, 20 bp, synthetic construct
  misc_feature 1..20: note = Description of Artificial Sequence: Synthetic oligonucleotide
  misc_feature 1..20: note = Target: SCN10A; (+) strand; PAM type: NNNNGHTT; PAM sequence: TGCTGATT
  source 1..20: mol_type = other DNA
gctgcttggactctgctttg

SEQ ID NO: 11477 - DNA, 20 bp, synthetic construct
  misc_feature 1..20: note = Description of Artificial Sequence: Synthetic oligonucleotide
  misc_feature 1..20: note = Target: SCN10A; (+) strand; PAM type: NNNNGHTT; PAM sequence: CAAAGTTT
  source 1..20: mol_type = other DNA
tgttggcatccctgccactt

SEQ ID NO: 11478 - DNA, 20 bp, synthetic construct
  misc_feature 1..20: note = Description of Artificial Sequence: Synthetic oligonucleotide
  misc_feature 1..20: note = Target: SCN10A; (+) strand; PAM type: NNNNGHTT; PAM sequence: TTTTGTTT
  source 1..20: mol_type = other DNA
gcatccctgccacttcaaag

SEQ ID NO: 11479 - DNA, 20 bp, synthetic construct
  misc_feature 1..20: note = Description of Artificial Sequence: Synthetic oligonucleotide
  misc_feature 1..20: note = Target: SCN10A; (+) strand; PAM type: NNNNGHTT; PAM sequence: GAGTGTTT
  source 1..20: mol_type = other DNA
aaattagggaacaaaggaaa

SEQ ID NO: 11480 - DNA, 20 bp, synthetic construct
  misc_feature 1..20: note = Description of Artificial Sequence: Synthetic oligonucleotide
  misc_feature 1..20: note = Target: SCN10A; (+) strand; PAM type: NNNNGHTT; PAM sequence: CCTTGCTT
  source 1..20: mol_type = other DNA
aacaaaggaaagagtgttta

SEQ ID NO: 11481 - DNA, 20 bp, synthetic construct
  misc_feature 1..20: note = Description of Artificial Sequence: Synthetic oligonucleotide
  misc_feature 1..20: note = Target: SCN10A; (+) strand; PAM type: NNNNGHTT; PAM sequence: TGAGGTTT
  source 1..20: mol_type = other DNA
ctcaggaacagaattggtta

SEQ ID NO: 11482 - DNA, 20 bp, synthetic construct
  misc_feature 1..20: note = Description of Artificial Sequence: Synthetic oligonucleotide
  misc_feature 1..20: note = Target: SCN10A; (+) strand; PAM type: NNNNGHTT; PAM sequence: TGCAGCTT
  source 1..20: mol_type = other DNA
catcctcggaggatcttagt

SEQ ID NO: 11483 - DNA, 20 bp, synthetic construct
  misc_feature 1..20: note = Description of Artificial Sequence: Synthetic oligonucleotide
  misc_feature 1..20: note = Target: SCN10A; (+) strand; PAM type: NNNNGHTT; PAM sequence: TGGTGATT
  source 1..20: mol_type = other DNA
tgcagcttaattaggagaaa

SEQ ID NO: 11484 - DNA, 20 bp, synthetic construct
  misc_feature 1..20: note = Description of Artificial Sequence: Synthetic oligonucleotide
  misc_feature 1..20: note = Target: SCN10A; (+) strand; PAM type: NNNNGHTT; PAM sequence: ATATGATT
  source 1..20: mol_type = other DNA
ctccagggtccctttttgaa

SEQ ID NO: 11485 - DNA, 20 bp, synthetic construct
  misc_feature 1..20: note = Description of Artificial Sequence: Synthetic oligonucleotide
  misc_feature 1..20: note = Target: SCN10A; (+) strand; PAM type: NNNNGHTT; PAM sequence: GGAAGCTT
  source 1..20: mol_type = other DNA
tgttgtcttccttgagggga

SEQ ID NO: 11486 - DNA, 20 bp, synthetic construct
  misc_feature 1..20: note = Description of Artificial Sequence: Synthetic oligonucleotide
  misc_feature 1..20: note = Target: SCN10A; (+) strand; PAM type: NNNNGHTT; PAM sequence: GAGAGATT
  source 1..20: mol_type = other DNA
gaagaagctgggatgtcaaa

SEQ ID NO: 11487 - DNA, 20 bp, synthetic construct
  misc_feature 1..20: note = Description of Artificial Sequence: Synthetic oligonucleotide
  misc_feature 1..20: note = Target: SCN10A; (+) strand; PAM type: NNNNGHTT; PAM sequence: TCATGTTT
  source 1..20: mol_type = other DNA
ggggaaggtgccaaaaactt

SEQ ID NO: 11488 - DNA, 20 bp, synthetic construct
  misc_feature 1..20: note = Description of Artificial Sequence: Synthetic oligonucleotide
  misc_feature 1..20: note = Target: SCN10A; (+) strand; PAM type: NNNNGHTT; PAM sequence: TGTGGATT
  source 1..20: mol_type = other DNA
tccttggcatctggctcaaa

SEQ ID NO: 11489 - DNA, 20 bp, synthetic construct
  misc_feature 1..20: note = Description of Artificial Sequence: Synthetic oligonucleotide
  misc_feature 1..20: note = Target: SCN10A; (+) strand; PAM type: NNNNGHTT; PAM sequence: AGCTGCTT
  source 1..20: mol_type = other DNA
gtaaaggccagtgtggactc

SEQ ID NO: 11490 - DNA, 20 bp, synthetic construct
  misc_feature 1..20: note = Description of Artificial Sequence: Synthetic oligonucleotide
  misc_feature 1..20: note = Target: SCN10A; (+) strand; PAM type: NNNNGHTT; PAM sequence: GCTTGCTT
  source 1..20: mol_type = other DNA
aggccagtgtggactcagct

SEQ ID NO: 11491 - DNA, 20 bp, synthetic construct
  misc_feature 1..20: note = Description of Artificial Sequence: Synthetic oligonucleotide
  misc_feature 1..20: note = Target: SCN10A; (+) strand; PAM type: NNNNGHTT; PAM sequence: TCTTGATT
  source 1..20: mol_type = other DNA
ggttcactcaaatccagtta

SEQ ID NO: 11492 - DNA, 20 bp, synthetic construct
  misc_feature 1..20: note = Description of Artificial Sequence: Synthetic oligonucleotide
  misc_feature 1..20: note = Target: SCN10A; (+) strand; PAM type: NNNNGHTT; PAM sequence: GGGTGATT
  source 1..20: mol_type = other DNA
tccagttatcttgattgtat

SEQ ID NO: 11493 - DNA, 20 bp, synthetic construct
  misc_feature 1..20: note = Description of Artificial Sequence: Synthetic oligonucleotide
  misc_feature 1..20: note = Target: SCN10A; (+) strand; PAM type: NNNNGHTT; PAM sequence: AAATGTTT
  source 1..20: mol_type = other DNA
tcatcacttttttctcttgt

SEQ ID NO: 11494 - DNA, 20 bp, synthetic construct
  misc_feature 1..20: note = Description of Artificial Sequence: Synthetic oligonucleotide
  misc_feature 1..20: note = Target: SCN10A; (+) strand; PAM type: NNNNGHTT; PAM sequence: CAAAGTTT
  source 1..20: mol_type = other DNA
tgtttttcactttgttctga

SEQ ID NO: 11495 - DNA, 20 bp, synthetic construct
  misc_feature 1..20: note = Description of Artificial Sequence: Synthetic oligonucleotide
  misc_feature 1..20: note = Target: SCN10A; (+) strand; PAM type: NNNNGHTT; PAM sequence: CCTTGATT
  source 1..20: mol_type = other DNA
taaattatgcaaatcctata

SEQ ID NO: 11496 - DNA, 20 bp, synthetic construct
  misc_feature 1..20: note = Description of Artificial Sequence: Synthetic oligonucleotide
  misc_feature 1..20: note = Target: SCN10A; (+) strand; PAM type: NNNNGHTT; PAM sequence: AATAGCTT
  source 1..20: mol_type = other DNA
accttgatttaaaaaaatct

SEQ ID NO: 11497 - DNA, 20 bp, synthetic construct
  misc_feature 1..20: note = Description of Artificial Sequence: Synthetic oligonucleotide
  misc_feature 1..20: note = Target: SCN10A; (+) strand; PAM type: NNNNGHTT; PAM sequence: AAAGGCTT
  source 1..20: mol_type = other DNA
tctccataattcatttaggg

SEQ ID NO: 11498 - DNA, 20 bp, synthetic construct
  misc_feature 1..20: note = Description of Artificial Sequence: Synthetic oligonucleotide
  misc_feature 1..20: note = Target: SCN10A; (+) strand; PAM type: NNNNGHTT; PAM sequence: CTGTGATT
  source 1..20: mol_type = other DNA
aattgtgtcatcagcaatac

SEQ ID NO: 11499 - DNA, 20 bp, synthetic construct
  misc_feature 1..20: note = Description of Artificial Sequence: Synthetic oligonucleotide
  misc_feature 1..20: note = Target: SCN10A; (+) strand; PAM type: NNNNGHTT; PAM sequence: GAAAGTTT
  source 1..20: mol_type = other DNA
aatgctgcatcttagccaca

SEQ ID NO: 11500 - DNA, 20 bp, synthetic construct
  misc_feature 1..20: note = Description of Artificial Sequence: Synthetic oligonucleotide
  misc_feature 1..20: note = Target: SCN10A; (+) strand; PAM type: NNNNGHTT; PAM sequence: AGAGGCTT
  source 1..20: mol_type = other DNA
gtgctatcttagggcctctc

SEQ ID NO: 11501 - DNA, 20 bp, synthetic construct
  misc_feature 1..20: note = Description of Artificial Sequence: Synthetic oligonucleotide
  misc_feature 1..20: note = Target: SCN10A; (+) strand; PAM type: NNNNGHTT; PAM sequence: TGATGTTT
  source 1..20: mol_type = other DNA
cttagggcctctcagaggct

SEQ ID NO: 11502 - DNA, 20 bp, synthetic construct
  misc_feature 1..20: note = Description of Artificial Sequence: Synthetic oligonucleotide
  misc_feature 1..20: note = Target: SCN10A; (+) strand; PAM type: NNNNGHTT; PAM sequence: ACAAGTTT
  source 1..20: mol_type = other DNA
agaccatgatacataaccac

SEQ ID NO: 11503 - DNA, 20 bp, synthetic construct
  misc_feature 1..20: note = Description of Artificial Sequence: Synthetic oligonucleotide
  misc_feature 1..20: note = Target: SCN10A; (+) strand; PAM type: NNNNGHTT; PAM sequence: CTTAGCTT
  source 1..20: mol_type = other DNA
tctaactacccttactgtca

SEQ ID NO: 11504 - DNA, 20 bp, synthetic construct
  misc_feature 1..20: note = Description of Artificial Sequence: Synthetic oligonucleotide
  misc_feature 1..20: note = Target: SCN10A; (+) strand; PAM type: NNNNGHTT; PAM sequence: CAGTGCTT
  source 1..20: mol_type = other DNA
ctaaaactgttggagaaact

SEQ ID NO: 11505 - DNA, 20 bp, synthetic construct
  misc_feature 1..20: note = Description of Artificial Sequence: Synthetic oligonucleotide
  misc_feature 1..20: note = Target: SCN10A; (+) strand; PAM type: NNNNGHTT; PAM sequence: AACAGATT
  source 1..20: mol_type = other DNA
agaaactcagtgcttccccc

SEQ ID NO: 11506 - DNA, 20 bp, synthetic construct
  misc_feature 1..20: note = Description of Artificial Sequence: Synthetic oligonucleotide
  misc_feature 1..20: note = Target: SCN10A; (+) strand; PAM type: NNNNGHTT; PAM sequence: GTATGTTT
  source 1..20: mol_type = other DNA
atttcaaatagctgtaaaag

SEQ ID NO: 11507 - DNA, 20 bp, synthetic construct
  misc_feature 1..20: note = Description of Artificial Sequence: Synthetic oligonucleotide
  misc_feature 1..20: note = Target: SCN10A; (+) strand; PAM type: NNNNGHTT; PAM sequence: AGTTGCTT
  source 1..20: mol_type = other DNA
tgtttactccagaagaccag

SEQ ID NO: 11508 - DNA, 20 bp, synthetic construct
  misc_feature 1..20: note = Description of Artificial Sequence: Synthetic oligonucleotide
  misc_feature 1..20: note = Target: SCN10A; (+) strand; PAM type: NNNNGHTT; PAM sequence: GTTGGATT
  source 1..20: mol_type = other DNA
acacaggcatagactgtcat

SEQ ID NO: 11509 - DNA, 20 bp, synthetic construct
  misc_feature 1..20: note = Description of Artificial Sequence: Synthetic oligonucleotide
  misc_feature 1..20: note = Target: SCN10A; (+) strand; PAM type: NNNNGHTT; PAM sequence: ATGGGCTT
  source 1..20: mol_type = other DNA
ggctcaccaggggccgtggg

SEQ ID NO: 11510 - DNA, 20 bp, synthetic construct
  misc_feature 1..20: note = Description of Artificial Sequence: Synthetic oligonucleotide
  misc_feature 1..20: note = Target: SCN10A; (+) strand; PAM type: NNNNGHTT; PAM sequence: TGGGGCTT
  source 1..20: mol_type = other DNA
ggggccgtgggatgggcttc

SEQ ID NO: 11511 - DNA, 20 bp, synthetic construct
  misc_feature 1..20: note = Description of Artificial Sequence: Synthetic oligonucleotide
  misc_feature 1..20: note = Target: SCN10A; (+) strand; PAM type: NNNNGHTT; PAM sequence: GCCAGTTT
  source 1..20: mol_type = other DNA
gcctgggtctctaaagcaaa

SEQ ID NO: 11512 - DNA, 20 bp, synthetic construct
  misc_feature 1..20: note = Description of Artificial Sequence: Synthetic oligonucleotide
  misc_feature 1..20: note = Target: SCN10A; (+) strand; PAM type: NNNNGHTT; PAM sequence: TTGGGCTT
  source 1..20: mol_type = other DNA
gttcattccagtaaaattct

SEQ ID NO: 11513 - DNA, 20 bp, synthetic construct
  misc_feature 1..20: note = Description of Artificial Sequence: Synthetic oligonucleotide
  misc_feature 1..20: note = Target: SCN10A; (+) strand; PAM type: NNNNGHTT; PAM sequence: AAGAGATT
  source 1..20: mol_type = other DNA
cacagtccctcccagggggc

SEQ ID NO: 11514 - DNA, 20 bp, synthetic construct
  misc_feature 1..20: note = Description of Artificial Sequence: Synthetic oligonucleotide
  misc_feature 1..20: note = Target: SCN10A; (+) strand; PAM type: NNNNGHTT; PAM sequence: AGATGTTT
  source 1..20: mol_type = other DNA
gccagaaactgcaccaacga

SEQ ID NO: 11515 - DNA, 20 bp, synthetic construct
  misc_feature 1..20: note = Description of Artificial Sequence: Synthetic oligonucleotide
  misc_feature 1..20: note = Target: SCN10A; (+) strand; PAM type: NNNNGHTT; PAM sequence: TTAGGATT
  source 1..20: mol_type = other DNA
aacgaagatgttttcctccc

SEQ ID NO: 11516 - DNA, 20 bp, synthetic construct
  misc_feature 1..20: note = Description of Artificial Sequence: Synthetic oligonucleotide
  misc_feature 1..20: note = Target: SCN10A; (+) strand; PAM type: NNNNGHTT; PAM sequence: ATTAGTTT
  source 1..20: mol_type = other DNA
ttcctcccttaggattgggt

SEQ ID NO: 11517 - DNA, 20 bp, synthetic construct
  misc_feature 1..20: note = Description of Artificial Sequence: Synthetic oligonucleotide
  misc_feature 1..20: note = Target: SCN10A; (+) strand; PAM type: NNNNGHTT; PAM sequence: TTTGGATT
  source 1..20: mol_type = other DNA
tagtttttctttaggggccc

SEQ ID NO: 11518 - DNA, 20 bp, synthetic construct
  misc_feature 1..20: note = Description of Artificial Sequence: Synthetic oligonucleotide
  misc_feature 1..20: note = Target: SCN10A; (+) strand; PAM type: NNNNGHTT; PAM sequence: TTTAGCTT
  source 1..20: mol_type = other DNA
tcttcattcaaactctcacc

SEQ ID NO: 11519 - DNA, 20 bp, synthetic construct
  misc_feature 1..20: note = Description of Artificial Sequence: Synthetic oligonucleotide
  misc_feature 1..20: note = Target: SCN10A; (+) strand; PAM type: NNNNGHTT; PAM sequence: ACATGTTT
  source 1..20: mol_type = other DNA
gaaagccacctattttaata

SEQ ID NO: 11520 - DNA, 20 bp, synthetic construct
  misc_feature 1..20: note = Description of Artificial Sequence: Synthetic oligonucleotide
  misc_feature 1..20: note = Target: SCN10A; (+) strand; PAM type: NNNNGHTT; PAM sequence: AAGGGCTT
  source 1..20: mol_type = other DNA
tgagaagatctgtggacaca

SEQ ID NO: 11521 - DNA, 20 bp, synthetic construct
  misc_feature 1..20: note = Description of Artificial Sequence: Synthetic oligonucleotide
  misc_feature 1..20: note = Target: SCN10A; (+) strand; PAM type: NNNNGHTT; PAM sequence: CAAGGATT
  source 1..20: mol_type = other DNA
gtcatgctgagaactctgac

SEQ ID NO: 11522 - DNA, 20 bp, synthetic construct
  misc_feature 1..20: note = Description of Artificial Sequence: Synthetic oligonucleotide
  misc_feature 1..20: note = Target: SCN10A; (+) strand; PAM type: NNNNGHTT; PAM sequence: TGCAGTTT
  source 1..20: mol_type = other DNA
ctgaccaaggattcagtaga

SEQ ID NO: 11523 - DNA, 20 bp, synthetic construct
  misc_feature 1..20: note = Description of Artificial Sequence: Synthetic oligonucleotide
  misc_feature 1..20: note = Target: SCN10A; (+) strand; PAM type: NNNNGHTT; PAM sequence: ATCTGTTT
  source 1..20: mol_type = other DNA
acctaatatctccctctgta

SEQ ID NO: 11524 - DNA, 20 bp, synthetic construct
  misc_feature 1..20: note = Description of Artificial Sequence: Synthetic oligonucleotide
  misc_feature 1..20: note = Target: SCN10A; (+) strand; PAM type: NNNNGHTT; PAM sequence: CTCAGTTT
  source 1..20: mol_type = other DNA
tctgtaatctgtttcttgac

SEQ ID NO: 11525 - DNA, 20 bp, synthetic construct
  misc_feature 1..20: note = Description of Artificial Sequence: Synthetic oligonucleotide
  misc_feature 1..20: note = Target: SCN10A; (+) strand; PAM type: NNNNGHTT; PAM sequence: AAATGATT
  source 1..20: mol_type = other DNA
tctcatctgtaaaatgagag

SEQ ID NO: 11526 - DNA, 20 bp, synthetic construct
  misc_feature 1..20: note = Description of Artificial Sequence: Synthetic oligonucleotide
  misc_feature 1..20: note = Target: SCN10A; (+) strand; PAM type: NNNNGHTT; PAM sequence: GATTGCTT
  source 1..20: mol_type = other DNA
atctgtaaaatgagagaaat

SEQ ID NO: 11527 - DNA, 20 bp, synthetic construct
  misc_feature 1..20: note = Description of Artificial Sequence: Synthetic oligonucleotide
  misc_feature 1..20: note = Target: SCN10A; (+) strand; PAM type: NNNNGHTT; PAM sequence: CAAGGATT
  source 1..20: mol_type = other DNA
cttatgctcagaaccctggg

SEQ ID NO: 11528 - DNA, 20 bp, synthetic construct
  misc_feature 1..20: note = Description of Artificial Sequence: Synthetic oligonucleotide
  misc_feature 1..20: note = Target: SCN10A; (+) strand; PAM type: NNNNGHTT; PAM sequence: TCAGGATT
  source 1..20: mol_type = other DNA
ttatgctcagtgatctttgt

SEQ ID NO: 11529 - DNA, 20 bp, synthetic construct
  misc_feature 1..20: note = Description of Artificial Sequence: Synthetic oligonucleotide
  misc_feature 1..20: note = Target: SCN10A; (+) strand; PAM type: NNNNGHTT; PAM sequence: TTTTGTTT
  source 1..20: mol_type = other DNA
tcagtgatctttgttcagga

SEQ ID NO: 11530 - DNA, 20 bp, synthetic construct
  misc_feature 1..20: note = Description of Artificial Sequence: Synthetic oligonucleotide
  misc_feature 1..20: note = Target: SCN10A; (+) strand; PAM type: NNNNGHTT; PAM sequence: AGGGGTTT
  source 1..20: mol_type = other DNA
atgagaaaactgagactcag

SEQ ID NO: 11531 - DNA, 20 bp, synthetic construct
  misc_feature 1..20: note = Description of Artificial Sequence: Synthetic oligonucleotide
  misc_feature 1..20: note = Target: SCN10A; (+) strand; PAM type: NNNNGHTT; PAM sequence: CCAGGTTT
  source 1..20: mol_type = other DNA
gttgagtcaggaatgcaaac

SEQ ID NO: 11532 - DNA, 20 bp, synthetic construct
  misc_feature 1..20: note = Description of Artificial Sequence: Synthetic oligonucleotide
  misc_feature 1..20: note = Target: SCN10A; (+) strand; PAM type: NNNNGHTT; PAM sequence: CTGGGATT
  source 1..20: mol_type = other DNA
ttataaacatgagaggttat

SEQ ID NO: 11533 - DNA, 20 bp, synthetic construct
  misc_feature 1..20: note = Description of Artificial Sequence: Synthetic oligonucleotide
  misc_feature 1..20: note = Target: SCN10A; (+) strand; PAM type: NNNNGHTT; PAM sequence: ATTCGATT
  source 1..20: mol_type = other DNA
aacatgagaggttatctggg

SEQ ID NO: 11534 - DNA, 20 bp, synthetic construct
  misc_feature 1..20: note = Description of Artificial Sequence: Synthetic oligonucleotide
  misc_feature 1..20: note = Target: SCN10A; (+) strand; PAM type: NNNNGHTT; PAM sequence: TTGGGATT
  source 1..20: mol_type = other DNA
cctccccatcccaaggaggg

SEQ ID NO: 11535 - DNA, 20 bp, synthetic construct
  misc_feature 1..20: note = Description of Artificial Sequence: Synthetic oligonucleotide
  misc_feature 1..20: note = Target: SCN10A; (+) strand; PAM type: NNNNGHTT; PAM sequence: CCCTGCTT
  source 1..20: mol_type = other DNA
agttctagatccctttcttt

SEQ ID NO: 11536 - DNA, 20 bp, synthetic construct
  misc_feature 1..20: note = Description of Artificial Sequence: Synthetic oligonucleotide
  misc_feature 1..20: note = Target: SCN10A; (+) strand; PAM type: NNNNGHTT; PAM sequence: GTTGGCTT
  source 1..20: mol_type = other DNA
agtgatgggctgtgagtagt

SEQ ID NO: 11537 - DNA, 20 bp, synthetic construct
  misc_feature 1..20: note = Description of Artificial Sequence: Synthetic oligonucleotide
  misc_feature 1..20: note = Target: SCN10A; (+) strand; PAM type: NNNNGHTT; PAM sequence: TAAGGCTT
  source 1..20: mol_type = other DNA
tgggcagggaacaggaaata

SEQ ID NO: 11538 - DNA, 20 bp, synthetic construct
  misc_feature 1..20: note = Description of Artificial Sequence: Synthetic oligonucleotide
  misc_feature 1..20: note = Target: SCN10A; (+) strand; PAM type: NNNNGHTT; PAM sequence: TGTTGATT
  source 1..20: mol_type = other DNA
caccacttatcttttttttc

SEQ ID NO: 11539 - DNA, 20 bp, synthetic construct
  misc_feature 1..20: note = Description of Artificial Sequence: Synthetic oligonucleotide
  misc_feature 1..20: note = Target: SCN10A; (+) strand; PAM type: NNNNGHTT; PAM sequence: AAGAGATT
  source 1..20: mol_type = other DNA
tgtcaattatgaccccaaca

SEQ ID NO: 11540 - DNA, 20 bp, synthetic construct
  misc_feature 1..20: note = Description of Artificial Sequence: Synthetic oligonucleotide
  misc_feature 1..20: note = Target: SCN10A; (+) strand; PAM type: NNNNGHTT; PAM sequence: AGGTGATT
  source 1..20: mol_type = other DNA
taagacatggacctgggtgc

SEQ ID NO: 11541 - DNA, 20 bp, synthetic construct
  misc_feature 1..20: note = Description of Artificial Sequence: Synthetic oligonucleotide
  misc_feature 1..20: note = Target: SCN10A; (+) strand; PAM type: NNNNGHTT; PAM sequence: GCAGGATT
  source 1..20: mol_type = other DNA
agtaactgtgtagagcacat

SEQ ID NO: 11542 - DNA, 20 bp, synthetic construct
  misc_feature 1..20: note = Description of Artificial Sequence: Synthetic oligonucleotide
  misc_feature 1..20: note = Target: SCN10A; (+) strand; PAM type: NNNNGHTT; PAM sequence: CCTGGCTT
  source 1..20: mol_type = other DNA
ccccaatagtgtctccccag

SEQ ID NO: 11543 - DNA, 20 bp, synthetic construct
  misc_feature 1..20: note = Description of Artificial Sequence: Synthetic oligonucleotide
  misc_feature 1..20: note = Target: SCN10A; (+) strand; PAM type: NNNNGHTT; PAM sequence: TTGAGATT
  source 1..20: mol_type = other DNA
ttcttttcttttcttttttt

SEQ ID NO: 11544 - DNA, 20 bp, synthetic construct
  misc_feature 1..20: note = Description of Artificial Sequence: Synthetic oligonucleotide
  misc_feature 1..20: note = Target: SCN10A; (+) strand; PAM type: NNNNGHTT; PAM sequence: AAGAGATT
  source 1..20: mol_type = other DNA
aacttctgcctcccgggttc

SEQ ID NO: 11545 - DNA, 20 bp, synthetic construct
  misc_feature 1..20: note = Description of Artificial Sequence: Synthetic oligonucleotide
  misc_feature 1..20: note = Target: SCN10A; (+) strand; PAM type: NNNNGHTT; PAM sequence: TGGGGTTT
  source 1..20: mol_type = other DNA
ctttcatattttagtagaga

SEQ ID NO: 11546 - DNA, 20 bp, synthetic construct
  misc_feature 1..20: note = Description of Artificial Sequence: Synthetic oligonucleotide
  misc_feature 1..20: note = Target: SCN10A; (+) strand; PAM type: NNNNGHTT; PAM sequence: CTAGGATT
  source 1..20: mol_type = other DNA
cacctcggcctcccaaagtg

SEQ ID NO: 11547 - DNA, 20 bp, synthetic construct
  misc_feature 1..20: note = Description of Artificial Sequence: Synthetic oligonucleotide
  misc_feature 1..20: note = Target: SCN10A; (+) strand; PAM type: NNNNGHTT; PAM sequence: CTGGGTTT
  source 1..20: mol_type = other DNA
accactgcgcctggcccatc

SEQ ID NO: 11548 - DNA, 20 bp, synthetic construct
  misc_feature 1..20: note = Description of Artificial Sequence: Synthetic oligonucleotide
  misc_feature 1..20: note = Target: SCN10A; (+) strand; PAM type: NNNNGHTT; PAM sequence: CTGAGATT
  source 1..20: mol_type = other DNA
cctgggttttatgatagttc

SEQ ID NO: 11549 - DNA, 20 bp, synthetic construct
  misc_feature 1..20: note = Description of Artificial Sequence: Synthetic oligonucleotide
  misc_feature 1..20: note = Target: SCN10A; (+) strand; PAM type: NNNNGHTT; PAM sequence: CCTTGATT
  source 1..20: mol_type = other DNA
acctcattcctccctatgca

SEQ ID NO: 11550 - DNA, 20 bp, synthetic construct
  misc_feature 1..20: note = Description of Artificial Sequence: Synthetic oligonucleotide
  misc_feature 1..20: note = Target: SCN10A; (+) strand; PAM type: NNNNGHTT; PAM sequence: CCTTGCTT
  source 1..20: mol_type = other DNA
caccttgatttagctactac

SEQ ID NO: 11551 - DNA, 20 bp, synthetic construct
  misc_feature 1..20: note = Description of Artificial Sequence: Synthetic oligonucleotide
  misc_feature 1..20: note = Target: SCN10A; (+) strand; PAM type: NNNNGHTT; PAM sequence: TGATGCTT
  source 1..20: mol_type = other DNA
actgtctcttagaggttatc

SEQ ID NO: 11552 - DNA, 20 bp, synthetic construct
  misc_feature 1..20: note = Description of Artificial Sequence: Synthetic oligonucleotide
  misc_feature 1..20: note = Target: SCN10A; (+) strand; PAM type: NNNNGHTT; PAM sequence: AAGGGCTT
  source 1..20: mol_type = other DNA
ggagagagtcctgtgttgga

SEQ ID NO: 11553 - DNA, 20 bp, synthetic construct
  misc_feature 1..20: note = Description of Artificial Sequence: Synthetic oligonucleotide
  misc_feature 1..20: note = Target: SCN10A; (+) strand; PAM type: NNNNGHTT; PAM sequence: TGATGATT
  source 1..20: mol_type = other DNA
gttacttgactaatctcata

SEQ ID NO: 11554 - DNA, 20 bp, synthetic construct
  misc_feature 1..20: note = Description of Artificial Sequence: Synthetic oligonucleotide
  misc_feature 1..20: note = Target: SCN10A; (+) strand; PAM type: NNNNGHTT; PAM sequence: GGCTGTTT
  source 1..20: mol_type = other DNA
tttaaagtaatcccacatgt

SEQ ID NO: 11555 - DNA, 20 bp, synthetic construct
  misc_feature 1..20: note = Description of Artificial Sequence: Synthetic oligonucleotide
  misc_feature 1..20: note = Target: SCN10A; (+) strand; PAM type: NNNNGHTT; PAM sequence: TAAGGTTT
  source 1..20: mol_type = other DNA
gtctgctctgtgcacttgcc

SEQ ID NO: 11556 - DNA, 20 bp, synthetic construct
  misc_feature 1..20: note = Description of Artificial Sequence: Synthetic oligonucleotide
  misc_feature 1..20: note = Target: SCN10A; (+) strand; PAM type: NNNNGHTT; PAM sequence: TTCAGCTT
  source 1..20: mol_type = other DNA
aagacctccatgttcctgcc

SEQ ID NO: 11557 - DNA, 20 bp, synthetic construct
  misc_feature 1..20: note = Description of Artificial Sequence: Synthetic oligonucleotide
  misc_feature 1..20: note = Target: SCN10A; (+) strand; PAM type: NNNNGHTT; PAM sequence: AGCTGTTT
  source 1..20: mol_type = other DNA
gcctgttacagcacttaatg

SEQ ID NO: 11558 - DNA, 20 bp, synthetic construct
  misc_feature 1..20: note = Description of Artificial Sequence: Synthetic oligonucleotide
  misc_feature 1..20: note = Target: SCN10A; (+) strand; PAM type: NNNNGHTT; PAM sequence: GTCTGTTT
  source 1..20: mol_type = other DNA
ctgttttaattcacctatta

SEQ ID NO: 11559 - DNA, 20 bp, synthetic construct
  misc_feature 1..20: note = Description of Artificial Sequence: Synthetic oligonucleotide
  misc_feature 1..20: note = Target: SCN10A; (+) strand; PAM type: NNNNGHTT; PAM sequence: CAGAGATT
  source 1..20: mol_type = other DNA
cctggcataccagagctact

SEQ ID NO: 11560 - DNA, 20 bp, synthetic construct
  misc_feature 1..20: note = Description of Artificial Sequence: Synthetic oligonucleotide
  misc_feature 1..20: note = Target: SCN10A; (+) strand; PAM type: NNNNGHTT; PAM sequence: GAGTGATT
  source 1..20: mol_type = other DNA
ggtagatgaaggcaagaaat

SEQ ID NO: 11561 - DNA, 20 bp, synthetic construct
  misc_feature 1..20: note = Description of Artificial Sequence: Synthetic oligonucleotide
  misc_feature 1..20: note = Target: SCN10A; (+) strand; PAM type: NNNNGHTT; PAM sequence: ATGTGTTT
  source 1..20: mol_type = other DNA
aagaaagaaagacaggatga

SEQ ID NO: 11562 - DNA, 20 bp, synthetic construct
  misc_feature 1..20: note = Description of Artificial Sequence: Synthetic oligonucleotide
  misc_feature 1..20: note = Target: SCN10A; (+) strand; PAM type: NNNNGHTT; PAM sequence: CTGTGTTT
  source 1..20: mol_type = other DNA
gtgtctattttgtacaggtt

SEQ ID NO: 11563 - DNA, 20 bp, synthetic construct
  misc_feature 1..20: note = Description of Artificial Sequence: Synthetic oligonucleotide
  misc_feature 1..20: note = Target: SCN10A; (+) strand; PAM type: NNNNGHTT; PAM sequence: TGGAGTTT
  source 1..20: mol_type = other DNA
gacccagaagaagctgccag

SEQ ID NO: 11564 - DNA, 20 bp, synthetic construct
  misc_feature 1..20: note = Description of Artificial Sequence: Synthetic oligonucleotide
  misc_feature 1..20: note = Target: SCN10A; (+) strand; PAM type: NNNNGHTT; PAM sequence: GCTGGATT
  source 1..20: mol_type = other DNA
cccaatgccccaccccctct

SEQ ID NO: 11565 - DNA, 20 bp, synthetic construct
  misc_feature 1..20: note = Description of Artificial Sequence: Synthetic oligonucleotide
  misc_feature 1..20: note = Target: SCN10A; (+) strand; PAM type: NNNNGHTT; PAM sequence: GGCTGCTT
  source 1..20: mol_type = other DNA
tctctttctatactcattca

SEQ ID NO: 11566 - DNA, 20 bp, synthetic construct
  misc_feature 1..20: note = Description of Artificial Sequence: Synthetic oligonucleotide
  misc_feature 1..20: note = Target: SCN10A; (+) strand; PAM type: NNNNGHTT; PAM sequence: GATGGATT
  source 1..20: mol_type = other DNA
agagacattgggcagctgaa

SEQ ID NO: 11567 - DNA, 20 bp, synthetic construct
  misc_feature 1..20: note = Description of Artificial Sequence: Synthetic oligonucleotide
  misc_feature 1..20: note = Target: SCN10A; (+) strand; PAM type: NNNNGHTT; PAM sequence: ATGAGTTT
  source 1..20: mol_type = other DNA
gggttgcagtgagaagatgg

SEQ ID NO: 11568 - DNA, 20 bp, synthetic construct
  misc_feature 1..20: note = Description of Artificial Sequence: Synthetic oligonucleotide
  misc_feature 1..20: note = Target: SCN10A; (+) strand; PAM type: NNNNGHTT; PAM sequence: AATAGCTT
  source 1..20: mol_type = other DNA
acctaaatccatattcacaa

SEQ ID NO: 11569 - DNA, 20 bp, synthetic construct
  misc_feature 1..20: note = Description of Artificial Sequence: Synthetic oligonucleotide
  misc_feature 1..20: note = Target: SCN10A; (+) strand; PAM type: NNNNGHTT; PAM sequence: TAGTGTTT
  source 1..20: mol_type = other DNA
ctatttcaatcttcgggtcc

SEQ ID NO: 11570 - DNA, 20 bp, synthetic construct
  misc_feature 1..20: note = Description of Artificial Sequence: Synthetic oligonucleotide
  misc_feature 1..20: note = Target: SCN10A; (+) strand; PAM type: NNNNGHTT; PAM sequence: TTTTGTTT
  source 1..20: mol_type = other DNA
agttaatttcaaaagcccac

SEQ ID NO: 11571 - DNA, 20 bp, synthetic construct
  misc_feature 1..20: note = Description of Artificial Sequence: Synthetic oligonucleotide
  misc_feature 1..20: note = Target: SCN10A; (+) strand; PAM type: NNNNGHTT; PAM sequence: TGATGATT
  source 1..20: mol_type = other DNA
agggaaaaatttacaggacc

SEQ ID NO: 11572 - DNA, 20 bp, synthetic construct
  misc_feature 1..20: note = Description of Artificial Sequence: Synthetic oligonucleotide
  misc_feature 1..20: note = Target: SCN10A; (+) strand; PAM type: NNNNGHTT; PAM sequence: GGGTGATT
  source 1..20: mol_type = other DNA
tggcaataagaggcagagtt

SEQ ID NO: 11573 - DNA, 20 bp, synthetic construct
  misc_feature 1..20: note = Description of Artificial Sequence: Synthetic oligonucleotide
  misc_feature 1..20: note = Target: SCN10A; (+) strand; PAM type: NNNNGHTT; PAM sequence: AGATGCTT
  source 1..20: mol_type = other DNA
agttgggtgattgagataat

SEQ ID NO: 11574 - DNA, 20 bp, synthetic construct
  misc_feature 1..20: note = Description of Artificial Sequence: Synthetic oligonucleotide
  misc_feature 1..20: note = Target: SCN10A; (+) strand; PAM type: NNNNGHTT; PAM sequence: CGATGATT
  source 1..20: mol_type = other DNA
gataatagatgcttgtggag

SEQ ID NO: 11575 - DNA, 20 bp, synthetic construct
  misc_feature 1..20: note = Description of Artificial Sequence: Synthetic oligonucleotide
  misc_feature 1..20: note = Target: SCN10A; (+) strand; PAM type: NNNNGHTT; PAM sequence: TCAGGATT
  source 1..20: mol_type = other DNA
gatgcttgtggagcgatgat

SEQ ID NO: 11576 - DNA, 20 bp, synthetic construct
  misc_feature 1..20: note = Description of Artificial Sequence: Synthetic oligonucleotide
  misc_feature 1..20: note = Target: SCN10A; (+) strand; PAM type: NNNNGHTT; PAM sequence: AGAAGTTT
  source 1..20: mol_type = other DNA
taccaaaacctgcagaccag

SEQ ID NO: 11577 - DNA, 20 bp, synthetic construct
  misc_feature 1..20: note = Description of Artificial Sequence: Synthetic oligonucleotide
  misc_feature 1..20: note = Target: SCN10A; (+) strand; PAM type: NNNNGHTT; PAM sequence: TTTTGTTT
  source 1..20: mol_type = other DNA
acctgcagaccagagaagtt

SEQ ID NO: 11578 - DNA, 20 bp, synthetic construct
  misc_feature 1..20: note = Description of Artificial Sequence: Synthetic oligonucleotide
  misc_feature 1..20: note = Target: SCN10A; (+) strand; PAM type: NNNNGHTT; PAM sequence: GTTTGTTT
  source 1..20: mol_type = other DNA
gcagaccagagaagtttttt

SEQ ID NO: 11579 - DNA, 20 bp, synthetic construct
  misc_feature 1..20: note = Description of Artificial Sequence: Synthetic oligonucleotide
  misc_feature 1..20: note = Target: SCN10A; (+) strand; PAM type: NNNNGHTT; PAM sequence: TAGTGATT
  source 1..20: mol_type = other DNA
accaccacacctcgtggtgg

SEQ ID NO: 11580 - DNA, 20 bp, synthetic construct
  misc_feature 1..20: note = Description of Artificial Sequence: Synthetic oligonucleotide
  misc_feature 1..20: note = Target: SCN10A; (+) strand; PAM type: NNNNGHTT; PAM sequence: CAGGGTTT
  source 1..20: mol_type = other DNA
ttttgtacttttagcagaga

SEQ ID NO: 11581 - DNA, 20 bp, synthetic construct
  misc_feature 1..20: note = Description of Artificial Sequence: Synthetic oligonucleotide
  misc_feature 1..20: note = Target: SCN10A; (+) strand; PAM type: NNNNGHTT; PAM sequence: GGTGGTTT
  source 1..20: mol_type = other DNA
ggtttcggcatgttggccag

SEQ ID NO: 11582 - DNA, 20 bp, synthetic construct
  misc_feature 1..20: note = Description of Artificial Sequence: Synthetic oligonucleotide
  misc_feature 1..20: note = Target: SCN10A; (+) strand; PAM type: NNNNGHTT; PAM sequence: CTGGGATT
  source 1..20: mol_type = other DNA
cgcctcagcctcccaaagtg

SEQ ID NO: 11583 - DNA, 20 bp, synthetic construct
  misc_feature 1..20: note = Description of Artificial Sequence: Synthetic oligonucleotide
  misc_feature 1..20: note = Target: SCN10A; (+) strand; PAM type: NNNNGHTT; PAM sequence: AGAAGTTT
  source 1..20: mol_type = other DNA
accgtgcctggccagatgag

SEQ ID NO: 11584 - DNA, 20 bp, synthetic construct
  misc_feature 1..20: note = Description of Artificial Sequence: Synthetic oligonucleotide
  misc_feature 1..20: note = Target: SCN10A; (+) strand; PAM type: NNNNGHTT; PAM sequence: AAGGGCTT
  source 1..20: mol_type = other DNA
cgcagagcgcgaagggttcg

SEQ ID NO: 11585 - DNA, 20 bp, synthetic construct
  misc_feature 1..20: note = Description of Artificial Sequence: Synthetic oligonucleotide
  misc_feature 1..20: note = Target: SCN10A; (+) strand; PAM type: NNNNGHTT; PAM sequence: CTAGGTTT
  source 1..20: mol_type = other DNA
gagagggcagaaacatcact

SEQ ID NO: 11586 - DNA, 20 bp, synthetic construct
  misc_feature 1..20: note = Description of Artificial Sequence: Synthetic oligonucleotide
  misc_feature 1..20: note = Target: SCN10A; (+) strand; PAM type: NNNNGHTT; PAM sequence: AAGAGTTT
  source 1..20: mol_type = other DNA
actccaatgagaggtctaga

SEQ ID NO: 11587 - DNA, 20 bp, synthetic construct
  misc_feature 1..20: note = Description of Artificial Sequence: Synthetic oligonucleotide
  misc_feature 1..20: note = Target: SCN10A; (+) strand; PAM type: NNNNGHTT; PAM sequence: CCAAGCTT
  source 1..20: mol_type = other DNA
aacctctggtacgtaggtgg

SEQ ID NO: 11588 - DNA, 20 bp, synthetic construct
  misc_feature 1..20: note = Description of Artificial Sequence: Synthetic oligonucleotide
  misc_feature 1..20: note = Target: SCN10A; (+) strand; PAM type: NNNNGHTT; PAM sequence: AACTGATT
  source 1..20: mol_type = other DNA
tcaggcctcaacaaccttga

SEQ ID NO: 11589 - DNA, 20 bp, synthetic construct
  misc_feature 1..20: note = Description of Artificial Sequence: Synthetic oligonucleotide
  misc_feature 1..20: note = Target: SCN10A; (+) strand; PAM type: NNNNGHTT; PAM sequence: AGTGGTTT
  source 1..20: mol_type = other DNA
agaagtggggtggaaagaat

SEQ ID NO: 11590 - DNA, 20 bp, synthetic construct
  misc_feature 1..20: note = Description of Artificial Sequence: Synthetic oligonucleotide
  misc_feature 1..20: note = Target: SCN10A; (+) strand; PAM type: NNNNGHTT; PAM sequence: CCCTGATT
  source 1..20: mol_type = other DNA
gggtctaattcccatttgaa

SEQ ID NO: 11591 - DNA, 20 bp, synthetic construct
  misc_feature 1..20: note = Description of Artificial Sequence: Synthetic oligonucleotide
  misc_feature 1..20: note = Target: SCN10A; (+) strand; PAM type: NNNNGHTT; PAM sequence: GTGAGCTT
  source 1..20: mol_type = other DNA
catttgaaccctgatttttt

SEQ ID NO: 11592 - DNA, 20 bp, synthetic construct
  misc_feature 1..20: note = Description of Artificial Sequence: Synthetic oligonucleotide
  misc_feature 1..20: note = Target: SCN10A; (+) strand; PAM type: NNNNGHTT; PAM sequence: AAAAGTTT
  source 1..20: mol_type = other DNA
gatagctctgcagttcttca

SEQ ID NO: 11593 - DNA, 20 bp, synthetic construct
  misc_feature 1..20: note = Description of Artificial Sequence: Synthetic oligonucleotide
  misc_feature 1..20: note = Target: SCN10A; (+) strand; PAM type: NNNNGHTT; PAM sequence: TCTAGCTT
  source 1..20: mol_type = other DNA
tctggtatgggtccatgaga

SEQ ID NO: 11594 - DNA, 20 bp, synthetic construct
  misc_feature 1..20: note = Description of Artificial Sequence: Synthetic oligonucleotide
  misc_feature 1..20: note = Target: SCN10A; (+) strand; PAM type: NNNNGHTT; PAM sequence: GTCAGTTT
  source 1..20: mol_type = other DNA
ttgtgagccccttttggtct

SEQ ID NO: 11595 - DNA, 20 bp, synthetic construct
  misc_feature 1..20: note = Description of Artificial Sequence: Synthetic oligonucleotide
  misc_feature 1..20: note = Target: SCN10A; (+) strand; PAM type: NNNNGHTT; PAM sequence: CTCAGCTT
  source 1..20: mol_type = other DNA
gatggtgggctgaattcagg

SEQ ID NO: 11596 - DNA, 20 bp, synthetic construct
  misc_feature 1..20: note = Description of Artificial Sequence: Synthetic oligonucleotide
  misc_feature 1..20: note = Target: SCN10A; (+) strand; PAM type: NNNNGHTT; PAM sequence: AGGAGCTT
  source 1..20: mol_type = other DNA
cagttaggtgggatgcacac

SEQ ID NO: 11597 - DNA, 20 bp, synthetic construct
  misc_feature 1..20: note = Description of Artificial Sequence: Synthetic oligonucleotide
  misc_feature 1..20: note = Target: SCN10A; (+) strand; PAM type: NNNNGHTT; PAM sequence: AAGGGCTT
  source 1..20: mol_type = other DNA
acacaggagcttcagaaaag

SEQ ID NO: 11598 - DNA, 20 bp, synthetic construct
  misc_feature 1..20: note = Description of Artificial Sequence: Synthetic oligonucleotide
  misc_feature 1..20: note = Target: SCN10A; (+) strand; PAM type: NNNNGHTT; PAM sequence: AGTGGCTT
  source 1..20: mol_type = other DNA
caatgtccattctttggatg

SEQ ID NO: 11599 - DNA, 20 bp, synthetic construct
  misc_feature 1..20: note = Description of Artificial Sequence: Synthetic oligonucleotide
  misc_feature 1..20: note = Target: SCN10A; (+) strand; PAM type: NNNNGHTT; PAM sequence: GGAGGTTT
  source 1..20: mol_type = other DNA
gcctgggtgcatgagggtag

SEQ ID NO: 11600 - DNA, 20 bp, synthetic construct
  misc_feature 1..20: note = Description of Artificial Sequence: Synthetic oligonucleotide
  misc_feature 1..20: note = Target: SCN10A; (+) strand; PAM type: NNNNGHTT; PAM sequence: ATCTGATT
  source 1..20: mol_type = other DNA
gcatctattctccactgcaa

SEQ ID NO: 11601 - DNA, 20 bp, synthetic construct
  misc_feature 1..20: note = Description of Artificial Sequence: Synthetic oligonucleotide
  misc_feature 1..20: note = Target: SCN10A; (+) strand; PAM type: NNNNGHTT; PAM sequence: CTGTGCTT
  source 1..20: mol_type = other DNA
ggagatagtgagtatttatt

SEQ ID NO: 11602 - DNA, 20 bp, synthetic construct
  misc_feature 1..20: note = Description of Artificial Sequence: Synthetic oligonucleotide
  misc_feature 1..20: note = Target: SCN10A; (+) strand; PAM type: NNNNGHTT; PAM sequence: TTCTGTTT
  source 1..20: mol_type = other DNA
agtgagtatttattctgtgc

SEQ ID NO: 11603 - DNA, 20 bp, synthetic construct
  misc_feature 1..20: note = Description of Artificial Sequence: Synthetic oligonucleotide
  misc_feature 1..20: note = Target: SCN10A; (+) strand; PAM type: NNNNGHTT; PAM sequence: GGGTGATT
  source 1..20: mol_type = other DNA
cagctggatgaaaagttgaa

SEQ ID NO: 11604 - DNA, 20 bp, synthetic construct
  misc_feature 1..20: note = Description of Artificial Sequence: Synthetic oligonucleotide
  misc_feature 1..20: note = Target: SCN10A; (+) strand; PAM type: NNNNGHTT; PAM sequence: GATAGATT
  source 1..20: mol_type = other DNA
aaggatacaatgataaatag

SEQ ID NO: 11605 - DNA, 20 bp, synthetic construct
  misc_feature 1..20: note = Description of Artificial Sequence: Synthetic oligonucleotide
  misc_feature 1..20: note = Target: SCN10A; (+) strand; PAM type: NNNNGHTT; PAM sequence: TATTGTTT
  source 1..20: mol_type = other DNA
tactatagttaataatagca

SEQ ID NO: 11606 - DNA, 20 bp, synthetic construct
  misc_feature 1..20: note = Description of Artificial Sequence: Synthetic oligonucleotide
  misc_feature 1..20: note = Target: SCN10A; (+) strand; PAM type: NNNNGHTT; PAM sequence: TATGGTTT
  source 1..20: mol_type = other DNA
ttgtatcccttaaaaattga

SEQ ID NO: 11607 - DNA, 20 bp, synthetic construct
  misc_feature 1..20: note = Description of Artificial Sequence: Synthetic oligonucleotide
  misc_feature 1..20: note = Target: SCN10A; (+) strand; PAM type: NNNNGHTT; PAM sequence: ATAAGTTT
  source 1..20: mol_type = other DNA
tgctgttctcatgatagtga

SEQ ID NO: 11608 - DNA, 20 bp, synthetic construct
  misc_feature 1..20: note = Description of Artificial Sequence: Synthetic oligonucleotide
  misc_feature 1..20: note = Target: SCN10A; (+) strand; PAM type: NNNNGHTT; PAM sequence: GGGAGTTT
  source 1..20: mol_type = other DNA
gatgtgacggtattataagg

SEQ ID NO: 11609 - DNA, 20 bp, synthetic construct
  misc_feature 1..20: note = Description of Artificial Sequence: Synthetic oligonucleotide
  misc_feature 1..20: note = Target: SCN10A; (+) strand; PAM type: NNNNGHTT; PAM sequence: CCATGATT
  source 1..20: mol_type = other DNA
tcgcacctcctttccttttg

SEQ ID NO: 11610 - DNA, 20 bp, synthetic construct
  misc_feature 1..20: note = Description of Artificial Sequence: Synthetic oligonucleotide
  misc_feature 1..20: note = Target: SCN10A; (+) strand; PAM type: NNNNGHTT; PAM sequence: TAAGGCTT
  source 1..20: mol_type = other DNA
ctttccttttgccatgattg

SEQ ID NO: 11611 - DNA, 20 bp, synthetic construct
  misc_feature 1..20: note = Description of Artificial Sequence: Synthetic oligonucleotide
  misc_feature 1..20: note = Target: SCN10A; (+) strand; PAM type: NNNNGHTT; PAM sequence: GCATGCTT
  source 1..20: mol_type = other DNA
agaaggatgagtgagtagaa

SEQ ID NO: 11612 - DNA, 20 bp, synthetic construct
  misc_feature 1..20: note = Description of Artificial Sequence: Synthetic oligonucleotide
  misc_feature 1..20: note = Target: SCN10A; (+) strand; PAM type: NNNNGHTT; PAM sequence: AGATGATT
  source 1..20: mol_type = other DNA
gaatgagtgaacagaatgtt

SEQ ID NO: 11613 - DNA, 20 bp, synthetic construct
  misc_feature 1..20: note = Description of Artificial Sequence: Synthetic oligonucleotide
  misc_feature 1..20: note = Target: SCN10A; (+) strand; PAM type: NNNNGHTT; PAM sequence: GGAAGTTT
  source 1..20: mol_type = other DNA
aggatgatgaatagatggaa

SEQ ID NO: 11614 - DNA, 20 bp, synthetic construct
  misc_feature 1..20: note = Description of Artificial Sequence: Synthetic oligonucleotide
  misc_feature 1..20: note = Target: SCN10A; (+) strand; PAM type: NNNNGHTT; PAM sequence: AAAAGATT
  source 1..20: mol_type = other DNA
gatggaaggaagtttagaat

SEQ ID NO: 11615 - DNA, 20 bp, synthetic construct
  misc_feature 1..20: note = Description of Artificial Sequence: Synthetic oligonucleotide
  misc_feature 1..20: note = Target: SCN10A; (+) strand; PAM type: NNNNGHTT; PAM sequence: GGATGTTT
  source 1..20: mol_type = other DNA
tggaagaaataaagatggat

SEQ ID NO: 11616 - DNA, 20 bp, synthetic construct
  misc_feature 1..20: note = Description of Artificial Sequence: Synthetic oligonucleotide
  misc_feature 1..20: note = Target: SCN10A; (+) strand; PAM type: NNNNGHTT; PAM sequence: GACCGTTT
  source 1..20: mol_type = other DNA
gatggatgaaatgagtgcat

SEQ ID NO: 11617 - DNA, 20 bp, synthetic construct
  misc_feature 1..20: note = Description of Artificial Sequence: Synthetic oligonucleotide
  misc_feature 1..20: note = Target: SCN10A; (+) strand; PAM type: NNNNGHTT; PAM sequence: AGGTGATT
  source 1..20: mol_type = other DNA
aatgagtgcatgaccgttta

SEQ ID NO: 11618 - DNA, 20 bp, synthetic construct
  misc_feature 1..20: note = Description of Artificial Sequence: Synthetic oligonucleotide
  misc_feature 1..20: note = Target: SCN10A; (+) strand; PAM type: NNNNGHTT; PAM sequence: CTCAGATT
  source 1..20: mol_type = other DNA
cacagaattatcacccatga

SEQ ID NO: 11619 - DNA, 20 bp, synthetic construct
  misc_feature 1..20: note = Description of Artificial Sequence: Synthetic oligonucleotide
  misc_feature 1..20: note = Target: SCN10A; (+) strand; PAM type: NNNNGHTT; PAM sequence: TCCAGCTT
  source 1..20: mol_type = other DNA
atgttctgtgctgaacctca

SEQ ID NO: 11620 - DNA, 20 bp, synthetic construct
  misc_feature 1..20: note = Description of Artificial Sequence: Synthetic oligonucleotide
  misc_feature 1..20: note = Target: SCN10A; (+) strand; PAM type: NNNNGHTT; PAM sequence: AGCTGCTT
  source 1..20: mol_type = other DNA
gggcagaccttgctgctggc

SEQ ID NO: 11621 - DNA, 20 bp, synthetic construct
  misc_feature 1..20: note = Description of Artificial Sequence: Synthetic oligonucleotide
  misc_feature 1..20: note = Target: SCN10A; (+) strand; PAM type: NNNNGHTT; PAM sequence: CCCTGCTT
  source 1..20: mol_type = other DNA
ccaacacagcacatgcctca

SEQ ID NO: 11622 - DNA, 20 bp, synthetic construct
  misc_feature 1..20: note = Description of Artificial Sequence: Synthetic oligonucleotide
  misc_feature 1..20: note = Target: SCN10A; (+) strand; PAM type: NNNNGHTT; PAM sequence: CAGGGATT
  source 1..20: mol_type = other DNA
acacagtcaattctctaatg

SEQ ID NO: 11623 - DNA, 20 bp, synthetic construct
  misc_feature 1..20: note = Description of Artificial Sequence: Synthetic oligonucleotide
  misc_feature 1..20: note = Target: SCN10A; (+) strand; PAM type: NNNNGHTT; PAM sequence: AGGTGATT
  source 1..20: mol_type = other DNA
tgcatatttcatagctcccc

SEQ ID NO: 11624 - DNA, 20 bp, synthetic construct
  misc_feature 1..20: note = Description of Artificial Sequence: Synthetic oligonucleotide
  misc_feature 1..20: note = Target: SCN10A; (+) strand; PAM type: NNNNGHTT; PAM sequence: GGAAGATT
  source 1..20: mol_type = other DNA
ggaccacagaaccgcaggtg

SEQ ID NO: 11625 - DNA, 20 bp, synthetic construct
  misc_feature 1..20: note = Description of Artificial Sequence: Synthetic oligonucleotide
  misc_feature 1..20: note = Target: SCN10A; (+) strand; PAM type: NNNNGHTT; PAM sequence: AGAGGATT
  source 1..20: mol_type = other DNA
cactttggatgtaaaaatgc

SEQ ID NO: 11626 - DNA, 20 bp, synthetic construct
  misc_feature 1..20: note = Description of Artificial Sequence: Synthetic oligonucleotide
  misc_feature 1..20: note = Target: SCN10A; (+) strand; PAM type: NNNNGHTT; PAM sequence: CTGAGCTT
  source 1..20: mol_type = other DNA
agcccttgagggccaggtct

SEQ ID NO: 11627 - DNA, 20 bp, synthetic construct
  misc_feature 1..20: note = Description of Artificial Sequence: Synthetic oligonucleotide
  misc_feature 1..20: note = Target: SCN10A; (+) strand; PAM type: NNNNGHTT; PAM sequence: CAAAGCTT
  source 1..20: mol_type = other DNA
accctgtcagtgtactccag

SEQ ID NO: 11628 - DNA, 20 bp, synthetic construct
  misc_feature 1..20: note = Description of Artificial Sequence: Synthetic oligonucleotide
  misc_feature 1..20: note = Target: SCN10A; (+) strand; PAM type: NNNNGHTT; PAM sequence: GTGGGCTT
  source 1..20: mol_type = other DNA
actccagcaaagctttcacc

SEQ ID NO: 11629 - DNA, 20 bp, synthetic construct
  misc_feature 1..20: note = Description of Artificial Sequence: Synthetic oligonucleotide
  misc_feature 1..20: note = Target: SCN10A; (+) strand; PAM type: NNNNGHTT; PAM sequence: AGGGGATT
  source 1..20: mol_type = other DNA
ccctgaccacagtccctgga

SEQ ID NO: 11630 - DNA, 20 bp, synthetic construct
  misc_feature 1..20: note = Description of Artificial Sequence: Synthetic oligonucleotide
  misc_feature 1..20: note = Target: SCN10A; (+) strand; PAM type: NNNNGHTT; PAM sequence: GTCAGCTT
  source 1..20: mol_type = other DNA
ccctggaaggggatttggta

SEQ ID NO: 11631 - DNA, 20 bp, synthetic construct
  misc_feature 1..20: note = Description of Artificial Sequence: Synthetic oligonucleotide
  misc_feature 1..20: note = Target: SCN10A; (+) strand; PAM type: NNNNGHTT; PAM sequence: TTTTGTTT
  source 1..20: mol_type = other DNA
tagtcagcttgccagtagca

SEQ ID NO: 11632 - DNA, 20 bp, synthetic construct
  misc_feature 1..20: note = Description of Artificial Sequence: Synthetic oligonucleotide
  misc_feature 1..20: note = Target: SCN10A; (+) strand; PAM type: NNNNGHTT; PAM sequence: ATTGGATT
  source 1..20: mol_type = other DNA
gagaaagaaaaccttctcaa

SEQ ID NO: 11633 - DNA, 20 bp, synthetic construct
  misc_feature 1..20: note = Description of Artificial Sequence: Synthetic oligonucleotide
  misc_feature 1..20: note = Target: SCN10A; (+) strand; PAM type: NNNNGHTT; PAM sequence: CTTTGTTT
  source 1..20: mol_type = other DNA
caaagggatgctaacagtga

SEQ ID NO: 11634 - DNA, 20 bp, synthetic construct
  misc_feature 1..20: note = Description of Artificial Sequence: Synthetic oligonucleotide
  misc_feature 1..20: note = Target: SCN10A; (+) strand; PAM type: NNNNGHTT; PAM sequence: GGCAGTTT
  source 1..20: mol_type = other DNA
agcatcaacggatgttcaca

SEQ ID NO: 11635 - DNA, 20 bp, synthetic construct
  misc_feature 1..20: note = Description of Artificial Sequence: Synthetic oligonucleotide
  misc_feature 1..20: note = Target: SCN10A; (+) strand; PAM type: NNNNGHTT; PAM sequence: TGCTGTTT
  source 1..20: mol_type = other DNA
aaattcaaattaaaagaaga

SEQ ID NO: 11636 - DNA, 20 bp, synthetic construct
  misc_feature 1..20: note = Description of Artificial Sequence: Synthetic oligonucleotide
  misc_feature 1..20: note = Target: SCN10A; (+) strand; PAM type: NNNNGHTT; PAM sequence: CGGGGTTT
  source 1..20: mol_type = other DNA
ttttgtatttttagtagaga

SEQ ID NO: 11637 - DNA, 20 bp, synthetic construct
  misc_feature 1..20: note = Description of Artificial Sequence: Synthetic oligonucleotide
  misc_feature 1..20: note = Target: SCN10A; (+) strand; PAM type: NNNNGHTT; PAM sequence: CACCGTTT
  source 1..20: mol_type = other DNA
ttttagtagagacggggttt

SEQ ID NO: 11638 - DNA, 20 bp, synthetic construct
  misc_feature 1..20: note = Description of Artificial Sequence: Synthetic oligonucleotide
  misc_feature 1..20: note = Target: SCN10A; (+) strand; PAM type: NNNNGHTT; PAM sequence: CTGGGATT
  source 1..20: mol_type = other DNA
cgcctcagcctcccaaagtg

SEQ ID NO: 11639 - DNA, 20 bp, synthetic construct
  misc_feature 1..20: note = Description of Artificial Sequence: Synthetic oligonucleotide
  misc_feature 1..20: note = Target: SCN10A; (+) strand; PAM type: NNNNGHTT; PAM sequence: AGAGGTTT
  source 1..20: mol_type = other DNA
ccaaattggcaatgtgactc

SEQ ID NO: 11640 - DNA, 20 bp, synthetic construct
  misc_feature 1..20: note = Description of Artificial Sequence: Synthetic oligonucleotide
  misc_feature 1..20: note = Target: SCN10A; (+) strand; PAM type: NNNNGHTT; PAM sequence: GATGGCTT
  source 1..20: mol_type = other DNA
gatgcagacacccccttcct

SEQ ID NO: 11641 - DNA, 20 bp, synthetic construct
  misc_feature 1..20: note = Description of Artificial Sequence: Synthetic oligonucleotide
  misc_feature 1..20: note = Target: SCN10A; (+) strand; PAM type: NNNNGHTT; PAM sequence: AAATGCTT
  source 1..20: mol_type = other DNA
gaaactgtgtccaccttggg

SEQ ID NO: 11642 - DNA, 20 bp, synthetic construct
  misc_feature 1..20: note = Description of Artificial Sequence: Synthetic oligonucleotide
  misc_feature 1..20: note = Target: SCN10A; (+) strand; PAM type: NNNNGHTT; PAM sequence: GGGGGATT
  source 1..20: mol_type = other DNA
ctcagccagggacagtgaca

SEQ ID NO: 11643 - DNA, 20 bp, synthetic construct
  misc_feature 1..20: note = Description of Artificial Sequence: Synthetic oligonucleotide
  misc_feature 1..20: note = Target: SCN10A; (+) strand; PAM type: NNNNGHTT; PAM sequence: TTGTGCTT
  source 1..20: mol_type = other DNA
ggacagctctttggtgtcct

SEQ ID NO: 11644 - DNA, 20 bp, synthetic construct
  misc_feature 1..20: note = Description of Artificial Sequence: Synthetic oligonucleotide
  misc_feature 1..20: note = Target: SCN10A; (+) strand; PAM type: NNNNGHTT; PAM sequence: CAGGGCTT
  source 1..20: mol_type = other DNA
ctttggtgtcctttgtgctt

SEQ ID NO: 11645 - DNA, 20 bp, synthetic construct
  misc_feature 1..20: note = Description of Artificial Sequence: Synthetic oligonucleotide
  misc_feature 1..20: note = Target: SCN10A; (+) strand; PAM type: NNNNGHTT; PAM sequence: GCCGGATT
  source 1..20: mol_type = other DNA
tttccatgggatcagctgaa

SEQ ID NO: 11646 - DNA, 20 bp, synthetic construct
  misc_feature 1..20: note = Description of Artificial Sequence: Synthetic oligonucleotide
  misc_feature 1..20: note = Target: SCN10A; (+) strand; PAM type: NNNNGHTT; PAM sequence: CTCAGCTT
  source 1..20: mol_type = other DNA
caactgaacccacatctttt

SEQ ID NO: 11647 - DNA, 20 bp, synthetic construct
  misc_feature 1..20: note = Description of Artificial Sequence: Synthetic oligonucleotide
  misc_feature 1..20: note = Target: SCN10A; (+) strand; PAM type: NNNNGHTT; PAM sequence: TTCCGATT
  source 1..20: mol_type = other DNA
aacccacatcttttctcagc

SEQ ID NO: 11648 - DNA, 20 bp, synthetic construct
  misc_feature 1..20: note = Description of Artificial Sequence: Synthetic oligonucleotide
  misc_feature 1..20: note = Target: SCN10A; (+) strand; PAM type: NNNNGHTT; PAM sequence: GGGAGATT
  source 1..20: mol_type = other DNA
tctaggacgaggactaagat

SEQ ID NO: 11649 - DNA, 20 bp, synthetic construct
  misc_feature 1..20: note = Description of Artificial Sequence: Synthetic oligonucleotide
  misc_feature 1..20: note = Target: SCN10A; (+) strand; PAM type: NNNNGHTT; PAM sequence: TAGAGATT
  source 1..20: mol_type = other DNA
atgtgtattagaagtaaaca

SEQ ID NO: 11650 - DNA, 20 bp, synthetic construct
  misc_feature 1..20: note = Description of Artificial Sequence: Synthetic oligonucleotide
  misc_feature 1..20: note = Target: SCN10A; (+) strand; PAM type: NNNNGHTT; PAM sequence: TGTGGTTT
  source 1..20: mol_type = other DNA
gaggttatagaatgcataaa

SEQ ID NO: 11651 - DNA, 20 bp, synthetic construct
  misc_feature 1..20: note = Description of Artificial Sequence: Synthetic oligonucleotide
  misc_feature 1..20: note = Target: SCN10A; (+) strand; PAM type: NNNNGHTT; PAM sequence: GCATGTTT
  source 1..20: mol_type = other DNA
gatgagaaagaggtatacca

SEQ ID NO: 11652 - DNA, 20 bp, synthetic construct
  misc_feature 1..20: note = Description of Artificial Sequence: Synthetic oligonucleotide
  misc_feature 1..20: note = Target: SCN10A; (+) strand; PAM type: NNNNGHTT; PAM sequence: GTGAGTTT
  source 1..20: mol_type = other DNA
gtataccagcatgttttcaa

SEQ ID NO: 11653 - DNA, 20 bp, synthetic construct
  misc_feature 1..20: note = Description of Artificial Sequence: Synthetic oligonucleotide
  misc_feature 1..20: note = Target: SCN10A; (+) strand; PAM type: NNNNGHTT; PAM sequence: GGATGATT
  source 1..20: mol_type = other DNA
tctttgagtgatagggaaat

SEQ ID NO: 11654 - DNA, 20 bp, synthetic construct
  misc_feature 1..20: note = Description of Artificial Sequence: Synthetic oligonucleotide
  misc_feature 1..20: note = Target: SCN10A; (+) strand; PAM type: NNNNGHTT; PAM sequence: CTGAGCTT
  source 1..20: mol_type = other DNA
gctggcgcagtgctgcaggt

SEQ ID NO: 11655 - DNA, 20 bp, synthetic construct
  misc_feature 1..20: note = Description of Artificial Sequence: Synthetic oligonucleotide
  misc_feature 1..20: note = Target: SCN10A; (+) strand; PAM type: NNNNGHTT; PAM sequence: CTTGGCTT
  source 1..20: mol_type = other DNA
gccccgaaactctcttctcc

SEQ ID NO: 11656 - DNA, 20 bp, synthetic construct
  misc_feature 1..20: note = Description of Artificial Sequence: Synthetic oligonucleotide
  misc_feature 1..20: note = Target: SCN10A; (+) strand; PAM type: NNNNGHTT; PAM sequence: CCTAGTTT
  source 1..20: mol_type = other DNA
tggctttgcgtcattgccac

SEQ ID NO: 11657 - DNA, 20 bp, synthetic construct
  misc_feature 1..20: note = Description of Artificial Sequence: Synthetic oligonucleotide
  misc_feature 1..20: note = Target: SCN10A; (+) strand; PAM type: NNNNGHTT; PAM sequence: AGCAGTTT
  source 1..20: mol_type = other DNA
aaagctgaggccatgcaccg

SEQ ID NO: 11658 - DNA, 20 bp, synthetic construct
  misc_feature 1..20: note = Description of Artificial Sequence: Synthetic oligonucleotide
  misc_feature 1..20: note = Target: SCN10A; (+) strand; PAM type: NNNNGHTT; PAM sequence: GGTTGTTT
  source 1..20: mol_type = other DNA
ggaggcctagatatttagta

SEQ ID NO: 11659 - DNA, 20 bp, synthetic construct
  misc_feature 1..20: note = Description of Artificial Sequence: Synthetic oligonucleotide
  misc_feature 1..20: note = Target: SCN10A; (+) strand; PAM type: NNNNGHTT; PAM sequence: TTGGGCTT
  source 1..20: mol_type = other DNA
acctgaagcccctcatgcct

SEQ ID NO: 11660 - DNA, 20 bp, synthetic construct
  misc_feature 1..20: note = Description of Artificial Sequence: Synthetic oligonucleotide
  misc_feature 1..20: note = Target: SCN10A; (+) strand; PAM type: NNNNGHTT; PAM sequence: TTGAGATT
  source 1..20: mol_type = other DNA
ttggtctattggcggagtag

SEQ ID NO: 11661 - DNA, 20 bp, synthetic construct
  misc_feature 1..20: note = Description of Artificial Sequence: Synthetic oligonucleotide
  misc_feature 1..20: note = Target: SCN10A; (+) strand; PAM type: NNNNGHTT; PAM sequence: AGGAGCTT
  source 1..20: mol_type = other DNA
ggagtagttgagattgtgta

SEQ ID NO: 11662 - DNA, 20 bp, synthetic construct
  misc_feature 1..20: note = Description of Artificial Sequence: Synthetic oligonucleotide
  misc_feature 1..20: note = Target: SCN10A; (+) strand; PAM type: NNNNGHTT; PAM sequence: GGGAGCTT
  source 1..20: mol_type = other DNA
gggcagtgcaagcatcacct

SEQ ID NO: 11663 - DNA, 20 bp, synthetic construct
  misc_feature 1..20: note = Description of Artificial Sequence: Synthetic oligonucleotide
  misc_feature 1..20: note = Target: SCN10A; (+) strand; PAM type: NNNNGHTT; PAM sequence: CACAGATT
  source 1..20: mol_type = other DNA
tgcaaattctcaggccctgc

SEQ ID NO: 11664 - DNA, 20 bp, synthetic construct
  misc_feature 1..20: note = Description of Artificial Sequence: Synthetic oligonucleotide
  misc_feature 1..20: note = Target: SCN10A; (+) strand; PAM type: NNNNGHTT; PAM sequence: GGGAGATT
  source 1..20: mol_type = other DNA
ctgcatttgaacaagctcct

SEQ ID NO: 11665 - DNA, 20 bp, synthetic construct
  misc_feature 1..20: note = Description of Artificial Sequence: Synthetic oligonucleotide
  misc_feature 1..20: note = Target: SCN10A; (+) strand; PAM type: NNNNGHTT; PAM sequence: TAATGATT
  source 1..20: mol_type = other DNA
aattttgagaagtgctattg

SEQ ID NO: 11666 - DNA, 20 bp, synthetic construct
  misc_feature 1..20: note = Description of Artificial Sequence: Synthetic oligonucleotide
  misc_feature 1..20: note = Target: SCN10A; (+) strand; PAM type: NNNNGHTT; PAM sequence: GTGAGCTT
  source 1..20: mol_type = other DNA
tgctattgtaatgattttct

SEQ ID NO: 11667 - DNA, 20 bp, synthetic construct
  misc_feature 1..20: note = Description of Artificial Sequence: Synthetic oligonucleotide
  misc_feature 1..20: note = Target: SCN10A; (+) strand; PAM type: NNNNGHTT; PAM sequence: AGTGGTTT
  source 1..20: mol_type = other DNA
agtaattagtagcatttgga

SEQ ID NO: 11668 - DNA, 20 bp, synthetic construct
  misc_feature 1..20: note = Description of Artificial Sequence: Synthetic oligonucleotide
  misc_feature 1..20: note = Target: SCN10A; (+) strand; PAM type: NNNNGHTT; PAM sequence: AGGGGCTT
  source 1..20: mol_type = other DNA
aggtcagagggtgggaagcc

SEQ ID NO: 11669 - DNA, 20 bp, synthetic construct
  misc_feature 1..20: note = Description of Artificial Sequence: Synthetic oligonucleotide
  misc_feature 1..20: note = Target: SCN10A; (+) strand; PAM type: NNNNGHTT; PAM sequence: TCGGGATT
  source 1..20: mol_type = other DNA
agggtgggaagccaggggct

SEQ ID NO: 11670 - DNA, 20 bp, synthetic construct
  misc_feature 1..20: note = Description of Artificial Sequence: Synthetic oligonucleotide
  misc_feature 1..20: note = Target: SCN10A; (+) strand; PAM type: NNNNGHTT; PAM sequence: CTGGGTTT
  source 1..20: mol_type = other DNA
gggattaaataagggcaaag

SEQ ID NO: 11671 - DNA, 20 bp, synthetic construct
  misc_feature 1..20: note = Description of Artificial Sequence: Synthetic oligonucleotide
  misc_feature 1..20: note = Target: SCN10A; (+) strand; PAM type: NNNNGHTT; PAM sequence: GTCAGTTT
  source 1..20: mol_type = other DNA
gccttttaaacattttgagt

SEQ ID NO: 11672 - DNA, 20 bp, synthetic construct
  misc_feature 1..20: note = Description of Artificial Sequence: Synthetic oligonucleotide
  misc_feature 1..20: note = Target: SCN10A; (+) strand; PAM type: NNNNGHTT; PAM sequence: AAATGCTT
  source 1..20: mol_type = other DNA
aggcatacactcactcactc

SEQ ID NO: 11673 - DNA, 20 bp, synthetic construct
  misc_feature 1..20: note = Description of Artificial Sequence: Synthetic oligonucleotide
  misc_feature 1..20: note = Target: SCN10A; (+) strand; PAM type: NNNNGHTT; PAM sequence: CCAGGTTT
  source 1..20: mol_type = other DNA
actcactcaaatgcttgcag

SEQ ID NO: 11674 - DNA, 20 bp, synthetic construct
  misc_feature 1..20: note = Description of Artificial Sequence: Synthetic oligonucleotide
  misc_feature 1..20: note = Target: SCN10A; (+) strand; PAM type: NNNNGHTT; PAM sequence: TTTGGATT
  source 1..20: mol_type = other DNA
actgatgcagctccagggcc

SEQ ID NO: 11675 - DNA, 20 bp, synthetic construct
  misc_feature 1..20: note = Description of Artificial Sequence: Synthetic oligonucleotide
  misc_feature 1..20: note = Target: SCN10A; (+) strand; PAM type: NNNNGHTT; PAM sequence: AGGAGATT
  source 1..20: mol_type = other DNA
ctccagggcctttggattgt

SEQ ID NO: 11676 - DNA, 20 bp, synthetic construct
  misc_feature 1..20: note = Description of Artificial Sequence: Synthetic oligonucleotide
  misc_feature 1..20: note = Target: SCN10A; (+) strand; PAM type: NNNNGHTT; PAM sequence: GGAGGATT
  source 1..20: mol_type = other DNA
attgtaggagattcctatct

SEQ ID NO: 11677 - DNA, 20 bp, synthetic construct
  misc_feature 1..20: note = Description of Artificial Sequence: Synthetic oligonucleotide
  misc_feature 1..20: note = Target: SCN10A; (+) strand; PAM type: NNNNGHTT; PAM sequence: TCCAGTTT
  source 1..20: mol_type = other DNA
cccatggactcttggtggta

SEQ ID NO: 11678 - DNA, 20 bp, synthetic construct
  misc_feature 1..20: note = Description of Artificial Sequence: Synthetic oligonucleotide
  misc_feature 1..20: note = Target: SCN10A; (+) strand; PAM type: NNNNGHTT; PAM sequence: TGATGTTT
  source 1..20: mol_type = other DNA
atcatcagtcttgcccactc

SEQ ID NO: 11679 - DNA, 20 bp, synthetic construct
  misc_feature 1..20: note = Description of Artificial Sequence: Synthetic oligonucleotide
  misc_feature 1..20: note = Target: SCN10A; (+) strand; PAM type: NNNNGHTT; PAM sequence: TGGGGATT
  source 1..20: mol_type = other DNA
gggccacgacgtggctggga

SEQ ID NO: 11680 - DNA, 20 bp, synthetic construct
  misc_feature 1..20: note = Description of Artificial Sequence: Synthetic oligonucleotide
  misc_feature 1..20: note = Target: SCN10A; (+) strand; PAM type: NNNNGHTT; PAM sequence: TCTTGATT
  source 1..20: mol_type = other DNA
attccctttatagaatggac

SEQ ID NO: 11681 - DNA, 20 bp, synthetic construct
  misc_feature 1..20: note = Description of Artificial Sequence: Synthetic oligonucleotide
  misc_feature 1..20: note = Target: SCN10A; (+) strand; PAM type: NNNNGHTT; PAM sequence: TTCTGCTT
  source 1..20: mol_type = other DNA
aaagatgactaagacacagg

SEQ ID NO: 11682 - DNA, 20 bp, synthetic construct
  misc_feature 1..20: note = Description of Artificial Sequence: Synthetic oligonucleotide
  misc_feature 1..20: note = Target: SCN10A; (+) strand; PAM type: NNNNGHTT; PAM sequence: AAAAGATT
  source 1..20: mol_type = other DNA
tctgcttttgagagctaaac

SEQ ID NO: 11683 - DNA, 20 bp, synthetic construct
  misc_feature 1..20: note = Description of Artificial Sequence: Synthetic oligonucleotide
  misc_feature 1..20: note = Target: SCN10A; (+) strand; PAM type: NNNNGHTT; PAM sequence: AAGAGTTT
  source 1..20: mol_type = other DNA
ggtccttcatggtccaaatc

SEQ ID NO: 11684 - DNA, 20 bp, synthetic construct
  misc_feature 1..20: note = Description of Artificial Sequence: Synthetic oligonucleotide
  misc_feature 1..20: note = Target: SCN10A; (+) strand; PAM type: NNNNGHTT; PAM sequence: TGGTGTTT
  source 1..20: mol_type = other DNA
tccaaatcaagagttttcag

SEQ ID NO: 11685 - DNA, 20 bp, synthetic construct
  misc_feature 1..20: note = Description of Artificial Sequence: Synthetic oligonucleotide
  misc_feature 1..20: note = Target: SCN10A; (+) strand; PAM type: NNNNGHTT; PAM sequence: CTACGTTT
  source 1..20: mol_type = other DNA
agtggtgtttatggtggtga

SEQ ID NO: 11686 - DNA, 20 bp, synthetic construct
  misc_feature 1..20: note = Description of Artificial Sequence: Synthetic oligonucleotide
  misc_feature 1..20: note = Target: SCN10A; (+) strand; PAM type: NNNNGHTT; PAM sequence: GCTGGTTT
  source 1..20: mol_type = other DNA
ccccctttcaactcaagagg

SEQ ID NO: 11687 - DNA, 20 bp, synthetic construct
  misc_feature 1..20: note = Description of Artificial Sequence: Synthetic oligonucleotide
  misc_feature 1..20: note = Target: SCN10A; (+) strand; PAM type: NNNNGHTT; PAM sequence: AGGGGTTT
  source 1..20: mol_type = other DNA
ggctggtttagaactcacgg

SEQ ID NO: 11688 - DNA, 20 bp, synthetic construct
  misc_feature 1..20: note = Description of Artificial Sequence: Synthetic oligonucleotide
  misc_feature 1..20: note = Target: SCN10A; (+) strand; PAM type: NNNNGHTT; PAM sequence: CACAGCTT
  source 1..20: mol_type = other DNA
ggagtgaggcagcaagtggg

SEQ ID NO: 11689 - DNA, 20 bp, synthetic construct
  misc_feature 1..20: note = Description of Artificial Sequence: Synthetic oligonucleotide
  misc_feature 1..20: note = Target: SCN10A; (+) strand; PAM type: NNNNGHTT; PAM sequence: GCTTGTTT
  source 1..20: mol_type = other DNA
tgaggcagcaagtgggcaca

SEQ ID NO: 11690 - DNA, 20 bp, synthetic construct
  misc_feature 1..20: note = Description of Artificial Sequence: Synthetic oligonucleotide
  misc_feature 1..20: note = Target: SCN10A; (+) strand; PAM type: NNNNGHTT; PAM sequence: ACTGGATT
  source 1..20: mol_type = other DNA
cccaggtgagtgttcgctca

SEQ ID NO: 11691 - DNA, 20 bp, synthetic construct
  misc_feature 1..20: note = Description of Artificial Sequence: Synthetic oligonucleotide
  misc_feature 1..20: note = Target: SCN10A; (+) strand; PAM type: NNNNGHTT; PAM sequence: TCAGGATT
  source 1..20: mol_type = other DNA
tgccagctcagggatcttcc

SEQ ID NO: 11692 - DNA, 20 bp, synthetic construct
  misc_feature 1..20: note = Description of Artificial Sequence: Synthetic oligonucleotide
  misc_feature 1..20: note = Target: SCN10A; (+) strand; PAM type: NNNNGHTT; PAM sequence: AGGAGCTT
  source 1..20: mol_type = other DNA
gtccaccgtgctgccctcag

SEQ ID NO: 11693 - DNA, 20 bp, synthetic construct
  misc_feature 1..20: note = Description of Artificial Sequence: Synthetic oligonucleotide
  misc_feature 1..20: note = Target: SCN10A; (+) strand; PAM type: NNNNGHTT; PAM sequence: CCATGTTT
  source 1..20: mol_type = other DNA
cactgcaggttcaactgcac

SEQ ID NO: 11694 - DNA, 20 bp, synthetic construct
  misc_feature 1..20: note = Description of Artificial Sequence: Synthetic oligonucleotide
  misc_feature 1..20: note = Target: SCN10A; (+) strand; PAM type: NNNNGHTT; PAM sequence: AGAGGCTT
  source 1..20: mol_type = other DNA
gctcttctccctggagcccc

SEQ ID NO: 11695 - DNA, 20 bp, synthetic construct
  misc_feature 1..20: note = Description of Artificial Sequence: Synthetic oligonucleotide
  misc_feature 1..20: note = Target: SCN10A; (+) strand; PAM type: NNNNGHTT; PAM sequence: CTGGGCTT
  source 1..20: mol_type = other DNA
ataacgactctcagcattca

SEQ ID NO: 11696 - DNA, 20 bp, synthetic construct
  misc_feature 1..20: note = Description of Artificial Sequence: Synthetic oligonucleotide
  misc_feature 1..20: note = Target: SCN10A; (+) strand; PAM type: NNNNGHTT; PAM sequence: GATAGCTT
  source 1..20: mol_type = other DNA
gctctcatattagtaaacct

SEQ ID NO: 11697 - DNA, 20 bp, synthetic construct
  misc_feature 1..20: note = Description of Artificial Sequence: Synthetic oligonucleotide
  misc_feature 1..20: note = Target: SCN10A; (+) strand; PAM type: NNNNGHTT; PAM sequence: AGCGGCTT
  source 1..20: mol_type = other DNA
ccctcacccagtgggaacca

SEQ ID NO: 11698 - DNA, 20 bp, synthetic construct
  misc_feature 1..20: note = Description of Artificial Sequence: Synthetic oligonucleotide
  misc_feature 1..20: note = Target: SCN10A; (+) strand; PAM type: NNNNGHTT; PAM sequence: AAGGGCTT
  source 1..20: mol_type = other DNA
agctgacattcttcaagctg

SEQ ID NO: 11699 - DNA, 20 bp, synthetic construct
  misc_feature 1..20: note = Description of Artificial Sequence: Synthetic oligonucleotide
  misc_feature 1..20: note = Target: SCN10A; (+) strand; PAM type: NNNNGHTT; PAM sequence: TATAGCTT
  source 1..20: mol_type = other DNA
tttatagatgcctctttccc

SEQ ID NO: 11700 - DNA, 20 bp, synthetic construct
  misc_feature 1..20: note = Description of Artificial Sequence: Synthetic oligonucleotide
  misc_feature 1..20: note = Target: SCN10A; (+) strand; PAM type: NNNNGHTT; PAM sequence: GCTTGTTT
  source 1..20: mol_type = other DNA
tagatgcctctttccctata

SEQ ID NO: 11701 - DNA, 20 bp, synthetic construct
  misc_feature 1..20: note = Description of Artificial Sequence: Synthetic oligonucleotide
  misc_feature 1..20: note = Target: SCN10A; (+) strand; PAM type: NNNNGHTT; PAM sequence: TCAAGATT
  source 1..20: mol_type = other DNA
ttccctatagcttgtttcct

SEQ ID NO: 11702 - DNA, 20 bp, synthetic construct
  misc_feature 1..20: note = Description of Artificial Sequence: Synthetic oligonucleotide
  misc_feature 1..20: note = Target: SCN10A; (+) strand; PAM type: NNNNGHTT; PAM sequence: TTTCGTTT
  source 1..20: mol_type = other DNA
gactttctttgtgcgttgtc

SEQ ID NO: 11703 - DNA, 20 bp, synthetic construct
  misc_feature 1..20: note = Description of Artificial Sequence: Synthetic oligonucleotide
  misc_feature 1..20: note = Target: SCN10A; (+) strand; PAM type: NNNNGHTT; PAM sequence: TTAAGCTT
  source 1..20: mol_type = other DNA
tttgacaagcagcatctcat

SEQ ID NO: 11704 - DNA, 20 bp, synthetic construct
  misc_feature 1..20: note = Description of Artificial Sequence: Synthetic oligonucleotide
  misc_feature 1..20: note = Target: SCN10A; (+) strand; PAM type: NNNNGHTT; PAM sequence: TTCAGTTT
  source 1..20: mol_type = other DNA
ctaccaagtaggcattacca

SEQ ID NO: 11705 - DNA, 20 bp, synthetic construct
  misc_feature 1..20: note = Description of Artificial Sequence: Synthetic oligonucleotide
  misc_feature 1..20: note = Target: SCN10A; (+) strand; PAM type: NNNNGHTT; PAM sequence: AGAGGTTT
  source 1..20: mol_type = other DNA
atgaataaatggcggctcag

SEQ ID NO: 11706 - DNA, 20 bp, synthetic construct
  misc_feature 1..20: note = Description of Artificial Sequence: Synthetic oligonucleotide
  misc_feature 1..20: note = Target: SCN10A; (+) strand; PAM type: NNNNGHTT; PAM sequence: CACAGCTT
  source 1..20: mol_type = other DNA
tgggaactgatcttaggtcc

SEQ ID NO: 11707 - DNA, 20 bp, synthetic construct
  misc_feature 1..20: note = Description of Artificial Sequence: Synthetic oligonucleotide
  misc_feature 1..20: note = Target: SCN10A; (+) strand; PAM type: NNNNGHTT; PAM sequence: GTGAGATT
  source 1..20: mol_type = other DNA
atacctagaaccaccctgga

SEQ ID NO: 11708 - DNA, 20 bp, synthetic construct
  misc_feature 1..20: note = Description of Artificial Sequence: Synthetic oligonucleotide
  misc_feature 1..20: note = Target: SCN10A; (+) strand; PAM type: NNNNGHTT; PAM sequence: TGCGGATT
  source 1..20: mol_type = other DNA
tatggtgaaagttgaaattg

SEQ ID NO: 11709 - DNA, 20 bp, synthetic construct
  misc_feature 1..20: note = Description of Artificial Sequence: Synthetic oligonucleotide
  misc_feature 1..20: note = Target: SCN10A; (+) strand; PAM type: NNNNGHTT; PAM sequence: ATGTGATT
  source 1..20: mol_type = other DNA
ccaggataagaaatgaggtt

SEQ ID NO: 11710 - DNA, 20 bp, synthetic construct
  misc_feature 1..20: note = Description of Artificial Sequence: Synthetic oligonucleotide
  misc_feature 1..20: note = Target: SCN10A; (+) strand; PAM type: NNNNGHTT; PAM sequence: AAGAGTTT
  source 1..20: mol_type = other DNA
catcacaggctgccagagcc

SEQ ID NO: 11711 - DNA, 20 bp, synthetic construct
  misc_feature 1..20: note = Description of Artificial Sequence: Synthetic oligonucleotide
  misc_feature 1..20: note = Target: SCN10A; (+) strand; PAM type: NNNNGHTT; PAM sequence: CTATGTTT
  source 1..20: mol_type = other DNA
aagactatagctagatagac

SEQ ID NO: 11712 - DNA, 20 bp, synthetic construct
  misc_feature 1..20: note = Description of Artificial Sequence: Synthetic oligonucleotide
  misc_feature 1..20: note = Target: SCN10A; (+) strand; PAM type: NNNNGHTT; PAM sequence: AGTTGTTT
  source 1..20: mol_type = other DNA
aagatgtgtgaccttaggca

SEQ ID NO: 11713 - DNA, 20 bp, synthetic construct
  misc_feature 1..20: note = Description of Artificial Sequence: Synthetic oligonucleotide
  misc_feature 1..20: note = Target: SCN10A; (+) strand; PAM type: NNNNGHTT; PAM sequence: CCCAGCTT
  source 1..20: mol_type = other DNA
cctctctaatcttcattttt

SEQ ID NO: 11714 - DNA, 20 bp, synthetic construct
  misc_feature 1..20: note = Description of Artificial Sequence: Synthetic oligonucleotide
  misc_feature 1..20: note = Target: SCN10A; (+) strand; PAM type: NNNNGHTT; PAM sequence: AGCTGTTT
  source 1..20: mol_type = other DNA
aggctagatctgcatcattc

SEQ ID NO: 11715 - DNA, 20 bp, synthetic construct
  misc_feature 1..20: note = Description of Artificial Sequence: Synthetic oligonucleotide
  misc_feature 1..20: note = Target: SCN10A; (+) strand; PAM type: NNNNGHTT; PAM sequence: TAGCGCTT
  source 1..20: mol_type = other DNA
gttttgatgactaaatatgt

SEQ ID NO: 11716 - DNA, 20 bp, synthetic construct
  misc_feature 1..20: note = Description of Artificial Sequence: Synthetic oligonucleotide
  misc_feature 1..20: note = Target: SCN10A; (+) strand; PAM type: NNNNGHTT; PAM sequence: AAGTGCTT
  source 1..20: mol_type = other DNA
cttgtaaaacactttgcacg

SEQ ID NO: 11717 - DNA, 20 bp, synthetic construct
  misc_feature 1..20: note = Description of Artificial Sequence: Synthetic oligonucleotide
  misc_feature 1..20: note = Target: SCN10A; (+) strand; PAM type: NNNNGHTT; PAM sequence: AATAGATT
  source 1..20: mol_type = other DNA
ttgcacgaagtgcttggctc

SEQ ID NO: 11718 - DNA, 20 bp, synthetic construct
  misc_feature 1..20: note = Description of Artificial Sequence: Synthetic oligonucleotide
  misc_feature 1..20: note = Target: SCN10A; (+) strand; PAM type: NNNNGHTT; PAM sequence: AAATGCTT
  source 1..20: mol_type = other DNA
aagagccccaaagtaactga

SEQ ID NO: 11719 - DNA, 20 bp, synthetic construct
  misc_feature 1..20: note = Description of Artificial Sequence: Synthetic oligonucleotide
  misc_feature 1..20: note = Target: SCN10A; (+) strand; PAM type: NNNNGHTT; PAM sequence: CACAGCTT
  source 1..20: mol_type = other DNA
ggagagctacagactcaaag

SEQ ID NO: 11720 - DNA, 20 bp, synthetic construct
  misc_feature 1..20: note = Description of Artificial Sequence: Synthetic oligonucleotide
  misc_feature 1..20: note = Target: SCN10A; (+) strand; PAM type: NNNNGHTT; PAM sequence: ACCAGCTT
  source 1..20: mol_type = other DNA
aggttagcgagggttgatat

SEQ ID NO: 11721 - DNA, 20 bp, synthetic construct
  misc_feature 1..20: note = Description of Artificial Sequence: Synthetic oligonucleotide
  misc_feature 1..20: note = Target: SCN10A; (+) strand; PAM type: NNNNGHTT; PAM sequence: ATGTGCTT
  source 1..20: mol_type = other DNA
tatattatcaaatggctcaa

SEQ ID NO: 11722 - DNA, 20 bp, synthetic construct
  misc_feature 1..20: note = Description of Artificial Sequence: Synthetic oligonucleotide
  misc_feature 1..20: note = Target: SCN10A; (+) strand; PAM type: NNNNGHTT; PAM sequence: TAAAGATT
  source 1..20: mol_type = other DNA
aggacttcttaggatgctgg

SEQ ID NO: 11723 - DNA, 20 bp, synthetic construct
  misc_feature 1..20: note = Description of Artificial Sequence: Synthetic oligonucleotide
  misc_feature 1..20: note = Target: SCN10A; (+) strand; PAM type: NNNNGHTT; PAM sequence: CCCTGTTT
  source 1..20: mol_type = other DNA
ctcacctgctgccccccact

SEQ ID NO: 11724 - DNA, 20 bp, synthetic construct
  misc_feature 1..20: note = Description of Artificial Sequence: Synthetic oligonucleotide
  misc_feature 1..20: note = Target: SCN10A; (+) strand; PAM type: NNNNGHTT; PAM sequence: GAAAGCTT
  source 1..20: mol_type = other DNA
ctcaaacgccaactcctctg

SEQ ID NO: 11725 - DNA, 20 bp, synthetic construct
  misc_feature 1..20: note = Description of Artificial Sequence: Synthetic oligonucleotide
  misc_feature 1..20: note = Target: SCN10A; (+) strand; PAM type: NNNNGHTT; PAM sequence: CATGGTTT
  source 1..20: mol_type = other DNA
aactcctctggaaagcttgg

SEQ ID NO: 11726 - DNA, 20 bp, synthetic construct
  misc_feature 1..20: note = Description of Artificial Sequence: Synthetic oligonucleotide
  misc_feature 1..20: note = Target: SCN10A; (+) strand; PAM type: NNNNGHTT; PAM sequence: ATCAGATT
  source 1..20: mol_type = other DNA
tcatcctccaagtcatcaag

SEQ ID NO: 11727 - DNA, 20 bp, synthetic construct
  misc_feature 1..20: note = Description of Artificial Sequence: Synthetic oligonucleotide
  misc_feature 1..20: note = Target: SCN10A; (+) strand; PAM type: NNNNGHTT; PAM sequence: GTCGGATT
  source 1..20: mol_type = other DNA
tgggcacagagacccacaca

SEQ ID NO: 11728 - DNA, 20 bp, synthetic construct
  misc_feature 1..20: note = Description of Artificial Sequence: Synthetic oligonucleotide
  misc_feature 1..20: note = Target: SCN10A; (+) strand; PAM type: NNNNGHTT; PAM sequence: GGGAGCTT
  source 1..20: mol_type = other DNA
tgctcatccctggggcctct

SEQ ID NO: 11729 - DNA, 20 bp, synthetic construct
  misc_feature 1..20: note = Description of Artificial Sequence: Synthetic oligonucleotide
  misc_feature 1..20: note = Target: SCN10A; (+) strand; PAM type: NNNNGHTT; PAM sequence: GGGAGTTT
  source 1..20: mol_type = other DNA
cagccttggagctggagagt

SEQ ID NO: 11730 - DNA, 20 bp, synthetic construct
  misc_feature 1..20: note = Description of Artificial Sequence: Synthetic oligonucleotide
  misc_feature 1..20: note = Target: SCN10A; (+) strand; PAM type: NNNNGHTT; PAM sequence: GCCTGTTT
  source 1..20: mol_type = other DNA
tgctgaagaagctgcaaaga

SEQ ID NO: 11731 - DNA, 20 bp, synthetic construct
  misc_feature 1..20: note = Description of Artificial Sequence: Synthetic oligonucleotide
  misc_feature 1..20: note = Target: SCN10A; (+) strand; PAM type: NNNNGHTT; PAM sequence: GGAAGATT
  source 1..20: mol_type = other DNA
ctgaagagaaggaatggaag

SEQ ID NO: 11732 - DNA, 20 bp, synthetic construct
  misc_feature 1..20: note = Description of Artificial Sequence: Synthetic oligonucleotide
  misc_feature 1..20: note = Target: SCN10A; (+) strand; PAM type: NNNNGHTT; PAM sequence: GAAAGTTT
  source 1..20: mol_type = other DNA
ctttctgagagcagttgagg

SEQ ID NO: 11733 - DNA, 20 bp, synthetic construct
  misc_feature 1..20: note = Description of Artificial Sequence: Synthetic oligonucleotide
  misc_feature 1..20: note = Target: SCN10A; (+) strand; PAM type: NNNNGHTT; PAM sequence: CGAGGCTT
  source 1..20: mol_type = other DNA
gagtgacccgcctcagtgga

SEQ ID NO: 11734 - DNA, 20 bp, synthetic construct
  misc_feature 1..20: note = Description of Artificial Sequence: Synthetic oligonucleotide
  misc_feature 1..20: note = Target: SCN10A; (+) strand; PAM type: NNNNGHTT; PAM sequence: TGCTGCTT
  source 1..20: mol_type = other DNA
ctggaatcctgggcacatct

SEQ ID NO: 11735 - DNA, 20 bp, synthetic construct
  misc_feature 1..20: note = Description of Artificial Sequence: Synthetic oligonucleotide
  misc_feature 1..20: note = Target: SCN10A; (+) strand; PAM type: NNNNGHTT; PAM sequence: CAGAGTTT
  source 1..20: mol_type = other DNA
gtgggctcagcctggaagaa

SEQ ID NO: 11736 - DNA, 20 bp, synthetic construct
  misc_feature 1..20: note = Description of Artificial Sequence: Synthetic oligonucleotide
  misc_feature 1..20: note = Target: SCN10A; (+) strand; PAM type: NNNNGHTT; PAM sequence: TCTGGATT
  source 1..20: mol_type = other DNA
gggtggaaaagactaaagag

SEQ ID NO: 11737 - DNA, 20 bp, synthetic construct
  misc_feature 1..20: note = Description of Artificial Sequence: Synthetic oligonucleotide
  misc_feature 1..20: note = Target: SCN10A; (+) strand; PAM type: NNNNGHTT; PAM sequence: TGTTGCTT
  source 1..20: mol_type = other DNA
actaaagagtctggatttgt

SEQ ID NO: 11738 - DNA, 20 bp, synthetic construct
  misc_feature 1..20: note = Description of Artificial Sequence: Synthetic oligonucleotide
  misc_feature 1..20: note = Target: SCN10A; (+) strand; PAM type: NNNNGHTT; PAM sequence: CTTGGTTT
  source 1..20: mol_type = other DNA
tttgttgttgcttccctttt

SEQ ID NO: 11739 - DNA, 20 bp, synthetic construct
  misc_feature 1..20: note = Description of Artificial Sequence: Synthetic oligonucleotide
  misc_feature 1..20: note = Target: SCN10A; (+) strand; PAM type: NNNNGHTT; PAM sequence: TTTAGCTT
  source 1..20: mol_type = other DNA
tgttgcttcccttttcttgg

SEQ ID NO: 11740 - DNA, 20 bp, synthetic construct
  misc_feature 1..20: note = Description of Artificial Sequence: Synthetic oligonucleotide
  misc_feature 1..20: note = Target: SCN10A; (+) strand; PAM type: NNNNGHTT; PAM sequence: AGGGGCTT
  source 1..20: mol_type = other DNA
gatgtccagggcaataagaa

SEQ ID NO: 11741 - DNA, 20 bp, synthetic construct
  misc_feature 1..20: note = Description of Artificial Sequence: Synthetic oligonucleotide
  misc_feature 1..20: note = Target: SCN10A; (+) strand; PAM type: NNNNGHTT; PAM sequence: TGGGGCTT
  source 1..20: mol_type = other DNA
ctggggcggagaaggggtat

SEQ ID NO: 11742 - DNA, 20 bp, synthetic construct
  misc_feature 1..20: note = Description of Artificial Sequence: Synthetic oligonucleotide
  misc_feature 1..20: note = Target: SCN10A; (+) strand; PAM type: NNNNGHTT; PAM sequence: AGGGGCTT
  source 1..20: mol_type = other DNA
attggcaagtgagtctccag

SEQ ID NO: 11743 - DNA, 20 bp, synthetic construct
  misc_feature 1..20: note = Description of Artificial Sequence: Synthetic oligonucleotide
  misc_feature 1..20: note = Target: SCN10A; (+) strand; PAM type: NNNNGHTT; PAM sequence: AGTAGATT
  source 1..20: mol_type = other DNA
ggggcttcctccaaacatgg

SEQ ID NO: 11744 - DNA, 20 bp, synthetic construct
  misc_feature 1..20: note = Description of Artificial Sequence: Synthetic oligonucleotide
  misc_feature 1..20: note = Target: SCN10A; (+) strand; PAM type: NNNNGHTT; PAM sequence: TGCAGCTT
  source 1..20: mol_type = other DNA
ctgctcccagctaggacctg

SEQ ID NO: 11745 - DNA, 20 bp, synthetic construct
  misc_feature 1..20: note = Description of Artificial Sequence: Synthetic oligonucleotide
  misc_feature 1..20: note = Target: SCN10A; (+) strand; PAM type: NNNNGHTT; PAM sequence: AAATGTTT
  source 1..20: mol_type = other DNA
gctcttacttccctgaataa

SEQ ID NO: 11746 - DNA, 20 bp, synthetic construct
  misc_feature 1..20: note = Description of Artificial Sequence: Synthetic oligonucleotide
  misc_feature 1..20: note = Target: SCN10A; (+) strand; PAM type: NNNNGHTT; PAM sequence: CTCAGATT
  source 1..20: mol_type = other DNA
aaaaatgttttctgagcccc

SEQ ID NO: 11747 - DNA, 20 bp, synthetic construct
  misc_feature 1..20: note = Description of Artificial Sequence: Synthetic oligonucleotide
  misc_feature 1..20: note = Target: SCN10A; (+) strand; PAM type: NNNNGHTT; PAM sequence: CACCGTTT
  source 1..20: mol_type = other DNA
ttcctttaacagctaataga

SEQ ID NO: 11748 - DNA, 20 bp, synthetic construct
  misc_feature 1..20: note = Description of Artificial Sequence: Synthetic oligonucleotide
  misc_feature 1..20: note = Target: SCN10A; (+) strand; PAM type: NNNNGHTT; PAM sequence: TCTTGATT
  source 1..20: mol_type = other DNA
cccatgagtaagcattattt

SEQ ID NO: 11749 - DNA, 20 bp, synthetic construct
  misc_feature 1..20: note = Description of Artificial Sequence: Synthetic oligonucleotide
  misc_feature 1..20: note = Target: SCN10A; (+) strand; PAM type: NNNNGHTT; PAM sequence: AGGAGATT
  source 1..20: mol_type = other DNA
tttaaggaaattagatcttg

SEQ ID NO: 11750 - DNA, 20 bp, synthetic construct
  misc_feature 1..20: note = Description of Artificial Sequence: Synthetic oligonucleotide
  misc_feature 1..20: note = Target: SCN10A; (+) strand; PAM type: NNNNGHTT; PAM sequence: CAGAGATT
  source 1..20: mol_type = other DNA
ccacctagtaaatggtggag

SEQ ID NO: 11751 - DNA, 20 bp, synthetic construct
  misc_feature 1..20: note = Description of Artificial Sequence: Synthetic oligonucleotide
  misc_feature 1..20: note = Target: SCN10A; (+) strand; PAM type: NNNNGHTT; PAM sequence: AAAAGTTT
  source 1..20: mol_type = other DNA
atgaatcccacatgaatttg

SEQ ID NO: 11752 - DNA, 20 bp, synthetic construct
  misc_feature 1..20: note = Description of Artificial Sequence: Synthetic oligonucleotide
  misc_feature 1..20: note = Target: SCN10A; (+) strand; PAM type: NNNNGHTT; PAM sequence: CAAAGCTT
  source 1..20: mol_type = other DNA
ctgggcataaaaatgcagat

SEQ ID NO: 11753 - DNA, 20 bp, synthetic construct
  misc_feature 1..20: note = Description of Artificial Sequence: Synthetic oligonucleotide
  misc_feature 1..20: note = Target: SCN10A; (+) strand; PAM type: NNNNGHTT; PAM sequence: TATGGATT
  source 1..20: mol_type = other DNA
gtcaagaaaaggatgaggca

SEQ ID NO: 11754 - DNA, 20 bp, synthetic construct
  misc_feature 1..20: note = Description of Artificial Sequence: Synthetic oligonucleotide
  misc_feature 1..20: note = Target: SCN10A; (+) strand; PAM type: NNNNGHTT; PAM sequence: GGTAGTTT
  source 1..20: mol_type = other DNA
gatattttttcggttgttac

SEQ ID NO: 11755 - DNA, 20 bp, synthetic construct
  misc_feature 1..20: note = Description of Artificial Sequence: Synthetic oligonucleotide
  misc_feature 1..20: note = Target: SCN10A; (+) strand; PAM type: NNNNGHTT; PAM sequence: AGCTGCTT
  source 1..20: mol_type = other DNA
tacggtagttttcccctagg

SEQ ID NO: 11756 - DNA, 20 bp, synthetic construct
  misc_feature 1..20: note = Description of Artificial Sequence: Synthetic oligonucleotide
  misc_feature 1..20: note = Target: SCN10A; (+) strand; PAM type: NNNNGHTT; PAM sequence: CTGAGTTT
  source 1..20: mol_type = other DNA
gaggttccccagtgccccca

SEQ ID NO: 11757 - DNA, 20 bp, synthetic construct
  misc_feature 1..20: note = Description of Artificial Sequence: Synthetic oligonucleotide
  misc_feature 1..20: note = Target: SCN10A; (+) strand; PAM type: NNNNGHTT; PAM sequence: GTGTGTTT
  source 1..20: mol_type = other DNA
gtttccgatgatcttgatga

SEQ ID NO: 11758 - DNA, 20 bp, synthetic construct
  misc_feature 1..20: note = Description of Artificial Sequence: Synthetic oligonucleotide
  misc_feature 1..20: note = Target: SCN10A; (+) strand; PAM type: NNNNGHTT; PAM sequence: CCAGGATT
  source 1..20: mol_type = other DNA
atgagtgtgtttaaggtggg

SEQ ID NO: 11759 - DNA, 20 bp, synthetic construct
  misc_feature 1..20: note = Description of Artificial Sequence: Synthetic oligonucleotide
  misc_feature 1..20: note = Target: SCN10A; (+) strand; PAM type: NNNNGHTT; PAM sequence: GCCAGCTT
  source 1..20: mol_type = other DNA
ttaaggtgggccaggatttg

SEQ ID NO: 11760 - DNA, 20 bp, synthetic construct
  misc_feature 1..20: note = Description of Artificial Sequence: Synthetic oligonucleotide
  misc_feature 1..20: note = Target: SCN10A; (+) strand; PAM type: NNNNGHTT; PAM sequence: TCAGGTTT
  source 1..20: mol_type = other DNA
ctgcagagaaacagagaccg

SEQ ID NO: 11761 - DNA, 20 bp, synthetic construct
  misc_feature 1..20: note = Description of Artificial Sequence: Synthetic oligonucleotide
  misc_feature 1..20: note = Target: SCN10A; (+) strand; PAM type: NNNNGHTT; PAM sequence: TAAAGTTT
  source 1..20: mol_type = other DNA
tgtgctcattacctttcatc

SEQ ID NO: 11762 - DNA, 20 bp, synthetic construct
  misc_feature 1..20: note = Description of Artificial Sequence: Synthetic oligonucleotide
  misc_feature 1..20: note = Target: SCN10A; (+) strand; PAM type: NNNNGHTT; PAM sequence: GGGCGTTT
  source 1..20: mol_type = other DNA
cctctcatcccattaaacca

SEQ ID NO: 11763 - DNA, 20 bp, synthetic construct
  misc_feature 1..20: note = Description of Artificial Sequence: Synthetic oligonucleotide
  misc_feature 1..20: note = Target: SCN10A; (+) strand; PAM type: NNNNGHTT; PAM sequence: CACTGCTT
  source 1..20: mol_type = other DNA
aaaccagggcgttttctgga

SEQ ID NO: 11764 - DNA, 20 bp, synthetic construct
  misc_feature 1..20: note = Description of Artificial Sequence: Synthetic oligonucleotide
  misc_feature 1..20: note = Target: SCN10A; (+) strand; PAM type: NNNNGHTT; PAM sequence: ATGTGCTT
  source 1..20: mol_type = other DNA
tctatggttcataagtatca

SEQ ID NO: 11765 - DNA, 20 bp, synthetic construct
  misc_feature 1..20: note = Description of Artificial Sequence: Synthetic oligonucleotide
  misc_feature 1..20: note = Target: SCN10A; (+) strand; PAM type: NNNNGHTT; PAM sequence: ACAAGCTT
  source 1..20: mol_type = other DNA
gggctcacaaataagtgaga

SEQ ID NO: 11766 - DNA, 20 bp, synthetic construct
  misc_feature 1..20: note = Description of Artificial Sequence: Synthetic oligonucleotide
  misc_feature 1..20: note = Target: SCN10A; (+) strand; PAM type: NNNNGHTT; PAM sequence: ACCAGCTT
  source 1..20: mol_type = other DNA
ggacaacatctgttgctccc

SEQ ID NO: 11767 - DNA, 20 bp, synthetic construct
  misc_feature 1..20: note = Description of Artificial Sequence: Synthetic oligonucleotide
  misc_feature 1..20: note = Target: SCN10A; (+) strand; PAM type: NNNNGHTT; PAM sequence: CCATGATT
  source 1..20: mol_type = other DNA
agctttgaaactgcaaatgt

SEQ ID NO: 11768 - DNA, 20 bp, synthetic construct
  misc_feature 1..20: note = Description of Artificial Sequence: Synthetic oligonucleotide
  misc_feature 1..20: note = Target: SCN10A; (+) strand; PAM type: NNNNGHTT; PAM sequence: AGTTGATT
  source 1..20: mol_type = other DNA
tcatggactcagcattcata

SEQ ID NO: 11769 - DNA, 20 bp, synthetic construct
  misc_feature 1..20: note = Description of Artificial Sequence: Synthetic oligonucleotide
  misc_feature 1..20: note = Target: SCN10A; (+) strand; PAM type: NNNNGHTT; PAM sequence: AATGGTTT
  source 1..20: mol_type = other DNA
gctcttgctctcatggaacc

SEQ ID NO: 11770 - DNA, 20 bp, synthetic construct
  misc_feature 1..20: note = Description of Artificial Sequence: Synthetic oligonucleotide
  misc_feature 1..20: note = Target: SCN10A; (+) strand; PAM type: NNNNGHTT; PAM sequence: ATGTGTTT
  source 1..20: mol_type = other DNA
atcatcaagcataaaaatgt

SEQ ID NO: 11771 - DNA, 20 bp, synthetic construct
  misc_feature 1..20: note = Description of Artificial Sequence: Synthetic oligonucleotide
  misc_feature 1..20: note = Target: SCN10A; (+) strand; PAM type: NNNNGHTT; PAM sequence: GTGTGTTT
  source 1..20: mol_type = other DNA
ctgtcagtctgtcagtcaag

SEQ ID NO: 11772 - DNA, 20 bp, synthetic construct
  misc_feature 1..20: note = Description of Artificial Sequence: Synthetic oligonucleotide
  misc_feature 1..20: note = Target: SCN10A; (+) strand; PAM type: NNNNGHTT; PAM sequence: TGTGGCTT
  source 1..20: mol_type = other DNA
gcacctactaagagccaggc

SEQ ID NO: 11773 - DNA, 20 bp, synthetic construct
  misc_feature 1..20: note = Description of Artificial Sequence: Synthetic oligonucleotide
  misc_feature 1..20: note = Target: SCN10A; (+) strand; PAM type: NNNNGHTT; PAM sequence: GGAGGTTT
  source 1..20: mol_type = other DNA
cgtgagtaaatcccacggga

SEQ ID NO: 11774 - DNA, 20 bp, synthetic construct
  misc_feature 1..20: note = Description of Artificial Sequence: Synthetic oligonucleotide
  misc_feature 1..20: note = Target: SCN10A; (+) strand; PAM type: NNNNGHTT; PAM sequence: CAGAGCTT
  source 1..20: mol_type = other DNA
tactctcctcatatgggaag

SEQ ID NO: 11775 - DNA, 20 bp, synthetic construct
  misc_feature 1..20: note = Description of Artificial Sequence: Synthetic oligonucleotide
  misc_feature 1..20: note = Target: SCN10A; (+) strand; PAM type: NNNNGHTT; PAM sequence: CCCTGCTT
  source 1..20: mol_type = other DNA
taagcctagcaggaatttct

SEQ ID NO: 11776 - DNA, 20 bp, synthetic construct
  misc_feature 1..20: note = Description of Artificial Sequence: Synthetic oligonucleotide
  misc_feature 1..20: note = Target: SCN10A; (+) strand; PAM type: NNNNGHTT; PAM sequence: ATAGGATT
  source 1..20: mol_type = other DNA
aacaacaaagtggtgctcat

SEQ ID NO: 11777 - DNA, 20 bp, synthetic construct
  misc_feature 1..20: note = Description of Artificial Sequence: Synthetic oligonucleotide
  misc_feature 1..20: note = Target: SCN10A; (+) strand; PAM type: NNNNGHTT; PAM sequence: TCAGGTTT
  source 1..20: mol_type = other DNA
tggaggaacctgcctttatc

SEQ ID NO: 11778 - DNA, 20 bp, synthetic construct
  misc_feature 1..20: note = Description of Artificial Sequence: Synthetic oligonucleotide
  misc_feature 1..20: note = Target: SCN10A; (+) strand; PAM type: NNNNGHTT; PAM sequence: AATTGTTT
  source 1..20: mol_type = other DNA
tttcaaactattccctcaaa

SEQ ID NO: 11779 - DNA, 20 bp, synthetic construct
  misc_feature 1..20: note = Description of Artificial Sequence: Synthetic oligonucleotide
  misc_feature 1..20: note = Target: SCN10A; (+) strand; PAM type: NNNNGHTT; PAM sequence: GAAGGTTT
  source 1..20: mol_type = other DNA
aaaattaaaaatattatgaa

SEQ ID NO: 11780 - DNA, 20 bp, synthetic construct
  misc_feature 1..20: note = Description of Artificial Sequence: Synthetic oligonucleotide
  misc_feature 1..20: note = Target: SCN10A; (+) strand; PAM type: NNNNGHTT; PAM sequence: ATCAGATT
  source 1..20: mol_type = other DNA
atattatgaagaaggtttgc

SEQ ID NO: 11781 - DNA, 20 bp, synthetic construct
  misc_feature 1..20: note = Description of Artificial Sequence: Synthetic oligonucleotide
  misc_feature 1..20: note = Target: SCN10A; (+) strand; PAM type: NNNNGHTT; PAM sequence: CACAGTTT
  source 1..20: mol_type = other DNA
aaggtttgcatcagatttga

SEQ ID NO: 11782 - DNA, 20 bp, synthetic construct
  misc_feature 1..20: note = Description of Artificial Sequence: Synthetic oligonucleotide
  misc_feature 1..20: note = Target: SCN10A; (+) strand; PAM type: NNNNGHTT; PAM sequence: GAGAGTTT
  source 1..20: mol_type = other DNA
agacatagaggatagaatga

SEQ ID NO: 11783 - DNA, 20 bp, synthetic construct
  misc_feature 1..20: note = Description of Artificial Sequence: Synthetic oligonucleotide
  misc_feature 1..20: note = Target: SCN10A; (+) strand; PAM type: NNNNGHTT; PAM sequence: TAAAGATT
  source 1..20: mol_type = other DNA
attgaagaaaattacaaaac

SEQ ID NO: 11784 - DNA, 20 bp, synthetic construct
  misc_feature 1..20: note = Description of Artificial Sequence: Synthetic oligonucleotide
  misc_feature 1..20: note = Target: SCN10A; (+) strand; PAM type: NNNNGHTT; PAM sequence: AGAAGATT
  source 1..20: mol_type = other DNA
gcagaacaccaaagatggat

SEQ ID NO: 11785 - DNA, 20 bp, synthetic construct
  misc_feature 1..20: note = Description of Artificial Sequence: Synthetic oligonucleotide
  misc_feature 1..20: note = Target: SCN10A; (+) strand; PAM type: NNNNGHTT; PAM sequence: TTAGGCTT
  source 1..20: mol_type = other DNA
agaaatcaataactaaattt

SEQ ID NO: 11786 - DNA, 20 bp, synthetic construct
  misc_feature 1..20: note = Description of Artificial Sequence: Synthetic oligonucleotide
  misc_feature 1..20: note = Target: SCN10A; (+) strand; PAM type: NNNNGHTT; PAM sequence: TTGAGTTT
  source 1..20: mol_type = other DNA
tcagtaacttacaaaaattc

SEQ ID NO: 11787 - DNA, 20 bp, synthetic construct
  misc_feature 1..20: note = Description of Artificial Sequence: Synthetic oligonucleotide
  misc_feature 1..20: note = Target: SCN10A; (+) strand; PAM type: NNNNGHTT; PAM sequence: TGGAGTTT
  source 1..20: mol_type = other DNA
ttggaaccaggatggccgac

SEQ ID NO: 11788 - DNA, 20 bp, synthetic construct
  misc_feature 1..20: note = Description of Artificial Sequence: Synthetic oligonucleotide
  misc_feature 1..20: note = Target: SCN10A; (+) strand; PAM type: NNNNGHTT; PAM sequence: ATGAGCTT
  source 1..20: mol_type = other DNA
ccgactggagtttgtgcaga

SEQ ID NO: 11789 - DNA, 20 bp, synthetic construct
  misc_feature 1..20: note = Description of Artificial Sequence: Synthetic oligonucleotide
  misc_feature 1..20: note = Target: SCN10A; (+) strand; PAM type: NNNNGHTT; PAM sequence: CCCAGATT
  source 1..20: mol_type = other DNA
catattgcatactaactccc

SEQ ID NO: 11790 - DNA, 20 bp, synthetic construct
  misc_feature 1..20: note = Description of Artificial Sequence: Synthetic oligonucleotide
  misc_feature 1..20: note = Target: SCN10A; (+) strand; PAM type: NNNNGHTT; PAM sequence: CTGAGCTT
  source 1..20: mol_type = other DNA
gacagcacagggagacagat

SEQ ID NO: 11791 - DNA, 20 bp, synthetic construct
  misc_feature 1..20: note = Description of Artificial Sequence: Synthetic oligonucleotide
  misc_feature 1..20: note = Target: SCN10A; (+) strand; PAM type: NNNNGHTT; PAM sequence: GCCAGCTT
  source 1..20: mol_type = other DNA
gacctcctgtcttcttgcca

SEQ ID NO: 11792 - DNA, 20 bp, synthetic construct
  misc_feature 1..20: note = Description of Artificial Sequence: Synthetic oligonucleotide
  misc_feature 1..20: note = Target: SCN10A; (+) strand; PAM type: NNNNGHTT; PAM sequence: TTAAGCTT
  source 1..20: mol_type = other DNA
ttgccagccagcttgcagta

SEQ ID NO: 11793 - DNA, 20 bp, synthetic construct
  misc_feature 1..20: note = Description of Artificial Sequence: Synthetic oligonucleotide
  misc_feature 1..20: note = Target: SCN10A; (+) strand; PAM type: NNNNGHTT; PAM sequence: CTTGGCTT
  source 1..20: mol_type = other DNA
caaaagcctggtgtcctcgt

SEQ ID NO: 11794 - DNA, 20 bp, synthetic construct
  misc_feature 1..20: note = Description of Artificial Sequence: Synthetic oligonucleotide
  misc_feature 1..20: note = Target: SCN10A; (+) strand; PAM type: NNNNGHTT; PAM sequence: ATTGGCTT
  source 1..20: mol_type = other DNA
ttggcttccaaagtcatagt

SEQ ID NO: 11795 - DNA, 20 bp, synthetic construct
  misc_feature 1..20: note = Description of Artificial Sequence: Synthetic oligonucleotide
  misc_feature 1..20: note = Target: SCN10A; (+) strand; PAM type: NNNNGHTT; PAM sequence: GACTGTTT
  source 1..20: mol_type = other DNA
tcctcccagacacaacggaa

SEQ ID NO: 11796 - DNA, 20 bp, synthetic construct
  misc_feature 1..20: note = Description of Artificial Sequence: Synthetic oligonucleotide
  misc_feature 1..20: note = Target: SCN10A; (+) strand; PAM type: NNNNGHTT; PAM sequence: TCCAGTTT
  source 1..20: mol_type = other DNA
gacacaacggaagactgttt

SEQ ID NO: 11797 - DNA, 20 bp, synthetic construct
  misc_feature 1..20: note = Description of Artificial Sequence: Synthetic oligonucleotide
  misc_feature 1..20: note = Target: SCN10A; (+) strand; PAM type: NNNNGHTT; PAM sequence: TTTTGCTT
  source 1..20: mol_type = other DNA
aacggaagactgttttccag

SEQ ID NO: 11798 - DNA, 20 bp, synthetic construct
  misc_feature 1..20: note = Description of Artificial Sequence: Synthetic oligonucleotide
  misc_feature 1..20: note = Target: SCN10A; (+) strand; PAM type: NNNNGHTT; PAM sequence: GAGAGCTT
  source 1..20: mol_type = other DNA
cttgaagtagacactcccag

SEQ ID NO: 11799 - DNA, 20 bp, synthetic construct
  misc_feature 1..20: note = Description of Artificial Sequence: Synthetic oligonucleotide
  misc_feature 1..20: note = Target: SCN10A; (+) strand; PAM type: NNNNGHTT; PAM sequence: CACAGATT
  source 1..20: mol_type = other DNA
acatctctattatgttaact

SEQ ID NO: 11800 - DNA, 20 bp, synthetic construct
  misc_feature 1..20: note = Description of Artificial Sequence: Synthetic oligonucleotide
  misc_feature 1..20: note = Target: SCN10A; (+) strand; PAM type: NNNNGHTT; PAM sequence: AATTGCTT
  source 1..20: mol_type = other DNA
cttatcttgagtaatggaga

SEQ ID NO: 11801 - DNA, 20 bp, synthetic construct
  misc_feature 1..20: note = Description of Artificial Sequence: Synthetic oligonucleotide
  misc_feature 1..20: note = Target: SCN10A; (+) strand; PAM type: NNNNGHTT; PAM sequence: ACTGGCTT
  source 1..20: mol_type = other DNA
aaaagcatcaactatgtggc

SEQ ID NO: 11802 - DNA, 20 bp, synthetic construct
  misc_feature 1..20: note = Description of Artificial Sequence: Synthetic oligonucleotide
  misc_feature 1..20: note = Target: SCN10A; (+) strand; PAM type: NNNNGHTT; PAM sequence: GAAGGCTT
  source 1..20: mol_type = other DNA
caacaaggaagctgatagga

SEQ ID NO: 11803 - DNA, 20 bp, synthetic construct
  misc_feature 1..20: note = Description of Artificial Sequence: Synthetic oligonucleotide
  misc_feature 1..20: note = Target: SCN10A; (+) strand; PAM type: NNNNGHTT; PAM sequence: AAGGGTTT
  source 1..20: mol_type = other DNA
tgaaccagcaaccctagggg

SEQ ID NO: 11804 - DNA, 20 bp, synthetic construct
  misc_feature 1..20: note = Description of Artificial Sequence: Synthetic oligonucleotide
  misc_feature 1..20: note = Target: SCN10A; (+) strand; PAM type: NNNNGHTT; PAM sequence: AAGAGATT
  source 1..20: mol_type = other DNA
ttggtcaagacagtacaaga

SEQ ID NO: 11805 - DNA, 20 bp, synthetic construct
  misc_feature 1..20: note = Description of Artificial Sequence: Synthetic oligonucleotide
  misc_feature 1..20: note = Target: SCN10A; (+) strand; PAM type: NNNNGHTT; PAM sequence: GAAAGATT
  source 1..20: mol_type = other DNA
caagaaagagattagctcag

SEQ ID NO: 11806 - DNA, 20 bp, synthetic construct
  misc_feature 1..20: note = Description of Artificial Sequence: Synthetic oligonucleotide
  misc_feature 1..20: note = Target: SCN10A; (+) strand; PAM type: NNNNGHTT; PAM sequence: GCTGGTTT
  source 1..20: mol_type = other DNA
attagctcaggaaagattta

SEQ ID NO: 11807 - DNA, 20 bp, synthetic construct
  misc_feature 1..20: note = Description of Artificial Sequence: Synthetic oligonucleotide
  misc_feature 1..20: note = Target: SCN10A; (+) strand; PAM type: NNNNGHTT; PAM sequence: AGAAGTTT
  source 1..20: mol_type = other DNA
aataaaagaaaatataatcc

SEQ ID NO: 11808 - DNA, 20 bp, synthetic construct
  misc_feature 1..20: note = Description of Artificial Sequence: Synthetic oligonucleotide
  misc_feature 1..20: note = Target: SCN10A; (+) strand; PAM type: NNNNGHTT; PAM sequence: TGACGATT
  source 1..20: mol_type = other DNA
aatccagaagtttagagcct

SEQ ID NO: 11809 - DNA, 20 bp, synthetic construct
  misc_feature 1..20: note = Description of Artificial Sequence: Synthetic oligonucleotide
  misc_feature 1..20: note = Target: SCN10A; (+) strand; PAM type: NNNNGHTT; PAM sequence: TACTGCTT
  source 1..20: mol_type = other DNA
cttgacgatttagggaactg

SEQ ID NO: 11810 - DNA, 20 bp, synthetic construct
  misc_feature 1..20: note = Description of Artificial Sequence: Synthetic oligonucleotide
  misc_feature 1..20: note = Target: SCN10A; (+) strand; PAM type: NNNNGHTT; PAM sequence: TCTAGATT
  source 1..20: mol_type = other DNA
atttagggaactgtactgct

SEQ ID NO: 11811 - DNA, 20 bp, synthetic construct
  misc_feature 1..20: note = Description of Artificial Sequence: Synthetic oligonucleotide
  misc_feature 1..20: note = Target: SCN10A; (+) strand; PAM type: NNNNGHTT; PAM sequence: ATGGGATT
  source 1..20: mol_type = other DNA
tagattccaggcagtgagca

SEQ ID NO: 11812 - DNA, 20 bp, synthetic construct
  misc_feature 1..20: note = Description of Artificial Sequence: Synthetic oligonucleotide
  misc_feature 1..20: note = Target: SCN10A; (+) strand; PAM type: NNNNGHTT; PAM sequence: CAAAGCTT
  source 1..20: mol_type = other DNA
ttaaatgaaacaactcttag

SEQ ID NO: 11813 - DNA, 20 bp, synthetic construct
  misc_feature 1..20: note = Description of Artificial Sequence: Synthetic oligonucleotide
  misc_feature 1..20: note = Target: SCN10A; (+) strand; PAM type: NNNNGHTT; PAM sequence: CACTGTTT
  source 1..20: mol_type = other DNA
gcttgtagtaatggtgtagc

SEQ ID NO: 11814 - DNA, 20 bp, synthetic construct
  misc_feature 1..20: note = Description of Artificial Sequence: Synthetic oligonucleotide
  misc_feature 1..20: note = Target: SCN10A; (+) strand; PAM type: NNNNGHTT; PAM sequence: CTAAGTTT
  source 1..20: mol_type = other DNA
aatgagaggtctgaagccat

SEQ ID NO: 11815 - DNA, 20 bp, synthetic construct
  misc_feature 1..20: note = Description of Artificial Sequence: Synthetic oligonucleotide
  misc_feature 1..20: note = Target: SCN10A; (+) strand; PAM type: NNNNGHTT; PAM sequence: CACTGTTT
  source 1..20: mol_type = other DNA
ccctgactgaaaaagccttt

SEQ ID NO: 11816 - DNA, 20 bp, synthetic construct
  misc_feature 1..20: note = Description of Artificial Sequence: Synthetic oligonucleotide
  misc_feature 1..20: note = Target: SCN10A; (+) strand; PAM type: NNNNGHTT; PAM sequence: CTTGGCTT
  source 1..20: mol_type = other DNA
gtttaaaccttaaaacaaac

SEQ ID NO: 11817 - DNA, 20 bp, synthetic construct
  misc_feature 1..20: note = Description of Artificial Sequence: Synthetic oligonucleotide
  misc_feature 1..20: note = Target: SCN10A; (+) strand; PAM type: NNNNGHTT; PAM sequence: TCTGGCTT
  source 1..20: mol_type = other DNA
tggagtcccacctagagctg

SEQ ID NO: 11818 - DNA, 20 bp, synthetic construct
  misc_feature 1..20: note = Description of Artificial Sequence: Synthetic oligonucleotide
  misc_feature 1..20: note = Target: SCN10A; (+) strand; PAM type: NNNNGHTT; PAM sequence: CTCAGTTT
  source 1..20: mol_type = other DNA
acctttattggggtcagtta

SEQ ID NO: 11819 - DNA, 20 bp, synthetic construct
  misc_feature 1..20: note = Description of Artificial Sequence: Synthetic oligonucleotide
  misc_feature 1..20: note = Target: SCN10A; (+) strand; PAM type: NNNNGHTT; PAM sequence: TAGAGATT
  source 1..20: mol_type = other DNA
tggggtcagttactcagttt

SEQ ID NO: 11820 - DNA, 20 bp, synthetic construct
  misc_feature 1..20: note = Description of Artificial Sequence: Synthetic oligonucleotide
  misc_feature 1..20: note = Target: SCN10A; (+) strand; PAM type: NNNNGHTT; PAM sequence: GGTAGCTT
  source 1..20: mol_type = other DNA
tagagattgtctgtataata

SEQ ID NO: 11821 - DNA, 20 bp, synthetic construct
  misc_feature 1..20: note = Description of Artificial Sequence: Synthetic oligonucleotide
  misc_feature 1..20: note = Target: SCN10A; (+) strand; PAM type: NNNNGHTT; PAM sequence: CATTGATT
  source 1..20: mol_type = other DNA
taataggtagctttattttt

SEQ ID NO: 11822 - DNA, 20 bp, synthetic construct
  misc_feature 1..20: note = Description of Artificial Sequence: Synthetic oligonucleotide
  misc_feature 1..20: note = Target: SCN10A; (+) strand; PAM type: NNNNGHTT; PAM sequence: TAAAGATT
  source 1..20: mol_type = other DNA
aagttgtcttggaggaaggt

SEQ ID NO: 11823 - DNA, 20 bp, synthetic construct
  misc_feature 1..20: note = Description of Artificial Sequence: Synthetic oligonucleotide
  misc_feature 1..20: note = Target: SCN10A; (+) strand; PAM type: NNNNGHTT; PAM sequence: TTTGGCTT
  source 1..20: mol_type = other DNA
gttaaagattttagctaact

SEQ ID NO: 11824 - DNA, 20 bp, synthetic construct
  misc_feature 1..20: note = Description of Artificial Sequence: Synthetic oligonucleotide
  misc_feature 1..20: note = Target: SCN10A; (+) strand; PAM type: NNNNGHTT; PAM sequence: CTTTGATT
  source 1..20: mol_type = other DNA
agattttagctaacttttgg

SEQ ID NO: 11825 - DNA, 20 bp, synthetic construct
  misc_feature 1..20: note = Description of Artificial Sequence: Synthetic oligonucleotide
  misc_feature 1..20: note = Target: SCN10A; (+) strand; PAM type: NNNNGHTT; PAM sequence: TGGAGTTT
  source 1..20: mol_type = other DNA
ttatttatttatttttgaga

SEQ ID NO: 11826 - DNA, 20 bp, synthetic construct
  misc_feature 1..20: note = Description of Artificial Sequence: Synthetic oligonucleotide
  misc_feature 1..20: note = Target: SCN10A; (+) strand; PAM type: NNNNGHTT; PAM sequence: CTGGGATT
  source 1..20: mol_type = other DNA
tccctcagcctcccaagtag

SEQ ID NO: 11827 - DNA, 20 bp, synthetic construct
  misc_feature 1..20: note = Description of Artificial Sequence: Synthetic oligonucleotide
  misc_feature 1..20: note = Target: SCN10A; (+) strand; PAM type: NNNNGHTT; PAM sequence: CTGGGATT
  source 1..20: mol_type = other DNA
tgcctgcgcctccaacagtg

SEQ ID NO: 11828 - DNA, 20 bp, synthetic construct
  misc_feature 1..20: note = Description of Artificial Sequence: Synthetic oligonucleotide
  misc_feature 1..20: note = Target: SCN10A; (+) strand; PAM type: NNNNGHTT; PAM sequence: TATTGTTT
  source 1..20: mol_type = other DNA
actgcccctggccttctttt

SEQ ID NO: 11829 - DNA, 20 bp, synthetic construct
  misc_feature 1..20: note = Description of Artificial Sequence: Synthetic oligonucleotide
  misc_feature 1..20: note = Target: SCN10A; (+) strand; PAM type: NNNNGHTT; PAM sequence: CTGGGATT
  source 1..20: mol_type = other DNA
gctcactgcaacctctgtct

SEQ ID NO: 11830 - DNA, 20 bp, synthetic construct
  misc_feature 1..20: note = Description of Artificial Sequence: Synthetic oligonucleotide
  misc_feature 1..20: note = Target: SCN10A; (+) strand; PAM type: NNNNGHTT; PAM sequence: CTGGGATT
  source 1..20: mol_type = other DNA
tgcctcaccctcctgagtag

SEQ ID NO: 11831 - DNA, 20 bp, synthetic construct
  misc_feature 1..20: note = Description of Artificial Sequence: Synthetic oligonucleotide
  misc_feature 1..20: note = Target: SCN10A; (+) strand; PAM type: NNNNGHTT; PAM sequence: TGGGGTTT
  source 1..20: mol_type = other DNA
ttatatatttttagtagaga

SEQ ID NO: 11832 - DNA, 20 bp, synthetic construct
  misc_feature 1..20: note = Description of Artificial Sequence: Synthetic oligonucleotide
  misc_feature 1..20: note = Target: SCN10A; (+) strand; PAM type: NNNNGHTT; PAM sequence: CTGGGATT
  source 1..20: mol_type = other DNA
caccttggcctcccaaaatt

SEQ ID NO: 11833 - DNA, 20 bp, synthetic construct
  misc_feature 1..20: note = Description of Artificial Sequence: Synthetic oligonucleotide
  misc_feature 1..20: note = Target: SCN10A; (+) strand; PAM type: NNNNGHTT; PAM sequence: CTTGGCTT
  source 1..20: mol_type = other DNA
gagccaccccacctggcccc

SEQ ID NO: 11834 - DNA, 20 bp, synthetic construct
  misc_feature 1..20: note = Description of Artificial Sequence: Synthetic oligonucleotide
  misc_feature 1..20: note = Target: SCN10A; (+) strand; PAM type: NNNNGHTT; PAM sequence: CTAGGTTT
  source 1..20: mol_type = other DNA
aaaaatgcatcacgatcaag

SEQ ID NO: 11835 - DNA, 20 bp, synthetic construct
  misc_feature 1..20: note = Description of Artificial Sequence: Synthetic oligonucleotide
  misc_feature 1..20: note = Target: SCN10A; (+) strand; PAM type: NNNNGHTT; PAM sequence: AGTTGATT
  source 1..20: mol_type = other DNA
ggtttgagctgggaatgtaa

SEQ ID NO: 11836 - DNA, 20 bp, synthetic construct
  misc_feature 1..20: note = Description of Artificial Sequence: Synthetic oligonucleotide
  misc_feature 1..20: note = Target: SCN10A; (+) strand; PAM type: NNNNGHTT; PAM sequence: AACAGATT
  source 1..20: mol_type = other DNA
ttaatataattcaccacttt

SEQ ID NO: 11837 - DNA, 20 bp, synthetic construct
  misc_feature 1..20: note = Description of Artificial Sequence: Synthetic oligonucleotide
  misc_feature 1..20: note = Target: SCN10A; (+) strand; PAM type: NNNNGHTT; PAM sequence: ACATGATT
  source 1..20: mol_type = other DNA
aacagattgaaggagaaaat

SEQ ID NO: 11838 - DNA, 20 bp, synthetic construct
  misc_feature 1..20: note = Description of Artificial Sequence: Synthetic oligonucleotide
  misc_feature 1..20: note = Target: SCN10A; (+) strand; PAM type: NNNNGHTT; PAM sequence: TAAAGATT
  source 1..20: mol_type = other DNA
aagagaacttcctgaactga

SEQ ID NO: 11839 - DNA, 20 bp, synthetic construct
  misc_feature 1..20: note = Description of Artificial Sequence: Synthetic oligonucleotide
  misc_feature 1..20: note = Target: SCN10A; (+) strand; PAM type: NNNNGHTT; PAM sequence: AAAGGATT
  source 1..20: mol_type = other DNA
ttagaggtggtgaaatattg

SEQ ID NO: 11840 - DNA, 20 bp, synthetic construct
  misc_feature 1..20: note = Description of Artificial Sequence: Synthetic oligonucleotide
  misc_feature 1..20: note = Target: SCN10A; (+) strand; PAM type: NNNNGHTT; PAM sequence: TAAGGATT
  source 1..20: mol_type = other DNA
gtaaaaagaacctaatggca

SEQ ID NO: 11841 - DNA, 20 bp, synthetic construct
  misc_feature 1..20: note = Description of Artificial Sequence: Synthetic oligonucleotide
  misc_feature 1..20: note = Target: SCN10A; (+) strand; PAM type: NNNNGHTT; PAM sequence: ATGTGATT
  source 1..20: mol_type = other DNA
ctcattgttattttcacatg

SEQ ID NO: 11842 - DNA, 20 bp, synthetic construct
  misc_feature 1..20: note = Description of Artificial Sequence: Synthetic oligonucleotide
  misc_feature 1..20: note = Target: SCN10A; (+) strand; PAM type: NNNNGHTT; PAM sequence: TAAAGATT
  source 1..20: mol_type = other DNA
gatcagaagactgaattatg

SEQ ID NO: 11843 - DNA, 20 bp, synthetic construct
  misc_feature 1..20: note = Description of Artificial Sequence: Synthetic oligonucleotide
  misc_feature 1..20: note = Target: SCN10A; (+) strand; PAM type: NNNNGHTT; PAM sequence: AGCAGTTT
  source 1..20: mol_type = other DNA
tccctaatgggaaaaacaat

SEQ ID NO: 11844 - DNA, 20 bp, synthetic construct
  misc_feature 1..20: note = Description of Artificial Sequence: Synthetic oligonucleotide
  misc_feature 1..20: note = Target: SCN10A; (+) strand; PAM type: NNNNGHTT; PAM sequence: GGTGGATT
  source 1..20: mol_type = other DNA
gatattcttgaagtaaatta

SEQ ID NO: 11845 - DNA, 20 bp, synthetic construct
  misc_feature 1..20: note = Description of Artificial Sequence: Synthetic oligonucleotide
  misc_feature 1..20: note = Target: SCN10A; (+) strand; PAM type: NNNNGHTT; PAM sequence: ACTTGATT
  source 1..20: mol_type = other DNA
tgaagtaaattaggtggatt

SEQ ID NO: 11846 - DNA, 20 bp, synthetic construct
  misc_feature 1..20: note = Description of Artificial Sequence: Synthetic oligonucleotide
  misc_feature 1..20: note = Target: SCN10A; (+) strand; PAM type: NNNNGHTT; PAM sequence: CAAGGCTT
  source 1..20: mol_type = other DNA
gactaacagagcaaatggag

SEQ ID NO: 11847 - DNA, 20 bp, synthetic construct
  misc_feature 1..20: note = Description of Artificial Sequence: Synthetic oligonucleotide
  misc_feature 1..20: note = Target: SCN10A; (+) strand; PAM type: NNNNGHTT; PAM sequence: AGGTGTTT
  source 1..20: mol_type = other DNA
ccttccttcaatcaatcaac

SEQ ID NO: 11848 - DNA, 20 bp, synthetic construct
  misc_feature 1..20: note = Description of Artificial Sequence: Synthetic oligonucleotide
  misc_feature 1..20: note = Target: SCN10A; (+) strand; PAM type: NNNNGHTT; PAM sequence: TCTGGTTT
  source 1..20: mol_type = other DNA
taaaacggtagacaagaaac

SEQ ID NO: 11849 - DNA, 20 bp, synthetic construct
  misc_feature 1..20: note = Description of Artificial Sequence: Synthetic oligonucleotide
  misc_feature 1..20: note = Target: SCN10A; (+) strand; PAM type: NNNNGHTT; PAM sequence: CAGAGTTT
  source 1..20: mol_type = other DNA
ggtgacaagtgcattgaaca

SEQ ID NO: 11850 - DNA, 20 bp, synthetic construct
  misc_feature 1..20: note = Description of Artificial Sequence: Synthetic oligonucleotide
  misc_feature 1..20: note = Target: SCN10A; (+) strand; PAM type: NNNNGHTT; PAM sequence: TCCTGATT
  source 1..20: mol_type = other DNA
gagactggtgaactggcagg

SEQ ID NO: 11851 - DNA, 20 bp, synthetic construct
  misc_feature 1..20: note = Description of Artificial Sequence: Synthetic oligonucleotide
  misc_feature 1..20: note = Target: SCN10A; (+) strand; PAM type: NNNNGHTT; PAM sequence: TCTGGATT
  source 1..20: mol_type = other DNA
ttgtacaccatcatgaggag

SEQ ID NO: 11852 - DNA, 20 bp, synthetic construct
  misc_feature 1..20: note = Description of Artificial Sequence: Synthetic oligonucleotide
  misc_feature 1..20: note = Target: SCN10A; (+) strand; PAM type: NNNNGHTT; PAM sequence: GTGGGATT
  source 1..20: mol_type = other DNA
tgtgtgtgtgtgtgtgtgtt

SEQ ID NO: 11853 - DNA, 20 bp, synthetic construct
  misc_feature 1..20: note = Description of Artificial Sequence: Synthetic oligonucleotide
  misc_feature 1..20: note = Target: SCN10A; (+) strand; PAM type: NNNNGHTT; PAM sequence: GAAAGCTT
  source 1..20: mol_type = other DNA
ttgtgggattgatggtatat

SEQ ID NO: 11854 - DNA, 20 bp, synthetic construct
  misc_feature 1..20: note = Description of Artificial Sequence: Synthetic oligonucleotide
  misc_feature 1..20: note = Target: SCN10A; (+) strand; PAM type: NNNNGHTT; PAM sequence: TCCAGTTT
  source 1..20: mol_type = other DNA
aagctttctgttcaatctgc

SEQ ID NO: 11855 - DNA, 20 bp, synthetic construct
  misc_feature 1..20: note = Description of Artificial Sequence: Synthetic oligonucleotide
  misc_feature 1..20: note = Target: SCN10A; (+) strand; PAM type: NNNNGHTT; PAM sequence: CGGTGATT
  source 1..20: mol_type = other DNA
ccaggaaactgaccagctgg

SEQ ID NO: 11856 - DNA, 20 bp, synthetic construct
  misc_feature 1..20: note = Description of Artificial Sequence: Synthetic oligonucleotide
  misc_feature 1..20: note = Target: SCN10A; (+) strand; PAM type: NNNNGHTT; PAM sequence: TGAGGTTT
  source 1..20: mol_type = other DNA
atttgacttagactctccgg

SEQ ID NO: 11857 - DNA, 20 bp, synthetic construct
  misc_feature 1..20: note = Description of Artificial Sequence: Synthetic oligonucleotide
  misc_feature 1..20: note = Target: SCN10A; (+) strand; PAM type: NNNNGHTT; PAM sequence: AGGTGATT
  source 1..20: mol_type = other DNA
cgcaaagaggcagagggaaa

SEQ ID NO: 11858 - DNA, 20 bp, synthetic construct
  misc_feature 1..20: note = Description of Artificial Sequence: Synthetic oligonucleotide
  misc_feature 1..20: note = Target: SCN10A; (+) strand; PAM type: NNNNGHTT; PAM sequence: TTGAGTTT
  source 1..20: mol_type = other DNA
gaggcagagggaaaaggtga

SEQ ID NO: 11859 - DNA, 20 bp, synthetic construct
  misc_feature 1..20: note = Description of Artificial Sequence: Synthetic oligonucleotide
  misc_feature 1..20: note = Target: SCN10A; (+) strand; PAM type: NNNNGHTT; PAM sequence: GTTTGTTT
  source 1..20: mol_type = other DNA
cagagggaaaaggtgattga

SEQ ID NO: 11860 - DNA, 20 bp, synthetic construct
  misc_feature 1..20: note = Description of Artificial Sequence: Synthetic oligonucleotide
  misc_feature 1..20: note = Target: SCN10A; (+) strand; PAM type: NNNNGHTT; PAM sequence: GGTTGTTT
  source 1..20: mol_type = other DNA
aagtaaacttgcctattttt

SEQ ID NO: 11861 - DNA, 20 bp, synthetic construct
  misc_feature 1..20: note = Description of Artificial Sequence: Synthetic oligonucleotide
  misc_feature 1..20: note = Target: SCN10A; (+) strand; PAM type: NNNNGHTT; PAM sequence: CTAAGCTT
  source 1..20: mol_type = other DNA
agcacatagaccttaaaaca

SEQ ID NO: 11862 - DNA, 20 bp, synthetic construct
  misc_feature 1..20: note = Description of Artificial Sequence: Synthetic oligonucleotide
  misc_feature 1..20: note = Target: SCN10A; (+) strand; PAM type: NNNNGHTT; PAM sequence: TTCTGCTT
  source 1..20: mol_type = other DNA
tagaccttaaaacactaagc

SEQ ID NO: 11863 - DNA, 20 bp, synthetic construct
  misc_feature 1..20: note = Description of Artificial Sequence: Synthetic oligonucleotide
  misc_feature 1..20: note = Target: SCN10A; (+) strand; PAM type: NNNNGHTT; PAM sequence: GTTCGTTT
  source 1..20: mol_type = other DNA
tccccaagtgtagcagaaat

SEQ ID NO: 11864 - DNA, 20 bp, synthetic construct
  misc_feature 1..20: note = Description of Artificial Sequence: Synthetic oligonucleotide
  misc_feature 1..20: note = Target: SCN10A; (+) strand; PAM type: NNNNGHTT; PAM sequence: CGCTGTTT
  source 1..20: mol_type = other DNA
ttttttttgagacggagtcc

SEQ ID NO: 11865 - DNA, 20 bp, synthetic construct
  misc_feature 1..20: note = Description of Artificial Sequence: Synthetic oligonucleotide
  misc_feature 1..20: note = Target: SCN10A; (+) strand; PAM type: NNNNGHTT; PAM sequence: GCCGGATT
  source 1..20: mol_type = other DNA
agtcccgctgtttagcccag

SEQ ID NO: 11866 - DNA, 20 bp, synthetic construct
  misc_feature 1..20: note = Description of Artificial Sequence: Synthetic oligonucleotide
  misc_feature 1..20: note = Target: SCN10A; (+) strand; PAM type: NNNNGHTT; PAM sequence: CGGGGTTT
  source 1..20: mol_type = other DNA
ttttgtatttttagtagaga

SEQ ID NO: 11867 - DNA, 20 bp, synthetic construct
  misc_feature 1..20: note = Description of Artificial Sequence: Synthetic oligonucleotide
  misc_feature 1..20: note = Target: SCN10A; (+) strand; PAM type: NNNNGHTT; PAM sequence: CTGGGATT
  source 1..20: mol_type = other DNA
tgcctcggcctcccaaagtg

SEQ ID NO: 11868 - DNA, 20 bp, synthetic construct
  misc_feature 1..20: note = Description of Artificial Sequence: Synthetic oligonucleotide
  misc_feature 1..20: note = Target: SCN10A; (+) strand; PAM type: NNNNGHTT; PAM sequence: TGACGATT
  source 1..20: mol_type = other DNA
tgtgatatctcctgctctct

SEQ ID NO: 11869 - DNA, 20 bp, synthetic construct
  misc_feature 1..20: note = Description of Artificial Sequence: Synthetic oligonucleotide
  misc_feature 1..20: note = Target: SCN10A; (+) strand; PAM type: NNNNGHTT; PAM sequence: ATTAGCTT
  source 1..20: mol_type = other DNA
ataggtaccttatattgacc

SEQ ID NO: 11870 - DNA, 20 bp, synthetic construct
  misc_feature 1..20: note = Description of Artificial Sequence: Synthetic oligonucleotide
  misc_feature 1..20: note = Target: SCN10A; (+) strand; PAM type: NNNNGHTT; PAM sequence: ATGTGATT
  source 1..20: mol_type = other DNA
agaaatctgtccttctaaaa

SEQ ID NO: 11871 - DNA, 20 bp, synthetic construct
  misc_feature 1..20: note = Description of Artificial Sequence: Synthetic oligonucleotide
  misc_feature 1..20: note = Target: SCN10A; (+) strand; PAM type: NNNNGHTT; PAM sequence: GTAAGATT
  source 1..20: mol_type = other DNA
tgtgatttaattctgacctt

SEQ ID NO: 11872 - DNA, 20 bp, synthetic construct
  misc_feature 1..20: note = Description of Artificial Sequence: Synthetic oligonucleotide
  misc_feature 1..20: note = Target: SCN10A; (+) strand; PAM type: NNNNGHTT; PAM sequence: ATCAGCTT
  source 1..20: mol_type = other DNA
cctgggatggtgacagtacc

SEQ ID NO: 11873 - DNA, 20 bp, synthetic construct
  misc_feature 1..20: note = Description of Artificial Sequence: Synthetic oligonucleotide
  misc_feature 1..20: note = Target: SCN10A; (+) strand; PAM type: NNNNGHTT; PAM sequence: CAGCGTTT
  source 1..20: mol_type = other DNA
cttaggcagatgccatcaac

SEQ ID NO: 11874 - DNA, 20 bp, synthetic construct
  misc_feature 1..20: note = Description of Artificial Sequence: Synthetic oligonucleotide
  misc_feature 1..20: note = Target: SCN10A; (+) strand; PAM type: NNNNGHTT; PAM sequence: ACATGCTT
  source 1..20: mol_type = other DNA
tggcacagctgtgtctcagg

SEQ ID NO: 11875 - DNA, 20 bp, synthetic construct
  misc_feature 1..20: note = Description of Artificial Sequence: Synthetic oligonucleotide
  misc_feature 1..20: note = Target: SCN10A; (+) strand; PAM type: NNNNGHTT; PAM sequence: GAGTGTTT
  source 1..20: mol_type = other DNA
catgctttatttggtcttta

SEQ ID NO: 11876 - DNA, 20 bp, synthetic construct
  misc_feature 1..20: note = Description of Artificial Sequence: Synthetic oligonucleotide
  misc_feature 1..20: note = Target: SCN10A; (+) strand; PAM type: NNNNGHTT; PAM sequence: ACTGGATT
  source 1..20: mol_type = other DNA
tctttagagtgtttttaaaa

SEQ ID NO: 11877 - DNA, 20 bp, synthetic construct
  misc_feature 1..20: note = Description of Artificial Sequence: Synthetic oligonucleotide
  misc_feature 1..20: note = Target: SCN10A; (+) strand; PAM type: NNNNGHTT; PAM sequence: TCTGGATT
  source 1..20: mol_type = other DNA
taaagacatttgcacaaaaa

SEQ ID NO: 11878 - DNA, 20 bp, synthetic construct
  misc_feature 1..20: note = Description of Artificial Sequence: Synthetic oligonucleotide
  misc_feature 1..20: note = Target: SCN10A; (+) strand; PAM type: NNNNGHTT; PAM sequence: TCTCGCTT
  source 1..20: mol_type = other DNA
ctttctttcatctgtctttc

SEQ ID NO: 11879 - DNA, 20 bp, synthetic construct
  misc_feature 1..20: note = Description of Artificial Sequence: Synthetic oligonucleotide
  misc_feature 1..20: note = Target: SCN10A; (+) strand; PAM type: NNNNGHTT; PAM sequence: CGGGGTTT
  source 1..20: mol_type = other DNA
tttttcattttttgtagaga

SEQ ID NO: 11880 - DNA, 20 bp, synthetic construct
  misc_feature 1..20: note = Description of Artificial Sequence: Synthetic oligonucleotide
  misc_feature 1..20: note = Target: SCN10A; (+) strand; PAM type: NNNNGHTT; PAM sequence: CTAGGATT
  source 1..20: mol_type = other DNA
tgcctcggcctcccaaagta

SEQ ID NO: 11881 - DNA, 20 bp, synthetic construct
  misc_feature 1..20: note = Description of Artificial Sequence: Synthetic oligonucleotide
  misc_feature 1..20: note = Target: SCN10A; (+) strand; PAM type: NNNNGHTT; PAM sequence: CATTGATT
  source 1..20: mol_type = other DNA
cacctggcctgagatggtca

SEQ ID NO: 11882 - DNA, 20 bp, synthetic construct
  misc_feature 1..20: note = Description of Artificial Sequence: Synthetic oligonucleotide
  misc_feature 1..20: note = Target: SCN10A; (+) strand; PAM type: NNNNGHTT; PAM sequence: CACTGCTT
  source 1..20: mol_type = other DNA
catccctcccaggagttgtg

SEQ ID NO: 11883 - DNA, 20 bp, synthetic construct
  misc_feature 1..20: note = Description of Artificial Sequence: Synthetic oligonucleotide
  misc_feature 1..20: note = Target: SCN10A; (+) strand; PAM type: NNNNGHTT; PAM sequence: TTGAGTTT
  source 1..20: mol_type = other DNA
atgtcactgcacatgggcat

SEQ ID NO: 11884 - DNA, 20 bp, synthetic construct
  misc_feature 1..20: note = Description of Artificial Sequence: Synthetic oligonucleotide
  misc_feature 1..20: note = Target: SCN10A; (+) strand; PAM type: NNNNGHTT; PAM sequence: GGAAGATT
  source 1..20: mol_type = other DNA
caacacttgtcaggaccttg

SEQ ID NO: 11885 - DNA, 20 bp, synthetic construct
  misc_feature 1..20: note = Description of Artificial Sequence: Synthetic oligonucleotide
  misc_feature 1..20: note = Target: SCN10A; (+) strand; PAM type: NNNNGHTT; PAM sequence: CTTTGTTT
  source 1..20: mol_type = other DNA
gaagattgttggatactccc

SEQ ID NO: 11886 - DNA, 20 bp, synthetic construct
  misc_feature 1..20: note = Description of Artificial Sequence: Synthetic oligonucleotide
  misc_feature 1..20: note = Target: SCN10A; (+) strand; PAM type: NNNNGHTT; PAM sequence: GAGAGATT
  source 1..20: mol_type = other DNA
cagggctcccagttaatact

SEQ ID NO: 11887 - DNA, 20 bp, synthetic construct
  misc_feature 1..20: note = Description of Artificial Sequence: Synthetic oligonucleotide
  misc_feature 1..20: note = Target: SCN10A; (+) strand; PAM type: NNNNGHTT; PAM sequence: CCAAGCTT
  source 1..20: mol_type = other DNA
tcccaagagtcagtgagatg

SEQ ID NO: 11888 - DNA, 20 bp, synthetic construct
  misc_feature 1..20: note = Description of Artificial Sequence: Synthetic oligonucleotide
  misc_feature 1..20: note = Target: SCN10A; (+) strand; PAM type: NNNNGHTT; PAM sequence: ACAGGTTT
  source 1..20: mol_type = other DNA
ccgacactcctgggaatctg

SEQ ID NO: 11889 - DNA, 20 bp, synthetic construct
  misc_feature 1..20: note = Description of Artificial Sequence: Synthetic oligonucleotide
  misc_feature 1..20: note = Target: SCN10A; (+) strand; PAM type: NNNNGHTT; PAM sequence: CTGAGTTT
  source 1..20: mol_type = other DNA
ctgtagagggcgtcctggag

SEQ ID NO: 11890 - DNA, 20 bp, synthetic construct
  misc_feature 1..20: note = Description of Artificial Sequence: Synthetic oligonucleotide
  misc_feature 1..20: note = Target: SCN10A; (+) strand; PAM type: NNNNGHTT; PAM sequence: AGGTGCTT
  source 1..20: mol_type = other DNA
gagactaataggcaggttga

SEQ ID NO: 11891 - DNA, 20 bp, synthetic construct
  misc_feature 1..20: note = Description of Artificial Sequence: Synthetic oligonucleotide
  misc_feature 1..20: note = Target: SCN10A; (+) strand; PAM type: NNNNGHTT; PAM sequence: CTGTGATT
  source 1..20: mol_type = other DNA
aggtgcttgagacattgggg

SEQ ID NO: 11892 - DNA, 20 bp, synthetic construct
  misc_feature 1..20: note = Description of Artificial Sequence: Synthetic oligonucleotide
  misc_feature 1..20: note = Target: SCN10A; (+) strand; PAM type: NNNNGHTT; PAM sequence: CCTGGATT
  source 1..20: mol_type = other DNA
ggggctctggagtcagacaa

SEQ ID NO: 11893 - DNA, 20 bp, synthetic construct
  misc_feature 1..20: note = Description of Artificial Sequence: Synthetic oligonucleotide
  misc_feature 1..20: note = Target: SCN10A; (+) strand; PAM type: NNNNGHTT; PAM sequence: TGTGGCTT
  source 1..20: mol_type = other DNA
ctggatttgagatccaggtc

SEQ ID NO: 11894 - DNA, 20 bp, synthetic construct
  misc_feature 1..20: note = Description of Artificial Sequence: Synthetic oligonucleotide
  misc_feature 1..20: note = Target: SCN10A; (+) strand; PAM type: NNNNGHTT; PAM sequence: ATTCGCTT
  source 1..20: mol_type = other DNA
gagatccaggtctgtggctt

SEQ ID NO: 11895 - DNA, 20 bp, synthetic construct
  misc_feature 1..20: note = Description of Artificial Sequence: Synthetic oligonucleotide
  misc_feature 1..20: note = Target: SCN10A; (+) strand; PAM type: NNNNGHTT; PAM sequence: GCTTGCTT
  source 1..20: mol_type = other DNA
tccaggtctgtggcttattc

SEQ ID NO: 11896 - DNA, 20 bp, synthetic construct
  misc_feature 1..20: note = Description of Artificial Sequence: Synthetic oligonucleotide
  misc_feature 1..20: note = Target: SCN10A; (+) strand; PAM type: NNNNGHTT; PAM sequence: GTGCGTTT
  source 1..20: mol_type = other DNA
tgttgtgagcataaaatgag

SEQ ID NO: 11897 - DNA, 20 bp, synthetic construct
  misc_feature 1..20: note = Description of Artificial Sequence: Synthetic oligonucleotide
  misc_feature 1..20: note = Target: SCN10A; (+) strand; PAM type: NNNNGHTT; PAM sequence: CTGTGATT
  source 1..20: mol_type = other DNA
tgctcagtaagtattagctg

SEQ ID NO: 11898 - DNA, 20 bp, synthetic construct
  misc_feature 1..20: note = Description of Artificial Sequence: Synthetic oligonucleotide
  misc_feature 1..20: note = Target: SCN10A; (+) strand; PAM type: NNNNGHTT; PAM sequence: CAGTGCTT
  source 1..20: mol_type = other DNA
tatttgataagagacgagga

SEQ ID NO: 11899 - DNA, 20 bp, synthetic construct
  misc_feature 1..20: note = Description of Artificial Sequence: Synthetic oligonucleotide
  misc_feature 1..20: note = Target: SCN10A; (+) strand; PAM type: NNNNGHTT; PAM sequence: GGGAGTTT
  source 1..20: mol_type = other DNA
tgtcttccctgaatctgggt

SEQ ID NO: 11900 - DNA, 20 bp, synthetic construct
  misc_feature 1..20: note = Description of Artificial Sequence: Synthetic oligonucleotide
  misc_feature 1..20: note = Target: SCN10A; (+) strand; PAM type: NNNNGHTT; PAM sequence: ACAGGCTT
  source 1..20: mol_type = other DNA
gcggaagctccgcagcacag

SEQ ID NO: 11901 - DNA, 20 bp, synthetic construct
  misc_feature 1..20: note = Description of Artificial Sequence: Synthetic oligonucleotide
  misc_feature 1..20: note = Target: SCN10A; (+) strand; PAM type: NNNNGHTT; PAM sequence: CAATGATT
  source 1..20: mol_type = other DNA
ataatagtatgggtcgaagg

SEQ ID NO: 11902 - DNA, 20 bp, synthetic construct
  misc_feature 1..20: note = Description of Artificial Sequence: Synthetic oligonucleotide
  misc_feature 1..20: note = Target: SCN10A; (+) strand; PAM type: NNNNGHTT; PAM sequence: ACAAGCTT
  source 1..20: mol_type = other DNA
gtaaagacctaggagtggaa

SEQ ID NO: 11903 - DNA, 20 bp, synthetic construct
  misc_feature 1..20: note = Description of Artificial Sequence: Synthetic oligonucleotide
  misc_feature 1..20: note = Target: SCN10A; (+) strand; PAM type: NNNNGHTT; PAM sequence: TTTTGTTT
  source 1..20: mol_type = other DNA
atttacaaaatagaaaatcc

SEQ ID NO: 11904 - DNA, 20 bp, synthetic construct
  misc_feature 1..20: note = Description of Artificial Sequence: Synthetic oligonucleotide
  misc_feature 1..20: note = Target: SCN10A; (+) strand; PAM type: NNNNGHTT; PAM sequence: TGAGGATT
  source 1..20: mol_type = other DNA
ctatgttatctgtgggctcc

SEQ ID NO: 11905 - DNA, 20 bp, synthetic construct
  misc_feature 1..20: note = Description of Artificial Sequence: Synthetic oligonucleotide
  misc_feature 1..20: note = Target: SCN10A; (+) strand; PAM type: NNNNGHTT; PAM sequence: TGCAGTTT
  source 1..20: mol_type = other DNA
ttctcaggggctgtgcatgc

SEQ ID NO: 11906 - DNA, 20 bp, synthetic construct
  misc_feature 1..20: note = Description of Artificial Sequence: Synthetic oligonucleotide
  misc_feature 1..20: note = Target: SCN10A; (+) strand; PAM type: NNNNGHTT; PAM sequence: CCTGGATT
  source 1..20: mol_type = other DNA
gggttgtgggacatcacaga

SEQ ID NO: 11907 - DNA, 20 bp, synthetic construct
  misc_feature 1..20: note = Description of Artificial Sequence: Synthetic oligonucleotide
  misc_feature 1..20: note = Target: SCN10A; (+) strand; PAM type: NNNNGHTT; PAM sequence: CCTAGCTT
  source 1..20: mol_type = other DNA
aaatcccagcccagacattt

SEQ ID NO: 11908 - DNA, 20 bp, synthetic construct
  misc_feature 1..20: note = Description of Artificial Sequence: Synthetic oligonucleotide
  misc_feature 1..20: note = Target: SCN10A; (+) strand; PAM type: NNNNGHTT; PAM sequence: GTAAGCTT
  source 1..20: mol_type = other DNA
ccagacatttcctagcttat

SEQ ID NO: 11909 - DNA, 20 bp, synthetic construct
  misc_feature 1..20: note = Description of Artificial Sequence: Synthetic oligonucleotide
  misc_feature 1..20: note = Target: SCN10A; (+) strand; PAM type: NNNNGHTT; PAM sequence: CAATGATT
  source 1..20: mol_type = other DNA
gtaacagtgactagtaagaa

SEQ ID NO: 11910 - DNA, 20 bp, synthetic construct
  misc_feature 1..20: note = Description of Artificial Sequence: Synthetic oligonucleotide
  misc_feature 1..20: note = Target: SCN10A; (+) strand; PAM type: NNNNGHTT; PAM sequence: CTAAGATT
  source 1..20: mol_type = other DNA
agaacaatgattcattgcct

SEQ ID NO: 11911 - DNA, 20 bp, synthetic construct
  misc_feature 1..20: note = Description of Artificial Sequence: Synthetic oligonucleotide
  misc_feature 1..20: note = Target: SCN10A; (+) strand; PAM type: NNNNGHTT; PAM sequence: AGGTGCTT
  source 1..20: mol_type = other DNA
ggaaagcaacgaccagggtc

SEQ ID NO: 11912 - DNA, 20 bp, synthetic construct
  misc_feature 1..20: note = Description of Artificial Sequence: Synthetic oligonucleotide
  misc_feature 1..20: note = Target: SCN10A; (+) strand; PAM type: NNNNGHTT; PAM sequence: GAGAGTTT
  source 1..20: mol_type = other DNA
tatggagaagaaaacaggct

SEQ ID NO: 11913 - DNA, 20 bp, synthetic construct
  misc_feature 1..20: note = Description of Artificial Sequence: Synthetic oligonucleotide
  misc_feature 1..20: note = Target: SCN10A; (+) strand; PAM type: NNNNGHTT; PAM sequence: GACTGATT
  source 1..20: mol_type = other DNA
gtgactttctcatgccacaa

SEQ ID NO: 11914 - DNA, 20 bp, synthetic construct
  misc_feature 1..20: note = Description of Artificial Sequence: Synthetic oligonucleotide
  misc_feature 1..20: note = Target: SCN10A; (+) strand; PAM type: NNNNGHTT; PAM sequence: TCTTGCTT
  source 1..20: mol_type = other DNA
aggcaccaagcacatgactt

SEQ ID NO: 11915 - DNA, 20 bp, synthetic construct
  misc_feature 1..20: note = Description of Artificial Sequence: Synthetic oligonucleotide
  misc_feature 1..20: note = Target: SCN10A; (+) strand; PAM type: NNNNGHTT; PAM sequence: TCTTGCTT
  source 1..20: mol_type = other DNA
tgggaaaggccttttctctc

SEQ ID NO: 11916 - DNA, 20 bp, synthetic construct
  misc_feature 1..20: note = Description of Artificial Sequence: Synthetic oligonucleotide
  misc_feature 1..20: note = Target: SCN10A; (+) strand; PAM type: NNNNGHTT; PAM sequence: TGCTGATT
  source 1..20: mol_type = other DNA
tgctgccaaaacatgaggca

SEQ ID NO: 11917 - DNA, 20 bp, synthetic construct
  misc_feature 1..20: note = Description of Artificial Sequence: Synthetic oligonucleotide
  misc_feature 1..20: note = Target: SCN10A; (+) strand; PAM type: NNNNGHTT; PAM sequence: CCTGGATT
  source 1..20: mol_type = other DNA
actgctgcccctttcacagc

SEQ ID NO: 11918 - DNA, 20 bp, synthetic construct
  misc_feature 1..20: note = Description of Artificial Sequence: Synthetic oligonucleotide
  misc_feature 1..20: note = Target: SCN10A; (+) strand; PAM type: NNNNGHTT; PAM sequence: AGTGGTTT
  source 1..20: mol_type = other DNA
ccctggattatggcggaggg

SEQ ID NO: 11919 - DNA, 20 bp, synthetic construct
  misc_feature 1..20: note = Description of Artificial Sequence: Synthetic oligonucleotide
  misc_feature 1..20: note = Target: SCN10A; (+) strand; PAM type: NNNNGHTT; PAM sequence: TCCAGCTT
  source 1..20: mol_type = other DNA
ggtgaatccagtaggtcacc

SEQ ID NO: 11920 - DNA, 20 bp, synthetic construct
  misc_feature 1..20: note = Description of Artificial Sequence: Synthetic oligonucleotide
  misc_feature 1..20: note = Target: SCN10A; (+) strand; PAM type: NNNNGHTT; PAM sequence: TCTAGCTT
  source 1..20: mol_type = other DNA
aaggcaggatgctgaccctt

SEQ ID NO: 11921 - DNA, 20 bp, synthetic construct
  misc_feature 1..20: note = Description of Artificial Sequence: Synthetic oligonucleotide
  misc_feature 1..20: note = Target: SCN10A; (+) strand; PAM type: NNNNGHTT; PAM sequence: GTGTGTTT
  source 1..20: mol_type = other DNA
cttctgcctatcatgtgtgc

SEQ ID NO: 11922 - DNA, 20 bp, synthetic construct
  misc_feature 1..20: note = Description of Artificial Sequence: Synthetic oligonucleotide
  misc_feature 1..20: note = Target: SCN10A; (+) strand; PAM type: NNNNGHTT; PAM sequence: GGTGGCTT
  source 1..20: mol_type = other DNA
cacacacgcaagtcttgtga

SEQ ID NO: 11923 - DNA, 20 bp, synthetic construct
  misc_feature 1..20: note = Description of Artificial Sequence: Synthetic oligonucleotide
  misc_feature 1..20: note = Target: SCN10A; (+) strand; PAM type: NNNNGHTT; PAM sequence: GCGGGCTT
  source 1..20: mol_type = other DNA
taattcaggggttaagaaaa

SEQ ID NO: 11924 - DNA, 20 bp, synthetic construct
  misc_feature 1..20: note = Description of Artificial Sequence: Synthetic oligonucleotide
  misc_feature 1..20: note = Target: SCN10A; (+) strand; PAM type: NNNNGHTT; PAM sequence: GGAAGATT
  source 1..20: mol_type = other DNA
aactcaactctatgatcttg

SEQ ID NO: 11925 - DNA, 20 bp, synthetic construct
  misc_feature 1..20: note = Description of Artificial Sequence: Synthetic oligonucleotide
  misc_feature 1..20: note = Target: SCN10A; (+) strand; PAM type: NNNNGHTT; PAM sequence: TATGGATT
  source 1..20: mol_type = other DNA
cagtatatagtgaaatccag

SEQ ID NO: 11926 - DNA, 20 bp, synthetic construct
  misc_feature 1..20: note = Description of Artificial Sequence: Synthetic oligonucleotide
  misc_feature 1..20: note = Target: SCN10A; (+) strand; PAM type: NNNNGHTT; PAM sequence: TGATGCTT
  source 1..20: mol_type = other DNA
aaagaaaagttccgacttcc

SEQ ID NO: 11927 - DNA, 20 bp, synthetic construct
  misc_feature 1..20: note = Description of Artificial Sequence: Synthetic oligonucleotide
  misc_feature 1..20: note = Target: SCN10A; (+) strand; PAM type: NNNNGHTT; PAM sequence: CCTTGTTT
  source 1..20: mol_type = other DNA
tgcttttgttacaacagcaa

SEQ ID NO: 11928 - DNA, 20 bp, synthetic construct
  misc_feature 1..20: note = Description of Artificial Sequence: Synthetic oligonucleotide
  misc_feature 1..20: note = Target: SCN10A; (+) strand; PAM type: NNNNGHTT; PAM sequence: CCATGTTT
  source 1..20: mol_type = other DNA
ttacaacagcaaccttgttt

SEQ ID NO: 11929 - DNA, 20 bp, synthetic construct
  misc_feature 1..20: note = Description of Artificial Sequence: Synthetic oligonucleotide
  misc_feature 1..20: note = Target: SCN10A; (+) strand; PAM type: NNNNGHTT; PAM sequence: CAAAGATT
  source 1..20: mol_type = other DNA
tggaaggaaacagacaagtc

SEQ ID NO: 11930 - DNA, 20 bp, synthetic construct
  misc_feature 1..20: note = Description of Artificial Sequence: Synthetic oligonucleotide
  misc_feature 1..20: note = Target: SCN10A; (+) strand; PAM type: NNNNGHTT; PAM sequence: CTATGTTT
  source 1..20: mol_type = other DNA
agaaaattcaagtggttgtc

SEQ ID NO: 11931 - DNA, 20 bp, synthetic construct
  misc_feature 1..20: note = Description of Artificial Sequence: Synthetic oligonucleotide
  misc_feature 1..20: note = Target: SCN10A; (+) strand; PAM type: NNNNGHTT; PAM sequence: CTGTGCTT
  source 1..20: mol_type = other DNA
ggctctcctggttcactttc

SEQ ID NO: 11932 - DNA, 20 bp, synthetic construct
  misc_feature 1..20: note = Description of Artificial Sequence: Synthetic oligonucleotide
  misc_feature 1..20: note = Target: SCN10A; (+) strand; PAM type: NNNNGHTT; PAM sequence: CATGGCTT
  source 1..20: mol_type = other DNA
acgatgttgcctatctggag

SEQ ID NO: 11933 - DNA, 20 bp, synthetic construct
  misc_feature 1..20: note = Description of Artificial Sequence: Synthetic oligonucleotide
  misc_feature 1..20: note = Target: SCN10A; (+) strand; PAM type: NNNNGHTT; PAM sequence: TTGAGCTT
  source 1..20: mol_type = other DNA
caagcccaaagagaattgtc

SEQ ID NO: 11934 - DNA, 20 bp, synthetic construct
  misc_feature 1..20: note = Description of Artificial Sequence: Synthetic oligonucleotide
  misc_feature 1..20: note = Target: SCN10A; (+) strand; PAM type: NNNNGHTT; PAM sequence: CCCAGCTT
  source 1..20: mol_type = other DNA
tgtccttacttctcaatttg

SEQ ID NO: 11935 - DNA, 20 bp, synthetic construct
  misc_feature 1..20: note = Description of Artificial Sequence: Synthetic oligonucleotide
  misc_feature 1..20: note = Target: SCN10A; (+) strand; PAM type: NNNNGHTT; PAM sequence: CTTAGATT
  source 1..20: mol_type = other DNA
ttacttctcaatttgcccag

SEQ ID NO: 11936 - DNA, 20 bp, synthetic construct
  misc_feature 1..20: note = Description of Artificial Sequence: Synthetic oligonucleotide
  misc_feature 1..20: note = Target: SCN10A; (+) strand; PAM type: NNNNGHTT; PAM sequence: CTATGCTT
  source 1..20: mol_type = other DNA
tggctggaaaaaatacacaa

SEQ ID NO: 11937 - DNA, 20 bp, synthetic construct
  misc_feature 1..20: note = Description of Artificial Sequence: Synthetic oligonucleotide
  misc_feature 1..20: note = Target: SCN10A; (+) strand; PAM type: NNNNGHTT; PAM sequence: CTGTGTTT
  source 1..20: mol_type = other DNA
tgccctgcccagaaatctgg

SEQ ID NO: 11938 - DNA, 20 bp, synthetic construct
  misc_feature 1..20: note = Description of Artificial Sequence: Synthetic oligonucleotide
  misc_feature 1..20: note = Target: SCN10A; (+) strand; PAM type: NNNNGHTT; PAM sequence: GACTGTTT
  source 1..20: mol_type = other DNA
attccttcattcttccagat

SEQ ID NO: 11939 - DNA, 20 bp, synthetic construct
  misc_feature 1..20: note = Description of Artificial Sequence: Synthetic oligonucleotide
  misc_feature 1..20: note = Target: SCN10A; (+) strand; PAM type: NNNNGHTT; PAM sequence: ACATGCTT
  source 1..20: mol_type = other DNA
ccattgccatgagcaggtaa

SEQ ID NO: 11940 - DNA, 20 bp, synthetic construct
  misc_feature 1..20: note = Description of Artificial Sequence: Synthetic oligonucleotide
  misc_feature 1..20: note = Target: SCN10A; (+) strand; PAM type: NNNNGHTT; PAM sequence: CGCGGCTT
  source 1..20: mol_type = other DNA
taaacatgctttaattatct

SEQ ID NO: 11941 - DNA, 20 bp, synthetic construct
  misc_feature 1..20: note = Description of Artificial Sequence: Synthetic oligonucleotide
  misc_feature 1..20: note = Target: SCN10A; (+) strand; PAM type: NNNNGHTT; PAM sequence: TACTGCTT
  source 1..20: mol_type = other DNA
gaccccatgctctctttcat

SEQ ID NO: 11942 - DNA, 20 bp, synthetic construct
  misc_feature 1..20: note = Description of Artificial Sequence: Synthetic oligonucleotide
  misc_feature 1..20: note = Target: SCN10A; (+) strand; PAM type: NNNNGHTT; PAM sequence: AAGAGTTT
  source 1..20: mol_type = other DNA
ttgacagtaaaattccttgc

SEQ ID NO: 11943 - DNA, 20 bp, synthetic construct
  misc_feature 1..20: note = Description of Artificial Sequence: Synthetic oligonucleotide
  misc_feature 1..20: note = Target: SCN10A; (+) strand; PAM type: NNNNGHTT; PAM sequence: AACTGCTT
  source 1..20: mol_type = other DNA
agcccctggaatctgacttt

SEQ ID NO: 11944 - DNA, 20 bp, synthetic construct
  misc_feature 1..20: note = Description of Artificial Sequence: Synthetic oligonucleotide
  misc_feature 1..20: note = Target: SCN10A; (+) strand; PAM type: NNNNGHTT; PAM sequence: AATTGATT
  source 1..20: mol_type = other DNA
aactgcttccaaattcaaat

SEQ ID NO: 11945 - DNA, 20 bp, synthetic construct
  misc_feature 1..20: note = Description of Artificial Sequence: Synthetic oligonucleotide
  misc_feature 1..20: note = Target: SCN10A; (+) strand; PAM type: NNNNGHTT; PAM sequence: TCTTGCTT
  source 1..20: mol_type = other DNA
gctctggggactgcatcatc

SEQ ID NO: 11946 - DNA, 20 bp, synthetic construct
  misc_feature 1..20: note = Description of Artificial Sequence: Synthetic oligonucleotide
  misc_feature 1..20: note = Target: SCN10A; (+) strand; PAM type: NNNNGHTT; PAM sequence: TTCTGTTT
  source 1..20: mol_type = other DNA
tttctccacttcttttcact

SEQ ID NO: 11947 - DNA, 20 bp, synthetic construct
  misc_feature 1..20: note = Description of Artificial Sequence: Synthetic oligonucleotide
  misc_feature 1..20: note = Target: SCN10A; (+) strand; PAM type: NNNNGHTT; PAM sequence: TCCTGCTT
  source 1..20: mol_type = other DNA
tttttgtctcccttttcctt

SEQ ID NO: 11948 - DNA, 20 bp, synthetic construct
  misc_feature 1..20: note = Description of Artificial Sequence: Synthetic oligonucleotide
  misc_feature 1..20: note = Target: SCN10A; (+) strand; PAM type: NNNNGHTT; PAM sequence: CTTAGCTT
  source 1..20: mol_type = other DNA
aataactcaagcattctcac

SEQ ID NO: 11949 - DNA, 20 bp, synthetic construct
  misc_feature 1..20: note = Description of Artificial Sequence: Synthetic oligonucleotide
  misc_feature 1..20: note = Target: SCN10A; (+) strand; PAM type: NNNNGHTT; PAM sequence: CTGTGTTT
  source 1..20: mol_type = other DNA
gcattctcaccttagcttct

SEQ ID NO: 11950 - DNA, 20 bp, synthetic construct
  misc_feature 1..20: note = Description of Artificial Sequence: Synthetic oligonucleotide
  misc_feature 1..20: note = Target: SCN10A; (+) strand; PAM type: NNNNGHTT; PAM sequence: CTAGGCTT
  source 1..20: mol_type = other DNA
ttctgatcccttcctgaaca

SEQ ID NO: 11951 - DNA, 20 bp, synthetic construct
  misc_feature 1..20: note = Description of Artificial Sequence: Synthetic oligonucleotide
  misc_feature 1..20: note = Target: SCN10A; (+) strand; PAM type: NNNNGHTT; PAM sequence: CTTAGCTT
  source 1..20: mol_type = other DNA
acctcgatggagggcaattt

SEQ ID NO: 11952 - DNA, 20 bp, synthetic construct
  misc_feature 1..20: note = Description of Artificial Sequence: Synthetic oligonucleotide
  misc_feature 1..20: note = Target: SCN10A; (+) strand; PAM type: NNNNGHTT; PAM sequence: TTAGGTTT
  source 1..20: mol_type = other DNA
tggagggcaatttcttagct

SEQ ID NO: 11953 - DNA, 20 bp, synthetic construct
  misc_feature 1..20: note = Description of Artificial Sequence: Synthetic oligonucleotide
  misc_feature 1..20: note = Target: SCN10A; (+) strand; PAM type: NNNNGHTT; PAM sequence: CATTGTTT
  source 1..20: mol_type = other DNA
gggcaaagaaagatgatgtc

SEQ ID NO: 11954 - DNA, 20 bp, synthetic construct
  misc_feature 1..20: note = Description of Artificial Sequence: Synthetic oligonucleotide
  misc_feature 1..20: note = Target: SCN10A; (+) strand; PAM type: NNNNGHTT; PAM sequence: GGCAGATT
  source 1..20: mol_type = other DNA
tacattgtgaaaaagaatga

SEQ ID NO: 11955 - DNA, 20 bp, synthetic construct
  misc_feature 1..20: note = Description of Artificial Sequence: Synthetic oligonucleotide
  misc_feature 1..20: note = Target: SCN10A; (+) strand; PAM type: NNNNGHTT; PAM sequence: ATGTGCTT
  source 1..20: mol_type = other DNA
tagtgtgtgtatgtgcatgc

SEQ ID NO: 11956 - DNA, 20 bp, synthetic construct
  misc_feature 1..20: note = Description of Artificial Sequence: Synthetic oligonucleotide
  misc_feature 1..20: note = Target: SCN10A; (+) strand; PAM type: NNNNGHTT; PAM sequence: CATTGCTT
  source 1..20: mol_type = other DNA
gtgcttatatatgcatagaa

SEQ ID NO: 11957 - DNA, 20 bp, synthetic construct
  misc_feature 1..20: note = Description of Artificial Sequence: Synthetic oligonucleotide
  misc_feature 1..20: note = Target: SCN10A; (+) strand; PAM type: NNNNGHTT; PAM sequence: CAGTGTTT
  source 1..20: mol_type = other DNA
tgtcattgcatacacacttg

SEQ ID NO: 11958 - DNA, 20 bp, synthetic construct
  misc_feature 1..20: note = Description of Artificial Sequence: Synthetic oligonucleotide
  misc_feature 1..20: note = Target: SCN10A; (+) strand; PAM type: NNNNGHTT; PAM sequence: TAGGGTTT
  source 1..20: mol_type = other DNA
gcatacacacttgcagtgtt

SEQ ID NO: 11959 - DNA, 20 bp, synthetic construct
  misc_feature 1..20: note = Description of Artificial Sequence: Synthetic oligonucleotide
  misc_feature 1..20: note = Target: SCN10A; (+) strand; PAM type: NNNNGHTT; PAM sequence: ATCAGTTT
  source 1..20: mol_type = other DNA
ttactatatgcacttgaaaa

SEQ ID NO: 11960 - DNA, 20 bp, synthetic construct
  misc_feature 1..20: note = Description of Artificial Sequence: Synthetic oligonucleotide
  misc_feature 1..20: note = Target: SCN10A; (+) strand; PAM type: NNNNGHTT; PAM sequence: CAGTGTTT
  source 1..20: mol_type = other DNA
gtgcccccaaattttgctaa

SEQ ID NO: 11961 - DNA, 20 bp, synthetic construct
  misc_feature 1..20: note = Description of Artificial Sequence: Synthetic oligonucleotide
  misc_feature 1..20: note = Target: SCN10A; (+) strand; PAM type: NNNNGHTT; PAM sequence: TCAAGATT
  source 1..20: mol_type = other DNA
atttaaaaatgtgtatgtag

SEQ ID NO: 11962 - DNA, 20 bp, synthetic construct
  misc_feature 1..20: note = Description of Artificial Sequence: Synthetic oligonucleotide
  misc_feature 1..20: note = Target: SCN10A; (+) strand; PAM type: NNNNGHTT; PAM sequence: ATTTGTTT
  source 1..20: mol_type = other DNA
gatttatcagtagtattttt

SEQ ID NO: 11963 - DNA, 20 bp, synthetic construct
  misc_feature 1..20: note = Description of Artificial Sequence: Synthetic oligonucleotide
  misc_feature 1..20: note = Target: SCN10A; (+) strand; PAM type: NNNNGHTT; PAM sequence: TTAAGTTT
  source 1..20: mol_type = other DNA
ttctttttttaaattatact

SEQ ID NO: 11964 - DNA, 20 bp, synthetic construct
  misc_feature 1..20: note = Description of Artificial Sequence: Synthetic oligonucleotide
  misc_feature 1..20: note = Target: SCN10A; (+) strand; PAM type: NNNNGHTT; PAM sequence: TGAAGCTT
  source 1..20: mol_type = other DNA
atgcatacatgccttacata

SEQ ID NO: 11965 - DNA, 20 bp, synthetic construct
  misc_feature 1..20: note = Description of Artificial Sequence: Synthetic oligonucleotide
  misc_feature 1..20: note = Target: SCN10A; (+) strand; PAM type: NNNNGHTT; PAM sequence: CAAGGCTT
  source 1..20: mol_type = other DNA
atatgaagcttttctcacta

SEQ ID NO: 11966 - DNA, 20 bp, synthetic construct
  misc_feature 1..20: note = Description of Artificial Sequence: Synthetic oligonucleotide
  misc_feature 1..20: note = Target: SCN10A; (+) strand; PAM type: NNNNGHTT; PAM sequence: CCATGTTT
  source 1..20: mol_type = other DNA
aggcttggaaaataccttct

SEQ ID NO: 11967 - DNA, 20 bp, synthetic construct
  misc_feature 1..20: note = Description of Artificial Sequence: Synthetic oligonucleotide
  misc_feature 1..20: note = Target: SCN10A; (+) strand; PAM type: NNNNGHTT; PAM sequence: TGTAGTTT
  source 1..20: mol_type = other DNA
ccatgtttttttctttcttt

SEQ ID NO: 11968 - DNA, 20 bp, synthetic construct
  misc_feature 1..20: note = Description of Artificial Sequence: Synthetic oligonucleotide
  misc_feature 1..20: note = Target: SCN10A; (+) strand; PAM type: NNNNGHTT; PAM sequence: TGTGGTTT
  source 1..20: mol_type = other DNA
ggtaaagagtaagatattga

SEQ ID NO: 11969 - DNA, 20 bp, synthetic construct
  misc_feature 1..20: note = Description of Artificial Sequence: Synthetic oligonucleotide
  misc_feature 1..20: note = Target: SCN10A; (+) strand; PAM type: NNNNGHTT; PAM sequence: CTCTGATT
  source 1..20: mol_type = other DNA
tgtggtttattttttcctgt

SEQ ID NO: 11970 - DNA, 20 bp, synthetic construct
  misc_feature 1..20: note = Description of Artificial Sequence: Synthetic oligonucleotide
  misc_feature 1..20: note = Target: SCN10A; (+) strand; PAM type: NNNNGHTT; PAM sequence: CCAAGATT
  source 1..20: mol_type = other DNA
ttgaataatttttcattttc

SEQ ID NO: 11971 - DNA, 20 bp, synthetic construct
  misc_feature 1..20: note = Description of Artificial Sequence: Synthetic oligonucleotide
  misc_feature 1..20: note = Target: SCN10A; (+) strand; PAM type: NNNNGHTT; PAM sequence: ATGTGTTT
  source 1..20: mol_type = other DNA
tgttattaccatttatgttc

SEQ ID NO: 11972 - DNA, 20 bp, synthetic construct
  misc_feature 1..20: note = Description of Artificial Sequence: Synthetic oligonucleotide
  misc_feature 1..20: note = Target: SCN10A; (+) strand; PAM type: NNNNGHTT; PAM sequence: TGCTGTTT
  source 1..20: mol_type = other DNA
actatttattttcactgtca

SEQ ID NO: 11973 - DNA, 20 bp, synthetic construct
  misc_feature 1..20: note = Description of Artificial Sequence: Synthetic oligonucleotide
  misc_feature 1..20: note = Target: SCN10A; (+) strand; PAM type: NNNNGHTT; PAM sequence: ACTGGATT
  source 1..20: mol_type = other DNA
tcatgctgttttaatcactg

SEQ ID NO: 11974 - DNA, 20 bp, synthetic construct
  misc_feature 1..20: note = Description of Artificial Sequence: Synthetic oligonucleotide
  misc_feature 1..20: note = Target: SCN10A; (+) strand; PAM type: NNNNGHTT; PAM sequence: CCCTGTTT
  source 1..20: mol_type = other DNA
ctgggaccaaaatcaacaat

SEQ ID NO: 11975 - DNA, 20 bp, synthetic construct
  misc_feature 1..20: note = Description of Artificial Sequence: Synthetic oligonucleotide
  misc_feature 1..20: note = Target: SCN10A; (+) strand; PAM type: NNNNGHTT; PAM sequence: ACTTGATT
  source 1..20: mol_type = other DNA
aacagccttgacattgttga

SEQ ID NO: 11976 - DNA, 20 bp, synthetic construct
  misc_feature 1..20: note = Description of Artificial Sequence: Synthetic oligonucleotide
  misc_feature 1..20: note = Target: SCN10A; (+) strand; PAM type: NNNNGHTT; PAM sequence: GATTGATT
  source 1..20: mol_type = other DNA
gccttgacattgttgaactt

SEQ ID NO: 11977 - DNA, 20 bp, synthetic construct
  misc_feature 1..20: note = Description of Artificial Sequence: Synthetic oligonucleotide
  misc_feature 1..20: note = Target: SCN10A; (+) strand; PAM type: NNNNGHTT; PAM sequence: GCCAGCTT
  source 1..20: mol_type = other DNA
gagactaaaagtatctactt

SEQ ID NO: 11978 - DNA, 20 bp, synthetic construct
  misc_feature 1..20: note = Description of Artificial Sequence: Synthetic oligonucleotide
  misc_feature 1..20: note = Target: SCN10A; (+) strand; PAM type: NNNNGHTT; PAM sequence: TTACGCTT
  source 1..20: mol_type = other DNA
actttcctcccttcatcctg

SEQ ID NO: 11979 - DNA, 20 bp, synthetic construct
  misc_feature 1..20: note = Description of Artificial Sequence: Synthetic oligonucleotide
  misc_feature 1..20: note = Target: SCN10A; (+) strand; PAM type: NNNNGHTT; PAM sequence: TTTTGCTT
  source 1..20: mol_type = other DNA
cttttactccattaatcctc

SEQ ID NO: 11980 - DNA, 20 bp, synthetic construct
  misc_feature 1..20: note = Description of Artificial Sequence: Synthetic oligonucleotide
  misc_feature 1..20: note = Target: SCN10A; (+) strand; PAM type: NNNNGHTT; PAM sequence: TCATGTTT
  source 1..20: mol_type = other DNA
actaaagcccctggaccttt

SEQ ID NO: 11981 - DNA, 20 bp, synthetic construct
  misc_feature 1..20: note = Description of Artificial Sequence: Synthetic oligonucleotide
  misc_feature 1..20: note = Target: SCN10A; (+) strand; PAM type: NNNNGHTT; PAM sequence: TTCTGCTT
  source 1..20: mol_type = other DNA
tcctctgctgggtccatctc

SEQ ID NO: 11982 - DNA, 20 bp, synthetic construct
  misc_feature 1..20: note = Description of Artificial Sequence: Synthetic oligonucleotide
  misc_feature 1..20: note = Target: SCN10A; (+) strand; PAM type: NNNNGHTT; PAM sequence: TTTAGTTT
  source 1..20: mol_type = other DNA
ttctgcttaactattaaaca

SEQ ID NO: 11983 - DNA, 20 bp, synthetic construct
  misc_feature 1..20: note = Description of Artificial Sequence: Synthetic oligonucleotide
  misc_feature 1..20: note = Target: SCN10A; (+) strand; PAM type: NNNNGHTT; PAM sequence: AACTGCTT
  source 1..20: mol_type = other DNA
aaaattaccacttacattca

SEQ ID NO: 11984 - DNA, 20 bp, synthetic construct
  misc_feature 1..20: note = Description of Artificial Sequence: Synthetic oligonucleotide
  misc_feature 1..20: note = Target: SCN10A; (+) strand; PAM type: NNNNGHTT; PAM sequence: CTTGGCTT
  source 1..20: mol_type = other DNA
tcaagcactgccatcttgta

SEQ ID NO: 11985 - DNA, 20 bp, synthetic construct
  misc_feature 1..20: note = Description of Artificial Sequence: Synthetic oligonucleotide
  misc_feature 1..20: note = Target: SCN10A; (+) strand; PAM type: NNNNGHTT; PAM sequence: ACTGGTTT
  source 1..20: mol_type = other DNA
ttgtacttggcttcctccta

SEQ ID NO: 11986 - DNA, 20 bp, synthetic construct
  misc_feature 1..20: note = Description of Artificial Sequence: Synthetic oligonucleotide
  misc_feature 1..20: note = Target: SCN10A; (+) strand; PAM type: NNNNGHTT; PAM sequence: AGGAGTTT
  source 1..20: mol_type = other DNA
ccatatccttaatgcagtct

SEQ ID NO: 11987 - DNA, 20 bp, synthetic construct
  misc_feature 1..20: note = Description of Artificial Sequence: Synthetic oligonucleotide
  misc_feature 1..20: note = Target: SCN10A; (+) strand; PAM type: NNNNGHTT; PAM sequence: TTAGGCTT
  source 1..20: mol_type = other DNA
ttctctaggttacagctaca

SEQ ID NO: 11988 - DNA, 20 bp, synthetic construct
  misc_feature 1..20: note = Description of Artificial Sequence: Synthetic oligonucleotide
  misc_feature 1..20: note = Target: SCN10A; (+) strand; PAM type: NNNNGHTT; PAM sequence: TTCTGCTT
  source 1..20: mol_type = other DNA
ccttcaaatgttattctctc

SEQ ID NO: 11989 - DNA, 20 bp, synthetic construct
  misc_feature 1..20: note = Description of Artificial Sequence: Synthetic oligonucleotide
  misc_feature 1..20: note = Target: SCN10A; (+) strand; PAM type: NNNNGHTT; PAM sequence: CCCAGCTT
  source 1..20: mol_type = other DNA
cagtaagctcactgctgtga

SEQ ID NO: 11990 - DNA, 20 bp, synthetic construct
  misc_feature 1..20: note = Description of Artificial Sequence: Synthetic oligonucleotide
  misc_feature 1..20: note = Target: SCN10A; (+) strand; PAM type: NNNNGHTT; PAM sequence: TCTGGCTT
  source 1..20: mol_type = other DNA
tgtgacccagcttctggaat

SEQ ID NO: 11991 - DNA, 20 bp, synthetic construct
  misc_feature 1..20: note = Description of Artificial Sequence: Synthetic oligonucleotide
  misc_feature 1..20: note = Target: SCN10A; (+) strand; PAM type: NNNNGHTT; PAM sequence: CTCAGCTT
  source 1..20: mol_type = other DNA
ggcttggacaacagtgaaat

SEQ ID NO: 11992 - DNA, 20 bp, synthetic construct
  misc_feature 1..20: note = Description of Artificial Sequence: Synthetic oligonucleotide
  misc_feature 1..20: note = Target: SCN10A; (+) strand; PAM type: NNNNGHTT; PAM sequence: ACATGCTT
  source 1..20: mol_type = other DNA
atgccaagcatagaaggttc

SEQ ID NO: 11993 - DNA, 20 bp, synthetic construct
  misc_feature 1..20: note = Description of Artificial Sequence: Synthetic oligonucleotide
  misc_feature 1..20: note = Target: SCN10A; (+) strand; PAM type: NNNNGHTT; PAM sequence: GTTGGTTT
  source 1..20: mol_type = other DNA
cagtgaattgtcaaactcct

SEQ ID NO: 11994 - DNA, 20 bp, synthetic construct
  misc_feature 1..20: note = Description of Artificial Sequence: Synthetic oligonucleotide
  misc_feature 1..20: note = Target: SCN10A; (+) strand; PAM type: NNNNGHTT; PAM sequence: TAAGGTTT
  source 1..20: mol_type = other DNA
ttgacctcttttatttaacc

SEQ ID NO: 11995 - DNA, 20 bp, synthetic construct
  misc_feature 1..20: note = Description of Artificial Sequence: Synthetic oligonucleotide
  misc_feature 1..20: note = Target: SCN10A; (+) strand; PAM type: NNNNGHTT; PAM sequence: CTCAGATT
  source 1..20: mol_type = other DNA
ttaacctaaggtttcctctc

SEQ ID NO: 11996 - DNA, 20 bp, synthetic construct
  misc_feature 1..20: note = Description of Artificial Sequence: Synthetic oligonucleotide
  misc_feature 1..20: note = Target: SCN10A; (+) strand; PAM type: NNNNGHTT; PAM sequence: CATTGTTT
  source 1..20: mol_type = other DNA
tcagattttctttaaaacat

SEQ ID NO: 11997 - DNA, 20 bp, synthetic construct
  misc_feature 1..20: note = Description of Artificial Sequence: Synthetic oligonucleotide
  misc_feature 1..20: note = Target: SCN10A; (+) strand; PAM type: NNNNGHTT; PAM sequence: CATAGATT
  source 1..20: mol_type = other DNA
aacagacacatctccgccct

SEQ ID NO: 11998 - DNA, 20 bp, synthetic construct
  misc_feature 1..20: note = Description of Artificial Sequence: Synthetic oligonucleotide
  misc_feature 1..20: note = Target: SCN10A; (+) strand; PAM type: NNNNGHTT; PAM sequence: TTTTGCTT
  source 1..20: mol_type = other DNA
gccagtcgtggttctaagca

SEQ ID NO: 11999 - DNA, 20 bp, synthetic construct
  misc_feature 1..20: note = Description of Artificial Sequence: Synthetic oligonucleotide
  misc_feature 1..20: note = Target: SCN10A; (+) strand; PAM type: NNNNGHTT; PAM sequence: ATGTGTTT
  source 1..20: mol_type = other DNA
tttgtcttacctacactggg

SEQ ID NO: 12000 - DNA, 20 bp, synthetic construct
  misc_feature 1..20: note = Description of Artificial Sequence: Synthetic oligonucleotide
  misc_feature 1..20: note = Target: SCN10A; (+) strand; PAM type: NNNNGHTT; PAM sequence: TTTTGCTT
  source 1..20: mol_type = other DNA
ggatgtgtttgggacatgca

SEQ ID NO: 12001 - DNA, 20 bp, synthetic construct
  misc_feature 1..20: note = Description of Artificial Sequence: Synthetic oligonucleotide
  misc_feature 1..20: note = Target: SCN10A; (+) strand; PAM type: NNNNGHTT; PAM sequence: CTCAGCTT
  source 1..20: mol_type = other DNA
ttgtgtctgcgaactttctc

SEQ ID NO: 12002 - DNA, 20 bp, synthetic construct
  misc_feature 1..20: note = Description of Artificial Sequence: Synthetic oligonucleotide
  misc_feature 1..20: note = Target: SCN10A; (+) strand; PAM type: NNNNGHTT; PAM sequence: AGCTGATT
  source 1..20: mol_type = other DNA
ttctcctcagcttcttacat

SEQ ID NO: 12003 - DNA, 20 bp, synthetic construct
  misc_feature 1..20: note = Description of Artificial Sequence: Synthetic oligonucleotide
  misc_feature 1..20: note = Target: SCN10A; (+) strand; PAM type: NNNNGHTT; PAM sequence: TGTAGATT
  source 1..20: mol_type = other DNA
tgtccccttccctgctagga

SEQ ID NO: 12004 - DNA, 20 bp, synthetic construct
  misc_feature 1..20: note = Description of Artificial Sequence: Synthetic oligonucleotide
  misc_feature 1..20: note = Target: SCN10A; (+) strand; PAM type: NNNNGHTT; PAM sequence: GCAAGCTT
  source 1..20: mol_type = other DNA
aggatgtagattccatgagc

SEQ ID NO: 12005 - DNA, 20 bp, synthetic construct
  misc_feature 1..20: note = Description of Artificial Sequence: Synthetic oligonucleotide
  misc_feature 1..20: note = Target: SCN10A; (+) strand; PAM type: NNNNGHTT; PAM sequence: AAATGCTT
  source 1..20: mol_type = other DNA
acacacaacaggggctcaac

SEQ ID NO: 12006 - DNA, 20 bp, synthetic construct
  misc_feature 1..20: note = Description of Artificial Sequence: Synthetic oligonucleotide
  misc_feature 1..20: note = Target: SCN10A; (+) strand; PAM type: NNNNGHTT; PAM sequence: GGAAGCTT
  source 1..20: mol_type = other DNA
aatgaaagaagagagaagga

SEQ ID NO: 12007 - DNA, 20 bp, synthetic construct
  misc_feature 1..20: note = Description of Artificial Sequence: Synthetic oligonucleotide
  misc_feature 1..20: note = Target: SCN10A; (+) strand; PAM type: NNNNGHTT; PAM sequence: AACAGTTT
  source 1..20: mol_type = other DNA
aagagagaaggaggaagctt

SEQ ID NO: 12008 - DNA, 20 bp, synthetic construct
  misc_feature 1..20: note = Description of Artificial Sequence: Synthetic oligonucleotide
  misc_feature 1..20: note = Target: SCN10A; (+) strand; PAM type: NNNNGHTT; PAM sequence: AACTGTTT
  source 1..20: mol_type = other DNA
gagaataaatgaaaaaaaca

SEQ ID NO: 12009 - DNA, 20 bp, synthetic construct
  misc_feature 1..20: note = Description of Artificial Sequence: Synthetic oligonucleotide
  misc_feature 1..20: note = Target: SCN10A; (+) strand; PAM type: NNNNGHTT; PAM sequence: CAATGTTT
  source 1..20: mol_type = other DNA
aaaaacaaactgtttgtatt

SEQ ID NO: 12010 - DNA, 20 bp, synthetic construct
  misc_feature 1..20: note = Description of Artificial Sequence: Synthetic oligonucleotide
  misc_feature 1..20: note = Target: SCN10A; (+) strand; PAM type: NNNNGHTT; PAM sequence: TGCTGTTT
  source 1..20: mol_type = other DNA
aactgtttgtattcaatgtt

SEQ ID NO: 12011 - DNA, 20 bp, synthetic construct
  misc_feature 1..20: note = Description of Artificial Sequence: Synthetic oligonucleotide
  misc_feature 1..20: note = Target: SCN10A; (+) strand; PAM type: NNNNGHTT; PAM sequence: AGCAGCTT
  source 1..20: mol_type = other DNA
aagaaagaaattgtgggaat

SEQ ID NO: 12012 - DNA, 20 bp, synthetic construct
  misc_feature 1..20: note = Description of Artificial Sequence: Synthetic oligonucleotide
  misc_feature 1..20: note = Target: SCN10A; (+) strand; PAM type: NNNNGHTT; PAM sequence: TTATGCTT
  source 1..20: mol_type = other DNA
gtaacttagttgaattcaat

SEQ ID NO: 12013 - DNA, 20 bp, synthetic construct
  misc_feature 1..20: note = Description of Artificial Sequence: Synthetic oligonucleotide
  misc_feature 1..20: note = Target: SCN10A; (+) strand; PAM type: NNNNGHTT; PAM sequence: CTGAGTTT
  source 1..20: mol_type = other DNA
ttcaatatctgagtctgtgt

SEQ ID NO: 12014 - DNA, 20 bp, synthetic construct
  misc_feature 1..20: note = Description of Artificial Sequence: Synthetic oligonucleotide
  misc_feature 1..20: note = Target: SCN10A; (+) strand; PAM type: NNNNGHTT; PAM sequence: TCTAGTTT
  source 1..20: mol_type = other DNA
atgaagatggctcttctctc

SEQ ID NO: 12015 - DNA, 20 bp, synthetic construct
  misc_feature 1..20: note = Description of Artificial Sequence: Synthetic oligonucleotide
  misc_feature 1..20: note = Target: SCN10A; (+) strand; PAM type: NNNNGHTT; PAM sequence: GGCTGCTT
  source 1..20: mol_type = other DNA
agccacagggctctctctga

SEQ ID NO: 12016 - DNA, 20 bp, synthetic construct
  misc_feature 1..20: note = Description of Artificial Sequence: Synthetic oligonucleotide
  misc_feature 1..20: note = Target: SCN10A; (+) strand; PAM type: NNNNGHTT; PAM sequence: CCCAGATT
  source 1..20: mol_type = other DNA
ctaagctaaggttgcctttc

SEQ ID NO: 12017 - DNA, 20 bp, synthetic construct
  misc_feature 1..20: note = Description of Artificial Sequence: Synthetic oligonucleotide
  misc_feature 1..20: note = Target: SCN10A; (+) strand; PAM type: NNNNGHTT; PAM sequence: CTTTGTTT
  source 1..20: mol_type = other DNA
ccagattttcttaaaaacgt

SEQ ID NO: 12018 - DNA, 20 bp, synthetic construct
  misc_feature 1..20: note = Description of Artificial Sequence: Synthetic oligonucleotide
  misc_feature 1..20: note = Target: SCN10A; (+) strand; PAM type: NNNNGHTT; PAM sequence: ATCAGTTT
  source 1..20: mol_type = other DNA
tccttattttcttccttttt

SEQ ID NO: 12019 - DNA, 20 bp, synthetic construct
  misc_feature 1..20: note = Description of Artificial Sequence: Synthetic oligonucleotide
  misc_feature 1..20: note = Target: SCN10A; (+) strand; PAM type: NNNNGHTT; PAM sequence: TACAGTTT
  source 1..20: mol_type = other DNA
attactggctagttctactc

SEQ ID NO: 12020 - DNA, 20 bp, synthetic construct
  misc_feature 1..20: note = Description of Artificial Sequence: Synthetic oligonucleotide
  misc_feature 1..20: note = Target: SCN10A; (+) strand; PAM type: NNNNGHTT; PAM sequence: TAAGGCTT
  source 1..20: mol_type = other DNA
tgtgcatgtgaatctctctc

SEQ ID NO: 12021 - DNA, 20 bp, synthetic construct
  misc_feature 1..20: note = Description of Artificial Sequence: Synthetic oligonucleotide
  misc_feature 1..20: note = Target: SCN10A; (+) strand; PAM type: NNNNGHTT; PAM sequence: TCTGGCTT
  source 1..20: mol_type = other DNA
tctctctaaggcttgccacc

SEQ ID NO: 12022 - DNA, 20 bp, synthetic construct
  misc_feature 1..20: note = Description of Artificial Sequence: Synthetic oligonucleotide
  misc_feature 1..20: note = Target: SCN10A; (+) strand; PAM type: NNNNGHTT; PAM sequence: CTCTGTTT
  source 1..20: mol_type = other DNA
gaaagtagggcacacattgg

SEQ ID NO: 12023 - DNA, 20 bp, synthetic construct
  misc_feature 1..20: note = Description of Artificial Sequence: Synthetic oligonucleotide
  misc_feature 1..20: note = Target: SCN10A; (+) strand; PAM type: NNNNGHTT; PAM sequence: TTTGGTTT
  source 1..20: mol_type = other DNA
tgaaatccctcaaacatttt

SEQ ID NO: 12024 - DNA, 20 bp, synthetic construct
  misc_feature 1..20: note = Description of Artificial Sequence: Synthetic oligonucleotide
  misc_feature 1..20: note = Target: SCN10A; (+) strand; PAM type: NNNNGHTT; PAM sequence: TTAGGATT
  source 1..20: mol_type = other DNA
caccacttcttcccctcaaa

SEQ ID NO: 12025 - DNA, 20 bp, synthetic construct
  misc_feature 1..20: note = Description of Artificial Sequence: Synthetic oligonucleotide
  misc_feature 1..20: note = Target: SCN10A; (+) strand; PAM type: NNNNGHTT; PAM sequence: GTCAGTTT
  source 1..20: mol_type = other DNA
ttacaactcctccagcctag

SEQ ID NO: 12026 - DNA, 20 bp, synthetic construct
  misc_feature 1..20: note = Description of Artificial Sequence: Synthetic oligonucleotide
  misc_feature 1..20: note = Target: SCN10A; (+) strand; PAM type: NNNNGHTT; PAM sequence: GCTGGATT
  source 1..20: mol_type = other DNA
ataccctaaggcaaaaaaag

SEQ ID NO: 12027 - DNA, 20 bp, synthetic construct
  misc_feature 1..20: note = Description of Artificial Sequence: Synthetic oligonucleotide
  misc_feature 1..20: note = Target: SCN10A; (+) strand; PAM type: NNNNGHTT; PAM sequence: TTTGGCTT
  source 1..20: mol_type = other DNA
gccactctcttcctctaccc

SEQ ID NO: 12028 - DNA, 20 bp, synthetic construct
  misc_feature 1..20: note = Description of Artificial Sequence: Synthetic oligonucleotide
  misc_feature 1..20: note = Target: SCN10A; (+) strand; PAM type: NNNNGHTT; PAM sequence: AGTGGATT
  source 1..20: mol_type = other DNA
atacattgctggggagactg

SEQ ID NO: 12029 - DNA, 20 bp, synthetic construct
  misc_feature 1..20: note = Description of Artificial Sequence: Synthetic oligonucleotide
  misc_feature 1..20: note = Target: SCN10A; (+) strand; PAM type: NNNNGHTT; PAM sequence: ACTTGATT
  source 1..20: mol_type = other DNA
gggagactgagtggattccc

SEQ ID NO: 12030 - DNA, 20 bp, synthetic construct
  misc_feature 1..20: note = Description of Artificial Sequence: Synthetic oligonucleotide
  misc_feature 1..20: note = Target: SCN10A; (+) strand; PAM type: NNNNGHTT; PAM sequence: GACTGATT
  source 1..20: mol_type = other DNA
aacaaggacttagttaaatt

SEQ ID NO: 12031 - DNA, 20 bp, synthetic construct
  misc_feature 1..20: note = Description of Artificial Sequence: Synthetic oligonucleotide
  misc_feature 1..20: note = Target: SCN10A; (+) strand; PAM type: NNNNGHTT; PAM sequence: GTGGGCTT
  source 1..20: mol_type = other DNA
ctaccaatattcagcataat

SEQ ID NO: 12032 - DNA, 20 bp, synthetic construct
  misc_feature 1..20: note = Description of Artificial Sequence: Synthetic oligonucleotide
  misc_feature 1..20: note = Target: SCN10A; (+) strand; PAM type: NNNNGHTT; PAM sequence: TCTAGTTT
  source 1..20: mol_type = other DNA
tgccagatcacttttaaaaa

SEQ ID NO: 12033 - DNA, 20 bp, synthetic construct
  misc_feature 1..20: note = Description of Artificial Sequence: Synthetic oligonucleotide
  misc_feature 1..20: note = Target: SCN10A; (+) strand; PAM type: NNNNGHTT; PAM sequence: TTTTGTTT
  source 1..20: mol_type = other DNA
atattttattcatcaaatta

SEQ ID NO: 12034 - DNA, 20 bp, synthetic construct
  misc_feature 1..20: note = Description of Artificial Sequence: Synthetic oligonucleotide
  misc_feature 1..20: note = Target: SCN10A; (+) strand; PAM type: NNNNGHTT; PAM sequence: GGACGCTT
  source 1..20: mol_type = other DNA
gaattccagtacacagagat

SEQ ID NO: 12035 - DNA, 20 bp, synthetic construct
  misc_feature 1..20: note = Description of Artificial Sequence: Synthetic oligonucleotide
  misc_feature 1..20: note = Target: SCN10A; (+) strand; PAM type: NNNNGHTT; PAM sequence: CATTGCTT
  source 1..20: mol_type = other DNA
gctttgacacgagttagaga

SEQ ID NO: 12036 - DNA, 20 bp, synthetic construct
  misc_feature 1..20: note = Description of Artificial Sequence: Synthetic oligonucleotide
  misc_feature 1..20: note = Target: SCN10A; (+) strand; PAM type: NNNNGHTT; PAM sequence: AGGTGATT
  source 1..20: mol_type = other DNA
gttctgacaaatacatcatt

SEQ ID NO: 12037 - DNA, 20 bp, synthetic construct
  misc_feature 1..20: note = Description of Artificial Sequence: Synthetic oligonucleotide
  misc_feature 1..20: note = Target: SCN10A; (+) strand; PAM type: NNNNGHTT; PAM sequence: GAAAGTTT
  source 1..20: mol_type = other DNA
aaacagttaataaacataaa

SEQ ID NO: 12038 - DNA, 20 bp, synthetic construct
  misc_feature 1..20: note = Description of Artificial Sequence: Synthetic oligonucleotide
  misc_feature 1..20: note = Target: SCN10A; (+) strand; PAM type: NNNNGHTT; PAM sequence: TAAAGCTT
  source 1..20: mol_type = other DNA
ataaacataaagaaagttta

SEQ ID NO: 12039 - DNA, 20 bp, synthetic construct
  misc_feature 1..20: note = Description of Artificial Sequence: Synthetic oligonucleotide
  misc_feature 1..20: note = Target: SCN10A; (+) strand; PAM type: NNNNGHTT; PAM sequence: GGAGGCTT
  source 1..20: mol_type = other DNA
ctttttacaaggggagataa

SEQ ID NO: 12040 - DNA, 20 bp, synthetic construct
  misc_feature 1..20: note = Description of Artificial Sequence: Synthetic oligonucleotide
  misc_feature 1..20: note = Target: SCN10A; (+) strand; PAM type: NNNNGHTT; PAM sequence: CTCTGTTT
  source 1..20: mol_type = other DNA
ggatgcctttgactttaagg

SEQ ID NO: 12041 - DNA, 20 bp, synthetic construct
  misc_feature 1..20: note = Description of Artificial Sequence: Synthetic oligonucleotide
  misc_feature 1..20: note = Target: SCN10A; (+) strand; PAM type: NNNNGHTT; PAM sequence: TGGTGATT
  source 1..20: mol_type = other DNA
ttgactttaaggctctgttt

SEQ ID NO: 12042 - DNA, 20 bp, synthetic construct
  misc_feature 1..20: note = Description of Artificial Sequence: Synthetic oligonucleotide
  misc_feature 1..20: note = Target: SCN10A; (+) strand; PAM type: NNNNGHTT; PAM sequence: CCAGGTTT
  source 1..20: mol_type = other DNA
tccttaccctctggttctgg

SEQ ID NO: 12043 - DNA, 20 bp, synthetic construct
  misc_feature 1..20: note = Description of Artificial Sequence: Synthetic oligonucleotide
  misc_feature 1..20: note = Target: SCN10A; (+) strand; PAM type: NNNNGHTT; PAM sequence: CCTGGCTT
  source 1..20: mol_type = other DNA
agacaagtcaggtattttcc

SEQ ID NO: 12044 - DNA, 20 bp, synthetic construct
  misc_feature 1..20: note = Description of Artificial Sequence: Synthetic oligonucleotide
  misc_feature 1..20: note = Target: SCN10A; (+) strand; PAM type: NNNNGHTT; PAM sequence: AACAGCTT
  source 1..20: mol_type = other DNA
tcccttcagcctaggcatgt

SEQ ID NO: 12045 - DNA, 20 bp, synthetic construct
  misc_feature 1..20: note = Description of Artificial Sequence: Synthetic oligonucleotide
  misc_feature 1..20: note = Target: SCN10A; (+) strand; PAM type: NNNNGHTT; PAM sequence: ACTAGTTT
  source 1..20: mol_type = other DNA
tgtaacagcttccccctgtt

SEQ ID NO: 12046 - DNA, 20 bp, synthetic construct
  misc_feature 1..20: note = Description of Artificial Sequence: Synthetic oligonucleotide
  misc_feature 1..20: note = Target: SCN10A; (+) strand; PAM type: NNNNGHTT; PAM sequence: ATCTGTTT
  source 1..20: mol_type = other DNA
ttagcccatcggagtggtcc

SEQ ID NO: 12047 - DNA, 20 bp, synthetic construct
  misc_feature 1..20: note = Description of Artificial Sequence: Synthetic oligonucleotide
  misc_feature 1..20: note = Target: SCN10A; (+) strand; PAM type: NNNNGHTT; PAM sequence: CTGCGATT
  source 1..20: mol_type = other DNA
ccctgacttgccattacact

SEQ ID NO: 12048 - DNA, 20 bp, synthetic construct
  misc_feature 1..20: note = Description of Artificial Sequence: Synthetic oligonucleotide
  misc_feature 1..20: note = Target: SCN10A; (+) strand; PAM type: NNNNGHTT; PAM sequence: CTGTGCTT
  source 1..20: mol_type = other DNA
tgtgagtaaagcaaggaata

SEQ ID NO: 12049 - DNA, 20 bp, synthetic construct
  misc_feature 1..20: note = Description of Artificial Sequence: Synthetic oligonucleotide
  misc_feature 1..20: note = Target: SCN10A; (+) strand; PAM type: NNNNGHTT; PAM sequence: AAGAGTTT
  source 1..20: mol_type = other DNA
gtgccatttgcccagcctag

SEQ ID NO: 12050 - DNA, 20 bp, synthetic construct
  misc_feature 1..20: note = Description of Artificial Sequence: Synthetic oligonucleotide
  misc_feature 1..20: note = Target: SCN10A; (+) strand; PAM type: NNNNGHTT; PAM sequence: TTCAGTTT
  source 1..20: mol_type = other DNA
aagcaggaagagaagggtcc

SEQ ID NO: 12051 - DNA, 20 bp, synthetic construct
  misc_feature 1..20: note = Description of Artificial Sequence: Synthetic oligonucleotide
  misc_feature 1..20: note = Target: SCN10A; (+) strand; PAM type: NNNNGHTT; PAM sequence: ACCTGTTT
  source 1..20: mol_type = other DNA
actgcagaataaaccaggaa

SEQ ID NO: 12052 - DNA, 20 bp, synthetic construct
  misc_feature 1..20: note = Description of Artificial Sequence: Synthetic oligonucleotide
  misc_feature 1..20: note = Target: SCN10A; (+) strand; PAM type: NNNNGHTT; PAM sequence: TCAGGCTT
  source 1..20: mol_type = other DNA
atcccttccattggtgatac

SEQ ID NO: 12053 - DNA, 20 bp, synthetic construct
  misc_feature 1..20: note = Description of Artificial Sequence: Synthetic oligonucleotide
  misc_feature 1..20: note = Target: SCN10A; (+) strand; PAM type: NNNNGHTT; PAM sequence: CAAGGCTT
  source 1..20: mol_type = other DNA
gatactcaggcttcttggct

SEQ ID NO: 12054 - DNA, 20 bp, synthetic construct
  misc_feature 1..20: note = Description of Artificial Sequence: Synthetic oligonucleotide
  misc_feature 1..20: note = Target: SCN10A; (+) strand; PAM type: NNNNGHTT; PAM sequence: GAGGGCTT
  source 1..20: mol_type = other DNA
agggttgctgggttgaggaa

SEQ ID NO: 12055 - DNA, 20 bp, synthetic construct
  misc_feature 1..20: note = Description of Artificial Sequence: Synthetic oligonucleotide
  misc_feature 1..20: note = Target: SCN10A; (+) strand; PAM type: NNNNGHTT; PAM sequence: GATGGCTT
  source 1..20: mol_type = other DNA
acccagcagcagagagcccc

SEQ ID NO: 12056 - DNA, 20 bp, synthetic construct
  misc_feature 1..20: note = Description of Artificial Sequence: Synthetic oligonucleotide
  misc_feature 1..20: note = Target: SCN10A; (+) strand; PAM type: NNNNGHTT; PAM sequence: CGGCGTTT
  source 1..20: mol_type = other DNA
acacactgccatgactagcc

SEQ ID NO: 12057 - DNA, 20 bp, synthetic construct
  misc_feature 1..20: note = Description of Artificial Sequence: Synthetic oligonucleotide
  misc_feature 1..20: note = Target: SCN10A; (+) strand; PAM type: NNNNGHTT; PAM sequence: GAGAGATT
  source 1..20: mol_type = other DNA
cgggaaagaccaggagagag

SEQ ID NO: 12058 - DNA, 20 bp, synthetic construct
  misc_feature 1..20: note = Description of Artificial Sequence: Synthetic oligonucleotide
  misc_feature 1..20: note = Target: SCN10A; (+) strand; PAM type: NNNNGHTT; PAM sequence: AGTTGATT
  source 1..20: mol_type = other DNA
ccttgtcacctggatagttc

SEQ ID NO: 12059 - DNA, 20 bp, synthetic construct
  misc_feature 1..20: note = Description of Artificial Sequence: Synthetic oligonucleotide
  misc_feature 1..20: note = Target: SCN10A; (+) strand; PAM type: NNNNGHTT; PAM sequence: GAGAGTTT
  source 1..20: mol_type = other DNA
gatcccatctgtatgaatgt

SEQ ID NO: 12060 - DNA, 20 bp, synthetic construct
  misc_feature 1..20: note = Description of Artificial Sequence: Synthetic oligonucleotide
  misc_feature 1..20: note = Target: SCN10A; (+) strand; PAM type: NNNNGHTT; PAM sequence: ATGAGTTT
  source 1..20: mol_type = other DNA
gacaagagctgtacagtgca

SEQ ID NO: 12061 - DNA, 20 bp, synthetic construct
  misc_feature 1..20: note = Description of Artificial Sequence: Synthetic oligonucleotide
  misc_feature 1..20: note = Target: SCN10A; (+) strand; PAM type: NNNNGHTT; PAM sequence: CGAGGCTT
  source 1..20: mol_type = other DNA
aatgagtttctaggatccct

SEQ ID NO: 12062 - DNA, 20 bp, synthetic construct
  misc_feature 1..20: note = Description of Artificial Sequence: Synthetic oligonucleotide
  misc_feature 1..20: note = Target: SCN10A; (+) strand; PAM type: NNNNGHTT; PAM sequence: TGTGGCTT
  source 1..20: mol_type = other DNA
atcttccattgagggaactg

SEQ ID NO: 12063 - DNA, 20 bp, synthetic construct
  misc_feature 1..20: note = Description of Artificial Sequence: Synthetic oligonucleotide
  misc_feature 1..20: note = Target: SCN10A; (+) strand; PAM type: NNNNGHTT; PAM sequence: TACCGATT
  source 1..20: mol_type = other DNA
ttcataccaaactctgatca

SEQ ID NO: 12064 - DNA, 20 bp, synthetic construct
  misc_feature 1..20: note = Description of Artificial Sequence: Synthetic oligonucleotide
  misc_feature 1..20: note = Target: SCN10A; (+) strand; PAM type: NNNNGHTT; PAM sequence: TGAAGTTT
  source 1..20: mol_type = other DNA
atccccttatctcacagaac

SEQ ID NO: 12065 - DNA, 20 bp, synthetic construct
  misc_feature 1..20: note = Description of Artificial Sequence: Synthetic oligonucleotide
  misc_feature 1..20: note = Target: SCN10A; (+) strand; PAM type: NNNNGHTT; PAM sequence: TCCTGTTT
  source 1..20: mol_type = other DNA
cttgataatttgaagcctga

SEQ ID NO: 12066 - DNA, 20 bp, synthetic construct
  misc_feature 1..20: note = Description of Artificial Sequence: Synthetic oligonucleotide
  misc_feature 1..20: note = Target: SCN10A; (+) strand; PAM type: NNNNGHTT; PAM sequence: TAAGGTTT
  source 1..20: mol_type = other DNA
gccacgagttattttagaat

SEQ ID NO: 12067 - DNA, 20 bp, synthetic construct
  misc_feature 1..20: note = Description of Artificial Sequence: Synthetic oligonucleotide
  misc_feature 1..20: note = Target: SCN10A; (+) strand; PAM type: NNNNGHTT; PAM sequence: AATTGCTT
  source 1..20: mol_type = other DNA
cttctgagtataagcattag

SEQ ID NO: 12068 - DNA, 20 bp, synthetic construct
  misc_feature 1..20: note = Description of Artificial Sequence: Synthetic oligonucleotide
  misc_feature 1..20: note = Target: SCN10A; (+) strand; PAM type: NNNNGHTT; PAM sequence: CTGTGATT
  source 1..20: mol_type = other DNA
ctctaacgagaccaactggt

SEQ ID NO: 12069 - DNA, 20 bp, synthetic construct
  misc_feature 1..20: note = Description of Artificial Sequence: Synthetic oligonucleotide
  misc_feature 1..20: note = Target: SCN10A; (+) strand; PAM type: NNNNGHTT; PAM sequence: AATGGCTT
  source 1..20: mol_type = other DNA
ttaatttctattggttataa

SEQ ID NO: 12070 - DNA, 20 bp, synthetic construct
  misc_feature 1..20: note = Description of Artificial Sequence: Synthetic oligonucleotide
  misc_feature 1..20: note = Target: SCN10A; (+) strand; PAM type: NNNNGHTT; PAM sequence: GGATGTTT
  source 1..20: mol_type = other DNA
ctatccagccccataagagt

SEQ ID NO: 12071 - DNA, 20 bp, synthetic construct
  misc_feature 1..20: note = Description of Artificial Sequence: Synthetic oligonucleotide
  misc_feature 1..20: note = Target: SCN10A; (+) strand; PAM type: NNNNGHTT; PAM sequence: CCCTGATT
  source 1..20: mol_type = other DNA
cataagagtggatgtttctt

SEQ ID NO: 12072 - DNA, 20 bp, synthetic construct
  misc_feature 1..20: note = Description of Artificial Sequence: Synthetic oligonucleotide
  misc_feature 1..20: note = Target: SCN10A; (+) strand; PAM type: NNNNGHTT; PAM sequence: CTGTGTTT
  source 1..20: mol_type = other DNA
atacactatttaacacatag

SEQ ID NO: 12073 - DNA, 20 bp, synthetic construct
  misc_feature 1..20: note = Description of Artificial Sequence: Synthetic oligonucleotide
  misc_feature 1..20: note = Target: SCN10A; (+) strand; PAM type: NNNNGHTT; PAM sequence: CTGTGATT
  source 1..20: mol_type = other DNA
cattgacatttccatggaag

SEQ ID NO: 12074 - DNA, 20 bp, synthetic construct
  misc_feature 1..20: note = Description of Artificial Sequence: Synthetic oligonucleotide
  misc_feature 1..20: note = Target: SCN10A; (+) strand; PAM type: NNNNGHTT; PAM sequence: CTGTGATT
  source 1..20: mol_type = other DNA
aagctgtgattcatcctgtt

SEQ ID NO: 12075 - DNA, 20 bp, synthetic construct
  misc_feature 1..20: note = Description of Artificial Sequence: Synthetic oligonucleotide
  misc_feature 1..20: note = Target: SCN10A; (+) strand; PAM type: NNNNGHTT; PAM sequence: CTGTGTTT
  source 1..20: mol_type = other DNA
cagtgtgcatgcaagtgtgt

SEQ ID NO: 12076 - DNA, 20 bp, synthetic construct
  misc_feature 1..20: note = Description of Artificial Sequence: Synthetic oligonucleotide
  misc_feature 1..20: note = Target: SCN10A; (+) strand; PAM type: NNNNGHTT; PAM sequence: TTCGGCTT
  source 1..20: mol_type = other DNA
tgcaaaaaagtaaaatatcc

SEQ ID NO: 12077 - DNA, 20 bp, synthetic construct
  misc_feature 1..20: note = Description of Artificial Sequence: Synthetic oligonucleotide
  misc_feature 1..20: note = Target: SCN10A; (+) strand; PAM type: NNNNGHTT; PAM sequence: AAGAGATT
  source 1..20: mol_type = other DNA
ccttcggcttagcacaggaa

SEQ ID NO: 12078 - DNA, 20 bp, synthetic construct
  misc_feature 1..20: note = Description of Artificial Sequence: Synthetic oligonucleotide
  misc_feature 1..20: note = Target: SCN10A; (+) strand; PAM type: NNNNGHTT; PAM sequence: GCTGGATT
  source 1..20: mol_type = other DNA
ggtgctgaagccattcccag

SEQ ID NO: 12079 - DNA, 20 bp, synthetic construct
  misc_feature 1..20: note = Description of Artificial Sequence: Synthetic oligonucleotide
  misc_feature 1..20: note = Target: SCN10A; (+) strand; PAM type: NNNNGHTT; PAM sequence: GACAGCTT
  source 1..20: mol_type = other DNA
cttttctgataacaacaggt

SEQ ID NO: 12080 - DNA, 20 bp, synthetic construct
  misc_feature 1..20: note = Description of Artificial Sequence: Synthetic oligonucleotide
  misc_feature 1..20: note = Target: SCN10A; (+) strand; PAM type: NNNNGHTT; PAM sequence: TTAAGATT
  source 1..20: mol_type = other DNA
ctttgatgtccgcagacacc

SEQ ID NO: 12081 - DNA, 20 bp, synthetic construct
  misc_feature 1..20: note = Description of Artificial Sequence: Synthetic oligonucleotide
  misc_feature 1..20: note = Target: SCN10A; (+) strand; PAM type: NNNNGHTT; PAM sequence: ATGGGCTT
  source 1..20: mol_type = other DNA
ttaagattggcatgttcagt

SEQ ID NO: 12082 - DNA, 20 bp, synthetic construct
  misc_feature 1..20: note = Description of Artificial Sequence: Synthetic oligonucleotide
  misc_feature 1..20: note = Target: SCN10A; (+) strand; PAM type: NNNNGHTT; PAM sequence: ATTTGATT
  source 1..20: mol_type = other DNA
tcatcttggaatcaccaccc

SEQ ID NO: 12083 - DNA, 20 bp, synthetic construct
  misc_feature 1..20: note = Description of Artificial Sequence: Synthetic oligonucleotide
  misc_feature 1..20: note = Target: SCN10A; (+) strand; PAM type: NNNNGHTT; PAM sequence: CCTAGTTT
  source 1..20: mol_type = other DNA
cccatctataattacacttt

SEQ ID NO: 12084 - DNA, 20 bp, synthetic construct
  misc_feature 1..20: note = Description of Artificial Sequence: Synthetic oligonucleotide
  misc_feature 1..20: note = Target: SCN10A; (+) strand; PAM type: NNNNGHTT; PAM sequence: GGGTGATT
  source 1..20: mol_type = other DNA
tggttgtaaggatcagagcg

SEQ ID NO: 12085 - DNA, 20 bp, synthetic construct
  misc_feature 1..20: note = Description of Artificial Sequence: Synthetic oligonucleotide
  misc_feature 1..20: note = Target: SCN10A; (+) strand; PAM type: NNNNGHTT; PAM sequence: CTTGGCTT
  source 1..20: mol_type = other DNA
ctgtggagccctctgacact

SEQ ID NO: 12086 - DNA, 20 bp, synthetic construct
  misc_feature 1..20: note = Description of Artificial Sequence: Synthetic oligonucleotide
  misc_feature 1..20: note = Target: SCN10A; (+) strand; PAM type: NNNNGHTT; PAM sequence: ATTTGCTT
  source 1..20: mol_type = other DNA
cagcaggtgtagccaatagt

SEQ ID NO: 12087 - DNA, 20 bp, synthetic construct
  misc_feature 1..20: note = Description of Artificial Sequence: Synthetic oligonucleotide
  misc_feature 1..20: note = Target: SCN10A; (+) strand; PAM type: NNNNGHTT; PAM sequence: GTGGGATT
  source 1..20: mol_type = other DNA
gggttaggaccagggtggtg

SEQ ID NO: 12088 - DNA, 20 bp, synthetic construct
  misc_feature 1..20: note = Description of Artificial Sequence: Synthetic oligonucleotide
  misc_feature 1..20: note = Target: SCN10A; (+) strand; PAM type: NNNNGHTT; PAM sequence: AGCTGCTT
  source 1..20: mol_type = other DNA
aggtcagcacagctatcccg

SEQ ID NO: 12089 - DNA, 20 bp, synthetic construct
  misc_feature 1..20: note = Description of Artificial Sequence: Synthetic oligonucleotide
  misc_feature 1..20: note = Target: SCN10A; (+) strand; PAM type: NNNNGHTT; PAM sequence: GCCTGCTT
  source 1..20: mol_type = other DNA
aaaaaaagtctcttttggct

SEQ ID NO: 12090 - DNA, 20 bp, synthetic construct
  misc_feature 1..20: note = Description of Artificial Sequence: Synthetic oligonucleotide
  misc_feature 1..20: note = Target: SCN10A; (+) strand; PAM type: NNNNGHTT; PAM sequence: CCTTGTTT
  source 1..20: mol_type = other DNA
ggtctctagctgagaacact

SEQ ID NO: 12091 - DNA, 20 bp, synthetic construct
  misc_feature 1..20: note = Description of Artificial Sequence: Synthetic oligonucleotide
  misc_feature 1..20: note = Target: SCN10A; (+) strand; PAM type: NNNNGHTT; PAM sequence: TTCTGTTT
  source 1..20: mol_type = other DNA
tagttccaccctctgcccca

SEQ ID NO: 12092 - DNA, 20 bp, synthetic construct
  misc_feature 1..20: note = Description of Artificial Sequence: Synthetic oligonucleotide
  misc_feature 1..20: note = Target: SCN10A; (+) strand; PAM type: NNNNGHTT; PAM sequence: TTTTGCTT
  source 1..20: mol_type = other DNA
ccaccctctgccccattctg

SEQ ID NO: 12093 - DNA, 20 bp, synthetic construct
  misc_feature 1..20: note = Description of Artificial Sequence: Synthetic oligonucleotide
  misc_feature 1..20: note = Target: SCN10A; (+) strand; PAM type: NNNNGHTT; PAM sequence: ATTCGCTT
  source 1..20: mol_type = other DNA
gccccattctgttttgcttc

SEQ ID NO: 12094 - DNA, 20 bp, synthetic construct
  misc_feature 1..20: note = Description of Artificial Sequence: Synthetic oligonucleotide
  misc_feature 1..20: note = Target: SCN10A; (+) strand; PAM type: NNNNGHTT; PAM sequence: CTTAGCTT
  source 1..20: mol_type = other DNA
cacttgcacaagaatcctca

SEQ ID NO: 12095 - DNA, 20 bp, synthetic construct
  misc_feature 1..20: note = Description of Artificial Sequence: Synthetic oligonucleotide
  misc_feature 1..20: note = Target: SCN10A; (+) strand; PAM type: NNNNGHTT; PAM sequence: AGATGATT
  source 1..20: mol_type = other DNA
ctaatatggtccctgaggca

SEQ ID NO: 12096 - DNA, 20 bp, synthetic construct
  misc_feature 1..20: note = Description of Artificial Sequence: Synthetic oligonucleotide
  misc_feature 1..20: note = Target: SCN10A; (+) strand; PAM type: NNNNGHTT; PAM sequence: CAAAGCTT
  source 1..20: mol_type = other DNA
acagtctgcaaccttcttca

SEQ ID NO: 12097 - DNA, 20 bp, synthetic construct
  misc_feature 1..20: note = Description of Artificial Sequence: Synthetic oligonucleotide
  misc_feature 1..20: note = Target: SCN10A; (+) strand; PAM type: NNNNGHTT; PAM sequence: CTTTGCTT
  source 1..20: mol_type = other DNA
gcctcctggaacttcttctc

SEQ ID NO: 12098 - DNA, 20 bp, synthetic construct
  misc_feature 1..20: note = Description of Artificial Sequence: Synthetic oligonucleotide
  misc_feature 1..20: note = Target: SCN10A; (+) strand; PAM type: NNNNGHTT; PAM sequence: GGAAGATT
  source 1..20: mol_type = other DNA
gaccaggtagaaagatccca

SEQ ID NO: 12099 - DNA, 20 bp, synthetic construct
  misc_feature 1..20: note = Description of Artificial Sequence: Synthetic oligonucleotide
  misc_feature 1..20: note = Target: SCN10A; (+) strand; PAM type: NNNNGHTT; PAM sequence: TATAGATT
  source 1..20: mol_type = other DNA
tacgagcacaaaaaagatca

SEQ ID NO: 12100 - DNA, 20 bp, synthetic construct
  misc_feature 1..20: note = Description of Artificial Sequence: Synthetic oligonucleotide
  misc_feature 1..20: note = Target: SCN10A; (+) strand; PAM type: NNNNGHTT; PAM sequence: AGAAGTTT
  source 1..20: mol_type = other DNA
tagttaaaatccgggttgtc

SEQ ID NO: 12101 - DNA, 20 bp, synthetic construct
  misc_feature 1..20: note = Description of Artificial Sequence: Synthetic oligonucleotide
  misc_feature 1..20: note = Target: SCN10A; (+) strand; PAM type: NNNNGHTT; PAM sequence: CCCTGCTT
  source 1..20: mol_type = other DNA
caagaacagagaaggtcatc

SEQ ID NO: 12102 - DNA, 20 bp, synthetic construct
  misc_feature 1..20: note = Description of Artificial Sequence: Synthetic oligonucleotide
  misc_feature 1..20: note = Target: SCN10A; (+) strand; PAM type: NNNNGHTT; PAM sequence: CAGAGTTT
  source 1..20: mol_type = other DNA
ccagggctgcgagacaacca

SEQ ID NO: 12103 - DNA, 20 bp, synthetic construct
  misc_feature 1..20: note = Description of Artificial Sequence: Synthetic oligonucleotide
  misc_feature 1..20: note = Target: SCN10A; (+) strand; PAM type: NNNNGHTT; PAM sequence: GTCTGTTT
  source 1..20: mol_type = other DNA
aggatgatcttggacacttg

SEQ ID NO: 12104 - DNA, 20 bp, synthetic construct
  misc_feature 1..20: note = Description of Artificial Sequence: Synthetic oligonucleotide
  misc_feature 1..20: note = Target: SCN10A; (+) strand; PAM type: NNNNGHTT; PAM sequence: ATTGGTTT
  source 1..20: mol_type = other DNA
gacacttggtctgtttaggt

SEQ ID NO: 12105 - DNA, 20 bp, synthetic construct
  misc_feature 1..20: note = Description of Artificial Sequence: Synthetic oligonucleotide
  misc_feature 1..20: note = Target: SCN10A; (+) strand; PAM type: NNNNGHTT; PAM sequence: CACTGATT
  source 1..20: mol_type = other DNA
ggtctcacattagccaagtt

SEQ ID NO: 12106 - DNA, 20 bp, synthetic construct
  misc_feature 1..20: note = Description of Artificial Sequence: Synthetic oligonucleotide
  misc_feature 1..20: note = Target: SCN10A; (+) strand; PAM type: NNNNGHTT; PAM sequence: AAGTGCTT
  source 1..20: mol_type = other DNA
gtgttcttctctctcccttt

SEQ ID NO: 12107 - DNA, 20 bp, synthetic construct
  misc_feature 1..20: note = Description of Artificial Sequence: Synthetic oligonucleotide
  misc_feature 1..20: note = Target: SCN10A; (+) strand; PAM type: NNNNGHTT; PAM sequence: GCCAGATT
  source 1..20: mol_type = other DNA
aagatggcctatgaaggaag

SEQ ID NO: 12108 - DNA, 20 bp, synthetic construct
  misc_feature 1..20: note = Description of Artificial Sequence: Synthetic oligonucleotide
  misc_feature 1..20: note = Target: SCN10A; (+) strand; PAM type: NNNNGHTT; PAM sequence: CCTCGTTT
  source 1..20: mol_type = other DNA
tgatcaatgaaacagcaatg

SEQ ID NO: 12109 - DNA, 20 bp, synthetic construct
  misc_feature 1..20: note = Description of Artificial Sequence: Synthetic oligonucleotide
  misc_feature 1..20: note = Target: SCN10A; (+) strand; PAM type: NNNNGHTT; PAM sequence: TCCTGTTT
  source 1..20: mol_type = other DNA
tttaaatttttttctttttc

SEQ ID NO: 12110 - DNA, 20 bp, synthetic construct
  misc_feature 1..20: note = Description of Artificial Sequence: Synthetic oligonucleotide
  misc_feature 1..20: note = Target: SCN10A; (+) strand; PAM type: NNNNGHTT; PAM sequence: CCAGGATT
  source 1..20: mol_type = other DNA
tacatggaattcttttactc

SEQ ID NO: 12111 - DNA, 20 bp, synthetic construct
  misc_feature 1..20: note = Description of Artificial Sequence: Synthetic oligonucleotide
  misc_feature 1..20: note = Target: SCN10A; (+) strand; PAM type: NNNNGHTT; PAM sequence: CATGGATT
  source 1..20: mol_type = other DNA
tccatgtgaacaacccatac

SEQ ID NO: 12112 - DNA, 20 bp, synthetic construct
  misc_feature 1..20: note = Description of Artificial Sequence: Synthetic oligonucleotide
  misc_feature 1..20: note = Target: SCN10A; (+) strand; PAM type: NNNNGHTT; PAM sequence: CTTCGATT
  source 1..20: mol_type = other DNA
cagttccaagtctatctcca

SEQ ID NO: 12113 - DNA, 20 bp, synthetic construct
  misc_feature 1..20: note = Description of Artificial Sequence: Synthetic oligonucleotide
  misc_feature 1..20: note = Target: SCN10A; (+) strand; PAM type: NNNNGHTT; PAM sequence: TGAAGATT
  source 1..20: mol_type = other DNA
aagtctatctccacttcgat

SEQ ID NO: 12114 - DNA, 20 bp, synthetic construct
  misc_feature 1..20: note = Description of Artificial Sequence: Synthetic oligonucleotide
  misc_feature 1..20: note = Target: SCN10A; (+) strand; PAM type: NNNNGHTT; PAM sequence: CCTGGCTT
  source 1..20: mol_type = other DNA
cgattgaagattgcaagttc

SEQ ID NO: 12115 - DNA, 20 bp, synthetic construct
  misc_feature 1..20: note = Description of Artificial Sequence: Synthetic oligonucleotide
  misc_feature 1..20: note = Target: SCN10A; (+) strand; PAM type: NNNNGHTT; PAM sequence: CTTGGTTT
  source 1..20: mol_type = other DNA
cccacatttaaagataggct

SEQ ID NO: 12116 - DNA, 20 bp, synthetic construct
  misc_feature 1..20: note = Description of Artificial Sequence: Synthetic oligonucleotide
  misc_feature 1..20: note = Target: SCN10A; (+) strand; PAM type: NNNNGHTT; PAM sequence: GTAGGTTT
  source 1..20: mol_type = other DNA
ggctaggcaacccatttcct

SEQ ID NO: 12117 - DNA, 20 bp, synthetic construct
  misc_feature 1..20: note = Description of Artificial Sequence: Synthetic oligonucleotide
  misc_feature 1..20: note = Target: SCN10A; (+) strand; PAM type: NNNNGHTT; PAM sequence: CCTTGTTT
  source 1..20: mol_type = other DNA
ttaattaactctgagggcag

SEQ ID NO: 12118 - DNA, 20 bp, synthetic construct
  misc_feature 1..20: note = Description of Artificial Sequence: Synthetic oligonucleotide
  misc_feature 1..20: note = Target: SCN10A; (+) strand; PAM type: NNNNGHTT; PAM sequence: TGAGGATT
  source 1..20: mol_type = other DNA
atataaacagttcactgctc

SEQ ID NO: 12119 - DNA, 20 bp, synthetic construct
  misc_feature 1..20: note = Description of Artificial Sequence: Synthetic oligonucleotide
  misc_feature 1..20: note = Target: SCN10A; (+) strand; PAM type: NNNNGHTT; PAM sequence: TATTGTTT
  source 1..20: mol_type = other DNA
aaactgcaaaggaaaattcc

SEQ ID NO: 12120 - DNA, 20 bp, synthetic construct
  misc_feature 1..20: note = Description of Artificial Sequence: Synthetic oligonucleotide
  misc_feature 1..20: note = Target: SCN10A; (+) strand; PAM type: NNNNGHTT; PAM sequence: TCTGGCTT
  source 1..20: mol_type = other DNA
tgtgggcctttcctcaggac

SEQ ID NO: 12121 - DNA, 20 bp, synthetic construct
  misc_feature 1..20: note = Description of Artificial Sequence: Synthetic oligonucleotide
  misc_feature 1..20: note = Target: SCN10A; (+) strand; PAM type: NNNNGHTT; PAM sequence: CCAGGTTT
  source 1..20: mol_type = other DNA
tctgcagccccacagaggac

SEQ ID NO: 12122 - DNA, 20 bp, synthetic construct
  misc_feature 1..20: note = Description of Artificial Sequence: Synthetic oligonucleotide
  misc_feature 1..20: note = Target: SCN10A; (+) strand; PAM type: NNNNGHTT; PAM sequence: TTTAGCTT
  source 1..20: mol_type = other DNA
agccccacagaggacccagg

SEQ ID NO: 12123 - DNA, 20 bp, synthetic construct
  misc_feature 1..20: note = Description of Artificial Sequence: Synthetic oligonucleotide
  misc_feature 1..20: note = Target: SCN10A; (+) strand; PAM type: NNNNGHTT; PAM sequence: CTTGGTTT
  source 1..20: mol_type = other DNA
cagaaggatgctgaggggct

SEQ ID NO: 12124 - DNA, 20 bp, synthetic construct
  misc_feature 1..20: note = Description of Artificial Sequence: Synthetic oligonucleotide
  misc_feature 1..20: note = Target: SCN10A; (+) strand; PAM type: NNNNGHTT; PAM sequence: TCCTGCTT
  source 1..20: mol_type = other DNA
acctgatgttgaccaaatgc

SEQ ID NO: 12125 - DNA, 20 bp, synthetic construct
  misc_feature 1..20: note = Description of Artificial Sequence: Synthetic oligonucleotide
  misc_feature 1..20: note = Target: SCN10A; (+) strand; PAM type: NNNNGHTT; PAM sequence: GCTTGTTT
  source 1..20: mol_type = other DNA
gatgttgaccaaatgctcct

SEQ ID NO: 12126 - DNA, 20 bp, synthetic construct
  misc_feature 1..20: note = Description of Artificial Sequence: Synthetic oligonucleotide
  misc_feature 1..20: note = Target: SCN10A; (+) strand; PAM type: NNNNGHTT; PAM sequence: GATAGTTT
  source 1..20: mol_type = other DNA
cagtcctcagctccaactga

SEQ ID NO: 12127 - DNA, 20 bp, synthetic construct
  misc_feature 1..20: note = Description of Artificial Sequence: Synthetic oligonucleotide
  misc_feature 1..20: note = Target: SCN10A; (+) strand; PAM type: NNNNGHTT; PAM sequence: CTCTGCTT
  source 1..20: mol_type = other DNA
ggcactgggggtgttgtgag

SEQ ID NO: 12128 - DNA, 20 bp, synthetic construct
  misc_feature 1..20: note = Description of Artificial Sequence: Synthetic oligonucleotide
  misc_feature 1..20: note = Target: SCN10A; (+) strand; PAM type: NNNNGHTT; PAM sequence: CTTAGCTT
  source 1..20: mol_type = other DNA
gagctgaggggtcctcatcc

SEQ ID NO: 12129 - DNA, 20 bp, synthetic construct
  misc_feature 1..20: note = Description of Artificial Sequence: Synthetic oligonucleotide
  misc_feature 1..20: note = Target: SCN10A; (+) strand; PAM type: NNNNGHTT; PAM sequence: CTGTGTTT
  source 1..20: mol_type = other DNA
tgcctcacaccgccacctca

SEQ ID NO: 12130 - DNA, 20 bp, synthetic construct
  misc_feature 1..20: note = Description of Artificial Sequence: Synthetic oligonucleotide
  misc_feature 1..20: note = Target: SCN10A; (+) strand; PAM type: NNNNGHTT; PAM sequence: ACTTGTTT
  source 1..20: mol_type = other DNA
tatgaagcctctagtaaaga

SEQ ID NO: 12131 - DNA, 20 bp, synthetic construct
  misc_feature 1..20: note = Description of Artificial Sequence: Synthetic oligonucleotide
  misc_feature 1..20: note = Target: SCN10A; (+) strand; PAM type: NNNNGHTT; PAM sequence: AGCAGCTT
  source 1..20: mol_type = other DNA
tgaatgagaaattgcaaact

SEQ ID NO: 12132 - DNA, 20 bp, synthetic construct
  misc_feature 1..20: note = Description of Artificial Sequence: Synthetic oligonucleotide
  misc_feature 1..20: note = Target: SCN10A; (+) strand; PAM type: NNNNGHTT; PAM sequence: GCTGGATT
  source 1..20: mol_type = other DNA
tgcaaactagcagcttatag

SEQ ID NO: 12133 - DNA, 20 bp, synthetic construct
  misc_feature 1..20: note = Description of Artificial Sequence: Synthetic oligonucleotide
  misc_feature 1..20: note = Target: SCN10A; (+) strand; PAM type: NNNNGHTT; PAM sequence: TTTTGTTT
  source 1..20: mol_type = other DNA
ggatttggcccacagaaata

SEQ ID NO: 12134 - DNA, 20 bp, synthetic construct
  misc_feature 1..20: note = Description of Artificial Sequence: Synthetic oligonucleotide
  misc_feature 1..20: note = Target: SCN10A; (+) strand; PAM type: NNNNGHTT; PAM sequence: CAATGTTT
  source 1..20: mol_type = other DNA
cattttttggaataggtagc

SEQ ID NO: 12135 - DNA, 20 bp, synthetic construct
  misc_feature 1..20: note = Description of Artificial Sequence: Synthetic oligonucleotide
  misc_feature 1..20: note = Target: SCN10A; (+) strand; PAM type: NNNNGHTT; PAM sequence: GGGAGATT
  source 1..20: mol_type = other DNA
ggtagccaatgtttacggtt

SEQ ID NO: 12136 - DNA, 20 bp, synthetic construct
  misc_feature 1..20: note = Description of Artificial Sequence: Synthetic oligonucleotide
  misc_feature 1..20: note = Target: SCN10A; (+) strand; PAM type: NNNNGHTT; PAM sequence: ATGTGTTT
  source 1..20: mol_type = other DNA
gaaattgcaaagtctgatac

SEQ ID NO: 12137 - DNA, 20 bp, synthetic construct
  misc_feature 1..20: note = Description of Artificial Sequence: Synthetic oligonucleotide
  misc_feature 1..20: note = Target: SCN10A; (+) strand; PAM type: NNNNGHTT; PAM sequence: TGATGATT
  source 1..20: mol_type = other DNA
ctatagaatggagttagctg

SEQ ID NO: 12138 - DNA, 20 bp, synthetic construct
  misc_feature 1..20: note = Description of Artificial Sequence: Synthetic oligonucleotide
  misc_feature 1..20: note = Target: SCN10A; (+) strand; PAM type: NNNNGHTT; PAM sequence: GGTAGATT
  source 1..20: mol_type = other DNA
aagtattggttccttcctgg

SEQ ID NO: 12139 - DNA, 20 bp, synthetic construct
  misc_feature 1..20: note = Description of Artificial Sequence: Synthetic oligonucleotide
  misc_feature 1..20: note = Target: SCN10A; (+) strand; PAM type: NNNNGHTT; PAM sequence: ACTTGCTT
  source 1..20: mol_type = other DNA
tggatctctactggactgca

SEQ ID NO: 12140 - DNA, 20 bp, synthetic construct
  misc_feature 1..20: note = Description of Artificial Sequence: Synthetic oligonucleotide
  misc_feature 1..20: note = Target: SCN10A; (+) strand; PAM type: NNNNGHTT; PAM sequence: CACTGTTT
  source 1..20: mol_type = other DNA
gaagaagccttgcaaacttc

SEQ ID NO: 12141 - DNA, 20 bp, synthetic construct
  misc_feature 1..20: note = Description of Artificial Sequence: Synthetic oligonucleotide
  misc_feature 1..20: note = Target: SCN10A; (+) strand; PAM type: NNNNGHTT; PAM sequence: ACCTGTTT
  source 1..20: mol_type = other DNA
atgagaacaggcccaggcta

SEQ ID NO: 12142 - DNA, 20 bp, synthetic construct
  misc_feature 1..20: note = Description of Artificial Sequence: Synthetic oligonucleotide
  misc_feature 1..20: note = Target: SCN10A; (+) strand; PAM type: NNNNGHTT; PAM sequence: TGTTGTTT
  source 1..20: mol_type = other DNA
gaatcatgaattaaatacat

SEQ ID NO: 12143 - DNA, 20 bp, synthetic construct
  misc_feature 1..20: note = Description of Artificial Sequence: Synthetic oligonucleotide
  misc_feature 1..20: note = Target: SCN10A; (+) strand; PAM type: NNNNGHTT; PAM sequence: CCATGATT
  source 1..20: mol_type = other DNA
gagctctgggttggcaaagg

SEQ ID NO: 12144 - DNA, 20 bp, synthetic construct
  misc_feature 1..20: note = Description of Artificial Sequence: Synthetic oligonucleotide
  misc_feature 1..20: note = Target: SCN10A; (+) strand; PAM type: NNNNGHTT; PAM sequence: TCGTGCTT
  source 1..20: mol_type = other DNA
gagaaggaattgttgggcac

SEQ ID NO: 12145 - DNA, 20 bp, synthetic construct
  misc_feature 1..20: note = Description of Artificial Sequence: Synthetic oligonucleotide
  misc_feature 1..20: note = Target: SCN10A; (+) strand; PAM type: NNNNGHTT; PAM sequence: CCTCGCTT
  source 1..20: mol_type = other DNA
acagtaaggggtcagaagtg

SEQ ID NO: 12146 - DNA, 20 bp, synthetic construct
  misc_feature 1..20: note = Description of Artificial Sequence: Synthetic oligonucleotide
  misc_feature 1..20: note = Target: SCN10A; (+) strand; PAM type: NNNNGHTT; PAM sequence: TCTAGATT
  source 1..20: mol_type = other DNA
cagaggtagaatgacttgcc

SEQ ID NO: 12147 - DNA, 20 bp, synthetic construct
  misc_feature 1..20: note = Description of Artificial Sequence: Synthetic oligonucleotide
  misc_feature 1..20: note = Target: SCN10A; (+) strand; PAM type: NNNNGHTT; PAM sequence: TCACGTTT
  source 1..20: mol_type = other DNA
ccctatggaagagactccac

SEQ ID NO: 12148 - DNA, 20 bp, synthetic construct
  misc_feature 1..20: note = Description of Artificial Sequence: Synthetic oligonucleotide
  misc_feature 1..20: note = Target: SCN10A; (+) strand; PAM type: NNNNGHTT; PAM sequence: GCCAGTTT
  source 1..20: mol_type = other DNA
tggtgaggatggtcacatca

SEQ ID NO: 12149 - DNA, 20 bp, synthetic construct
  misc_feature 1..20: note = Description of Artificial Sequence: Synthetic oligonucleotide
  misc_feature 1..20: note = Target: SCN10A; (+) strand; PAM type: NNNNGHTT; PAM sequence: CGAAGCTT
  source 1..20: mol_type = other DNA
gttccaagacctttctcatc

SEQ ID NO: 12150 - DNA, 20 bp, synthetic construct
  misc_feature 1..20: note = Description of Artificial Sequence: Synthetic oligonucleotide
  misc_feature 1..20: note = Target: SCN10A; (+) strand; PAM type: NNNNGHTT; PAM sequence: GGCAGCTT
  source 1..20: mol_type = other DNA
ctttctgcatgcatctggga

SEQ ID NO: 12151 - DNA, 20 bp, synthetic construct
  misc_feature 1..20: note = Description of Artificial Sequence: Synthetic oligonucleotide
  misc_feature 1..20: note = Target: SCN10A; (+) strand; PAM type: NNNNGHTT; PAM sequence: GTGAGTTT
  source 1..20: mol_type = other DNA
agacacagagaaacagagag

SEQ ID NO: 12152 - DNA, 20 bp, synthetic construct
  misc_feature 1..20: note = Description of Artificial Sequence: Synthetic oligonucleotide
  misc_feature 1..20: note = Target: SCN10A; (+) strand; PAM type: NNNNGHTT; PAM sequence: ACCTGCTT
  source 1..20: mol_type = other DNA
ctggcagcaaagaaggatac

SEQ ID NO: 12153 - DNA, 20 bp, synthetic construct
  misc_feature 1..20: note = Description of Artificial Sequence: Synthetic oligonucleotide
  misc_feature 1..20: note = Target: SCN10A; (+) strand; PAM type: NNNNGHTT; PAM sequence: GCTTGTTT
  source 1..20: mol_type = other DNA
cagcaaagaaggatacacct

SEQ ID NO: 12154 - DNA, 20 bp, synthetic construct
  misc_feature 1..20: note = Description of Artificial Sequence: Synthetic oligonucleotide
  misc_feature 1..20: note = Target: SCN10A; (+) strand; PAM type: NNNNGHTT; PAM sequence: GGATGATT
  source 1..20: mol_type = other DNA
acacctgcttgtttaaggag

SEQ ID NO: 12155 - DNA, 20 bp, synthetic construct
  misc_feature 1..20: note = Description of Artificial Sequence: Synthetic oligonucleotide
  misc_feature 1..20: note = Target: SCN10A; (+) strand; PAM type: NNNNGHTT; PAM sequence: AGCAGCTT
  source 1..20: mol_type = other DNA
aaaatcaacttctttgggag

SEQ ID NO: 12156 - DNA, 20 bp, synthetic construct
  misc_feature 1..20: note = Description of Artificial Sequence: Synthetic oligonucleotide
  misc_feature 1..20: note = Target: SCN10A; (+) strand; PAM type: NNNNGHTT; PAM sequence: CTAGGATT
  source 1..20: mol_type = other DNA
gctctgaccagggaagcaat

SEQ ID NO: 12157 - DNA, 20 bp, synthetic construct
  misc_feature 1..20: note = Description of Artificial Sequence: Synthetic oligonucleotide
  misc_feature 1..20: note = Target: SCN10A; (+) strand; PAM type: NNNNGHTT; PAM sequence: GGTGGATT
  source 1..20: mol_type = other DNA
ggagtatttgcagaaccgta

SEQ ID NO: 12158 - DNA, 20 bp, synthetic construct
  misc_feature 1..20: note = Description of Artificial Sequence: Synthetic oligonucleotide
  misc_feature 1..20: note = Target: SCN10A; (+) strand; PAM type: NNNNGHTT; PAM sequence: GAGAGTTT
  source 1..20: mol_type = other DNA
gtgtccagtgggaattggca

SEQ ID NO: 12159 - DNA, 20 bp, synthetic construct
  misc_feature 1..20: note = Description of Artificial Sequence: Synthetic oligonucleotide
  misc_feature 1..20: note = Target: SCN10A; (+) strand; PAM type: NNNNGHTT; PAM sequence: GGGTGTTT
  source 1..20: mol_type = other DNA
aaagacttccactctagaat

SEQ ID NO: 12160 - DNA, 20 bp, synthetic construct
  misc_feature 1..20: note = Description of Artificial Sequence: Synthetic oligonucleotide
  misc_feature 1..20: note = Target: SCN10A; (+) strand; PAM type: NNNNGHTT; PAM sequence: TTCTGTTT
  source 1..20: mol_type = other DNA
ttccactctagaatgggtgt

SEQ ID NO: 12161 - DNA, 20 bp, synthetic construct
  misc_feature 1..20: note = Description of Artificial Sequence: Synthetic oligonucleotide
  misc_feature 1..20: note = Target: SCN10A; (+) strand; PAM type: NNNNGHTT; PAM sequence: GAAAGTTT
  source 1..20: mol_type = other DNA
aagcatcaagtcccatttca

SEQ ID NO: 12162 - DNA, 20 bp, synthetic construct
  misc_feature 1..20: note = Description of Artificial Sequence: Synthetic oligonucleotide
  misc_feature 1..20: note = Target: SCN10A; (+) strand; PAM type: NNNNGHTT; PAM sequence: ATGAGCTT
  source 1..20: mol_type = other DNA
gatcttagaggccccacaca

SEQ ID NO: 12163 - DNA, 20 bp, synthetic construct
  misc_feature 1..20: note = Description of Artificial Sequence: Synthetic oligonucleotide
  misc_feature 1..20: note = Target: SCN10A; (+) strand; PAM type: NNNNGHTT; PAM sequence: TTTTGTTT
  source 1..20: mol_type = other DNA
aatgagctttgatggactac

SEQ ID NO: 12164 - DNA, 20 bp, synthetic construct
  misc_feature 1..20: note = Description of Artificial Sequence: Synthetic oligonucleotide
  misc_feature 1..20: note = Target: SCN10A; (+) strand; PAM type: NNNNGHTT; PAM sequence: ACAGGATT
  source 1..20: mol_type = other DNA
tttcctctgggtgtctaaag

SEQ ID NO: 12165 - DNA, 20 bp, synthetic construct
  misc_feature 1..20: note = Description of Artificial Sequence: Synthetic oligonucleotide
  misc_feature 1..20: note = Target: SCN10A; (+) strand; PAM type: NNNNGHTT; PAM sequence: GACTGCTT
  source 1..20: mol_type = other DNA
ggaaacagtgaagatactgg

SEQ ID NO: 12166 - DNA, 20 bp, synthetic construct
  misc_feature 1..20: note = Description of Artificial Sequence: Synthetic oligonucleotide
  misc_feature 1..20: note = Target: SCN10A; (+) strand; PAM type: NNNNGHTT; PAM sequence: CCAAGTTT
  source 1..20: mol_type = other DNA
ttctcccttcctccccattt

SEQ ID NO: 12167 - DNA, 20 bp, synthetic construct
  misc_feature 1..20: note = Description of Artificial Sequence: Synthetic oligonucleotide
  misc_feature 1..20: note = Target: SCN10A; (+) strand; PAM type: NNNNGHTT; PAM sequence: TTTAGTTT
  source 1..20: mol_type = other DNA
cccatttccaagtttaatcc

SEQ ID NO: 12168 - DNA, 20 bp, synthetic construct
  misc_feature 1..20: note = Description of Artificial Sequence: Synthetic oligonucleotide
  misc_feature 1..20: note = Target: SCN10A; (+) strand; PAM type: NNNNGHTT; PAM sequence: TATTGATT
  source 1..20: mol_type = other DNA
gacatgcccctcctgttacg

SEQ ID NO: 12169 - DNA, 20 bp, synthetic construct
  misc_feature 1..20: note = Description of Artificial Sequence: Synthetic oligonucleotide
  misc_feature 1..20: note = Target: SCN10A; (+) strand; PAM type: NNNNGHTT; PAM sequence: ATAGGCTT
  source 1..20: mol_type = other DNA
ctggcctaggagttgggaca

SEQ ID NO: 12170 - DNA, 20 bp, synthetic construct
  misc_feature 1..20: note = Description of Artificial Sequence: Synthetic oligonucleotide
  misc_feature 1..20: note = Target: SCN10A; (+) strand; PAM type: NNNNGHTT; PAM sequence: TTGGGTTT
  source 1..20: mol_type = other DNA
ctcttactagtgaagaggcc

SEQ ID NO: 12171 - DNA, 20 bp, synthetic construct
  misc_feature 1..20: note = Description of Artificial Sequence: Synthetic oligonucleotide
  misc_feature 1..20: note = Target: SCN10A; (+) strand; PAM type: NNNNGHTT; PAM sequence: TTATGTTT
  source 1..20: mol_type = other DNA
ctagtgaagaggccttgggt

SEQ ID NO: 12172 - DNA, 20 bp, synthetic construct
  misc_feature 1..20: note = Description of Artificial Sequence: Synthetic oligonucleotide
  misc_feature 1..20: note = Target: SCN10A; (+) strand; PAM type: NNNNGHTT; PAM sequence: AACTGTTT
  source 1..20: mol_type = other DNA
tgctcacctgggatcacaga

SEQ ID NO: 12173 - DNA, 20 bp, synthetic construct
  misc_feature 1..20: note = Description of Artificial Sequence: Synthetic oligonucleotide
  misc_feature 1..20: note = Target: SCN10A; (+) strand; PAM type: NNNNGHTT; PAM sequence: CACTGATT
  source 1..20: mol_type = other DNA
catctatagactgacactga

SEQ ID NO: 12174 - DNA, 20 bp, synthetic construct
  misc_feature 1..20: note = Description of Artificial Sequence: Synthetic oligonucleotide
  misc_feature 1..20: note = Target: SCN10A; (+) strand; PAM type: NNNNGHTT; PAM sequence: AGGAGTTT
  source 1..20: mol_type = other DNA
gtggacggatcttcaaacac

SEQ ID NO: 12175 - DNA, 20 bp, synthetic construct
  misc_feature 1..20: note = Description of Artificial Sequence: Synthetic oligonucleotide
  misc_feature 1..20: note = Target: SCN10A; (+) strand; PAM type: NNNNGHTT; PAM sequence: CACTGATT
  source 1..20: mol_type = other DNA
gaccaaccagtctcctcaga

SEQ ID NO: 12176 - DNA, 20 bp, synthetic construct
  misc_feature 1..20: note = Description of Artificial Sequence: Synthetic oligonucleotide
  misc_feature 1..20: note = Target: SCN10A; (+) strand; PAM type: NNNNGHTT; PAM sequence: CTCAGATT
  source 1..20: mol_type = other DNA
tgtgacaggctaactgttat

SEQ ID NO: 12177 - DNA, 20 bp, synthetic construct
  misc_feature 1..20: note = Description of Artificial Sequence: Synthetic oligonucleotide
  misc_feature 1..20: note = Target: SCN10A; (+) strand; PAM type: NNNNGHTT; PAM sequence: AATAGTTT
  source 1..20: mol_type = other DNA
tttttattttattttatttc

SEQ ID NO: 12178 - DNA, 20 bp, synthetic construct
  misc_feature 1..20: note = Description of Artificial Sequence: Synthetic oligonucleotide
  misc_feature 1..20: note = Target: SCN10A; (+) strand; PAM type: NNNNGHTT; PAM sequence: GGTGGTTT
  source 1..20: mol_type = other DNA
tcaatagttttgagggaaca

SEQ ID NO: 12179 - DNA, 20 bp, synthetic construct
  misc_feature 1..20: note = Description of Artificial Sequence: Synthetic oligonucleotide
  misc_feature 1..20: note = Target: SCN10A; (+) strand; PAM type: NNNNGHTT; PAM sequence: AATAGTTT
  source 1..20: mol_type = other DNA
aagttctttatttgtatttc

SEQ ID NO: 12180 - DNA, 20 bp, synthetic construct
  misc_feature 1..20: note = Description of Artificial Sequence: Synthetic oligonucleotide
  misc_feature 1..20: note = Target: SCN10A; (+) strand; PAM type: NNNNGHTT; PAM sequence: CGCTGATT
  source 1..20: mol_type = other DNA
tgcacagaaaaattctttaa

SEQ ID NO: 12181 - DNA, 20 bp, synthetic construct
  misc_feature 1..20: note = Description of Artificial Sequence: Synthetic oligonucleotide
  misc_feature 1..20: note = Target: SCN10A; (+) strand; PAM type: NNNNGHTT; PAM sequence: CTGAGATT
  source 1..20: mol_type = other DNA
aaattctttaacgctgattt

SEQ ID NO: 12182 - DNA, 20 bp, synthetic construct
  misc_feature 1..20: note = Description of Artificial Sequence: Synthetic oligonucleotide
  misc_feature 1..20: note = Target: SCN10A; (+) strand; PAM type: NNNNGHTT; PAM sequence: CACAGCTT
  source 1..20: mol_type = other DNA
ttgttatgcctttgcatcct

SEQ ID NO: 12183 - DNA, 20 bp, synthetic construct
  misc_feature 1..20: note = Description of Artificial Sequence: Synthetic oligonucleotide
  misc_feature 1..20: note = Target: SCN10A; (+) strand; PAM type: NNNNGHTT; PAM sequence: TCCTGCTT
  source 1..20: mol_type = other DNA
ttgcatcctcacagcttagc

SEQ ID NO: 12184 - DNA, 20 bp, synthetic construct
  misc_feature 1..20: note = Description of Artificial Sequence: Synthetic oligonucleotide
  misc_feature 1..20: note = Target: SCN10A; (+) strand; PAM type: NNNNGHTT; PAM sequence: TGATGCTT
  source 1..20: mol_type = other DNA
tgcttgtaattaagaacaca

SEQ ID NO: 12185 - DNA, 20 bp, synthetic construct
  misc_feature 1..20: note = Description of Artificial Sequence: Synthetic oligonucleotide
  misc_feature 1..20: note = Target: SCN10A; (+) strand; PAM type: NNNNGHTT; PAM sequence: TCCAGCTT
  source 1..20: mol_type = other DNA
aataatagtctccaactcca

SEQ ID NO: 12186 - DNA, 20 bp, synthetic construct
  misc_feature 1..20: note = Description of Artificial Sequence: Synthetic oligonucleotide
  misc_feature 1..20: note = Target: SCN10A; (+) strand; PAM type: NNNNGHTT; PAM sequence: AATGGCTT
  source 1..20: mol_type = other DNA
tatgcaagtgtctttttaat

SEQ ID NO: 12187 - DNA, 20 bp, synthetic construct
  misc_feature 1..20: note = Description of Artificial Sequence: Synthetic oligonucleotide
  misc_feature 1..20: note = Target: SCN10A; (+) strand; PAM type: NNNNGHTT; PAM sequence: GTGGGATT
  source 1..20: mol_type = other DNA
ctctgggtagatacccagta

SEQ ID NO: 12188 - DNA, 20 bp, synthetic construct
  misc_feature 1..20: note = Description of Artificial Sequence: Synthetic oligonucleotide
  misc_feature 1..20: note = Target: SCN10A; (+) strand; PAM type: NNNNGHTT; PAM sequence: TAACGTTT
  source 1..20: mol_type = other DNA
agttctttaaggaatctcca

SEQ ID NO: 12189 - DNA, 20 bp, synthetic construct
  misc_feature 1..20: note = Description of Artificial Sequence: Synthetic oligonucleotide
  misc_feature 1..20: note = Target: SCN10A; (+) strand; PAM type: NNNNGHTT; PAM sequence: ACTAGTTT
  source 1..20: mol_type = other DNA
acgttttccttagtggttgt

SEQ ID NO: 12190 - DNA, 20 bp, synthetic construct
  misc_feature 1..20: note = Description of Artificial Sequence: Synthetic oligonucleotide
  misc_feature 1..20: note = Target: SCN10A; (+) strand; PAM type: NNNNGHTT; PAM sequence: AATTGTTT
  source 1..20: mol_type = other DNA
cattcccaccagcagtgtaa

SEQ ID NO: 12191 - DNA, 20 bp, synthetic construct
  misc_feature 1..20: note = Description of Artificial Sequence: Synthetic oligonucleotide
  misc_feature 1..20: note = Target: SCN10A; (+) strand; PAM type: NNNNGHTT; PAM sequence: TGTGGTTT
  source 1..20: mol_type = other DNA
ggagtaaggtggtatctcat

SEQ ID NO: 12192 - DNA, 20 bp, synthetic construct
  misc_feature 1..20: note = Description of Artificial Sequence: Synthetic oligonucleotide
  misc_feature 1..20: note = Target: SCN10A; (+) strand; PAM type: NNNNGHTT; PAM sequence: ATGGGATT
  source 1..20: mol_type = other DNA
tgtcctttgcccacttttgg

SEQ ID NO: 12193 - DNA, 20 bp, synthetic construct
  misc_feature 1..20: note = Description of Artificial Sequence: Synthetic oligonucleotide
  misc_feature 1..20: note = Target: SCN10A; (+) strand; PAM type: NNNNGHTT; PAM sequence: ATTTGTTT
  source 1..20: mol_type = other DNA
gcccacttttggatgggatt

SEQ ID NO: 12194 - DNA, 20 bp, synthetic construct
  misc_feature 1..20: note = Description of Artificial Sequence: Synthetic oligonucleotide
  misc_feature 1..20: note = Target: SCN10A; (+) strand; PAM type: NNNNGHTT; PAM sequence: GTTTGTTT
  source 1..20: mol_type = other DNA
acttttggatgggattattt

SEQ ID NO: 12195 - DNA, 20 bp, synthetic construct
  misc_feature 1..20: note = Description of Artificial Sequence: Synthetic oligonucleotide
  misc_feature 1..20: note = Target: SCN10A; (+) strand; PAM type: NNNNGHTT; PAM sequence: TGCTGATT
  source 1..20: mol_type = other DNA
ggattatttgtttgttttct

SEQ ID NO: 12196 - DNA, 20 bp, synthetic construct
  misc_feature 1..20: note = Description of Artificial Sequence: Synthetic oligonucleotide
  misc_feature 1..20: note = Target: SCN10A; (+) strand; PAM type: NNNNGHTT; PAM sequence: TTGTGTTT
  source 1..20: mol_type = other DNA
ttgttttcttgctgatttat

SEQ ID NO: 12197 - DNA, 20 bp, synthetic construct
  misc_feature 1..20: note = Description of Artificial Sequence: Synthetic oligonucleotide
  misc_feature 1..20: note = Target: SCN10A; (+) strand; PAM type: NNNNGHTT; PAM sequence: CAAAGATT
  source 1..20: mol_type = other DNA
tttgctggaagcatagataa

SEQ ID NO: 12198 - DNA, 20 bp, synthetic construct
  misc_feature 1..20: note = Description of Artificial Sequence: Synthetic oligonucleotide
  misc_feature 1..20: note = Target: SCN10A; (+) strand; PAM type: NNNNGHTT; PAM sequence: GTCTGTTT
  source 1..20: mol_type = other DNA
tttctctcatcctatgggtt

SEQ ID NO: 12199 - DNA, 20 bp, synthetic construct
  misc_feature 1..20: note = Description of Artificial Sequence: Synthetic oligonucleotide
  misc_feature 1..20: note = Target: SCN10A; (+) strand; PAM type: NNNNGHTT; PAM sequence: GGATGATT
  source 1..20: mol_type = other DNA
tatgggttgtctgtttactt

SEQ ID NO: 12200 - DNA, 20 bp, synthetic construct
  misc_feature 1..20: note = Description of Artificial Sequence: Synthetic oligonucleotide
  misc_feature 1..20: note = Target: SCN10A; (+) strand; PAM type: NNNNGHTT; PAM sequence: AACAGCTT
  source 1..20: mol_type = other DNA
gattatttctcttgctgtgc

SEQ ID NO: 12201 - DNA, 20 bp, synthetic construct
  misc_feature 1..20: note = Description of Artificial Sequence: Synthetic oligonucleotide
  misc_feature 1..20: note = Target: SCN10A; (+) strand; PAM type: NNNNGHTT; PAM sequence: TTTAGTTT
  source 1..20: mol_type = other DNA
ctcttgctgtgcaacagctt

SEQ ID NO: 12202 - DNA, 20 bp, synthetic construct
  misc_feature 1..20: note = Description of Artificial Sequence: Synthetic oligonucleotide
  misc_feature 1..20: note = Target: SCN10A; (+) strand; PAM type: NNNNGHTT; PAM sequence: TTTTGTTT
  source 1..20: mol_type = other DNA
attagatcccatctatttat

SEQ ID NO: 12203 - DNA, 20 bp, synthetic construct
  misc_feature 1..20: note = Description of Artificial Sequence: Synthetic oligonucleotide
  misc_feature 1..20: note = Target: SCN10A; (+) strand; PAM type: NNNNGHTT; PAM sequence: GTTGGATT
  source 1..20: mol_type = other DNA
atctatttatttttgttttt

SEQ ID NO: 12204 - DNA, 20 bp, synthetic construct
  misc_feature 1..20: note = Description of Artificial Sequence: Synthetic oligonucleotide
  misc_feature 1..20: note = Target: SCN10A; (+) strand; PAM type: NNNNGHTT; PAM sequence: ATTTGCTT
  source 1..20: mol_type = other DNA
tttatttttgtttttgttgg

SEQ ID NO: 12205 - DNA, 20 bp, synthetic construct
  misc_feature 1..20: note = Description of Artificial Sequence: Synthetic oligonucleotide
  misc_feature 1..20: note = Target: SCN10A; (+) strand; PAM type: NNNNGHTT; PAM sequence: GAACGTTT
  source 1..20: mol_type = other DNA
tgctttgggtccttggtcag

SEQ ID NO: 12206 - DNA, 20 bp, synthetic construct
  misc_feature 1..20: note = Description of Artificial Sequence: Synthetic oligonucleotide
  misc_feature 1..20: note = Target: SCN10A; (+) strand; PAM type: NNNNGHTT; PAM sequence: AAGAGTTT
  source 1..20: mol_type = other DNA
ttgcctaagccaatgtctag

SEQ ID NO: 12207 - DNA, 20 bp, synthetic construct
  misc_feature 1..20: note = Description of Artificial Sequence: Synthetic oligonucleotide
  misc_feature 1..20: note = Target: SCN10A; (+) strand; PAM type: NNNNGHTT; PAM sequence: CTTAGATT
  source 1..20: mol_type = other DNA
aattttttataatttcaggt

SEQ ID NO: 12208 - DNA, 20 bp, synthetic construct
  misc_feature 1..20: note = Description of Artificial Sequence: Synthetic oligonucleotide
  misc_feature 1..20: note = Target: SCN10A; (+) strand; PAM type: NNNNGHTT; PAM sequence: AATTGATT
  source 1..20: mol_type = other DNA
taagccttttatccatcttg

SEQ ID NO: 12209 - DNA, 20 bp, synthetic construct
  misc_feature 1..20: note = Description of Artificial Sequence: Synthetic oligonucleotide
  misc_feature 1..20: note = Target: SCN10A; (+) strand; PAM type: NNNNGHTT; PAM sequence: TGAAGATT
  source 1..20: mol_type = other DNA
tttttgtataaggtgagaga

SEQ ID NO: 12210 - DNA, 20 bp, synthetic construct
  misc_feature 1..20: note = Description of Artificial Sequence: Synthetic oligonucleotide
  misc_feature 1..20: note = Target: SCN10A; (+) strand; PAM type: NNNNGHTT; PAM sequence: TTCAGTTT
  source 1..20: mol_type = other DNA
tataaggtgagagatgaaga

SEQ ID NO: 12211 - DNA, 20 bp, synthetic construct
  misc_feature 1..20: note = Description of Artificial Sequence: Synthetic oligonucleotide
  misc_feature 1..20: note = Target: SCN10A; (+) strand; PAM type: NNNNGHTT; PAM sequence: TGTGGCTT
  source 1..20: mol_type = other DNA
ttcagtttctttcttccaca

SEQ ID NO: 12212 - DNA, 20 bp, synthetic construct
  misc_feature 1..20: note = Description of Artificial Sequence: Synthetic oligonucleotide
  misc_feature 1..20: note = Target: SCN10A; (+) strand; PAM type: NNNNGHTT; PAM sequence: TTACGTTT
  source 1..20: mol_type = other DNA
atagggtgtcctttccccac

SEQ ID NO: 12213 - DNA, 20 bp, synthetic construct
  misc_feature 1..20: note = Description of Artificial Sequence: Synthetic oligonucleotide
  misc_feature 1..20: note = Target: SCN10A; (+) strand; PAM type: NNNNGHTT; PAM sequence: TTTTGTTT
  source 1..20: mol_type = other DNA
tgtcctttccccacttacgt

SEQ ID NO: 12214 - DNA, 20 bp, synthetic construct
  misc_feature 1..20: note = Description of Artificial Sequence: Synthetic oligonucleotide
  misc_feature 1..20: note = Target: SCN10A; (+) strand; PAM type: NNNNGHTT; PAM sequence: GTTTGCTT
  source 1..20: mol_type = other DNA
ctttccccacttacgttttt

SEQ ID NO: 12215 - DNA, 20 bp, synthetic construct
  misc_feature 1..20: note = Description of Artificial Sequence: Synthetic oligonucleotide
  misc_feature 1..20: note = Target: SCN10A; (+) strand; PAM type: NNNNGHTT; PAM sequence: AGTTGCTT
  source 1..20: mol_type = other DNA
tgtttgctttttcaaagatc

SEQ ID NO: 12216 - DNA, 20 bp, synthetic construct
  misc_feature 1..20: note = Description of Artificial Sequence: Synthetic oligonucleotide
  misc_feature 1..20: note = Target: SCN10A; (+) strand; PAM type: NNNNGHTT; PAM sequence: TTTGGCTT
  source 1..20: mol_type = other DNA
agatcagttgcttgtaagta

SEQ ID NO: 12217 - DNA, 20 bp, synthetic construct
  misc_feature 1..20: note = Description of Artificial Sequence: Synthetic oligonucleotide
  misc_feature 1..20: note = Target: SCN10A; (+) strand; PAM type: NNNNGHTT; PAM sequence: ATGTGCTT
  source 1..20: mol_type = other DNA
ctattcttttccattggtct

SEQ ID NO: 12218 - DNA, 20 bp, synthetic construct
  misc_feature 1..20: note = Description of Artificial Sequence: Synthetic oligonucleotide
  misc_feature 1..20: note = Target: SCN10A; (+) strand; PAM type: NNNNGHTT; PAM sequence: TGCTGTTT
  source 1..20: mol_type = other DNA
ttatttttataccagtatca

SEQ ID NO: 12219 - DNA, 20 bp, synthetic construct
  misc_feature 1..20: note = Description of Artificial Sequence: Synthetic oligonucleotide
  misc_feature 1..20: note = Target: SCN10A; (+) strand; PAM type: NNNNGHTT; PAM sequence: TATAGTTT
  source 1..20: mol_type = other DNA
gctatactatagccttgtag

SEQ ID NO: 12220 - DNA, 20 bp, synthetic construct
  misc_feature 1..20: note = Description of Artificial Sequence: Synthetic oligonucleotide
  misc_feature 1..20: note = Target: SCN10A; (+) strand; PAM type: NNNNGHTT; PAM sequence: TCCAGATT
  source 1..20: mol_type = other DNA
aaatcagctaaggtgatgcc

SEQ ID NO: 12221 - DNA, 20 bp, synthetic construct
  misc_feature 1..20: note = Description of Artificial Sequence: Synthetic oligonucleotide
  misc_feature 1..20: note = Target: SCN10A; (+) strand; PAM type: NNNNGHTT; PAM sequence: TCTTGCTT
  source 1..20: mol_type = other DNA
gatgcctccagatttgttat

SEQ ID NO: 12222 - DNA, 20 bp, synthetic construct
  misc_feature 1..20: note = Description of Artificial Sequence: Synthetic oligonucleotide
  misc_feature 1..20: note = Target: SCN10A; (+) strand; PAM type: NNNNGHTT; PAM sequence: TCTTGCTT
  source 1..20: mol_type = other DNA
gatttgttattcttgcttag

SEQ ID NO: 12223 - DNA, 20 bp, synthetic construct
  misc_feature 1..20: note = Description of Artificial Sequence: Synthetic oligonucleotide
  misc_feature 1..20: note = Target: SCN10A; (+) strand; PAM type: NNNNGHTT; PAM sequence: TGTGGATT
  source 1..20: mol_type = other DNA
gcttagtcttgctttggcta

SEQ ID NO: 12224 - DNA, 20 bp, synthetic construct
  misc_feature 1..20: note = Description of Artificial Sequence: Synthetic oligonucleotide
  misc_feature 1..20: note = Target: SCN10A; (+) strand; PAM type: NNNNGHTT; PAM sequence: TATTGCTT
  source 1..20: mol_type = other DNA
gaaattgtattgaatctgta

SEQ ID NO: 12225 - DNA, 20 bp, synthetic construct
  misc_feature 1..20: note = Description of Artificial Sequence: Synthetic oligonucleotide
  misc_feature 1..20: note = Target: SCN10A; (+) strand; PAM type: NNNNGHTT; PAM sequence: TATTGATT
  source 1..20: mol_type = other DNA
cagtaaggtcattttcacaa

SEQ ID NO: 12226 - DNA, 20 bp, synthetic construct
  misc_feature 1..20: note = Description of Artificial Sequence: Synthetic oligonucleotide
  misc_feature 1..20: note = Target: SCN10A; (+) strand; PAM type: NNNNGHTT; PAM sequence: ATTTGTTT
  source 1..20: mol_type = other DNA
tgagcatgggatgtgttccc

SEQ ID NO: 12227 - DNA, 20 bp, synthetic construct
  misc_feature 1..20: note = Description of Artificial Sequence: Synthetic oligonucleotide
  misc_feature 1..20: note = Target: SCN10A; (+) strand; PAM type: NNNNGHTT; PAM sequence: CTGTGATT
  source 1..20: mol_type = other DNA
ttcccatttgtttgtgtcat

SEQ ID NO: 12228 - DNA, 20 bp, synthetic construct
  misc_feature 1..20: note = Description of Artificial Sequence: Synthetic oligonucleotide
  misc_feature 1..20: note = Target: SCN10A; (+) strand; PAM type: NNNNGHTT; PAM sequence: CAGTGTTT
  source 1..20: mol_type = other DNA
tcatctgtgatttattttag

SEQ ID NO: 12229 - DNA, 20 bp, synthetic construct
  misc_feature 1..20: note = Description of Artificial Sequence: Synthetic oligonucleotide
  misc_feature 1..20: note = Target: SCN10A; (+) strand; PAM type: NNNNGHTT; PAM sequence: TGTAGTTT
  source 1..20: mol_type = other DNA
gatttattttagcagtgttt

SEQ ID NO: 12230 - DNA, 20 bp, synthetic construct
  misc_feature 1..20: note = Description of Artificial Sequence: Synthetic oligonucleotide
  misc_feature 1..20: note = Target: SCN10A; (+) strand; PAM type: NNNNGHTT; PAM sequence: CTAAGATT
  source 1..20: mol_type = other DNA
ctttttggttaggtatattc

SEQ ID NO: 12231 - DNA, 20 bp, synthetic construct
  misc_feature 1..20: note = Description of Artificial Sequence: Synthetic oligonucleotide
  misc_feature 1..20: note = Target: SCN10A; (+) strand; PAM type: NNNNGHTT; PAM sequence: TTTTGTTT
  source 1..20: mol_type = other DNA
taggtatattcctaagattt

SEQ ID NO: 12232 - DNA, 20 bp, synthetic construct
  misc_feature 1..20: note = Description of Artificial Sequence: Synthetic oligonucleotide
  misc_feature 1..20: note = Target: SCN10A; (+) strand; PAM type: NNNNGHTT; PAM sequence: TTTTGTTT
  source 1..20: mol_type = other DNA
taagatttttttgtttttat

SEQ ID NO: 12233 - DNA, 20 bp, synthetic construct
  misc_feature 1..20: note = Description of Artificial Sequence: Synthetic oligonucleotide
  misc_feature 1..20: note = Target: SCN10A; (+) strand; PAM type: NNNNGHTT; PAM sequence: AAGGGATT
  source 1..20: mol_type = other DNA
tttttttgcagctgttgtaa

SEQ ID NO: 12234 - DNA, 20 bp, synthetic construct
  misc_feature 1..20: note = Description of Artificial Sequence: Synthetic oligonucleotide
  misc_feature 1..20: note = Target: SCN10A; (+) strand; PAM type: NNNNGHTT; PAM sequence: TCTTGATT
  source 1..20: mol_type = other DNA
tgttgtaaaagggattgagt

SEQ ID NO: 12235 - DNA, 20 bp, synthetic construct
  misc_feature 1..20: note = Description of Artificial Sequence: Synthetic oligonucleotide
  misc_feature 1..20: note = Target: SCN10A; (+) strand; PAM type: NNNNGHTT; PAM sequence: CTCAGCTT
  source 1..20: mol_type = other DNA
attgagttcttgatttgttc

SEQ ID NO: 12236 - DNA, 20 bp, synthetic construct
  misc_feature 1..20: note = Description of Artificial Sequence: Synthetic oligonucleotide
  misc_feature 1..20: note = Target: SCN10A; (+) strand; PAM type: NNNNGHTT; PAM sequence: CTTGGTTT
  source 1..20: mol_type = other DNA
gttcttgatttgttcctcag

SEQ ID NO: 12237 - DNA, 20 bp, synthetic construct
  misc_feature 1..20: note = Description of Artificial Sequence: Synthetic oligonucleotide
  misc_feature 1..20: note = Target: SCN10A; (+) strand; PAM type: NNNNGHTT; PAM sequence: TGCTGATT
  source 1..20: mol_type = other DNA
ctggtggtgtacagtagtgc

SEQ ID NO: 12238 - DNA, 20 bp, synthetic construct
  misc_feature 1..20: note = Description of Artificial Sequence: Synthetic oligonucleotide
  misc_feature 1..20: note = Target: SCN10A; (+) strand; PAM type: NNNNGHTT; PAM sequence: CATTGTTT
  source 1..20: mol_type = other DNA
tagtgctgctgatttgtata

SEQ ID NO: 12239 - DNA, 20 bp, synthetic construct
  misc_feature 1..20: note = Description of Artificial Sequence: Synthetic oligonucleotide
  misc_feature 1..20: note = Target: SCN10A; (+) strand; PAM type: NNNNGHTT; PAM sequence: AGGAGCTT
  source 1..20: mol_type = other DNA
tgaattcatttattagatct

SEQ ID NO: 12240 - DNA, 20 bp, synthetic construct
  misc_feature 1..20: note = Description of Artificial Sequence: Synthetic oligonucleotide
  misc_feature 1..20: note = Target: SCN10A; (+) strand; PAM type: NNNNGHTT; PAM sequence: TAGGGTTT
  source 1..20: mol_type = other DNA
gagctttttggatgagtctt

SEQ ID NO: 12241 - DNA, 20 bp, synthetic construct
  misc_feature 1..20: note = Description of Artificial Sequence: Synthetic oligonucleotide
  misc_feature 1..20: note = Target: SCN10A; (+) strand; PAM type: NNNNGHTT; PAM sequence: AACAGTTT
  source 1..20: mol_type = other DNA
tcatatcattggtgaacagc

SEQ ID NO: 12242 - DNA, 20 bp, synthetic construct
  misc_feature 1..20: note = Description of Artificial Sequence: Synthetic oligonucleotide
  misc_feature 1..20: note = Target: SCN10A; (+) strand; PAM type: NNNNGHTT; PAM sequence: TACTGATT
  source 1..20: mol_type = other DNA
caacagtttgacttcccctt

SEQ ID NO: 12243 - DNA, 20 bp, synthetic construct
  misc_feature 1..20: note = Description of Artificial Sequence: Synthetic oligonucleotide
  misc_feature 1..20: note = Target: SCN10A; (+) strand; PAM type: NNNNGHTT; PAM sequence: TTTGGATT
  source 1..20: mol_type = other DNA
tttgacttcccctttactga

SEQ ID NO: 12244 - DNA, 20 bp, synthetic construct
  misc_feature 1..20: note = Description of Artificial Sequence: Synthetic oligonucleotide
  misc_feature 1..20: note = Target: SCN10A; (+) strand; PAM type: NNNNGHTT; PAM sequence: GTCTGATT
  source 1..20: mol_type = other DNA
tccctttatttatttctctt

SEQ ID NO: 12245 - DNA, 20 bp, synthetic construct
  misc_feature 1..20: note = Description of Artificial Sequence: Synthetic oligonucleotide
  misc_feature 1..20: note = Target: SCN10A; (+) strand; PAM type: NNNNGHTT; PAM sequence: TCTTGTTT
  source 1..20: mol_type = other DNA
ggtgaaagtgggcatccttg

SEQ ID NO: 12246 - DNA, 20 bp, synthetic construct
  misc_feature 1..20: note = Description of Artificial Sequence: Synthetic oligonucleotide
  misc_feature 1..20: note = Target: SCN10A; (+) strand; PAM type: NNNNGHTT; PAM sequence: GAATGCTT
  source 1..20: mol_type = other DNA
cttgtttcagttctcagggg

SEQ ID NO: 12247 - DNA, 20 bp, synthetic construct
  misc_feature 1..20: note = Description of Artificial Sequence: Synthetic oligonucleotide
  misc_feature 1..20: note = Target: SCN10A; (+) strand; PAM type: NNNNGHTT; PAM sequence: CCCTGTTT
  source 1..20: mol_type = other DNA
ggggaatgctttcaactttt

SEQ ID NO: 12248 - DNA, 20 bp, synthetic construct
  misc_feature 1..20: note = Description of Artificial Sequence: Synthetic oligonucleotide
  misc_feature 1..20: note = Target: SCN10A; (+) strand; PAM type: NNNNGHTT; PAM sequence: TGTGGATT
  source 1..20: mol_type = other DNA
ctgtttggtataatgttggc

SEQ ID NO: 12249 - DNA, 20 bp, synthetic construct
  misc_feature 1..20: note = Description of Artificial Sequence: Synthetic oligonucleotide
  misc_feature 1..20: note = Target: SCN10A; (+) strand; PAM type: NNNNGHTT; PAM sequence: GATGGCTT
  source 1..20: mol_type = other DNA
ttggctgtggatttgtcata

SEQ ID NO: 12250 - DNA, 20 bp, synthetic construct
  misc_feature 1..20: note = Description of Artificial Sequence: Synthetic oligonucleotide
  misc_feature 1..20: note = Target: SCN10A; (+) strand; PAM type: NNNNGHTT; PAM sequence: GAGGGTTT
  source 1..20: mol_type = other DNA
ccttctatgccaatttggtt

SEQ ID NO: 12251 - DNA, 20 bp, synthetic construct
  misc_feature 1..20: note = Description of Artificial Sequence: Synthetic oligonucleotide
  misc_feature 1..20: note = Target: SCN10A; (+) strand; PAM type: NNNNGHTT; PAM sequence: GCTGGATT
  source 1..20: mol_type = other DNA
ggttttaatcataatgggat

SEQ ID NO: 12252 - DNA, 20 bp, synthetic construct
  misc_feature 1..20: note = Description of Artificial Sequence: Synthetic oligonucleotide
  misc_feature 1..20: note = Target: SCN10A; (+) strand; PAM type: NNNNGHTT; PAM sequence: AAATGCTT
  source 1..20: mol_type = other DNA
atgggatgctggattttgtc

SEQ ID NO: 12253 - DNA, 20 bp, synthetic construct
  misc_feature 1..20: note = Description of Artificial Sequence: Synthetic oligonucleotide
  misc_feature 1..20: note = Target: SCN10A; (+) strand; PAM type: NNNNGHTT; PAM sequence: ATATGATT
  source 1..20: mol_type = other DNA
ctgcacctattgagatgatc

SEQ ID NO: 12254 - DNA, 20 bp, synthetic construct
  misc_feature 1..20: note = Description of Artificial Sequence: Synthetic oligonucleotide
  misc_feature 1..20: note = Target: SCN10A; (+) strand; PAM type: NNNNGHTT; PAM sequence: TTTTGTTT
  source 1..20: mol_type = other DNA
tattgagatgatcatatgat

SEQ ID NO: 12255 - DNA, 20 bp, synthetic construct
  misc_feature 1..20: note = Description of Artificial Sequence: Synthetic oligonucleotide
  misc_feature 1..20: note = Target: SCN10A; (+) strand; PAM type: NNNNGHTT; PAM sequence: TTCTGTTT
  source 1..20: mol_type = other DNA
catatgatttttgtttttaa

SEQ ID NO: 12256 - DNA, 20 bp, synthetic construct
  misc_feature 1..20: note = Description of Artificial Sequence: Synthetic oligonucleotide
  misc_feature 1..20: note = Target: SCN10A; (+) strand; PAM type: NNNNGHTT; PAM sequence: GTTGGATT
  source 1..20: mol_type = other DNA
gtgttatcttttggatatgt

SEQ ID NO: 12257 - DNA, 20 bp, synthetic construct
  misc_feature 1..20: note = Description of Artificial Sequence: Synthetic oligonucleotide
  misc_feature 1..20: note = Target: SCN10A; (+) strand; PAM type: NNNNGHTT; PAM sequence: TGAGGATT
  source 1..20: mol_type = other DNA
tcaattagctagcattttgt

SEQ ID NO: 12258 - DNA, 20 bp, synthetic construct
  misc_feature 1..20: note = Description of Artificial Sequence: Synthetic oligonucleotide
  misc_feature 1..20: note = Target: SCN10A; (+) strand; PAM type: NNNNGHTT; PAM sequence: TCTGGTTT
  source 1..20: mol_type = other DNA
ttcttttttaaaagtccttt

SEQ ID NO: 12259 - DNA, 20 bp, synthetic construct
  misc_feature 1..20: note = Description of Artificial Sequence: Synthetic oligonucleotide
  misc_feature 1..20: note = Target: SCN10A; (+) strand; PAM type: NNNNGHTT; PAM sequence: ACTGGCTT
  source 1..20: mol_type = other DNA
ggttttggtattagggtgat

SEQ ID NO: 12260 - DNA, 20 bp, synthetic construct
  misc_feature 1..20: note = Description of Artificial Sequence: Synthetic oligonucleotide
  misc_feature 1..20: note = Target: SCN10A; (+) strand; PAM type: NNNNGHTT; PAM sequence: AAATGATT
  source 1..20: mol_type = other DNA
agggtgatactggcttcata

SEQ ID NO: 12261 - DNA, 20 bp, synthetic construct
  misc_feature 1..20: note = Description of Artificial Sequence: Synthetic oligonucleotide
  misc_feature 1..20: note = Target: SCN10A; (+) strand; PAM type: NNNNGHTT; PAM sequence: GGAGGATT
  source 1..20: mol_type = other DNA
tggcttcataaaatgattta

SEQ ID NO: 12262 - DNA, 20 bp, synthetic construct
  misc_feature 1..20: note = Description of Artificial Sequence: Synthetic oligonucleotide
  misc_feature 1..20: note = Target: SCN10A; (+) strand; PAM type: NNNNGHTT; PAM sequence: AATAGTTT
  source 1..20: mol_type = other DNA
cctctttctgcatcttttgg

SEQ ID NO: 12263 - DNA, 20 bp, synthetic construct
  misc_feature 1..20: note = Description of Artificial Sequence: Synthetic oligonucleotide
  misc_feature 1..20: note = Target: SCN10A; (+) strand; PAM type: NNNNGHTT; PAM sequence: TACTGTTT
  source 1..20: mol_type = other DNA
ttccttggcaatttttgaat

SEQ ID NO: 12264 - DNA, 20 bp, synthetic construct
  misc_feature 1..20: note = Description of Artificial Sequence: Synthetic oligonucleotide
  misc_feature 1..20: note = Target: SCN10A; (+) strand; PAM type: NNNNGHTT; PAM sequence: GTCTGTTT
  source 1..20: mol_type = other DNA
aatctcgctacttgttattg

SEQ ID NO: 12265 - DNA, 20 bp, synthetic construct
  misc_feature 1..20: note = Description of Artificial Sequence: Synthetic oligonucleotide
  misc_feature 1..20: note = Target: SCN10A; (+) strand; PAM type: NNNNGHTT; PAM sequence: TAGAGTTT
  source 1..20: mol_type = other DNA
ctacttgttattggtctgtt

SEQ ID NO: 12266 - DNA, 20 bp, synthetic construct
  misc_feature 1..20: note = Description of Artificial Sequence: Synthetic oligonucleotide
  misc_feature 1..20: note = Target: SCN10A; (+) strand; PAM type: NNNNGHTT; PAM sequence: TTCTGATT
  source 1..20: mol_type = other DNA
tgtttagagtttctattact

SEQ ID NO: 12267 - DNA, 20 bp, synthetic construct
  misc_feature 1..20: note = Description of Artificial Sequence: Synthetic oligonucleotide
  misc_feature 1..20: note = Target: SCN10A; (+) strand; PAM type: NNNNGHTT; PAM sequence: TCTAGTTT
  source 1..20: mol_type = other DNA
tattcatctcctctaaattt

SEQ ID NO: 12268 - DNA, 20 bp, synthetic construct
  misc_feature 1..20: note = Description of Artificial Sequence: Synthetic oligonucleotide
  misc_feature 1..20: note = Target: SCN10A; (+) strand; PAM type: NNNNGHTT; PAM sequence: GAATGATT
  source 1..20: mol_type = other DNA
aaggtgttcatagtagcctt

SEQ ID NO: 12269 - DNA, 20 bp, synthetic construct
  misc_feature 1..20: note = Description of Artificial Sequence: Synthetic oligonucleotide
  misc_feature 1..20: note = Target: SCN10A; (+) strand; PAM type: NNNNGHTT; PAM sequence: TTGAGCTT
  source 1..20: mol_type = other DNA
atctcccattttatttctaa

SEQ ID NO: 12270 - DNA, 20 bp, synthetic construct
  misc_feature 1..20: note = Description of Artificial Sequence: Synthetic oligonucleotide
  misc_feature 1..20: note = Target: SCN10A; (+) strand; PAM type: NNNNGHTT; PAM sequence: ACCCGCTT
  source 1..20: mol_type = other DNA
tttctatatctttttaaaga

SEQ ID NO: 12271 - DNA, 20 bp, synthetic construct
  misc_feature 1..20: note = Description of Artificial Sequence: Synthetic oligonucleotide
  misc_feature 1..20: note = Target: SCN10A; (+) strand; PAM type: NNNNGHTT; PAM sequence: TTTTGTTT
  source 1..20: mol_type = other DNA
atctttttaaagaacccgct

SEQ ID NO: 12272 - DNA, 20 bp, synthetic construct
  misc_feature 1..20: note = Description of Artificial Sequence: Synthetic oligonucleotide
  misc_feature 1..20: note = Target: SCN10A; (+) strand; PAM type: NNNNGHTT; PAM sequence: TTCTGCTT
  source 1..20: mol_type = other DNA
gatctttgttattccttttc

SEQ ID NO: 12273 - DNA, 20 bp, synthetic construct
  misc_feature 1..20: note = Description of Artificial Sequence: Synthetic oligonucleotide
  misc_feature 1..20: note = Target: SCN10A; (+) strand; PAM type: NNNNGHTT; PAM sequence: CTTGGTTT
  source 1..20: mol_type = other DNA
ttgttattccttttcttctg

SEQ ID NO: 12274 - DNA, 20 bp, synthetic construct
  misc_feature 1..20: note = Description of Artificial Sequence: Synthetic oligonucleotide
  misc_feature 1..20: note = Target: SCN10A; (+) strand; PAM type: NNNNGHTT; PAM sequence: GTCTGTTT
  source 1..20: mol_type = other DNA
ttttcttctgcttggtttgg

SEQ ID NO: 12275 - DNA, 20 bp, synthetic construct
  misc_feature 1..20: note = Description of Artificial Sequence: Synthetic oligonucleotide
  misc_feature 1..20: note = Target: SCN10A; (+) strand; PAM type: NNNNGHTT; PAM sequence: TCTTGTTT
  source 1..20: mol_type = other DNA
ttggtttgggtctgttttgt

SEQ ID NO: 12276 - DNA, 20 bp, synthetic construct
  misc_feature 1..20: note = Description of Artificial Sequence: Synthetic oligonucleotide
  misc_feature 1..20: note = Target: SCN10A; (+) strand; PAM type: NNNNGHTT; PAM sequence: CTTAGATT
  source 1..20: mol_type = other DNA
ctaattccttgaggtgtgac

SEQ ID NO: 12277 - DNA, 20 bp, synthetic construct
  misc_feature 1..20: note = Description of Artificial Sequence: Synthetic oligonucleotide
  misc_feature 1..20: note = Target: SCN10A; (+) strand; PAM type: NNNNGHTT; PAM sequence: ATGAGCTT
  source 1..20: mol_type = other DNA
tgatgtaggtatttaatgct

SEQ ID NO: 12278 - DNA, 20 bp, synthetic construct
  misc_feature 1..20: note = Description of Artificial Sequence: Synthetic oligonucleotide
  misc_feature 1..20: note = Target: SCN10A; (+) strand; PAM type: NNNNGHTT; PAM sequence: CACTGCTT
  source 1..20: mol_type = other DNA
gctatgagctttcctcttag

SEQ ID NO: 12279 - DNA, 20 bp, synthetic construct
  misc_feature 1..20: note = Description of Artificial Sequence: Synthetic oligonucleotide
  misc_feature 1..20: note = Target: SCN10A; (+) strand; PAM type: NNNNGHTT; PAM sequence: AGAGGTTT
  source 1..20: mol_type = other DNA
cactgctttagctgtatccc

SEQ ID NO: 12280 - DNA, 20 bp, synthetic construct
  misc_feature 1..20: note = Description of Artificial Sequence: Synthetic oligonucleotide
  misc_feature 1..20: note = Target: SCN10A; (+) strand; PAM type: NNNNGHTT; PAM sequence: TCTTGATT
  source 1..20: mol_type = other DNA
aaaaaatttttaaacttcca

SEQ ID NO: 12281 - DNA, 20 bp, synthetic construct
  misc_feature 1..20: note = Description of Artificial Sequence: Synthetic oligonucleotide
  misc_feature 1..20: note = Target: SCN10A; (+) strand; PAM type: NNNNGHTT; PAM sequence: AGCAGATT
  source 1..20: mol_type = other DNA
tgacccaaagatcattcaag

SEQ ID NO: 12282 - DNA, 20 bp, synthetic construct
  misc_feature 1..20: note = Description of Artificial Sequence: Synthetic oligonucleotide
  misc_feature 1..20: note = Target: SCN10A; (+) strand; PAM type: NNNNGHTT; PAM sequence: GATTGTTT
  source 1..20: mol_type = other DNA
ccaaagatcattcaagagca

SEQ ID NO: 12283 - DNA, 20 bp, synthetic construct
  misc_feature 1..20: note = Description of Artificial Sequence: Synthetic oligonucleotide
  misc_feature 1..20: note = Target: SCN10A; (+) strand; PAM type: NNNNGHTT; PAM sequence: TTTAGTTT
  source 1..20: mol_type = other DNA
gatcattcaagagcagattg

SEQ ID NO: 12284 - DNA, 20 bp, synthetic construct
  misc_feature 1..20: note = Description of Artificial Sequence: Synthetic oligonucleotide
  misc_feature 1..20: note = Target: SCN10A; (+) strand; PAM type: NNNNGHTT; PAM sequence: TATAGTTT
  source 1..20: mol_type = other DNA
gtttagttttcatgtatttg

SEQ ID NO: 12285 - DNA, 20 bp, synthetic construct
  misc_feature 1..20: note = Description of Artificial Sequence: Synthetic oligonucleotide
  misc_feature 1..20: note = Target: SCN10A; (+) strand; PAM type: NNNNGHTT; PAM sequence: GAGGGTTT
  source 1..20: mol_type = other DNA
tcatgtatttgtatagtttt

SEQ ID NO: 12286 - DNA, 20 bp, synthetic construct
  misc_feature 1..20: note = Description of Artificial Sequence: Synthetic oligonucleotide
  misc_feature 1..20: note = Target: SCN10A; (+) strand; PAM type: NNNNGHTT; PAM sequence: CGAGGTTT
  source 1..20: mol_type = other DNA
gtttcttttggagttaactc

SEQ ID NO: 12287 - DNA, 20 bp, synthetic construct
  misc_feature 1..20: note = Description of Artificial Sequence: Synthetic oligonucleotide
  misc_feature 1..20: note = Target: SCN10A; (+) strand; PAM type: NNNNGHTT; PAM sequence: TTGAGATT
  source 1..20: mol_type = other DNA
tttctattttcttaaattta

SEQ ID NO: 12288 - DNA, 20 bp, synthetic construct
  misc_feature 1..20: note = Description of Artificial Sequence: Synthetic oligonucleotide
  misc_feature 1..20: note = Target: SCN10A; (+) strand; PAM type: NNNNGHTT; PAM sequence: AGTTGTTT
  source 1..20: mol_type = other DNA
gaaaagaatgtatattctgc

SEQ ID NO: 12289 - DNA, 20 bp, synthetic construct
  misc_feature 1..20: note = Description of Artificial Sequence: Synthetic oligonucleotide
  misc_feature 1..20: note = Target: SCN10A; (+) strand; PAM type: NNNNGHTT; PAM sequence: GAATGTTT
  source 1..20: mol_type = other DNA
tattctgcagttgtttggta

SEQ ID NO: 12290 - DNA, 20 bp, synthetic construct
  misc_feature 1..20: note = Description of Artificial Sequence: Synthetic oligonucleotide
  misc_feature 1..20: note = Target: SCN10A; (+) strand; PAM type: NNNNGHTT; PAM sequence: TACAGTTT
  source 1..20: mol_type = other DNA
taagtccatttgttctaggt

SEQ ID NO: 12291 - DNA, 20 bp, synthetic construct
  misc_feature 1..20: note = Description of Artificial Sequence: Synthetic oligonucleotide
  misc_feature 1..20: note = Target: SCN10A; (+) strand; PAM type: NNNNGHTT; PAM sequence: CATTGTTT
  source 1..20: mol_type = other DNA
tctaggttacagtttaagtt

SEQ ID NO: 12292 - DNA, 20 bp, synthetic construct
  misc_feature 1..20: note = Description of Artificial Sequence: Synthetic oligonucleotide
  misc_feature 1..20: note = Target: SCN10A; (+) strand; PAM type: NNNNGHTT; PAM sequence: AATTGTTT
  source 1..20: mol_type = other DNA
catttcttaggtctagtagt

SEQ ID NO: 12293 - DNA, 20 bp, synthetic construct
  misc_feature 1..20: note = Description of Artificial Sequence: Synthetic oligonucleotide
  misc_feature 1..20: note = Target: SCN10A; (+) strand; PAM type: NNNNGHTT; PAM sequence: TTAGGATT
  source 1..20: mol_type = other DNA
agtgttaggtgcatatgtat

SEQ ID NO: 12294 - DNA, 20 bp, synthetic construct
  misc_feature 1..20: note = Description of Artificial Sequence: Synthetic oligonucleotide
  misc_feature 1..20: note = Target: SCN10A; (+) strand; PAM type: NNNNGHTT; PAM sequence: TGTTGCTT
  source 1..20: mol_type = other DNA
ctttgtctttttttaactgt

SEQ ID NO: 12295 - DNA, 20 bp, synthetic construct
  misc_feature 1..20: note = Description of Artificial Sequence: Synthetic oligonucleotide
  misc_feature 1..20: note = Target: SCN10A; (+) strand; PAM type: NNNNGHTT; PAM sequence: GTCTGTTT
  source 1..20: mol_type = other DNA
ttaactgttgttgctttaag

SEQ ID NO: 12296 - DNA, 20 bp, synthetic construct
  misc_feature 1..20: note = Description of Artificial Sequence: Synthetic oligonucleotide
  misc_feature 1..20: note = Target: SCN10A; (+) strand; PAM type: NNNNGHTT; PAM sequence: TCCTGCTT
  source 1..20: mol_type = other DNA
tctgatataagaatagctac

SEQ ID NO: 12297 - DNA, 20 bp, synthetic construct
  misc_feature 1..20: note = Description of Artificial Sequence: Synthetic oligonucleotide
  misc_feature 1..20: note = Target: SCN10A; (+) strand; PAM type: NNNNGHTT; PAM sequence: GCTTGCTT
  source 1..20: mol_type = other DNA
atataagaatagctactcct

SEQ ID NO: 12298 - DNA, 20 bp, synthetic construct
  misc_feature 1..20: note = Description of Artificial Sequence: Synthetic oligonucleotide
  misc_feature 1..20: note = Target: SCN10A; (+) strand; PAM type: NNNNGHTT; PAM sequence: TTTGGTTT
  source 1..20: mol_type = other DNA
aatagctactcctgcttgct

SEQ ID NO: 12299 - DNA, 20 bp, synthetic construct
  misc_feature 1..20: note = Description of Artificial Sequence: Synthetic oligonucleotide
  misc_feature 1..20: note = Target: SCN10A; (+) strand; PAM type: NNNNGHTT; PAM sequence: TTAAGTTT
  source 1..20: mol_type = other DNA
tcttttcccatctctttacc

SEQ ID NO: 12300 - DNA, 20 bp, synthetic construct
  misc_feature 1..20: note = Description of Artificial Sequence: Synthetic oligonucleotide
  misc_feature 1..20: note = Target: SCN10A; (+) strand; PAM type: NNNNGHTT; PAM sequence: GGTGGATT
  source 1..20: mol_type = other DNA
aagacagtagatacttggtt

SEQ ID NO: 12301 - DNA, 20 bp, synthetic construct
  misc_feature 1..20: note = Description of Artificial Sequence: Synthetic oligonucleotide
  misc_feature 1..20: note = Target: SCN10A; (+) strand; PAM type: NNNNGHTT; PAM sequence: TATTGTTT
  source 1..20: mol_type = other DNA
aattcctttttttattgtgt

SEQ ID NO: 12302 - DNA, 20 bp, synthetic construct
  misc_feature 1..20: note = Description of Artificial Sequence: Synthetic oligonucleotide
  misc_feature 1..20: note = Target: SCN10A; (+) strand; PAM type: NNNNGHTT; PAM sequence: TTATGCTT
  source 1..20: mol_type = other DNA
ttttataggtcctttgatat

SEQ ID NO: 12303 - DNA, 20 bp, synthetic construct
  misc_feature 1..20: note = Description of Artificial Sequence: Synthetic oligonucleotide
  misc_feature 1..20: note = Target: SCN10A; (+) strand; PAM type: NNNNGHTT; PAM sequence: TAAGGTTT
  source 1..20: mol_type = other DNA
ggttctattttggtgtattt

SEQ ID NO: 12304 - DNA, 20 bp, synthetic construct
  misc_feature 1..20: note = Description of Artificial Sequence: Synthetic oligonucleotide
  misc_feature 1..20: note = Target: SCN10A; (+) strand; PAM type: NNNNGHTT; PAM sequence: TCAAGATT
  source 1..20: mol_type = other DNA
gtgtattttaaggttttatt

SEQ ID NO: 12305 - DNA, 20 bp, synthetic construct
  misc_feature 1..20: note = Description of Artificial Sequence: Synthetic oligonucleotide
  misc_feature 1..20: note = Target: SCN10A; (+) strand; PAM type: NNNNGHTT; PAM sequence: GCTGGCTT
  source 1..20: mol_type = other DNA
cttttagcatttcttgtagt

SEQ ID NO: 12306 - DNA, 20 bp, synthetic construct
  misc_feature 1..20: note = Description of Artificial Sequence: Synthetic oligonucleotide
  misc_feature 1..20: note = Target: SCN10A; (+) strand; PAM type: NNNNGHTT; PAM sequence: ATTTGTTT
  source 1..20: mol_type = other DNA
tagtggaaaattctctcacc

SEQ ID NO: 12307 - DNA, 20 bp, synthetic construct
  misc_feature 1..20: note = Description of Artificial Sequence: Synthetic oligonucleotide
  misc_feature 1..20: note = Target: SCN10A; (+) strand; PAM type: NNNNGHTT; PAM sequence: TGAAGCTT
  source 1..20: mol_type = other DNA
ctttatcttgtcttcactta

SEQ ID NO: 12308 - DNA, 20 bp, synthetic construct
  misc_feature 1..20: note = Description of Artificial Sequence: Synthetic oligonucleotide
  misc_feature 1..20: note = Target: SCN10A; (+) strand; PAM type: NNNNGHTT; PAM sequence: CTTAGTTT
  source 1..20: mol_type = other DNA
tcttgtcttcacttatgaag

SEQ ID NO: 12309 - DNA, 20 bp, synthetic construct
  misc_feature 1..20: note = Description of Artificial Sequence: Synthetic oligonucleotide
  misc_feature 1..20: note = Target: SCN10A; (+) strand; PAM type: NNNNGHTT; PAM sequence: TTTTGTTT
  source 1..20: mol_type = other DNA
atattcttggctggcaatta

SEQ ID NO: 12310 - DNA, 20 bp, synthetic construct
  misc_feature 1..20: note = Description of Artificial Sequence: Synthetic oligonucleotide
  misc_feature 1..20: note = Target: SCN10A; (+) strand; PAM type: NNNNGHTT; PAM sequence: TCTGGCTT
  source 1..20: mol_type = other DNA
aagatgggaccctaatccct

SEQ ID NO: 12311 - DNA, 20 bp, synthetic construct
  misc_feature 1..20: note = Description of Artificial Sequence: Synthetic oligonucleotide
  misc_feature 1..20: note = Target: SCN10A; (+) strand; PAM type: NNNNGHTT; PAM sequence: CAAGGTTT
  source 1..20: mol_type = other DNA
ccctaatcccttctggcttg

SEQ ID NO: 12312 - DNA, 20 bp, synthetic construct
  misc_feature 1..20: note = Description of Artificial Sequence: Synthetic oligonucleotide
  misc_feature 1..20: note = Target: SCN10A; (+) strand; PAM type: NNNNGHTT; PAM sequence: TGAGGCTT
  source 1..20: mol_type = other DNA
cctttcctttataggttatc

SEQ ID NO: 12313 - DNA, 20 bp, synthetic construct
  misc_feature 1..20: note = Description of Artificial Sequence: Synthetic oligonucleotide
  misc_feature 1..20: note = Target: SCN10A; (+) strand; PAM type: NNNNGHTT; PAM sequence: TTAAGATT
  source 1..20: mol_type = other DNA
aggcttttgtctcacagctc

SEQ ID NO: 12314 - DNA, 20 bp, synthetic construct
  misc_feature 1..20: note = Description of Artificial Sequence: Synthetic oligonucleotide
  misc_feature 1..20: note = Target: SCN10A; (+) strand; PAM type: NNNNGHTT; PAM sequence: TTGAGCTT
  source 1..20: mol_type = other DNA
acacatttcagaggtattct

SEQ ID NO: 12315 - DNA, 20 bp, synthetic construct
  misc_feature 1..20: note = Description of Artificial Sequence: Synthetic oligonucleotide
  misc_feature 1..20: note = Target: SCN10A; (+) strand; PAM type: NNNNGHTT; PAM sequence: GGAAGTTT
  source 1..20: mol_type = other DNA
tatatttctaacaaggccag

SEQ ID NO: 12316 - DNA, 20 bp, synthetic construct
  misc_feature 1..20: note = Description of Artificial Sequence: Synthetic oligonucleotide
  misc_feature 1..20: note = Target: SCN10A; (+) strand; PAM type: NNNNGHTT; PAM sequence: ATAAGTTT
  source 1..20: mol_type = other DNA
ttcctcaattattccctcaa

SEQ ID NO: 12317 - DNA, 20 bp, synthetic construct
  misc_feature 1..20: note = Description of Artificial Sequence: Synthetic oligonucleotide
  misc_feature 1..20: note = Target: SCN10A; (+) strand; PAM type: NNNNGHTT; PAM sequence: TTTAGATT
  source 1..20: mol_type = other DNA
tcaaataagttttccaaact

SEQ ID NO: 12318 - DNA, 20 bp, synthetic construct
  misc_feature 1..20: note = Description of Artificial Sequence: Synthetic oligonucleotide
  misc_feature 1..20: note = Target: SCN10A; (+) strand; PAM type: NNNNGHTT; PAM sequence: TTAGGTTT
  source 1..20: mol_type = other DNA
cttgggaacacccattattc

SEQ ID NO: 12319 - DNA, 20 bp, synthetic construct
  misc_feature 1..20: note = Description of Artificial Sequence: Synthetic oligonucleotide
  misc_feature 1..20: note = Target: SCN10A; (+) strand; PAM type: NNNNGHTT; PAM sequence: GGTTGTTT
  source 1..20: mol_type = other DNA
cacccattattcttaggttt

SEQ ID NO: 12320 - DNA, 20 bp, synthetic construct
  misc_feature 1..20: note = Description of Artificial Sequence: Synthetic oligonucleotide
  misc_feature 1..20: note = Target: SCN10A; (+) strand; PAM type: NNNNGHTT; PAM sequence: ACATGATT
  source 1..20: mol_type = other DNA
ttcttaggtttggttgtttc

SEQ ID NO: 12321 - DNA, 20 bp, synthetic construct
  misc_feature 1..20: note = Description of Artificial Sequence: Synthetic oligonucleotide
  misc_feature 1..20: note = Target: SCN10A; (+) strand; PAM type: NNNNGHTT; PAM sequence: GGCCGATT
  source 1..20: mol_type = other DNA
cacatgattccaaatttatt

SEQ ID NO: 12322 - DNA, 20 bp, synthetic construct
  misc_feature 1..20: note = Description of Artificial Sequence: Synthetic oligonucleotide
  misc_feature 1..20: note = Target: SCN10A; (+) strand; PAM type: NNNNGHTT; PAM sequence: CTTAGTTT
  source 1..20: mol_type = other DNA
aattctttctttttgtgtgt

SEQ ID NO: 12323 - DNA, 20 bp, synthetic construct
  misc_feature 1..20: note = Description of Artificial Sequence: Synthetic oligonucleotide
  misc_feature 1..20: note = Target: SCN10A; (+) strand; PAM type: NNNNGHTT; PAM sequence: AAAAGCTT
  source 1..20: mol_type = other DNA
tgtcttagtttgggtctatt

SEQ ID NO: 12324 - DNA, 20 bp, synthetic construct
  misc_feature 1..20: note = Description of Artificial Sequence: Synthetic oligonucleotide
  misc_feature 1..20: note = Target: SCN10A; (+) strand; PAM type: NNNNGHTT; PAM sequence: TTGTGATT
  source 1..20: mol_type = other DNA
gagtcttccatttccagaag

SEQ ID NO: 12325 - DNA, 20 bp, synthetic construct
  misc_feature 1..20: note = Description of Artificial Sequence: Synthetic oligonucleotide
  misc_feature 1..20: note = Target: SCN10A; (+) strand; PAM type: NNNNGHTT; PAM sequence: GATTGTTT
  source 1..20: mol_type = other DNA
cttccatttccagaagttgt

SEQ ID NO: 12326 - DNA, 20 bp, synthetic construct
  misc_feature 1..20: note = Description of Artificial Sequence: Synthetic oligonucleotide
  misc_feature 1..20: note = Target: SCN10A; (+) strand; PAM type: NNNNGHTT; PAM sequence: TGTTGTTT
  source 1..20: mol_type = other DNA
agaattttccatccatatct

SEQ ID NO: 12327 - DNA, 20 bp, synthetic construct
  misc_feature 1..20: note = Description of Artificial Sequence: Synthetic oligonucleotide
  misc_feature 1..20: note = Target: SCN10A; (+) strand; PAM type: NNNNGHTT; PAM sequence: GTTGGTTT
  source 1..20: mol_type = other DNA
tgttttaaaaatttctttaa

SEQ ID NO: 12328 - DNA, 20 bp, synthetic construct
  misc_feature 1..20: note = Description of Artificial Sequence: Synthetic oligonucleotide
  misc_feature 1..20: note = Target: SCN10A; (+) strand; PAM type: NNNNGHTT; PAM sequence: GATGGATT
  source 1..20: mol_type = other DNA
tcttttttttttttttttga

SEQ ID NO: 12329 - DNA, 20 bp, synthetic construct
  misc_feature 1..20: note = Description of Artificial Sequence: Synthetic oligonucleotide
  misc_feature 1..20: note = Target: SCN10A; (+) strand; PAM type: NNNNGHTT; PAM sequence: CTGGGATT
  source 1..20: mol_type = other DNA
tgcctcagtctcctgagtag

SEQ ID NO: 12330 - DNA, 20 bp, synthetic construct
  misc_feature 1..20: note = Description of Artificial Sequence: Synthetic oligonucleotide
  misc_feature 1..20: note = Target: SCN10A; (+) strand; PAM type: NNNNGHTT; PAM sequence: CGGGGTTT
  source 1..20: mol_type = other DNA
tttgtattttttagtagaga

SEQ ID NO: 12331 - DNA, 20 bp, synthetic construct
  misc_feature 1..20: note = Description of Artificial Sequence: Synthetic oligonucleotide
  misc_feature 1..20: note = Target: SCN10A; (+) strand; PAM type: NNNNGHTT; PAM sequence: GTTGGCTT
  source 1..20: mol_type = other DNA
tagagacggggtttctccat

SEQ ID NO: 12332 - DNA, 20 bp, synthetic construct
  misc_feature 1..20: note = Description of Artificial Sequence: Synthetic oligonucleotide
  misc_feature 1..20: note = Target: SCN10A; (+) strand; PAM type: NNNNGHTT; PAM sequence: CTGAGATT
  source 1..20: mol_type = other DNA
caccttggcctcccaaagtg

SEQ ID NO: 12333 - DNA, 20 bp, synthetic construct
  misc_feature 1..20: note = Description of Artificial Sequence: Synthetic oligonucleotide
  misc_feature 1..20: note = Target: SCN10A; (+) strand; PAM type: NNNNGHTT; PAM sequence: CAGAGATT
  source 1..20: mol_type = other DNA
gaattctttatctggcaatt

SEQ ID NO: 12334 - DNA, 20 bp, synthetic construct
  misc_feature 1..20: note = Description of Artificial Sequence: Synthetic oligonucleotide
  misc_feature 1..20: note = Target: SCN10A; (+) strand; PAM type: NNNNGHTT; PAM sequence: CTTAGTTT
  source 1..20: mol_type = other DNA
tggcaattcagagatttctt

SEQ ID NO: 12335 - DNA, 20 bp, synthetic construct
  misc_feature 1..20: note = Description of Artificial Sequence: Synthetic oligonucleotide
  misc_feature 1..20: note = Target: SCN10A; (+) strand; PAM type: NNNNGHTT; PAM sequence: GCTAGTTT
  source 1..20: mol_type = other DNA
tttggatccattgttgggga

SEQ ID NO: 12336 - DNA, 20 bp, synthetic construct
  misc_feature 1..20: note = Description of Artificial Sequence: Synthetic oligonucleotide
  misc_feature 1..20: note = Target: SCN10A; (+) strand; PAM type: NNNNGHTT; PAM sequence: AATTGCTT
  source 1..20: mol_type = other DNA
ctcttttgtcatattaccag

SEQ ID NO: 12337 - DNA, 20 bp, synthetic construct
  misc_feature 1..20: note = Description of Artificial Sequence: Synthetic oligonucleotide
  misc_feature 1..20: note = Target: SCN10A; (+) strand; PAM type: NNNNGHTT; PAM sequence: TGCAGATT
  source 1..20: mol_type = other DNA
ctggaactgaatggctgttg

SEQ ID NO: 12338 - DNA, 20 bp, synthetic construct
  misc_feature 1..20: note = Description of Artificial Sequence: Synthetic oligonucleotide
  misc_feature 1..20: note = Target: SCN10A; (+) strand; PAM type: NNNNGHTT; PAM sequence: TTTTGTTT
  source 1..20: mol_type = other DNA
aatggctgttgtgcagattc

SEQ ID NO: 12339 - DNA, 20 bp, synthetic construct
  misc_feature 1..20: note = Description of Artificial Sequence: Synthetic oligonucleotide
  misc_feature 1..20: note = Target: SCN10A; (+) strand; PAM type: NNNNGHTT; PAM sequence: TGGGGCTT
  source 1..20: mol_type = other DNA
tctccccaatcccctgggga

SEQ ID NO: 12340 - DNA, 20 bp, synthetic construct
  misc_feature 1..20: note = Description of Artificial Sequence: Synthetic oligonucleotide
  misc_feature 1..20: note = Target: SCN10A; (+) strand; PAM type: NNNNGHTT; PAM sequence: ATGTGATT
  source 1..20: mol_type = other DNA
atgcctgcaagagtcctgtg

SEQ ID NO: 12341 - DNA, 20 bp, synthetic construct
  misc_feature 1..20: note = Description of Artificial Sequence: Synthetic oligonucleotide
  misc_feature 1..20: note = Target: SCN10A; (+) strand; PAM type: NNNNGHTT; PAM sequence: GATAGATT
  source 1..20: mol_type = other DNA
tgtgagagtcctaggctgta

SEQ ID NO: 12342 - DNA, 20 bp, synthetic construct
  misc_feature 1..20: note = Description of Artificial Sequence: Synthetic oligonucleotide
  misc_feature 1..20: note = Target: SCN10A; (+) strand; PAM type: NNNNGHTT; PAM sequence: GCTGGCTT
  source 1..20: mol_type = other DNA
gctgtagatagatttagtgt

SEQ ID NO: 12343 - DNA, 20 bp, synthetic construct
  misc_feature 1..20: note = Description of Artificial Sequence: Synthetic oligonucleotide
  misc_feature 1..20: note = Target: SCN10A; (+) strand; PAM type: NNNNGHTT; PAM sequence: TGTTGTTT
  source 1..20: mol_type = other DNA
ttgcaggcagtgcaactggt

SEQ ID NO: 12344 - DNA, 20 bp, synthetic construct
  misc_feature 1..20: note = Description of Artificial Sequence: Synthetic oligonucleotide
  misc_feature 1..20: note = Target: SCN10A; (+) strand; PAM type: NNNNGHTT; PAM sequence: AGTTGCTT
  source 1..20: mol_type = other DNA
atcaaagttattctgtcatg

SEQ ID NO: 12345 - DNA, 20 bp, synthetic construct
  misc_feature 1..20: note = Description of Artificial Sequence: Synthetic oligonucleotide
  misc_feature 1..20: note = Target: SCN10A; (+) strand; PAM type: NNNNGHTT; PAM sequence: AGCTGTTT
  source 1..20: mol_type = other DNA
tgagttgctttaatggcctg

SEQ ID NO: 12346 - DNA, 20 bp, synthetic construct
  misc_feature 1..20: note = Description of Artificial Sequence: Synthetic oligonucleotide
  misc_feature 1..20: note = Target: SCN10A; (+) strand; PAM type: NNNNGHTT; PAM sequence: TGATGCTT
  source 1..20: mol_type = other DNA
tttgacctccagccggtagg

SEQ ID NO: 12347 - DNA, 20 bp, synthetic construct
  misc_feature 1..20: note = Description of Artificial Sequence: Synthetic oligonucleotide
  misc_feature 1..20: note = Target: SCN10A; (+) strand; PAM type: NNNNGHTT; PAM sequence: TTTAGTTT
  source 1..20: mol_type = other DNA
aagttggccagggtaaatat

SEQ ID NO: 12348 - DNA, 20 bp, synthetic construct
  misc_feature 1..20: note = Description of Artificial Sequence: Synthetic oligonucleotide
  misc_feature 1..20: note = Target: SCN10A; (+) strand; PAM type: NNNNGHTT; PAM sequence: TAAAGCTT
  source 1..20: mol_type = other DNA
ttaggtgatgagcagggcca

SEQ ID NO: 12349 - DNA, 20 bp, synthetic construct
  misc_feature 1..20: note = Description of Artificial Sequence: Synthetic oligonucleotide
  misc_feature 1..20: note = Target: SCN10A; (+) strand; PAM type: NNNNGHTT; PAM sequence: GAGAGTTT
  source 1..20: mol_type = other DNA
agcagggccataaagcttcc

SEQ ID NO: 12350 - DNA, 20 bp, synthetic construct
  misc_feature 1..20: note = Description of Artificial Sequence: Synthetic oligonucleotide
  misc_feature 1..20: note = Target: SCN10A; (+) strand; PAM type: NNNNGHTT; PAM sequence: CTGGGTTT
  source 1..20: mol_type = other DNA
cataaagcttccgagagttt

SEQ ID NO: 12351 - DNA, 20 bp, synthetic construct
  misc_feature 1..20: note = Description of Artificial Sequence: Synthetic oligonucleotide
  misc_feature 1..20: note = Target: SCN10A; (+) strand; PAM type: NNNNGHTT; PAM sequence: TAGGGATT
  source 1..20: mol_type = other DNA
agactcagacccttcttggg

SEQ ID NO: 12352 - DNA, 20 bp, synthetic construct
  misc_feature 1..20: note = Description of Artificial Sequence: Synthetic oligonucleotide
  misc_feature 1..20: note = Target: SCN10A; (+) strand; PAM type: NNNNGHTT; PAM sequence: GTGAGCTT
  source 1..20: mol_type = other DNA
ctcagaccttgccccaggct

SEQ ID NO: 12353 - DNA, 20 bp, synthetic construct
  misc_feature 1..20: note = Description of Artificial Sequence: Synthetic oligonucleotide
  misc_feature 1..20: note = Target: SCN10A; (+) strand; PAM type: NNNNGHTT; PAM sequence: GTCTGCTT
  source 1..20: mol_type = other DNA
tttggaccgcatccctcact

SEQ ID NO: 12354 - DNA, 20 bp, synthetic construct
  misc_feature 1..20: note = Description of Artificial Sequence: Synthetic oligonucleotide
  misc_feature 1..20: note = Target: SCN10A; (+) strand; PAM type: NNNNGHTT; PAM sequence: CCTGGATT
  source 1..20: mol_type = other DNA
cttgcagttcccatttgccc

SEQ ID NO: 12355 - DNA, 20 bp, synthetic construct
  misc_feature 1..20: note = Description of Artificial Sequence: Synthetic oligonucleotide
  misc_feature 1..20: note = Target: SCN10A; (+) strand; PAM type: NNNNGHTT; PAM sequence: CCCTGATT
  source 1..20: mol_type = other DNA
tctttcatcctgtgacccct

SEQ ID NO: 12356 - DNA, 20 bp, synthetic construct
  misc_feature 1..20: note = Description of Artificial Sequence: Synthetic oligonucleotide
  misc_feature 1..20: note = Target: SCN10A; (+) strand; PAM type: NNNNGHTT; PAM sequence: GATGGATT
  source 1..20: mol_type = other DNA
gcctgtgagacatagtcagg

SEQ ID NO: 12357 - DNA, 20 bp, synthetic construct
  misc_feature 1..20: note = Description of Artificial Sequence: Synthetic oligonucleotide
  misc_feature 1..20: note = Target: SCN10A; (+) strand; PAM type: NNNNGHTT; PAM sequence: TGCTGTTT
  source 1..20: mol_type = other DNA
gcctacaaggcacttccctt

SEQ ID NO: 12358 - DNA, 20 bp, synthetic construct
  misc_feature 1..20: note = Description of Artificial Sequence: Synthetic oligonucleotide
  misc_feature 1..20: note = Target: SCN10A; (+) strand; PAM type: NNNNGHTT; PAM sequence: TGTGGCTT
  source 1..20: mol_type = other DNA
gtttctacttttatattttg

SEQ ID NO: 12359 - DNA, 20 bp, synthetic construct
  misc_feature 1..20: note = Description of Artificial Sequence: Synthetic oligonucleotide
  misc_feature 1..20: note = Target: SCN10A; (+) strand; PAM type: NNNNGHTT; PAM sequence: TCTGGATT
  source 1..20: mol_type = other DNA
ggtaaattcttctcctgtga

SEQ ID NO: 12360 - DNA, 20 bp, synthetic construct
  misc_feature 1..20: note = Description of Artificial Sequence: Synthetic oligonucleotide
  misc_feature 1..20: note = Target: SCN10A; (+) strand; PAM type: NNNNGHTT; PAM sequence: TTCAGATT
  source 1..20: mol_type = other DNA
cttctcctgtgatctggatt

SEQ ID NO: 12361 - DNA, 20 bp, synthetic construct
  misc_feature 1..20: note = Description of Artificial Sequence: Synthetic oligonucleotide
  misc_feature 1..20: note = Target: SCN10A; (+) strand; PAM type: NNNNGHTT; PAM sequence: GTATGTTT
  source 1..20: mol_type = other DNA
tcagattacccagttgggat

SEQ ID NO: 12362 - DNA, 20 bp, synthetic construct
  misc_feature 1..20: note = Description of Artificial Sequence: Synthetic oligonucleotide
  misc_feature 1..20: note = Target: SCN10A; (+) strand; PAM type: NNNNGHTT; PAM sequence: GCAGGTTT
  source 1..20: mol_type = other DNA
gttgggatgtatgtttggag

SEQ ID NO: 12363 - DNA, 20 bp, synthetic construct
  misc_feature 1..20: note = Description of Artificial Sequence: Synthetic oligonucleotide
  misc_feature 1..20: note = Target: SCN10A; (+) strand; PAM type: NNNNGHTT; PAM sequence: CACAGTTT
  source 1..20: mol_type = other DNA
cccctcacactttgggagct

SEQ ID NO: 12364 - DNA, 20 bp, synthetic construct
  misc_feature 1..20: note = Description of Artificial Sequence: Synthetic oligonucleotide
  misc_feature 1..20: note = Target: SCN10A; (+) strand; PAM type: NNNNGHTT; PAM sequence: CAAGGCTT
  source 1..20: mol_type = other DNA
cctcttgccagtatctttat

SEQ ID NO: 12365 - DNA, 20 bp, synthetic construct
  misc_feature 1..20: note = Description of Artificial Sequence: Synthetic oligonucleotide
  misc_feature 1..20: note = Target: SCN10A; (+) strand; PAM type: NNNNGHTT; PAM sequence: AGCAGCTT
  source 1..20: mol_type = other DNA
tgtgtgtggctgggacagcc

SEQ ID NO: 12366 - DNA, 20 bp, synthetic construct
  misc_feature 1..20: note = Description of Artificial Sequence: Synthetic oligonucleotide
  misc_feature 1..20: note = Target: SCN10A; (+) strand; PAM type: NNNNGHTT; PAM sequence: CAAGGATT
  source 1..20: mol_type = other DNA
gggcagtagcgggtgaagag

SEQ ID NO: 12367 - DNA, 20 bp, synthetic construct
  misc_feature 1..20: note = Description of Artificial Sequence: Synthetic oligonucleotide
  misc_feature 1..20: note = Target: SCN10A; (+) strand; PAM type: NNNNGHTT; PAM sequence: TCCTGTTT
  source 1..20: mol_type = other DNA
cgggtgaagagcaaggattc

SEQ ID NO: 12368 - DNA, 20 bp, synthetic construct
  misc_feature 1..20: note = Description of Artificial Sequence: Synthetic oligonucleotide
  misc_feature 1..20: note = Target: SCN10A; (+) strand; PAM type: NNNNGHTT; PAM sequence: CCCAGTTT
  source 1..20: mol_type = other DNA
tggaggctcatctaaaaact

SEQ ID NO: 12369 - DNA, 20 bp, synthetic construct
  misc_feature 1..20: note = Description of Artificial Sequence: Synthetic oligonucleotide
  misc_feature 1..20: note = Target: SCN10A; (+) strand; PAM type: NNNNGHTT; PAM sequence: AACTGCTT
  source 1..20: mol_type = other DNA
gctatgctgcagagccccag

SEQ ID NO: 12370 - DNA, 20 bp, synthetic construct
  misc_feature 1..20: note = Description of Artificial Sequence: Synthetic oligonucleotide
  misc_feature 1..20: note = Target: SCN10A; (+) strand; PAM type: NNNNGHTT; PAM sequence: CAAGGTTT
  source 1..20: mol_type = other DNA
atgctaagtatctctgaaag

SEQ ID NO: 12371 - DNA, 20 bp, synthetic construct
  misc_feature 1..20: note = Description of Artificial Sequence: Synthetic oligonucleotide
  misc_feature 1..20: note = Target: SCN10A; (+) strand; PAM type: NNNNGHTT; PAM sequence: AATTGCTT
  source 1..20: mol_type = other DNA
gtgataagtagggctgaaag

SEQ ID NO: 12372 - DNA, 20 bp, synthetic construct
  misc_feature 1..20: note = Description of Artificial Sequence: Synthetic oligonucleotide
  misc_feature 1..20: note = Target: SCN10A; (+) strand; PAM type: NNNNGHTT; PAM sequence: GAAAGTTT
  source 1..20: mol_type = other DNA
tagggctgaaagaattgctt

SEQ ID NO: 12373 - DNA, 20 bp, synthetic construct
  misc_feature 1..20: note = Description of Artificial Sequence: Synthetic oligonucleotide
  misc_feature 1..20: note = Target: SCN10A; (+) strand; PAM type: NNNNGHTT; PAM sequence: TTGAGCTT
  source 1..20: mol_type = other DNA
aagttttttacaggaaccag

SEQ ID NO: 12374 - DNA, 20 bp, synthetic construct
  misc_feature 1..20: note = Description of Artificial Sequence: Synthetic oligonucleotide
  misc_feature 1..20: note = Target: SCN10A; (+) strand; PAM type: NNNNGHTT; PAM sequence: TGCTGCTT
  source 1..20: mol_type = other DNA
aaccagttgagctttctaga

SEQ ID NO: 12375 - DNA, 20 bp, synthetic construct
  misc_feature 1..20: note = Description of Artificial Sequence: Synthetic oligonucleotide
  misc_feature 1..20: note = Target: SCN10A; (+) strand; PAM type: NNNNGHTT; PAM sequence: AACTGTTT
  source 1..20: mol_type = other DNA
atgccatccattcaatgaga

SEQ ID NO: 12376 - DNA, 20 bp, synthetic construct
  misc_feature 1..20: note = Description of Artificial Sequence: Synthetic oligonucleotide
  misc_feature 1..20: note = Target: SCN10A; (+) strand; PAM type: NNNNGHTT; PAM sequence: AATGGATT
  source 1..20: mol_type = other DNA
gaaactgtttctgctccaga

SEQ ID NO: 12377 - DNA, 20 bp, synthetic construct
  misc_feature 1..20: note = Description of Artificial Sequence: Synthetic oligonucleotide
  misc_feature 1..20: note = Target: SCN10A; (+) strand; PAM type: NNNNGHTT; PAM sequence: AAAAGTTT
  source 1..20: mol_type = other DNA
actgaaaaatgcatataaag

SEQ ID NO: 12378 - DNA, 20 bp, synthetic construct
  misc_feature 1..20: note = Description of Artificial Sequence: Synthetic oligonucleotide
  misc_feature 1..20: note = Target: SCN10A; (+) strand; PAM type: NNNNGHTT; PAM sequence: TTAAGTTT
  source 1..20: mol_type = other DNA
ctattcacttctgctcctcg

SEQ ID NO: 12379 - DNA, 20 bp, synthetic construct
  misc_feature 1..20: note = Description of Artificial Sequence: Synthetic oligonucleotide
  misc_feature 1..20: note = Target: SCN10A; (+) strand; PAM type: NNNNGHTT; PAM sequence: TCTGGTTT
  source 1..20: mol_type = other DNA
gttaagtttccagaagataa

SEQ ID NO: 12380 - DNA, 20 bp, synthetic construct
  misc_feature 1..20: note = Description of Artificial Sequence: Synthetic oligonucleotide
  misc_feature 1..20: note = Target: SCN10A; (+) strand; PAM type: NNNNGHTT; PAM sequence: GGATGCTT
  source 1..20: mol_type = other DNA
aggagcatcaggaatttgaa

SEQ ID NO: 12381 - DNA, 20 bp, synthetic construct
  misc_feature 1..20: note = Description of Artificial Sequence: Synthetic oligonucleotide
  misc_feature 1..20: note = Target: SCN10A; (+) strand; PAM type: NNNNGHTT; PAM sequence: GGCAGATT
  source 1..20: mol_type = other DNA
cactttgggaggccgaggcg

SEQ ID NO: 12382 - DNA, 20 bp, synthetic construct
  misc_feature 1..20: note = Description of Artificial Sequence: Synthetic oligonucleotide
  misc_feature 1..20: note = Target: SCN10A; (+) strand; PAM type: NNNNGHTT; PAM sequence: CGGAGCTT
  source 1..20: mol_type = other DNA
aatggcgtgaacccgggagg

SEQ ID NO: 12383 - DNA, 20 bp, synthetic construct
  misc_feature 1..20: note = Description of Artificial Sequence: Synthetic oligonucleotide
  misc_feature 1..20: note = Target: SCN10A; (+) strand; PAM type: NNNNGHTT; PAM sequence: TAAAGTTT
  source 1..20: mol_type = other DNA
ctaataggcggacttgtaaa

SEQ ID NO: 12384 - DNA, 20 bp, synthetic construct
  misc_feature 1..20: note = Description of Artificial Sequence: Synthetic oligonucleotide
  misc_feature 1..20: note = Target: SCN10A; (+) strand; PAM type: NNNNGHTT; PAM sequence: AAAAGTTT
  source 1..20: mol_type = other DNA
gaaatggataggaagtgata

SEQ ID NO: 12385 - DNA, 20 bp, synthetic construct
  misc_feature 1..20: note = Description of Artificial Sequence: Synthetic oligonucleotide
  misc_feature 1..20: note = Target: SCN10A; (+) strand; PAM type: NNNNGHTT; PAM sequence: TATTGTTT
  source 1..20: mol_type = other DNA
gagaatcagactaggaggta

SEQ ID NO: 12386 - DNA, 20 bp, synthetic construct
  misc_feature 1..20: note = Description of Artificial Sequence: Synthetic oligonucleotide
  misc_feature 1..20: note = Target: SCN10A; (+) strand; PAM type: NNNNGHTT; PAM sequence: AGGAGTTT
  source 1..20: mol_type = other DNA
caggaggatcacttgaaccc

SEQ ID NO: 12387 - DNA, 20 bp, synthetic construct
  misc_feature 1..20: note = Description of Artificial Sequence: Synthetic oligonucleotide
  misc_feature 1..20: note = Target: SCN10A; (+) strand; PAM type: NNNNGHTT; PAM sequence: CTGTGATT
  source 1..20: mol_type = other DNA
cagaagatgaagtactctag

SEQ ID NO: 12388 - DNA, 20 bp, synthetic construct
  misc_feature 1..20: note = Description of Artificial Sequence: Synthetic oligonucleotide
  misc_feature 1..20: note = Target: SCN10A; (+) strand; PAM type: NNNNGHTT; PAM sequence: AAGAGTTT
  source 1..20: mol_type = other DNA
caacaattaaacatctggag

SEQ ID NO: 12389 - DNA, 20 bp, synthetic construct
  misc_feature 1..20: note = Description of Artificial Sequence: Synthetic oligonucleotide
  misc_feature 1..20: note = Target: SCN10A; (+) strand; PAM type: NNNNGHTT; PAM sequence: CAGTGTTT
  source 1..20: mol_type = other DNA
ctgcatgacacagctgtaaa

SEQ ID NO: 12390 - DNA, 20 bp, synthetic construct
  misc_feature 1..20: note = Description of Artificial Sequence: Synthetic oligonucleotide
  misc_feature 1..20: note = Target: SCN10A; (+) strand; PAM type: NNNNGHTT; PAM sequence: TGAAGATT
  source 1..20: mol_type = other DNA
atattatctgatgatctaac

SEQ ID NO: 12391 - DNA, 20 bp, synthetic construct
  misc_feature 1..20: note = Description of Artificial Sequence: Synthetic oligonucleotide
  misc_feature 1..20: note = Target: SCN10A; (+) strand; PAM type: NNNNGHTT; PAM sequence: ATGAGTTT
  source 1..20: mol_type = other DNA
gaagatgagggtgagaggaa

SEQ ID NO: 12392 - DNA, 20 bp, synthetic construct
  misc_feature 1..20: note = Description of Artificial Sequence: Synthetic oligonucleotide
  misc_feature 1..20: note = Target: SCN10A; (+) strand; PAM type: NNNNGHTT; PAM sequence: TTAAGTTT
  source 1..20: mol_type = other DNA
atgagtttgtggatgtggcc

SEQ ID NO: 12393 - DNA, 20 bp, synthetic construct
  misc_feature 1..20: note = Description of Artificial Sequence: Synthetic oligonucleotide
  misc_feature 1..20: note = Target: SCN10A; (+) strand; PAM type: NNNNGHTT; PAM sequence: TGCTGTTT
  source 1..20: mol_type = other DNA
agagatgagaaaaatgaaat

SEQ ID NO: 12394 - DNA, 20 bp, synthetic construct
  misc_feature 1..20: note = Description of Artificial Sequence: Synthetic oligonucleotide
  misc_feature 1..20: note = Target: SCN10A; (+) strand; PAM type: NNNNGHTT; PAM sequence: TCGTGTTT
  source 1..20: mol_type = other DNA
cacatctgtgagaggagaaa

SEQ ID NO: 12395 - DNA, 20 bp, synthetic construct
  misc_feature 1..20: note = Description of Artificial Sequence: Synthetic oligonucleotide
  misc_feature 1..20: note = Target: SCN10A; (+) strand; PAM type: NNNNGHTT; PAM sequence: AGCTGCTT
  source 1..20: mol_type = other DNA
gaatctatatctggttgcat

SEQ ID NO: 12396 - DNA, 20 bp, synthetic construct
  misc_feature 1..20: note = Description of Artificial Sequence: Synthetic oligonucleotide
  misc_feature 1..20: note = Target: SCN10A; (+) strand; PAM type: NNNNGHTT; PAM sequence: GTCAGCTT
  source 1..20: mol_type = other DNA
gttgcatagctgcttgagct

SEQ ID NO: 12397 - DNA, 20 bp, synthetic construct
  misc_feature 1..20: note = Description of Artificial Sequence: Synthetic oligonucleotide
  misc_feature 1..20: note = Target: SCN10A; (+) strand; PAM type: NNNNGHTT; PAM sequence: GTTGGTTT
  source 1..20: mol_type = other DNA
gctgtcagcttccatatctt

SEQ ID NO: 12398 - DNA, 20 bp, synthetic construct
  misc_feature 1..20: note = Description of Artificial Sequence: Synthetic oligonucleotide
  misc_feature 1..20: note = Target: SCN10A; (+) strand; PAM type: NNNNGHTT; PAM sequence: TTATGTTT
  source 1..20: mol_type = other DNA
tggtttcccccccacactct

SEQ ID NO: 12399 - DNA, 20 bp, synthetic construct
  misc_feature 1..20: note = Description of Artificial Sequence: Synthetic oligonucleotide
  misc_feature 1..20: note = Target: SCN10A; (+) strand; PAM type: NNNNGHTT; PAM sequence: GGAAGCTT
  source 1..20: mol_type = other DNA
ctcagaattataggttgttg

SEQ ID NO: 12400 - DNA, 20 bp, synthetic construct
  misc_feature 1..20: note = Description of Artificial Sequence: Synthetic oligonucleotide
  misc_feature 1..20: note = Target: SCN10A; (+) strand; PAM type: NNNNGHTT; PAM sequence: TCTGGTTT
  source 1..20: mol_type = other DNA
gggaagctttgatggatatt

SEQ ID NO: 12401 - DNA, 20 bp, synthetic construct
  misc_feature 1..20: note = Description of Artificial Sequence: Synthetic oligonucleotide
  misc_feature 1..20: note = Target: SCN10A; (+) strand; PAM type: NNNNGHTT; PAM sequence: CAGTGCTT
  source 1..20: mol_type = other DNA
tgctctctaaagactatttt

SEQ ID NO: 12402 - DNA, 20 bp, synthetic construct
  misc_feature 1..20: note = Description of Artificial Sequence: Synthetic oligonucleotide
  misc_feature 1..20: note = Target: SCN10A; (+) strand; PAM type: NNNNGHTT; PAM sequence: AAGTGCTT
  source 1..20: mol_type = other DNA
agcccaatgtgttatttcct

SEQ ID NO: 12403 - DNA, 20 bp, synthetic construct
  misc_feature 1..20: note = Description of Artificial Sequence: Synthetic oligonucleotide
  misc_feature 1..20: note = Target: SCN10A; (+) strand; PAM type: NNNNGHTT; PAM sequence: GTCTGATT
  source 1..20: mol_type = other DNA
gagccacttgcaccactgat

SEQ ID NO: 12404 - DNA, 20 bp, synthetic construct
  misc_feature 1..20: note = Description of Artificial Sequence: Synthetic oligonucleotide
  misc_feature 1..20: note = Target: SCN10A; (+) strand; PAM type: NNNNGHTT; PAM sequence: CAAAGATT
  source 1..20: mol_type = other DNA
cgatattcaggctctgaaaa

SEQ ID NO: 12405 - DNA, 20 bp, synthetic construct
  misc_feature 1..20: note = Description of Artificial Sequence: Synthetic oligonucleotide
  misc_feature 1..20: note = Target: SCN10A; (+) strand; PAM type: NNNNGHTT; PAM sequence: ATCAGTTT
  source 1..20: mol_type = other DNA
atgtacactaagtgaccaca

SEQ ID NO: 12406 - DNA, 20 bp, synthetic construct
  misc_feature 1..20: note = Description of Artificial Sequence: Synthetic oligonucleotide
  misc_feature 1..20: note = Target: SCN10A; (+) strand; PAM type: NNNNGHTT; PAM sequence: TGGAGTTT
  source 1..20: mol_type = other DNA
ttccttgctgaccatgtggc

SEQ ID NO: 12407 - DNA, 20 bp, synthetic construct
  misc_feature 1..20: note = Description of Artificial Sequence: Synthetic oligonucleotide
  misc_feature 1..20: note = Target: SCN10A; (+) strand; PAM type: NNNNGHTT; PAM sequence: AAAAGTTT
  source 1..20: mol_type = other DNA
acacctttcctcttttaaaa

SEQ ID NO: 12408 - DNA, 20 bp, synthetic construct
  misc_feature 1..20: note = Description of Artificial Sequence: Synthetic oligonucleotide
  misc_feature 1..20: note = Target: SCN10A; (+) strand; PAM type: NNNNGHTT; PAM sequence: ATCTGTTT
  source 1..20: mol_type = other DNA
attgtggaactatcaccact

SEQ ID NO: 12409 - DNA, 20 bp, synthetic construct
  misc_feature 1..20: note = Description of Artificial Sequence: Synthetic oligonucleotide
  misc_feature 1..20: note = Target: SCN10A; (+) strand; PAM type: NNNNGHTT; PAM sequence: TTGCGTTT
  source 1..20: mol_type = other DNA
atcatgcaacatttgttctt

SEQ ID NO: 12410 - DNA, 20 bp, synthetic construct
  misc_feature 1..20: note = Description of Artificial Sequence: Synthetic oligonucleotide
  misc_feature 1..20: note = Target: SCN10A; (+) strand; PAM type: NNNNGHTT; PAM sequence: CAATGCTT
  source 1..20: mol_type = other DNA
ttgagttattttacttagca

SEQ ID NO: 12411 - DNA, 20 bp, synthetic construct
  misc_feature 1..20: note = Description of Artificial Sequence: Synthetic oligonucleotide
  misc_feature 1..20: note = Target: SCN10A; (+) strand; PAM type: NNNNGHTT; PAM sequence: AATTGTTT
  source 1..20: mol_type = other DNA
tttaaaactgaatgatattc

SEQ ID NO: 12412 - DNA, 20 bp, synthetic construct
  misc_feature 1..20: note = Description of Artificial Sequence: Synthetic oligonucleotide
  misc_feature 1..20: note = Target: SCN10A; (+) strand; PAM type: NNNNGHTT; PAM sequence: GTCTGTTT
  source 1..20: mol_type = other DNA
aagccaacataccttttaaa

SEQ ID NO: 12413 - DNA, 20 bp, synthetic construct
  misc_feature 1..20: note = Description of Artificial Sequence: Synthetic oligonucleotide
  misc_feature 1..20: note = Target: SCN10A; (+) strand; PAM type: NNNNGHTT; PAM sequence: ATTAGCTT
  source 1..20: mol_type = other DNA
cagagagctcttcttttaaa

SEQ ID NO: 12414 - DNA, 20 bp, synthetic construct
  misc_feature 1..20: note = Description of Artificial Sequence: Synthetic oligonucleotide
  misc_feature 1..20: note = Target: SCN10A; (+) strand; PAM type: NNNNGHTT; PAM sequence: CATAGTTT
  source 1..20: mol_type = other DNA
atgctgacaacttacttatt

SEQ ID NO: 12415 - DNA, 20 bp, synthetic construct
  misc_feature 1..20: note = Description of Artificial Sequence: Synthetic oligonucleotide
  misc_feature 1..20: note = Target: SCN10A; (+) strand; PAM type: NNNNGHTT; PAM sequence: AATTGTTT
  source 1..20: mol_type = other DNA
tctaattaaggaattatacc

SEQ ID NO: 12416 - DNA, 20 bp, synthetic construct
  misc_feature 1..20: note = Description of Artificial Sequence: Synthetic oligonucleotide
  misc_feature 1..20: note = Target: SCN10A; (+) strand; PAM type: NNNNGHTT; PAM sequence: TCTTGTTT
  source 1..20: mol_type = other DNA
ggaattataccaattgtttt

SEQ ID NO: 12417 - DNA, 20 bp, synthetic construct
  misc_feature 1..20: note = Description of Artificial Sequence: Synthetic oligonucleotide
  misc_feature 1..20: note = Target: SCN10A; (+) strand; PAM type: NNNNGHTT; PAM sequence: AATTGATT
  source 1..20: mol_type = other DNA
tctccaaccacaatatttgt

SEQ ID NO: 12418 - DNA, 20 bp, synthetic construct
  misc_feature 1..20: note = Description of Artificial Sequence: Synthetic oligonucleotide
  misc_feature 1..20: note = Target: SCN10A; (+) strand; PAM type: NNNNGHTT; PAM sequence: ACTGGTTT
  source 1..20: mol_type = other DNA
tatttgtaattgatttggaa

SEQ ID NO: 12419 - DNA, 20 bp, synthetic construct
  misc_feature 1..20: note = Description of Artificial Sequence: Synthetic oligonucleotide
  misc_feature 1..20: note = Target: SCN10A; (+) strand; PAM type: NNNNGHTT; PAM sequence: TTGTGCTT
  source 1..20: mol_type = other DNA
tcttaccagcaggagtgcaa

SEQ ID NO: 12420 - DNA, 20 bp, synthetic construct
  misc_feature 1..20: note = Description of Artificial Sequence: Synthetic oligonucleotide
  misc_feature 1..20: note = Target: SCN10A; (+) strand; PAM type: NNNNGHTT; PAM sequence: TATAGTTT
  source 1..20: mol_type = other DNA
atgaggatgaatgatgactc

SEQ ID NO: 12421 - DNA, 20 bp, synthetic construct
  misc_feature 1..20: note = Description of Artificial Sequence: Synthetic oligonucleotide
  misc_feature 1..20: note = Target: SCN10A; (+) strand; PAM type: NNNNGHTT; PAM sequence: TTGTGCTT
  source 1..20: mol_type = other DNA
tatactgggaaagccttatt

SEQ ID NO: 12422 - DNA, 20 bp, synthetic construct
  misc_feature 1..20: note = Description of Artificial Sequence: Synthetic oligonucleotide
  misc_feature 1..20: note = Target: SCN10A; (+) strand; PAM type: NNNNGHTT; PAM sequence: ATTGGTTT
  source 1..20: mol_type = other DNA
gcttgtagtagagatattca

SEQ ID NO: 12423 - DNA, 20 bp, synthetic construct
  misc_feature 1..20: note = Description of Artificial Sequence: Synthetic oligonucleotide
  misc_feature 1..20: note = Target: SCN10A; (+) strand; PAM type: NNNNGHTT; PAM sequence: GGAAGTTT
  source 1..20: mol_type = other DNA
actttattggaaaataatat

SEQ ID NO: 12424 - DNA, 20 bp, synthetic construct
  misc_feature 1..20: note = Description of Artificial Sequence: Synthetic oligonucleotide
  misc_feature 1..20: note = Target: SCN10A; (+) strand; PAM type: NNNNGHTT; PAM sequence: GATAGCTT
  source 1..20: mol_type = other DNA
gaaaataatatggaagtttt

SEQ ID NO: 12425 - DNA, 20 bp, synthetic construct
  misc_feature 1..20: note = Description of Artificial Sequence: Synthetic oligonucleotide
  misc_feature 1..20: note = Target: SCN10A; (+) strand; PAM type: NNNNGHTT; PAM sequence: TCTGGTTT
  source 1..20: mol_type = other DNA
cattttcttatatatttttg

SEQ ID NO: 12426 - DNA, 20 bp, synthetic construct
  misc_feature 1..20: note = Description of Artificial Sequence: Synthetic oligonucleotide
  misc_feature 1..20: note = Target: SCN10A; (+) strand; PAM type: NNNNGHTT; PAM sequence: GGGAGATT
  source 1..20: mol_type = other DNA
atatatttttgtctggtttt

SEQ ID NO: 12427 - DNA, 20 bp, synthetic construct
  misc_feature 1..20: note = Description of Artificial Sequence: Synthetic oligonucleotide
  misc_feature 1..20: note = Target: SCN10A; (+) strand; PAM type: NNNNGHTT; PAM sequence: AACAGATT
  source 1..20: mol_type = other DNA
tatccacttgtctcatgaca

SEQ ID NO: 12428 - DNA, 20 bp, synthetic construct
  misc_feature 1..20: note = Description of Artificial Sequence: Synthetic oligonucleotide
  misc_feature 1..20: note = Target: SCN10A; (+) strand; PAM type: NNNNGHTT; PAM sequence: TCATGCTT
  source 1..20: mol_type = other DNA
ttgtctcatgacaaacagat

SEQ ID NO: 12429 - DNA, 20 bp, synthetic construct
  misc_feature 1..20: note = Description of Artificial Sequence: Synthetic oligonucleotide
  misc_feature 1..20: note = Target: SCN10A; (+) strand; PAM type: NNNNGHTT; PAM sequence: GTAGGATT
  source 1..20: mol_type = other DNA
ttgtgaccttatttcacatt

SEQ ID NO: 12430 - DNA, 20 bp, synthetic construct
  misc_feature 1..20: note = Description of Artificial Sequence: Synthetic oligonucleotide
  misc_feature 1..20: note = Target: SCN10A; (+) strand; PAM type: NNNNGHTT; PAM sequence: TTATGCTT
  source 1..20: mol_type = other DNA
ttctatttttatcattattg

SEQ ID NO: 12431 - DNA, 20 bp, synthetic construct
  misc_feature 1..20: note = Description of Artificial Sequence: Synthetic oligonucleotide
  misc_feature 1..20: note = Target: SCN10A; (+) strand; PAM type: NNNNGHTT; PAM sequence: CTATGATT
  source 1..20: mol_type = other DNA
cattagtcaagataaactgc

SEQ ID NO: 12432 - DNA, 20 bp, synthetic construct
  misc_feature 1..20: note = Description of Artificial Sequence: Synthetic oligonucleotide
  misc_feature 1..20: note = Target: SCN10A; (+) strand; PAM type: NNNNGHTT; PAM sequence: ATCAGTTT
  source 1..20: mol_type = other DNA
tgttaaccattatgaatgaa

SEQ ID NO: 12433 - DNA, 20 bp, synthetic construct
  misc_feature 1..20: note = Description of Artificial Sequence: Synthetic oligonucleotide
  misc_feature 1..20: note = Target: SCN10A; (+) strand; PAM type: NNNNGHTT; PAM sequence: CACTGTTT
  source 1..20: mol_type = other DNA
atcagtttttgaagcacata

SEQ ID NO: 12434 - DNA, 20 bp, synthetic construct
  misc_feature 1..20: note = Description of Artificial Sequence: Synthetic oligonucleotide
  misc_feature 1..20: note = Target: SCN10A; (+) strand; PAM type: NNNNGHTT; PAM sequence: GTTAGATT
  source 1..20: mol_type = other DNA
tataataattaatcttacat

SEQ ID NO: 12435 - DNA, 20 bp, synthetic construct
  misc_feature 1..20: note = Description of Artificial Sequence: Synthetic oligonucleotide
  misc_feature 1..20: note = Target: SCN10A; (+) strand; PAM type: NNNNGHTT; PAM sequence: GACAGTTT
  source 1..20: mol_type = other DNA
gagttggaacatcccaaagg

SEQ ID NO: 12436 - DNA, 20 bp, synthetic construct
  misc_feature 1..20: note = Description of Artificial Sequence: Synthetic oligonucleotide
  misc_feature 1..20: note = Target: SCN10A; (+) strand; PAM type: NNNNGHTT; PAM sequence: AGAAGATT
  source 1..20: mol_type = other DNA
ccaaagggacagtttatgaa

SEQ ID NO: 12437 - DNA, 20 bp, synthetic construct
  misc_feature 1..20: note = Description of Artificial Sequence: Synthetic oligonucleotide
  misc_feature 1..20: note = Target: SCN10A; (+) strand; PAM type: NNNNGHTT; PAM sequence: GTTAGTTT
  source 1..20: mol_type = other DNA
aaaaatagactaacaaacct

SEQ ID NO: 12438 - DNA, 20 bp, synthetic construct
  misc_feature 1..20: note = Description of Artificial Sequence: Synthetic oligonucleotide
  misc_feature 1..20: note = Target: SCN10A; (+) strand; PAM type: NNNNGHTT; PAM sequence: TACAGATT
  source 1..20: mol_type = other DNA
gactaacaaacctgttagtt

SEQ ID NO: 12439 - DNA, 20 bp, synthetic construct
  misc_feature 1..20: note = Description of Artificial Sequence: Synthetic oligonucleotide
  misc_feature 1..20: note = Target: SCN10A; (+) strand; PAM type: NNNNGHTT; PAM sequence: CATAGCTT
  source 1..20: mol_type = other DNA
aaaataaatatgctcactgt

SEQ ID NO: 12440 - DNA, 20 bp, synthetic construct
  misc_feature 1..20: note = Description of Artificial Sequence: Synthetic oligonucleotide
  misc_feature 1..20: note = Target: SCN10A; (+) strand; PAM type: NNNNGHTT; PAM sequence: ACAAGTTT
  source 1..20: mol_type = other DNA
taagaatcataaaggaagaa

SEQ ID NO: 12441 - DNA, 20 bp, synthetic construct
  misc_feature 1..20: note = Description of Artificial Sequence: Synthetic oligonucleotide
  misc_feature 1..20: note = Target: SCN10A; (+) strand; PAM type: NNNNGHTT; PAM sequence: GACAGTTT
  source 1..20: mol_type = other DNA
atagaaattaataatattaa

SEQ ID NO: 12442 - DNA, 20 bp, synthetic construct
  misc_feature 1..20: note = Description of Artificial Sequence: Synthetic oligonucleotide
  misc_feature 1..20: note = Target: SCN10A; (+) strand; PAM type: NNNNGHTT; PAM sequence: GAAGGCTT
  source 1..20: mol_type = other DNA
tctgccatactgatgtgtgg

SEQ ID NO: 12443 - DNA, 20 bp, synthetic construct
  misc_feature 1..20: note = Description of Artificial Sequence: Synthetic oligonucleotide
  misc_feature 1..20: note = Target: SCN10A; (+) strand; PAM type: NNNNGHTT; PAM sequence: TGGCGATT
  source 1..20: mol_type = other DNA
aaggcttcgtattgtaaatg

SEQ ID NO: 12444 - DNA, 20 bp, synthetic construct
  misc_feature 1..20: note = Description of Artificial Sequence: Synthetic oligonucleotide
  misc_feature 1..20: note = Target: SCN10A; (+) strand; PAM type: NNNNGHTT; PAM sequence: CAAAGTTT
  source 1..20: mol_type = other DNA
caattcagtgcattaccaaa

SEQ ID NO: 12445 - DNA, 20 bp, synthetic construct
  misc_feature 1..20: note = Description of Artificial Sequence: Synthetic oligonucleotide
  misc_feature 1..20: note = Target: SCN10A; (+) strand; PAM type: NNNNGHTT; PAM sequence: ATGAGATT
  source 1..20: mol_type = other DNA
tgttgactcaggatgtgaca

SEQ ID NO: 12446 - DNA, 20 bp, synthetic construct
  misc_feature 1..20: note = Description of Artificial Sequence: Synthetic oligonucleotide
  misc_feature 1..20: note = Target: SCN10A; (+) strand; PAM type: NNNNGHTT; PAM sequence: AACAGATT
  source 1..20: mol_type = other DNA
acaatgagattactgggaga

SEQ ID NO: 12447 - DNA, 20 bp, synthetic construct
  misc_feature 1..20: note = Description of Artificial Sequence: Synthetic oligonucleotide
  misc_feature 1..20: note = Target: SCN10A; (+) strand; PAM type: NNNNGHTT; PAM sequence: AGGAGATT
  source 1..20: mol_type = other DNA
cacatacaaaaataaattct

SEQ ID NO: 12448 - DNA, 20 bp, synthetic construct
  misc_feature 1..20: note = Description of Artificial Sequence: Synthetic oligonucleotide
  misc_feature 1..20: note = Target: SCN10A; (+) strand; PAM type: NNNNGHTT; PAM sequence: CCCCGTTT
  source 1..20: mol_type = other DNA
gcagtgttaaacacccactt

SEQ ID NO: 12449 - DNA, 20 bp, synthetic construct
  misc_feature 1..20: note = Description of Artificial Sequence: Synthetic oligonucleotide
  misc_feature 1..20: note = Target: SCN10A; (+) strand; PAM type: NNNNGHTT; PAM sequence: AGTAGATT
  source 1..20: mol_type = other DNA
acacccacttccccgtttgc

SEQ ID NO: 12450 - DNA, 20 bp, synthetic construct
  misc_feature 1..20: note = Description of Artificial Sequence: Synthetic oligonucleotide
  misc_feature 1..20: note = Target: SCN10A; (+) strand; PAM type: NNNNGHTT; PAM sequence: TTCAGCTT
  source 1..20: mol_type = other DNA
acttccccgtttgcagtaga

SEQ ID NO: 12451 - DNA, 20 bp, synthetic construct
  misc_feature 1..20: note = Description of Artificial Sequence: Synthetic oligonucleotide
  misc_feature 1..20: note = Target: SCN10A; (+) strand; PAM type: NNNNGHTT; PAM sequence: AAAGGTTT
  source 1..20: mol_type = other DNA
ccaaattgctataatttgtc

SEQ ID NO: 12452 - DNA, 20 bp, synthetic construct
  misc_feature 1..20: note = Description of Artificial Sequence: Synthetic oligonucleotide
  misc_feature 1..20: note = Target: SCN10A; (+) strand; PAM type: NNNNGHTT; PAM sequence: TTATGCTT
  source 1..20: mol_type = other DNA
aaaggttttccagaatattg

SEQ ID NO: 12453 - DNA, 20 bp, synthetic construct
  misc_feature 1..20: note = Description of Artificial Sequence: Synthetic oligonucleotide
  misc_feature 1..20: note = Target: SCN10A; (+) strand; PAM type: NNNNGHTT; PAM sequence: CAATGATT
  source 1..20: mol_type = other DNA
gggtcatcaaagagcccctt

SEQ ID NO: 12454 - DNA, 20 bp, synthetic construct
  misc_feature 1..20: note = Description of Artificial Sequence: Synthetic oligonucleotide
  misc_feature 1..20: note = Target: SCN10A; (+) strand; PAM type: NNNNGHTT; PAM sequence: TCTAGTTT
  source 1..20: mol_type = other DNA
gcccaatctgaggaagaacc

SEQ ID NO: 12455 - DNA, 20 bp, synthetic construct
  misc_feature 1..20: note = Description of Artificial Sequence: Synthetic oligonucleotide
  misc_feature 1..20: note = Target: SCN10A; (+) strand; PAM type: NNNNGHTT; PAM sequence: AGGGGATT
  source 1..20: mol_type = other DNA
agtttcttcccaagcaaaag

SEQ ID NO: 12456 - DNA, 20 bp, synthetic construct
  misc_feature 1..20: note = Description of Artificial Sequence: Synthetic oligonucleotide
  misc_feature 1..20: note = Target: SCN10A; (+) strand; PAM type: NNNNGHTT; PAM sequence: TAATGTTT
  source 1..20: mol_type = other DNA
agcaggtaattgtgcaaagc

SEQ ID NO: 12457 - DNA, 20 bp, synthetic construct
  misc_feature 1..20: note = Description of Artificial Sequence: Synthetic oligonucleotide
  misc_feature 1..20: note = Target: SCN10A; (+) strand; PAM type: NNNNGHTT; PAM sequence: AAAAGATT
  source 1..20: mol_type = other DNA
gaagggagggaagataagga

SEQ ID NO: 12458 - DNA, 20 bp, synthetic construct
  misc_feature 1..20: note = Description of Artificial Sequence: Synthetic oligonucleotide
  misc_feature 1..20: note = Target: SCN10A; (+) strand; PAM type: NNNNGHTT; PAM sequence: ATAAGATT
  source 1..20: mol_type = other DNA
attgtgttaagaacatggca

SEQ ID NO: 12459 - DNA, 20 bp, synthetic construct
  misc_feature 1..20: note = Description of Artificial Sequence: Synthetic oligonucleotide
  misc_feature 1..20: note = Target: SCN10A; (+) strand; PAM type: NNNNGHTT; PAM sequence: ATTGGTTT
  source 1..20: mol_type = other DNA
gttaagaacatggcaataag

SEQ ID NO: 12460 - DNA, 20 bp, synthetic construct
  misc_feature 1..20: note = Description of Artificial Sequence: Synthetic oligonucleotide
  misc_feature 1..20: note = Target: SCN10A; (+) strand; PAM type: NNNNGHTT; PAM sequence: TTCTGATT
  source 1..20: mol_type = other DNA
aacatggcaataagattggt

SEQ ID NO: 12461 - DNA, 20 bp, synthetic construct
  misc_feature 1..20: note = Description of Artificial Sequence: Synthetic oligonucleotide
  misc_feature 1..20: note = Target: SCN10A; (+) strand; PAM type: NNNNGHTT; PAM sequence: TAATGCTT
  source 1..20: mol_type = other DNA
attcctcactggctacaatt

SEQ ID NO: 12462 - DNA, 20 bp, synthetic construct
  misc_feature 1..20: note = Description of Artificial Sequence: Synthetic oligonucleotide
  misc_feature 1..20: note = Target: SCN10A; (+) strand; PAM type: NNNNGHTT; PAM sequence: GTCTGATT
  source 1..20: mol_type = other DNA
catttcaaaaagaaaatcta

SEQ ID NO: 12463 - DNA, 20 bp, synthetic construct
  misc_feature 1..20: note = Description of Artificial Sequence: Synthetic oligonucleotide
  misc_feature 1..20: note = Target: SCN10A; (+) strand; PAM type: NNNNGHTT; PAM sequence: CCAGGATT
  source 1..20: mol_type = other DNA
aatacctgtcacataaattc

SEQ ID NO: 12464 - DNA, 20 bp, synthetic construct
  misc_feature 1..20: note = Description of Artificial Sequence: Synthetic oligonucleotide
  misc_feature 1..20: note = Target: SCN10A; (+) strand; PAM type: NNNNGHTT; PAM sequence: GGTAGATT
  source 1..20: mol_type = other DNA
cccaggattgtgaccatata

SEQ ID NO: 12465 - DNA, 20 bp, synthetic construct
  misc_feature 1..20: note = Description of Artificial Sequence: Synthetic oligonucleotide
  misc_feature 1..20: note = Target: SCN10A; (+) strand; PAM type: NNNNGHTT; PAM sequence: AATGGATT
  source 1..20: mol_type = other DNA
taatacaaaatctcctaaag

SEQ ID NO: 12466 - DNA, 20 bp, synthetic construct
  misc_feature 1..20: note = Description of Artificial Sequence: Synthetic oligonucleotide
  misc_feature 1..20: note = Target: SCN10A; (+) strand; PAM type: NNNNGHTT; PAM sequence: AGACGATT
  source 1..20: mol_type = other DNA
ggaaaggatccaactttgga

SEQ ID NO: 12467 - DNA, 20 bp, synthetic construct
  misc_feature 1..20: note = Description of Artificial Sequence: Synthetic oligonucleotide
  misc_feature 1..20: note = Target: SCN10A; (+) strand; PAM type: NNNNGHTT; PAM sequence: TGAGGATT
  source 1..20: mol_type = other DNA
taatatgtggtggcaaaata

SEQ ID NO: 12468 - DNA, 20 bp, synthetic construct
  misc_feature 1..20: note = Description of Artificial Sequence: Synthetic oligonucleotide
  misc_feature 1..20: note = Target: SCN10A; (+) strand; PAM type: NNNNGHTT; PAM sequence: CTGGGATT
  source 1..20: mol_type = other DNA
tttctataaaacagctgctg

SEQ ID NO: 12469 - DNA, 20 bp, synthetic construct
  misc_feature 1..20: note = Description of Artificial Sequence: Synthetic oligonucleotide
  misc_feature 1..20: note = Target: SCN10A; (+) strand; PAM type: NNNNGHTT; PAM sequence: TTTGGATT
  source 1..20: mol_type = other DNA
tgcatatttttacaacagca

SEQ ID NO: 12470 - DNA, 20 bp, synthetic construct
  misc_feature 1..20: note = Description of Artificial Sequence: Synthetic oligonucleotide
  misc_feature 1..20: note = Target: SCN10A; (+) strand; PAM type: NNNNGHTT; PAM sequence: TACTGTTT
  source 1..20: mol_type = other DNA
gcatttggatttattagatc

SEQ ID NO: 12471 - DNA, 20 bp, synthetic construct
  misc_feature 1..20: note = Description of Artificial Sequence: Synthetic oligonucleotide
  misc_feature 1..20: note = Target: SCN10A; (+) strand; PAM type: NNNNGHTT; PAM sequence: TATTGCTT
  source 1..20: mol_type = other DNA
tgtttttctattttgtaatt

SEQ ID NO: 12472 - DNA, 20 bp, synthetic construct
  misc_feature 1..20: note = Description of Artificial Sequence: Synthetic oligonucleotide
  misc_feature 1..20: note = Target: SCN10A; (+) strand; PAM type: NNNNGHTT; PAM sequence: TCTAGTTT
  source 1..20: mol_type = other DNA
ctttcatttgttatcctttt

SEQ ID NO: 12473 - DNA, 20 bp, synthetic construct
  misc_feature 1..20: note = Description of Artificial Sequence: Synthetic oligonucleotide
  misc_feature 1..20: note = Target: SCN10A; (+) strand; PAM type: NNNNGHTT; PAM sequence: TTCAGCTT
  source 1..20: mol_type = other DNA
aggtctttaaataatttctt

SEQ ID NO: 12474 - DNA, 20 bp, synthetic construct
  misc_feature 1..20: note = Description of Artificial Sequence: Synthetic oligonucleotide
  misc_feature 1..20: note = Target: SCN10A; (+) strand; PAM type: NNNNGHTT; PAM sequence: CTATGCTT
  source 1..20: mol_type = other DNA
cttttactgatataaatatt

SEQ ID NO: 12475 - DNA, 20 bp, synthetic construct
  misc_feature 1..20: note = Description of Artificial Sequence: Synthetic oligonucleotide
  misc_feature 1..20: note = Target: SCN10A; (+) strand; PAM type: NNNNGHTT; PAM sequence: TTCTGATT
  source 1..20: mol_type = other DNA
ctttaactgcactctctagg

SEQ ID NO: 12476 - DNA, 20 bp, synthetic construct
  misc_feature 1..20: note = Description of Artificial Sequence: Synthetic oligonucleotide
  misc_feature 1..20: note = Target: SCN10A; (+) strand; PAM type: NNNNGHTT; PAM sequence: AACTGTTT
  source 1..20: mol_type = other DNA
cactctctaggttctgatta

SEQ ID NO: 12477 - DNA, 20 bp, synthetic construct
  misc_feature 1..20: note = Description of Artificial Sequence: Synthetic oligonucleotide
  misc_feature 1..20: note = Target: SCN10A; (+) strand; PAM type: NNNNGHTT; PAM sequence: TTTAGTTT
  source 1..20: mol_type = other DNA
ttccctcgaaattatataat

SEQ ID NO: 12478 - DNA, 20 bp, synthetic construct
  misc_feature 1..20: note = Description of Artificial Sequence: Synthetic oligonucleotide
  misc_feature 1..20: note = Target: SCN10A; (+) strand; PAM type: NNNNGHTT; PAM sequence: TATAGTTT
  source 1..20: mol_type = other DNA
gaaattatataattttagtt

SEQ ID NO: 12479 - DNA, 20 bp, synthetic construct
  misc_feature 1..20: note = Description of Artificial Sequence: Synthetic oligonucleotide
  misc_feature 1..20: note = Target: SCN10A; (+) strand; PAM type: NNNNGHTT; PAM sequence: GAGAGATT
  source 1..20: mol_type = other DNA
tttgtccaagaattctttaa

SEQ ID NO: 12480 - DNA, 20 bp, synthetic construct
  misc_feature 1..20: note = Description of Artificial Sequence: Synthetic oligonucleotide
  misc_feature 1..20: note = Target: SCN10A; (+) strand; PAM type: NNNNGHTT; PAM sequence: GAATGTTT
  source 1..20: mol_type = other DNA
tctatttcattatgatcaga

SEQ ID NO: 12481 - DNA, 20 bp, synthetic construct
  misc_feature 1..20: note = Description of Artificial Sequence: Synthetic oligonucleotide
  misc_feature 1..20: note = Target: SCN10A; (+) strand; PAM type: NNNNGHTT; PAM sequence: TGGAGCTT
  source 1..20: mol_type = other DNA
tctatattatttccactttc

SEQ ID NO: 12482 - DNA, 20 bp, synthetic construct
  misc_feature 1..20: note = Description of Artificial Sequence: Synthetic oligonucleotide
  misc_feature 1..20: note = Target: SCN10A; (+) strand; PAM type: NNNNGHTT; PAM sequence: TGAGGTTT
  source 1..20: mol_type = other DNA
ttccactttctggagcttat

SEQ ID NO: 12483 - DNA, 20 bp, synthetic construct
  misc_feature 1..20: note = Description of Artificial Sequence: Synthetic oligonucleotide
  misc_feature 1..20: note = Target: SCN10A; (+) strand; PAM type: NNNNGHTT; PAM sequence: CATGGCTT
  source 1..20: mol_type = other DNA
gagcttattgaggtttttgt

SEQ ID NO: 12484 - DNA, 20 bp, synthetic construct
  misc_feature 1..20: note = Description of Artificial Sequence: Synthetic oligonucleotide
  misc_feature 1..20: note = Target: SCN10A; (+) strand; PAM type: NNNNGHTT; PAM sequence: TTTGGTTT
  source 1..20: mol_type = other DNA
gtttttgtcatggcttaata

SEQ ID NO: 12485 - DNA, 20 bp, synthetic construct
  misc_feature 1..20: note = Description of Artificial Sequence: Synthetic oligonucleotide
  misc_feature 1..20: note = Target: SCN10A; (+) strand; PAM type: NNNNGHTT; PAM sequence: ATATGTTT
  source 1..20: mol_type = other DNA
atggcttaatatttggtttg

SEQ ID NO: 12486 - DNA, 20 bp, synthetic construct
  misc_feature 1..20: note = Description of Artificial Sequence: Synthetic oligonucleotide
  misc_feature 1..20: note = Target: SCN10A; (+) strand; PAM type: NNNNGHTT; PAM sequence: TTTGGTTT
  source 1..20: mol_type = other DNA
ttaatatttggtttgatatg

SEQ ID NO: 12487 - DNA, 20 bp, synthetic construct
  misc_feature 1..20: note = Description of Artificial Sequence: Synthetic oligonucleotide
  misc_feature 1..20: note = Target: SCN10A; (+) strand; PAM type: NNNNGHTT; PAM sequence: GGTAGTTT
  source 1..20: mol_type = other DNA
cattttctattgttagggaa

SEQ ID NO: 12488 - DNA, 20 bp, synthetic construct
  misc_feature 1..20: note = Description of Artificial Sequence: Synthetic oligonucleotide
  misc_feature 1..20: note = Target: SCN10A; (+) strand; PAM type: NNNNGHTT; PAM sequence: CAATGTTT
  source 1..20: mol_type = other DNA
attgaaaatttctattccta

SEQ ID NO: 12489 - DNA, 20 bp, synthetic construct
  misc_feature 1..20: note = Description of Artificial Sequence: Synthetic oligonucleotide
  misc_feature 1..20: note = Target: SCN10A; (+) strand; PAM type: NNNNGHTT; PAM sequence: TTCTGATT
  source 1..20: mol_type = other DNA
tatcctcctactctaataat

SEQ ID NO: 12490 - DNA, 20 bp, synthetic construct
  misc_feature 1..20: note = Description of Artificial Sequence: Synthetic oligonucleotide
  misc_feature 1..20: note = Target: SCN10A; (+) strand; PAM type: NNNNGHTT; PAM sequence: TATAGATT
  source 1..20: mol_type = other DNA
catcttatttgttgcaaaga

SEQ ID NO: 12491 - DNA, 20 bp, synthetic construct
  misc_feature 1..20: note = Description of Artificial Sequence: Synthetic oligonucleotide
  misc_feature 1..20: note = Target: SCN10A; (+) strand; PAM type: NNNNGHTT; PAM sequence: TCATGCTT
  source 1..20: mol_type = other DNA
tgtgcaatttttgtcctatt

SEQ ID NO: 12492 - DNA, 20 bp, synthetic construct
  misc_feature 1..20: note = Description of Artificial Sequence: Synthetic oligonucleotide
  misc_feature 1..20: note = Target: SCN10A; (+) strand; PAM type: NNNNGHTT; PAM sequence: CCGAGATT
  source 1..20: mol_type = other DNA
tcctatttcatgctttttga

SEQ ID NO: 12493 - DNA, 20 bp, synthetic construct
  misc_feature 1..20: note = Description of Artificial Sequence: Synthetic oligonucleotide
  misc_feature 1..20: note = Target: SCN10A; (+) strand; PAM type: NNNNGHTT; PAM sequence: TCCTGCTT
  source 1..20: mol_type = other DNA
tctgatattaaaatcatgga

SEQ ID NO: 12494 - DNA, 20 bp, synthetic construct
  misc_feature 1..20: note = Description of Artificial Sequence: Synthetic oligonucleotide
  misc_feature 1..20: note = Target: SCN10A; (+) strand; PAM type: NNNNGHTT; PAM sequence: CTTTGTTT
  source 1..20: mol_type = other DNA
aaaatcatggatcctgcttt

SEQ ID NO: 12495 - DNA, 20 bp, synthetic construct
  misc_feature 1..20: note = Description of Artificial Sequence: Synthetic oligonucleotide
  misc_feature 1..20: note = Target: SCN10A; (+) strand; PAM type: NNNNGHTT; PAM sequence: CTTTGCTT
  source 1..20: mol_type = other DNA
atcctgctttctttgtttgc

SEQ ID NO: 12496 - DNA, 20 bp, synthetic construct
  misc_feature 1..20: note = Description of Artificial Sequence: Synthetic oligonucleotide
  misc_feature 1..20: note = Target: SCN10A; (+) strand; PAM type: NNNNGHTT; PAM sequence: TATTGCTT
  source 1..20: mol_type = other DNA
ttattcaacatagagttggg

SEQ ID NO: 12497 - DNA, 20 bp, synthetic construct
  misc_feature 1..20: note = Description of Artificial Sequence: Synthetic oligonucleotide
  misc_feature 1..20: note = Target: SCN10A; (+) strand; PAM type: NNNNGHTT; PAM sequence: GACAGATT
  source 1..20: mol_type = other DNA
ccatttatatttagtgacat

SEQ ID NO: 12498 - DNA, 20 bp, synthetic construct
  misc_feature 1..20: note = Description of Artificial Sequence: Synthetic oligonucleotide
  misc_feature 1..20: note = Target: SCN10A; (+) strand; PAM type: NNNNGHTT; PAM sequence: ATTTGCTT
  source 1..20: mol_type = other DNA
tatatttagtgacatgacag

SEQ ID NO: 12499 - DNA, 20 bp, synthetic construct
  misc_feature 1..20: note = Description of Artificial Sequence: Synthetic oligonucleotide
  misc_feature 1..20: note = Target: SCN10A; (+) strand; PAM type: NNNNGHTT; PAM sequence: CTTAGCTT
  source 1..20: mol_type = other DNA
acatgacagatttgcttagt

SEQ ID NO: 12500 - DNA, 20 bp, synthetic construct
  misc_feature 1..20: note = Description of Artificial Sequence: Synthetic oligonucleotide
  misc_feature 1..20: note = Target: SCN10A; (+) strand; PAM type: NNNNGHTT; PAM sequence: GCTTGTTT
  source 1..20: mol_type = other DNA
gacagatttgcttagtctta

SEQ ID NO: 12501 - DNA, 20 bp, synthetic construct
  misc_feature 1..20: note = Description of Artificial Sequence: Synthetic oligonucleotide
  misc_feature 1..20: note = Target: SCN10A; (+) strand; PAM type: NNNNGHTT; PAM sequence: TTTAGTTT
  source 1..20: mol_type = other DNA
atattatttcatatgacgta

SEQ ID NO: 12502 - DNA, 20 bp, synthetic construct
  misc_feature 1..20: note = Description of Artificial Sequence: Synthetic oligonucleotide
  misc_feature 1..20: note = Target: SCN10A; (+) strand; PAM type: NNNNGHTT; PAM sequence: TGTGGTTT
  source 1..20: mol_type = other DNA
taggttggtacaaaagtaat

SEQ ID NO: 12503 - DNA, 20 bp, synthetic construct
  misc_feature 1..20: note = Description of Artificial Sequence: Synthetic oligonucleotide
  misc_feature 1..20: note = Target: SCN10A; (+) strand; PAM type: NNNNGHTT; PAM sequence: TGCCGTTT
  source 1..20: mol_type = other DNA
gtttttgcattgttgaaatt

SEQ ID NO: 12504 - DNA, 20 bp, synthetic construct
  misc_feature 1..20: note = Description of Artificial Sequence: Synthetic oligonucleotide
  misc_feature 1..20: note = Target: SCN10A; (+) strand; PAM type: NNNNGHTT; PAM sequence: TGCTGTTT
  source 1..20: mol_type = other DNA
tttgctaatgacttattact

SEQ ID NO: 12505 - DNA, 20 bp, synthetic construct
  misc_feature 1..20: note = Description of Artificial Sequence: Synthetic oligonucleotide
  misc_feature 1..20: note = Target: SCN10A; (+) strand; PAM type: NNNNGHTT; PAM sequence: GAGCGATT
  source 1..20: mol_type = other DNA
gttatacaaaaagcaaattc

SEQ ID NO: 12506 - DNA, 20 bp, synthetic construct
  misc_feature 1..20: note = Description of Artificial Sequence: Synthetic oligonucleotide
  misc_feature 1..20: note = Target: SCN10A; (+) strand; PAM type: NNNNGHTT; PAM sequence: CAGGGATT
  source 1..20: mol_type = other DNA
catcaacaacgcatttggcc

SEQ ID NO: 12507 - DNA, 20 bp, synthetic construct
  misc_feature 1..20: note = Description of Artificial Sequence: Synthetic oligonucleotide
  misc_feature 1..20: note = Target: SCN10A; (+) strand; PAM type: NNNNGHTT; PAM sequence: AGAAGTTT
  source 1..20: mol_type = other DNA
tacagtgcagtggtggttca

SEQ ID NO: 12508 - DNA, 20 bp, synthetic construct
  misc_feature 1..20: note = Description of Artificial Sequence: Synthetic oligonucleotide
  misc_feature 1..20: note = Target: SCN10A; (+) strand; PAM type: NNNNGHTT; PAM sequence: AAATGTTT
  source 1..20: mol_type = other DNA
gtgcctcataagctaaggaa

SEQ ID NO: 12509 - DNA, 20 bp, synthetic construct
  misc_feature 1..20: note = Description of Artificial Sequence: Synthetic oligonucleotide
  misc_feature 1..20: note = Target: SCN10A; (+) strand; PAM type: NNNNGHTT; PAM sequence: ATCAGATT
  source 1..20: mol_type = other DNA
caaaaatgaactatttctta

SEQ ID NO: 12510 - DNA, 20 bp, synthetic construct
  misc_feature 1..20: note = Description of Artificial Sequence: Synthetic oligonucleotide
  misc_feature 1..20: note = Target: SCN10A; (+) strand; PAM type: NNNNGHTT; PAM sequence: ACCAGCTT
  source 1..20: mol_type = other DNA
ttacttgacaactggcaatg

SEQ ID NO: 12511 - DNA, 20 bp, synthetic construct
  misc_feature 1..20: note = Description of Artificial Sequence: Synthetic oligonucleotide
  misc_feature 1..20: note = Target: SCN10A; (+) strand; PAM type: NNNNGHTT; PAM sequence: CACTGCTT
  source 1..20: mol_type = other DNA
gcaccaaaaaaagtcgtggt

SEQ ID NO: 12512 - DNA, 20 bp, synthetic construct
  misc_feature 1..20: note = Description of Artificial Sequence: Synthetic oligonucleotide
  misc_feature 1..20: note = Target: SCN10A; (+) strand; PAM type: NNNNGHTT; PAM sequence: TACAGCTT
  source 1..20: mol_type = other DNA
ctgctgccggtctgatctac

SEQ ID NO: 12513 - DNA, 20 bp, synthetic construct
  misc_feature 1..20: note = Description of Artificial Sequence: Synthetic oligonucleotide
  misc_feature 1..20: note = Target: SCN10A; (+) strand; PAM type: NNNNGHTT; PAM sequence: TGAAGTTT
  source 1..20: mol_type = other DNA
aagttgaatgaattgggcta

SEQ ID NO: 12514 - DNA, 20 bp, synthetic construct
  misc_feature 1..20: note = Description of Artificial Sequence: Synthetic oligonucleotide
  misc_feature 1..20: note = Target: SCN10A; (+) strand; PAM type: NNNNGHTT; PAM sequence: CATGGATT
  source 1..20: mol_type = other DNA
gagttcattgaatcccaaag

SEQ ID NO: 12515 - DNA, 20 bp, synthetic construct
  misc_feature 1..20: note = Description of Artificial Sequence: Synthetic oligonucleotide
  misc_feature 1..20: note = Target: SCN10A; (+) strand; PAM type: NNNNGHTT; PAM sequence: TGTTGATT
  source 1..20: mol_type = other DNA
atttctcattggcaaaaatg

SEQ ID NO: 12516 - DNA, 20 bp, synthetic construct
  misc_feature 1..20: note = Description of Artificial Sequence: Synthetic oligonucleotide
  misc_feature 1..20: note = Target: SCN10A; (+) strand; PAM type: NNNNGHTT; PAM sequence: CTTTGATT
  source 1..20: mol_type = other DNA
gttgattgtaatggttccta

SEQ ID NO: 12517 - DNA, 20 bp, synthetic construct
  misc_feature 1..20: note = Description of Artificial Sequence: Synthetic oligonucleotide
  misc_feature 1..20: note = Target: SCN10A; (+) strand; PAM type: NNNNGHTT; PAM sequence: ATGTGTTT
  source 1..20: mol_type = other DNA
tcctactttgattaataaag

SEQ ID NO: 12518 - DNA, 20 bp, synthetic construct
  misc_feature 1..20: note = Description of Artificial Sequence: Synthetic oligonucleotide
  misc_feature 1..20: note = Target: SCN10A; (+) strand; PAM type: NNNNGHTT; PAM sequence: TAATGATT
  source 1..20: mol_type = other DNA
gatgtgtttgagcctagtta

SEQ ID NO: 12519 - DNA, 20 bp, synthetic construct
  misc_feature 1..20: note = Description of Artificial Sequence: Synthetic oligonucleotide
  misc_feature 1..20: note = Target: SCN10A; (+) strand; PAM type: NNNNGHTT; PAM sequence: ATTTGCTT
  source 1..20: mol_type = other DNA
ttcattatttggcatctctt

SEQ ID NO: 12520 - DNA, 20 bp, synthetic construct
  misc_feature 1..20: note = Description of Artificial Sequence: Synthetic oligonucleotide
  misc_feature 1..20: note = Target: SCN10A; (+) strand; PAM type: NNNNGHTT; PAM sequence: TAGAGTTT
  source 1..20: mol_type = other DNA
tgtacaattcttccagtatt

SEQ ID NO: 12521 - DNA, 20 bp, synthetic construct
  misc_feature 1..20: note = Description of Artificial Sequence: Synthetic oligonucleotide
  misc_feature 1..20: note = Target: SCN10A; (+) strand; PAM type: NNNNGHTT; PAM sequence: TATAGATT
  source 1..20: mol_type = other DNA
catattatttgttacaaata

SEQ ID NO: 12522 - DNA, 20 bp, synthetic construct
  misc_feature 1..20: note = Description of Artificial Sequence: Synthetic oligonucleotide
  misc_feature 1..20: note = Target: SCN10A; (+) strand; PAM type: NNNNGHTT; PAM sequence: AAGAGTTT
  source 1..20: mol_type = other DNA
tacaaatatatagattacta

SEQ ID NO: 12523 - DNA, 20 bp, synthetic construct
  misc_feature 1..20: note = Description of Artificial Sequence: Synthetic oligonucleotide
  misc_feature 1..20: note = Target: SCN10A; (+) strand; PAM type: NNNNGHTT; PAM sequence: TGGTGATT
  source 1..20: mol_type = other DNA
caaaatctctcatttccatt

SEQ ID NO: 12524 - DNA, 20 bp, synthetic construct
  misc_feature 1..20: note = Description of Artificial Sequence: Synthetic oligonucleotide
  misc_feature 1..20: note = Target: SCN10A; (+) strand; PAM type: NNNNGHTT; PAM sequence: CTCTGTTT
  source 1..20: mol_type = other DNA
catttggtgattcctttcct

SEQ ID NO: 12525 - DNA, 20 bp, synthetic construct
  misc_feature 1..20: note = Description of Artificial Sequence: Synthetic oligonucleotide
  misc_feature 1..20: note = Target: SCN10A; (+) strand; PAM type: NNNNGHTT; PAM sequence: TTGTGCTT
  source 1..20: mol_type = other DNA
ctgtatttaataatatcttt

SEQ ID NO: 12526 - DNA, 20 bp, synthetic construct
  misc_feature 1..20: note = Description of Artificial Sequence: Synthetic oligonucleotide
  misc_feature 1..20: note = Target: SCN10A; (+) strand; PAM type: NNNNGHTT; PAM sequence: TTCTGCTT
  source 1..20: mol_type = other DNA
gctcacatgttctttcctct

SEQ ID NO: 12527 - DNA, 20 bp, synthetic construct
  misc_feature 1..20: note = Description of Artificial Sequence: Synthetic oligonucleotide
  misc_feature 1..20: note = Target: SCN10A; (+) strand; PAM type: NNNNGHTT; PAM sequence: TGGGGCTT
  source 1..20: mol_type = other DNA
gtcaacacttgcagggcctc

SEQ ID NO: 12528 - DNA, 20 bp, synthetic construct
  misc_feature 1..20: note = Description of Artificial Sequence: Synthetic oligonucleotide
  misc_feature 1..20: note = Target: SCN10A; (+) strand; PAM type: NNNNGHTT; PAM sequence: CGTGGTTT
  source 1..20: mol_type = other DNA
ttatccccctctggaggcac

SEQ ID NO: 12529 - DNA, 20 bp, synthetic construct
  misc_feature 1..20: note = Description of Artificial Sequence: Synthetic oligonucleotide
  misc_feature 1..20: note = Target: SCN10A; (+) strand; PAM type: NNNNGHTT; PAM sequence: AAGTGATT
  source 1..20: mol_type = other DNA
ttaacaaaccctgatctgct

SEQ ID NO: 12530 - DNA, 20 bp, synthetic construct
  misc_feature 1..20: note = Description of Artificial Sequence: Synthetic oligonucleotide
  misc_feature 1..20: note = Target: SCN10A; (+) strand; PAM type: NNNNGHTT; PAM sequence: AAGTGTTT
  source 1..20: mol_type = other DNA
ccacccacttttggtcttcc

SEQ ID NO: 12531 - DNA, 20 bp, synthetic construct
  misc_feature 1..20: note = Description of Artificial Sequence: Synthetic oligonucleotide
  misc_feature 1..20: note = Target: SCN10A; (+) strand; PAM type: NNNNGHTT; PAM sequence: CTGTGTTT
  source 1..20: mol_type = other DNA
gttttgacatcatttgtcct

SEQ ID NO: 12532 - DNA, 20 bp, synthetic construct
  misc_feature 1..20: note = Description of Artificial Sequence: Synthetic oligonucleotide
  misc_feature 1..20: note = Target: SCN10A; (+) strand; PAM type: NNNNGHTT; PAM sequence: AAATGTTT
  source 1..20: mol_type = other DNA
aaataactcattttgcaaaa

SEQ ID NO: 12533 - DNA, 20 bp, synthetic construct
  misc_feature 1..20: note = Description of Artificial Sequence: Synthetic oligonucleotide
  misc_feature 1..20: note = Target: SCN10A; (+) strand; PAM type: NNNNGHTT; PAM sequence: TCATGATT
  source 1..20: mol_type = other DNA
caacaatattaaatataatt

SEQ ID NO: 12534 - DNA, 20 bp, synthetic construct
  misc_feature 1..20: note = Description of Artificial Sequence: Synthetic oligonucleotide
  misc_feature 1..20: note = Target: SCN10A; (+) strand; PAM type: NNNNGHTT; PAM sequence: TTGTGATT
  source 1..20: mol_type = other DNA
ttaaatataatttcatgatt

SEQ ID NO: 12535 - DNA, 20 bp, synthetic construct
  misc_feature 1..20: note = Description of Artificial Sequence: Synthetic oligonucleotide
  misc_feature 1..20: note = Target: SCN10A; (+) strand; PAM type: NNNNGHTT; PAM sequence: TTCTGATT
  source 1..20: mol_type = other DNA
ttctctacttagtaaccatc

SEQ ID NO: 12536 - DNA, 20 bp, synthetic construct
  misc_feature 1..20: note = Description of Artificial Sequence: Synthetic oligonucleotide
  misc_feature 1..20: note = Target: SCN10A; (+) strand; PAM type: NNNNGHTT; PAM sequence: TTGGGTTT
  source 1..20: mol_type = other DNA
tcatttattttaaaaaatta

SEQ ID NO: 12537 - DNA, 20 bp, synthetic construct
  misc_feature 1..20: note = Description of Artificial Sequence: Synthetic oligonucleotide
  misc_feature 1..20: note = Target: SCN10A; (+) strand; PAM type: NNNNGHTT; PAM sequence: AAATGTTT
  source 1..20: mol_type = other DNA
taaattaattattttaaaac

SEQ ID NO: 12538 - DNA, 20 bp, synthetic construct
  misc_feature 1..20: note = Description of Artificial Sequence: Synthetic oligonucleotide
  misc_feature 1..20: note = Target: SCN10A; (+) strand; PAM type: NNNNGHTT; PAM sequence: GGTGGCTT
  source 1..20: mol_type = other DNA
taacaaaataccatagactg

SEQ ID NO: 12539 - DNA, 20 bp, synthetic construct
  misc_feature 1..20: note = Description of Artificial Sequence: Synthetic oligonucleotide
  misc_feature 1..20: note = Target: SCN10A; (+) strand; PAM type: NNNNGHTT; PAM sequence: CTGAGATT
  source 1..20: mol_type = other DNA
acaaatctggaggttgaagc

SEQ ID NO: 12540 - DNA, 20 bp, synthetic construct
  misc_feature 1..20: note = Description of Artificial Sequence: Synthetic oligonucleotide
  misc_feature 1..20: note = Target: SCN10A; (+) strand; PAM type: NNNNGHTT; PAM sequence: TCTAGCTT
  source 1..20: mol_type = other DNA
ggtctgggaaagactctctt

SEQ ID NO: 12541 - DNA, 20 bp, synthetic construct
  misc_feature 1..20: note = Description of Artificial Sequence: Synthetic oligonucleotide
  misc_feature 1..20: note = Target: SCN10A; (+) strand; PAM type: NNNNGHTT; PAM sequence: GGGGGTTT
  source 1..20: mol_type = other DNA
atctccaacatagcaacatg

SEQ ID NO: 12542 - DNA, 20 bp, synthetic construct
  misc_feature 1..20: note = Description of Artificial Sequence: Synthetic oligonucleotide
  misc_feature 1..20: note = Target: SCN10A; (+) strand; PAM type: NNNNGHTT; PAM sequence: GTTTGTTT
  source 1..20: mol_type = other DNA
ccaacatagcaacatggggg

SEQ ID NO: 12543 - DNA, 20 bp, synthetic construct
  misc_feature 1..20: note = Description of Artificial Sequence: Synthetic oligonucleotide
  misc_feature 1..20: note = Target: SCN10A; (+) strand; PAM type: NNNNGHTT; PAM sequence: AGCAGCTT
  source 1..20: mol_type = other DNA
ggggacaaaattcactccat

SEQ ID NO: 12544 - DNA, 20 bp, synthetic construct
  misc_feature 1..20: note = Description of Artificial Sequence: Synthetic oligonucleotide
  misc_feature 1..20: note = Target: SCN10A; (+) strand; PAM type: NNNNGHTT; PAM sequence: TGATGCTT
  source 1..20: mol_type = other DNA
tttttcttgccttactttat

SEQ ID NO: 12545 - DNA, 20 bp, synthetic construct
  misc_feature 1..20: note = Description of Artificial Sequence: Synthetic oligonucleotide
  misc_feature 1..20: note = Target: SCN10A; (+) strand; PAM type: NNNNGHTT; PAM sequence: AATAGTTT
  source 1..20: mol_type = other DNA
aagtatgcattcctaaacaa

SEQ ID NO: 12546 - DNA, 20 bp, synthetic construct
  misc_feature 1..20: note = Description of Artificial Sequence: Synthetic oligonucleotide
  misc_feature 1..20: note = Target: SCN10A; (+) strand; PAM type: NNNNGHTT; PAM sequence: TTTAGTTT
  source 1..20: mol_type = other DNA
tgcattcctaaacaaaatag

SEQ ID NO: 12547 - DNA, 20 bp, synthetic construct
  misc_feature 1..20: note = Description of Artificial Sequence: Synthetic oligonucleotide
  misc_feature 1..20: note = Target: SCN10A; (+) strand; PAM type: NNNNGHTT; PAM sequence: TTTTGCTT
  source 1..20: mol_type = other DNA
tcctaaacaaaatagtttag

SEQ ID NO: 12548 - DNA, 20 bp, synthetic construct
  misc_feature 1..20: note = Description of Artificial Sequence: Synthetic oligonucleotide
  misc_feature 1..20: note = Target: SCN10A; (+) strand; PAM type: NNNNGHTT; PAM sequence: GCTTGATT
  source 1..20: mol_type = other DNA
aaacaaaatagtttagtttt

SEQ ID NO: 12549 - DNA, 20 bp, synthetic construct
  misc_feature 1..20: note = Description of Artificial Sequence: Synthetic oligonucleotide
  misc_feature 1..20: note = Target: SCN10A; (+) strand; PAM type: NNNNGHTT; PAM sequence: CCTTGTTT
  source 1..20: mol_type = other DNA
tcaaactttatataaatgaa

SEQ ID NO: 12550 - DNA, 20 bp, synthetic construct
  misc_feature 1..20: note = Description of Artificial Sequence: Synthetic oligonucleotide
  misc_feature 1..20: note = Target: SCN10A; (+) strand; PAM type: NNNNGHTT; PAM sequence: TTTGGCTT
  source 1..20: mol_type = other DNA
tgtttatgtaatcctttgca

SEQ ID NO: 12551 - DNA, 20 bp, synthetic construct
  misc_feature 1..20: note = Description of Artificial Sequence: Synthetic oligonucleotide
  misc_feature 1..20: note = Target: SCN10A; (+) strand; PAM type: NNNNGHTT; PAM sequence: TAAAGTTT
  source 1..20: mol_type = other DNA
tccttattgttgtgcagcac

SEQ ID NO: 12552 - DNA, 20 bp, synthetic construct
  misc_feature 1..20: note = Description of Artificial Sequence: Synthetic oligonucleotide
  misc_feature 1..20: note = Target: SCN10A; (+) strand; PAM type: NNNNGHTT; PAM sequence: GTAAGTTT
  source 1..20: mol_type = other DNA
gtttattaatttttattgct

SEQ ID NO: 12553 - DNA, 20 bp, synthetic construct
  misc_feature 1..20: note = Description of Artificial Sequence: Synthetic oligonucleotide
  misc_feature 1..20: note = Target: SCN10A; (+) strand; PAM type: NNNNGHTT; PAM sequence: CAAAGTTT
  source 1..20: mol_type = other DNA
acagaaatagttaatgtact

SEQ ID NO: 12554 - DNA, 20 bp, synthetic construct
  misc_feature 1..20: note = Description of Artificial Sequence: Synthetic oligonucleotide
  misc_feature 1..20: note = Target: SCN10A; (+) strand; PAM type: NNNNGHTT; PAM sequence: AGTGGTTT
  source 1..20: mol_type = other DNA
tcaaagtttatggacatttg

SEQ ID NO: 12555 - DNA, 20 bp, synthetic construct
  misc_feature 1..20: note = Description of Artificial Sequence: Synthetic oligonucleotide
  misc_feature 1..20: note = Target: SCN10A; (+) strand; PAM type: NNNNGHTT; PAM sequence: TCCGGTTT
  source 1..20: mol_type = other DNA
ttatggacatttgagtggtt

SEQ ID NO: 12556 - DNA, 20 bp, synthetic construct
  misc_feature 1..20: note = Description of Artificial Sequence: Synthetic oligonucleotide
  misc_feature 1..20: note = Target: SCN10A; (+) strand; PAM type: NNNNGHTT; PAM sequence: TGGGGTTT
  source 1..20: mol_type = other DNA
catttgagtggtttccggtt

SEQ ID NO: 12557 - DNA, 20 bp, synthetic construct
  misc_feature 1..20: note = Description of Artificial Sequence: Synthetic oligonucleotide
  misc_feature 1..20: note = Target: SCN10A; (+) strand; PAM type: NNNNGHTT; PAM sequence: GTATGCTT
  source 1..20: mol_type = other DNA
aatagaagaatacagcatat

SEQ ID NO: 12558 - DNA, 20 bp, synthetic construct
  misc_feature 1..20: note = Description of Artificial Sequence: Synthetic oligonucleotide
  misc_feature 1..20: note = Target: SCN10A; (+) strand; PAM type: NNNNGHTT; PAM sequence: CCTTGCTT
  source 1..20: mol_type = other DNA
cacctttactagataatacc

SEQ ID NO: 12559 - DNA, 20 bp, synthetic construct
  misc_feature 1..20: note = Description of Artificial Sequence: Synthetic oligonucleotide
  misc_feature 1..20: note = Target: SCN10A; (+) strand; PAM type: NNNNGHTT; PAM sequence: GTGAGTTT
  source 1..20: mol_type = other DNA
tacactcccaccagcagtgt

SEQ ID NO: 12560 - DNA, 20 bp, synthetic construct
  misc_feature 1..20: note = Description of Artificial Sequence: Synthetic oligonucleotide
  misc_feature 1..20: note = Target: SCN10A; (+) strand; PAM type: NNNNGHTT; PAM sequence: GTGTGATT
  source 1..20: mol_type = other DNA
gaacatgtaataaaatctca

SEQ ID NO: 12561 - DNA, 20 bp, synthetic construct
  misc_feature 1..20: note = Description of Artificial Sequence: Synthetic oligonucleotide
  misc_feature 1..20: note = Target: SCN10A; (+) strand; PAM type: NNNNGHTT; PAM sequence: CTTTGATT
  source 1..20: mol_type = other DNA
tgtgattttaatttgcaact

SEQ ID NO: 12562 - DNA, 20 bp, synthetic construct
  misc_feature 1..20: note = Description of Artificial Sequence: Synthetic oligonucleotide
  misc_feature 1..20: note = Target: SCN10A; (+) strand; PAM type: NNNNGHTT; PAM sequence: ATATGTTT
  source 1..20: mol_type = other DNA
aaaaggttaagaatactttc

SEQ ID NO: 12563 - DNA, 20 bp, synthetic construct
  misc_feature 1..20: note = Description of Artificial Sequence: Synthetic oligonucleotide
  misc_feature 1..20: note = Target: SCN10A; (+) strand; PAM type: NNNNGHTT; PAM sequence: TTTGGATT
  source 1..20: mol_type = other DNA
ctttcatatgtttatggcca

SEQ ID NO: 12564 - DNA, 20 bp, synthetic construct
  misc_feature 1..20: note = Description of Artificial Sequence: Synthetic oligonucleotide
  misc_feature 1..20: note = Target: SCN10A; (+) strand; PAM type: NNNNGHTT; PAM sequence: AATTGATT
  source 1..20: mol_type = other DNA
ggttgttctgacatttttct

SEQ ID NO: 12565 - DNA, 20 bp, synthetic construct
  misc_feature 1..20: note = Description of Artificial Sequence: Synthetic oligonucleotide
  misc_feature 1..20: note = Target: SCN10A; (+) strand; PAM type: NNNNGHTT; PAM sequence: ACTTGCTT
  source 1..20: mol_type = other DNA
tcattactctgaatataagc

SEQ ID NO: 12566 - DNA, 20 bp, synthetic construct
  misc_feature 1..20: note = Description of Artificial Sequence: Synthetic oligonucleotide
  misc_feature 1..20: note = Target: SCN10A; (+) strand; PAM type: NNNNGHTT; PAM sequence: ATCAGTTT
  source 1..20: mol_type = other DNA
attatagtatactaaaatgt

SEQ ID NO: 12567 - DNA, 20 bp, synthetic construct
  misc_feature 1..20: note = Description of Artificial Sequence: Synthetic oligonucleotide
  misc_feature 1..20: note = Target: SCN10A; (+) strand; PAM type: NNNNGHTT; PAM sequence: TAGTGCTT
  source 1..20: mol_type = other DNA
tcagttttttcctgtatagt

SEQ ID NO: 12568 - DNA, 20 bp, synthetic construct
  misc_feature 1..20: note = Description of Artificial Sequence: Synthetic oligonucleotide
  misc_feature 1..20: note = Target: SCN10A; (+) strand; PAM type: NNNNGHTT; PAM sequence: TAAAGTTT
  source 1..20: mol_type = other DNA
gcttcttgtgtcatatgtaa

SEQ ID NO: 12569 - DNA, 20 bp, synthetic construct
  misc_feature 1..20: note = Description of Artificial Sequence: Synthetic oligonucleotide
  misc_feature 1..20: note = Target: SCN10A; (+) strand; PAM type: NNNNGHTT; PAM sequence: CTTTGTTT
  source 1..20: mol_type = other DNA
gaggtcataaagatattcct

SEQ ID NO: 12570 - DNA, 20 bp, synthetic construct
  misc_feature 1..20: note = Description of Artificial Sequence: Synthetic oligonucleotide
  misc_feature 1..20: note = Target: SCN10A; (+) strand; PAM type: NNNNGHTT; PAM sequence: AAAAGCTT
  source 1..20: mol_type = other DNA
ctctttgttttttcctttca

SEQ ID NO: 12571 - DNA, 20 bp, synthetic construct
  misc_feature 1..20: note = Description of Artificial Sequence: Synthetic oligonucleotide
  misc_feature 1..20: note = Target: SCN10A; (+) strand; PAM type: NNNNGHTT; PAM sequence: GTCGGCTT
  source 1..20: mol_type = other DNA
agcttatccaccacgatcaa

SEQ ID NO: 12572 - DNA, 20 bp, synthetic construct
  misc_feature 1..20: note = Description of Artificial Sequence: Synthetic oligonucleotide
  misc_feature 1..20: note = Target: SCN10A; (+) strand; PAM type: NNNNGHTT; PAM sequence: ACGTGATT
  source 1..20: mol_type = other DNA
cagaaccaatgacaaaaacc

SEQ ID NO: 12573 - DNA, 20 bp, synthetic construct
  misc_feature 1..20: note = Description of Artificial Sequence: Synthetic oligonucleotide
  misc_feature 1..20: note = Target: SCN10A; (+) strand; PAM type: NNNNGHTT; PAM sequence: CTCTGTTT
  source 1..20: mol_type = other DNA
aaaagaggaagtcaaattgt

SEQ ID NO: 12574 - DNA, 20 bp, synthetic construct
  misc_feature 1..20: note = Description of Artificial Sequence: Synthetic oligonucleotide
  misc_feature 1..20: note = Target: SCN10A; (+) strand; PAM type: NNNNGHTT; PAM sequence: TATAGATT
  source 1..20: mol_type = other DNA
ccatactgcccaaagtaatt

SEQ ID NO: 12575 - DNA, 20 bp, synthetic construct
  misc_feature 1..20: note = Description of Artificial Sequence: Synthetic oligonucleotide
  misc_feature 1..20: note = Target: SCN10A; (+) strand; PAM type: NNNNGHTT; PAM sequence: AAAGGATT
  source 1..20: mol_type = other DNA
gacaaaagcaagcaatgggg

SEQ ID NO: 12576 - DNA, 20 bp, synthetic construct
  misc_feature 1..20: note = Description of Artificial Sequence: Synthetic oligonucleotide
  misc_feature 1..20: note = Target: SCN10A; (+) strand; PAM type: NNNNGHTT; PAM sequence: GATAGATT
  source 1..20: mol_type = other DNA
ttacacaaaaattaactcaa

SEQ ID NO: 12577 - DNA, 20 bp, synthetic construct
  misc_feature 1..20: note = Description of Artificial Sequence: Synthetic oligonucleotide
  misc_feature 1..20: note = Target: SCN10A; (+) strand; PAM type: NNNNGHTT; PAM sequence: AAAGGCTT
  source 1..20: mol_type = other DNA
ttcaggacataggcatgggc

SEQ ID NO: 12578 - DNA, 20 bp, synthetic construct
  misc_feature 1..20: note = Description of Artificial Sequence: Synthetic oligonucleotide
  misc_feature 1..20: note = Target: SCN10A; (+) strand; PAM type: NNNNGHTT; PAM sequence: AAGAGCTT
  source 1..20: mol_type = other DNA
aatggaatccaattaaacta

SEQ ID NO: 12579 - DNA, 20 bp, synthetic construct
  misc_feature 1..20: note = Description of Artificial Sequence: Synthetic oligonucleotide
  misc_feature 1..20: note = Target: SCN10A; (+) strand; PAM type: NNNNGHTT; PAM sequence: GAATGCTT
  source 1..20: mol_type = other DNA
gagaggatgtggagagatag

SEQ ID NO: 12580 - DNA, 20 bp, synthetic construct
  misc_feature 1..20: note = Description of Artificial Sequence: Synthetic oligonucleotide
  misc_feature 1..20: note = Target: SCN10A; (+) strand; PAM type: NNNNGHTT; PAM sequence: TGGTGATT
  source 1..20: mol_type = other DNA
aaccattgtggaagacagtg

SEQ ID NO: 12581 - DNA, 20 bp, synthetic construct
  misc_feature 1..20: note = Description of Artificial Sequence: Synthetic oligonucleotide
  misc_feature 1..20: note = Target: SCN10A; (+) strand; PAM type: NNNNGHTT; PAM sequence: AAAGGATT
  source 1..20: mol_type = other DNA
ccattactgggtatataccc

SEQ ID NO: 12582 - DNA, 20 bp, synthetic construct
  misc_feature 1..20: note = Description of Artificial Sequence: Synthetic oligonucleotide
  misc_feature 1..20: note = Target: SCN10A; (+) strand; PAM type: NNNNGHTT; PAM sequence: GTATGTTT
  source 1..20: mol_type = other DNA
ctataaagatacaagcatgc

SEQ ID NO: 12583 - DNA, 20 bp, synthetic construct
  misc_feature 1..20: note = Description of Artificial Sequence: Synthetic oligonucleotide
  misc_feature 1..20: note = Target: SCN10A; (+) strand; PAM type: NNNNGHTT; PAM sequence: AAGGGCTT
  source 1..20: mol_type = other DNA
acttaaagtaaaatttaaaa

SEQ ID NO: 12584 - DNA, 20 bp, synthetic construct
  misc_feature 1..20: note = Description of Artificial Sequence: Synthetic oligonucleotide
  misc_feature 1..20: note = Target: SCN10A; (+) strand; PAM type: NNNNGHTT; PAM sequence: AATTGATT
  source 1..20: mol_type = other DNA
tgaggtgttgatccacctag

SEQ ID NO: 12585 - DNA, 20 bp, synthetic construct
  misc_feature 1..20: note = Description of Artificial Sequence: Synthetic oligonucleotide
  misc_feature 1..20: note = Target: SCN10A; (+) strand; PAM type: NNNNGHTT; PAM sequence: GGATGTTT
  source 1..20: mol_type = other DNA
cttgtgtgtggtgcaaagtt

SEQ ID NO: 12586 - DNA, 20 bp, synthetic construct
  misc_feature 1..20: note = Description of Artificial Sequence: Synthetic oligonucleotide
  misc_feature 1..20: note = Target: SCN10A; (+) strand; PAM type: NNNNGHTT; PAM sequence: TGTAGTTT
  source 1..20: mol_type = other DNA
gtgcaaagttggatgtttaa

SEQ ID NO: 12587 - DNA, 20 bp, synthetic construct
  misc_feature 1..20: note = Description of Artificial Sequence: Synthetic oligonucleotide
  misc_feature 1..20: note = Target: SCN10A; (+) strand; PAM type: NNNNGHTT; PAM sequence: GTGAGATT
  source 1..20: mol_type = other DNA
tgtttaatgtagtttttcca

SEQ ID NO: 12588 - DNA, 20 bp, synthetic construct
  misc_feature 1..20: note = Description of Artificial Sequence: Synthetic oligonucleotide
  misc_feature 1..20: note = Target: SCN10A; (+) strand; PAM type: NNNNGHTT; PAM sequence: AGATGTTT
  source 1..20: mol_type = other DNA
gtgccaccttttcacacatt

SEQ ID NO: 12589 - DNA, 20 bp, synthetic construct
  misc_feature 1..20: note = Description of Artificial Sequence: Synthetic oligonucleotide
  misc_feature 1..20: note = Target: SCN10A; (+) strand; PAM type: NNNNGHTT; PAM sequence: GTCTGTTT
  source 1..20: mol_type = other DNA
agatgtttacatatgtgttg

SEQ ID NO: 12590 - DNA, 20 bp, synthetic construct
  misc_feature 1..20: note = Description of Artificial Sequence: Synthetic oligonucleotide
  misc_feature 1..20: note = Target: SCN10A; (+) strand; PAM type: NNNNGHTT; PAM sequence: CACTGCTT
  source 1..20: mol_type = other DNA
ccaatcttacaccaatggca

SEQ ID NO: 12591 - DNA, 20 bp, synthetic construct
  misc_feature 1..20: note = Description of Artificial Sequence: Synthetic oligonucleotide
  misc_feature 1..20: note = Target: SCN10A; (+) strand; PAM type: NNNNGHTT; PAM sequence: TAGAGCTT
  source 1..20: mol_type = other DNA
caatggcacactgcttcaat

SEQ ID NO: 12592 - DNA, 20 bp, synthetic construct
  misc_feature 1..20: note = Description of Artificial Sequence: Synthetic oligonucleotide
  misc_feature 1..20: note = Target: SCN10A; (+) strand; PAM type: NNNNGHTT; PAM sequence: AAAAGTTT
  source 1..20: mol_type = other DNA
ccactttgtatttcttcctc

SEQ ID NO: 12593 - DNA, 20 bp, synthetic construct
  misc_feature 1..20: note = Description of Artificial Sequence: Synthetic oligonucleotide
  misc_feature 1..20: note = Target: SCN10A; (+) strand; PAM type: NNNNGHTT; PAM sequence: TAAAGTTT
  source 1..20: mol_type = other DNA
aacttttgaggaagaaaatt

SEQ ID NO: 12594 - DNA, 20 bp, synthetic construct
  misc_feature 1..20: note = Description of Artificial Sequence: Synthetic oligonucleotide
  misc_feature 1..20: note = Target: SCN10A; (+) strand; PAM type: NNNNGHTT; PAM sequence: TAAAGTTT
  source 1..20: mol_type = other DNA
gaggaagaaaatttaaagtt

SEQ ID NO: 12595 - DNA, 20 bp, synthetic construct
  misc_feature 1..20: note = Description of Artificial Sequence: Synthetic oligonucleotide
  misc_feature 1..20: note = Target: SCN10A; (+) strand; PAM type: NNNNGHTT; PAM sequence: TATTGATT
  source 1..20: mol_type = other DNA
ccaaaagaagcctgttgaaa

SEQ ID NO: 12596 - DNA, 20 bp, synthetic construct
  misc_feature 1..20: note = Description of Artificial Sequence: Synthetic oligonucleotide
  misc_feature 1..20: note = Target: SCN10A; (+) strand; PAM type: NNNNGHTT; PAM sequence: CACTGATT
  source 1..20: mol_type = other DNA
aatctgagaacatgtctccc

SEQ ID NO: 12597 - DNA, 20 bp, synthetic construct
  misc_feature 1..20: note = Description of Artificial Sequence: Synthetic oligonucleotide
  misc_feature 1..20: note = Target: SCN10A; (+) strand; PAM type: NNNNGHTT; PAM sequence: TTTGGTTT
  source 1..20: mol_type = other DNA
agaacatgtctccccactga

SEQ ID NO: 12598 - DNA, 20 bp, synthetic construct
  misc_feature 1..20: note = Description of Artificial Sequence: Synthetic oligonucleotide
  misc_feature 1..20: note = Target: SCN10A; (+) strand; PAM type: NNNNGHTT; PAM sequence: TTCTGTTT
  source 1..20: mol_type = other DNA
tggtatttttaaaaactatt

SEQ ID NO: 12599 - DNA, 20 bp, synthetic construct
  misc_feature 1..20: note = Description of Artificial Sequence: Synthetic oligonucleotide
  misc_feature 1..20: note = Target: SCN10A; (+) strand; PAM type: NNNNGHTT; PAM sequence: AATTGATT
  source 1..20: mol_type = other DNA
tgttgctagtgtctatacac

SEQ ID NO: 12600 - DNA, 20 bp, synthetic construct
  misc_feature 1..20: note = Description of Artificial Sequence: Synthetic oligonucleotide
  misc_feature 1..20: note = Target: SCN10A; (+) strand; PAM type: NNNNGHTT; PAM sequence: TACTGTTT
  source 1..20: mol_type = other DNA
tatactcttttattaattct

SEQ ID NO: 12601 - DNA, 20 bp, synthetic construct
  misc_feature 1..20: note = Description of Artificial Sequence: Synthetic oligonucleotide
  misc_feature 1..20: note = Target: SCN10A; (+) strand; PAM type: NNNNGHTT; PAM sequence: CTTTGCTT
  source 1..20: mol_type = other DNA
tcttcttgcacttttttttt

SEQ ID NO: 12602 - DNA, 20 bp, synthetic construct
  misc_feature 1..20: note = Description of Artificial Sequence: Synthetic oligonucleotide
  misc_feature 1..20: note = Target: SCN10A; (+) strand; PAM type: NNNNGHTT; PAM sequence: TTTGGTTT
  source 1..20: mol_type = other DNA
aactgagaagaacagacatc

SEQ ID NO: 12603 - DNA, 20 bp, synthetic construct
  misc_feature 1..20: note = Description of Artificial Sequence: Synthetic oligonucleotide
  misc_feature 1..20: note = Target: SCN10A; (+) strand; PAM type: NNNNGHTT; PAM sequence: GAAAGCTT
  source 1..20: mol_type = other DNA
ttttcttttgatctcaaagg

SEQ ID NO: 12604 - DNA, 20 bp, synthetic construct
  misc_feature 1..20: note = Description of Artificial Sequence: Synthetic oligonucleotide
  misc_feature 1..20: note = Target: SCN10A; (+) strand; PAM type: NNNNGHTT; PAM sequence: TGACGCTT
  source 1..20: mol_type = other DNA
tccatgttcacaattaagta

SEQ ID NO: 12605 - DNA, 20 bp, synthetic construct
  misc_feature 1..20: note = Description of Artificial Sequence: Synthetic oligonucleotide
  misc_feature 1..20: note = Target: SCN10A; (+) strand; PAM type: NNNNGHTT; PAM sequence: GCCGGTTT
  source 1..20: mol_type = other DNA
ggggtacatgtgcagaacgt

SEQ ID NO: 12606 - DNA, 20 bp, synthetic construct
  misc_feature 1..20: note = Description of Artificial Sequence: Synthetic oligonucleotide
  misc_feature 1..20: note = Target: SCN10A; (+) strand; PAM type: NNNNGHTT; PAM sequence: GGTGGTTT
  source 1..20: mol_type = other DNA
cataggtgtacccgtgccat

SEQ ID NO: 12607 - DNA, 20 bp, synthetic construct
  misc_feature 1..20: note = Description of Artificial Sequence: Synthetic oligonucleotide
  misc_feature 1..20: note = Target: SCN10A; (+) strand; PAM type: NNNNGHTT; PAM sequence: CGGTGTTT
  source 1..20: mol_type = other DNA
cacttatgagtgagaacata

SEQ ID NO: 12608 - DNA, 20 bp, synthetic construct
  misc_feature 1..20: note = Description of Artificial Sequence: Synthetic oligonucleotide
  misc_feature 1..20: note = Target: SCN10A; (+) strand; PAM type: NNNNGHTT; PAM sequence: TTTGGTTT
  source 1..20: mol_type = other DNA
atgagtgagaacatacggtg

SEQ ID NO: 12609 - DNA, 20 bp, synthetic construct
  misc_feature 1..20: note = Description of Artificial Sequence: Synthetic oligonucleotide
  misc_feature 1..20: note = Target: SCN10A; (+) strand; PAM type: NNNNGHTT; PAM sequence: GTTAGTTT
  source 1..20: mol_type = other DNA
gtttggttttctgttcttgt

SEQ ID NO: 12610 - DNA, 20 bp, synthetic construct
  misc_feature 1..20: note = Description of Artificial Sequence: Synthetic oligonucleotide
  misc_feature 1..20: note = Target: SCN10A; (+) strand; PAM type: NNNNGHTT; PAM sequence: GATGGTTT
  source 1..20: mol_type = other DNA
tgtgttagtttgctgagaat

SEQ ID NO: 12611 - DNA, 20 bp, synthetic construct
  misc_feature 1..20: note = Description of Artificial Sequence: Synthetic oligonucleotide
  misc_feature 1..20: note = Target: SCN10A; (+) strand; PAM type: NNNNGHTT; PAM sequence: TCCAGCTT
  source 1..20: mol_type = other DNA
gtttgctgagaatgatggtt

SEQ ID NO: 12612 - DNA, 20 bp, synthetic construct
  misc_feature 1..20: note = Description of Artificial Sequence: Synthetic oligonucleotide
  misc_feature 1..20: note = Target: SCN10A; (+) strand; PAM type: NNNNGHTT; PAM sequence: AAATGATT
  source 1..20: mol_type = other DNA
aatggaaattaaactttatc

SEQ ID NO: 12613 - DNA, 20 bp, synthetic construct
  misc_feature 1..20: note = Description of Artificial Sequence: Synthetic oligonucleotide
  misc_feature 1..20: note = Target: SCN10A; (+) strand; PAM type: NNNNGHTT; PAM sequence: TTATGATT
  source 1..20: mol_type = other DNA
tgttgtggcatgcattactg

SEQ ID NO: 12614 - DNA, 20 bp, synthetic construct
  misc_feature 1..20: note = Description of Artificial Sequence: Synthetic oligonucleotide
  misc_feature 1..20: note = Target: SCN10A; (+) strand; PAM type: NNNNGHTT; PAM sequence: GAATGTTT
  source 1..20: mol_type = other DNA
ctcccagatgtgtggatatg

SEQ ID NO: 12615 - DNA, 20 bp, synthetic construct
  misc_feature 1..20: note = Description of Artificial Sequence: Synthetic oligonucleotide
  misc_feature 1..20: note = Target: SCN10A; (+) strand; PAM type: NNNNGHTT; PAM sequence: CCCAGATT
  source 1..20: mol_type = other DNA
tggaatgtttttggaaaact

SEQ ID NO: 12616 - DNA, 20 bp, synthetic construct
  misc_feature 1..20: note = Description of Artificial Sequence: Synthetic oligonucleotide
  misc_feature 1..20: note = Target: SCN10A; (+) strand; PAM type: NNNNGHTT; PAM sequence: AGGGGTTT
  source 1..20: mol_type = other DNA
ctcccagattctgaaactat

SEQ ID NO: 12617 - DNA, 20 bp, synthetic construct
  misc_feature 1..20: note = Description of Artificial Sequence: Synthetic oligonucleotide
  misc_feature 1..20: note = Target: SCN10A; (+) strand; PAM type: NNNNGHTT; PAM sequence: AACAGCTT
  source 1..20: mol_type = other DNA
atatgaagcatgataactta

SEQ ID NO: 12618 - DNA, 20 bp, synthetic construct
  misc_feature 1..20: note = Description of Artificial Sequence: Synthetic oligonucleotide
  misc_feature 1..20: note = Target: SCN10A; (+) strand; PAM type: NNNNGHTT; PAM sequence: CTCAGTTT
  source 1..20: mol_type = other DNA
ccatttgttcttagttctgt

SEQ ID NO: 12619 - DNA, 20 bp, synthetic construct
  misc_feature 1..20: note = Description of Artificial Sequence: Synthetic oligonucleotide
  misc_feature 1..20: note = Target: SCN10A; (+) strand; PAM type: NNNNGHTT; PAM sequence: GTATGTTT
  source 1..20: mol_type = other DNA
tctttgaaactgaaaatcat

SEQ ID NO: 12620 - DNA, 20 bp, synthetic construct
  misc_feature 1..20: note = Description of Artificial Sequence: Synthetic oligonucleotide
  misc_feature 1..20: note = Target: SCN10A; (+) strand; PAM type: NNNNGHTT; PAM sequence: ATGAGATT
  source 1..20: mol_type = other DNA
attacaaagacatatagaca

SEQ ID NO: 12621 - DNA, 20 bp, synthetic construct
  misc_feature 1..20: note = Description of Artificial Sequence: Synthetic oligonucleotide
  misc_feature 1..20: note = Target: SCN10A; (+) strand; PAM type: NNNNGHTT; PAM sequence: GAATGATT
  source 1..20: mol_type = other DNA
tctaggatcaccttgatgct

SEQ ID NO: 12622 - DNA, 20 bp, synthetic construct
  misc_feature 1..20: note = Description of Artificial Sequence: Synthetic oligonucleotide
  misc_feature 1..20: note = Target: SCN10A; (+) strand; PAM type: NNNNGHTT; PAM sequence: ATTAGCTT
  source 1..20: mol_type = other DNA
attcataaatcttagccaat

SEQ ID NO: 12623 - DNA, 20 bp, synthetic construct
  misc_feature 1..20: note = Description of Artificial Sequence: Synthetic oligonucleotide
  misc_feature 1..20: note = Target: SCN10A; (+) strand; PAM type: NNNNGHTT; PAM sequence: ATCTGTTT
  source 1..20: mol_type = other DNA
ctgcagagatgtgaactctt

SEQ ID NO: 12624 - DNA, 20 bp, synthetic construct
  misc_feature 1..20: note = Description of Artificial Sequence: Synthetic oligonucleotide
  misc_feature 1..20: note = Target: SCN10A; (+) strand; PAM type: NNNNGHTT; PAM sequence: ATTAGTTT
  source 1..20: mol_type = other DNA
aggtacaaactttcatggga

SEQ ID NO: 12625 - DNA, 20 bp, synthetic construct
  misc_feature 1..20: note = Description of Artificial Sequence: Synthetic oligonucleotide
  misc_feature 1..20: note = Target: SCN10A; (+) strand; PAM type: NNNNGHTT; PAM sequence: ATCAGATT
  source 1..20: mol_type = other DNA
ctttcatgggaattagtttc

SEQ ID NO: 12626 - DNA, 20 bp, synthetic construct
  misc_feature 1..20: note = Description of Artificial Sequence: Synthetic oligonucleotide
  misc_feature 1..20: note = Target: SCN10A; (+) strand; PAM type: NNNNGHTT; PAM sequence: GATTGTTT
  source 1..20: mol_type = other DNA
catgggaattagtttcatca

SEQ ID NO: 12627 - DNA, 20 bp, synthetic construct
  misc_feature 1..20: note = Description of Artificial Sequence: Synthetic oligonucleotide
  misc_feature 1..20: note = Target: SCN10A; (+) strand; PAM type: NNNNGHTT; PAM sequence: GTAGGATT
  source 1..20: mol_type = other DNA
gctcaggaagaaaaccccaa

SEQ ID NO: 12628 - DNA, 20 bp, synthetic construct
  misc_feature 1..20: note = Description of Artificial Sequence: Synthetic oligonucleotide
  misc_feature 1..20: note = Target: SCN10A; (+) strand; PAM type: NNNNGHTT; PAM sequence: AAGGGATT
  source 1..20: mol_type = other DNA
ttgacagcagactatgggca

SEQ ID NO: 12629 - DNA, 20 bp, synthetic construct
  misc_feature 1..20: note = Description of Artificial Sequence: Synthetic oligonucleotide
  misc_feature 1..20: note = Target: SCN10A; (+) strand; PAM type: NNNNGHTT; PAM sequence: CAGTGCTT
  source 1..20: mol_type = other DNA
aggaatagctgggctcccaa

SEQ ID NO: 12630 - DNA, 20 bp, synthetic construct
  misc_feature 1..20: note = Description of Artificial Sequence: Synthetic oligonucleotide
  misc_feature 1..20: note = Target: SCN10A; (+) strand; PAM type: NNNNGHTT; PAM sequence: TTTAGTTT
  source 1..20: mol_type = other DNA
gcagaagtatttaaatgtat

SEQ ID NO: 12631 - DNA, 20 bp, synthetic construct
  misc_feature 1..20: note = Description of Artificial Sequence: Synthetic oligonucleotide
  misc_feature 1..20: note = Target: SCN10A; (+) strand; PAM type: NNNNGHTT; PAM sequence: TCTAGTTT
  source 1..20: mol_type = other DNA
tctgtaaatgccttgatgtg

SEQ ID NO: 12632 - DNA, 20 bp, synthetic construct
  misc_feature 1..20: note = Description of Artificial Sequence: Synthetic oligonucleotide
  misc_feature 1..20: note = Target: SCN10A; (+) strand; PAM type: NNNNGHTT; PAM sequence: CAAGGATT
  source 1..20: mol_type = other DNA
catggggggaaatgttaatc

SEQ ID NO: 12633 - DNA, 20 bp, synthetic construct
  misc_feature 1..20: note = Description of Artificial Sequence: Synthetic oligonucleotide
  misc_feature 1..20: note = Target: SCN10A; (+) strand; PAM type: NNNNGHTT; PAM sequence: ATGTGATT
  source 1..20: mol_type = other DNA
tatgaaaacattcatagcaa

SEQ ID NO: 12634 - DNA, 20 bp, synthetic construct
  misc_feature 1..20: note = Description of Artificial Sequence: Synthetic oligonucleotide
  misc_feature 1..20: note = Target: SCN10A; (+) strand; PAM type: NNNNGHTT; PAM sequence: ATGAGATT
  source 1..20: mol_type = other DNA
gggctggagttaccaaattt

SEQ ID NO: 12635 - DNA, 20 bp, synthetic construct
  misc_feature 1..20: note = Description of Artificial Sequence: Synthetic oligonucleotide
  misc_feature 1..20: note = Target: SCN10A; (+) strand; PAM type: NNNNGHTT; PAM sequence: AACAGCTT
  source 1..20: mol_type = other DNA
tgtgaggaagagaccccctc

SEQ ID NO: 12636 - DNA, 20 bp, synthetic construct
  misc_feature 1..20: note = Description of Artificial Sequence: Synthetic oligonucleotide
  misc_feature 1..20: note = Target: SCN10A; (+) strand; PAM type: NNNNGHTT; PAM sequence: AGGGGATT
  source 1..20: mol_type = other DNA
ctggtcacttggttcttttt

SEQ ID NO: 12637 - DNA, 20 bp, synthetic construct
  misc_feature 1..20: note = Description of Artificial Sequence: Synthetic oligonucleotide
  misc_feature 1..20: note = Target: SCN10A; (+) strand; PAM type: NNNNGHTT; PAM sequence: AGCTGTTT
  source 1..20: mol_type = other DNA
aggggattttatttctaatt

SEQ ID NO: 12638 - DNA, 20 bp, synthetic construct
  misc_feature 1..20: note = Description of Artificial Sequence: Synthetic oligonucleotide
  misc_feature 1..20: note = Target: SCN10A; (+) strand; PAM type: NNNNGHTT; PAM sequence: AGGAGTTT
  source 1..20: mol_type = other DNA
ttcaaccagaatccataaag

SEQ ID NO: 12639 - DNA, 20 bp, synthetic construct
  misc_feature 1..20: note = Description of Artificial Sequence: Synthetic oligonucleotide
  misc_feature 1..20: note = Target: SCN10A; (+) strand; PAM type: NNNNGHTT; PAM sequence: GTATGTTT
  source 1..20: mol_type = other DNA
gaatccataaagaggagttt

SEQ ID NO: 12640 - DNA, 20 bp, synthetic construct
  misc_feature 1..20: note = Description of Artificial Sequence: Synthetic oligonucleotide
  misc_feature 1..20: note = Target: SCN10A; (+) strand; PAM type: NNNNGHTT; PAM sequence: TTGTGATT
  source 1..20: mol_type = other DNA
ataaagaggagtttgtatgt

SEQ ID NO: 12641 - DNA, 20 bp, synthetic construct
  misc_feature 1..20: note = Description of Artificial Sequence: Synthetic oligonucleotide
  misc_feature 1..20: note = Target: SCN10A; (+) strand; PAM type: NNNNGHTT; PAM sequence: CCCTGATT
  source 1..20: mol_type = other DNA
acacattgagagaataatta

SEQ ID NO: 12642 - DNA, 20 bp, synthetic construct
  misc_feature 1..20: note = Description of Artificial Sequence: Synthetic oligonucleotide
  misc_feature 1..20: note = Target: SCN10A; (+) strand; PAM type: NNNNGHTT; PAM sequence: GTCAGTTT
  source 1..20: mol_type = other DNA
tttacttaatgcctctgtgt

SEQ ID NO: 12643 - DNA, 20 bp, synthetic construct
  misc_feature 1..20: note = Description of Artificial Sequence: Synthetic oligonucleotide
  misc_feature 1..20: note = Target: SCN10A; (+) strand; PAM type: NNNNGHTT; PAM sequence: AGAGGCTT
  source 1..20: mol_type = other DNA
gggatggtaatctctacttc

SEQ ID NO: 12644 - DNA, 20 bp, synthetic construct
  misc_feature 1..20: note = Description of Artificial Sequence: Synthetic oligonucleotide
  misc_feature 1..20: note = Target: SCN10A; (+) strand; PAM type: NNNNGHTT; PAM sequence: TCAAGATT
  source 1..20: mol_type = other DNA
cttctgtagaatctgaaaat

SEQ ID NO: 12645 - DNA, 20 bp, synthetic construct
  misc_feature 1..20: note = Description of Artificial Sequence: Synthetic oligonucleotide
  misc_feature 1..20: note = Target: SCN10A; (+) strand; PAM type: NNNNGHTT; PAM sequence: TGCAGCTT
  source 1..20: mol_type = other DNA
aatgcaacttcatcaagctg

SEQ ID NO: 12646 - DNA, 20 bp, synthetic construct
  misc_feature 1..20: note = Description of Artificial Sequence: Synthetic oligonucleotide
  misc_feature 1..20: note = Target: SCN10A; (+) strand; PAM type: NNNNGHTT; PAM sequence: ACTAGTTT
  source 1..20: mol_type = other DNA
aaccaaagtatcttttttct

SEQ ID NO: 12647 - DNA, 20 bp, synthetic construct
  misc_feature 1..20: note = Description of Artificial Sequence: Synthetic oligonucleotide
  misc_feature 1..20: note = Target: SCN10A; (+) strand; PAM type: NNNNGHTT; PAM sequence: TTTGGCTT
  source 1..20: mol_type = other DNA
aagtatcttttttctactag

SEQ ID NO: 12648 - DNA, 20 bp, synthetic construct
  misc_feature 1..20: note = Description of Artificial Sequence: Synthetic oligonucleotide
  misc_feature 1..20: note = Target: SCN10A; (+) strand; PAM type: NNNNGHTT; PAM sequence: AGCAGCTT
  source 1..20: mol_type = other DNA
gccttgcaaaatcccctgaa

SEQ ID NO: 12649 - DNA, 20 bp, synthetic construct
  misc_feature 1..20: note = Description of Artificial Sequence: Synthetic oligonucleotide
  misc_feature 1..20: note = Target: SCN10A; (+) strand; PAM type: NNNNGHTT; PAM sequence: ATCAGATT
  source 1..20: mol_type = other DNA
cagtcttgtatggcatgaac

SEQ ID NO: 12650 - DNA, 20 bp, synthetic construct
  misc_feature 1..20: note = Description of Artificial Sequence: Synthetic oligonucleotide
  misc_feature 1..20: note = Target: SCN10A; (+) strand; PAM type: NNNNGHTT; PAM sequence: AGTAGTTT
  source 1..20: mol_type = other DNA
attgacattttaaacctgct

SEQ ID NO: 12651 - DNA, 20 bp, synthetic construct
  misc_feature 1..20: note = Description of Artificial Sequence: Synthetic oligonucleotide
  misc_feature 1..20: note = Target: SCN10A; (+) strand; PAM type: NNNNGHTT; PAM sequence: GTCTGTTT
  source 1..20: mol_type = other DNA
tgtgtgctcttcccatcatg

SEQ ID NO: 12652 - DNA, 20 bp, synthetic construct
  misc_feature 1..20: note = Description of Artificial Sequence: Synthetic oligonucleotide
  misc_feature 1..20: note = Target: SCN10A; (+) strand; PAM type: NNNNGHTT; PAM sequence: GAAGGCTT
  source 1..20: mol_type = other DNA
gcctatctcatctgcccaaa

SEQ ID NO: 12653 - DNA, 20 bp, synthetic construct
  misc_feature 1..20: note = Description of Artificial Sequence: Synthetic oligonucleotide
  misc_feature 1..20: note = Target: SCN10A; (+) strand; PAM type: NNNNGHTT; PAM sequence: GGATGTTT
  source 1..20: mol_type = other DNA
caaacctcccctcataaaga

SEQ ID NO: 12654 - DNA, 20 bp, synthetic construct
  misc_feature 1..20: note = Description of Artificial Sequence: Synthetic oligonucleotide
  misc_feature 1..20: note = Target: SCN10A; (+) strand; PAM type: NNNNGHTT; PAM sequence: TCTAGATT
  source 1..20: mol_type = other DNA
gttgtgcatccacaggtgtg

SEQ ID NO: 12655 - DNA, 20 bp, synthetic construct
  misc_feature 1..20: note = Description of Artificial Sequence: Synthetic oligonucleotide
  misc_feature 1..20: note = Target: SCN10A; (+) strand; PAM type: NNNNGHTT; PAM sequence: GACTGCTT
  source 1..20: mol_type = other DNA
acacttcttctgtgtcttgg

SEQ ID NO: 12656 - DNA, 20 bp, synthetic construct
  misc_feature 1..20: note = Description of Artificial Sequence: Synthetic oligonucleotide
  misc_feature 1..20: note = Target: SCN10A; (+) strand; PAM type: NNNNGHTT; PAM sequence: TTGGGATT
  source 1..20: mol_type = other DNA
ctaatgacctcattgtactt

SEQ ID NO: 12657 - DNA, 20 bp, synthetic construct
  misc_feature 1..20: note = Description of Artificial Sequence: Synthetic oligonucleotide
  misc_feature 1..20: note = Target: SCN10A; (+) strand; PAM type: NNNNGHTT; PAM sequence: ACAAGATT
  source 1..20: mol_type = other DNA
aagtggacctccaatgagaa

SEQ ID NO: 12658 - DNA, 20 bp, synthetic construct
  misc_feature 1..20: note = Description of Artificial Sequence: Synthetic oligonucleotide
  misc_feature 1..20: note = Target: SCN10A; (+) strand; PAM type: NNNNGHTT; PAM sequence: CCATGTTT
  source 1..20: mol_type = other DNA
aaacaagattccttatacaa

SEQ ID NO: 12659 - DNA, 20 bp, synthetic construct
  misc_feature 1..20: note = Description of Artificial Sequence: Synthetic oligonucleotide
  misc_feature 1..20: note = Target: SCN10A; (+) strand; PAM type: NNNNGHTT; PAM sequence: TCAGGCTT
  source 1..20: mol_type = other DNA
taaacatgagaggcattatc

SEQ ID NO: 12660 - DNA, 20 bp, synthetic construct
  misc_feature 1..20: note = Description of Artificial Sequence: Synthetic oligonucleotide
  misc_feature 1..20: note = Target: SCN10A; (+) strand; PAM type: NNNNGHTT; PAM sequence: CCTTGTTT
  source 1..20: mol_type = other DNA
tcttctgacaagagaaccat

SEQ ID NO: 12661 - DNA, 20 bp, synthetic construct
  misc_feature 1..20: note = Description of Artificial Sequence: Synthetic oligonucleotide
  misc_feature 1..20: note = Target: SCN10A; (+) strand; PAM type: NNNNGHTT; PAM sequence: TAATGTTT
  source 1..20: mol_type = other DNA
agagaaccatccttgttttg

SEQ ID NO: 12662 - DNA, 20 bp, synthetic construct
  misc_feature 1..20: note = Description of Artificial Sequence: Synthetic oligonucleotide
  misc_feature 1..20: note = Target: SCN10A; (+) strand; PAM type: NNNNGHTT; PAM sequence: CCTGGTTT
  source 1..20: mol_type = other DNA
ctctgtctcttaaatcctct

SEQ ID NO: 12663 - DNA, 20 bp, synthetic construct
  misc_feature 1..20: note = Description of Artificial Sequence: Synthetic oligonucleotide
  misc_feature 1..20: note = Target: SCN10A; (+) strand; PAM type: NNNNGHTT; PAM sequence: TGAGGATT
  source 1..20: mol_type = other DNA
cctctcctggtttctccctc

SEQ ID NO: 12664 - DNA, 20 bp, synthetic construct
  misc_feature 1..20: note = Description of Artificial Sequence: Synthetic oligonucleotide
  misc_feature 1..20: note = Target: SCN10A; (+) strand; PAM type: NNNNGHTT; PAM sequence: GGCTGATT
  source 1..20: mol_type = other DNA
ctgctagccatatttgagat

SEQ ID NO: 12665 - DNA, 20 bp, synthetic construct
  misc_feature 1..20: note = Description of Artificial Sequence: Synthetic oligonucleotide
  misc_feature 1..20: note = Target: SCN10A; (+) strand; PAM type: NNNNGHTT; PAM sequence: TCTTGTTT
  source 1..20: mol_type = other DNA
gataattgtcatgaagaagc

SEQ ID NO: 12666 - DNA, 20 bp, synthetic construct
  misc_feature 1..20: note = Description of Artificial Sequence: Synthetic oligonucleotide
  misc_feature 1..20: note = Target: SCN10A; (+) strand; PAM type: NNNNGHTT; PAM sequence: TACTGATT
  source 1..20: mol_type = other DNA
gaagaagctcttgtttaaac

SEQ ID NO: 12667 - DNA, 20 bp, synthetic construct
  misc_feature 1..20: note = Description of Artificial Sequence: Synthetic oligonucleotide
  misc_feature 1..20: note = Target: SCN10A; (+) strand; PAM type: NNNNGHTT; PAM sequence: TTTTGATT
  source 1..20: mol_type = other DNA
aaactactgattctcaaact

SEQ ID NO: 12668 - DNA, 20 bp, synthetic construct
  misc_feature 1..20: note = Description of Artificial Sequence: Synthetic oligonucleotide
  misc_feature 1..20: note = Target: SCN10A; (+) strand; PAM type: NNNNGHTT; PAM sequence: CAGGGATT
  source 1..20: mol_type = other DNA
attctcaaactttttgattt

SEQ ID NO: 12669 - DNA, 20 bp, synthetic construct
  misc_feature 1..20: note = Description of Artificial Sequence: Synthetic oligonucleotide
  misc_feature 1..20: note = Target: SCN10A; (+) strand; PAM type: NNNNGHTT; PAM sequence: TTTTGTTT
  source 1..20: mol_type = other DNA
tattgaggaccccaaataac

SEQ ID NO: 12670 - DNA, 20 bp, synthetic construct
  misc_feature 1..20: note = Description of Artificial Sequence: Synthetic oligonucleotide
  misc_feature 1..20: note = Target: SCN10A; (+) strand; PAM type: NNNNGHTT; PAM sequence: TTTTGTTT
  source 1..20: mol_type = other DNA
ttttgtttatgttgatacct

SEQ ID NO: 12671 - DNA, 20 bp, synthetic construct
  misc_feature 1..20: note = Description of Artificial Sequence: Synthetic oligonucleotide
  misc_feature 1..20: note = Target: SCN10A; (+) strand; PAM type: NNNNGHTT; PAM sequence: ATATGCTT
  source 1..20: mol_type = other DNA
agaaattaatatatatgtat

SEQ ID NO: 12672 - DNA, 20 bp, synthetic construct
  misc_feature 1..20: note = Description of Artificial Sequence: Synthetic oligonucleotide
  misc_feature 1..20: note = Target: SCN10A; (+) strand; PAM type: NNNNGHTT; PAM sequence: AGTAGCTT
  source 1..20: mol_type = other DNA
aatatacaggcacacattcc

SEQ ID NO: 12673 - DNA, 20 bp, synthetic construct
  misc_feature 1..20: note = Description of Artificial Sequence: Synthetic oligonucleotide
  misc_feature 1..20: note = Target: SCN10A; (+) strand; PAM type: NNNNGHTT; PAM sequence: AATAGTTT
  source 1..20: mol_type = other DNA
acatccaagtattgttatac

SEQ ID NO: 12674 - DNA, 20 bp, synthetic construct
  misc_feature 1..20: note = Description of Artificial Sequence: Synthetic oligonucleotide
  misc_feature 1..20: note = Target: SCN10A; (+) strand; PAM type: NNNNGHTT; PAM sequence: AACAGTTT
  source 1..20: mol_type = other DNA
tcattttataaacccactaa

SEQ ID NO: 12675 - DNA, 20 bp, synthetic construct
  misc_feature 1..20: note = Description of Artificial Sequence: Synthetic oligonucleotide
  misc_feature 1..20: note = Target: SCN10A; (+) strand; PAM type: NNNNGHTT; PAM sequence: ACTGGCTT
  source 1..20: mol_type = other DNA
caagatcatagttgaggacc

SEQ ID NO: 12676 - DNA, 20 bp, synthetic construct
  misc_feature 1..20: note = Description of Artificial Sequence: Synthetic oligonucleotide
  misc_feature 1..20: note = Target: SCN10A; (+) strand; PAM type: NNNNGHTT; PAM sequence: TCCTGCTT
  source 1..20: mol_type = other DNA
ggaccactggcttaaattca

SEQ ID NO: 12677 - DNA, 20 bp, synthetic construct
  misc_feature 1..20: note = Description of Artificial Sequence: Synthetic oligonucleotide
  misc_feature 1..20: note = Target: SCN10A; (+) strand; PAM type: NNNNGHTT; PAM sequence: ATCTGCTT
  source 1..20: mol_type = other DNA
ctgaaagctctgcagcagtt

SEQ ID NO: 12678 - DNA, 20 bp, synthetic construct
  misc_feature 1..20: note = Description of Artificial Sequence: Synthetic oligonucleotide
  misc_feature 1..20: note = Target: SCN10A; (+) strand; PAM type: NNNNGHTT; PAM sequence: GTGGGTTT
  source 1..20: mol_type = other DNA
agttatctgcttttgaagat

SEQ ID NO: 12679 - DNA, 20 bp, synthetic construct
  misc_feature 1..20: note = Description of Artificial Sequence: Synthetic oligonucleotide
  misc_feature 1..20: note = Target: SCN10A; (+) strand; PAM type: NNNNGHTT; PAM sequence: GTTAGTTT
  source 1..20: mol_type = other DNA
cttttgaagatgtgggttta

SEQ ID NO: 12680 - DNA, 20 bp, synthetic construct
  misc_feature 1..20: note = Description of Artificial Sequence: Synthetic oligonucleotide
  misc_feature 1..20: note = Target: SCN10A; (+) strand; PAM type: NNNNGHTT; PAM sequence: GCAGGCTT
  source 1..20: mol_type = other DNA
tagaacttgggcagctggtt

SEQ ID NO: 12681 - DNA, 20 bp, synthetic construct
  misc_feature 1..20: note = Description of Artificial Sequence: Synthetic oligonucleotide
  misc_feature 1..20: note = Target: SCN10A; (+) strand; PAM type: NNNNGHTT; PAM sequence: CGAGGCTT
  source 1..20: mol_type = other DNA
ctttcaagtccagctggggc

SEQ ID NO: 12682 - DNA, 20 bp, synthetic construct
  misc_feature 1..20: note = Description of Artificial Sequence: Synthetic oligonucleotide
  misc_feature 1..20: note = Target: SCN10A; (+) strand; PAM type: NNNNGHTT; PAM sequence: CTATGCTT
  source 1..20: mol_type = other DNA
cttcttggtccttctgctcc

SEQ ID NO: 12683 - DNA, 20 bp, synthetic construct
  misc_feature 1..20: note = Description of Artificial Sequence: Synthetic oligonucleotide
  misc_feature 1..20: note = Target: SCN10A; (+) strand; PAM type: NNNNGHTT; PAM sequence: TCTGGCTT
  source 1..20: mol_type = other DNA
ttctgctccctatgcttctc

SEQ ID NO: 12684 - DNA, 20 bp, synthetic construct
  misc_feature 1..20: note = Description of Artificial Sequence: Synthetic oligonucleotide
  misc_feature 1..20: note = Target: SCN10A; (+) strand; PAM type: NNNNGHTT; PAM sequence: CCCTGCTT
  source 1..20: mol_type = other DNA
tctctctggctttctttgtt

SEQ ID NO: 12685 - DNA, 20 bp, synthetic construct
  misc_feature 1..20: note = Description of Artificial Sequence: Synthetic oligonucleotide
  misc_feature 1..20: note = Target: SCN10A; (+) strand; PAM type: NNNNGHTT; PAM sequence: ATTTGCTT
  source 1..20: mol_type = other DNA
ttgttccctgcttggcagca

SEQ ID NO: 12686 - DNA, 20 bp, synthetic construct
  misc_feature 1..20: note = Description of Artificial Sequence: Synthetic oligonucleotide
  misc_feature 1..20: note = Target: SCN10A; (+) strand; PAM type: NNNNGHTT; PAM sequence: GTTAGTTT
  source 1..20: mol_type = other DNA
ggagtaaagcgacggaagtt

SEQ ID NO: 12687 - DNA, 20 bp, synthetic construct
  misc_feature 1..20: note = Description of Artificial Sequence: Synthetic oligonucleotide
  misc_feature 1..20: note = Target: SCN10A; (+) strand; PAM type: NNNNGHTT; PAM sequence: GACAGCTT
  source 1..20: mol_type = other DNA
ggacataaccacagagaggt

SEQ ID NO: 12688 - DNA, 20 bp, synthetic construct
  misc_feature 1..20: note = Description of Artificial Sequence: Synthetic oligonucleotide
  misc_feature 1..20: note = Target: SCN10A; (+) strand; PAM type: NNNNGHTT; PAM sequence: TCTTGATT
  source 1..20: mol_type = other DNA
tgtccctctcatctgtccca

SEQ ID NO: 12689 - DNA, 20 bp, synthetic construct
  misc_feature 1..20: note = Description of Artificial Sequence: Synthetic oligonucleotide
  misc_feature 1..20: note = Target: SCN10A; (+) strand; PAM type: NNNNGHTT; PAM sequence: GGCTGTTT
  source 1..20: mol_type = other DNA
cctgcaaggcattcagggga

SEQ ID NO: 12690 - DNA, 20 bp, synthetic construct
  misc_feature 1..20: note = Description of Artificial Sequence: Synthetic oligonucleotide
  misc_feature 1..20: note = Target: SCN10A; (+) strand; PAM type: NNNNGHTT; PAM sequence: ATGTGCTT
  source 1..20: mol_type = other DNA
gggttatgtctttgctcccc

SEQ ID NO: 12691 - DNA, 20 bp, synthetic construct
  misc_feature 1..20: note = Description of Artificial Sequence: Synthetic oligonucleotide
  misc_feature 1..20: note = Target: SCN10A; (+) strand; PAM type: NNNNGHTT; PAM sequence: CATTGCTT
  source 1..20: mol_type = other DNA
ctccccatgtgcttctatgt

SEQ ID NO: 12692 - DNA, 20 bp, synthetic construct
  misc_feature 1..20: note = Description of Artificial Sequence: Synthetic oligonucleotide
  misc_feature 1..20: note = Target: SCN10A; (+) strand; PAM type: NNNNGHTT; PAM sequence: ACCAGATT
  source 1..20: mol_type = other DNA
tgtaccatcctaccaccacc

SEQ ID NO: 12693 - DNA, 20 bp, synthetic construct
  misc_feature 1..20: note = Description of Artificial Sequence: Synthetic oligonucleotide
  misc_feature 1..20: note = Target: SCN10A; (+) strand; PAM type: NNNNGHTT; PAM sequence: TTTGGTTT
  source 1..20: mol_type = other DNA
ctcccatattcatcaaagac

SEQ ID NO: 12694 - DNA, 20 bp, synthetic construct
  misc_feature 1..20: note = Description of Artificial Sequence: Synthetic oligonucleotide
  misc_feature 1..20: note = Target: SCN10A; (+) strand; PAM type: NNNNGHTT; PAM sequence: ACCTGTTT
  source 1..20: mol_type = other DNA
gacattgtcaacatttctcc

SEQ ID NO: 12695 - DNA, 20 bp, synthetic construct
  misc_feature 1..20: note = Description of Artificial Sequence: Synthetic oligonucleotide
  misc_feature 1..20: note = Target: SCN10A; (+) strand; PAM type: NNNNGHTT; PAM sequence: TCCAGATT
  source 1..20: mol_type = other DNA
cctccaagttactggagaac

SEQ ID NO: 12696 - DNA, 20 bp, synthetic construct
  misc_feature 1..20: note = Description of Artificial Sequence: Synthetic oligonucleotide
  misc_feature 1..20: note = Target: SCN10A; (+) strand; PAM type: NNNNGHTT; PAM sequence: ACCAGATT
  source 1..20: mol_type = other DNA
gctgaacacttttccccata

SEQ ID NO: 12697 - DNA, 20 bp, synthetic construct
  misc_feature 1..20: note = Description of Artificial Sequence: Synthetic oligonucleotide
  misc_feature 1..20: note = Target: SCN10A; (+) strand; PAM type: NNNNGHTT; PAM sequence: AGCAGTTT
  source 1..20: mol_type = other DNA
atcatatggtatccctagtc

SEQ ID NO: 12698 - DNA, 20 bp, synthetic construct
  misc_feature 1..20: note = Description of Artificial Sequence: Synthetic oligonucleotide
  misc_feature 1..20: note = Target: SCN10A; (+) strand; PAM type: NNNNGHTT; PAM sequence: TGAGGTTT
  source 1..20: mol_type = other DNA
gtcagcagtttcttctagtc

SEQ ID NO: 12699 - DNA, 20 bp, synthetic construct
  misc_feature 1..20: note = Description of Artificial Sequence: Synthetic oligonucleotide
  misc_feature 1..20: note = Target: SCN10A; (+) strand; PAM type: NNNNGHTT; PAM sequence: CTCTGCTT
  source 1..20: mol_type = other DNA
tctaaggaccattcctttcc

SEQ ID NO: 12700 - DNA, 20 bp, synthetic construct
  misc_feature 1..20: note = Description of Artificial Sequence: Synthetic oligonucleotide
  misc_feature 1..20: note = Target: SCN10A; (+) strand; PAM type: NNNNGHTT; PAM sequence: AGATGCTT
  source 1..20: mol_type = other DNA
tctttcctatcagcatttaa

SEQ ID NO: 12701 - DNA, 20 bp, synthetic construct
  misc_feature 1..20: note = Description of Artificial Sequence: Synthetic oligonucleotide
  misc_feature 1..20: note = Target: SCN10A; (+) strand; PAM type: NNNNGHTT; PAM sequence: ATTGGCTT
  source 1..20: mol_type = other DNA
cctcctctctcctgttctct

SEQ ID NO: 12702 - DNA, 20 bp, synthetic construct
  misc_feature 1..20: note = Description of Artificial Sequence: Synthetic oligonucleotide
  misc_feature 1..20: note = Target: SCN10A; (+) strand; PAM type: NNNNGHTT; PAM sequence: CACTGTTT
  source 1..20: mol_type = other DNA
ataaaggacttacttctact

SEQ ID NO: 12703 - DNA, 20 bp, synthetic construct
  misc_feature 1..20: note = Description of Artificial Sequence: Synthetic oligonucleotide
  misc_feature 1..20: note = Target: SCN10A; (+) strand; PAM type: NNNNGHTT; PAM sequence: TGAAGCTT
  source 1..20: mol_type = other DNA
tccagtcacttttcagtctt

SEQ ID NO: 12704 - DNA, 20 bp, synthetic construct
  misc_feature 1..20: note = Description of Artificial Sequence: Synthetic oligonucleotide
  misc_feature 1..20: note = Target: SCN10A; (+) strand; PAM type: NNNNGHTT; PAM sequence: CTTGGATT
  source 1..20: mol_type = other DNA
tcacttttcagtctttgaag

SEQ ID NO: 12705 - DNA, 20 bp, synthetic construct
  misc_feature 1..20: note = Description of Artificial Sequence: Synthetic oligonucleotide
  misc_feature 1..20: note = Target: SCN10A; (+) strand; PAM type: NNNNGHTT; PAM sequence: AAATGCTT
  source 1..20: mol_type = other DNA
tttgccctcctatctcacta

SEQ ID NO: 12706 - DNA, 20 bp, synthetic construct
  misc_feature 1..20: note = Description of Artificial Sequence: Synthetic oligonucleotide
  misc_feature 1..20: note = Target: SCN10A; (+) strand; PAM type: NNNNGHTT; PAM sequence: AAGAGATT
  source 1..20: mol_type = other DNA
atgcttccttgcagggatac

SEQ ID NO: 12707 - DNA, 20 bp, synthetic construct
  misc_feature 1..20: note = Description of Artificial Sequence: Synthetic oligonucleotide
  misc_feature 1..20: note = Target: SCN10A; (+) strand; PAM type: NNNNGHTT; PAM sequence: TTTTGTTT
  source 1..20: mol_type = other DNA
cccttctcagttcttgtctt

SEQ ID NO: 12708 - DNA, 20 bp, synthetic construct
  misc_feature 1..20: note = Description of Artificial Sequence: Synthetic oligonucleotide
  misc_feature 1..20: note = Target: SCN10A; (+) strand; PAM type: NNNNGHTT; PAM sequence: GCTAGTTT
  source 1..20: mol_type = other DNA
ggcacatgtcaccacactcg

SEQ ID NO: 12709 - DNA, 20 bp, synthetic construct
  misc_feature 1..20: note = Description of Artificial Sequence: Synthetic oligonucleotide
  misc_feature 1..20: note = Target: SCN10A; (+) strand; PAM type: NNNNGHTT; PAM sequence: GGCTGTTT
  source 1..20: mol_type = other DNA
cttatcttgatggtcctatt

SEQ ID NO: 12710 - DNA, 20 bp, synthetic construct
  misc_feature 1..20: note = Description of Artificial Sequence: Synthetic oligonucleotide
  misc_feature 1..20: note = Target: SCN10A; (+) strand; PAM type: NNNNGHTT; PAM sequence: CTTGGTTT
  source 1..20: mol_type = other DNA
tttggctaccatgacactct

SEQ ID NO: 12711 - DNA, 20 bp, synthetic construct
  misc_feature 1..20: note = Description of Artificial Sequence: Synthetic oligonucleotide
  misc_feature 1..20: note = Target: SCN10A; (+) strand; PAM type: NNNNGHTT; PAM sequence: CTCAGCTT
  source 1..20: mol_type = other DNA
tccttctcagtctctccttt

SEQ ID NO: 12712 - DNA, 20 bp, synthetic construct
  misc_feature 1..20: note = Description of Artificial Sequence: Synthetic oligonucleotide
  misc_feature 1..20: note = Target: SCN10A; (+) strand; PAM type: NNNNGHTT; PAM sequence: ACATGATT
  source 1..20: mol_type = other DNA
cctttctcagcttttcccat

SEQ ID NO: 12713 - DNA, 20 bp, synthetic construct
  misc_feature 1..20: note = Description of Artificial Sequence: Synthetic oligonucleotide
  misc_feature 1..20: note = Target: SCN10A; (+) strand; PAM type: NNNNGHTT; PAM sequence: TTTTGTTT
  source 1..20: mol_type = other DNA
gtgaataatggcactctatc

SEQ ID NO: 12714 - DNA, 20 bp, synthetic construct
  misc_feature 1..20: note = Description of Artificial Sequence: Synthetic oligonucleotide
  misc_feature 1..20: note = Target: SCN10A; (+) strand; PAM type: NNNNGHTT; PAM sequence: CTGAGATT
  source 1..20: mol_type = other DNA
ttcaacagcgctagcattta

SEQ ID NO: 12715 - DNA, 20 bp, synthetic construct
  misc_feature 1..20: note = Description of Artificial Sequence: Synthetic oligonucleotide
  misc_feature 1..20: note = Target: SCN10A; (+) strand; PAM type: NNNNGHTT; PAM sequence: TCTGGATT
  source 1..20: mol_type = other DNA
gattccactgtatttcagac

SEQ ID NO: 12716 - DNA, 20 bp, synthetic construct
  misc_feature 1..20: note = Description of Artificial Sequence: Synthetic oligonucleotide
  misc_feature 1..20: note = Target: SCN10A; (+) strand; PAM type: NNNNGHTT; PAM sequence: GTATGTTT
  source 1..20: mol_type = other DNA
agaacggtacttaaactcag

SEQ ID NO: 12717 - DNA, 20 bp, synthetic construct
  misc_feature 1..20: note = Description of Artificial Sequence: Synthetic oligonucleotide
  misc_feature 1..20: note = Target: SCN10A; (+) strand; PAM type: NNNNGHTT; PAM sequence: GCCTGTTT
  source 1..20: mol_type = other DNA
actgccattagccccaaata

SEQ ID NO: 12718 - DNA, 20 bp, synthetic construct
  misc_feature 1..20: note = Description of Artificial Sequence: Synthetic oligonucleotide
  misc_feature 1..20: note = Target: SCN10A; (+) strand; PAM type: NNNNGHTT; PAM sequence: TGTTGCTT
  source 1..20: mol_type = other DNA
tacaatcaaacatctagtgc

SEQ ID NO: 12719 - DNA, 20 bp, synthetic construct
  misc_feature 1..20: note = Description of Artificial Sequence: Synthetic oligonucleotide
  misc_feature 1..20: note = Target: SCN10A; (+) strand; PAM type: NNNNGHTT; PAM sequence: TTTTGATT
  source 1..20: mol_type = other DNA
cactggcctcgtatgtgtca

SEQ ID NO: 12720 - DNA, 20 bp, synthetic construct
  misc_feature 1..20: note = Description of Artificial Sequence: Synthetic oligonucleotide
  misc_feature 1..20: note = Target: SCN10A; (+) strand; PAM type: NNNNGHTT; PAM sequence: ATAAGTTT
  source 1..20: mol_type = other DNA
tccccagccacactactttt

SEQ ID NO: 12721 - DNA, 20 bp, synthetic construct
  misc_feature 1..20: note = Description of Artificial Sequence: Synthetic oligonucleotide
  misc_feature 1..20: note = Target: SCN10A; (+) strand; PAM type: NNNNGHTT; PAM sequence: TAAGGCTT
  source 1..20: mol_type = other DNA
tgacccattcttttttatgt

SEQ ID NO: 12722 - DNA, 20 bp, synthetic construct
  misc_feature 1..20: note = Description of Artificial Sequence: Synthetic oligonucleotide
  misc_feature 1..20: note = Target: SCN10A; (+) strand; PAM type: NNNNGHTT; PAM sequence: CTTGGCTT
  source 1..20: mol_type = other DNA
tcctctcttattcttgtact

SEQ ID NO: 12723 - DNA, 20 bp, synthetic construct
  misc_feature 1..20: note = Description of Artificial Sequence: Synthetic oligonucleotide
  misc_feature 1..20: note = Target: SCN10A; (+) strand; PAM type: NNNNGHTT; PAM sequence: TTAGGATT
  source 1..20: mol_type = other DNA
tgacctatatgaagtctatg

SEQ ID NO: 12724 - DNA, 20 bp, synthetic construct
  misc_feature 1..20: note = Description of Artificial Sequence: Synthetic oligonucleotide
  misc_feature 1..20: note = Target: SCN10A; (+) strand; PAM type: NNNNGHTT; PAM sequence: TCCTGTTT
  source 1..20: mol_type = other DNA
tatgaagtctatgttaggat

SEQ ID NO: 12725 - DNA, 20 bp, synthetic construct
  misc_feature 1..20: note = Description of Artificial Sequence: Synthetic oligonucleotide
  misc_feature 1..20: note = Target: SCN10A; (+) strand; PAM type: NNNNGHTT; PAM sequence: ATCTGATT
  source 1..20: mol_type = other DNA
tctgcactttctctataaac

SEQ ID NO: 12726 - DNA, 20 bp, synthetic construct
  misc_feature 1..20: note = Description of Artificial Sequence: Synthetic oligonucleotide
  misc_feature 1..20: note = Target: SCN10A; (+) strand; PAM type: NNNNGHTT; PAM sequence: TTCTGTTT
  source 1..20: mol_type = other DNA
ataaacatctgatttgtaat

SEQ ID NO: 12727 - DNA, 20 bp, synthetic construct
  misc_feature 1..20: note = Description of Artificial Sequence: Synthetic oligonucleotide
  misc_feature 1..20: note = Target: SCN10A; (+) strand; PAM type: NNNNGHTT; PAM sequence: TATTGTTT
  source 1..20: mol_type = other DNA
gtaatttctgtttgcctttc

SEQ ID NO: 12728 - DNA, 20 bp, synthetic construct
  misc_feature 1..20: note = Description of Artificial Sequence: Synthetic oligonucleotide
  misc_feature 1..20: note = Target: SCN10A; (+) strand; PAM type: NNNNGHTT; PAM sequence: CATTGATT
  source 1..20: mol_type = other DNA
ctcacatctattttgttcag

SEQ ID NO: 12729 - DNA, 20 bp, synthetic construct
  misc_feature 1..20: note = Description of Artificial Sequence: Synthetic oligonucleotide
  misc_feature 1..20: note = Target: SCN10A; (+) strand; PAM type: NNNNGHTT; PAM sequence: AAGAGATT
  source 1..20: mol_type = other DNA
aataggaatataaggaacca

SEQ ID NO: 12730 - DNA, 20 bp, synthetic construct
  misc_feature 1..20: note = Description of Artificial Sequence: Synthetic oligonucleotide
  misc_feature 1..20: note = Target: SCN10A; (+) strand; PAM type: NNNNGHTT; PAM sequence: CAGTGCTT
  source 1..20: mol_type = other DNA
caagcagatggtggcagagg

SEQ ID NO: 12731 - DNA, 20 bp, synthetic construct
  misc_feature 1..20: note = Description of Artificial Sequence: Synthetic oligonucleotide
  misc_feature 1..20: note = Target: SCN10A; (+) strand; PAM type: NNNNGHTT; PAM sequence: TCCTGCTT
  source 1..20: mol_type = other DNA
aaatacccctatgatggaga

SEQ ID NO: 12732 - DNA, 20 bp, synthetic construct
  misc_feature 1..20: note = Description of Artificial Sequence: Synthetic oligonucleotide
  misc_feature 1..20: note = Target: SCN10A; (+) strand; PAM type: NNNNGHTT; PAM sequence: CACTGCTT
  source 1..20: mol_type = other DNA
caatacctctgtgatataga

SEQ ID NO: 12733 - DNA, 20 bp, synthetic construct
  misc_feature 1..20: note = Description of Artificial Sequence: Synthetic oligonucleotide
  misc_feature 1..20: note = Target: SCN10A; (+) strand; PAM type: NNNNGHTT; PAM sequence: GAGAGCTT
  source 1..20: mol_type = other DNA
gtcctccattactttcttct

SEQ ID NO: 12734 - DNA, 20 bp, synthetic construct
  misc_feature 1..20: note = Description of Artificial Sequence: Synthetic oligonucleotide
  misc_feature 1..20: note = Target: SCN10A; (+) strand; PAM type: NNNNGHTT; PAM sequence: ATCTGTTT
  source 1..20: mol_type = other DNA
ctcctgcctatttgtagttg

SEQ ID NO: 12735 - DNA, 20 bp, synthetic construct
  misc_feature 1..20: note = Description of Artificial Sequence: Synthetic oligonucleotide
  misc_feature 1..20: note = Target: SCN10A; (+) strand; PAM type: NNNNGHTT; PAM sequence: TTCTGATT
  source 1..20: mol_type = other DNA
ctatgtgttgtgtgcccaaa

SEQ ID NO: 12736 - DNA, 20 bp, synthetic construct
  misc_feature 1..20: note = Description of Artificial Sequence: Synthetic oligonucleotide
  misc_feature 1..20: note = Target: SCN10A; (+) strand; PAM type: NNNNGHTT; PAM sequence: CAAAGATT
  source 1..20: mol_type = other DNA
aattcttcccttctgagaaa

SEQ ID NO: 12737 - DNA, 20 bp, synthetic construct
  misc_feature 1..20: note = Description of Artificial Sequence: Synthetic oligonucleotide
  misc_feature 1..20: note = Target: SCN10A; (+) strand; PAM type: NNNNGHTT; PAM sequence: TATAGTTT
  source 1..20: mol_type = other DNA
tctaggggagaagagatact

SEQ ID NO: 12738 - DNA, 20 bp, synthetic construct
  misc_feature 1..20: note = Description of Artificial Sequence: Synthetic oligonucleotide
  misc_feature 1..20: note = Target: SCN10A; (+) strand; PAM type: NNNNGHTT; PAM sequence: AGTTGTTT
  source 1..20: mol_type = other DNA
aaatttgaatcccaggactc

SEQ ID NO: 12739 - DNA, 20 bp, synthetic construct
  misc_feature 1..20: note = Description of Artificial Sequence: Synthetic oligonucleotide
  misc_feature 1..20: note = Target: SCN10A; (+) strand; PAM type: NNNNGHTT; PAM sequence: TGAGGATT
  source 1..20: mol_type = other DNA
gtgacactggaatgcaatgt

SEQ ID NO: 12740 - DNA, 20 bp, synthetic construct
  misc_feature 1..20: note = Description of Artificial Sequence: Synthetic oligonucleotide
  misc_feature 1..20: note = Target: SCN10A; (+) strand; PAM type: NNNNGHTT; PAM sequence: TGGAGCTT
  source 1..20: mol_type = other DNA
agaattccaggtcctggagc

SEQ ID NO: 12741 - DNA, 20 bp, synthetic construct
  misc_feature 1..20: note = Description of Artificial Sequence: Synthetic oligonucleotide
  misc_feature 1..20: note = Target: SCN10A; (+) strand; PAM type: NNNNGHTT; PAM sequence: AATTGTTT
  source 1..20: mol_type = other DNA
atccctccagctaaggacaa

SEQ ID NO: 12742 - DNA, 20 bp, synthetic construct
  misc_feature 1..20: note = Description of Artificial Sequence: Synthetic oligonucleotide
  misc_feature 1..20: note = Target: SCN10A; (+) strand; PAM type: NNNNGHTT; PAM sequence: CCTTGATT
  source 1..20: mol_type = other DNA
atagctctggacttgggatc

SEQ ID NO: 12743 - DNA, 20 bp, synthetic construct
  misc_feature 1..20: note = Description of Artificial Sequence: Synthetic oligonucleotide
  misc_feature 1..20: note = Target: SCN10A; (+) strand; PAM type: NNNNGHTT; PAM sequence: AGTAGTTT
  source 1..20: mol_type = other DNA
gagaaaactattggggtgca

SEQ ID NO: 12744 - DNA, 20 bp, synthetic construct
  misc_feature 1..20: note = Description of Artificial Sequence: Synthetic oligonucleotide
  misc_feature 1..20: note = Target: SCN10A; (+) strand; PAM type: NNNNGHTT; PAM sequence: AATTGTTT
  source 1..20: mol_type = other DNA
tatgggcaaactgggctcag

SEQ ID NO: 12745 - DNA, 20 bp, synthetic construct
  misc_feature 1..20: note = Description of Artificial Sequence: Synthetic oligonucleotide
  misc_feature 1..20: note = Target: SCN10A; (+) strand; PAM type: NNNNGHTT; PAM sequence: TAGGGTTT
  source 1..20: mol_type = other DNA
tcactgaggggtaaggatac

SEQ ID NO: 12746 - DNA, 20 bp, synthetic construct
  misc_feature 1..20: note = Description of Artificial Sequence: Synthetic oligonucleotide
  misc_feature 1..20: note = Target: SCN10A; (+) strand; PAM type: NNNNGHTT; PAM sequence: CTGGGATT
  source 1..20: mol_type = other DNA
cttattggttgacggttgtc

SEQ ID NO: 12747 - DNA, 20 bp, synthetic construct
  misc_feature 1..20: note = Description of Artificial Sequence: Synthetic oligonucleotide
  misc_feature 1..20: note = Target: SCN10A; (+) strand; PAM type: NNNNGHTT; PAM sequence: ATAGGATT
  source 1..20: mol_type = other DNA
ccatatcaaatgtatgtgtt

SEQ ID NO: 12748 - DNA, 20 bp, synthetic construct
  misc_feature 1..20: note = Description of Artificial Sequence: Synthetic oligonucleotide
  misc_feature 1..20: note = Target: SCN10A; (+) strand; PAM type: NNNNGHTT; PAM sequence: CTTGGATT
  source 1..20: mol_type = other DNA
tctgggcctgatactcactt

SEQ ID NO: 12749 - DNA, 20 bp, synthetic construct
  misc_feature 1..20: note = Description of Artificial Sequence: Synthetic oligonucleotide
  misc_feature 1..20: note = Target: SCN10A; (+) strand; PAM type: NNNNGHTT; PAM sequence: TCTAGTTT
  source 1..20: mol_type = other DNA
acaatccaagaaatatctat

SEQ ID NO: 12750 - DNA, 20 bp, synthetic construct
  misc_feature 1..20: note = Description of Artificial Sequence: Synthetic oligonucleotide
  misc_feature 1..20: note = Target: SCN10A; (+) strand; PAM type: NNNNGHTT; PAM sequence: CCTGGCTT
  source 1..20: mol_type = other DNA
agtttagctccaagctcggc

SEQ ID NO: 12751 - DNA, 20 bp, synthetic construct
  misc_feature 1..20: note = Description of Artificial Sequence: Synthetic oligonucleotide
  misc_feature 1..20: note = Target: SCN10A; (+) strand; PAM type: NNNNGHTT; PAM sequence: ATGAGTTT
  source 1..20: mol_type = other DNA
ctggctttcaaacagtctgc

SEQ ID NO: 12752 - DNA, 20 bp, synthetic construct
  misc_feature 1..20: note = Description of Artificial Sequence: Synthetic oligonucleotide
  misc_feature 1..20: note = Target: SCN10A; (+) strand; PAM type: NNNNGHTT; PAM sequence: TTAAGTTT
  source 1..20: mol_type = other DNA
gtttttgcaggtatattccc

SEQ ID NO: 12753 - DNA, 20 bp, synthetic construct
  misc_feature 1..20: note = Description of Artificial Sequence: Synthetic oligonucleotide
  misc_feature 1..20: note = Target: SCN10A; (+) strand; PAM type: NNNNGHTT; PAM sequence: TGGGGTTT
  source 1..20: mol_type = other DNA
gctaatcttcatatttttga

SEQ ID NO: 12754 - DNA, 20 bp, synthetic construct
  misc_feature 1..20: note = Description of Artificial Sequence: Synthetic oligonucleotide
  misc_feature 1..20: note = Target: SCN10A; (-) strand; PAM type: NRG; PAM sequence: TAG
  source 1..20: mol_type = other DNA
atagtccgtatgcctggcca

SEQ ID NO: 12755 - DNA, 20 bp, synthetic construct
  misc_feature 1..20: note = Description of Artificial Sequence: Synthetic oligonucleotide
  misc_feature 1..20: note = Target: SCN10A; (-) strand; PAM type: NRG; PAM sequence: TGG
  source 1..20: mol_type = other DNA
acaaaaatagtccgtatgcc

SEQ ID NO: 12756 - DNA, 20 bp, synthetic construct
  misc_feature 1..20: note = Description of Artificial Sequence: Synthetic oligonucleotide
  misc_feature 1..20: note = Target: SCN10A; (-) strand; PAM type: NRG; PAM sequence: TAG
  source 1..20: mol_type = other DNA
atagggcacatttacaaaaa

SEQ ID NO: 12757 - DNA, 20 bp, synthetic construct
  misc_feature 1..20: note = Description of Artificial Sequence: Synthetic oligonucleotide
  misc_feature 1..20: note = Target: SCN10A; (-) strand; PAM type: NRG; PAM sequence: GGG
  source 1..20: mol_type = other DNA
ggtacaaatacaagtacata

SEQ ID NO: 12758 - DNA, 20 bp, synthetic construct
  misc_feature 1..20: note = Description of Artificial Sequence: Synthetic oligonucleotide
  misc_feature 1..20: note = Target: SCN10A; (-) strand; PAM type: NRG; PAM sequence: AGG
  source 1..20: mol_type = other DNA
gggtacaaatacaagtacat

SEQ ID NO: 12759 - DNA, 20 bp, synthetic construct
  misc_feature 1..20: note = Description of Artificial Sequence: Synthetic oligonucleotide
  misc_feature 1..20: note = Target: SCN10A; (-) strand; PAM type: NRG; PAM sequence: TAG
  source 1..20: mol_type = other DNA
agggtacaaatacaagtaca

SEQ ID NO: 12760 - DNA, 20 bp, synthetic construct
  misc_feature 1..20: note = Description of Artificial Sequence: Synthetic oligonucleotide
  misc_feature 1..20: note = Target: SCN10A; (-) strand; PAM type: NRG; PAM sequence: AAG
  source 1..20: mol_type = other DNA
taccaaaagggtacaaatac

SEQ ID NO: 12761 - DNA, 20 bp, synthetic construct
  misc_feature 1..20: note = Description of Artificial Sequence: Synthetic oligonucleotide
  misc_feature 1..20: note = Target: SCN10A; (-) strand; PAM type: NRG; PAM sequence: GGG
  source 1..20: mol_type = other DNA
aaaacctaaggttaccaaaa

SEQ ID NO: 12762 - DNA, 20 bp, synthetic construct
  misc_feature 1..20: note = Description of Artificial Sequence: Synthetic oligonucleotide
  misc_feature 1..20: note = Target: SCN10A; (-) strand; PAM type: NRG; PAM sequence: AGG
  source 1..20: mol_type = other DNA
caaaacctaaggttaccaaa

SEQ ID NO: 12763 - DNA, 20 bp, synthetic construct
  misc_feature 1..20: note = Description of Artificial Sequence: Synthetic oligonucleotide
  misc_feature 1..20: note = Target: SCN10A; (-) strand; PAM type: NRG; PAM sequence: AAG
  source 1..20: mol_type = other DNA
acaaaacctaaggttaccaa

SEQ ID NO: 12764 - DNA, 20 bp, synthetic construct
  misc_feature 1..20: note = Description of Artificial Sequence: Synthetic oligonucleotide
  misc_feature 1..20: note = Target: SCN10A; (-) strand; PAM type: NRG; PAM sequence: AGG
  source 1..20: mol_type = other DNA
agaaagccacacaaaaccta

SEQ ID NO: 12765 - DNA, 20 bp, synthetic construct
  misc_feature 1..20: note = Description of Artificial Sequence: Synthetic oligonucleotide
  misc_feature 1..20: note = Target: SCN10A; (-) strand; PAM type: NRG; PAM sequence: AAG
  source 1..20: mol_type = other DNA
cagaaagccacacaaaacct

SEQ ID NO: 12766 - DNA, 20 bp, synthetic construct
  misc_feature 1..20: note = Description of Artificial Sequence: Synthetic oligonucleotide
  misc_feature 1..20: note = Target: SCN10A; (-) strand; PAM type: NRG; PAM sequence: AAG
  source 1..20: mol_type = other DNA
aaataaattctgtttacaga

SEQ ID NO: 12767 - DNA, 20 bp, synthetic construct
  misc_feature 1..20: note = Description of Artificial Sequence: Synthetic oligonucleotide
  misc_feature 1..20: note = Target: SCN10A; (-) strand; PAM type: NRG; PAM sequence: CAG
  source 1..20: mol_type = other DNA
attcaaataaattctgttta

SEQ ID NO: 12768 - DNA, 20 bp, synthetic construct
  misc_feature 1..20: note = Description of Artificial Sequence: Synthetic oligonucleotide
  misc_feature 1..20: note = Target: SCN10A; (-) strand; PAM type: NRG; PAM sequence: AAG
  source 1..20: mol_type = other DNA
tgggaaaaagagtgtcagtc

SEQ ID NO: 12769 - DNA, 20 bp, synthetic construct
  misc_feature 1..20: note = Description of Artificial Sequence: Synthetic oligonucleotide
  misc_feature 1..20: note = Target: SCN10A; (-) strand; PAM type: NRG; PAM sequence: CAG
  source 1..20: mol_type = other DNA
gactctgggaaaaagagtgt

SEQ ID NO: 12770 - DNA, 20 bp, synthetic construct
  misc_feature 1..20: note = Description of Artificial Sequence: Synthetic oligonucleotide
  misc_feature 1..20: note = Target: SCN10A; (-) strand; PAM type: NRG; PAM sequence: GAG
  source 1..20: mol_type = other DNA
taaatggactctgggaaaaa

SEQ ID NO: 12771 - DNA, 20 bp, synthetic construct
  misc_feature 1..20: note = Description of Artificial Sequence: Synthetic oligonucleotide
  misc_feature 1..20: note = Target: SCN10A; (-) strand; PAM type: NRG; PAM sequence: AAG
  source 1..20: mol_type = other DNA
tttaaatggactctgggaaa

SEQ ID NO: 12772 - DNA, 20 bp, synthetic construct
  misc_feature 1..20: note = Description of Artificial Sequence: Synthetic oligonucleotide
  misc_feature 1..20: note = Target: SCN10A; (-) strand; PAM type: NRG; PAM sequence: GGG
  source 1..20: mol_type = other DNA
attaaatttaaatggactct

SEQ ID NO: 12773 - DNA, 20 bp, synthetic construct
  misc_feature 1..20: note = Description of Artificial Sequence: Synthetic oligonucleotide
  misc_feature 1..20: note = Target: SCN10A; (-) strand; PAM type: NRG; PAM sequence: TGG
  source 1..20: mol_type = other DNA
cattaaatttaaatggactc

SEQ ID NO: 12774 - DNA, 20 bp, synthetic construct
  misc_feature 1..20: note = Description of Artificial Sequence: Synthetic oligonucleotide
  misc_feature 1..20: note = Target: SCN10A; (-) strand; PAM type: NRG; PAM sequence: TGG
  source 1..20: mol_type = other DNA
taaattacattaaatttaaa

SEQ ID NO: 12775 - DNA, 20 bp, synthetic construct
  misc_feature 1..20: note = Description of Artificial Sequence: Synthetic oligonucleotide
  misc_feature 1..20: note = Target: SCN10A; (-) strand; PAM type: NRG; PAM sequence: TAG
  source 1..20: mol_type = other DNA
atagaaaagacagagtaaag

SEQ ID NO: 12776 - DNA, 20 bp, synthetic construct
  misc_feature 1..20: note = Description of Artificial Sequence: Synthetic oligonucleotide
  misc_feature 1..20: note = Target: SCN10A; (-) strand; PAM type: NRG; PAM sequence: AAG
  source 1..20: mol_type = other DNA
caaatagaaaagacagagta

SEQ ID NO: 12777 - DNA, 20 bp, synthetic construct
  misc_feature 1..20: note = Description of Artificial Sequence: Synthetic oligonucleotide
  misc_feature 1..20: note = Target: SCN10A; (-) strand; PAM type: NRG; PAM sequence: GAG
  source 1..20: mol_type = other DNA
agaaacaaatagaaaagaca

SEQ ID NO: 12778 - DNA, 20 bp, synthetic construct
  misc_feature 1..20: note = Description of Artificial Sequence: Synthetic oligonucleotide
  misc_feature 1..20: note = Target: SCN10A; (-) strand; PAM type: NRG; PAM sequence: CAG
  source 1..20: mol_type = other DNA
aaagaaacaaatagaaaaga

SEQ ID NO: 12779 - DNA, 20 bp, synthetic construct
  misc_feature 1..20: note = Description of Artificial Sequence: Synthetic oligonucleotide
  misc_feature 1..20: note = Target: SCN10A; (-) strand; PAM type: NRG; PAM sequence: AAG
  source 1..20: mol_type = other DNA
aataaaagaaacaaatagaa

SEQ ID NO: 12780 - DNA, 20 bp, synthetic construct
  misc_feature 1..20: note = Description of Artificial Sequence: Synthetic oligonucleotide
  misc_feature 1..20: note = Target: SCN10A; (-) strand; PAM type: NRG; PAM sequence: TAG
  source 1..20: mol_type = other DNA
tacagaataaaagaaacaaa

SEQ ID NO: 12781 - DNA, 20 bp, synthetic construct
  misc_feature 1..20: note = Description of Artificial Sequence: Synthetic oligonucleotide
  misc_feature 1..20: note = Target: SCN10A; (-) strand; PAM type: NRG; PAM sequence: AAG
  source 1..20: mol_type = other DNA
tatagagacatacagaataa

SEQ ID NO: 12782 - DNA, 20 bp, synthetic construct
  misc_feature 1..20: note = Description of Artificial Sequence: Synthetic oligonucleotide
  misc_feature 1..20: note = Target: SCN10A; (-) strand; PAM type: NRG; PAM sequence: CAG
  source 1..20: mol_type = other DNA
acccgggatatagagacata

SEQ ID NO: 12783 - DNA, 20 bp, synthetic construct
  misc_feature 1..20: note = Description of Artificial Sequence: Synthetic oligonucleotide
  misc_feature 1..20: note = Target: SCN10A; (-) strand; PAM type: NRG; PAM sequence: GAG
  source 1..20: mol_type = other DNA
ttaaaaaaacccgggatata

SEQ ID NO: 12784 - DNA, 20 bp, synthetic construct
  misc_feature 1..20: note = Description of Artificial Sequence: Synthetic oligonucleotide
  misc_feature 1..20: note = Target: SCN10A; (-) strand; PAM type: NRG; PAM sequence: TAG
  source 1..20: mol_type = other DNA
aattaaaaaaacccgggata

SEQ ID NO: 12785 - DNA, 20 bp, synthetic construct
  misc_feature 1..20: note = Description of Artificial Sequence: Synthetic oligonucleotide
  misc_feature 1..20: note = Target: SCN10A; (-) strand; PAM type: NRG; PAM sequence: GGG
  source 1..20: mol_type = other DNA
aataataattaaaaaaaccc

SEQ ID NO: 12786 - DNA, 20 bp, synthetic construct
  misc_feature 1..20: note = Description of Artificial Sequence: Synthetic oligonucleotide
  misc_feature 1..20: note = Target: SCN10A; (-) strand; PAM type: NRG; PAM sequence: CGG
  source 1..20: mol_type = other DNA
taataataattaaaaaaacc

SEQ ID NO: 12787 - DNA, 20 bp, synthetic construct
  misc_feature 1..20: note = Description of Artificial Sequence: Synthetic oligonucleotide
  misc_feature 1..20: note = Target: SCN10A; (-) strand; PAM type: NRG; PAM sequence: AAG
  source 1..20: mol_type = other DNA
ctcatgtatcctaaaactta

SEQ ID NO: 12788 - DNA, 20 bp, synthetic construct
  misc_feature 1..20: note = Description of Artificial Sequence: Synthetic oligonucleotide
  misc_feature 1..20: note = Target: SCN10A; (-) strand; PAM type: NRG; PAM sequence: TGG
  source 1..20: mol_type = other DNA
atgggtgcagcacaccaaca

SEQ ID NO: 12789 - DNA, 20 bp, synthetic construct
  misc_feature 1..20: note = Description of Artificial Sequence: Synthetic oligonucleotide
  misc_feature 1..20: note = Target: SCN10A; (-) strand; PAM type: NRG; PAM sequence: CAG
  source 1..20: mol_type = other DNA
aaatgacaagttaatgggtg

SEQ ID NO: 12790 - DNA, 20 bp, synthetic construct
  misc_feature 1..20: note = Description of Artificial Sequence: Synthetic oligonucleotide
  misc_feature 1..20: note = Target: SCN10A; (-) strand; PAM type: NRG; PAM sequence: GGG
  source 1..20: mol_type = other DNA
aatgtaaatgacaagttaat

SEQ ID NO: 12791 - DNA, 20 bp, synthetic construct
  misc_feature 1..20: note = Description of Artificial Sequence: Synthetic oligonucleotide
  misc_feature 1..20: note = Target: SCN10A; (-) strand; PAM type: NRG; PAM sequence: TGG
  source 1..20: mol_type = other DNA
taatgtaaatgacaagttaa

SEQ ID NO: 12792 - DNA, 20 bp, synthetic construct
  misc_feature 1..20: note = Description of Artificial Sequence: Synthetic oligonucleotide
  misc_feature 1..20: note = Target: SCN10A; (-) strand; PAM type: NRG; PAM sequence: AAG
  source 1..20: mol_type = other DNA
atatacctaatgtaaatgac

SEQ ID NO: 12793 - DNA, 20 bp, synthetic construct
  misc_feature 1..20: note = Description of Artificial Sequence: Synthetic oligonucleotide
  misc_feature 1..20: note = Target: SCN10A; (-) strand; PAM type: NRG; PAM sequence: GAG
  source 1..20: mol_type = other DNA
ggggggagggatagcattag

SEQ ID NO: 12794 - DNA, 20 bp, synthetic construct
  misc_feature 1..20: note = Description of Artificial Sequence: Synthetic oligonucleotide
  misc_feature 1..20: note = Target: SCN10A; (-) strand; PAM type: NRG; PAM sequence: AGG
  source 1..20: mol_type = other DNA
gaggggggagggatagcatt

SEQ ID NO: 12795 - DNA, 20 bp, synthetic construct
  misc_feature 1..20: note = Description of Artificial Sequence: Synthetic oligonucleotide
  misc_feature 1..20: note = Target: SCN10A; (-) strand; PAM type: NRG; PAM sequence: TAG
  source 1..20: mol_type = other DNA
ggaggggggagggatagcat

SEQ ID NO: 12796 - DNA, 20 bp, synthetic construct
  misc_feature 1..20: note = Description of Artificial Sequence: Synthetic oligonucleotide
  misc_feature 1..20: note = Target: SCN10A; (-) strand; PAM type: NRG; PAM sequence: TAG
  source 1..20: mol_type = other DNA
gtggagggaggggggaggga

SEQ ID NO: 12797 - DNA, 20 bp, synthetic construct
  misc_feature 1..20: note = Description of Artificial Sequence: Synthetic oligonucleotide
  misc_feature 1..20: note = Target: SCN10A; (-) strand; PAM type: NRG; PAM sequence: GGG
  source 1..20: mol_type = other DNA
tggggtggagggagggggga

SEQ ID NO: 12798 - DNA, 20 bp, synthetic construct
  misc_feature 1..20: note = Description of Artificial Sequence: Synthetic oligonucleotide
  misc_feature 1..20: note = Target: SCN10A; (-) strand; PAM type: NRG; PAM sequence: AGG
  source 1..20: mol_type = other DNA
gtggggtggagggagggggg

SEQ ID NO: 12799 - DNA, 20 bp, synthetic construct
  misc_feature 1..20: note = Description of Artificial Sequence: Synthetic oligonucleotide
  misc_feature 1..20: note = Target: SCN10A; (-) strand; PAM type: NRG; PAM sequence: GAG
  source 1..20: mol_type = other DNA
tgtggggtggagggaggggg

SEQ ID NO: 12800 - DNA, 20 bp, synthetic construct
  misc_feature 1..20: note = Description of Artificial Sequence: Synthetic oligonucleotide
  misc_feature 1..20: note = Target: SCN10A; (-) strand; PAM type: NRG; PAM sequence: GGG
  source 1..20: mol_type = other DNA
gttgtggggtggagggaggg

SEQ ID NO: 12801 - DNA, 20 bp, synthetic construct
  misc_feature 1..20: note = Description of Artificial Sequence: Synthetic oligonucleotide
  misc_feature 1..20: note = Target: SCN10A; (-) strand; PAM type: NRG; PAM sequence: GGG
  source 1..20: mol_type = other DNA
agttgtggggtggagggagg

SEQ ID NO: 12802 - DNA, 20 bp, synthetic construct
  misc_feature 1..20: note = Description of Artificial Sequence: Synthetic oligonucleotide
  misc_feature 1..20: note = Target: SCN10A; (-) strand; PAM type: NRG; PAM sequence: GGG
  source 1..20: mol_type = other DNA
cagttgtggggtggagggag

SEQ ID NO: 12803 - DNA, 20 bp, synthetic construct
  misc_feature 1..20: note = Description of Artificial Sequence: Synthetic oligonucleotide
  misc_feature 1..20: note = Target: SCN10A; (-) strand; PAM type: NRG; PAM sequence: GGG
  source 1..20: mol_type = other DNA
acagttgtggggtggaggga

SEQ ID NO: 12804 - DNA, 20 bp, synthetic construct
  misc_feature 1..20: note = Description of Artificial Sequence: Synthetic oligonucleotide
  misc_feature 1..20: note = Target: SCN10A; (-) strand; PAM type: NRG; PAM sequence: AGG
  source 1..20: mol_type = other DNA
gacagttgtggggtggaggg

SEQ ID NO: 12805 - DNA, 20 bp, synthetic construct
  misc_feature 1..20: note = Description of Artificial Sequence: Synthetic oligonucleotide
  misc_feature 1..20: note = Target: SCN10A; (-) strand; PAM type: NRG; PAM sequence: GAG
  source 1..20: mol_type = other DNA
ggacagttgtggggtggagg

SEQ ID NO: 12806 - DNA, 20 bp, synthetic construct
  misc_feature 1..20: note = Description of Artificial Sequence: Synthetic oligonucleotide
  misc_feature 1..20: note = Target: SCN10A; (-) strand; PAM type: NRG; PAM sequence: GGG
  source 1..20: mol_type = other DNA
ggggacagttgtggggtgga

SEQ ID NO: 12807 - DNA, 20 bp, synthetic construct
  misc_feature 1..20: note = Description of Artificial Sequence: Synthetic oligonucleotide
  misc_feature 1..20: note = Target: SCN10A; (-) strand; PAM type: NRG; PAM sequence: AGG
  source 1..20: mol_type = other DNA
cggggacagttgtggggtgg

SEQ ID NO: 12808 - DNA, 20 bp, synthetic construct
  misc_feature 1..20: note = Description of Artificial Sequence: Synthetic oligonucleotide
  misc_feature 1..20: note = Target: SCN10A; (-) strand; PAM type: NRG; PAM sequence: GAG
  source 1..20: mol_type = other DNA
ccggggacagttgtggggtg

SEQ ID NO: 12809 - DNA, 20 bp, synthetic construct
  misc_feature 1..20: note = Description of Artificial Sequence: Synthetic oligonucleotide
  misc_feature 1..20: note = Target: SCN10A; (-) strand; PAM type: NRG; PAM sequence: TGG
  source 1..20: mol_type = other DNA
caccggggacagttgtgggg

SEQ ID NO: 12810 - DNA, 20 bp, synthetic construct
  misc_feature 1..20: note = Description of Artificial Sequence: Synthetic oligonucleotide
  misc_feature 1..20: note = Target: SCN10A; (-) strand; PAM type: NRG; PAM sequence: GGG
  source 1..20: mol_type = other DNA
acacaccggggacagttgtg

SEQ ID NO: 12811 - DNA, 20 bp, synthetic construct
  misc_feature 1..20: note = Description of Artificial Sequence: Synthetic oligonucleotide
  misc_feature 1..20: note = Target: SCN10A; (-) strand; PAM type: NRG; PAM sequence: GGG
  source 1..20: mol_type = other DNA
cacacaccggggacagttgt

SEQ ID NO: 12812 - DNA, 20 bp, synthetic construct
  misc_feature 1..20: note = Description of Artificial Sequence: Synthetic oligonucleotide
  misc_feature 1..20: note = Target: SCN10A; (-) strand; PAM type: NRG; PAM sequence: TGG
  source 1..20: mol_type = other DNA
tcacacaccggggacagttg

SEQ ID NO: 12813 - DNA, 20 bp, synthetic construct
  misc_feature 1..20: note = Description of Artificial Sequence: Synthetic oligonucleotide
  misc_feature 1..20: note = Target: SCN10A; (-) strand; PAM type: NRG; PAM sequence: CAG
  source 1..20: mol_type = other DNA
ggaacatcacacaccgggga

SEQ ID NO: 12814 - DNA, 20 bp, synthetic construct
  misc_feature 1..20: note = Description of Artificial Sequence: Synthetic oligonucleotide
  misc_feature 1..20: note = Target: SCN10A; (-) strand; PAM type: NRG; PAM sequence: GGG
  source 1..20: mol_type = other DNA
aaggggaacatcacacaccg

SEQ ID NO: 12815 - DNA, 20 bp, synthetic construct
  misc_feature 1..20: note = Description of Artificial Sequence: Synthetic oligonucleotide
  misc_feature 1..20: note = Target: SCN10A; (-) strand; PAM type: NRG; PAM sequence: GGG
  source 1..20: mol_type = other DNA
gaaggggaacatcacacacc

SEQ ID NO: 12816 - DNA, 20 bp, synthetic construct
  misc_feature 1..20: note = Description of Artificial Sequence: Synthetic oligonucleotide
  misc_feature 1..20: note = Target: SCN10A; (-) strand; PAM type: NRG; PAM sequence: CGG
  source 1..20: mol_type = other DNA
ggaaggggaacatcacacac

SEQ ID NO: 12817 - DNA, 20 bp, synthetic construct
  misc_feature 1..20: note = Description of Artificial Sequence: Synthetic oligonucleotide
  misc_feature 1..20: note = Target: SCN10A; (-) strand; PAM type: NRG; PAM sequence: GGG
  source 1..20: mol_type = other DNA
gaacacatggacacaggaag

SEQ ID NO: 12818 - DNA, 20 bp, synthetic construct
  misc_feature 1..20: note = Description of Artificial Sequence: Synthetic oligonucleotide
  misc_feature 1..20: note = Target: SCN10A; (-) strand; PAM type: NRG; PAM sequence: GGG
  source 1..20: mol_type = other DNA
agaacacatggacacaggaa

SEQ ID NO: 12819 - DNA, 20 bp, synthetic construct
  misc_feature 1..20: note = Description of Artificial Sequence: Synthetic oligonucleotide
  misc_feature 1..20: note = Target: SCN10A; (-) strand; PAM type: NRG; PAM sequence: AGG
  source 1..20: mol_type = other DNA
aagaacacatggacacagga

SEQ ID NO: 12820 - DNA, 20 bp, synthetic construct
  misc_feature 1..20: note = Description of Artificial Sequence: Synthetic oligonucleotide
  misc_feature 1..20: note = Target: SCN10A; (-) strand; PAM type: NRG; PAM sequence: AAG
  source 1..20: mol_type = other DNA
taagaacacatggacacagg

SEQ ID NO: 12821 - DNA, 20 bp, synthetic construct
  misc_feature 1..20: note = Description of Artificial Sequence: Synthetic oligonucleotide
  misc_feature 1..20: note = Target: SCN10A; (-) strand; PAM type: NRG; PAM sequence: AGG
  source 1..20: mol_type = other DNA
caataagaacacatggacac

SEQ ID NO: 12822 - DNA, 20 bp, synthetic construct
  misc_feature 1..20: note = Description of Artificial Sequence: Synthetic oligonucleotide
  misc_feature 1..20: note = Target: SCN10A; (-) strand; PAM type: NRG; PAM sequence: CAG
  source 1..20: mol_type = other DNA
acaataagaacacatggaca

SEQ ID NO: 12823 - DNA, 20 bp, synthetic construct
  misc_feature 1..20: note = Description of Artificial Sequence: Synthetic oligonucleotide
  misc_feature 1..20: note = Target: SCN10A; (-) strand; PAM type: NRG; PAM sequence: TGG
  source 1..20: mol_type = other DNA
aattgaacaataagaacaca

SEQ ID NO: 12824 - DNA, 20 bp, synthetic construct
  misc_feature 1..20: note = Description of Artificial Sequence: Synthetic oligonucleotide
  misc_feature 1..20: note = Target: SCN10A; (-) strand; PAM type: NRG; PAM sequence: AAG
  source 1..20: mol_type = other DNA
ataggtgggaattgaacaat

SEQ ID NO: 12825 - DNA, 20 bp, synthetic construct
  misc_feature 1..20: note = Description of Artificial Sequence: Synthetic oligonucleotide
  misc_feature 1..20: note = Target: SCN10A; (-) strand; PAM type: NRG; PAM sequence: GGG
  source 1..20: mol_type = other DNA
gcatgttctcactcataggt

SEQ ID NO: 12826 - DNA, 20 bp, synthetic construct
  misc_feature 1..20: note = Description of Artificial Sequence: Synthetic oligonucleotide
  misc_feature 1..20: note = Target: SCN10A; (-) strand; PAM type: NRG; PAM sequence: TGG
  source 1..20: mol_type = other DNA
cgcatgttctcactcatagg

SEQ ID NO: 12827 - DNA, 20 bp, synthetic construct
  misc_feature 1..20: note = Description of Artificial Sequence: Synthetic oligonucleotide
  misc_feature 1..20: note = Target: SCN10A; (-) strand; PAM type: NRG; PAM sequence: AGG
  source 1..20: mol_type = other DNA
caccgcatgttctcactcat

SEQ ID NO: 12828 - DNA, 20 bp, synthetic construct
  misc_feature 1..20: note = Description of Artificial Sequence: Synthetic oligonucleotide
  misc_feature 1..20: note = Target: SCN10A; (-) strand; PAM type: NRG; PAM sequence: TAG
  source 1..20: mol_type = other DNA
acaccgcatgttctcactca

SEQ ID NO: 12829 - DNA, 20 bp, synthetic construct
  misc_feature 1..20: note = Description of Artificial Sequence: Synthetic oligonucleotide
  misc_feature 1..20: note = Target: SCN10A; (-) strand; PAM type: NRG; PAM sequence: AGG
  source 1..20: mol_type = other DNA
attctcagcaaactatcgca

SEQ ID NO: 12830 - DNA, 20 bp, synthetic construct
  misc_feature 1..20: note = Description of Artificial Sequence: Synthetic oligonucleotide
  misc_feature 1..20: note = Target: SCN10A; (-) strand; PAM type: NRG; PAM sequence: AAG
  source 1..20: mol_type = other DNA
cattctcagcaaactatcgc

SEQ ID NO: 12831 - DNA, 20 bp, synthetic construct
  misc_feature 1..20: note = Description of Artificial Sequence: Synthetic oligonucleotide
  misc_feature 1..20: note = Target: SCN10A; (-) strand; PAM type: NRG; PAM sequence: CAG
  source 1..20: mol_type = other DNA
aagctggaaaccatcattct

SEQ ID NO: 12832 - DNA, 20 bp, synthetic construct
  misc_feature 1..20: note = Description of Artificial Sequence: Synthetic oligonucleotide
  misc_feature 1..20: note = Target: SCN10A; (-) strand; PAM type: NRG; PAM sequence: TGG
  source 1..20: mol_type = other DNA
tgcagggacatggatgaagc

SEQ ID NO: 12833 - DNA, 20 bp, synthetic construct
  misc_feature 1..20: note = Description of Artificial Sequence: Synthetic oligonucleotide
  misc_feature 1..20: note = Target: SCN10A; (-) strand; PAM type: NRG; PAM sequence: AAG
  source 1..20: mol_type = other DNA
cctttgcagggacatggatg

SEQ ID NO: 12834 - DNA, 20 bp, synthetic construct
  misc_feature 1..20: note = Description of Artificial Sequence: Synthetic oligonucleotide
  misc_feature 1..20: note = Target: SCN10A; (-) strand; PAM type: NRG; PAM sequence: TGG
  source 1..20: mol_type = other DNA
tcatgtcctttgcagggaca

SEQ ID NO: 12835 - DNA, 20 bp, synthetic construct
  misc_feature 1..20: note = Description of Artificial Sequence: Synthetic oligonucleotide
  misc_feature 1..20: note = Target: SCN10A; (-) strand; PAM type: NRG; PAM sequence: GGG
  source 1..20: mol_type = other DNA
atgagttcatgtcctttgca

SEQ ID NO: 12836 - DNA, 20 bp, synthetic construct
  misc_feature 1..20: note = Description of Artificial Sequence: Synthetic oligonucleotide
  misc_feature 1..20: note = Target: SCN10A; (-) strand; PAM type: NRG; PAM sequence: AGG
  source 1..20: mol_type = other DNA
gatgagttcatgtcctttgc

SEQ ID NO: 12837 - DNA, 20 bp, synthetic construct
  misc_feature 1..20: note = Description of Artificial Sequence: Synthetic oligonucleotide
  misc_feature 1..20: note = Target: SCN10A; (-) strand; PAM type: NRG; PAM sequence: CAG
  source 1..20: mol_type = other DNA
tgatgagttcatgtcctttg

SEQ ID NO: 12838 - DNA, 20 bp, synthetic construct
  misc_feature 1..20: note = Description of Artificial Sequence: Synthetic oligonucleotide
  misc_feature 1..20: note = Target: SCN10A; (-) strand; PAM type: NRG; PAM sequence: GAG
  source 1..20: mol_type = other DNA
atgcagccataaaaaatgat

SEQ ID NO: 12839 - DNA, 20 bp, synthetic construct
  misc_feature 1..20: note = Description of Artificial Sequence: Synthetic oligonucleotide
  misc_feature 1..20: note = Target: SCN10A; (-) strand; PAM type: NRG; PAM sequence: CAG
  source 1..20: mol_type = other DNA
atacaccatggaatactatg

SEQ ID NO: 12840 - DNA, 20 bp, synthetic construct
  misc_feature 1..20: note = Description of Artificial Sequence: Synthetic oligonucleotide
  misc_feature 1..20: note = Target: SCN10A; (-) strand; PAM type: NRG; PAM sequence: TGG
  source 1..20: mol_type = other DNA
aatgtggcacatatacacca

SEQ ID NO: 12841 - DNA, 20 bp, synthetic construct
  misc_feature 1..20: note = Description of Artificial Sequence: Synthetic oligonucleotide
  misc_feature 1..20: note = Target: SCN10A; (-) strand; PAM type: NRG; PAM sequence: TGG
  source 1..20: mol_type = other DNA
tagactggattaagaaaatg

SEQ ID NO: 12842 - DNA, 20 bp, synthetic construct
  misc_feature 1..20: note = Description of Artificial Sequence: Synthetic oligonucleotide
  misc_feature 1..20: note = Target: SCN10A; (-) strand; PAM type: NRG; PAM sequence: AAG
  source 1..20: mol_type = other DNA
caacagtgatagactggatt

SEQ ID NO: 12843 - DNA, 20 bp, synthetic construct
  misc_feature 1..20: note = Description of Artificial Sequence: Synthetic oligonucleotide
  misc_feature 1..20: note = Target: SCN10A; (-) strand; PAM type: NRG; PAM sequence: TGG
  source 1..20: mol_type = other DNA
aatgtccaacagtgatagac

SEQ ID NO: 12844 - DNA, 20 bp, synthetic construct
  misc_feature 1..20: note = Description of Artificial Sequence: Synthetic oligonucleotide
  misc_feature 1..20: note = Target: SCN10A; (-) strand; PAM type: NRG; PAM sequence: TAG
  source 1..20: mol_type = other DNA
acccaaatgtccaacagtga

SEQ ID NO: 12845 - DNA, 20 bp, synthetic construct
  misc_feature 1..20: note = Description of Artificial Sequence: Synthetic oligonucleotide
  misc_feature 1..20: note = Target: SCN10A; (-) strand; PAM type: NRG; PAM sequence: CAG
  source 1..20: mol_type = other DNA
gaaccaacccaaatgtccaa

SEQ ID NO: 12846 - DNA, 20 bp, synthetic construct
  misc_feature 1..20: note = Description of Artificial Sequence: Synthetic oligonucleotide
  misc_feature 1..20: note = Target: SCN10A; (-) strand; PAM type: NRG; PAM sequence: TGG
  source 1..20: mol_type = other DNA
tattcacaatagcaaagact

SEQ ID NO: 12847 - DNA, 20 bp, synthetic construct
  misc_feature 1..20: note = Description of Artificial Sequence: Synthetic oligonucleotide
  misc_feature 1..20: note = Target: SCN10A; (-) strand; PAM type: NRG; PAM sequence: AAG
  source 1..20: mol_type = other DNA
tggcactattcacaatagca

SEQ ID NO: 12848 - DNA, 20 bp, synthetic construct
  misc_feature 1..20: note = Description of Artificial Sequence: Synthetic oligonucleotide
  misc_feature 1..20: note = Target: SCN10A; (-) strand; PAM type: NRG; PAM sequence: TAG
  source 1..20: mol_type = other DNA
tattgtggcactattcacaa

SEQ ID NO: 12849 - DNA, 20 bp, synthetic construct
  misc_feature 1..20: note = Description of Artificial Sequence: Synthetic oligonucleotide
  misc_feature 1..20: note = Target: SCN10A; (-) strand; PAM type: NRG; PAM sequence: TGG
  source 1..20: mol_type = other DNA
atgcacacgtatgtttattg

SEQ ID NO: 12850 - DNA, 20 bp, synthetic construct
  misc_feature 1..20: note = Description of Artificial Sequence: Synthetic oligonucleotide
  misc_feature 1..20: note = Target: SCN10A; (-) strand; PAM type: NRG; PAM sequence: AAG
  source 1..20: mol_type = other DNA
ttataaatcatactgctata

SEQ ID NO: 12851 - DNA, 20 bp, synthetic construct
  misc_feature 1..20: note = Description of Artificial Sequence: Synthetic oligonucleotide
  misc_feature 1..20: note = Target: SCN10A; (-) strand; PAM type: NRG; PAM sequence: AGG
  source 1..20: mol_type = other DNA
attactgggtatatacccaa

SEQ ID NO: 12852 - DNA, 20 bp, synthetic construct
  misc_feature 1..20: note = Description of Artificial Sequence: Synthetic oligonucleotide
  misc_feature 1..20: note = Target: SCN10A; (-) strand; PAM type: NRG; PAM sequence: AAG
  source 1..20: mol_type = other DNA
cattactgggtatataccca

SEQ ID NO: 12853 - DNA, 20 bp, synthetic construct
  misc_feature 1..20: note = Description of Artificial Sequence: Synthetic oligonucleotide
  misc_feature 1..20: note = Target: SCN10A; (-) strand; PAM type: NRG; PAM sequence: GGG
  source 1..20: mol_type = other DNA
gacccagccatcccattact

SEQ ID NO: 12854 - DNA, 20 bp, synthetic construct
  misc_feature 1..20: note = Description of Artificial Sequence: Synthetic oligonucleotide
  misc_feature 1..20: note = Target: SCN10A; (-) strand; PAM type: NRG; PAM sequence: TGG
  source 1..20: mol_type = other DNA
tgacccagccatcccattac

SEQ ID NO: 12855 - DNA, 20 bp, synthetic construct
  misc_feature 1..20: note = Description of Artificial Sequence: Synthetic oligonucleotide
  misc_feature 1..20: note = Target: SCN10A; (-) strand; PAM type: NRG; PAM sequence: CAG
  source 1..20: mol_type = other DNA
accagaaataccatttgacc

SEQ ID NO: 12856 - DNA, 20 bp, synthetic construct
  misc_feature 1..20: note = Description of Artificial Sequence: Synthetic oligonucleotide
  misc_feature 1..20: note = Target: SCN10A; (-) strand; PAM type: NRG; PAM sequence: CAG
  source 1..20: mol_type = other DNA
attcctcagggatctagaac

SEQ ID NO: 12857 - DNA, 20 bp, synthetic construct
  misc_feature 1..20: note = Description of Artificial Sequence: Synthetic oligonucleotide
  misc_feature 1..20: note = Target: SCN10A; (-) strand; PAM type: NRG; PAM sequence: TAG
  source 1..20: mol_type = other DNA
gtggcaattcctcagggatc

SEQ ID NO: 12858 - DNA, 20 bp, synthetic construct
  misc_feature 1..20: note = Description of Artificial Sequence: Synthetic oligonucleotide
  misc_feature 1..20: note = Target: SCN10A; (-) strand; PAM type: NRG; PAM sequence: GGG
  source 1..20: mol_type = other DNA
gtcggtgtggcaattcctca

SEQ ID NO: 12859 - DNA, 20 bp, synthetic construct
  misc_feature 1..20: note = Description of Artificial Sequence: Synthetic oligonucleotide
  misc_feature 1..20: note = Target: SCN10A; (-) strand; PAM type: NRG; PAM sequence: AGG
  source 1..20: mol_type = other DNA
agtcggtgtggcaattcctc

SEQ ID NO: 12860 - DNA, 20 bp, synthetic construct
  misc_feature 1..20: note = Description of Artificial Sequence: Synthetic oligonucleotide
  misc_feature 1..20: note = Target: SCN10A; (-) strand; PAM type: NRG; PAM sequence: CAG
  source 1..20: mol_type = other DNA
aagtcggtgtggcaattcct

SEQ ID NO: 12861 - DNA, 20 bp, synthetic construct
  misc_feature 1..20: note = Description of Artificial Sequence: Synthetic oligonucleotide
  misc_feature 1..20: note = Target: SCN10A; (-) strand; PAM type: NRG; PAM sequence: TGG
  source 1..20: mol_type = other DNA
aatcattgtggaagtcggtg

SEQ ID NO: 12862 - DNA, 20 bp, synthetic construct
  misc_feature 1..20: note = Description of Artificial Sequence: Synthetic oligonucleotide
  misc_feature 1..20: note = Target: SCN10A; (-) strand; PAM type: NRG; PAM sequence: CGG
  source 1..20: mol_type = other DNA
agttcaatcattgtggaagt

SEQ ID NO: 12863 - DNA, 20 bp, synthetic construct
  misc_feature 1..20: note = Description of Artificial Sequence: Synthetic oligonucleotide
  misc_feature 1..20: note = Target: SCN10A; (-) strand; PAM type: NRG; PAM sequence: AAG
  source 1..20: mol_type = other DNA
aactagttcaatcattgtgg

SEQ ID NO: 12864 - DNA, 20 bp, synthetic construct
  misc_feature 1..20: note = Description of Artificial Sequence: Synthetic oligonucleotide
  misc_feature 1..20: note = Target: SCN10A; (-) strand; PAM type: NRG; PAM sequence: TGG
  source 1..20: mol_type = other DNA
gtaaactagttcaatcattg

SEQ ID NO: 12865 - DNA, 20 bp, synthetic construct
  misc_feature 1..20: note = Description of Artificial Sequence: Synthetic oligonucleotide
  misc_feature 1..20: note = Target: SCN10A; (-) strand; PAM type: NRG; PAM sequence: TAG
  source 1..20: mol_type = other DNA
ctgttggtgggtctgtaaac

SEQ ID NO: 12866 - DNA, 20 bp, synthetic construct
  misc_feature 1..20: note = Description of Artificial Sequence: Synthetic oligonucleotide
  misc_feature 1..20: note = Target: SCN10A; (-) strand; PAM type: NRG; PAM sequence: GGG
  source 1..20: mol_type = other DNA
aacacttttacactgttggt

SEQ ID NO: 12867 - DNA, 20 bp, synthetic construct
  misc_feature 1..20: note = Description of Artificial Sequence: Synthetic oligonucleotide
  misc_feature 1..20: note = Target: SCN10A; (-) strand; PAM type: NRG; PAM sequence: TGG
  source 1..20: mol_type = other DNA
gaacacttttacactgttgg

SEQ ID NO: 12868 - DNA, 20 bp, synthetic construct
  misc_feature 1..20: note = Description of Artificial Sequence: Synthetic oligonucleotide
  misc_feature 1..20: note = Target: SCN10A; (-) strand; PAM type: NRG; PAM sequence: TGG
  source 1..20: mol_type = other DNA
taggaacacttttacactgt

SEQ ID NO: 12869 - DNA, 20 bp, synthetic construct
  misc_feature 1..20: note = Description of Artificial Sequence: Synthetic oligonucleotide
  misc_feature 1..20: note = Target: SCN10A; (-) strand; PAM type: NRG; PAM sequence: AGG
  source 1..20: mol_type = other DNA
tggagaggatgtggagaaat

SEQ ID NO: 12870 - DNA, 20 bp, synthetic construct
  misc_feature 1..20: note = Description of Artificial Sequence: Synthetic oligonucleotide
  misc_feature 1..20: note = Target: SCN10A; (-) strand; PAM type: NRG; PAM sequence: TAG
  source 1..20: mol_type = other DNA
ctggagaggatgtggagaaa

SEQ ID NO: 12871 - DNA, 20 bp, synthetic construct
  misc_feature 1..20: note = Description of Artificial Sequence: Synthetic oligonucleotide
  misc_feature 1..20: note = Target: SCN10A; (-) strand; PAM type: NRG; PAM sequence: GAG
  source 1..20: mol_type = other DNA
caggtgctggagaggatgtg

SEQ ID NO: 12872 - DNA, 20 bp, synthetic construct
  misc_feature 1..20: note = Description of Artificial Sequence: Synthetic oligonucleotide
  misc_feature 1..20: note = Target: SCN10A; (-) strand; PAM type: NRG; PAM sequence: TGG
  source 1..20: mol_type = other DNA
aacaggtgctggagaggatg

SEQ ID NO: 12873 - DNA, 20 bp, synthetic construct
  misc_feature 1..20: note = Description of Artificial Sequence: Synthetic oligonucleotide
  misc_feature 1..20: note = Target: SCN10A; (-) strand; PAM type: NRG; PAM sequence: AGG
  source 1..20: mol_type = other DNA
ggaaacaacaggtgctggag

SEQ ID NO: 12874 - DNA, 20 bp, synthetic construct
  misc_feature 1..20: note = Description of Artificial Sequence: Synthetic oligonucleotide
  misc_feature 1..20: note = Target: SCN10A; (-) strand; PAM type: NRG; PAM sequence: GAG
  source 1..20: mol_type = other DNA
aggaaacaacaggtgctgga

SEQ ID NO: 12875 - DNA, 20 bp, synthetic construct
  misc_feature 1..20: note = Description of Artificial Sequence: Synthetic oligonucleotide
  misc_feature 1..20: note = Target: SCN10A; (-) strand; PAM type: NRG; PAM sequence: GAG
  source 1..20: mol_type = other DNA
tcaggaaacaacaggtgctg

SEQ ID NO: 12876 - DNA, 20 bp, synthetic construct
  misc_feature 1..20: note = Description of Artificial Sequence: Synthetic oligonucleotide
  misc_feature 1..20: note = Target: SCN10A; (-) strand; PAM type: NRG; PAM sequence: TGG
  source 1..20: mol_type = other DNA
agtcaggaaacaacaggtgc

SEQ ID NO: 12877 - DNA, 20 bp, synthetic construct
  misc_feature 1..20: note = Description of Artificial Sequence: Synthetic oligonucleotide
  misc_feature 1..20: note = Target: SCN10A; (-) strand; PAM type: NRG; PAM sequence: AGG
  source 1..20: mol_type = other DNA
ttaaaaagtcaggaaacaac

SEQ ID NO: 12878 - DNA, 20 bp, synthetic construct
  misc_feature 1..20: note = Description of Artificial Sequence: Synthetic oligonucleotide
  misc_feature 1..20: note = Target: SCN10A; (-) strand; PAM type: NRG; PAM sequence: CAG
  source 1..20: mol_type = other DNA
attaaaaagtcaggaaacaa

SEQ ID NO: 12879 - DNA, 20 bp, synthetic construct
  misc_feature 1..20: note = Description of Artificial Sequence: Synthetic oligonucleotide
  misc_feature 1..20: note = Target: SCN10A; (-) strand; PAM type: NRG; PAM sequence: AGG
  source 1..20: mol_type = other DNA
atggcgatcattaaaaagtc

SEQ ID NO: 12880 - DNA, 20 bp, synthetic construct
  misc_feature 1..20: note = Description of Artificial Sequence: Synthetic oligonucleotide
  misc_feature 1..20: note = Target: SCN10A; (-) strand; PAM type: NRG; PAM sequence: CAG
  source 1..20: mol_type = other DNA
aatggcgatcattaaaaagt

SEQ ID NO: 12881 - DNA, 20 bp, synthetic construct
  misc_feature 1..20: note = Description of Artificial Sequence: Synthetic oligonucleotide
  misc_feature 1..20: note = Target: SCN10A; (-) strand; PAM type: NRG; PAM sequence: AAG
  source 1..20: mol_type = other DNA
ttagaatggcgatcattaaa

SEQ ID NO: 12882 - DNA, 20 bp, synthetic construct
  misc_feature 1..20: note = Description of Artificial Sequence: Synthetic oligonucleotide
  misc_feature 1..20: note = Target: SCN10A; (-) strand; PAM type: NRG; PAM sequence: TGG
  source 1..20: mol_type = other DNA
ccatctcacaccagttagaa

SEQ ID NO: 12883 - DNA, 20 bp, synthetic construct
  misc_feature 1..20: note = Description of Artificial Sequence: Synthetic oligonucleotide
  misc_feature 1..20: note = Target: SCN10A; (-) strand; PAM type: NRG; PAM sequence: TAG
  source 1..20: mol_type = other DNA
agataccatctcacaccagt

SEQ ID NO: 12884 - DNA, 20 bp, synthetic construct
  misc_feature 1..20: note = Description of Artificial Sequence: Synthetic oligonucleotide
  misc_feature 1..20: note = Target: SCN10A; (-) strand; PAM type: NRG; PAM sequence: CAG
  source 1..20: mol_type = other DNA
aatgagataccatctcacac

SEQ ID NO: 12885 - DNA, 20 bp, synthetic construct
  misc_feature 1..20: note = Description of Artificial Sequence: Synthetic oligonucleotide
  misc_feature 1..20: note = Target: SCN10A; (-) strand; PAM type: NRG; PAM sequence: GAG
  source 1..20: mol_type = other DNA
atgcaaatcaaaaccacaat

SEQ ID NO: 12886 - DNA, 20 bp, synthetic construct
  misc_feature 1..20: note = Description of Artificial Sequence: Synthetic oligonucleotide
  misc_feature 1..20: note = Target: SCN10A; (-) strand; PAM type: NRG; PAM sequence: GAG
  source 1..20: mol_type = other DNA
ctcatcatcactggccatca

SEQ ID NO: 12887 - DNA, 20 bp, synthetic construct
  misc_feature 1..20: note = Description of Artificial Sequence: Synthetic oligonucleotide
  misc_feature 1..20: note = Target: SCN10A; (-) strand; PAM type: NRG; PAM sequence: CAG
  source 1..20: mol_type = other DNA
tgctcatcatcactggccat

SEQ ID NO: 12888 - DNA, 20 bp, synthetic construct
  misc_feature 1..20: note = Description of Artificial Sequence: Synthetic oligonucleotide
  misc_feature 1..20: note = Target: SCN10A; (-) strand; PAM type: NRG; PAM sequence: TGG
  source 1..20: mol_type = other DNA
gaaaaaatgctcatcatcac

SEQ ID NO: 12889 - DNA, 20 bp, synthetic construct
  misc_feature 1..20: note = Description of Artificial Sequence: Synthetic oligonucleotide
  misc_feature 1..20: note = Target: SCN10A; (-) strand; PAM type: NRG; PAM sequence: CAG
  source 1..20: mol_type = other DNA
ctcaaaagaagacatttatg

SEQ ID NO: 12890 - DNA, 20 bp, synthetic construct
  misc_feature 1..20: note = Description of Artificial Sequence: Synthetic oligonucleotide
  misc_feature 1..20: note = Target: SCN10A; (-) strand; PAM type: NRG; PAM sequence: AAG
  source 1..20: mol_type = other DNA
gaacagacacttctcaaaag

SEQ ID NO: 12891 - DNA, 20 bp, synthetic construct
  misc_feature 1..20: note = Description of Artificial Sequence: Synthetic oligonucleotide
  misc_feature 1..20: note = Target: SCN10A; (-) strand; PAM type: NRG; PAM sequence: AAG
  source 1..20: mol_type = other DNA
tatgaacagacacttctcaa

SEQ ID NO: 12892 - DNA, 20 bp, synthetic construct
  misc_feature 1..20: note = Description of Artificial Sequence: Synthetic oligonucleotide
  misc_feature 1..20: note = Target: SCN10A; (-) strand; PAM type: NRG; PAM sequence: CAG
  source 1..20: mol_type = other DNA
aagtgggcgaaggatatgaa

SEQ ID NO: 12893 - DNA, 20 bp, synthetic construct
  misc_feature 1..20: note = Description of Artificial Sequence: Synthetic oligonucleotide
  misc_feature 1..20: note = Target: SCN10A; (-) strand; PAM type: NRG; PAM sequence: AGG
  source 1..20: mol_type = other DNA
tcccatcaaaaagtgggcga

SEQ ID NO: 12894 - DNA, 20 bp, synthetic construct
  misc_feature 1..20: note = Description of Artificial Sequence: Synthetic oligonucleotide
  misc_feature 1..20: note = Target: SCN10A; (-) strand; PAM type: NRG; PAM sequence: AAG
  source 1..20: mol_type = other DNA
atcccatcaaaaagtgggcg

SEQ ID NO: 12895 - DNA, 20 bp, synthetic construct
  misc_feature 1..20: note = Description of Artificial Sequence: Synthetic oligonucleotide
  misc_feature 1..20: note = Target: SCN10A; (-) strand; PAM type: NRG; PAM sequence: GGG
  source 1..20: mol_type = other DNA
aaaaaatcccatcaaaaagt

SEQ ID NO: 12896 - DNA, 20 bp, synthetic construct
  misc_feature 1..20: note = Description of Artificial Sequence: Synthetic oligonucleotide
  misc_feature 1..20: note = Target: SCN10A; (-) strand; PAM type: NRG; PAM sequence: TGG
  source 1..20: mol_type = other DNA
aaaaaaatcccatcaaaaag

SEQ ID NO: 12897 - DNA, 20 bp, synthetic construct
  misc_feature 1..20: note = Description of Artificial Sequence: Synthetic oligonucleotide
  misc_feature 1..20: note = Target: SCN10A; (-) strand; PAM type: NRG; PAM sequence: AAG
  source 1..20: mol_type = other DNA
aggaaaaaaatcccatcaaa

SEQ ID NO: 12898 - DNA, 20 bp, synthetic construct
  misc_feature 1..20: note = Description of Artificial Sequence: Synthetic oligonucleotide
  misc_feature 1..20: note = Target: SCN10A; (-) strand; PAM type: NRG; PAM sequence: AGG
  source 1..20: mol_type = other DNA
tgaactcaaacaaatttaca

SEQ ID NO: 12899 - DNA, 20 bp, synthetic construct
  misc_feature 1..20: note = Description of Artificial Sequence: Synthetic oligonucleotide
  misc_feature 1..20: note = Target: SCN10A; (-) strand; PAM type: NRG; PAM sequence: AAG
  source 1..20: mol_type = other DNA
atgaactcaaacaaatttac

SEQ ID NO: 12900 - DNA, 20 bp, synthetic construct
  misc_feature 1..20: note = Description of Artificial Sequence: Synthetic oligonucleotide
  misc_feature 1..20: note = Target: SCN10A; (-) strand; PAM type: NRG; PAM sequence: CAG
  source 1..20: mol_type = other DNA
tctgacgaagggctaatatc

SEQ ID NO: 12901 - DNA, 20 bp, synthetic construct
  misc_feature 1..20: note = Description of Artificial Sequence: Synthetic oligonucleotide
  misc_feature 1..20: note = Target: SCN10A; (-) strand; PAM type: NRG; PAM sequence: GGG
  source 1..20: mol_type = other DNA
caacctactcatctgacgaa

SEQ ID NO: 12902 - DNA, 20 bp, synthetic construct
  misc_feature 1..20: note = Description of Artificial Sequence: Synthetic oligonucleotide
  misc_feature 1..20: note = Target: SCN10A; (-) strand; PAM type: NRG; PAM sequence: AGG
  source 1..20: mol_type = other DNA
gcaacctactcatctgacga

SEQ ID NO: 12903 - DNA, 20 bp, synthetic construct
  misc_feature 1..20: note = Description of Artificial Sequence: Synthetic oligonucleotide
  misc_feature 1..20: note = Target: SCN10A; (-) strand; PAM type: NRG; PAM sequence: AAG
  source 1..20: mol_type = other DNA
tgcaacctactcatctgacg

SEQ ID NO: 12904 - DNA, 20 bp, synthetic construct
  misc_feature 1..20: note = Description of Artificial Sequence: Synthetic oligonucleotide
  misc_feature 1..20: note = Target: SCN10A; (-) strand; PAM type: NRG; PAM sequence: GAG
  source 1..20: mol_type = other DNA
aacagaaacctacaggatgg

SEQ ID NO: 12905 - DNA, 20 bp, synthetic construct
  misc_feature 1..20: note = Description of Artificial Sequence: Synthetic oligonucleotide
  misc_feature 1..20: note = Target: SCN10A; (-) strand; PAM type: NRG; PAM sequence: GGG
  source 1..20: mol_type = other DNA
tgaacagaaacctacaggat

SEQ ID NO: 12906 - DNA, 20 bp, synthetic construct
  misc_feature 1..20: note = Description of Artificial Sequence: Synthetic oligonucleotide
  misc_feature 1..20: note = Target: SCN10A; (-) strand; PAM type: NRG; PAM sequence: TGG
  source 1..20: mol_type = other DNA
gtgaacagaaacctacagga

SEQ ID NO: 12907 - DNA, 20 bp, synthetic construct
  misc_feature 1..20: note = Description of Artificial Sequence: Synthetic oligonucleotide
  misc_feature 1..20: note = Target: SCN10A; (-) strand; PAM type: NRG; PAM sequence: AGG
  source 1..20: mol_type = other DNA
cagagtgaacagaaacctac

SEQ ID NO: 12908 - DNA, 20 bp, synthetic construct
  misc_feature 1..20: note = Description of Artificial Sequence: Synthetic oligonucleotide
  misc_feature 1..20: note = Target: SCN10A; (-) strand; PAM type: NRG; PAM sequence: CAG
  source 1..20: mol_type = other DNA
tcagagtgaacagaaaccta

SEQ ID NO: 12909 - DNA, 20 bp, synthetic construct
  misc_feature 1..20: note = Description of Artificial Sequence: Synthetic oligonucleotide
  misc_feature 1..20: note = Target: SCN10A; (-) strand; PAM type: NRG; PAM sequence: CAG
  source 1..20: mol_type = other DNA
gaaaccaccatcagagtgaa

SEQ ID NO: 12910 - DNA, 20 bp, synthetic construct
  misc_feature 1..20: note = Description of Artificial Sequence: Synthetic oligonucleotide
  misc_feature 1..20: note = Target: SCN10A; (-) strand; PAM type: NRG; PAM sequence: GAG
  source 1..20: mol_type = other DNA
agcaaaagaaaccaccatca

SEQ ID NO: 12911 - DNA, 20 bp, synthetic construct
  misc_feature 1..20: note = Description of Artificial Sequence: Synthetic oligonucleotide
  misc_feature 1..20: note = Target: SCN10A; (-) strand; PAM type: NRG; PAM sequence: CAG
  source 1..20: mol_type = other DNA
gcagcaaaagaaaccaccat

SEQ ID NO: 12912 - DNA, 20 bp, synthetic construct
  misc_feature 1..20: note = Description of Artificial Sequence: Synthetic oligonucleotide
  misc_feature 1..20: note = Target: SCN10A; (-) strand; PAM type: NRG; PAM sequence: AAG
  source 1..20: mol_type = other DNA
aaagagcttctgagcagcaa

SEQ ID NO: 12913 - DNA, 20 bp, synthetic construct
  misc_feature 1..20: note = Description of Artificial Sequence: Synthetic oligonucleotide
  misc_feature 1..20: note = Target: SCN10A; (-) strand; PAM type: NRG; PAM sequence: CAG
  source 1..20: mol_type = other DNA
taaactaaagagcttctgag

SEQ ID NO: 12914 - DNA, 20 bp, synthetic construct
  misc_feature 1..20: note = Description of Artificial Sequence: Synthetic oligonucleotide
  misc_feature 1..20: note = Target: SCN10A; (-) strand; PAM type: NRG; PAM sequence: GAG
  source 1..20: mol_type = other DNA
cattaaactaaagagcttct

SEQ ID NO: 12915 - DNA, 20 bp, synthetic construct
  misc_feature 1..20: note = Description of Artificial Sequence: Synthetic oligonucleotide
  misc_feature 1..20: note = Target: SCN10A; (-) strand; PAM type: NRG; PAM sequence: GAG
  source 1..20: mol_type = other DNA
tgggatctcattaaactaaa

SEQ ID NO: 12916 - DNA, 20 bp, synthetic construct
  misc_feature 1..20: note = Description of Artificial Sequence: Synthetic oligonucleotide
  misc_feature 1..20: note = Target: SCN10A; (-) strand; PAM type: NRG; PAM sequence: AAG
  source 1..20: mol_type = other DNA
aatgggatctcattaaacta

SEQ ID NO: 12917 - DNA, 20 bp, synthetic construct
  misc_feature 1..20: note = Description of Artificial Sequence: Synthetic oligonucleotide
  misc_feature 1..20: note = Target: SCN10A; (-) strand; PAM type: NRG; PAM sequence: GGG
  source 1..20: mol_type = other DNA
aaaagtcaaaattgacaaat

SEQ ID NO: 12918 - DNA, 20 bp, synthetic construct
  misc_feature 1..20: note = Description of Artificial Sequence: Synthetic oligonucleotide
  misc_feature 1..20: note = Target: SCN10A; (-) strand; PAM type: NRG; PAM sequence: TGG
  source 1..20: mol_type = other DNA
caaaagtcaaaattgacaaa

SEQ ID NO: 12919 - DNA, 20 bp, synthetic construct
  misc_feature 1..20: note = Description of Artificial Sequence: Synthetic oligonucleotide
  misc_feature 1..20: note = Target: SCN10A; (-) strand; PAM type: NRG; PAM sequence: AAG
  source 1..20: mol_type = other DNA
accaaaagcaatggcaacaa

SEQ ID NO: 12920 - DNA, 20 bp, synthetic construct
  misc_feature 1..20: note = Description of Artificial Sequence: Synthetic oligonucleotide
  misc_feature 1..20: note = Target: SCN10A; (-) strand; PAM type: NRG; PAM sequence: TGG
  source 1..20: mol_type = other DNA
gtctaaaacaccaaaagcaa

SEQ ID NO: 12921 - DNA, 20 bp, synthetic construct
  misc_feature 1..20: note = Description of Artificial Sequence: Synthetic oligonucleotide
  misc_feature 1..20: note = Target: SCN10A; (-) strand; PAM type: NRG; PAM sequence: AAG
  source 1..20: mol_type = other DNA
cttcatgtctaaaacaccaa

SEQ ID NO: 12922 - DNA, 20 bp, synthetic construct
  misc_feature 1..20: note = Description of Artificial Sequence: Synthetic oligonucleotide
  misc_feature 1..20: note = Target: SCN10A; (-) strand; PAM type: NRG; PAM sequence: AGG
  source 1..20: mol_type = other DNA
tcaggacataggcatgggca

SEQ ID NO: 12923 - DNA, 20 bp, synthetic construct
  misc_feature 1..20: note = Description of Artificial Sequence: Synthetic oligonucleotide
  misc_feature 1..20: note = Target: SCN10A; (-) strand; PAM type: NRG; PAM sequence: AAG
  source 1..20: mol_type = other DNA
ttcaggacataggcatgggc

SEQ ID NO: 12924 - DNA, 20 bp, synthetic construct
  misc_feature 1..20: note = Description of Artificial Sequence: Synthetic oligonucleotide
  misc_feature 1..20: note = Target: SCN10A; (-) strand; PAM type: NRG; PAM sequence: GGG
  source 1..20: mol_type = other DNA
accattcaggacataggcat

SEQ ID NO: 12925 - DNA, 20 bp, synthetic construct
  misc_feature 1..20: note = Description of Artificial Sequence: Synthetic oligonucleotide
  misc_feature 1..20: note = Target: SCN10A; (-) strand; PAM type: NRG; PAM sequence: TGG
  source 1..20: mol_type = other DNA
taccattcaggacataggca

SEQ ID NO: 12926 - DNA, 20 bp, synthetic construct
  misc_feature 1..20: note = Description of Artificial Sequence: Synthetic oligonucleotide
  misc_feature 1..20: note = Target: SCN10A; (-) strand; PAM type: NRG; PAM sequence: AGG
  source 1..20: mol_type = other DNA
ggcaataccattcaggacat

SEQ ID NO: 12927 - DNA, 20 bp, synthetic construct
  misc_feature 1..20: note = Description of Artificial Sequence: Synthetic oligonucleotide
  misc_feature 1..20: note = Target: SCN10A; (-) strand; PAM type: NRG; PAM sequence: TAG
  source 1..20: mol_type = other DNA
aggcaataccattcaggaca

SEQ ID NO: 12928 - DNA, 20 bp, synthetic construct
  misc_feature 1..20: note = Description of Artificial Sequence: Synthetic oligonucleotide
  misc_feature 1..20: note = Target: SCN10A; (-) strand; PAM type: NRG; PAM sequence: AGG
  source 1..20: mol_type = other DNA
gaacctaggcaataccattc

SEQ ID NO: 12929 - DNA, 20 bp, synthetic construct
  misc_feature 1..20: note = Description of Artificial Sequence: Synthetic oligonucleotide
  misc_feature 1..20: note = Target: SCN10A; (-) strand; PAM type: NRG; PAM sequence: CAG
  source 1..20: mol_type = other DNA
agaacctaggcaataccatt

SEQ ID NO: 12930 - DNA, 20 bp, synthetic construct
  misc_feature 1..20: note = Description of Artificial Sequence: Synthetic oligonucleotide
  misc_feature 1..20: note = Target: SCN10A; (-) strand; PAM type: NRG; PAM sequence: AGG
  source 1..20: mol_type = other DNA
aaaaccctagaagagaacct

SEQ ID NO: 12931 - DNA, 20 bp, synthetic construct
  misc_feature 1..20: note = Description of Artificial Sequence: Synthetic oligonucleotide
  misc_feature 1..20: note = Target: SCN10A; (-) strand; PAM type: NRG; PAM sequence: TAG
  source 1..20: mol_type = other DNA
aaaaaccctagaagagaacc

SEQ ID NO: 12932 - DNA, 20 bp, synthetic construct
  misc_feature 1..20: note = Description of Artificial Sequence: Synthetic oligonucleotide
  misc_feature 1..20: note = Target: SCN10A; (-) strand; PAM type: NRG; PAM sequence: GAG
  source 1..20: mol_type = other DNA
aaaccataaaaaccctagaa

SEQ ID NO: 12933 - DNA, 20 bp, synthetic construct
  misc_feature 1..20: note = Description of Artificial Sequence: Synthetic oligonucleotide
  misc_feature 1..20: note = Target: SCN10A; (-) strand; PAM type: NRG; PAM sequence: AAG
  source 1..20: mol_type = other DNA
taaaaccataaaaaccctag

SEQ ID NO: 12934 - DNA, 20 bp, synthetic construct
  misc_feature 1..20: note = Description of Artificial Sequence: Synthetic oligonucleotide
  misc_feature 1..20: note = Target: SCN10A; (-) strand; PAM type: NRG; PAM sequence: TAG
  source 1..20: mol_type = other DNA
acctaaaaccataaaaaccc

SEQ ID NO: 12935 - DNA, 20 bp, synthetic construct
  misc_feature 1..20: note = Description of Artificial Sequence: Synthetic oligonucleotide
  misc_feature 1..20: note = Target: SCN10A; (-) strand; PAM type: NRG; PAM sequence: TAG
  source 1..20: mol_type = other DNA
tggattaaagacttaaatgt

SEQ ID NO: 12936 - DNA, 20 bp, synthetic construct
  misc_feature 1..20: note = Description of Artificial Sequence: Synthetic oligonucleotide
  misc_feature 1..20: note = Target: SCN10A; (-) strand; PAM type: NRG; PAM sequence: AAG
  source 1..20: mol_type = other DNA
aattaattcaagatggatta

SEQ ID NO: 12937 - DNA, 20 bp, synthetic construct
  misc_feature 1..20: note = Description of Artificial Sequence: Synthetic oligonucleotide
  misc_feature 1..20: note = Target: SCN10A; (-) strand; PAM type: NRG; PAM sequence: TGG
  source 1..20: mol_type = other DNA
atacaaaaattaattcaaga

SEQ ID NO: 12938 - DNA, 20 bp, synthetic construct
  misc_feature 1..20: note = Description of Artificial Sequence: Synthetic oligonucleotide
  misc_feature 1..20: note = Target: SCN10A; (-) strand; PAM type: NRG; PAM sequence: AAG
  source 1..20: mol_type = other DNA
ccttatacaaaaattaattc

SEQ ID NO: 12939 - DNA, 20 bp, synthetic construct
  misc_feature 1..20: note = Description of Artificial Sequence: Synthetic oligonucleotide
  misc_feature 1..20: note = Target: SCN10A; (-) strand; PAM type: NRG; PAM sequence: TGG
  source 1..20: mol_type = other DNA
catatggagaaagctgaaac

SEQ ID NO: 12940 - DNA, 20 bp, synthetic construct
  misc_feature 1..20: note = Description of Artificial Sequence: Synthetic oligonucleotide
  misc_feature 1..20: note = Target: SCN10A; (-) strand; PAM type: NRG; PAM sequence: AAG
  source 1..20: mol_type = other DNA
actggctagccatatggaga

SEQ ID NO: 12941 - DNA, 20 bp, synthetic construct
  misc_feature 1..20: note = Description of Artificial Sequence: Synthetic oligonucleotide
  misc_feature 1..20: note = Target: SCN10A; (-) strand; PAM type: NRG; PAM sequence: GAG
  source 1..20: mol_type = other DNA
gaaaactggctagccatatg

SEQ ID NO: 12942 - DNA, 20 bp, synthetic construct
  misc_feature 1..20: note = Description of Artificial Sequence: Synthetic oligonucleotide
  misc_feature 1..20: note = Target: SCN10A; (-) strand; PAM type: NRG; PAM sequence: TGG
  source 1..20: mol_type = other DNA
gggaaaactggctagccata

SEQ ID NO: 12943 - DNA, 20 bp, synthetic construct
  misc_feature 1..20: note = Description of Artificial Sequence: Synthetic oligonucleotide
  misc_feature 1..20: note = Target: SCN10A; (-) strand; PAM type: NRG; PAM sequence: TAG
  source 1..20: mol_type = other DNA
atggtgctgggaaaactggc

SEQ ID NO: 12944 - DNA, 20 bp, synthetic construct
  misc_feature 1..20: note = Description of Artificial Sequence: Synthetic oligonucleotide
  misc_feature 1..20: note = Target: SCN10A; (-) strand; PAM type: NRG; PAM sequence: TGG
  source 1..20: mol_type = other DNA
ataaatggtgctgggaaaac

SEQ ID NO: 12945 - DNA, 20 bp, synthetic construct
  misc_feature 1..20: note = Description of Artificial Sequence: Synthetic oligonucleotide
  misc_feature 1..20: note = Target: SCN10A; (-) strand; PAM type: NRG; PAM sequence: GGG
  source 1..20: mol_type = other DNA
cctatttaataaatggtgct

SEQ ID NO: 12946 - DNA, 20 bp, synthetic construct
  misc_feature 1..20: note = Description of Artificial Sequence: Synthetic oligonucleotide
  misc_feature 1..20: note = Target: SCN10A; (-) strand; PAM type: NRG; PAM sequence: TGG
  source 1..20: mol_type = other DNA
ccctatttaataaatggtgc

SEQ ID NO: 12947 - DNA, 20 bp, synthetic construct
  misc_feature 1..20: note = Description of Artificial Sequence: Synthetic oligonucleotide
  misc_feature 1..20: note = Target: SCN10A; (-) strand; PAM type: NRG; PAM sequence: TGG
  source 1..20: mol_type = other DNA
aggattccctatttaataaa

SEQ ID NO: 12948 - DNA, 20 bp, synthetic construct
  misc_feature 1..20: note = Description of Artificial Sequence: Synthetic oligonucleotide
  misc_feature 1..20: note = Target: SCN10A; (-) strand; PAM type: NRG; PAM sequence: AGG
  source 1..20: mol_type = other DNA
caaaaacaagaaatggggaa

SEQ ID NO: 12949 - DNA, 20 bp, synthetic construct
  misc_feature 1..20: note = Description of Artificial Sequence: Synthetic oligonucleotide
  misc_feature 1..20: note = Target: SCN10A; (-) strand; PAM type: NRG; PAM sequence: AAG
  source 1..20: mol_type = other DNA
acaaaaacaagaaatgggga

SEQ ID NO: 12950 - DNA, 20 bp, synthetic construct
  misc_feature 1..20: note = Description of Artificial Sequence: Synthetic oligonucleotide
  misc_feature 1..20: note = Target: SCN10A; (-) strand; PAM type: NRG; PAM sequence: GGG
  source 1..20: mol_type = other DNA
cctgacaaaaacaagaaatg

SEQ ID NO: 12951 - DNA, 20 bp, synthetic construct
  misc_feature 1..20: note = Description of Artificial Sequence: Synthetic oligonucleotide
  misc_feature 1..20: note = Target: SCN10A; (-) strand; PAM type: NRG; PAM sequence: GGG
  source 1..20: mol_type = other DNA
acctgacaaaaacaagaaat

SEQ ID NO: 12952 - DNA, 20 bp, synthetic construct
  misc_feature 1..20: note = Description of Artificial Sequence: Synthetic oligonucleotide
  misc_feature 1..20: note = Target: SCN10A; (-) strand; PAM type: NRG; PAM sequence: TGG
  source 1..20: mol_type = other DNA
aacctgacaaaaacaagaaa

SEQ ID NO: 12953 - DNA, 20 bp, synthetic construct
  misc_feature 1..20: note = Description of Artificial Sequence: Synthetic oligonucleotide
  misc_feature 1..20: note = Target: SCN10A; (-) strand; PAM type: NRG; PAM sequence: AAG
  source 1..20: mol_type = other DNA
ttgacaaacctgacaaaaac

SEQ ID NO: 12954 - DNA, 20 bp, synthetic construct
  misc_feature 1..20: note = Description of Artificial Sequence: Synthetic oligonucleotide
  misc_feature 1..20: note = Target: SCN10A; (-) strand; PAM type: NRG; PAM sequence: CAG
  source 1..20: mol_type = other DNA
atggaacagaacagagccct

SEQ ID NO: 12955 - DNA, 20 bp, synthetic construct
  misc_feature 1..20: note = Description of Artificial Sequence: Synthetic oligonucleotide
  misc_feature 1..20: note = Target: SCN10A; (-) strand; PAM type: NRG; PAM sequence: GAG
  source 1..20: mol_type = other DNA
tagaccaatggaacagaaca

SEQ ID NO: 12956 - DNA, 20 bp, synthetic construct
  misc_feature 1..20: note = Description of Artificial Sequence: Synthetic oligonucleotide
  misc_feature 1..20: note = Target: SCN10A; (-) strand; PAM type: NRG; PAM sequence: CAG
  source 1..20: mol_type = other DNA
tatagaccaatggaacagaa

SEQ ID NO: 12957 - DNA, 20 bp, synthetic construct
  misc_feature 1..20: note = Description of Artificial Sequence: Synthetic oligonucleotide
  misc_feature 1..20: note = Target: SCN10A; (-) strand; PAM type: NRG; PAM sequence: CAG
  source 1..20: mol_type = other DNA
agagatatagaccaatggaa

SEQ ID NO: 12958 - DNA, 20 bp, synthetic construct
  misc_feature 1..20: note = Description of Artificial Sequence: Synthetic oligonucleotide
  misc_feature 1..20: note = Target: SCN10A; (-) strand; PAM type: NRG; PAM sequence: TGG
  source 1..20: mol_type = other DNA
aaaacagagatatagaccaa

SEQ ID NO: 12959 - DNA, 20 bp, synthetic construct
  misc_feature 1..20: note = Description of Artificial Sequence: Synthetic oligonucleotide
  misc_feature 1..20: note = Target: SCN10A; (-) strand; PAM type: NRG; PAM sequence: TAG
  source 1..20: mol_type = other DNA
ctggtaccaaaacagagata

SEQ ID NO: 12960 - DNA, 20 bp, synthetic construct
  misc_feature 1..20: note = Description of Artificial Sequence: Synthetic oligonucleotide
  misc_feature 1..20: note = Target: SCN10A; (-) strand; PAM type: NRG; PAM sequence: GAG
  source 1..20: mol_type = other DNA
atggtactggtaccaaaaca

SEQ ID NO: 12961 - DNA, 20 bp, synthetic construct
  misc_feature 1..20: note = Description of Artificial Sequence: Synthetic oligonucleotide
  misc_feature 1..20: note = Target: SCN10A; (-) strand; PAM type: NRG; PAM sequence: CAG
  source 1..20: mol_type = other DNA
gcatggtactggtaccaaaa

SEQ ID NO: 12962 - DNA, 20 bp, synthetic construct
  misc_feature 1..20: note = Description of Artificial Sequence: Synthetic oligonucleotide
  misc_feature 1..20: note = Target: SCN10A; (-) strand; PAM type: NRG; PAM sequence: TGG
  source 1..20: mol_type = other DNA
taaccaaaacagcatggtac

SEQ ID NO: 12963 - DNA, 20 bp, synthetic construct
  misc_feature 1..20: note = Description of Artificial Sequence: Synthetic oligonucleotide
  misc_feature 1..20: note = Target: SCN10A; (-) strand; PAM type: NRG; PAM sequence: TGG
  source 1..20: mol_type = other DNA
ctacagtaaccaaaacagca

SEQ ID NO: 12964 - DNA, 20 bp, synthetic construct
  misc_feature 1..20: note = Description of Artificial Sequence: Synthetic oligonucleotide
  misc_feature 1..20: note = Target: SCN10A; (-) strand; PAM type: NRG; PAM sequence: CAG
  source 1..20: mol_type = other DNA
caaggctacagtaaccaaaa

SEQ ID NO: 12965 - DNA, 20 bp, synthetic construct
  misc_feature 1..20: note = Description of Artificial Sequence: Synthetic oligonucleotide
  misc_feature 1..20: note = Target: SCN10A; (-) strand; PAM type: NRG; PAM sequence: CAG
  source 1..20: mol_type = other DNA
caaactatattacaaggcta

SEQ ID NO: 12966 - DNA, 20 bp, synthetic construct
  misc_feature 1..20: note = Description of Artificial Sequence: Synthetic oligonucleotide
  misc_feature 1..20: note = Target: SCN10A; (-) strand; PAM type: NRG; PAM sequence: AGG
  source 1..20: mol_type = other DNA
tgacttcaaactatattaca

SEQ ID NO: 12967 - DNA, 20 bp, synthetic construct
  misc_feature 1..20: note = Description of Artificial Sequence: Synthetic oligonucleotide
  misc_feature 1..20: note = Target: SCN10A; (-) strand; PAM type: NRG; PAM sequence: AAG
  source 1..20: mol_type = other DNA
ctgacttcaaactatattac

SEQ ID NO: 12968 - DNA, 20 bp, synthetic construct
  misc_feature 1..20: note = Description of Artificial Sequence: Synthetic oligonucleotide
  misc_feature 1..20: note = Target: SCN10A; (-) strand; PAM type: NRG; PAM sequence: AGG
  source 1..20: mol_type = other DNA
ttggtgtataacaaagctgg

SEQ ID NO: 12969 - DNA, 20 bp, synthetic construct
  misc_feature 1..20: note = Description of Artificial Sequence: Synthetic oligonucleotide
  misc_feature 1..20: note = Target: SCN10A; (-) strand; PAM type: NRG; PAM sequence: GAG
  source 1..20: mol_type = other DNA
attggtgtataacaaagctg

SEQ ID NO: 12970 - DNA, 20 bp, synthetic construct
  misc_feature 1..20: note = Description of Artificial Sequence: Synthetic oligonucleotide
  misc_feature 1..20: note = Target: SCN10A; (-) strand; PAM type: NRG; PAM sequence: TGG
  source 1..20: mol_type = other DNA
ttattggtgtataacaaagc

SEQ ID NO: 12971 - DNA, 20 bp, synthetic construct
  misc_feature 1..20: note = Description of Artificial Sequence: Synthetic oligonucleotide
  misc_feature 1..20: note = Target: SCN10A; (-) strand; PAM type: NRG; PAM sequence: AAG
  source 1..20: mol_type = other DNA
tctgttattggtgtataaca

SEQ ID NO: 12972 - DNA, 20 bp, synthetic construct
  misc_feature 1..20: note = Description of Artificial Sequence: Synthetic oligonucleotide
  misc_feature 1..20: note = Target: SCN10A; (-) strand; PAM type: NRG; PAM sequence: TGG
  source 1..20: mol_type = other DNA
gctctctgtttgtctgttat

SEQ ID NO: 12973 - DNA, 20 bp, synthetic construct
  misc_feature 1..20: note = Description of Artificial Sequence: Synthetic oligonucleotide
  misc_feature 1..20: note = Target: SCN10A; (-) strand; PAM type: NRG; PAM sequence: TGG
  source 1..20: mol_type = other DNA
atgggagttcactcatgatt

SEQ ID NO: 12974 - DNA, 20 bp, synthetic construct
  misc_feature 1..20: note = Description of Artificial Sequence: Synthetic oligonucleotide
  misc_feature 1..20: note = Target: SCN10A; (-) strand; PAM type: NRG; PAM sequence: GAG
  source 1..20: mol_type = other DNA
tttgaagcaattgtgaatgg

SEQ ID NO: 12975 - DNA, 20 bp, synthetic construct
  misc_feature 1..20: note = Description of Artificial Sequence: Synthetic oligonucleotide
  misc_feature 1..20: note = Target: SCN10A; (-) strand; PAM type: NRG; PAM sequence: GGG
  source 1..20: mol_type = other DNA
tctttgaagcaattgtgaat

SEQ ID NO: 12976 - DNA, 20 bp, synthetic construct
  misc_feature 1..20: note = Description of Artificial Sequence: Synthetic oligonucleotide
  misc_feature 1..20: note = Target: SCN10A; (-) strand; PAM type: NRG; PAM sequence: TGG
  source 1..20: mol_type = other DNA
ctctttgaagcaattgtgaa

SEQ ID NO: 12977 - DNA, 20 bp, synthetic construct
  misc_feature 1..20: note = Description of Artificial Sequence: Synthetic oligonucleotide
  misc_feature 1..20: note = Target: SCN10A; (-) strand; PAM type: NRG; PAM sequence: AAG
  source 1..20: mol_type = other DNA
taggtattttattctctttg

SEQ ID NO: 12978 - DNA, 20 bp, synthetic construct
  misc_feature 1..20: note = Description of Artificial Sequence: Synthetic oligonucleotide
  misc_feature 1..20: note = Target: SCN10A; (-) strand; PAM type: NRG; PAM sequence: AGG
  source 1..20: mol_type = other DNA
cccttgtaagttgcattcct

SEQ ID NO: 12979 - DNA, 20 bp, synthetic construct
  misc_feature 1..20: note = Description of Artificial Sequence: Synthetic oligonucleotide
  misc_feature 1..20: note = Target: SCN10A; (-) strand; PAM type: NRG; PAM sequence: TAG
  source 1..20: mol_type = other DNA
tcccttgtaagttgcattcc

SEQ ID NO: 12980 - DNA, 20 bp, synthetic construct
  misc_feature 1..20: note = Description of Artificial Sequence: Synthetic oligonucleotide
  misc_feature 1..20: note = Target: SCN10A; (-) strand; PAM type: NRG; PAM sequence: AAG
  source 1..20: mol_type = other DNA
aggtccttcacatcccttgt

SEQ ID NO: 12981 - DNA, 20 bp, synthetic construct
  misc_feature 1..20: note = Description of Artificial Sequence: Synthetic oligonucleotide
  misc_feature 1..20: note = Target: SCN10A; (-) strand; PAM type: NRG; PAM sequence: AGG
  source 1..20: mol_type = other DNA
gtttgtagttctccttgaag

SEQ ID NO: 12982 - DNA, 20 bp, synthetic construct
  misc_feature 1..20: note = Description of Artificial Sequence: Synthetic oligonucleotide
  misc_feature 1..20: note = Target: SCN10A; (-) strand; PAM type: NRG; PAM sequence: GAG
  source 1..20: mol_type = other DNA
ggtttgtagttctccttgaa

SEQ ID NO: 12983 - DNA, 20 bp, synthetic construct
  misc_feature 1..20: note = Description of Artificial Sequence: Synthetic oligonucleotide
  misc_feature 1..20: note = Target: SCN10A; (-) strand; PAM type: NRG; PAM sequence: AAG
  source 1..20: mol_type = other DNA
gtggtttgtagttctccttg

SEQ ID NO: 12984 - DNA, 20 bp, synthetic construct
  misc_feature 1..20: note = Description of Artificial Sequence: Synthetic oligonucleotide
  misc_feature 1..20: note = Target: SCN10A; (-) strand; PAM type: NRG; PAM sequence: TAG
  source 1..20: mol_type = other DNA
tttcactgagcagtggtttg

SEQ ID NO: 12985 - DNA, 20 bp, synthetic construct
  misc_feature 1..20: note = Description of Artificial Sequence: Synthetic oligonucleotide
  misc_feature 1..20: note = Target: SCN10A; (-) strand; PAM type: NRG; PAM sequence: TGG
  source 1..20: mol_type = other DNA
tcttttatttcactgagcag

SEQ ID NO: 12986 - DNA, 20 bp, synthetic construct
  misc_feature 1..20: note = Description of Artificial Sequence: Synthetic oligonucleotide
  misc_feature 1..20: note = Target: SCN10A; (-) strand; PAM type: NRG; PAM sequence: CAG
  source 1..20: mol_type = other DNA
tcctcttttatttcactgag

SEQ ID NO: 12987 - DNA, 20 bp, synthetic construct
  misc_feature 1..20: note = Description of Artificial Sequence: Synthetic oligonucleotide
  misc_feature 1..20: note = Target: SCN10A; (-) strand; PAM type: NRG; PAM sequence: GAG
  source 1..20: mol_type = other DNA
gtatcctcttttatttcact

SEQ ID NO: 12988 - DNA, 20 bp, synthetic construct
  misc_feature 1..20: note = Description of Artificial Sequence: Synthetic oligonucleotide
  misc_feature 1..20: note = Target: SCN10A; (-) strand; PAM type: NRG; PAM sequence: GAG
  source 1..20: mol_type = other DNA
tcttcctacccatgagcatg

SEQ ID NO: 12989 - DNA, 20 bp, synthetic construct
  misc_feature 1..20: note = Description of Artificial Sequence: Synthetic oligonucleotide
  misc_feature 1..20: note = Target: SCN10A; (-) strand; PAM type: NRG; PAM sequence: TGG
  source 1..20: mol_type = other DNA
attcttcctacccatgagca

SEQ ID NO: 12990 - DNA, 20 bp, synthetic construct
  misc_feature 1..20: note = Description of Artificial Sequence: Synthetic oligonucleotide
  misc_feature 1..20: note = Target: SCN10A; (-) strand; PAM type: NRG; PAM sequence: GAG
  source 1..20: mol_type = other DNA
tattgattcttcctacccat

SEQ ID NO: 12991 - DNA, 20 bp, synthetic construct
  misc_feature 1..20: note = Description of Artificial Sequence: Synthetic oligonucleotide
  misc_feature 1..20: note = Target: SCN10A; (-) strand; PAM type: NRG; PAM sequence: AAG
  source 1..20: mol_type = other DNA
tgggcagtatggccattttc

SEQ ID NO: 12992 - DNA, 20 bp, synthetic construct
  misc_feature 1..20: note = Description of Artificial Sequence: Synthetic oligonucleotide
  misc_feature 1..20: note = Target: SCN10A; (-) strand; PAM type: NRG; PAM sequence: TGG
  source 1..20: mol_type = other DNA
ataaattaccttgggcagta

SEQ ID NO: 12993 - DNA, 20 bp, synthetic construct
  misc_feature 1..20: note = Description of Artificial Sequence: Synthetic oligonucleotide
  misc_feature 1..20: note = Target: SCN10A; (-) strand; PAM type: NRG; PAM sequence: CAG
  source 1..20: mol_type = other DNA
aatctataaattaccttggg

SEQ ID NO: 12994 - DNA, 20 bp, synthetic construct
  misc_feature 1..20: note = Description of Artificial Sequence: Synthetic oligonucleotide
  misc_feature 1..20: note = Target: SCN10A; (-) strand; PAM type: NRG; PAM sequence: GGG
  source 1..20: mol_type = other DNA
ttgaatctataaattacctt

SEQ ID NO: 12995 - DNA, 20 bp, synthetic construct
  misc_feature 1..20: note = Description of Artificial Sequence: Synthetic oligonucleotide
  misc_feature 1..20: note = Target: SCN10A; (-) strand; PAM type: NRG; PAM sequence: TGG
  source 1..20: mol_type = other DNA
attgaatctataaattacct

SEQ ID NO: 12996 - DNA, 20 bp, synthetic construct
  misc_feature 1..20: note = Description of Artificial Sequence: Synthetic oligonucleotide
  misc_feature 1..20: note = Target: SCN10A; (-) strand; PAM type: NRG; PAM sequence: TGG
  source 1..20: mol_type = other DNA
cattggtagcttgatgggga

SEQ ID NO: 12997 - DNA, 20 bp, synthetic construct
  misc_feature 1..20: note = Description of Artificial Sequence: Synthetic oligonucleotide
  misc_feature 1..20: note = Target: SCN10A; (-) strand; PAM type: NRG; PAM sequence: GGG
  source 1..20: mol_type = other DNA
aagtcattggtagcttgatg

SEQ ID NO: 12998 - DNA, 20 bp, synthetic construct
  misc_feature 1..20: note = Description of Artificial Sequence: Synthetic oligonucleotide
  misc_feature 1..20: note = Target: SCN10A; (-) strand; PAM type: NRG; PAM sequence: GGG
  source 1..20: mol_type = other DNA
aaagtcattggtagcttgat

SEQ ID NO: 12999 - DNA, 20 bp, synthetic construct
  misc_feature 1..20: note = Description of Artificial Sequence: Synthetic oligonucleotide
  misc_feature 1..20: note = Target: SCN10A; (-) strand; PAM type: NRG; PAM sequence: TGG
  source 1..20: mol_type = other DNA
gaaagtcattggtagcttga

SEQ ID NO: 13000 - DNA, 20 bp, synthetic construct
  misc_feature 1..20: note = Description of Artificial Sequence: Synthetic oligonucleotide
  misc_feature 1..20: note = Target: SCN10A; (-) strand; PAM type: NRG; PAM sequence: TAG
  source 1..20: mol_type = other DNA
tctgagaagaaagtcattgg

SEQ ID NO: 13001 - DNA, 20 bp, synthetic construct
  misc_feature 1..20: note = Description of Artificial Sequence: Synthetic oligonucleotide
  misc_feature 1..20: note = Target: SCN10A; (-) strand; PAM type: NRG; PAM sequence: TGG
  source 1..20: mol_type = other DNA
aattctgagaagaaagtcat

SEQ ID NO: 13002 - DNA, 20 bp, synthetic construct
  misc_feature 1..20: note = Description of Artificial Sequence: Synthetic oligonucleotide
  misc_feature 1..20: note = Target: SCN10A; (-) strand; PAM type: NRG; PAM sequence: AAG
  source 1..20: mol_type = other DNA
tttttccaattctgagaaga

SEQ ID NO: 13003 - DNA, 20 bp, synthetic construct
  misc_feature 1..20: note = Description of Artificial Sequence: Synthetic oligonucleotide
  misc_feature 1..20: note = Target: SCN10A; (-) strand; PAM type: NRG; PAM sequence: AAG
  source 1..20: mol_type = other DNA
tagttttttccaattctgag

SEQ ID NO: 13004 - DNA, 20 bp, synthetic construct
  misc_feature 1..20: note = Description of Artificial Sequence: Synthetic oligonucleotide
  misc_feature 1..20: note = Target: SCN10A; (-) strand; PAM type: NRG; PAM sequence: GAG
  source 1..20: mol_type = other DNA
aagtagttttttccaattct

SEQ ID NO: 13005 - DNA, 20 bp, synthetic construct
  misc_feature 1..20: note = Description of Artificial Sequence: Synthetic oligonucleotide
  misc_feature 1..20: note = Target: SCN10A; (-) strand; PAM type: NRG; PAM sequence: TAG
  source 1..20: mol_type = other DNA
gttccgtatgaactttaaag

SEQ ID NO: 13006 - DNA, 20 bp, synthetic construct
  misc_feature 1..20: note = Description of Artificial Sequence: Synthetic oligonucleotide
  misc_feature 1..20: note = Target: SCN10A; (-) strand; PAM type: NRG; PAM sequence: AAG
  source 1..20: mol_type = other DNA
ttggttccgtatgaacttta

SEQ ID NO: 13007 - DNA, 20 bp, synthetic construct
  misc_feature 1..20: note = Description of Artificial Sequence: Synthetic oligonucleotide
  misc_feature 1..20: note = Target: SCN10A; (-) strand; PAM type: NRG; PAM sequence: TGG
  source 1..20: mol_type = other DNA
tggcaatgtgggctcttttt

SEQ ID NO: 13008 - DNA, 20 bp, synthetic construct
  misc_feature 1..20: note = Description of Artificial Sequence: Synthetic oligonucleotide
  misc_feature 1..20: note = Target: SCN10A; (-) strand; PAM type: NRG; PAM sequence: GGG
  source 1..20: mol_type = other DNA
taggattgacttggcaatgt

SEQ ID NO: 13009 - DNA, 20 bp, synthetic construct
  misc_feature 1..20: note = Description of Artificial Sequence: Synthetic oligonucleotide
  misc_feature 1..20: note = Target: SCN10A; (-) strand; PAM type: NRG; PAM sequence: TGG
  source 1..20: mol_type = other DNA
ttaggattgacttggcaatg

SEQ ID NO: 13010 - DNA, 20 bp, synthetic construct
  misc_feature 1..20: note = Description of Artificial Sequence: Synthetic oligonucleotide
  misc_feature 1..20: note = Target: SCN10A; (-) strand; PAM type: NRG; PAM sequence: TGG
  source 1..20: mol_type = other DNA
aaacaggattaggattgact

SEQ ID NO: 13011 - DNA, 20 bp, synthetic construct
  misc_feature 1..20: note = Description of Artificial Sequence: Synthetic oligonucleotide
  misc_feature 1..20: note = Target: SCN10A; (-) strand; PAM type: NRG; PAM sequence: AGG
  source 1..20: mol_type = other DNA
gttaaaaaaaaaacaggatt

SEQ ID NO: 13012 - DNA, 20 bp, synthetic construct
  misc_feature 1..20: note = Description of Artificial Sequence: Synthetic oligonucleotide
  misc_feature 1..20: note = Target: SCN10A; (-) strand; PAM type: NRG; PAM sequence: TAG
  source 1..20: mol_type = other DNA
ggttaaaaaaaaaacaggat

SEQ ID NO: 13013 - DNA, 20 bp, synthetic construct
  misc_feature 1..20: note = Description of Artificial Sequence: Synthetic oligonucleotide
  misc_feature 1..20: note = Target: SCN10A; (-) strand; PAM type: NRG; PAM sequence: AGG
  source 1..20: mol_type = other DNA
agtaaggttaaaaaaaaaac

SEQ ID NO: 13014 - DNA, 20 bp, synthetic construct
  misc_feature 1..20: note = Description of Artificial Sequence: Synthetic oligonucleotide
  misc_feature 1..20: note = Target: SCN10A; (-) strand; PAM type: NRG; PAM sequence: CAG
  source 1..20: mol_type = other DNA
aagtaaggttaaaaaaaaaa

SEQ ID NO: 13015 - DNA, 20 bp, synthetic construct
  misc_feature 1..20: note = Description of Artificial Sequence: Synthetic oligonucleotide
  misc_feature 1..20: note = Target: SCN10A; (-) strand; PAM type: NRG; PAM sequence: AGG
  source 1..20: mol_type = other DNA
attagccaatcaaaaaagta

SEQ ID NO: 13016 - DNA, 20 bp, synthetic construct
  misc_feature 1..20: note = Description of Artificial Sequence: Synthetic oligonucleotide
  misc_feature 1..20: note = Target: SCN10A; (-) strand; PAM type: NRG; PAM sequence: AAG
  source 1..20: mol_type = other DNA
aattagccaatcaaaaaagt

SEQ ID NO: 13017 - DNA, 20 bp, synthetic construct
  misc_feature 1..20: note = Description of Artificial Sequence: Synthetic oligonucleotide
  misc_feature 1..20: note = Target: SCN10A; (-) strand; PAM type: NRG; PAM sequence: AAG
  source 1..20: mol_type = other DNA
aaacaattagccaatcaaaa

SEQ ID NO: 13018 - DNA, 20 bp, synthetic construct
  misc_feature 1..20: note = Description of Artificial Sequence: Synthetic oligonucleotide
  misc_feature 1..20: note = Target: SCN10A; (-) strand; PAM type: NRG; PAM sequence: TAG
  source 1..20: mol_type = other DNA
gaactatgctaagaaacaat

SEQ ID NO: 13019 - DNA, 20 bp, synthetic construct
  misc_feature 1..20: note = Description of Artificial Sequence: Synthetic oligonucleotide
  misc_feature 1..20: note = Target: SCN10A; (-) strand; PAM type: NRG; PAM sequence: AAG
  source 1..20: mol_type = other DNA
ggacaagggggaactatgct

SEQ ID NO: 13020 - DNA, 20 bp, synthetic construct
  misc_feature 1..20: note = Description of Artificial Sequence: Synthetic oligonucleotide
  misc_feature 1..20: note = Target: SCN10A; (-) strand; PAM type: NRG; PAM sequence: GGG
  source 1..20: mol_type = other DNA
atttccaaagtaggacaagg

SEQ ID NO: 13021 - DNA, 20 bp, synthetic construct
  misc_feature 1..20: note = Description of Artificial Sequence: Synthetic oligonucleotide
  misc_feature 1..20: note = Target: SCN10A; (-) strand; PAM type: NRG; PAM sequence: GGG
  source 1..20: mol_type = other DNA
catttccaaagtaggacaag

SEQ ID NO: 13022 - DNA, 20 bp, synthetic construct
  misc_feature 1..20: note = Description of Artificial Sequence: Synthetic oligonucleotide
  misc_feature 1..20: note = Target: SCN10A; (-) strand; PAM type: NRG; PAM sequence: GGG
  source 1..20: mol_type = other DNA
tcatttccaaagtaggacaa

SEQ ID NO: 13023 - DNA, 20 bp, synthetic construct
  misc_feature 1..20: note = Description of Artificial Sequence: Synthetic oligonucleotide
  misc_feature 1..20: note = Target: SCN10A; (-) strand; PAM type: NRG; PAM sequence: AGG
  source 1..20: mol_type = other DNA
atcatttccaaagtaggaca

SEQ ID NO: 13024 - DNA, 20 bp, synthetic construct
  misc_feature 1..20: note = Description of Artificial Sequence: Synthetic oligonucleotide
  misc_feature 1..20: note = Target: SCN10A; (-) strand; PAM type: NRG; PAM sequence: AAG
  source 1..20: mol_type = other DNA
tatcatttccaaagtaggac

SEQ ID NO: 13025 - DNA, 20 bp, synthetic construct
  misc_feature 1..20: note = Description of Artificial Sequence: Synthetic oligonucleotide
  misc_feature 1..20: note = Target: SCN10A; (-) strand; PAM type: NRG; PAM sequence: AGG
  source 1..20: mol_type = other DNA
gagtatatcatttccaaagt

SEQ ID NO: 13026 - DNA, 20 bp, synthetic construct
  misc_feature 1..20: note = Description of Artificial Sequence: Synthetic oligonucleotide
  misc_feature 1..20: note = Target: SCN10A; (-) strand; PAM type: NRG; PAM sequence: TAG
  source 1..20: mol_type = other DNA
agagtatatcatttccaaag

SEQ ID NO: 13027 - DNA, 20 bp, synthetic construct
  misc_feature 1..20: note = Description of Artificial Sequence: Synthetic oligonucleotide
  misc_feature 1..20: note = Target: SCN10A; (-) strand; PAM type: NRG; PAM sequence: AAG
  source 1..20: mol_type = other DNA
aatagagtatatcatttcca

SEQ ID NO: 13028 - DNA, 20 bp, synthetic construct
  misc_feature 1..20: note = Description of Artificial Sequence: Synthetic oligonucleotide
  misc_feature 1..20: note = Target: SCN10A; (-) strand; PAM type: NRG; PAM sequence: GAG
  source 1..20: mol_type = other DNA
ccagtaacaaatcagaaata

SEQ ID NO: 13029 - DNA, 20 bp, synthetic construct
  misc_feature 1..20: note = Description of Artificial Sequence: Synthetic oligonucleotide
  misc_feature 1..20: note = Target: SCN10A; (-) strand; PAM type: NRG; PAM sequence: TAG
  source 1..20: mol_type = other DNA
tgccagtaacaaatcagaaa

SEQ ID NO: 13030 - DNA, 20 bp, synthetic construct
  misc_feature 1..20: note = Description of Artificial Sequence: Synthetic oligonucleotide
  misc_feature 1..20: note = Target: SCN10A; (-) strand; PAM type: NRG; PAM sequence: CAG
  source 1..20: mol_type = other DNA
tagggttgccagtaacaaat

SEQ ID NO: 13031 - DNA, 20 bp, synthetic construct
  misc_feature 1..20: note = Description of Artificial Sequence: Synthetic oligonucleotide
  misc_feature 1..20: note = Target: SCN10A; (-) strand; PAM type: NRG; PAM sequence: CAG
  source 1..20: mol_type = other DNA
gacttaattattagggttgc

SEQ ID NO: 13032 - DNA, 20 bp, synthetic construct
  misc_feature 1..20: note = Description of Artificial Sequence: Synthetic oligonucleotide
  misc_feature 1..20: note = Target: SCN10A; (-) strand; PAM type: NRG; PAM sequence: GGG
  source 1..20: mol_type = other DNA
aatgaatgacttaattatta

SEQ ID NO: 13033 - DNA, 20 bp, synthetic construct
  misc_feature 1..20: note = Description of Artificial Sequence: Synthetic oligonucleotide
  misc_feature 1..20: note = Target: SCN10A; (-) strand; PAM type: NRG; PAM sequence: AGG
  source 1..20: mol_type = other DNA
gaatgaatgacttaattatt

SEQ ID NO: 13034 - DNA, 20 bp, synthetic construct
  misc_feature 1..20: note = Description of Artificial Sequence: Synthetic oligonucleotide
  misc_feature 1..20: note = Target: SCN10A; (-) strand; PAM type: NRG; PAM sequence: TAG
  source 1..20: mol_type = other DNA
agaatgaatgacttaattat

SEQ ID NO: 13035 - DNA, 20 bp, synthetic construct
  misc_feature 1..20: note = Description of Artificial Sequence: Synthetic oligonucleotide
  misc_feature 1..20: note = Target: SCN10A; (-) strand; PAM type: NRG; PAM sequence: AAG
  source 1..20: mol_type = other DNA
atcattagactgtgtaactt

SEQ ID NO: 13036 - DNA, 20 bp, synthetic construct
  misc_feature 1..20: note = Description of Artificial Sequence: Synthetic oligonucleotide
  misc_feature 1..20: note = Target: SCN10A; (-) strand; PAM type: NRG; PAM sequence: TAG
  source 1..20: mol_type = other DNA
gtaaaggtttttattatcat

SEQ ID NO: 13037 - DNA, 20 bp, synthetic construct
  misc_feature 1..20: note = Description of Artificial Sequence: Synthetic oligonucleotide
  misc_feature 1..20: note = Target: SCN10A; (-) strand; PAM type: NRG; PAM sequence: AGG
  source 1..20: mol_type = other DNA
taaaaagtaaaaaaaagtaa

SEQ ID NO: 13038 - DNA, 20 bp, synthetic construct
  misc_feature 1..20: note = Description of Artificial Sequence: Synthetic oligonucleotide
  misc_feature 1..20: note = Target: SCN10A; (-) strand; PAM type: NRG; PAM sequence: AAG
  source 1..20: mol_type = other DNA
ctaaaaagtaaaaaaaagta

SEQ ID NO: 13039 - DNA, 20 bp, synthetic construct
  misc_feature 1..20: note = Description of Artificial Sequence: Synthetic oligonucleotide
  misc_feature 1..20: note = Target: SCN10A; (-) strand; PAM type: NRG; PAM sequence: AAG
  source 1..20: mol_type = other DNA
taatgctaaaaagtaaaaaa

SEQ ID NO: 13040 - DNA, 20 bp, synthetic construct
  misc_feature 1..20: note = Description of Artificial Sequence: Synthetic oligonucleotide
  misc_feature 1..20: note = Target: SCN10A; (-) strand; PAM type: NRG; PAM sequence: AAG
  source 1..20: mol_type = other DNA
gtatttctcctaatgctaaa

SEQ ID NO: 13041 - DNA, 20 bp, synthetic construct
  misc_feature 1..20: note = Description of Artificial Sequence: Synthetic oligonucleotide
  misc_feature 1..20: note = Target: SCN10A; (-) strand; PAM type: NRG; PAM sequence: AGG
  source 1..20: mol_type = other DNA
atcaacccgtcatctacatt

SEQ ID NO: 13042 - DNA, 20 bp, synthetic construct
  misc_feature 1..20: note = Description of Artificial Sequence: Synthetic oligonucleotide
  misc_feature 1..20: note = Target: SCN10A; (-) strand; PAM type: NRG; PAM sequence: TAG
  source 1..20: mol_type = other DNA
catcaacccgtcatctacat

SEQ ID NO: 13043 - DNA, 20 bp, synthetic construct
  misc_feature 1..20: note = Description of Artificial Sequence: Synthetic oligonucleotide
  misc_feature 1..20: note = Target: SCN10A; (-) strand; PAM type: NRG; PAM sequence: TGG
  source 1..20: mol_type = other DNA
taggtatacatgtgccatgt

SEQ ID NO: 13044 - DNA, 20 bp, synthetic construct
  misc_feature 1..20: note = Description of Artificial Sequence: Synthetic oligonucleotide
  misc_feature 1..20: note = Target: SCN10A; (-) strand; PAM type: NRG; PAM sequence: AGG
  source 1..20: mol_type = other DNA
aatgtacatgtttgttatat

SEQ ID NO: 13045 - DNA, 20 bp, synthetic construct
  misc_feature 1..20: note = Description of Artificial Sequence: Synthetic oligonucleotide
  misc_feature 1..20: note = Target: SCN10A; (-) strand; PAM type: NRG; PAM sequence: TAG
  source 1..20: mol_type = other DNA
caatgtacatgtttgttata

SEQ ID NO: 13046 - DNA, 20 bp, synthetic construct
  misc_feature 1..20: note = Description of Artificial Sequence: Synthetic oligonucleotide
  misc_feature 1..20: note = Target: SCN10A; (-) strand; PAM type: NRG; PAM sequence: GGG
  source 1..20: mol_type = other DNA
aaattatactttaaattcta

SEQ ID NO: 13047 - DNA, 20 bp, synthetic construct
  misc_feature 1..20: note = Description of Artificial Sequence: Synthetic oligonucleotide
  misc_feature 1..20: note = Target: SCN10A; (-) strand; PAM type: NRG; PAM sequence: AGG
  source 1..20: mol_type = other DNA
aaaattatactttaaattct

SEQ ID NO: 13048 - DNA, 20 bp, synthetic construct
  misc_feature 1..20: note = Description of Artificial Sequence: Synthetic oligonucleotide
  misc_feature 1..20: note = Target: SCN10A; (-) strand; PAM type: NRG; PAM sequence: TAG
  source 1..20: mol_type = other DNA
taaaattatactttaaattc

SEQ ID NO: 13049 - DNA, 20 bp, synthetic construct
  misc_feature 1..20: note = Description of Artificial Sequence: Synthetic oligonucleotide
  misc_feature 1..20: note = Target: SCN10A; (-) strand; PAM type: NRG; PAM sequence: AAG
  source 1..20: mol_type = other DNA
aggtttacaaataaattaaa

SEQ ID NO: 13050 - DNA, 20 bp, synthetic construct
  misc_feature 1..20: note = Description of Artificial Sequence: Synthetic oligonucleotide
  misc_feature 1..20: note = Target: SCN10A; (-) strand; PAM type: NRG; PAM sequence: AGG
  source 1..20: mol_type = other DNA
tggagctgaacacaggctga

SEQ ID NO: 13051 - DNA, 20 bp, synthetic construct
  misc_feature 1..20: note = Description of Artificial Sequence: Synthetic oligonucleotide
  misc_feature 1..20: note = Target: SCN10A; (-) strand; PAM type: NRG; PAM sequence: AAG
  source 1..20: mol_type = other DNA
ctggagctgaacacaggctg

SEQ ID NO: 13052 - DNA, 20 bp, synthetic construct
  misc_feature 1..20: note = Description of Artificial Sequence: Synthetic oligonucleotide
  misc_feature 1..20: note = Target: SCN10A; (-) strand; PAM type: NRG; PAM sequence: AGG
  source 1..20: mol_type = other DNA
ttcagtctggagctgaacac

SEQ ID NO: 13053 - DNA, 20 bp, synthetic construct
  misc_feature 1..20: note = Description of Artificial Sequence: Synthetic oligonucleotide
  misc_feature 1..20: note = Target: SCN10A; (-) strand; PAM type: NRG; PAM sequence: CAG
  source 1..20: mol_type = other DNA
cttcagtctggagctgaaca

SEQ ID NO: 13054 - DNA, 20 bp, synthetic construct
  misc_feature 1..20: note = Description of Artificial Sequence: Synthetic oligonucleotide
  misc_feature 1..20: note = Target: SCN10A; (-) strand; PAM type: NRG; PAM sequence: GAG
  source 1..20: mol_type = other DNA
taagacagatcttcagtctg

SEQ ID NO: 13055 - DNA, 20 bp, synthetic construct
  misc_feature 1..20: note = Description of Artificial Sequence: Synthetic oligonucleotide
  misc_feature 1..20: note = Target: SCN10A; (-) strand; PAM type: NRG; PAM sequence: TGG
  source 1..20: mol_type = other DNA
gataagacagatcttcagtc

SEQ ID NO: 13056 - DNA, 20 bp, synthetic construct
  misc_feature 1..20: note = Description of Artificial Sequence: Synthetic oligonucleotide
  misc_feature 1..20: note = Target: SCN10A; (-) strand; PAM type: NRG; PAM sequence: CAG
  source 1..20: mol_type = other DNA
tgcaagataagacagatctt

SEQ ID NO: 13057 - DNA, 20 bp, synthetic construct
  misc_feature 1..20: note = Description of Artificial Sequence: Synthetic oligonucleotide
  misc_feature 1..20: note = Target: SCN10A; (-) strand; PAM type: NRG; PAM sequence: CAG
  source 1..20: mol_type = other DNA
gttagggatgcaagataaga

SEQ ID NO: 13058 - DNA, 20 bp, synthetic construct
  misc_feature 1..20: note = Description of Artificial Sequence: Synthetic oligonucleotide
  misc_feature 1..20: note = Target: SCN10A; (-) strand; PAM type: NRG; PAM sequence: AAG
  source 1..20: mol_type = other DNA
aagtgttagggatgcaagat

SEQ ID NO: 13059 - DNA, 20 bp, synthetic construct
  misc_feature 1..20: note = Description of Artificial Sequence: Synthetic oligonucleotide
  misc_feature 1..20: note = Target: SCN10A; (-) strand; PAM type: NRG; PAM sequence: AAG
  source 1..20: mol_type = other DNA
ttcctaagtgttagggatgc

SEQ ID NO: 13060 - DNA, 20 bp, synthetic construct
  misc_feature 1..20: note = Description of Artificial Sequence: Synthetic oligonucleotide
  misc_feature 1..20: note = Target: SCN10A; (-) strand; PAM type: NRG; PAM sequence: GGG
  source 1..20: mol_type = other DNA
agtcactttcctaagtgtta

SEQ ID NO: 13061 - DNA, 20 bp, synthetic construct
  misc_feature 1..20: note = Description of Artificial Sequence: Synthetic oligonucleotide
  misc_feature 1..20: note = Target: SCN10A; (-) strand; PAM type: NRG; PAM sequence: AGG
  source 1..20: mol_type = other DNA
aagtcactttcctaagtgtt

SEQ ID NO: 13062 - DNA, 20 bp, synthetic construct
  misc_feature 1..20: note = Description of Artificial Sequence: Synthetic oligonucleotide
  misc_feature 1..20: note = Target: SCN10A; (-) strand; PAM type: NRG; PAM sequence: TAG
  source 1..20: mol_type = other DNA
gaagtcactttcctaagtgt

SEQ ID NO: 13063 - DNA, 20 bp, synthetic construct
  misc_feature 1..20: note = Description of Artificial Sequence: Synthetic oligonucleotide
  misc_feature 1..20: note = Target: SCN10A; (-) strand; PAM type: NRG; PAM sequence: AAG
  source 1..20: mol_type = other DNA
aaaagtgaagtcactttcct

SEQ ID NO: 13064 - DNA, 20 bp, synthetic construct
  misc_feature 1..20: note = Description of Artificial Sequence: Synthetic oligonucleotide
  misc_feature 1..20: note = Target: SCN10A; (-) strand; PAM type: NRG; PAM sequence: AAG
  source 1..20: mol_type = other DNA
atttgcttaagacaaaagtg

SEQ ID NO: 13065 - DNA, 20 bp, synthetic construct
  misc_feature 1..20: note = Description of Artificial Sequence: Synthetic oligonucleotide
  misc_feature 1..20: note = Target: SCN10A; (-) strand; PAM type: NRG; PAM sequence: AAG
  source 1..20: mol_type = other DNA
ggagcatttgcttaagacaa

SEQ ID NO: 13066 - DNA, 20 bp, synthetic construct
  misc_feature 1..20: note = Description of Artificial Sequence: Synthetic oligonucleotide
  misc_feature 1..20: note = Target: SCN10A; (-) strand; PAM type: NRG; PAM sequence: AAG
  source 1..20: mol_type = other DNA
gtgtgctggagcatttgctt

SEQ ID NO: 13067 - DNA, 20 bp, synthetic construct
  misc_feature 1..20: note = Description of Artificial Sequence: Synthetic oligonucleotide
  misc_feature 1..20: note = Target: SCN10A; (-) strand; PAM type: NRG; PAM sequence: GAG
  source 1..20: mol_type = other DNA
ggcagagccctggtgtgctg

SEQ ID NO: 13068 - DNA, 20 bp, synthetic construct
  misc_feature 1..20: note = Description of Artificial Sequence: Synthetic oligonucleotide
  misc_feature 1..20: note = Target: SCN10A; (-) strand; PAM type: NRG; PAM sequence: TGG
  source 1..20: mol_type = other DNA
tcggcagagccctggtgtgc

SEQ ID NO: 13069 - DNA, 20 bp, synthetic construct
  misc_feature 1..20: note = Description of Artificial Sequence: Synthetic oligonucleotide
  misc_feature 1..20: note = Target: SCN10A; (-) strand; PAM type: NRG; PAM sequence: TGG
  source 1..20: mol_type = other DNA
agtaggtatcggcagagccc

SEQ ID NO: 13070 - DNA, 20 bp, synthetic construct
  misc_feature 1..20: note = Description of Artificial Sequence: Synthetic oligonucleotide
  misc_feature 1..20: note = Target: SCN10A; (-) strand; PAM type: NRG; PAM sequence: GAG
  source 1..20: mol_type = other DNA
cagaatagtaggtatcggca

SEQ ID NO: 13071 - DNA, 20 bp, synthetic construct
  misc_feature 1..20: note = Description of Artificial Sequence: Synthetic oligonucleotide
  misc_feature 1..20: note = Target: SCN10A; (-) strand; PAM type: NRG; PAM sequence: CAG
  source 1..20: mol_type = other DNA
cacagaatagtaggtatcgg

SEQ ID NO: 13072 - DNA, 20 bp, synthetic construct
  misc_feature 1..20: note = Description of Artificial Sequence: Synthetic oligonucleotide
  misc_feature 1..20: note = Target: SCN10A; (-) strand; PAM type: NRG; PAM sequence: CGG
  source 1..20: mol_type = other DNA
taacacagaatagtaggtat

SEQ ID NO: 13073 - DNA, 20 bp, synthetic construct
  misc_feature 1..20: note = Description of Artificial Sequence: Synthetic oligonucleotide
  misc_feature 1..20: note = Target: SCN10A; (-) strand; PAM type: NRG; PAM sequence: AGG
  source 1..20: mol_type = other DNA
tccacttaacacagaatagt

SEQ ID NO: 13074 - DNA, 20 bp, synthetic construct
  misc_feature 1..20: note = Description of Artificial Sequence: Synthetic oligonucleotide
  misc_feature 1..20: note = Target: SCN10A; (-) strand; PAM type: NRG; PAM sequence: TAG
  source 1..20: mol_type = other DNA
atccacttaacacagaatag

SEQ ID NO: 13075 - DNA, 20 bp, synthetic construct
  misc_feature 1..20: note = Description of Artificial Sequence: Synthetic oligonucleotide
  misc_feature 1..20: note = Target: SCN10A; (-) strand; PAM type: NRG; PAM sequence: TAG
  source 1..20: mol_type = other DNA
aacatccacttaacacagaa

SEQ ID NO: 13076 - DNA, 20 bp, synthetic construct
  misc_feature 1..20: note = Description of Artificial Sequence: Synthetic oligonucleotide
  misc_feature 1..20: note = Target: SCN10A; (-) strand; PAM type: NRG; PAM sequence: CAG
  source 1..20: mol_type = other DNA
ttcagaacatccacttaaca

SEQ ID NO: 13077 - DNA, 20 bp, synthetic construct
  misc_feature 1..20: note = Description of Artificial Sequence: Synthetic oligonucleotide
  misc_feature 1..20: note = Target: SCN10A; (-) strand; PAM type: NRG; PAM sequence: CAG
  source 1..20: mol_type = other DNA
cacagatggcaaataacatt

SEQ ID NO: 13078 - DNA, 20 bp, synthetic construct
  misc_feature 1..20: note = Description of Artificial Sequence: Synthetic oligonucleotide
  misc_feature 1..20: note = Target: SCN10A; (-) strand; PAM type: NRG; PAM sequence: TGG
  source 1..20: mol_type = other DNA
gcataacacatagacacaga

SEQ ID NO: 13079 - DNA, 20 bp, synthetic construct
  misc_feature 1..20: note = Description of Artificial Sequence: Synthetic oligonucleotide
  misc_feature 1..20: note = Target: SCN10A; (-) strand; PAM type: NRG; PAM sequence: CAG
  source 1..20: mol_type = other DNA
aactgcataacacatagaca

SEQ ID NO: 13080 - DNA, 20 bp, synthetic construct
  misc_feature 1..20: note = Description of Artificial Sequence: Synthetic oligonucleotide
  misc_feature 1..20: note = Target: SCN10A; (-) strand; PAM type: NRG; PAM sequence: TAG
  source 1..20: mol_type = other DNA
ccattaaactgcataacaca

SEQ ID NO: 13081 - DNA, 20 bp, synthetic construct
  misc_feature 1..20: note = Description of Artificial Sequence: Synthetic oligonucleotide
  misc_feature 1..20: note = Target: SCN10A; (-) strand; PAM type: NRG; PAM sequence: AAG
  source 1..20: mol_type = other DNA
tggaacctgcaagttctcaa

SEQ ID NO: 13082 - DNA, 20 bp, synthetic construct
  misc_feature 1..20: note = Description of Artificial Sequence: Synthetic oligonucleotide
  misc_feature 1..20: note = Target: SCN10A; (-) strand; PAM type: NRG; PAM sequence: AAG
  source 1..20: mol_type = other DNA
tacaaatatctggaacctgc

SEQ ID NO: 13083 - DNA, 20 bp, synthetic construct
  misc_feature 1..20: note = Description of Artificial Sequence: Synthetic oligonucleotide
  misc_feature 1..20: note = Target: SCN10A; (-) strand; PAM type: NRG; PAM sequence: TGG
  source 1..20: mol_type = other DNA
atgctgactgtacaaatatc

SEQ ID NO: 13084 - DNA, 20 bp, synthetic construct
  misc_feature 1..20: note = Description of Artificial Sequence: Synthetic oligonucleotide
  misc_feature 1..20: note = Target: SCN10A; (-) strand; PAM type: NRG; PAM sequence: AGG
  source 1..20: mol_type = other DNA
actgaagggagataagagac

SEQ ID NO: 13085 - DNA, 20 bp, synthetic construct
  misc_feature 1..20: note = Description of Artificial Sequence: Synthetic oligonucleotide
  misc_feature 1..20: note = Target: SCN10A; (-) strand; PAM type: NRG; PAM sequence: CAG
  source 1..20: mol_type = other DNA
cactgaagggagataagaga

SEQ ID NO: 13086 - DNA, 20 bp, synthetic construct
  misc_feature 1..20: note = Description of Artificial Sequence: Synthetic oligonucleotide
  misc_feature 1..20: note = Target: SCN10A; (-) strand; PAM type: NRG; PAM sequence: GAG
  source 1..20: mol_type = other DNA
ttagcactgaagggagataa

SEQ ID NO: 13087 - DNA, 20 bp, synthetic construct
  misc_feature 1..20: note = Description of Artificial Sequence: Synthetic oligonucleotide
  misc_feature 1..20: note = Target: SCN10A; (-) strand; PAM type: NRG; PAM sequence: AAG
  source 1..20: mol_type = other DNA
ccttagcactgaagggagat

SEQ ID NO: 13088 - DNA, 20 bp, synthetic construct
  misc_feature 1..20: note = Description of Artificial Sequence: Synthetic oligonucleotide
  misc_feature 1..20: note = Target: SCN10A; (-) strand; PAM type: NRG; PAM sequence: GAG
  source 1..20: mol_type = other DNA
ggataccttagcactgaagg

SEQ ID NO: 13089 - DNA, 20 bp, synthetic construct
  misc_feature 1..20: note = Description of Artificial Sequence: Synthetic oligonucleotide
  misc_feature 1..20: note = Target: SCN10A; (-) strand; PAM type: NRG; PAM sequence: GGG
  source 1..20: mol_type = other DNA
gaggataccttagcactgaa

SEQ ID NO: 13090 - DNA, 20 bp, synthetic construct
  misc_feature 1..20: note = Description of Artificial Sequence: Synthetic oligonucleotide
  misc_feature 1..20: note = Target: SCN10A; (-) strand; PAM type: NRG; PAM sequence: AGG
  source 1..20: mol_type = other DNA
tgaggataccttagcactga

SEQ ID NO: 13091 - DNA, 20 bp, synthetic construct
  misc_feature 1..20: note = Description of Artificial Sequence: Synthetic oligonucleotide
  misc_feature 1..20: note = Target: SCN10A; (-) strand; PAM type: NRG; PAM sequence: AAG
  source 1..20: mol_type = other DNA
gtgaggataccttagcactg

SEQ ID NO: 13092 - DNA, 20 bp, synthetic construct
  misc_feature 1..20: note = Description of Artificial Sequence: Synthetic oligonucleotide
  misc_feature 1..20: note = Target: SCN10A; (-) strand; PAM type: NRG; PAM sequence: TAG
  source 1..20: mol_type = other DNA
cccagaatgtgaggatacct

SEQ ID NO: 13093 - DNA, 20 bp, synthetic construct
  misc_feature 1..20: note = Description of Artificial Sequence: Synthetic oligonucleotide
  misc_feature 1..20: note = Target: SCN10A; (-) strand; PAM type: NRG; PAM sequence: AGG
  source 1..20: mol_type = other DNA
tctctctggcccagaatgtg

SEQ ID NO: 13094 - DNA, 20 bp, synthetic construct
  misc_feature 1..20: note = Description of Artificial Sequence: Synthetic oligonucleotide
  misc_feature 1..20: note = Target: SCN10A; (-) strand; PAM type: NRG; PAM sequence: GAG
  source 1..20: mol_type = other DNA
atctctctggcccagaatgt

SEQ ID NO: 13095 - DNA, 20 bp, synthetic construct
  misc_feature 1..20: note = Description of Artificial Sequence: Synthetic oligonucleotide
  misc_feature 1..20: note = Target: SCN10A; (-) strand; PAM type: NRG; PAM sequence: CAG
  source 1..20: mol_type = other DNA
aaactagaatctctctggcc

SEQ ID NO: 13096 - DNA, 20 bp, synthetic construct
  misc_feature 1..20: note = Description of Artificial Sequence: Synthetic oligonucleotide
  misc_feature 1..20: note = Target: SCN10A; (-) strand; PAM type: NRG; PAM sequence: TGG
  source 1..20: mol_type = other DNA
aggtaaaactagaatctctc

SEQ ID NO: 13097 - DNA, 20 bp, synthetic construct
  misc_feature 1..20: note = Description of Artificial Sequence: Synthetic oligonucleotide
  misc_feature 1..20: note = Target: SCN10A; (-) strand; PAM type: NRG; PAM sequence: TAG
  source 1..20: mol_type = other DNA
ccacccacaagaggtaaaac

SEQ ID NO: 13098 - DNA, 20 bp, synthetic construct
  misc_feature 1..20: note = Description of Artificial Sequence: Synthetic oligonucleotide
  misc_feature 1..20: note = Target: SCN10A; (-) strand; PAM type: NRG; PAM sequence: AGG
  source 1..20: mol_type = other DNA
ttctcaaccccacccacaag

SEQ ID NO: 13099 - DNA, 20 bp, synthetic construct
  misc_feature 1..20: note = Description of Artificial Sequence: Synthetic oligonucleotide
  misc_feature 1..20: note = Target: SCN10A; (-) strand; PAM type: NRG; PAM sequence: GAG
  source 1..20: mol_type = other DNA
cttctcaaccccacccacaa

SEQ ID NO: 13100 - DNA, 20 bp, synthetic construct
  misc_feature 1..20: note = Description of Artificial Sequence: Synthetic oligonucleotide
  misc_feature 1..20: note = Target: SCN10A; (-) strand; PAM type: NRG; PAM sequence: AAG
  source 1..20: mol_type = other DNA
accttctcaaccccacccac

SEQ ID NO: 13101 - DNA, 20 bp, synthetic construct
  misc_feature 1..20: note = Description of Artificial Sequence: Synthetic oligonucleotide
  misc_feature 1..20: note = Target: SCN10A; (-) strand; PAM type: NRG; PAM sequence: GAG
  source 1..20: mol_type = other DNA
gggagccaacctgagaacca

SEQ ID NO: 13102 - DNA, 20 bp, synthetic construct
  misc_feature 1..20: note = Description of Artificial Sequence: Synthetic oligonucleotide
  misc_feature 1..20: note = Target: SCN10A; (-) strand; PAM type: NRG; PAM sequence: CAG
  source 1..20: mol_type = other DNA
atgggagccaacctgagaac

SEQ ID NO: 13103 - DNA, 20 bp, synthetic construct
  misc_feature 1..20: note = Description of Artificial Sequence: Synthetic oligonucleotide
  misc_feature 1..20: note = Target: SCN10A; (-) strand; PAM type: NRG; PAM sequence: GAG
  source 1..20: mol_type = other DNA
atttccatgggagccaacct

SEQ ID NO: 13104 - DNA, 20 bp, synthetic construct
  misc_feature 1..20: note = Description of Artificial Sequence: Synthetic oligonucleotide
  misc_feature 1..20: note = Target: SCN10A; (-) strand; PAM type: NRG; PAM sequence: GAG
  source 1..20: mol_type = other DNA
tagaaactagatttccatgg

SEQ ID NO: 13105 - DNA, 20 bp, synthetic construct
  misc_feature 1..20: note = Description of Artificial Sequence: Synthetic oligonucleotide
  misc_feature 1..20: note = Target: SCN10A; (-) strand; PAM type: NRG; PAM sequence: GGG
  source 1..20: mol_type = other DNA
ggtagaaactagatttccat

SEQ ID NO: 13106 - DNA, 20 bp, synthetic construct
  misc_feature 1..20: note = Description of Artificial Sequence: Synthetic oligonucleotide
  misc_feature 1..20: note = Target: SCN10A; (-) strand; PAM type: NRG; PAM sequence: TGG
  source 1..20: mol_type = other DNA
aggtagaaactagatttcca

SEQ ID NO: 13107 - DNA, 20 bp, synthetic construct
  misc_feature 1..20: note = Description of Artificial Sequence: Synthetic oligonucleotide
  misc_feature 1..20: note = Target: SCN10A; (-) strand; PAM type: NRG; PAM sequence: TAG
  source 1..20: mol_type = other DNA
tacaattacaaggtagaaac

SEQ ID NO: 13108 - DNA, 20 bp, synthetic construct
  misc_feature 1..20: note = Description of Artificial Sequence: Synthetic oligonucleotide
  misc_feature 1..20: note = Target: SCN10A; (-) strand; PAM type: NRG; PAM sequence: TAG
  source 1..20: mol_type = other DNA
ctggtggtacaattacaagg

SEQ ID NO: 13109 - DNA, 20 bp, synthetic construct
  misc_feature 1..20: note = Description of Artificial Sequence: Synthetic oligonucleotide
  misc_feature 1..20: note = Target: SCN10A; (-) strand; PAM type: NRG; PAM sequence: AGG
  source 1..20: mol_type = other DNA
cacctggtggtacaattaca

SEQ ID NO: 13110 - DNA, 20 bp, synthetic construct
  misc_feature 1..20: note = Description of Artificial Sequence: Synthetic oligonucleotide
  misc_feature 1..20: note = Target: SCN10A; (-) strand; PAM type: NRG; PAM sequence: AAG
  source 1..20: mol_type = other DNA
tcacctggtggtacaattac

SEQ ID NO: 13111 - DNA, 20 bp, synthetic construct
  misc_feature 1..20: note = Description of Artificial Sequence: Synthetic oligonucleotide
  misc_feature 1..20: note = Target: SCN10A; (-) strand; PAM type: NRG; PAM sequence: TGG
  source 1..20: mol_type = other DNA
cagtttccaagttcacctgg

SEQ ID NO: 13112 - DNA, 20 bp, synthetic construct
  misc_feature 1..20: note = Description of Artificial Sequence: Synthetic oligonucleotide
  misc_feature 1..20: note = Target: SCN10A; (-) strand; PAM type: NRG; PAM sequence: TGG
  source 1..20: mol_type = other DNA
agccagtttccaagttcacc

SEQ ID NO: 13113 - DNA, 20 bp, synthetic construct
  misc_feature 1..20: note = Description of Artificial Sequence: Synthetic oligonucleotide
  misc_feature 1..20: note = Target: SCN10A; (-) strand; PAM type: NRG; PAM sequence: AAG
  source 1..20: mol_type = other DNA
tttcactagagccagtttcc

SEQ ID NO: 13114 - DNA, 20 bp, synthetic construct
  misc_feature 1..20: note = Description of Artificial Sequence: Synthetic oligonucleotide
  misc_feature 1..20: note = Target: SCN10A; (-) strand; PAM type: NRG; PAM sequence: CAG
  source 1..20: mol_type = other DNA
tttgaaaatttcactagagc

SEQ ID NO: 13115 - DNA, 20 bp, synthetic construct
  misc_feature 1..20: note = Description of Artificial Sequence: Synthetic oligonucleotide
  misc_feature 1..20: note = Target: SCN10A; (-) strand; PAM type: NRG; PAM sequence: GAG
  source 1..20: mol_type = other DNA
atcttttgaaaatttcacta

SEQ ID NO: 13116 - DNA, 20 bp, synthetic construct
  misc_feature 1..20: note = Description of Artificial Sequence: Synthetic oligonucleotide
  misc_feature 1..20: note = Target: SCN10A; (-) strand; PAM type: NRG; PAM sequence: TAG
  source 1..20: mol_type = other DNA
ttatcttttgaaaatttcac

SEQ ID NO: 13117 - DNA, 20 bp, synthetic construct
  misc_feature 1..20: note = Description of Artificial Sequence: Synthetic oligonucleotide
  misc_feature 1..20: note = Target: SCN10A; (-) strand; PAM type: NRG; PAM sequence: AAG
  source 1..20: mol_type = other DNA
ttggaaatgtatccaaatgc

SEQ ID NO: 13118 - DNA, 20 bp, synthetic construct
  misc_feature 1..20: note = Description of Artificial Sequence: Synthetic oligonucleotide
  misc_feature 1..20: note = Target: SCN10A; (-) strand; PAM type: NRG; PAM sequence: TGG
  source 1..20: mol_type = other DNA
cttgcatgacacggagtttt

SEQ ID NO: 13119 - DNA, 20 bp, synthetic construct
  misc_feature 1..20: note = Description of Artificial Sequence: Synthetic oligonucleotide
  misc_feature 1..20: note = Target: SCN10A; (-) strand; PAM type: NRG; PAM sequence: GAG
  source 1..20: mol_type = other DNA
tacacatcttgcatgacacg

SEQ ID NO: 13120 - DNA, 20 bp, synthetic construct
  misc_feature 1..20: note = Description of Artificial Sequence: Synthetic oligonucleotide
  misc_feature 1..20: note = Target: SCN10A; (-) strand; PAM type: NRG; PAM sequence: CGG
  source 1..20: mol_type = other DNA
tatacacatcttgcatgaca

SEQ ID NO: 13121 - DNA, 20 bp, synthetic construct
  misc_feature 1..20: note = Description of Artificial Sequence: Synthetic oligonucleotide
  misc_feature 1..20: note = Target: SCN10A; (-) strand; PAM type: NRG; PAM sequence: GGG
  source 1..20: mol_type = other DNA
taatgggaaacattggaaaa

SEQ ID NO: 13122 - DNA, 20 bp, synthetic construct
  misc_feature 1..20: note = Description of Artificial Sequence: Synthetic oligonucleotide
  misc_feature 1..20: note = Target: SCN10A; (-) strand; PAM type: NRG; PAM sequence: AGG
  source 1..20: mol_type = other DNA
gtaatgggaaacattggaaa

SEQ ID NO: 13123 - DNA, 20 bp, synthetic construct
  misc_feature 1..20: note = Description of Artificial Sequence: Synthetic oligonucleotide
  misc_feature 1..20: note = Target: SCN10A; (-) strand; PAM type: NRG; PAM sequence: AAG
  source 1..20: mol_type = other DNA
tgtaatgggaaacattggaa

SEQ ID NO: 13124 - DNA, 20 bp, synthetic construct
  misc_feature 1..20: note = Description of Artificial Sequence: Synthetic oligonucleotide
  misc_feature 1..20: note = Target: SCN10A; (-) strand; PAM type: NRG; PAM sequence: TGG
  source 1..20: mol_type = other DNA
taaattgtaatgggaaacat

SEQ ID NO: 13125 - DNA, 20 bp, synthetic construct
  misc_feature 1..20: note = Description of Artificial Sequence: Synthetic oligonucleotide
  misc_feature 1..20: note = Target: SCN10A; (-) strand; PAM type: NRG; PAM sequence: GGG
  source 1..20: mol_type = other DNA
tgcatttcctaaattgtaat

SEQ ID NO: 13126 - DNA, 20 bp, synthetic construct
  misc_feature 1..20: note = Description of Artificial Sequence: Synthetic oligonucleotide
  misc_feature 1..20: note = Target: SCN10A; (-) strand; PAM type: NRG; PAM sequence: TGG
  source 1..20: mol_type = other DNA
atgcatttcctaaattgtaa

SEQ ID NO: 13127 - DNA, 20 bp, synthetic construct
  misc_feature 1..20: note = Description of Artificial Sequence: Synthetic oligonucleotide
  misc_feature 1..20: note = Target: SCN10A; (-) strand; PAM type: NRG; PAM sequence: GGG
  source 1..20: mol_type = other DNA
taatttgttacagcatccca

SEQ ID NO: 13128 - DNA, 20 bp, synthetic construct
  misc_feature 1..20: note = Description of Artificial Sequence: Synthetic oligonucleotide
  misc_feature 1..20: note = Target: SCN10A; (-) strand; PAM type: NRG; PAM sequence: AGG
  source 1..20: mol_type = other DNA
gtaatttgttacagcatccc

SEQ ID NO: 13129 - DNA, 20 bp, synthetic construct
  misc_feature 1..20: note = Description of Artificial Sequence: Synthetic oligonucleotide
  misc_feature 1..20: note = Target: SCN10A; (-) strand; PAM type: NRG; PAM sequence: CAG
  source 1..20: mol_type = other DNA
ggtaatttgttacagcatcc

SEQ ID NO: 13130 - DNA, 20 bp, synthetic construct
  misc_feature 1..20: note = Description of Artificial Sequence: Synthetic oligonucleotide
  misc_feature 1..20: note = Target: SCN10A; (-) strand; PAM type: NRG; PAM sequence: CAG
  source 1..20: mol_type = other DNA
tagtttctggtaatttgtta

SEQ ID NO: 13131 - DNA, 20 bp, synthetic construct
  misc_feature 1..20: note = Description of Artificial Sequence: Synthetic oligonucleotide
  misc_feature 1..20: note = Target: SCN10A; (-) strand; PAM type: NRG; PAM sequence: TGG
  source 1..20: mol_type = other DNA
attgtcatctacctagtttc

SEQ ID NO: 13132 - DNA, 20 bp, synthetic construct
  misc_feature 1..20: note = Description of Artificial Sequence: Synthetic oligonucleotide
  misc_feature 1..20: note = Target: SCN10A; (-) strand; PAM type: NRG; PAM sequence: TAG
  source 1..20: mol_type = other DNA
ttctattattgtcatctacc

SEQ ID NO: 13133 - DNA, 20 bp, synthetic construct
  misc_feature 1..20: note = Description of Artificial Sequence: Synthetic oligonucleotide
  misc_feature 1..20: note = Target: SCN10A; (-) strand; PAM type: NRG; PAM sequence: GAG
  source 1..20: mol_type = other DNA
atctagcctcagaagtgtaa

SEQ ID NO: 13134 - DNA, 20 bp, synthetic construct
  misc_feature 1..20: note = Description of Artificial Sequence: Synthetic oligonucleotide
  misc_feature 1..20: note = Target: SCN10A; (-) strand; PAM type: NRG; PAM sequence: AAG
  source 1..20: mol_type = other DNA
acatctagcctcagaagtgt

SEQ ID NO: 13135 - DNA, 20 bp, synthetic construct
  misc_feature 1..20: note = Description of Artificial Sequence: Synthetic oligonucleotide
  misc_feature 1..20: note = Target: SCN10A; (-) strand; PAM type: NRG; PAM sequence: AAG
  source 1..20: mol_type = other DNA
ttttagacatctagcctcag

SEQ ID NO: 13136 - DNA, 20 bp, synthetic construct
  misc_feature 1..20: note = Description of Artificial Sequence: Synthetic oligonucleotide
  misc_feature 1..20: note = Target: SCN10A; (-) strand; PAM type: NRG; PAM sequence: CAG
  source 1..20: mol_type = other DNA
tgattttagacatctagcct

SEQ ID NO: 13137 - DNA, 20 bp, synthetic construct
  misc_feature 1..20: note = Description of Artificial Sequence: Synthetic oligonucleotide
  misc_feature 1..20: note = Target: SCN10A; (-) strand; PAM type: NRG; PAM sequence: TAG
  source 1..20: mol_type = other DNA
ataccttgattttagacatc

SEQ ID NO: 13138 - DNA, 20 bp, synthetic construct
  misc_feature 1..20: note = Description of Artificial Sequence: Synthetic oligonucleotide
  misc_feature 1..20: note = Target: SCN10A; (-) strand; PAM type: NRG; PAM sequence: TAG
  source 1..20: mol_type = other DNA
ctctgccaataccttgattt

SEQ ID NO: 13139 - DNA, 20 bp, synthetic construct
  misc_feature 1..20: note = Description of Artificial Sequence: Synthetic oligonucleotide
  misc_feature 1..20: note = Target: SCN10A; (-) strand; PAM type: NRG; PAM sequence: TGG
  source 1..20: mol_type = other DNA
tgcgggcttcagagggaaca

SEQ ID NO: 13140 - DNA, 20 bp, synthetic construct
  misc_feature 1..20: note = Description of Artificial Sequence: Synthetic oligonucleotide
  misc_feature 1..20: note = Target: SCN10A; (-) strand; PAM type: NRG; PAM sequence: GGG
  source 1..20: mol_type = other DNA
tctcacctgcgggcttcaga

SEQ ID NO: 13141 - DNA, 20 bp, synthetic construct
  misc_feature 1..20: note = Description of Artificial Sequence: Synthetic oligonucleotide
  misc_feature 1..20: note = Target: SCN10A; (-) strand; PAM type: NRG; PAM sequence: AGG
  source 1..20: mol_type = other DNA
ttctcacctgcgggcttcag

SEQ ID NO: 13142 - DNA, 20 bp, synthetic construct
  misc_feature 1..20: note = Description of Artificial Sequence: Synthetic oligonucleotide
  misc_feature 1..20: note = Target: SCN10A; (-) strand; PAM type: NRG; PAM sequence: GAG
  source 1..20: mol_type = other DNA
gttctcacctgcgggcttca

SEQ ID NO: 13143 - DNA, 20 bp, synthetic construct
  misc_feature 1..20: note = Description of Artificial Sequence: Synthetic oligonucleotide
  misc_feature 1..20: note = Target: SCN10A; (-) strand; PAM type: NRG; PAM sequence: CAG
  source 1..20: mol_type = other DNA
cggttctcacctgcgggctt

SEQ ID NO: 13144 - DNA, 20 bp, synthetic construct
  misc_feature 1..20: note = Description of Artificial Sequence: Synthetic oligonucleotide
  misc_feature 1..20: note = Target: SCN10A; (-) strand; PAM type: NRG; PAM sequence: GGG
  source 1..20: mol_type = other DNA
aggcaacggttctcacctgc

SEQ ID NO: 13145 - DNA, 20 bp, synthetic construct
  misc_feature 1..20: note = Description of Artificial Sequence: Synthetic oligonucleotide
  misc_feature 1..20: note = Target: SCN10A; (-) strand; PAM type: NRG; PAM sequence: CGG
  source 1..20: mol_type = other DNA
aaggcaacggttctcacctg

SEQ ID NO: 13146 - DNA, 20 bp, synthetic construct
  misc_feature 1..20: note = Description of Artificial Sequence: Synthetic oligonucleotide
  misc_feature 1..20: note = Target: SCN10A; (-) strand; PAM type: NRG; PAM sequence: CGG
  source 1..20: mol_type = other DNA
ggaggagacatggaaggcaa

SEQ ID NO: 13147 - DNA, 20 bp, synthetic construct
  misc_feature 1..20: note = Description of Artificial Sequence: Synthetic oligonucleotide
  misc_feature 1..20: note = Target: SCN10A; (-) strand; PAM type: NRG; PAM sequence: AGG
  source 1..20: mol_type = other DNA
aagctaggaggagacatgga

SEQ ID NO: 13148 - DNA, 20 bp, synthetic construct
  misc_feature 1..20: note = Description of Artificial Sequence: Synthetic oligonucleotide
  misc_feature 1..20: note = Target: SCN10A; (-) strand; PAM type: NRG; PAM sequence: AAG
  source 1..20: mol_type = other DNA
gaagctaggaggagacatgg

SEQ ID NO: 13149 - DNA, 20 bp, synthetic construct
  misc_feature 1..20: note = Description of Artificial Sequence: Synthetic oligonucleotide
  misc_feature 1..20: note = Target: SCN10A; (-) strand; PAM type: NRG; PAM sequence: TGG
  source 1..20: mol_type = other DNA
gctgaagctaggaggagaca

SEQ ID NO: 13150 - DNA, 20 bp, synthetic construct
  misc_feature 1..20: note = Description of Artificial Sequence: Synthetic oligonucleotide
  misc_feature 1..20: note = Target: SCN10A; (-) strand; PAM type: NRG; PAM sequence: GAG
  source 1..20: mol_type = other DNA
aagattgctgaagctaggag

SEQ ID NO: 13151 - DNA, 20 bp, synthetic construct
  misc_feature 1..20: note = Description of Artificial Sequence: Synthetic oligonucleotide
  misc_feature 1..20: note = Target: SCN10A; (-) strand; PAM type: NRG; PAM sequence: AGG
  source 1..20: mol_type = other DNA
caaagattgctgaagctagg

SEQ ID NO: 13152 - DNA, 20 bp, synthetic construct
  misc_feature 1..20: note = Description of Artificial Sequence: Synthetic oligonucleotide
  misc_feature 1..20: note = Target: SCN10A; (-) strand; PAM type: NRG; PAM sequence: GAG
  source 1..20: mol_type = other DNA
gcaaagattgctgaagctag

SEQ ID NO: 13153 - DNA, 20 bp, synthetic construct
  misc_feature 1..20: note = Description of Artificial Sequence: Synthetic oligonucleotide
  misc_feature 1..20: note = Target: SCN10A; (-) strand; PAM type: NRG; PAM sequence: AGG
  source 1..20: mol_type = other DNA
tggcaaagattgctgaagct

SEQ ID NO: 13154 - DNA, 20 bp, synthetic construct
  misc_feature 1..20: note = Description of Artificial Sequence: Synthetic oligonucleotide
  misc_feature 1..20: note = Target: SCN10A; (-) strand; PAM type: NRG; PAM sequence: TAG
  source 1..20: mol_type = other DNA
atggcaaagattgctgaagc

SEQ ID NO: 13155 - DNA, 20 bp, synthetic construct
  misc_feature 1..20: note = Description of Artificial Sequence: Synthetic oligonucleotide
  misc_feature 1..20: note = Target: SCN10A; (-) strand; PAM type: NRG; PAM sequence: AAG
  source 1..20: mol_type = other DNA
aggaatggcaaagattgctg

SEQ ID NO: 13156 - DNA, 20 bp, synthetic construct
  misc_feature 1..20: note = Description of Artificial Sequence: Synthetic oligonucleotide
  misc_feature 1..20: note = Target: SCN10A; (-) strand; PAM type: NRG; PAM sequence: AAG
  source 1..20: mol_type = other DNA
gtgcaggccaaggaatggca

SEQ ID NO: 13157 - DNA, 20 bp, synthetic construct
  misc_feature 1..20: note = Description of Artificial Sequence: Synthetic oligonucleotide
  misc_feature 1..20: note = Target: SCN10A; (-) strand; PAM type: NRG; PAM sequence: TGG
  source 1..20: mol_type = other DNA
tacatgtgcaggccaaggaa

SEQ ID NO: 13158 - DNA, 20 bp, synthetic construct
  misc_feature 1..20: note = Description of Artificial Sequence: Synthetic oligonucleotide
  misc_feature 1..20: note = Target: SCN10A; (-) strand; PAM type: NRG; PAM sequence: AGG
  source 1..20: mol_type = other DNA
agagatacatgtgcaggcca

SEQ ID NO: 13159 - DNA, 20 bp, synthetic construct
  misc_feature 1..20: note = Description of Artificial Sequence: Synthetic oligonucleotide
  misc_feature 1..20: note = Target: SCN10A; (-) strand; PAM type: NRG; PAM sequence: AAG
  source 1..20: mol_type = other DNA
gagagatacatgtgcaggcc

SEQ ID NO: 13160 - DNA, 20 bp, synthetic construct
  misc_feature 1..20: note = Description of Artificial Sequence: Synthetic oligonucleotide
  misc_feature 1..20: note = Target: SCN10A; (-) strand; PAM type: NRG; PAM sequence: AGG
  source 1..20: mol_type = other DNA
aatcggagagatacatgtgc

SEQ ID NO: 13161 - DNA, 20 bp, synthetic construct
  misc_feature 1..20: note = Description of Artificial Sequence: Synthetic oligonucleotide
  misc_feature 1..20: note = Target: SCN10A; (-) strand; PAM type: NRG; PAM sequence: CAG
  source 1..20: mol_type = other DNA
aaatcggagagatacatgtg

SEQ ID NO: 13162 - DNA, 20 bp, synthetic construct
  misc_feature 1..20: note = Description of Artificial Sequence: Synthetic oligonucleotide
  misc_feature 1..20: note = Target: SCN10A; (-) strand; PAM type: NRG; PAM sequence: GAG
  source 1..20: mol_type = other DNA
agacacaggaagaaatcgga

SEQ ID NO: 13163 - DNA, 20 bp, synthetic construct
  misc_feature 1..20: note = Description of Artificial Sequence: Synthetic oligonucleotide
  misc_feature 1..20: note = Target: SCN10A; (-) strand; PAM type: NRG; PAM sequence: GAG
  source 1..20: mol_type = other DNA
ggagacacaggaagaaatcg

SEQ ID NO: 13164 - DNA, 20 bp, synthetic construct
  misc_feature 1..20: note = Description of Artificial Sequence: Synthetic oligonucleotide
  misc_feature 1..20: note = Target: SCN10A; (-) strand; PAM type: NRG; PAM sequence: CGG
  source 1..20: mol_type = other DNA
atggagacacaggaagaaat

SEQ ID NO: 13165 - DNA, 20 bp, synthetic construct
  misc_feature 1..20: note = Description of Artificial Sequence: Synthetic oligonucleotide
  misc_feature 1..20: note = Target: SCN10A; (-) strand; PAM type: NRG; PAM sequence: AAG
  source 1..20: mol_type = other DNA
cagctgtatggagacacagg

SEQ ID NO: 13166 - DNA, 20 bp, synthetic construct
  misc_feature 1..20: note = Description of Artificial Sequence: Synthetic oligonucleotide
  misc_feature 1..20: note = Target: SCN10A; (-) strand; PAM type: NRG; PAM sequence: AGG
  source 1..20: mol_type = other DNA
agacagctgtatggagacac

SEQ ID NO: 13167 - DNA, 20 bp, synthetic construct
  misc_feature 1..20: note = Description of Artificial Sequence: Synthetic oligonucleotide
  misc_feature 1..20: note = Target: SCN10A; (-) strand; PAM type: NRG; PAM sequence: CAG
  source 1..20: mol_type = other DNA
aagacagctgtatggagaca

SEQ ID NO: 13168 - DNA, 20 bp, synthetic construct
  misc_feature 1..20: note = Description of Artificial Sequence: Synthetic oligonucleotide
  misc_feature 1..20: note = Target: SCN10A; (-) strand; PAM type: NRG; PAM sequence: GAG
  source 1..20: mol_type = other DNA
aaagaaaagacagctgtatg

SEQ ID NO: 13169 - DNA, 20 bp, synthetic construct
  misc_feature 1..20: note = Description of Artificial Sequence: Synthetic oligonucleotide
  misc_feature 1..20: note = Target: SCN10A; (-) strand; PAM type: NRG; PAM sequence: TGG
  source 1..20: mol_type = other DNA
acaaagaaaagacagctgta

SEQ ID NO: 13170 - DNA, 20 bp, synthetic construct
  misc_feature 1..20: note = Description of Artificial Sequence: Synthetic oligonucleotide
  misc_feature 1..20: note = Target: SCN10A; (-) strand; PAM type: NRG; PAM sequence: CAG
  source 1..20: mol_type = other DNA
aaacacacacaaagaaaaga

SEQ ID NO: 13171 - DNA, 20 bp, synthetic construct
  misc_feature 1..20: note = Description of Artificial Sequence: Synthetic oligonucleotide
  misc_feature 1..20: note = Target: SCN10A; (-) strand; PAM type: NRG; PAM sequence: AAG
  source 1..20: mol_type = other DNA
aaaaaaacacacacaaagaa

SEQ ID NO: 13172 - DNA, 20 bp, synthetic construct
  misc_feature 1..20: note = Description of Artificial Sequence: Synthetic oligonucleotide
  misc_feature 1..20: note = Target: SCN10A; (-) strand; PAM type: NRG; PAM sequence: AAG
  source 1..20: mol_type = other DNA
tgcagaaaaaaacacacaca

SEQ ID NO: 13173 - DNA, 20 bp, synthetic construct
  misc_feature 1..20: note = Description of Artificial Sequence: Synthetic oligonucleotide
  misc_feature 1..20: note = Target: SCN10A; (-) strand; PAM type: NRG; PAM sequence: CAG
  source 1..20: mol_type = other DNA
gagaataccatgggaagatg

SEQ ID NO: 13174 - DNA, 20 bp, synthetic construct
  misc_feature 1..20: note = Description of Artificial Sequence: Synthetic oligonucleotide
  misc_feature 1..20: note = Target: SCN10A; (-) strand; PAM type: NRG; PAM sequence: AAG
  source 1..20: mol_type = other DNA
agagaggagaataccatggg

SEQ ID NO: 13175 - DNA, 20 bp, synthetic construct
  misc_feature 1..20: note = Description of Artificial Sequence: Synthetic oligonucleotide
  misc_feature 1..20: note = Target: SCN10A; (-) strand; PAM type: NRG; PAM sequence: GGG
  source 1..20: mol_type = other DNA
cacagagaggagaataccat

SEQ ID NO: 13176 - DNA, 20 bp, synthetic construct
  misc_feature 1..20: note = Description of Artificial Sequence: Synthetic oligonucleotide
  misc_feature 1..20: note = Target: SCN10A; (-) strand; PAM type: NRG; PAM sequence: TGG
  source 1..20: mol_type = other DNA
acacagagaggagaatacca

SEQ ID NO: 13177 - DNA, 20 bp, synthetic construct
  misc_feature 1..20: note = Description of Artificial Sequence: Synthetic oligonucleotide
  misc_feature 1..20: note = Target: SCN10A; (-) strand; PAM type: NRG; PAM sequence: GAG
  source 1..20: mol_type = other DNA
gaacagagacacacagagag

SEQ ID NO: 13178 - DNA, 20 bp, synthetic construct
  misc_feature 1..20: note = Description of Artificial Sequence: Synthetic oligonucleotide
  misc_feature 1..20: note = Target: SCN10A; (-) strand; PAM type: NRG; PAM sequence: AGG
  source 1..20: mol_type = other DNA
ttgaacagagacacacagag

SEQ ID NO: 13179 - DNA, 20 bp, synthetic construct
  misc_feature 1..20: note = Description of Artificial Sequence: Synthetic oligonucleotide
  misc_feature 1..20: note = Target: SCN10A; (-) strand; PAM type: NRG; PAM sequence: GAG
  source 1..20: mol_type = other DNA
tttgaacagagacacacaga

SEQ ID NO: 13180 - DNA, 20 bp, synthetic construct
  misc_feature 1..20: note = Description of Artificial Sequence: Synthetic oligonucleotide
  misc_feature 1..20: note = Target: SCN10A; (-) strand; PAM type: NRG; PAM sequence: GAG
  source 1..20: mol_type = other DNA
aatttgaacagagacacaca

SEQ ID NO: 13181 - DNA, 20 bp, synthetic construct
  misc_feature 1..20: note = Description of Artificial Sequence: Synthetic oligonucleotide
  misc_feature 1..20: note = Target: SCN10A; (-) strand; PAM type: NRG; PAM sequence: CAG
  source 1..20: mol_type = other DNA
ggaatttgaacagagacaca

SEQ ID NO: 13182 - DNA, 20 bp, synthetic construct
  misc_feature 1..20: note = Description of Artificial Sequence: Synthetic oligonucleotide
  misc_feature 1..20: note = Target: SCN10A; (-) strand; PAM type: NRG; PAM sequence: GAG
  source 1..20: mol_type = other DNA
atatgaggggaatttgaaca

SEQ ID NO: 13183 - DNA, 20 bp, synthetic construct
  misc_feature 1..20: note = Description of Artificial Sequence: Synthetic oligonucleotide
  misc_feature 1..20: note = Target: SCN10A; (-) strand; PAM type: NRG; PAM sequence: CAG
  source 1..20: mol_type = other DNA
aaatatgaggggaatttgaa

SEQ ID NO: 13184 - DNA, 20 bp, synthetic construct
  misc_feature 1..20: note = Description of Artificial Sequence: Synthetic oligonucleotide
  misc_feature 1..20: note = Target: SCN10A; (-) strand; PAM type: NRG; PAM sequence: GGG
  source 1..20: mol_type = other DNA
tggtgttgctaaaatatgag

SEQ ID NO: 13185 - DNA, 20 bp, synthetic construct
  misc_feature 1..20: note = Description of Artificial Sequence: Synthetic oligonucleotide
  misc_feature 1..20: note = Target: SCN10A; (-) strand; PAM type: NRG; PAM sequence: GGG
  source 1..20: mol_type = other DNA
ctggtgttgctaaaatatga

SEQ ID NO: 13186 - DNA, 20 bp, synthetic construct
  misc_feature 1..20: note = Description of Artificial Sequence: Synthetic oligonucleotide
  misc_feature 1..20: note = Target: SCN10A; (-) strand; PAM type: NRG; PAM sequence: AGG
  source 1..20: mol_type = other DNA
actggtgttgctaaaatatg

SEQ ID NO: 13187 - DNA, 20 bp, synthetic construct
  misc_feature 1..20: note = Description of Artificial Sequence: Synthetic oligonucleotide
  misc_feature 1..20: note = Target: SCN10A; (-) strand; PAM type: NRG; PAM sequence: GAG
  source 1..20: mol_type = other DNA
gactggtgttgctaaaatat

SEQ ID NO: 13188 - DNA, 20 bp, synthetic construct
  misc_feature 1..20: note = Description of Artificial Sequence: Synthetic oligonucleotide
  misc_feature 1..20: note = Target: SCN10A; (-) strand; PAM type: NRG; PAM sequence: TGG
  source 1..20: mol_type = other DNA
gtgagccctaatccaatgac

SEQ ID NO: 13189 - DNA, 20 bp, synthetic construct
  misc_feature 1..20: note = Description of Artificial Sequence: Synthetic oligonucleotide
  misc_feature 1..20: note = Target: SCN10A; (-) strand; PAM type: NRG; PAM sequence: GAG
  source 1..20: mol_type = other DNA
aaacaaattcagatgaaggt

SEQ ID NO: 13190 - DNA, 20 bp, synthetic construct
  misc_feature 1..20: note = Description of Artificial Sequence: Synthetic oligonucleotide
  misc_feature 1..20: note = Target: SCN10A; (-) strand; PAM type: NRG; PAM sequence: AGG
  source 1..20: mol_type = other DNA
atgtaaacaaattcagatga

SEQ ID NO: 13191 - DNA, 20 bp, synthetic construct
  misc_feature 1..20: note = Description of Artificial Sequence: Synthetic oligonucleotide
  misc_feature 1..20: note = Target: SCN10A; (-) strand; PAM type: NRG; PAM sequence: AAG
  source 1..20: mol_type = other DNA
gatgtaaacaaattcagatg

SEQ ID NO: 13192 - DNA, 20 bp, synthetic construct
  misc_feature 1..20: note = Description of Artificial Sequence: Synthetic oligonucleotide
  misc_feature 1..20: note = Target: SCN10A; (-) strand; PAM type: NRG; PAM sequence: CAG
  source 1..20: mol_type = other DNA
tttgcagatgtaaacaaatt

SEQ ID NO: 13193 - DNA, 20 bp, synthetic construct
  misc_feature 1..20: note = Description of Artificial Sequence: Synthetic oligonucleotide
  misc_feature 1..20: note = Target: SCN10A; (-) strand; PAM type: NRG; PAM sequence: CAG
  source 1..20: mol_type = other DNA
atttgacattaaggtttttg

SEQ ID NO: 13194 - DNA, 20 bp, synthetic construct
  misc_feature 1..20: note = Description of Artificial Sequence: Synthetic oligonucleotide
  misc_feature 1..20: note = Target: SCN10A; (-) strand; PAM type: NRG; PAM sequence: AGG
  source 1..20: mol_type = other DNA
tgtgaccttatttgacatta

SEQ ID NO: 13195 - DNA, 20 bp, synthetic construct
  misc_feature 1..20: note = Description of Artificial Sequence: Synthetic oligonucleotide
  misc_feature 1..20: note = Target: SCN10A; (-) strand; PAM type: NRG; PAM sequence: AAG
  source 1..20: mol_type = other DNA
ttgtgaccttatttgacatt

SEQ ID NO: 13196 - DNA, 20 bp, synthetic construct
  misc_feature 1..20: note = Description of Artificial Sequence: Synthetic oligonucleotide
  misc_feature 1..20: note = Target: SCN10A; (-) strand; PAM type: NRG; PAM sequence: TAG
  source 1..20: mol_type = other DNA
tatgttgaagttctaaccaa

SEQ ID NO: 13197 - DNA, 20 bp, synthetic construct
  misc_feature 1..20: note = Description of Artificial Sequence: Synthetic oligonucleotide
  misc_feature 1..20: note = Target: SCN10A; (-) strand; PAM type: NRG; PAM sequence: AAG
  source 1..20: mol_type = other DNA
ttccctaaaagggtatgttg

SEQ ID NO: 13198 - DNA, 20 bp, synthetic construct
  misc_feature 1..20: note = Description of Artificial Sequence: Synthetic oligonucleotide
  misc_feature 1..20: note = Target: SCN10A; (-) strand; PAM type: NRG; PAM sequence: GGG
  source 1..20: mol_type = other DNA
ttgaataatgttccctaaaa

SEQ ID NO: 13199 - DNA, 20 bp, synthetic construct
  misc_feature 1..20: note = Description of Artificial Sequence: Synthetic oligonucleotide
  misc_feature 1..20: note = Target: SCN10A; (-) strand; PAM type: NRG; PAM sequence: AGG
  source 1..20: mol_type = other DNA
gttgaataatgttccctaaa

SEQ ID NO: 13200 - DNA, 20 bp, synthetic construct
  misc_feature 1..20: note = Description of Artificial Sequence: Synthetic oligonucleotide
  misc_feature 1..20: note = Target: SCN10A; (-) strand; PAM type: NRG; PAM sequence: AAG
  source 1..20: mol_type = other DNA
ggttgaataatgttccctaa

SEQ ID NO: 13201 - DNA, 20 bp, synthetic construct
  misc_feature 1..20: note = Description of Artificial Sequence: Synthetic oligonucleotide
  misc_feature 1..20: note = Target: SCN10A; (-) strand; PAM type: NRG; PAM sequence: GGG
  source 1..20: mol_type = other DNA
tttatgttgaattatgcttt

SEQ ID NO: 13202 - DNA, 20 bp, synthetic construct
  misc_feature 1..20: note = Description of Artificial Sequence: Synthetic oligonucleotide
  misc_feature 1..20: note = Target: SCN10A; (-) strand; PAM type: NRG; PAM sequence: TGG
  source 1..20: mol_type = other DNA
ctttatgttgaattatgctt

SEQ ID NO: 13203 - DNA, 20 bp, synthetic construct
  misc_feature 1..20: note = Description of Artificial Sequence: Synthetic oligonucleotide
  misc_feature 1..20: note = Target: SCN10A; (-) strand; PAM type: NRG; PAM sequence: AGG
  source 1..20: mol_type = other DNA
gaattatgctccctaaacat

SEQ ID NO: 13204 - DNA, 20 bp, synthetic construct
  misc_feature 1..20: note = Description of Artificial Sequence: Synthetic oligonucleotide
  misc_feature 1..20: note = Target: SCN10A; (-) strand; PAM type: NRG; PAM sequence: TAG
  source 1..20: mol_type = other DNA
tgaattatgctccctaaaca

SEQ ID NO: 13205 - DNA, 20 bp, synthetic construct
  misc_feature 1..20: note = Description of Artificial Sequence: Synthetic oligonucleotide
  misc_feature 1..20: note = Target: SCN10A; (-) strand; PAM type: NRG; PAM sequence: GAG
  source 1..20: mol_type = other DNA
ctcaaaagtatttttacttt

SEQ ID NO: 13206 - DNA, 20 bp, synthetic construct
  misc_feature 1..20: note = Description of Artificial Sequence: Synthetic oligonucleotide
  misc_feature 1..20: note = Target: SCN10A; (-) strand; PAM type: NRG; PAM sequence: AAG
  source 1..20: mol_type = other DNA
gcagatgatactattctcaa

SEQ ID NO: 13207 - DNA, 20 bp, synthetic construct
  misc_feature 1..20: note = Description of Artificial Sequence: Synthetic oligonucleotide
  misc_feature 1..20: note = Target: SCN10A; (-) strand; PAM type: NRG; PAM sequence: CAG
  source 1..20: mol_type = other DNA
tcagactggttctattaaag

SEQ ID NO: 13208 - DNA, 20 bp, synthetic construct
  misc_feature 1..20: note = Description of Artificial Sequence: Synthetic oligonucleotide
  misc_feature 1..20: note = Target: SCN10A; (-) strand; PAM type: NRG; PAM sequence: AAG
  source 1..20: mol_type = other DNA
ccatcagactggttctatta

SEQ ID NO: 13209 - DNA, 20 bp, synthetic construct
  misc_feature 1..20: note = Description of Artificial Sequence: Synthetic oligonucleotide
  misc_feature 1..20: note = Target: SCN10A; (-) strand; PAM type: NRG; PAM sequence: TGG
  source 1..20: mol_type = other DNA
agtgtgccaaaccatcagac

SEQ ID NO: 13210 - DNA, 20 bp, synthetic construct
  misc_feature 1..20: note = Description of Artificial Sequence: Synthetic oligonucleotide
  misc_feature 1..20: note = Target: SCN10A; (-) strand; PAM type: NRG; PAM sequence: CAG
  source 1..20: mol_type = other DNA
aattaagtgtgccaaaccat

SEQ ID NO: 13211 - DNA, 20 bp, synthetic construct
  misc_feature 1..20: note = Description of Artificial Sequence: Synthetic oligonucleotide
  misc_feature 1..20: note = Target: SCN10A; (-) strand; PAM type: NRG; PAM sequence: AAG
  source 1..20: mol_type = other DNA
caatgatatgtgaaagaatt

SEQ ID NO: 13212 - DNA, 20 bp, synthetic construct
  misc_feature 1..20: note = Description of Artificial Sequence: Synthetic oligonucleotide
  misc_feature 1..20: note = Target: SCN10A; (-) strand; PAM type: NRG; PAM sequence: AAG
  source 1..20: mol_type = other DNA
atttttacaatgatatgtga

SEQ ID NO: 13213 - DNA, 20 bp, synthetic construct
  misc_feature 1..20: note = Description of Artificial Sequence: Synthetic oligonucleotide
  misc_feature 1..20: note = Target: SCN10A; (-) strand; PAM type: NRG; PAM sequence: AGG
  source 1..20: mol_type = other DNA
tggacagagagtttgggcac

SEQ ID NO: 13214 - DNA, 20 bp, synthetic construct
  misc_feature 1..20: note = Description of Artificial Sequence: Synthetic oligonucleotide
  misc_feature 1..20: note = Target: SCN10A; (-) strand; PAM type: NRG; PAM sequence: CAG
  source 1..20: mol_type = other DNA
gtggacagagagtttgggca

SEQ ID NO: 13215 - DNA, 20 bp, synthetic construct
  misc_feature 1..20: note = Description of Artificial Sequence: Synthetic oligonucleotide
  misc_feature 1..20: note = Target: SCN10A; (-) strand; PAM type: NRG; PAM sequence: GGG
  source 1..20: mol_type = other DNA
gctaagtggacagagagttt

SEQ ID NO: 13216 - DNA, 20 bp, synthetic construct
  misc_feature 1..20: note = Description of Artificial Sequence: Synthetic oligonucleotide
  misc_feature 1..20: note = Target: SCN10A; (-) strand; PAM type: NRG; PAM sequence: TGG
  source 1..20: mol_type = other DNA
agctaagtggacagagagtt

SEQ ID NO: 13217 - DNA, 20 bp, synthetic construct
  misc_feature 1..20: note = Description of Artificial Sequence: Synthetic oligonucleotide
  misc_feature 1..20: note = Target: SCN10A; (-) strand; PAM type: NRG; PAM sequence: GAG
  source 1..20: mol_type = other DNA
aagacagctaagtggacaga

SEQ ID NO: 13218 - DNA, 20 bp, synthetic construct
  misc_feature 1..20: note = Description of Artificial Sequence: Synthetic oligonucleotide
  misc_feature 1..20: note = Target: SCN10A; (-) strand; PAM type: NRG; PAM sequence: GAG
  source 1..20: mol_type = other DNA
ataagacagctaagtggaca

SEQ ID NO: 13219 - DNA, 20 bp, synthetic construct
  misc_feature 1..20: note = Description of Artificial Sequence: Synthetic oligonucleotide
  misc_feature 1..20: note = Target: SCN10A; (-) strand; PAM type: NRG; PAM sequence: CAG
  source 1..20: mol_type = other DNA
ttataagacagctaagtgga

SEQ ID NO: 13220 - DNA, 20 bp, synthetic construct
  misc_feature 1..20: note = Description of Artificial Sequence: Synthetic oligonucleotide
  misc_feature 1..20: note = Target: SCN10A; (-) strand; PAM type: NRG; PAM sequence: TGG
  source 1..20: mol_type = other DNA
gtgtttataagacagctaag

SEQ ID NO: 13221 - DNA, 20 bp, synthetic construct
  misc_feature 1..20: note = Description of Artificial Sequence: Synthetic oligonucleotide
  misc_feature 1..20: note = Target: SCN10A; (-) strand; PAM type: NRG; PAM sequence: AAG
  source 1..20: mol_type = other DNA
caagtgtttataagacagct

SEQ ID NO: 13222 - DNA, 20 bp, synthetic construct
  misc_feature 1..20: note = Description of Artificial Sequence: Synthetic oligonucleotide
  misc_feature 1..20: note = Target: SCN10A; (-) strand; PAM type: NRG; PAM sequence: CAG
  source 1..20: mol_type = other DNA
tagcccaagtgtttataaga

SEQ ID NO: 13223 - DNA, 20 bp, synthetic construct
  misc_feature 1..20: note = Description of Artificial Sequence: Synthetic oligonucleotide
  misc_feature 1..20: note = Target: SCN10A; (-) strand; PAM type: NRG; PAM sequence: AAG
  source 1..20: mol_type = other DNA
atactagcccaagtgtttat

SEQ ID NO: 13224 - DNA, 20 bp, synthetic construct
  misc_feature 1..20: note = Description of Artificial Sequence: Synthetic oligonucleotide
  misc_feature 1..20: note = Target: SCN10A; (-) strand; PAM type: NRG; PAM sequence: AAG
  source 1..20: mol_type = other DNA
gccatctgagatactagccc

SEQ ID NO: 13225 - DNA, 20 bp, synthetic construct
  misc_feature 1..20: note = Description of Artificial Sequence: Synthetic oligonucleotide
  misc_feature 1..20: note = Target: SCN10A; (-) strand; PAM type: NRG; PAM sequence: TAG
  source 1..20: mol_type = other DNA
gaaaaagccatctgagatac

SEQ ID NO: 13226 - DNA, 20 bp, synthetic construct
  misc_feature 1..20: note = Description of Artificial Sequence: Synthetic oligonucleotide
  misc_feature 1..20: note = Target: SCN10A; (-) strand; PAM type: NRG; PAM sequence: GAG
  source 1..20: mol_type = other DNA
ggatgatgaaaaagccatct

SEQ ID NO: 13227 - DNA, 20 bp, synthetic construct
  misc_feature 1..20: note = Description of Artificial Sequence: Synthetic oligonucleotide
  misc_feature 1..20: note = Target: SCN10A; (-) strand; PAM type: NRG; PAM sequence: AAG
  source 1..20: mol_type = other DNA
atcccatgtggatgatgaaa

SEQ ID NO: 13228 - DNA, 20 bp, synthetic construct
  misc_feature 1..20: note = Description of Artificial Sequence: Synthetic oligonucleotide
  misc_feature 1..20: note = Target: SCN10A; (-) strand; PAM type: NRG; PAM sequence: TGG
  source 1..20: mol_type = other DNA
ttcaacgtctaaatcccatg

SEQ ID NO: 13229 - DNA, 20 bp, synthetic construct
  misc_feature 1..20: note = Description of Artificial Sequence: Synthetic oligonucleotide
  misc_feature 1..20: note = Target: SCN10A; (-) strand; PAM type: NRG; PAM sequence: CAG
  source 1..20: mol_type = other DNA
gagcacagatactgactgtg

SEQ ID NO: 13230 - DNA, 20 bp, synthetic construct
  misc_feature 1..20: note = Description of Artificial Sequence: Synthetic oligonucleotide
  misc_feature 1..20: note = Target: SCN10A; (-) strand; PAM type: NRG; PAM sequence: CAG
  source 1..20: mol_type = other DNA
taccactgaacccgggagca

SEQ ID NO: 13231 - DNA, 20 bp, synthetic construct
  misc_feature 1..20: note = Description of Artificial Sequence: Synthetic oligonucleotide
  misc_feature 1..20: note = Target: SCN10A; (-) strand; PAM type: NRG; PAM sequence: GAG
  source 1..20: mol_type = other DNA
tctcgtaccactgaacccgg

SEQ ID NO: 13232 - DNA, 20 bp, synthetic construct
  misc_feature 1..20: note = Description of Artificial Sequence: Synthetic oligonucleotide
  misc_feature 1..20: note = Target: SCN10A; (-) strand; PAM type: NRG; PAM sequence: GGG
  source 1..20: mol_type = other DNA
tctctcgtaccactgaaccc

SEQ ID NO: 13233 - DNA, 20 bp, synthetic construct
  misc_feature 1..20: note = Description of Artificial Sequence: Synthetic oligonucleotide
  misc_feature 1..20: note = Target: SCN10A; (-) strand; PAM type: NRG; PAM sequence: CGG
  source 1..20: mol_type = other DNA
ctctctcgtaccactgaacc

SEQ ID NO: 13234 - DNA, 20 bp, synthetic construct
  misc_feature 1..20: note = Description of Artificial Sequence: Synthetic oligonucleotide
  misc_feature 1..20: note = Target: SCN10A; (-) strand; PAM type: NRG; PAM sequence: GAG
  source 1..20: mol_type = other DNA
cctgatttattctaaaagat

SEQ ID NO: 13235 - DNA, 20 bp, synthetic construct
  misc_feature 1..20: note = Description of Artificial Sequence: Synthetic oligonucleotide
  misc_feature 1..20: note = Target: SCN10A; (-) strand; PAM type: NRG; PAM sequence: AAG
  source 1..20: mol_type = other DNA
gaatgcctgatttattctaa

SEQ ID NO: 13236 - DNA, 20 bp, synthetic construct
  misc_feature 1..20: note = Description of Artificial Sequence: Synthetic oligonucleotide
  misc_feature 1..20: note = Target: SCN10A; (-) strand; PAM type: NRG; PAM sequence: CAG
  source 1..20: mol_type = other DNA
ggtaccaagccatctcaaat

SEQ ID NO: 13237 - DNA, 20 bp, synthetic construct
  misc_feature 1..20: note = Description of Artificial Sequence: Synthetic oligonucleotide
  misc_feature 1..20: note = Target: SCN10A; (-) strand; PAM type: NRG; PAM sequence: AAG
  source 1..20: mol_type = other DNA
gatgggatagcagaggtacc

SEQ ID NO: 13238 - DNA, 20 bp, synthetic construct
  misc_feature 1..20: note = Description of Artificial Sequence: Synthetic oligonucleotide
  misc_feature 1..20: note = Target: SCN10A; (-) strand; PAM type: NRG; PAM sequence: AGG
  source 1..20: mol_type = other DNA
agatgatgatgggatagcag

SEQ ID NO: 13239 - DNA, 20 bp, synthetic construct
  misc_feature 1..20: note = Description of Artificial Sequence: Synthetic oligonucleotide
  misc_feature 1..20: note = Target: SCN10A; (-) strand; PAM type: NRG; PAM sequence: GAG
  source 1..20: mol_type = other DNA
aagatgatgatgggatagca

SEQ ID NO: 13240 - DNA, 20 bp, synthetic construct
  misc_feature 1..20: note = Description of Artificial Sequence: Synthetic oligonucleotide
  misc_feature 1..20: note = Target: SCN10A; (-) strand; PAM type: NRG; PAM sequence: CAG
  source 1..20: mol_type = other DNA
ataagatgatgatgggatag

SEQ ID NO: 13241 - DNA, 20 bp, synthetic construct
  misc_feature 1..20: note = Description of Artificial Sequence: Synthetic oligonucleotide
  misc_feature 1..20: note = Target: SCN10A; (-) strand; PAM type: NRG; PAM sequence: TAG
  source 1..20: mol_type = other DNA
ttaataagatgatgatggga

SEQ ID NO: 13242 - DNA, 20 bp, synthetic construct
  misc_feature 1..20: note = Description of Artificial Sequence: Synthetic oligonucleotide
  misc_feature 1..20: note = Target: SCN10A; (-) strand; PAM type: NRG; PAM sequence: GGG
  source 1..20: mol_type = other DNA
caggttaataagatgatgat

SEQ ID NO: 13243 - DNA, 20 bp, synthetic construct
  misc_feature 1..20: note = Description of Artificial Sequence: Synthetic oligonucleotide
  misc_feature 1..20: note = Target: SCN10A; (-) strand; PAM type: NRG; PAM sequence: TGG
  source 1..20: mol_type = other DNA
gcaggttaataagatgatga

SEQ ID NO: 13244 - DNA, 20 bp, synthetic construct
  misc_feature 1..20: note = Description of Artificial Sequence: Synthetic oligonucleotide
  misc_feature 1..20: note = Target: SCN10A; (-) strand; PAM type: NRG; PAM sequence: AAG
  source 1..20: mol_type = other DNA
atccacagatgcaggttaat

SEQ ID NO: 13245 - DNA, 20 bp, synthetic construct
  misc_feature 1..20: note = Description of Artificial Sequence: Synthetic oligonucleotide
  misc_feature 1..20: note = Target: SCN10A; (-) strand; PAM type: NRG; PAM sequence: AGG
  source 1..20: mol_type = other DNA
ttggcagcatccacagatgc

SEQ ID NO: 13246 - DNA, 20 bp, synthetic construct
  misc_feature 1..20: note = Description of Artificial Sequence: Synthetic oligonucleotide
  misc_feature 1..20: note = Target: SCN10A; (-) strand; PAM type: NRG; PAM sequence: CAG
  source 1..20: mol_type = other DNA
gttggcagcatccacagatg

SEQ ID NO: 13247 - DNA, 20 bp, synthetic construct
  misc_feature 1..20: note = Description of Artificial Sequence: Synthetic oligonucleotide
  misc_feature 1..20: note = Target: SCN10A; (-) strand; PAM type: NRG; PAM sequence: CAG
  source 1..20: mol_type = other DNA
ctgggagttggcagcatcca

SEQ ID NO: 13248 - DNA, 20 bp, synthetic construct
  misc_feature 1..20: note = Description of Artificial Sequence: Synthetic oligonucleotide
  misc_feature 1..20: note = Target: SCN10A; (-) strand; PAM type: NRG; PAM sequence: CAG
  source 1..20: mol_type = other DNA
agatgcttactgggagttgg

SEQ ID NO: 13249 - DNA, 20 bp, synthetic construct
  misc_feature 1..20: note = Description of Artificial Sequence: Synthetic oligonucleotide
  misc_feature 1..20: note = Target: SCN10A; (-) strand; PAM type: NRG; PAM sequence: TGG
  source 1..20: mol_type = other DNA
tcaagatgcttactgggagt

SEQ ID NO: 13250 - DNA, 20 bp, synthetic construct
  misc_feature 1..20: note = Description of Artificial Sequence: Synthetic oligonucleotide
  misc_feature 1..20: note = Target: SCN10A; (-) strand; PAM type: NRG; PAM sequence: GAG
  source 1..20: mol_type = other DNA
gctctcaagatgcttactgg

SEQ ID NO: 13251 - DNA, 20 bp, synthetic construct
  misc_feature 1..20: note = Description of Artificial Sequence: Synthetic oligonucleotide
  misc_feature 1..20: note = Target: SCN10A; (-) strand; PAM type: NRG; PAM sequence: GGG
  source 1..20: mol_type = other DNA
aggctctcaagatgcttact

SEQ ID NO: 13252 - DNA, 20 bp, synthetic construct
  misc_feature 1..20: note = Description of Artificial Sequence: Synthetic oligonucleotide
  misc_feature 1..20: note = Target: SCN10A; (-) strand; PAM type: NRG; PAM sequence: TGG
  source 1..20: mol_type = other DNA
gaggctctcaagatgcttac

SEQ ID NO: 13253 - DNA, 20 bp, synthetic construct
  misc_feature 1..20: note = Description of Artificial Sequence: Synthetic oligonucleotide
  misc_feature 1..20: note = Target: SCN10A; (-) strand; PAM type: NRG; PAM sequence: AAG
  source 1..20: mol_type = other DNA
aagaagtcaaagaggctctc

SEQ ID NO: 13254 - DNA, 20 bp, synthetic construct
  misc_feature 1..20: note = Description of Artificial Sequence: Synthetic oligonucleotide
  misc_feature 1..20: note = Target: SCN10A; (-) strand; PAM type: NRG; PAM sequence: AGG
  source 1..20: mol_type = other DNA
tagcccataagaagtcaaag

SEQ ID NO: 13255 - DNA, 20 bp, synthetic construct
  misc_feature 1..20: note = Description of Artificial Sequence: Synthetic oligonucleotide
  misc_feature 1..20: note = Target: SCN10A; (-) strand; PAM type: NRG; PAM sequence: GAG
  source 1..20: mol_type = other DNA
ttagcccataagaagtcaaa

SEQ ID NO: 13256 - DNA, 20 bp, synthetic construct
  misc_feature 1..20: note = Description of Artificial Sequence: Synthetic oligonucleotide
  misc_feature 1..20: note = Target: SCN10A; (-) strand; PAM type: NRG; PAM sequence: AAG
  source 1..20: mol_type = other DNA
tattagcccataagaagtca

SEQ ID NO: 13257 - DNA, 20 bp, synthetic construct
  misc_feature 1..20: note = Description of Artificial Sequence: Synthetic oligonucleotide
  misc_feature 1..20: note = Target: SCN10A; (-) strand; PAM type: NRG; PAM sequence: AAG
  source 1..20: mol_type = other DNA
tgtcactattagcccataag

SEQ ID NO: 13258 - DNA, 20 bp, synthetic construct
  misc_feature 1..20: note = Description of Artificial Sequence: Synthetic oligonucleotide
  misc_feature 1..20: note = Target: SCN10A; (-) strand; PAM type: NRG; PAM sequence: AAG
  source 1..20: mol_type = other DNA
ttctgtcactattagcccat

SEQ ID NO: 13259 - DNA, 20 bp, synthetic construct
  misc_feature 1..20: note = Description of Artificial Sequence: Synthetic oligonucleotide
  misc_feature 1..20: note = Target: SCN10A; (-) strand; PAM type: NRG; PAM sequence: TAG
  source 1..20: mol_type = other DNA
tctcccttttctgtcactat

SEQ ID NO: 13260 - DNA, 20 bp, synthetic construct
  misc_feature 1..20: note = Description of Artificial Sequence: Synthetic oligonucleotide
  misc_feature 1..20: note = Target: SCN10A; (-) strand; PAM type: NRG; PAM sequence: AGG
  source 1..20: mol_type = other DNA
tcaagaatacagatttgccg

SEQ ID NO: 13261 - DNA, 20 bp, synthetic construct
  misc_feature 1..20: note = Description of Artificial Sequence: Synthetic oligonucleotide
  misc_feature 1..20: note = Target: SCN10A; (-) strand; PAM type: NRG; PAM sequence: GAG
  source 1..20: mol_type = other DNA
ctcaagaatacagatttgcc

SEQ ID NO: 13262 - DNA, 20 bp, synthetic construct
  misc_feature 1..20: note = Description of Artificial Sequence: Synthetic oligonucleotide
  misc_feature 1..20: note = Target: SCN10A; (-) strand; PAM type: NRG; PAM sequence: CAG
  source 1..20: mol_type = other DNA
tctcacatgcctcaagaata

SEQ ID NO: 13263 - DNA, 20 bp, synthetic construct
  misc_feature 1..20: note = Description of Artificial Sequence: Synthetic oligonucleotide
  misc_feature 1..20: note = Target: SCN10A; (-) strand; PAM type: NRG; PAM sequence: AAG
  source 1..20: mol_type = other DNA
tgatacatctcacatgcctc

SEQ ID NO: 13264 - DNA, 20 bp, synthetic construct
  misc_feature 1..20: note = Description of Artificial Sequence: Synthetic oligonucleotide
  misc_feature 1..20: note = Target: SCN10A; (-) strand; PAM type: NRG; PAM sequence: TGG
  source 1..20: mol_type = other DNA
tgtataattacaaagcacag

SEQ ID NO: 13265 - DNA, 20 bp, synthetic construct
  misc_feature 1..20: note = Description of Artificial Sequence: Synthetic oligonucleotide
  misc_feature 1..20: note = Target: SCN10A; (-) strand; PAM type: NRG; PAM sequence: CAG
  source 1..20: mol_type = other DNA
atttgtataattacaaagca

SEQ ID NO: 13266 - DNA, 20 bp, synthetic construct
  misc_feature 1..20: note = Description of Artificial Sequence: Synthetic oligonucleotide
  misc_feature 1..20: note = Target: SCN10A; (-) strand; PAM type: NRG; PAM sequence: AAG
  source 1..20: mol_type = other DNA
tttccatttgtataattaca

SEQ ID NO: 13267 - DNA, 20 bp, synthetic construct
  misc_feature 1..20: note = Description of Artificial Sequence: Synthetic oligonucleotide
  misc_feature 1..20: note = Target: SCN10A; (-) strand; PAM type: NRG; PAM sequence: AAG
  source 1..20: mol_type = other DNA
tatatatttgatcatttcat

SEQ ID NO: 13268 - DNA, 20 bp, synthetic construct
  misc_feature 1..20: note = Description of Artificial Sequence: Synthetic oligonucleotide
  misc_feature 1..20: note = Target: SCN10A; (-) strand; PAM type: NRG; PAM sequence: TAG
  source 1..20: mol_type = other DNA
atcacaaagattcaaatata

SEQ ID NO: 13269 - DNA, 20 bp, synthetic construct
  misc_feature 1..20: note = Description of Artificial Sequence: Synthetic oligonucleotide
  misc_feature 1..20: note = Target: SCN10A; (-) strand; PAM type: NRG; PAM sequence: AAG
  source 1..20: mol_type = other DNA
cattcccagccacaatcaca

SEQ ID NO: 13270 - DNA, 20 bp, synthetic construct
  misc_feature 1..20: note = Description of Artificial Sequence: Synthetic oligonucleotide
  misc_feature 1..20: note = Target: SCN10A; (-) strand; PAM type: NRG; PAM sequence: CAG
  source 1..20: mol_type = other DNA
attaactcttggcccattcc

SEQ ID NO: 13271 - DNA, 20 bp, synthetic construct
  misc_feature 1..20: note = Description of Artificial Sequence: Synthetic oligonucleotide
  misc_feature 1..20: note = Target: SCN10A; (-) strand; PAM type: NRG; PAM sequence: TGG
  source 1..20: mol_type = other DNA
catgatcttccattaactct

SEQ ID NO: 13272 - DNA, 20 bp, synthetic construct
  misc_feature 1..20: note = Description of Artificial Sequence: Synthetic oligonucleotide
  misc_feature 1..20: note = Target: SCN10A; (-) strand; PAM type: NRG; PAM sequence: CAG
  source 1..20: mol_type = other DNA
ggacatagggattgtaatga

SEQ ID NO: 13273 - DNA, 20 bp, synthetic construct
  misc_feature 1..20: note = Description of Artificial Sequence: Synthetic oligonucleotide
  misc_feature 1..20: note = Target: SCN10A; (-) strand; PAM type: NRG; PAM sequence: GGG
  source 1..20: mol_type = other DNA
ctataacaacataggacata

SEQ ID NO: 13274 - DNA, 20 bp, synthetic construct
  misc_feature 1..20: note = Description of Artificial Sequence: Synthetic oligonucleotide
  misc_feature 1..20: note = Target: SCN10A; (-) strand; PAM type: NRG; PAM sequence: AGG
  source 1..20: mol_type = other DNA
cctataacaacataggacat

SEQ ID NO: 13275 - DNA, 20 bp, synthetic construct
  misc_feature 1..20: note = Description of Artificial Sequence: Synthetic oligonucleotide
  misc_feature 1..20: note = Target: SCN10A; (-) strand; PAM type: NRG; PAM sequence: TAG
  source 1..20: mol_type = other DNA
ccctataacaacataggaca

SEQ ID NO: 13276 - DNA, 20 bp, synthetic construct
  misc_feature 1..20: note = Description of Artificial Sequence: Synthetic oligonucleotide
  misc_feature 1..20: note = Target: SCN10A; (-) strand; PAM type: NRG; PAM sequence: AGG
  source 1..20: mol_type = other DNA
aagactccctataacaacat

SEQ ID NO: 13277 - DNA, 20 bp, synthetic construct
  misc_feature 1..20: note = Description of Artificial Sequence: Synthetic oligonucleotide
  misc_feature 1..20: note = Target: SCN10A; (-) strand; PAM type: NRG; PAM sequence: TAG
  source 1..20: mol_type = other DNA
aaagactccctataacaaca

SEQ ID NO: 13278 - DNA, 20 bp, synthetic construct
  misc_feature 1..20: note = Description of Artificial Sequence: Synthetic oligonucleotide
  misc_feature 1..20: note = Target: SCN10A; (-) strand; PAM type: NRG; PAM sequence: AAG
  source 1..20: mol_type = other DNA
ttttgagatgaagaaaagca

SEQ ID NO: 13279 - DNA, 20 bp, synthetic construct
  misc_feature 1..20: note = Description of Artificial Sequence: Synthetic oligonucleotide
  misc_feature 1..20: note = Target: SCN10A; (-) strand; PAM type: NRG; PAM sequence: AAG
  source 1..20: mol_type = other DNA
gcagattttgagatgaagaa

SEQ ID NO: 13280 - DNA, 20 bp, synthetic construct
  misc_feature 1..20: note = Description of Artificial Sequence: Synthetic oligonucleotide
  misc_feature 1..20: note = Target: SCN10A; (-) strand; PAM type: NRG; PAM sequence: AAG
  source 1..20: mol_type = other DNA
atgttgcagattttgagatg

SEQ ID NO: 13281 - DNA, 20 bp, synthetic construct
  misc_feature 1..20: note = Description of Artificial Sequence: Synthetic oligonucleotide
  misc_feature 1..20: note = Target: SCN10A; (-) strand; PAM type: NRG; PAM sequence: GAG
  source 1..20: mol_type = other DNA
aaaggcatgttgcagatttt

SEQ ID NO: 13282 - DNA, 20 bp, synthetic construct
  misc_feature 1..20: note = Description of Artificial Sequence: Synthetic oligonucleotide
  misc_feature 1..20: note = Target: SCN10A; (-) strand; PAM type: NRG; PAM sequence: CAG
  source 1..20: mol_type = other DNA
tttaggccaaaggcatgttg

SEQ ID NO: 13283 - DNA, 20 bp, synthetic construct
  misc_feature 1..20: note = Description of Artificial Sequence: Synthetic oligonucleotide
  misc_feature 1..20: note = Target: SCN10A; (-) strand; PAM type: NRG; PAM sequence: AGG
  source 1..20: mol_type = other DNA
gaggagtttatttaggccaa

SEQ ID NO: 13284 - DNA, 20 bp, synthetic construct
  misc_feature 1..20: note = Description of Artificial Sequence: Synthetic oligonucleotide
  misc_feature 1..20: note = Target: SCN10A; (-) strand; PAM type: NRG; PAM sequence: AAG
  source 1..20: mol_type = other DNA
agaggagtttatttaggcca

SEQ ID NO: 13285 - DNA, 20 bp, synthetic construct
  misc_feature 1..20: note = Description of Artificial Sequence: Synthetic oligonucleotide
  misc_feature 1..20: note = Target: SCN10A; (-) strand; PAM type: NRG; PAM sequence: AGG
  source 1..20: mol_type = other DNA
attgtcagaggagtttattt

SEQ ID NO: 13286 - DNA, 20 bp, synthetic construct
  misc_feature 1..20: note = Description of Artificial Sequence: Synthetic oligonucleotide
  misc_feature 1..20: note = Target: SCN10A; (-) strand; PAM type: NRG; PAM sequence: TAG
  source 1..20: mol_type = other DNA
aattgtcagaggagtttatt

SEQ ID NO: 13287 - DNA, 20 bp, synthetic construct
  misc_feature 1..20: note = Description of Artificial Sequence: Synthetic oligonucleotide
  misc_feature 1..20: note = Target: SCN10A; (-) strand; PAM type: NRG; PAM sequence: GAG
  source 1..20: mol_type = other DNA
tggagtaagaattgtcagag

SEQ ID NO: 13288 - DNA, 20 bp, synthetic construct
  misc_feature 1..20: note = Description of Artificial Sequence: Synthetic oligonucleotide
  misc_feature 1..20: note = Target: SCN10A; (-) strand; PAM type: NRG; PAM sequence: AGG
  source 1..20: mol_type = other DNA
aatggagtaagaattgtcag

SEQ ID NO: 13289 - DNA, 20 bp, synthetic construct
  misc_feature 1..20: note = Description of Artificial Sequence: Synthetic oligonucleotide
  misc_feature 1..20: note = Target: SCN10A; (-) strand; PAM type: NRG; PAM sequence: GAG
  source 1..20: mol_type = other DNA
gaatggagtaagaattgtca

SEQ ID NO: 13290 - DNA, 20 bp, synthetic construct
  misc_feature 1..20: note = Description of Artificial Sequence: Synthetic oligonucleotide
  misc_feature 1..20: note = Target: SCN10A; (-) strand; PAM type: NRG; PAM sequence: CAG
  source 1..20: mol_type = other DNA
ctgaatggagtaagaattgt

SEQ ID NO: 13291 - DNA, 20 bp, synthetic construct
  misc_feature 1..20: note = Description of Artificial Sequence: Synthetic oligonucleotide
  misc_feature 1..20: note = Target: SCN10A; (-) strand; PAM type: NRG; PAM sequence: AAG
  source 1..20: mol_type = other DNA
ttgtatgaactgaatggagt

SEQ ID NO: 13292 - DNA, 20 bp, synthetic construct
  misc_feature 1..20: note = Description of Artificial Sequence: Synthetic oligonucleotide
  misc_feature 1..20: note = Target: SCN10A; (-) strand; PAM type: NRG; PAM sequence: GAG
  source 1..20: mol_type = other DNA
ttaattgtatgaactgaatg

SEQ ID NO: 13293 - DNA, 20 bp, synthetic construct
  misc_feature 1..20: note = Description of Artificial Sequence: Synthetic oligonucleotide
  misc_feature 1..20: note = Target: SCN10A; (-) strand; PAM type: NRG; PAM sequence: TGG
  source 1..20: mol_type = other DNA
gattaattgtatgaactgaa

SEQ ID NO: 13294 - DNA, 20 bp, synthetic construct
  misc_feature 1..20: note = Description of Artificial Sequence: Synthetic oligonucleotide
  misc_feature 1..20: note = Target: SCN10A; (-) strand; PAM type: NRG; PAM sequence: AAG
  source 1..20: mol_type = other DNA
aataggaattaagcccccaa

SEQ ID NO: 13295 - DNA, 20 bp, synthetic construct
  misc_feature 1..20: note = Description of Artificial Sequence: Synthetic oligonucleotide
  misc_feature 1..20: note = Target: SCN10A; (-) strand; PAM type: NRG; PAM sequence: AAG
  source 1..20: mol_type = other DNA
caagagataaaataggaatt

SEQ ID NO: 13296 - DNA, 20 bp, synthetic construct
  misc_feature 1..20: note = Description of Artificial Sequence: Synthetic oligonucleotide
  misc_feature 1..20: note = Target: SCN10A; (-) strand; PAM type: NRG; PAM sequence: AGG
  source 1..20: mol_type = other DNA
ccaagaacaagagataaaat

SEQ ID NO: 13297 - DNA, 20 bp, synthetic construct
  misc_feature 1..20: note = Description of Artificial Sequence: Synthetic oligonucleotide
  misc_feature 1..20: note = Target: SCN10A; (-) strand; PAM type: NRG; PAM sequence: TAG
  source 1..20: mol_type = other DNA
tccaagaacaagagataaaa

SEQ ID NO: 13298 - DNA, 20 bp, synthetic construct
  misc_feature 1..20: note = Description of Artificial Sequence: Synthetic oligonucleotide
  misc_feature 1..20: note = Target: SCN10A; (-) strand; PAM type: NRG; PAM sequence: GAG
  source 1..20: mol_type = other DNA
gggcactgctccaagaacaa

SEQ ID NO: 13299 - DNA, 20 bp, synthetic construct
  misc_feature 1..20: note = Description of Artificial Sequence: Synthetic oligonucleotide
  misc_feature 1..20: note = Target: SCN10A; (-) strand; PAM type: NRG; PAM sequence: AAG
  source 1..20: mol_type = other DNA
atgggcactgctccaagaac

SEQ ID NO: 13300 - DNA, 20 bp, synthetic construct
  misc_feature 1..20: note = Description of Artificial Sequence: Synthetic oligonucleotide
  misc_feature 1..20: note = Target: SCN10A; (-) strand; PAM type: NRG; PAM sequence: AAG
  source 1..20: mol_type = other DNA
tatatgatgggcactgctcc

SEQ ID NO: 13301 - DNA, 20 bp, synthetic construct
  misc_feature 1..20: note = Description of Artificial Sequence: Synthetic oligonucleotide
  misc_feature 1..20: note = Target: SCN10A; (-) strand; PAM type: NRG; PAM sequence: GGG
  source 1..20: mol_type = other DNA
ttaattacgtactatatgat

SEQ ID NO: 13302 - DNA, 20 bp, synthetic construct
  misc_feature 1..20: note = Description of Artificial Sequence: Synthetic oligonucleotide
  misc_feature 1..20: note = Target: SCN10A; (-) strand; PAM type: NRG; PAM sequence: TGG
  source 1..20: mol_type = other DNA
attaattacgtactatatga

SEQ ID NO: 13303 - DNA, 20 bp, synthetic construct
  misc_feature 1..20: note = Description of Artificial Sequence: Synthetic oligonucleotide
  misc_feature 1..20: note = Target: SCN10A; (-) strand; PAM type: NRG; PAM sequence: TAG
  source 1..20: mol_type = other DNA
tagataaaaggtatggccag

SEQ ID NO: 13304 - DNA, 20 bp, synthetic construct
  misc_feature 1..20: note = Description of Artificial Sequence: Synthetic oligonucleotide
  misc_feature 1..20: note = Target: SCN10A; (-) strand; PAM type: NRG; PAM sequence: CAG
  source 1..20: mol_type = other DNA
cagtagataaaaggtatggc

SEQ ID NO: 13305 - DNA, 20 bp, synthetic construct
  misc_feature 1..20: note = Description of Artificial Sequence: Synthetic oligonucleotide
  misc_feature 1..20: note = Target: SCN10A; (-) strand; PAM type: NRG; PAM sequence: TGG
  source 1..20: mol_type = other DNA
gatccagtagataaaaggta

SEQ ID NO: 13306 - DNA, 20 bp, synthetic construct
  misc_feature 1..20: note = Description of Artificial Sequence: Synthetic oligonucleotide
  misc_feature 1..20: note = Target: SCN10A; (-) strand; PAM type: NRG; PAM sequence: AGG
  source 1..20: mol_type = other DNA
atgatgatccagtagataaa

SEQ ID NO: 13307 - DNA, 20 bp, synthetic construct
  misc_feature 1..20: note = Description of Artificial Sequence: Synthetic oligonucleotide
  misc_feature 1..20: note = Target: SCN10A; (-) strand; PAM type: NRG; PAM sequence: AAG
  source 1..20: mol_type = other DNA
aatgatgatccagtagataa

SEQ ID NO: 13308 - DNA, 20 bp, synthetic construct
  misc_feature 1..20: note = Description of Artificial Sequence: Synthetic oligonucleotide
  misc_feature 1..20: note = Target: SCN10A; (-) strand; PAM type: NRG; PAM sequence: TAG
  source 1..20: mol_type = other DNA
tcatgagaatgatgatccag

SEQ ID NO: 13309 - DNA, 20 bp, synthetic construct
  misc_feature 1..20: note = Description of Artificial Sequence: Synthetic oligonucleotide
  misc_feature 1..20: note = Target: SCN10A; (-) strand; PAM type: NRG; PAM sequence: CAG
  source 1..20: mol_type = other DNA
taatcatgagaatgatgatc

SEQ ID NO: 13310 - DNA, 20 bp, synthetic construct
  misc_feature 1..20: note = Description of Artificial Sequence: Synthetic oligonucleotide
  misc_feature 1..20: note = Target: SCN10A; (-) strand; PAM type: NRG; PAM sequence: GAG
  source 1..20: mol_type = other DNA
agaagaaaaagtataatcat

SEQ ID NO: 13311 - DNA, 20 bp, synthetic construct
  misc_feature 1..20: note = Description of Artificial Sequence: Synthetic oligonucleotide
  misc_feature 1..20: note = Target: SCN10A; (-) strand; PAM type: NRG; PAM sequence: AAG
  source 1..20: mol_type = other DNA
gttaatataatcagaagaaa

SEQ ID NO: 13312 - DNA, 20 bp, synthetic construct
  misc_feature 1..20: note = Description of Artificial Sequence: Synthetic oligonucleotide
  misc_feature 1..20: note = Target: SCN10A; (-) strand; PAM type: NRG; PAM sequence: AAG
  source 1..20: mol_type = other DNA
tccatagttaatataatcag

SEQ ID NO: 13313 - DNA, 20 bp, synthetic construct
  misc_feature 1..20: note = Description of Artificial Sequence: Synthetic oligonucleotide
  misc_feature 1..20: note = Target: SCN10A; (-) strand; PAM type: NRG; PAM sequence: CAG
  source 1..20: mol_type = other DNA
aactccatagttaatataat

SEQ ID NO: 13314 - DNA, 20 bp, synthetic construct
  misc_feature 1..20: note = Description of Artificial Sequence: Synthetic oligonucleotide
  misc_feature 1..20: note = Target: SCN10A; (-) strand; PAM type: NRG; PAM sequence: TAG
  source 1..20: mol_type = other DNA
acctggcgtccagaactcca

SEQ ID NO: 13315 - DNA, 20 bp, synthetic construct
  misc_feature 1..20: note = Description of Artificial Sequence: Synthetic oligonucleotide
  misc_feature 1..20: note = Target: SCN10A; (-) strand; PAM type: NRG; PAM sequence: CAG
  source 1..20: mol_type = other DNA
tttttacattacctggcgtc

SEQ ID NO: 13316 - DNA, 20 bp, synthetic construct
  misc_feature 1..20: note = Description of Artificial Sequence: Synthetic oligonucleotide
  misc_feature 1..20: note = Target: SCN10A; (-) strand; PAM type: NRG; PAM sequence: TGG
  source 1..20: mol_type = other DNA
aggagagtttttacattacc

SEQ ID NO: 13317 - DNA, 20 bp, synthetic construct
  misc_feature 1..20: note = Description of Artificial Sequence: Synthetic oligonucleotide
  misc_feature 1..20: note = Target: SCN10A; (-) strand; PAM type: NRG; PAM sequence: GAG
  source 1..20: mol_type = other DNA
taatcagacattaaggagga

SEQ ID NO: 13318 - DNA, 20 bp, synthetic construct
  misc_feature 1..20: note = Description of Artificial Sequence: Synthetic oligonucleotide
  misc_feature 1..20: note = Target: SCN10A; (-) strand; PAM type: NRG; PAM sequence: GAG
  source 1..20: mol_type = other DNA
cataatcagacattaaggag

SEQ ID NO: 13319 - DNA, 20 bp, synthetic construct
  misc_feature 1..20: note = Description of Artificial Sequence: Synthetic oligonucleotide
  misc_feature 1..20: note = Target: SCN10A; (-) strand; PAM type: NRG; PAM sequence: AGG
  source 1..20: mol_type = other DNA
ctcataatcagacattaagg

SEQ ID NO: 13320 - DNA, 20 bp, synthetic construct
  misc_feature 1..20: note = Description of Artificial Sequence: Synthetic oligonucleotide
  misc_feature 1..20: note = Target: SCN10A; (-) strand; PAM type: NRG; PAM sequence: GAG
  source 1..20: mol_type = other DNA
tctcataatcagacattaag

SEQ ID NO: 13321 - DNA, 20 bp, synthetic construct
  misc_feature 1..20: note = Description of Artificial Sequence: Synthetic oligonucleotide
  misc_feature 1..20: note = Target: SCN10A; (-) strand; PAM type: NRG; PAM sequence: AGG
  source 1..20: mol_type = other DNA
catctcataatcagacatta

SEQ ID NO: 13322 - DNA, 20 bp, synthetic construct
  misc_feature 1..20: note = Description of Artificial Sequence: Synthetic oligonucleotide
  misc_feature 1..20: note = Target: SCN10A; (-) strand; PAM type: NRG; PAM sequence: AAG
  source 1..20: mol_type = other DNA
acatctcataatcagacatt

SEQ ID NO: 13323 - DNA, 20 bp, synthetic construct
  misc_feature 1..20: note = Description of Artificial Sequence: Synthetic oligonucleotide
  misc_feature 1..20: note = Target: SCN10A; (-) strand; PAM type: NRG; PAM sequence: CAG
  source 1..20: mol_type = other DNA
gtctgttcacatctcataat

SEQ ID NO: 13324 - DNA, 20 bp, synthetic construct
  misc_feature 1..20: note = Description of Artificial Sequence: Synthetic oligonucleotide
  misc_feature 1..20: note = Target: SCN10A; (-) strand; PAM type: NRG; PAM sequence: GAG
  source 1..20: mol_type = other DNA
cagcttttgaatacattcca

SEQ ID NO: 13325 - DNA, 20 bp, synthetic construct
  misc_feature 1..20: note = Description of Artificial Sequence: Synthetic oligonucleotide
  misc_feature 1..20: note = Target: SCN10A; (-) strand; PAM type: NRG; PAM sequence: CAG
  source 1..20: mol_type = other DNA
ggcagcttttgaatacattc

SEQ ID NO: 13326 - DNA, 20 bp, synthetic construct
  misc_feature 1..20: note = Description of Artificial Sequence: Synthetic oligonucleotide
  misc_feature 1..20: note = Target: SCN10A; (-) strand; PAM type: NRG; PAM sequence: CAG
  source 1..20: mol_type = other DNA
ctgttgtgtagctaaagagg

SEQ ID NO: 13327 - DNA, 20 bp, synthetic construct
  misc_feature 1..20: note = Description of Artificial Sequence: Synthetic oligonucleotide
  misc_feature 1..20: note = Target: SCN10A; (-) strand; PAM type: NRG; PAM sequence: AGG
  source 1..20: mol_type = other DNA
tttctgttgtgtagctaaag

SEQ ID NO: 13328 - DNA, 20 bp, synthetic construct
  misc_feature 1..20: note = Description of Artificial Sequence: Synthetic oligonucleotide
  misc_feature 1..20: note = Target: SCN10A; (-) strand; PAM type: NRG; PAM sequence: GAG
  source 1..20: mol_type = other DNA
ctttctgttgtgtagctaaa

SEQ ID NO: 13329 - DNA, 20 bp, synthetic construct
  misc_feature 1..20: note = Description of Artificial Sequence: Synthetic oligonucleotide
  misc_feature 1..20: note = Target: SCN10A; (-) strand; PAM type: NRG; PAM sequence: AAG
  source 1..20: mol_type = other DNA
acctttctgttgtgtagcta

SEQ ID NO: 13330 - DNA, 20 bp, synthetic construct
  misc_feature 1..20: note = Description of Artificial Sequence: Synthetic oligonucleotide
  misc_feature 1..20: note = Target: SCN10A; (-) strand; PAM type: NRG; PAM sequence: TAG
  source 1..20: mol_type = other DNA
ggctggacctttctgttgtg

SEQ ID NO: 13331 - DNA, 20 bp, synthetic construct
  misc_feature 1..20: note = Description of Artificial Sequence: Synthetic oligonucleotide
  misc_feature 1..20: note = Target: SCN10A; (-) strand; PAM type: NRG; PAM sequence: TGG
  source 1..20: mol_type = other DNA
ttttctgaggctgaaatggc

SEQ ID NO: 13332 - DNA, 20 bp, synthetic construct
  misc_feature 1..20: note = Description of Artificial Sequence: Synthetic oligonucleotide
  misc_feature 1..20: note = Target: SCN10A; (-) strand; PAM type: NRG; PAM sequence: TGG
  source 1..20: mol_type = other DNA
actcttttctgaggctgaaa

SEQ ID NO: 13333 - DNA, 20 bp, synthetic construct
  misc_feature 1..20: note = Description of Artificial Sequence: Synthetic oligonucleotide
  misc_feature 1..20: note = Target: SCN10A; (-) strand; PAM type: NRG; PAM sequence: AGG
  source 1..20: mol_type = other DNA
gggaaaagcactcttttctg

SEQ ID NO: 13334 - DNA, 20 bp, synthetic construct
  misc_feature 1..20: note = Description of Artificial Sequence: Synthetic oligonucleotide
  misc_feature 1..20: note = Target: SCN10A; (-) strand; PAM type: NRG; PAM sequence: GAG
  source 1..20: mol_type = other DNA
tgggaaaagcactcttttct

SEQ ID NO: 13335 - DNA, 20 bp, synthetic construct
  misc_feature 1..20: note = Description of Artificial Sequence: Synthetic oligonucleotide
  misc_feature 1..20: note = Target: SCN10A; (-) strand; PAM type: NRG; PAM sequence: AAG
  source 1..20: mol_type = other DNA
ctgccccatttatatgggaa

SEQ ID NO: 13336 - DNA, 20 bp, synthetic construct
  misc_feature 1..20: note = Description of Artificial Sequence: Synthetic oligonucleotide
  misc_feature 1..20: note = Target: SCN10A; (-) strand; PAM type: NRG; PAM sequence: GGG
  source 1..20: mol_type = other DNA
ggtgcctgccccatttatat

SEQ ID NO: 13337 - DNA, 20 bp, synthetic construct
  misc_feature 1..20: note = Description of Artificial Sequence: Synthetic oligonucleotide
  misc_feature 1..20: note = Target: SCN10A; (-) strand; PAM type: NRG; PAM sequence: TGG
  source 1..20: mol_type = other DNA
tggtgcctgccccatttata

SEQ ID NO: 13338 - DNA, 20 bp, synthetic construct
  misc_feature 1..20: note = Description of Artificial Sequence: Synthetic oligonucleotide
  misc_feature 1..20: note = Target: SCN10A; (-) strand; PAM type: NRG; PAM sequence: TGG
  source 1..20: mol_type = other DNA
tctcgtgctgtagaactcca

SEQ ID NO: 13339 - DNA, 20 bp, synthetic construct
  misc_feature 1..20: note = Description of Artificial Sequence: Synthetic oligonucleotide
  misc_feature 1..20: note = Target: SCN10A; (-) strand; PAM type: NRG; PAM sequence: TAG
  source 1..20: mol_type = other DNA
agacttcgcatctcgtgctg

SEQ ID NO: 13340 - DNA, 20 bp, synthetic construct
  misc_feature 1..20: note = Description of Artificial Sequence: Synthetic oligonucleotide
  misc_feature 1..20: note = Target: SCN10A; (-) strand; PAM type: NRG; PAM sequence: TAG
  source 1..20: mol_type = other DNA
aagaaaatgaatgctttcta

SEQ ID NO: 13341 - DNA, 20 bp, synthetic construct
  misc_feature 1..20: note = Description of Artificial Sequence: Synthetic oligonucleotide
  misc_feature 1..20: note = Target: SCN10A; (-) strand; PAM type: NRG; PAM sequence: AAG
  source 1..20: mol_type = other DNA
tgtaaaattggtgggaaggg

SEQ ID NO: 13342 - DNA, 20 bp, synthetic construct
  misc_feature 1..20: note = Description of Artificial Sequence: Synthetic oligonucleotide
  misc_feature 1..20: note = Target: SCN10A; (-) strand; PAM type: NRG; PAM sequence: GGG
  source 1..20: mol_type = other DNA
acttgtaaaattggtgggaa

SEQ ID NO: 13343 - DNA, 20 bp, synthetic construct
  misc_feature 1..20: note = Description of Artificial Sequence: Synthetic oligonucleotide
  misc_feature 1..20: note = Target: SCN10A; (-) strand; PAM type: NRG; PAM sequence: AGG
  source 1..20: mol_type = other DNA
cacttgtaaaattggtggga

SEQ ID NO: 13344 - DNA, 20 bp, synthetic construct
  misc_feature 1..20: note = Description of Artificial Sequence: Synthetic oligonucleotide
  misc_feature 1..20: note = Target: SCN10A; (-) strand; PAM type: NRG; PAM sequence: AAG
  source 1..20: mol_type = other DNA
tcacttgtaaaattggtggg

SEQ ID NO: 13345 - DNA, 20 bp, synthetic construct
  misc_feature 1..20: note = Description of Artificial Sequence: Synthetic oligonucleotide
  misc_feature 1..20: note = Target: SCN10A; (-) strand; PAM type: NRG; PAM sequence: GGG
  source 1..20: mol_type = other DNA
tcctcacttgtaaaattggt

SEQ ID NO: 13346 - DNA, 20 bp, synthetic construct
  misc_feature 1..20: note = Description of Artificial Sequence: Synthetic oligonucleotide
  misc_feature 1..20: note = Target: SCN10A; (-) strand; PAM type: NRG; PAM sequence: TGG
  source 1..20: mol_type = other DNA
ttcctcacttgtaaaattgg

SEQ ID NO: 13347 - DNA, 20 bp, synthetic construct
  misc_feature 1..20: note = Description of Artificial Sequence: Synthetic oligonucleotide
  misc_feature 1..20: note = Target: SCN10A; (-) strand; PAM type: NRG; PAM sequence: TGG
  source 1..20: mol_type = other DNA
aatttcctcacttgtaaaat

SEQ ID NO: 13348 - DNA, 20 bp, synthetic construct
  misc_feature 1..20: note = Description of Artificial Sequence: Synthetic oligonucleotide
  misc_feature 1..20: note = Target: SCN10A; (-) strand; PAM type: NRG; PAM sequence: AAG
  source 1..20: mol_type = other DNA
tgtctggctgaccagggcta

SEQ ID NO: 13349 - DNA, 20 bp, synthetic construct
  misc_feature 1..20: note = Description of Artificial Sequence: Synthetic oligonucleotide
  misc_feature 1..20: note = Target: SCN10A; (-) strand; PAM type: NRG; PAM sequence: GGG
  source 1..20: mol_type = other DNA
accaattgtctggctgacca

SEQ ID NO: 13350 - DNA, 20 bp, synthetic construct
  misc_feature 1..20: note = Description of Artificial Sequence: Synthetic oligonucleotide
  misc_feature 1..20: note = Target: SCN10A; (-) strand; PAM type: NRG; PAM sequence: AGG
  source 1..20: mol_type = other DNA
caccaattgtctggctgacc

SEQ ID NO: 13351 - DNA, 20 bp, synthetic construct
  misc_feature 1..20: note = Description of Artificial Sequence: Synthetic oligonucleotide
  misc_feature 1..20: note = Target: SCN10A; (-) strand; PAM type: NRG; PAM sequence: CAG
  source 1..20: mol_type = other DNA
ccaccaattgtctggctgac

SEQ ID NO: 13352 - DNA, 20 bp, synthetic construct
  misc_feature 1..20: note = Description of Artificial Sequence: Synthetic oligonucleotide
  misc_feature 1..20: note = Target: SCN10A; (-) strand; PAM type: NRG; PAM sequence: TGG
  source 1..20: mol_type = other DNA
taacttttccaccaattgtc

SEQ ID NO: 13353 - DNA, 20 bp, synthetic construct
  misc_feature 1..20: note = Description of Artificial Sequence: Synthetic oligonucleotide
  misc_feature 1..20: note = Target: SCN10A; (-) strand; PAM type: NRG; PAM sequence: TGG
  source 1..20: mol_type = other DNA
tgggatctggaaatgccagt

SEQ ID NO: 13354 - DNA, 20 bp, synthetic construct
  misc_feature 1..20: note = Description of Artificial Sequence: Synthetic oligonucleotide
  misc_feature 1..20: note = Target: SCN10A; (-) strand; PAM type: NRG; PAM sequence: CAG
  source 1..20: mol_type = other DNA
gtcctgggatctggaaatgc

SEQ ID NO: 13355 - DNA, 20 bp, synthetic construct
  misc_feature 1..20: note = Description of Artificial Sequence: Synthetic oligonucleotide
  misc_feature 1..20: note = Target: SCN10A; (-) strand; PAM type: NRG; PAM sequence: TGG
  source 1..20: mol_type = other DNA
aagagcactgtcctgggatc

SEQ ID NO: 13356 - DNA, 20 bp, synthetic construct
  misc_feature 1..20: note = Description of Artificial Sequence: Synthetic oligonucleotide
  misc_feature 1..20: note = Target: SCN10A; (-) strand; PAM type: NRG; PAM sequence: GGG
  source 1..20: mol_type = other DNA
gcaggaaagagcactgtcct

SEQ ID NO: 13357 - DNA, 20 bp, synthetic construct
  misc_feature 1..20: note = Description of Artificial Sequence: Synthetic oligonucleotide
  misc_feature 1..20: note = Target: SCN10A; (-) strand; PAM type: NRG; PAM sequence: TGG
  source 1..20: mol_type = other DNA
agcaggaaagagcactgtcc

SEQ ID NO: 13358 - DNA, 20 bp, synthetic construct
  misc_feature 1..20: note = Description of Artificial Sequence: Synthetic oligonucleotide
  misc_feature 1..20: note = Target: SCN10A; (-) strand; PAM type: NRG; PAM sequence: GAG
  source 1..20: mol_type = other DNA
aggctgggtggagcaggaaa

SEQ ID NO: 13359 - DNA, 20 bp, synthetic construct
  misc_feature 1..20: note = Description of Artificial Sequence: Synthetic oligonucleotide
  misc_feature 1..20: note = Target: SCN10A; (-) strand; PAM type: NRG; PAM sequence: AAG
  source 1..20: mol_type = other DNA
tgaggctgggtggagcagga

SEQ ID NO: 13360 - DNA, 20 bp, synthetic construct
  misc_feature 1..20: note = Description of Artificial Sequence: Synthetic oligonucleotide
  misc_feature 1..20: note = Target: SCN10A; (-) strand; PAM type: NRG; PAM sequence: AGG
  source 1..20: mol_type = other DNA
agattgaggctgggtggagc

SEQ ID NO: 13361 - DNA, 20 bp, synthetic construct
  misc_feature 1..20: note = Description of Artificial Sequence: Synthetic oligonucleotide
  misc_feature 1..20: note = Target: SCN10A; (-) strand; PAM type: NRG; PAM sequence: CAG
  source 1..20: mol_type = other DNA
gagattgaggctgggtggag

SEQ ID NO: 13362 - DNA, 20 bp, synthetic construct
  misc_feature 1..20: note = Description of Artificial Sequence: Synthetic oligonucleotide
  misc_feature 1..20: note = Target: SCN10A; (-) strand; PAM type: NRG; PAM sequence: GAG
  source 1..20: mol_type = other DNA
tttgagattgaggctgggtg

SEQ ID NO: 13363 - DNA, 20 bp, synthetic construct
  misc_feature 1..20: note = Description of Artificial Sequence: Synthetic oligonucleotide
  misc_feature 1..20: note = Target: SCN10A; (-) strand; PAM type: NRG; PAM sequence: TGG
  source 1..20: mol_type = other DNA
agtttgagattgaggctggg

SEQ ID NO: 13364 - DNA, 20 bp, synthetic construct
  misc_feature 1..20: note = Description of Artificial Sequence: Synthetic oligonucleotide
  misc_feature 1..20: note = Target: SCN10A; (-) strand; PAM type: NRG; PAM sequence: GGG
  source 1..20: mol_type = other DNA
ttcagtttgagattgaggct

SEQ ID NO: 13365 - DNA, 20 bp, synthetic construct
  misc_feature 1..20: note = Description of Artificial Sequence: Synthetic oligonucleotide
  misc_feature 1..20: note = Target: SCN10A; (-) strand; PAM type: NRG; PAM sequence: TGG
  source 1..20: mol_type = other DNA
tttcagtttgagattgaggc

SEQ ID NO: 13366 - DNA, 20 bp, synthetic construct
  misc_feature 1..20: note = Description of Artificial Sequence: Synthetic oligonucleotide
  misc_feature 1..20: note = Target: SCN10A; (-) strand; PAM type: NRG; PAM sequence: AGG
  source 1..20: mol_type = other DNA
tatttttcagtttgagattg

SEQ ID NO: 13367 - DNA, 20 bp, synthetic construct
  misc_feature 1..20: note = Description of Artificial Sequence: Synthetic oligonucleotide
  misc_feature 1..20: note = Target: SCN10A; (-) strand; PAM type: NRG; PAM sequence: GAG
  source 1..20: mol_type = other DNA
atatttttcagtttgagatt

SEQ ID NO: 13368 - DNA, 20 bp, synthetic construct
  misc_feature 1..20: note = Description of Artificial Sequence: Synthetic oligonucleotide
  misc_feature 1..20: note = Target: SCN10A; (-) strand; PAM type: NRG; PAM sequence: GAG
  source 1..20: mol_type = other DNA
atcctgatatttttcagttt

SEQ ID NO: 13369 - DNA, 20 bp, synthetic construct
  misc_feature 1..20: note = Description of Artificial Sequence: Synthetic oligonucleotide
  misc_feature 1..20: note = Target: SCN10A; (-) strand; PAM type: NRG; PAM sequence: CAG
  source 1..20: mol_type = other DNA
tctgggatcctgatattttt

SEQ ID NO: 13370 - DNA, 20 bp, synthetic construct
  misc_feature 1..20: note = Description of Artificial Sequence: Synthetic oligonucleotide
  misc_feature 1..20: note = Target: SCN10A; (-) strand; PAM type: NRG; PAM sequence: GGG
  source 1..20: mol_type = other DNA
tcacttacccctcactttct

SEQ ID NO: 13371 - DNA, 20 bp, synthetic construct
  misc_feature 1..20: note = Description of Artificial Sequence: Synthetic oligonucleotide
  misc_feature 1..20: note = Target: SCN10A; (-) strand; PAM type: NRG; PAM sequence: TGG
  source 1..20: mol_type = other DNA
gtcacttacccctcactttc

SEQ ID NO: 13372 - DNA, 20 bp, synthetic construct
  misc_feature 1..20: note = Description of Artificial Sequence: Synthetic oligonucleotide
  misc_feature 1..20: note = Target: SCN10A; (-) strand; PAM type: NRG; PAM sequence: GAG
  source 1..20: mol_type = other DNA
gtgatgctgacctgtatcat

SEQ ID NO: 13373 - DNA, 20 bp, synthetic construct
  misc_feature 1..20: note = Description of Artificial Sequence: Synthetic oligonucleotide
  misc_feature 1..20: note = Target: SCN10A; (-) strand; PAM type: NRG; PAM sequence: AAG
  source 1..20: mol_type = other DNA
cacaccagcgttatatcata

SEQ ID NO: 13374 - DNA, 20 bp, synthetic construct
  misc_feature 1..20: note = Description of Artificial Sequence: Synthetic oligonucleotide
  misc_feature 1..20: note = Target: SCN10A; (-) strand; PAM type: NRG; PAM sequence: CAG
  source 1..20: mol_type = other DNA
ttttaaatgtatgtccacac

SEQ ID NO: 13375 - DNA, 20 bp, synthetic construct
  misc_feature 1..20: note = Description of Artificial Sequence: Synthetic oligonucleotide
  misc_feature 1..20: note = Target: SCN10A; (-) strand; PAM type: NRG; PAM sequence: GAG
  source 1..20: mol_type = other DNA
ctatgtcatgaaaagccttt

SEQ ID NO: 13376 - DNA, 20 bp, synthetic construct
  misc_feature 1..20: note = Description of Artificial Sequence: Synthetic oligonucleotide
  misc_feature 1..20: note = Target: SCN10A; (-) strand; PAM type: NRG; PAM sequence: AAG
  source 1..20: mol_type = other DNA
cctgtggcctatgtcatgaa

SEQ ID NO: 13377 - DNA, 20 bp, synthetic construct
  misc_feature 1..20: note = Description of Artificial Sequence: Synthetic oligonucleotide
  misc_feature 1..20: note = Target: SCN10A; (-) strand; PAM type: NRG; PAM sequence: TGG
  source 1..20: mol_type = other DNA
ctgacccagggtaacacctg

SEQ ID NO: 13378 - DNA, 20 bp, synthetic construct
  misc_feature 1..20: note = Description of Artificial Sequence: Synthetic oligonucleotide
  misc_feature 1..20: note = Target: SCN10A; (-) strand; PAM type: NRG; PAM sequence: GGG
  source 1..20: mol_type = other DNA
cggacaactgctctgaccca

SEQ ID NO: 13379 - DNA, 20 bp, synthetic construct
  misc_feature 1..20: note = Description of Artificial Sequence: Synthetic oligonucleotide
  misc_feature 1..20: note = Target: SCN10A; (-) strand; PAM type: NRG; PAM sequence: AGG
  source 1..20: mol_type = other DNA
tcggacaactgctctgaccc

SEQ ID NO: 13380 - DNA, 20 bp, synthetic construct
  misc_feature 1..20: note = Description of Artificial Sequence: Synthetic oligonucleotide
  misc_feature 1..20: note = Target: SCN10A; (-) strand; PAM type: NRG; PAM sequence: CAG
  source 1..20: mol_type = other DNA
gtcggacaactgctctgacc

SEQ ID NO: 13381 - DNA, 20 bp, synthetic construct
  misc_feature 1..20: note = Description of Artificial Sequence: Synthetic oligonucleotide
  misc_feature 1..20: note = Target: SCN10A; (-) strand; PAM type: NRG; PAM sequence: CGG
  source 1..20: mol_type = other DNA
tgactgcatgtgagagctgt

SEQ ID NO: 13382 - DNA, 20 bp, synthetic construct
  misc_feature 1..20: note = Description of Artificial Sequence: Synthetic oligonucleotide
  misc_feature 1..20: note = Target: SCN10A; (-) strand; PAM type: NRG; PAM sequence: GAG
  source 1..20: mol_type = other DNA
ttttgcatgactgcatgtga

SEQ ID NO: 13383 - DNA, 20 bp, synthetic construct
  misc_feature 1..20: note = Description of Artificial Sequence: Synthetic oligonucleotide
  misc_feature 1..20: note = Target: SCN10A; (-) strand; PAM type: NRG; PAM sequence: GAG
  source 1..20: mol_type = other DNA
gattttgcatgactgcatgt

SEQ ID NO: 13384 - DNA, 20 bp, synthetic construct
  misc_feature 1..20: note = Description of Artificial Sequence: Synthetic oligonucleotide
  misc_feature 1..20: note = Target: SCN10A; (-) strand; PAM type: NRG; PAM sequence: AGG
  source 1..20: mol_type = other DNA
agagattggcaatattattt

SEQ ID NO: 13385 - DNA, 20 bp, synthetic construct
  misc_feature 1..20: note = Description of Artificial Sequence: Synthetic oligonucleotide
  misc_feature 1..20: note = Target: SCN10A; (-) strand; PAM type: NRG; PAM sequence: TAG
  source 1..20: mol_type = other DNA
cagagattggcaatattatt

SEQ ID NO: 13386 - DNA, 20 bp, synthetic construct
  misc_feature 1..20: note = Description of Artificial Sequence: Synthetic oligonucleotide
  misc_feature 1..20: note = Target: SCN10A; (-) strand; PAM type: NRG; PAM sequence: TGG
  source 1..20: mol_type = other DNA
gtggagcaccatacagagat

SEQ ID NO: 13387 - DNA, 20 bp, synthetic construct
  misc_feature 1..20: note = Description of Artificial Sequence: Synthetic oligonucleotide
  misc_feature 1..20: note = Target: SCN10A; (-) strand; PAM type: NRG; PAM sequence: GAG
  source 1..20: mol_type = other DNA
cctctgtggagcaccataca

SEQ ID NO: 13388 - DNA, 20 bp, synthetic construct
  misc_feature 1..20: note = Description of Artificial Sequence: Synthetic oligonucleotide
  misc_feature 1..20: note = Target: SCN10A; (-) strand; PAM type: NRG; PAM sequence: CAG
  source 1..20: mol_type = other DNA
gtcctctgtggagcaccata

SEQ ID NO: 13389 - DNA, 20 bp, synthetic construct
  misc_feature 1..20: note = Description of Artificial Sequence: Synthetic oligonucleotide
  misc_feature 1..20: note = Target: SCN10A; (-) strand; PAM type: NRG; PAM sequence: GAG
  source 1..20: mol_type = other DNA
gtccaaggtagtcctctgtg

SEQ ID NO: 13390 - DNA, 20 bp, synthetic construct
  misc_feature 1..20: note = Description of Artificial Sequence: Synthetic oligonucleotide
  misc_feature 1..20: note = Target: SCN10A; (-) strand; PAM type: NRG; PAM sequence: TGG
  source 1..20: mol_type = other DNA
aggtccaaggtagtcctctg

SEQ ID NO: 13391 - DNA, 20 bp, synthetic construct
  misc_feature 1..20: note = Description of Artificial Sequence: Synthetic oligonucleotide
  misc_feature 1..20: note = Target: SCN10A; (-) strand; PAM type: NRG; PAM sequence: TAG
  source 1..20: mol_type = other DNA
acattactgaaggtccaagg

SEQ ID NO: 13392 - DNA, 20 bp, synthetic construct
  misc_feature 1..20: note = Description of Artificial Sequence: Synthetic oligonucleotide
  misc_feature 1..20: note = Target: SCN10A; (-) strand; PAM type: NRG; PAM sequence: AGG
  source 1..20: mol_type = other DNA
agaacattactgaaggtcca

SEQ ID NO: 13393 - DNA, 20 bp, synthetic construct
  misc_feature 1..20: note = Description of Artificial Sequence: Synthetic oligonucleotide
  misc_feature 1..20: note = Target: SCN10A; (-) strand; PAM type: NRG; PAM sequence: AAG
  source 1..20: mol_type = other DNA
aagaacattactgaaggtcc

SEQ ID NO: 13394 - DNA, 20 bp, synthetic construct
  misc_feature 1..20: note = Description of Artificial Sequence: Synthetic oligonucleotide
  misc_feature 1..20: note = Target: SCN10A; (-) strand; PAM type: NRG; PAM sequence: AGG
  source 1..20: mol_type = other DNA
tagaacaagaacattactga

SEQ ID NO: 13395 - DNA, 20 bp, synthetic construct
  misc_feature 1..20: note = Description of Artificial Sequence: Synthetic oligonucleotide
  misc_feature 1..20: note = Target: SCN10A; (-) strand; PAM type: NRG; PAM sequence: AAG
  source 1..20: mol_type = other DNA
atagaacaagaacattactg

SEQ ID NO: 13396 - DNA, 20 bp, synthetic construct
  misc_feature 1..20: note = Description of Artificial Sequence: Synthetic oligonucleotide
  misc_feature 1..20: note = Target: SCN10A; (-) strand; PAM type: NRG; PAM sequence: AAG
  source 1..20: mol_type = other DNA
aacttccaaagatatagaac

SEQ ID NO: 13397 - DNA, 20 bp, synthetic construct
  misc_feature 1..20: note = Description of Artificial Sequence: Synthetic oligonucleotide
  misc_feature 1..20: note = Target: SCN10A; (-) strand; PAM type: NRG; PAM sequence: TAG
  source 1..20: mol_type = other DNA
gaccagaacttccaaagata

SEQ ID NO: 13398 - DNA, 20 bp, synthetic construct
  misc_feature 1..20: note = Description of Artificial Sequence: Synthetic oligonucleotide
  misc_feature 1..20: note = Target: SCN10A; (-) strand; PAM type: NRG; PAM sequence: AAG
  source 1..20: mol_type = other DNA
tctcaggaccagaacttcca

SEQ ID NO: 13399 - DNA, 20 bp, synthetic construct
  misc_feature 1..20: note = Description of Artificial Sequence: Synthetic oligonucleotide
  misc_feature 1..20: note = Target: SCN10A; (-) strand; PAM type: NRG; PAM sequence: CAG
  source 1..20: mol_type = other DNA
tgagacaaacttctcaggac

SEQ ID NO: 13400 - DNA, 20 bp, synthetic construct
  misc_feature 1..20: note = Description of Artificial Sequence: Synthetic oligonucleotide
  misc_feature 1..20: note = Target: SCN10A; (-) strand; PAM type: NRG; PAM sequence: AGG
  source 1..20: mol_type = other DNA
tttactgagacaaacttctc

SEQ ID NO: 13401 - DNA, 20 bp, synthetic construct
  misc_feature 1..20: note = Description of Artificial Sequence: Synthetic oligonucleotide
  misc_feature 1..20: note = Target: SCN10A; (-) strand; PAM type: NRG; PAM sequence: CAG
  source 1..20: mol_type = other DNA
atttactgagacaaacttct

SEQ ID NO: 13402 - DNA, 20 bp, synthetic construct
  misc_feature 1..20: note = Description of Artificial Sequence: Synthetic oligonucleotide
  misc_feature 1..20: note = Target: SCN10A; (-) strand; PAM type: NRG; PAM sequence: GAG
  source 1..20: mol_type = other DNA
gtaatcagattatatttact

SEQ ID NO: 13403 - DNA, 20 bp, synthetic construct
  misc_feature 1..20: note = Description of Artificial Sequence: Synthetic oligonucleotide
  misc_feature 1..20: note = Target: SCN10A; (-) strand; PAM type: NRG; PAM sequence: CAG
  source 1..20: mol_type = other DNA
ccttttatttttgttgtaat

SEQ ID NO: 13404 - DNA, 20 bp, synthetic construct
  misc_feature 1..20: note = Description of Artificial Sequence: Synthetic oligonucleotide
  misc_feature 1..20: note = Target: SCN10A; (-) strand; PAM type: NRG; PAM sequence: CAG
  source 1..20: mol_type = other DNA
tcatgggttctcttactctc

SEQ ID NO: 13405 - DNA, 20 bp, synthetic construct
  misc_feature 1..20: note = Description of Artificial Sequence: Synthetic oligonucleotide
  misc_feature 1..20: note = Target: SCN10A; (-) strand; PAM type: NRG; PAM sequence: GGG
  source 1..20: mol_type = other DNA
gaatttcaatatcagatcat

SEQ ID NO: 13406 - DNA, 20 bp, synthetic construct
  misc_feature 1..20: note = Description of Artificial Sequence: Synthetic oligonucleotide
  misc_feature 1..20: note = Target: SCN10A; (-) strand; PAM type: NRG; PAM sequence: TGG
  source 1..20: mol_type = other DNA
tgaatttcaatatcagatca

SEQ ID NO: 13407 - DNA, 20 bp, synthetic construct
  misc_feature 1..20: note = Description of Artificial Sequence: Synthetic oligonucleotide
  misc_feature 1..20: note = Target: SCN10A; (-) strand; PAM type: NRG; PAM sequence: CAG
  source 1..20: mol_type = other DNA
tcccttctgaatttcaatat

SEQ ID NO: 13408 - DNA, 20 bp, synthetic construct
  misc_feature 1..20: note = Description of Artificial Sequence: Synthetic oligonucleotide
  misc_feature 1..20: note = Target: SCN10A; (-) strand; PAM type: NRG; PAM sequence: GAG
  source 1..20: mol_type = other DNA
aaataggagtcagaagctaa

SEQ ID NO: 13409 - DNA, 20 bp, synthetic construct
  misc_feature 1..20: note = Description of Artificial Sequence: Synthetic oligonucleotide
  misc_feature 1..20: note = Target: SCN10A; (-) strand; PAM type: NRG; PAM sequence: AAG
  source 1..20: mol_type = other DNA
acaaataggagtcagaagct

SEQ ID NO: 13410 - DNA, 20 bp, synthetic construct
  misc_feature 1..20: note = Description of Artificial Sequence: Synthetic oligonucleotide
  misc_feature 1..20: note = Target: SCN10A; (-) strand; PAM type: NRG; PAM sequence: AAG
  source 1..20: mol_type = other DNA
catacacaaataggagtcag

SEQ ID NO: 13411 - DNA, 20 bp, synthetic construct
  misc_feature 1..20: note = Description of Artificial Sequence: Synthetic oligonucleotide
  misc_feature 1..20: note = Target: SCN10A; (-) strand; PAM type: NRG; PAM sequence: CAG
  source 1..20: mol_type = other DNA
catcatacacaaataggagt

SEQ ID NO: 13412 - DNA, 20 bp, synthetic construct
  misc_feature 1..20: note = Description of Artificial Sequence: Synthetic oligonucleotide
  misc_feature 1..20: note = Target: SCN10A; (-) strand; PAM type: NRG; PAM sequence: GAG
  source 1..20: mol_type = other DNA
aaaccatcatacacaaatag

SEQ ID NO: 13413 - DNA, 20 bp, synthetic construct
  misc_feature 1..20: note = Description of Artificial Sequence: Synthetic oligonucleotide
  misc_feature 1..20: note = Target: SCN10A; (-) strand; PAM type: NRG; PAM sequence: AGG
  source 1..20: mol_type = other DNA
aaaaaccatcatacacaaat

SEQ ID NO: 13414 - DNA, 20 bp, synthetic construct
  misc_feature 1..20: note = Description of Artificial Sequence: Synthetic oligonucleotide
  misc_feature 1..20: note = Target: SCN10A; (-) strand; PAM type: NRG; PAM sequence: TAG
  source 1..20: mol_type = other DNA
aaaaaaccatcatacacaaa

SEQ ID NO: 13415 - DNA, 20 bp, synthetic construct
  misc_feature 1..20: note = Description of Artificial Sequence: Synthetic oligonucleotide
  misc_feature 1..20: note = Target: SCN10A; (-) strand; PAM type: NRG; PAM sequence: TGG
  source 1..20: mol_type = other DNA
aactgggcagggaatgcaac

SEQ ID NO: 13416 - DNA, 20 bp, synthetic construct
  misc_feature 1..20: note = Description of Artificial Sequence: Synthetic oligonucleotide
  misc_feature 1..20: note = Target: SCN10A; (-) strand; PAM type: NRG; PAM sequence: GGG
  source 1..20: mol_type = other DNA
cacaatgtcagaactgggca

SEQ ID NO: 13417 - DNA, 20 bp, synthetic construct
  misc_feature 1..20: note = Description of Artificial Sequence: Synthetic oligonucleotide
  misc_feature 1..20: note = Target: SCN10A; (-) strand; PAM type: NRG; PAM sequence: AGG
  source 1..20: mol_type = other DNA
tcacaatgtcagaactgggc

SEQ ID NO: 13418 - DNA, 20 bp, synthetic construct
  misc_feature 1..20: note = Description of Artificial Sequence: Synthetic oligonucleotide
  misc_feature 1..20: note = Target: SCN10A; (-) strand; PAM type: NRG; PAM sequence: CAG
  source 1..20: mol_type = other DNA
gtcacaatgtcagaactggg

SEQ ID NO: 13419 - DNA, 20 bp, synthetic construct
  misc_feature 1..20: note = Description of Artificial Sequence: Synthetic oligonucleotide
  misc_feature 1..20: note = Target: SCN10A; (-) strand; PAM type: NRG; PAM sequence: GGG
  source 1..20: mol_type = other DNA
ctggtcacaatgtcagaact

SEQ ID NO: 13420 - DNA, 20 bp, synthetic construct
  misc_feature 1..20: note = Description of Artificial Sequence: Synthetic oligonucleotide
  misc_feature 1..20: note = Target: SCN10A; (-) strand; PAM type: NRG; PAM sequence: TGG
  source 1..20: mol_type = other DNA
actggtcacaatgtcagaac

SEQ ID NO: 13421 - DNA, 20 bp, synthetic construct
  misc_feature 1..20: note = Description of Artificial Sequence: Synthetic oligonucleotide
  misc_feature 1..20: note = Target: SCN10A; (-) strand; PAM type: NRG; PAM sequence: CAG
  source 1..20: mol_type = other DNA
catgccactggtcacaatgt

SEQ ID NO: 13422 - DNA, 20 bp, synthetic construct
  misc_feature 1..20: note = Description of Artificial Sequence: Synthetic oligonucleotide
  misc_feature 1..20: note = Target: SCN10A; (-) strand; PAM type: NRG; PAM sequence: TGG
  source 1..20: mol_type = other DNA
gcctcaccaatgcatgccac

SEQ ID NO: 13423 - DNA, 20 bp, synthetic construct
  misc_feature 1..20: note = Description of Artificial Sequence: Synthetic oligonucleotide
  misc_feature 1..20: note = Target: SCN10A; (-) strand; PAM type: NRG; PAM sequence: CAG
  source 1..20: mol_type = other DNA
ttgcagatcacacccagcta

SEQ ID NO: 13424 - DNA, 20 bp, synthetic construct
  misc_feature 1..20: note = Description of Artificial Sequence: Synthetic oligonucleotide
  misc_feature 1..20: note = Target: SCN10A; (-) strand; PAM type: NRG; PAM sequence: CAG
  source 1..20: mol_type = other DNA
ttcccattgcagatcacacc

SEQ ID NO: 13425 - DNA, 20 bp, synthetic construct
  misc_feature 1..20: note = Description of Artificial Sequence: Synthetic oligonucleotide
  misc_feature 1..20: note = Target: SCN10A; (-) strand; PAM type: NRG; PAM sequence: CAG
  source 1..20: mol_type = other DNA
gtgttaactctttcccattg

SEQ ID NO: 13426 - DNA, 20 bp, synthetic construct
  misc_feature 1..20: note = Description of Artificial Sequence: Synthetic oligonucleotide
  misc_feature 1..20: note = Target: SCN10A; (-) strand; PAM type: NRG; PAM sequence: CAG
  source 1..20: mol_type = other DNA
cactccagcctggatatgtt

SEQ ID NO: 13427 - DNA, 20 bp, synthetic construct
  misc_feature 1..20: note = Description of Artificial Sequence: Synthetic oligonucleotide
  misc_feature 1..20: note = Target: SCN10A; (-) strand; PAM type: NRG; PAM sequence: TGG
  source 1..20: mol_type = other DNA
ctagtgagaacactccagcc

SEQ ID NO: 13428 - DNA, 20 bp, synthetic construct
  misc_feature 1..20: note = Description of Artificial Sequence: Synthetic oligonucleotide
  misc_feature 1..20: note = Target: SCN10A; (-) strand; PAM type: NRG; PAM sequence: CAG
  source 1..20: mol_type = other DNA
gggccctagtgagaacactc

SEQ ID NO: 13429 - DNA, 20 bp, synthetic construct
  misc_feature 1..20: note = Description of Artificial Sequence: Synthetic oligonucleotide
  misc_feature 1..20: note = Target: SCN10A; (-) strand; PAM type: NRG; PAM sequence: GAG
  source 1..20: mol_type = other DNA
gattgcccctgggccctagt

SEQ ID NO: 13430 - DNA, 20 bp, synthetic construct
  misc_feature 1..20: note = Description of Artificial Sequence: Synthetic oligonucleotide
  misc_feature 1..20: note = Target: SCN10A; (-) strand; PAM type: NRG; PAM sequence: TAG
  source 1..20: mol_type = other DNA
agctgattgcccctgggccc

SEQ ID NO: 13431 - DNA, 20 bp, synthetic construct
  misc_feature 1..20: note = Description of Artificial Sequence: Synthetic oligonucleotide
  misc_feature 1..20: note = Target: SCN10A; (-) strand; PAM type: NRG; PAM sequence: GGG
  source 1..20: mol_type = other DNA
gtatggagctgattgcccct

SEQ ID NO: 13432 - DNA, 20 bp, synthetic construct
  misc_feature 1..20: note = Description of Artificial Sequence: Synthetic oligonucleotide
  misc_feature 1..20: note = Target: SCN10A; (-) strand; PAM type: NRG; PAM sequence: TGG
  source 1..20: mol_type = other DNA
agtatggagctgattgcccc

SEQ ID NO: 13433 - DNA, 20 bp, synthetic construct
  misc_feature 1..20: note = Description of Artificial Sequence: Synthetic oligonucleotide
  misc_feature 1..20: note = Target: SCN10A; (-) strand; PAM type: NRG; PAM sequence: GAG
  source 1..20: mol_type = other DNA
aagatgaagccaccagtatg

SEQ ID NO: 13434 - DNA, 20 bp, synthetic construct
  misc_feature 1..20: note = Description of Artificial Sequence: Synthetic oligonucleotide
  misc_feature 1..20: note = Target: SCN10A; (-) strand; PAM type: NRG; PAM sequence: TGG
  source 1..20: mol_type = other DNA
tgaagatgaagccaccagta

SEQ ID NO: 13435 - DNA, 20 bp, synthetic construct
  misc_feature 1..20: note = Description of Artificial Sequence: Synthetic oligonucleotide
  misc_feature 1..20: note = Target: SCN10A; (-) strand; PAM type: NRG; PAM sequence: CAG
  source 1..20: mol_type = other DNA
caaaatgaagatgaagccac

SEQ ID NO: 13436 - DNA, 20 bp, synthetic construct
  misc_feature 1..20: note = Description of Artificial Sequence: Synthetic oligonucleotide
  misc_feature 1..20: note = Target: SCN10A; (-) strand; PAM type: NRG; PAM sequence: AAG
  source 1..20: mol_type = other DNA
ctcaatacaaaatgaagatg

SEQ ID NO: 13437 - DNA, 20 bp, synthetic construct
  misc_feature 1..20: note = Description of Artificial Sequence: Synthetic oligonucleotide
  misc_feature 1..20: note = Target: SCN10A; (-) strand; PAM type: NRG; PAM sequence: AAG
  source 1..20: mol_type = other DNA
atctagctcaatacaaaatg

SEQ ID NO: 13438 - DNA, 20 bp, synthetic construct
  misc_feature 1..20: note = Description of Artificial Sequence: Synthetic oligonucleotide
  misc_feature 1..20: note = Target: SCN10A; (-) strand; PAM type: NRG; PAM sequence: TAG
  source 1..20: mol_type = other DNA
agagtcaacatgaggacatc

SEQ ID NO: 13439 - DNA, 20 bp, synthetic construct
  misc_feature 1..20: note = Description of Artificial Sequence: Synthetic oligonucleotide
  misc_feature 1..20: note = Target: SCN10A; (-) strand; PAM type: NRG; PAM sequence: AGG
  source 1..20: mol_type = other DNA
ttagtgatagagtcaacatg

SEQ ID NO: 13440 - DNA, 20 bp, synthetic construct
  misc_feature 1..20: note = Description of Artificial Sequence: Synthetic oligonucleotide
  misc_feature 1..20: note = Target: SCN10A; (-) strand; PAM type: NRG; PAM sequence: GAG
  source 1..20: mol_type = other DNA
cttagtgatagagtcaacat

SEQ ID NO: 13441 - DNA, 20 bp, synthetic construct
  misc_feature 1..20: note = Description of Artificial Sequence: Synthetic oligonucleotide
  misc_feature 1..20: note = Target: SCN10A; (-) strand; PAM type: NRG; PAM sequence: GAG
  source 1..20: mol_type = other DNA
cactagaggccttagtgata

SEQ ID NO: 13442 - DNA, 20 bp, synthetic construct
  misc_feature 1..20: note = Description of Artificial Sequence: Synthetic oligonucleotide
  misc_feature 1..20: note = Target: SCN10A; (-) strand; PAM type: NRG; PAM sequence: TAG
  source 1..20: mol_type = other DNA
gtcactagaggccttagtga

SEQ ID NO: 13443 - DNA, 20 bp, synthetic construct
  misc_feature 1..20: note = Description of Artificial Sequence: Synthetic oligonucleotide
  misc_feature 1..20: note = Target: SCN10A; (-) strand; PAM type: NRG; PAM sequence: TAG
  source 1..20: mol_type = other DNA
gagagtgtcactagaggcct

SEQ ID NO: 13444 - DNA, 20 bp, synthetic construct
  misc_feature 1..20: note = Description of Artificial Sequence: Synthetic oligonucleotide
  misc_feature 1..20: note = Target: SCN10A; (-) strand; PAM type: NRG; PAM sequence: AGG
  source 1..20: mol_type = other DNA
tcctatgagagtgtcactag

SEQ ID NO: 13445 - DNA, 20 bp, synthetic construct
  misc_feature 1..20: note = Description of Artificial Sequence: Synthetic oligonucleotide
  misc_feature 1..20: note = Target: SCN10A; (-) strand; PAM type: NRG; PAM sequence: GAG
  source 1..20: mol_type = other DNA
gtcctatgagagtgtcacta

SEQ ID NO: 13446 - DNA, 20 bp, synthetic construct
  misc_feature 1..20: note = Description of Artificial Sequence: Synthetic oligonucleotide
  misc_feature 1..20: note = Target: SCN10A; (-) strand; PAM type: NRG; PAM sequence: TAG
  source 1..20: mol_type = other DNA
ccgtcctatgagagtgtcac

SEQ ID NO: 13447 - DNA, 20 bp, synthetic construct
  misc_feature 1..20: note = Description of Artificial Sequence: Synthetic oligonucleotide
  misc_feature 1..20: note = Target: SCN10A; (-) strand; PAM type: NRG; PAM sequence: GAG
  source 1..20: mol_type = other DNA
tcattcccaccgtcctatga

SEQ ID NO: 13448 - DNA, 20 bp, synthetic construct
  misc_feature 1..20: note = Description of Artificial Sequence: Synthetic oligonucleotide
  misc_feature 1..20: note = Target: SCN10A; (-) strand; PAM type: NRG; PAM sequence: GAG
  source 1..20: mol_type = other DNA
catcattcccaccgtcctat

SEQ ID NO: 13449 - DNA, 20 bp, synthetic construct
  misc_feature 1..20: note = Description of Artificial Sequence: Synthetic oligonucleotide
  misc_feature 1..20: note = Target: SCN10A; (-) strand; PAM type: NRG; PAM sequence: CAG
  source 1..20: mol_type = other DNA
aaatgaaaattgtgtactcc

SEQ ID NO: 13450 - DNA, 20 bp, synthetic construct
  misc_feature 1..20: note = Description of Artificial Sequence: Synthetic oligonucleotide
  misc_feature 1..20: note = Target: SCN10A; (-) strand; PAM type: NRG; PAM sequence: CAG
  source 1..20: mol_type = other DNA
tgaaggttttgttgcattca

SEQ ID NO: 13451 - DNA, 20 bp, synthetic construct
  misc_feature 1..20: note = Description of Artificial Sequence: Synthetic oligonucleotide
  misc_feature 1..20: note = Target: SCN10A; (-) strand; PAM type: NRG; PAM sequence: AGG
  source 1..20: mol_type = other DNA
gctgcatcactcccagatga

SEQ ID NO: 13452 - DNA, 20 bp, synthetic construct
  misc_feature 1..20: note = Description of Artificial Sequence: Synthetic oligonucleotide
  misc_feature 1..20: note = Target: SCN10A; (-) strand; PAM type: NRG; PAM sequence: AAG
  source 1..20: mol_type = other DNA
ggctgcatcactcccagatg

SEQ ID NO: 13453 - DNA, 20 bp, synthetic construct
  misc_feature 1..20: note = Description of Artificial Sequence: Synthetic oligonucleotide
  misc_feature 1..20: note = Target: SCN10A; (-) strand; PAM type: NRG; PAM sequence: CAG
  source 1..20: mol_type = other DNA
ggaggaggctgcatcactcc

SEQ ID NO: 13454 - DNA, 20 bp, synthetic construct
  misc_feature 1..20: note = Description of Artificial Sequence: Synthetic oligonucleotide
  misc_feature 1..20: note = Target: SCN10A; (-) strand; PAM type: NRG; PAM sequence: AGG
  source 1..20: mol_type = other DNA
tgtgcccagagctgaggagg

SEQ ID NO: 13455 - DNA, 20 bp, synthetic construct
  misc_feature 1..20: note = Description of Artificial Sequence: Synthetic oligonucleotide
  misc_feature 1..20: note = Target: SCN10A; (-) strand; PAM type: NRG; PAM sequence: GAG
  source 1..20: mol_type = other DNA
gtgtgcccagagctgaggag

SEQ ID NO: 13456 - DNA, 20 bp, synthetic construct
  misc_feature 1..20: note = Description of Artificial Sequence: Synthetic oligonucleotide
  misc_feature 1..20: note = Target: SCN10A; (-) strand; PAM type: NRG; PAM sequence: AGG
  source 1..20: mol_type = other DNA
atgtgtgcccagagctgagg

SEQ ID NO: 13457 - DNA, 20 bp, synthetic construct
  misc_feature 1..20: note = Description of Artificial Sequence: Synthetic oligonucleotide
  misc_feature 1..20: note = Target: SCN10A; (-) strand; PAM type: NRG; PAM sequence: GAG
  source 1..20: mol_type = other DNA
catgtgtgcccagagctgag

SEQ ID NO: 13458 - DNA, 20 bp, synthetic construct
  misc_feature 1..20: note = Description of Artificial Sequence: Synthetic oligonucleotide
  misc_feature 1..20: note = Target: SCN10A; (-) strand; PAM type: NRG; PAM sequence: AGG
  source 1..20: mol_type = other DNA
cccatgtgtgcccagagctg

SEQ ID NO: 13459 - DNA, 20 bp, synthetic construct
  misc_feature 1..20: note = Description of Artificial Sequence: Synthetic oligonucleotide
  misc_feature 1..20: note = Target: SCN10A; (-) strand; PAM type: NRG; PAM sequence: GAG
  source 1..20: mol_type = other DNA
ccccatgtgtgcccagagct

SEQ ID NO: 13460 - DNA, 20 bp, synthetic construct
  misc_feature 1..20: note = Description of Artificial Sequence: Synthetic oligonucleotide
  misc_feature 1..20: note = Target: SCN10A; (-) strand; PAM type: NRG; PAM sequence: GAG
  source 1..20: mol_type = other DNA
taacaccccatgtgtgccca

SEQ ID NO: 13461 - DNA, 20 bp, synthetic construct
  misc_feature 1..20: note = Description of Artificial Sequence: Synthetic oligonucleotide
  misc_feature 1..20: note = Target: SCN10A; (-) strand; PAM type: NRG; PAM sequence: CAG
  source 1..20: mol_type = other DNA
tctaacaccccatgtgtgcc

SEQ ID NO: 13462 - DNA, 20 bp, synthetic construct
  misc_feature 1..20: note = Description of Artificial Sequence: Synthetic oligonucleotide
  misc_feature 1..20: note = Target: SCN10A; (-) strand; PAM type: NRG; PAM sequence: TGG
  source 1..20: mol_type = other DNA
ctatgtgctgcaccgctcca

SEQ ID NO: 13463 - DNA, 20 bp, synthetic construct
  misc_feature 1..20: note = Description of Artificial Sequence: Synthetic oligonucleotide
  misc_feature 1..20: note = Target: SCN10A; (-) strand; PAM type: NRG; PAM sequence: GAG
  source 1..20: mol_type = other DNA
gtcattcaaaaggcctatcg

SEQ ID NO: 13464 - DNA, 20 bp, synthetic construct
  misc_feature 1..20: note = Description of Artificial Sequence: Synthetic oligonucleotide
  misc_feature 1..20: note = Target: SCN10A; (-) strand; PAM type: NRG; PAM sequence: CGG
  source 1..20: mol_type = other DNA
ctgtcattcaaaaggcctat

SEQ ID NO: 13465 - DNA, 20 bp, synthetic construct
  misc_feature 1..20: note = Description of Artificial Sequence: Synthetic oligonucleotide
  misc_feature 1..20: note = Target: SCN10A; (-) strand; PAM type: NRG; PAM sequence: AGG
  source 1..20: mol_type = other DNA
ttcagccactgtcattcaaa

SEQ ID NO: 13466 - DNA, 20 bp, synthetic construct
  misc_feature 1..20: note = Description of Artificial Sequence: Synthetic oligonucleotide
  misc_feature 1..20: note = Target: SCN10A; (-) strand; PAM type: NRG; PAM sequence: AAG
  source 1..20: mol_type = other DNA
tttcagccactgtcattcaa

SEQ ID NO: 13467 - DNA, 20 bp, synthetic construct
  misc_feature 1..20: note = Description of Artificial Sequence: Synthetic oligonucleotide
  misc_feature 1..20: note = Target: SCN10A; (-) strand; PAM type: NRG; PAM sequence: CAG
  source 1..20: mol_type = other DNA
atggaagcaagaagacattt

SEQ ID NO: 13468 - DNA, 20 bp, synthetic construct
  misc_feature 1..20: note = Description of Artificial Sequence: Synthetic oligonucleotide
  misc_feature 1..20: note = Target: SCN10A; (-) strand; PAM type: NRG; PAM sequence: AAG
  source 1..20: mol_type = other DNA
cactctccgatggaagcaag

SEQ ID NO: 13469 - DNA, 20 bp, synthetic construct
  misc_feature 1..20: note = Description of Artificial Sequence: Synthetic oligonucleotide
  misc_feature 1..20: note = Target: SCN10A; (-) strand; PAM type: NRG; PAM sequence: AAG
  source 1..20: mol_type = other DNA
aaccactctccgatggaagc

SEQ ID NO: 13470 - DNA, 20 bp, synthetic construct
  misc_feature 1..20: note = Description of Artificial Sequence: Synthetic oligonucleotide
  misc_feature 1..20: note = Target: SCN10A; (-) strand; PAM type: NRG; PAM sequence: AAG
  source 1..20: mol_type = other DNA
tagcaaccactctccgatgg

SEQ ID NO: 13471 - DNA, 20 bp, synthetic construct
  misc_feature 1..20: note = Description of Artificial Sequence: Synthetic oligonucleotide
  misc_feature 1..20: note = Target: SCN10A; (-) strand; PAM type: NRG; PAM sequence: TGG
  source 1..20: mol_type = other DNA
caatagcaaccactctccga

SEQ ID NO: 13472 - DNA, 20 bp, synthetic construct
  misc_feature 1..20: note = Description of Artificial Sequence: Synthetic oligonucleotide
  misc_feature 1..20: note = Target: SCN10A; (-) strand; PAM type: NRG; PAM sequence: TAG
  source 1..20: mol_type = other DNA
aaaatcatcctatgaaccaa

SEQ ID NO: 13473 - DNA, 20 bp, synthetic construct
  misc_feature 1..20: note = Description of Artificial Sequence: Synthetic oligonucleotide
  misc_feature 1..20: note = Target: SCN10A; (-) strand; PAM type: NRG; PAM sequence: TGG
  source 1..20: mol_type = other DNA
aaatatggaggagaagttta

SEQ ID NO: 13474 - DNA, 20 bp, synthetic construct
  misc_feature 1..20: note = Description of Artificial Sequence: Synthetic oligonucleotide
  misc_feature 1..20: note = Target: SCN10A; (-) strand; PAM type: NRG; PAM sequence: AAG
  source 1..20: mol_type = other DNA
tgaaggcaaatatggaggag

SEQ ID NO: 13475 - DNA, 20 bp, synthetic construct
  misc_feature 1..20: note = Description of Artificial Sequence: Synthetic oligonucleotide
  misc_feature 1..20: note = Target: SCN10A; (-) strand; PAM type: NRG; PAM sequence: GAG
  source 1..20: mol_type = other DNA
ctctgaaggcaaatatggag

SEQ ID NO: 13476 - DNA, 20 bp, synthetic construct
  misc_feature 1..20: note = Description of Artificial Sequence: Synthetic oligonucleotide
  misc_feature 1..20: note = Target: SCN10A; (-) strand; PAM type: NRG; PAM sequence: AGG
  source 1..20: mol_type = other DNA
ttctctgaaggcaaatatgg

SEQ ID NO: 13477 - DNA, 20 bp, synthetic construct
  misc_feature 1..20: note = Description of Artificial Sequence: Synthetic oligonucleotide
  misc_feature 1..20: note = Target: SCN10A; (-) strand; PAM type: NRG; PAM sequence: GAG
  source 1..20: mol_type = other DNA
attctctgaaggcaaatatg

SEQ ID NO: 13478 - DNA, 20 bp, synthetic construct
  misc_feature 1..20: note = Description of Artificial Sequence: Synthetic oligonucleotide
  misc_feature 1..20: note = Target: SCN10A; (-) strand; PAM type: NRG; PAM sequence: TGG
  source 1..20: mol_type = other DNA
ggattctctgaaggcaaata

SEQ ID NO: 13479 - DNA, 20 bp, synthetic construct
  misc_feature 1..20: note = Description of Artificial Sequence: Synthetic oligonucleotide
  misc_feature 1..20: note = Target: SCN10A; (-) strand; PAM type: NRG; PAM sequence: AGG
  source 1..20: mol_type = other DNA
cggggagttggattctctga

SEQ ID NO: 13480 - DNA, 20 bp, synthetic construct
  misc_feature 1..20: note = Description of Artificial Sequence: Synthetic oligonucleotide
  misc_feature 1..20: note = Target: SCN10A; (-) strand; PAM type: NRG; PAM sequence: AAG
  source 1..20: mol_type = other DNA
ccggggagttggattctctg

SEQ ID NO: 13481 - DNA, 20 bp, synthetic construct
  misc_feature 1..20: note = Description of Artificial Sequence: Synthetic oligonucleotide
  misc_feature 1..20: note = Target: SCN10A; (-) strand; PAM type: NRG; PAM sequence: TGG
  source 1..20: mol_type = other DNA
cctaggagaatccggggagt

SEQ ID NO: 13482 - DNA, 20 bp, synthetic construct
  misc_feature 1..20: note = Description of Artificial Sequence: Synthetic oligonucleotide
  misc_feature 1..20: note = Target: SCN10A; (-) strand; PAM type: NRG; PAM sequence: GAG
  source 1..20: mol_type = other DNA
atgtcctaggagaatccggg

SEQ ID NO: 13483 - DNA, 20 bp, synthetic construct
  misc_feature 1..20: note = Description of Artificial Sequence: Synthetic oligonucleotide
  misc_feature 1..20: note = Target: SCN10A; (-) strand; PAM type: NRG; PAM sequence: GGG
  source 1..20: mol_type = other DNA
gaatgtcctaggagaatccg

SEQ ID NO: 13484 - DNA, 20 bp, synthetic construct
  misc_feature 1..20: note = Description of Artificial Sequence: Synthetic oligonucleotide
  misc_feature 1..20: note = Target: SCN10A; (-) strand; PAM type: NRG; PAM sequence: GGG
  source 1..20: mol_type = other DNA
agaatgtcctaggagaatcc

SEQ ID NO: 13485 - DNA, 20 bp, synthetic construct
  misc_feature 1..20: note = Description of Artificial Sequence: Synthetic oligonucleotide
  misc_feature 1..20: note = Target: SCN10A; (-) strand; PAM type: NRG; PAM sequence: CGG
  source 1..20: mol_type = other DNA
aagaatgtcctaggagaatc

SEQ ID NO: 13486 - DNA, 20 bp, synthetic construct
  misc_feature 1..20: note = Description of Artificial Sequence: Synthetic oligonucleotide
  misc_feature 1..20: note = Target: SCN10A; (-) strand; PAM type: NRG; PAM sequence: GAG
  source 1..20: mol_type = other DNA
tttcaccaagaatgtcctag

SEQ ID NO: 13487 - DNA, 20 bp, synthetic construct
  misc_feature 1..20: note = Description of Artificial Sequence: Synthetic oligonucleotide
  misc_feature 1..20: note = Target: SCN10A; (-) strand; PAM type: NRG; PAM sequence: AGG
  source 1..20: mol_type = other DNA
gctttcaccaagaatgtcct

SEQ ID NO: 13488 - DNA, 20 bp, synthetic construct
  misc_feature 1..20: note = Description of Artificial Sequence: Synthetic oligonucleotide
  misc_feature 1..20: note = Target: SCN10A; (-) strand; PAM type: NRG; PAM sequence: TAG
  source 1..20: mol_type = other DNA
tgctttcaccaagaatgtcc

SEQ ID NO: 13489 - DNA, 20 bp, synthetic construct
  misc_feature 1..20: note = Description of Artificial Sequence: Synthetic oligonucleotide
  misc_feature 1..20: note = Target: SCN10A; (-) strand; PAM type: NRG; PAM sequence: AAG
  source 1..20: mol_type = other DNA
acatcctttttgctttcacc

SEQ ID NO: 13490 - DNA, 20 bp, synthetic construct
  misc_feature 1..20: note = Description of Artificial Sequence: Synthetic oligonucleotide
  misc_feature 1..20: note = Target: SCN10A; (-) strand; PAM type: NRG; PAM sequence: TGG
  source 1..20: mol_type = other DNA
tggagataagatccactgct

SEQ ID NO: 13491 - DNA, 20 bp, synthetic construct
  misc_feature 1..20: note = Description of Artificial Sequence: Synthetic oligonucleotide
  misc_feature 1..20: note = Target: SCN10A; (-) strand; PAM type: NRG; PAM sequence: AAG
  source 1..20: mol_type = other DNA
tgcctttggtccctggagat

SEQ ID NO: 13492 - DNA, 20 bp, synthetic construct
  misc_feature 1..20: note = Description of Artificial Sequence: Synthetic oligonucleotide
  misc_feature 1..20: note = Target: SCN10A; (-) strand; PAM type: NRG; PAM sequence: GAG
  source 1..20: mol_type = other DNA
ggacctgcctttggtccctg

SEQ ID NO: 13493 - DNA, 20 bp, synthetic construct
  misc_feature 1..20: note = Description of Artificial Sequence: Synthetic oligonucleotide
  misc_feature 1..20: note = Target: SCN10A; (-) strand; PAM type: NRG; PAM sequence: TGG
  source 1..20: mol_type = other DNA
atggacctgcctttggtccc

SEQ ID NO: 13494 - DNA, 20 bp, synthetic construct
  misc_feature 1..20: note = Description of Artificial Sequence: Synthetic oligonucleotide
  misc_feature 1..20: note = Target: SCN10A; (-) strand; PAM type: NRG; PAM sequence: TGG
  source 1..20: mol_type = other DNA
gatccagatggacctgcctt

SEQ ID NO: 13495 - DNA, 20 bp, synthetic construct
  misc_feature 1..20: note = Description of Artificial Sequence: Synthetic oligonucleotide
  misc_feature 1..20: note = Target: SCN10A; (-) strand; PAM type: NRG; PAM sequence: TGG
  source 1..20: mol_type = other DNA
tcgaaatatactgatccaga

SEQ ID NO: 13496 - DNA, 20 bp, synthetic construct
  misc_feature 1..20: note = Description of Artificial Sequence: Synthetic oligonucleotide
  misc_feature 1..20: note = Target: SCN10A; (-) strand; PAM type: NRG; PAM sequence: CAG
  source 1..20: mol_type = other DNA
ccaatcgaaatatactgatc

SEQ ID NO: 13497 - DNA, 20 bp, synthetic construct
  misc_feature 1..20: note = Description of Artificial Sequence: Synthetic oligonucleotide
  misc_feature 1..20: note = Target: SCN10A; (-) strand; PAM type: NRG; PAM sequence: GAG
  source 1..20: mol_type = other DNA
gacactctctctggtcccct

SEQ ID NO: 13498 - DNA, 20 bp, synthetic construct
  misc_feature 1..20: note = Description of Artificial Sequence: Synthetic oligonucleotide
  misc_feature 1..20: note = Target: SCN10A; (-) strand; PAM type: NRG; PAM sequence: TGG
  source 1..20: mol_type = other DNA
gactttgcagacactctctc

SEQ ID NO: 13499 - DNA, 20 bp, synthetic construct
  misc_feature 1..20: note = Description of Artificial Sequence: Synthetic oligonucleotide
  misc_feature 1..20: note = Target: SCN10A; (-) strand; PAM type: NRG; PAM sequence: CAG
  source 1..20: mol_type = other DNA
ttctgctctctcggactttg

SEQ ID NO: 13500 - DNA, 20 bp, synthetic construct
  misc_feature 1..20: note = Description of Artificial Sequence: Synthetic oligonucleotide
  misc_feature 1..20: note = Target: SCN10A; (-) strand; PAM type: NRG; PAM sequence: CGG
  source 1..20: mol_type = other DNA
tattaccttttctgctctct

SEQ ID NO: 13501 - DNA, 20 bp, synthetic construct
  misc_feature 1..20: note = Description of Artificial Sequence: Synthetic oligonucleotide
  misc_feature 1..20: note = Target: SCN10A; (-) strand; PAM type: NRG; PAM sequence: CAG
  source 1..20: mol_type = other DNA
agtttgacccagaggccact

SEQ ID NO: 13502 - DNA, 20 bp, synthetic construct
  misc_feature 1..20: note = Description of Artificial Sequence: Synthetic oligonucleotide
  misc_feature 1..20: note = Target: SCN10A; (-) strand; PAM type: NRG; PAM sequence: AGG
  source 1..20: mol_type = other DNA
ctgggagaagtttgacccag

SEQ ID NO: 13503 - DNA, 20 bp, synthetic construct
  misc_feature 1..20: note = Description of Artificial Sequence: Synthetic oligonucleotide
  misc_feature 1..20: note = Target: SCN10A; (-) strand; PAM type: NRG; PAM sequence: GAG
  source 1..20: mol_type = other DNA
cctgggagaagtttgaccca

SEQ ID NO: 13504 - DNA, 20 bp, synthetic construct
  misc_feature 1..20: note = Description of Artificial Sequence: Synthetic oligonucleotide
  misc_feature 1..20: note = Target: SCN10A; (-) strand; PAM type: NRG; PAM sequence: CAG
  source 1..20: mol_type = other DNA
gacctgggagaagtttgacc

SEQ ID NO: 13505 - DNA, 20 bp, synthetic construct
  misc_feature 1..20: note = Description of Artificial Sequence: Synthetic oligonucleotide
  misc_feature 1..20: note = Target: SCN10A; (-) strand; PAM type: NRG; PAM sequence: AAG
  source 1..20: mol_type = other DNA
tgttctatgagacctgggag

SEQ ID NO: 13506 - DNA, 20 bp, synthetic construct
  misc_feature 1..20: note = Description of Artificial Sequence: Synthetic oligonucleotide
  misc_feature 1..20: note = Target: SCN10A; (-) strand; PAM type: NRG; PAM sequence: GAG
  source 1..20: mol_type = other DNA
acatgttctatgagacctgg

SEQ ID NO: 13507 - DNA, 20 bp, synthetic construct
  misc_feature 1..20: note = Description of Artificial Sequence: Synthetic oligonucleotide
  misc_feature 1..20: note = Target: SCN10A; (-) strand; PAM type: NRG; PAM sequence: GGG
  source 1..20: mol_type = other DNA
tgacatgttctatgagacct

SEQ ID NO: 13508 - DNA, 20 bp, synthetic construct
  misc_feature 1..20: note = Description of Artificial Sequence: Synthetic oligonucleotide
  misc_feature 1..20: note = Target: SCN10A; (-) strand; PAM type: NRG; PAM sequence: TGG
  source 1..20: mol_type = other DNA
ttgacatgttctatgagacc

SEQ ID NO: 13509 - DNA, 20 bp, synthetic construct
  misc_feature 1..20: note = Description of Artificial Sequence: Synthetic oligonucleotide
  misc_feature 1..20: note = Target: SCN10A; (-) strand; PAM type: NRG; PAM sequence: GAG
  source 1..20: mol_type = other DNA
acgactttgacatgttctat

SEQ ID NO: 13510 - DNA, 20 bp, synthetic construct
  misc_feature 1..20: note = Description of Artificial Sequence: Synthetic oligonucleotide
  misc_feature 1..20: note = Target: SCN10A; (-) strand; PAM type: NRG; PAM sequence: AGG
  source 1..20: mol_type = other DNA
gagcactgagcccctgagtg

SEQ ID NO: 13511 - DNA, 20 bp, synthetic construct
  misc_feature 1..20: note = Description of Artificial Sequence: Synthetic oligonucleotide
  misc_feature 1..20: note = Target: SCN10A; (-) strand; PAM type: NRG; PAM sequence: GAG
  source 1..20: mol_type = other DNA
agagcactgagcccctgagt

SEQ ID NO: 13512 - DNA, 20 bp, synthetic construct
  misc_feature 1..20: note = Description of Artificial Sequence: Synthetic oligonucleotide
  misc_feature 1..20: note = Target: SCN10A; (-) strand; PAM type: NRG; PAM sequence: GAG
  source 1..20: mol_type = other DNA
gaggagagcactgagcccct

SEQ ID NO: 13513 - DNA, 20 bp, synthetic construct
  misc_feature 1..20: note = Description of Artificial Sequence: Synthetic oligonucleotide
  misc_feature 1..20: note = Target: SCN10A; (-) strand; PAM type: NRG; PAM sequence: GAG
  source 1..20: mol_type = other DNA
tggccacggaggagagcact

SEQ ID NO: 13514 - DNA, 20 bp, synthetic construct
  misc_feature 1..20: note = Description of Artificial Sequence: Synthetic oligonucleotide
  misc_feature 1..20: note = Target: SCN10A; (-) strand; PAM type: NRG; PAM sequence: GAG
  source 1..20: mol_type = other DNA
ttcaatgtggccacggagga

SEQ ID NO: 13515 - DNA, 20 bp, synthetic construct
  misc_feature 1..20: note = Description of Artificial Sequence: Synthetic oligonucleotide
  misc_feature 1..20: note = Target: SCN10A; (-) strand; PAM type: NRG; PAM sequence: GAG
  source 1..20: mol_type = other DNA
acttcaatgtggccacggag

SEQ ID NO: 13516 - DNA, 20 bp, synthetic construct
  misc_feature 1..20: note = Description of Artificial Sequence: Synthetic oligonucleotide
  misc_feature 1..20: note = Target: SCN10A; (-) strand; PAM type: NRG; PAM sequence: AGG
  source 1..20: mol_type = other DNA
gaacttcaatgtggccacgg

SEQ ID NO: 13517 - DNA, 20 bp, synthetic construct
  misc_feature 1..20: note = Description of Artificial Sequence: Synthetic oligonucleotide
  misc_feature 1..20: note = Target: SCN10A; (-) strand; PAM type: NRG; PAM sequence: GAG
  source 1..20: mol_type = other DNA
agaacttcaatgtggccacg

SEQ ID NO: 13518 - DNA, 20 bp, synthetic construct
  misc_feature 1..20: note = Description of Artificial Sequence: Synthetic oligonucleotide
  misc_feature 1..20: note = Target: SCN10A; (-) strand; PAM type: NRG; PAM sequence: CGG
  source 1..20: mol_type = other DNA
ggagaacttcaatgtggcca

SEQ ID NO: 13519 - DNA, 20 bp, synthetic construct
  misc_feature 1..20: note = Description of Artificial Sequence: Synthetic oligonucleotide
  misc_feature 1..20: note = Target: SCN10A; (-) strand; PAM type: NRG; PAM sequence: TGG
  source 1..20: mol_type = other DNA
gattctggagaacttcaatg

SEQ ID NO: 13520 - DNA, 20 bp, synthetic construct
  misc_feature 1..20: note = Description of Artificial Sequence: Synthetic oligonucleotide
  misc_feature 1..20: note = Target: SCN10A; (-) strand; PAM type: NRG; PAM sequence: GAG
  source 1..20: mol_type = other DNA
tgtacattgcagtgattctg

SEQ ID NO: 13521 - DNA, 20 bp, synthetic construct
  misc_feature 1..20: note = Description of Artificial Sequence: Synthetic oligonucleotide
  misc_feature 1..20: note = Target: SCN10A; (-) strand; PAM type: NRG; PAM sequence: TGG
  source 1..20: mol_type = other DNA
catgtacattgcagtgattc

SEQ ID NO: 13522 - DNA, 20 bp, synthetic construct
  misc_feature 1..20: note = Description of Artificial Sequence: Synthetic oligonucleotide
  misc_feature 1..20: note = Target: SCN10A; (-) strand; PAM type: NRG; PAM sequence: CAG
  source 1..20: mol_type = other DNA
catggtcaacatgtacattg

SEQ ID NO: 13523 - DNA, 20 bp, synthetic construct
  misc_feature 1..20: note = Description of Artificial Sequence: Synthetic oligonucleotide
  misc_feature 1..20: note = Target: SCN10A; (-) strand; PAM type: NRG; PAM sequence: TGG
  source 1..20: mol_type = other DNA
catcatctccttcctcatca

SEQ ID NO: 13524 - DNA, 20 bp, synthetic construct
  misc_feature 1..20: note = Description of Artificial Sequence: Synthetic oligonucleotide
  misc_feature 1..20: note = Target: SCN10A; (-) strand; PAM type: NRG; PAM sequence: AGG
  source 1..20: mol_type = other DNA
gactgtgggagcccagccgt

SEQ ID NO: 13525 - DNA, 20 bp, synthetic construct
  misc_feature 1..20: note = Description of Artificial Sequence: Synthetic oligonucleotide
  misc_feature 1..20: note = Target: SCN10A; (-) strand; PAM type: NRG; PAM sequence: TAG
  source 1..20: mol_type = other DNA
ggactgtgggagcccagccg

SEQ ID NO: 13526 - DNA, 20 bp, synthetic construct
  misc_feature 1..20: note = Description of Artificial Sequence: Synthetic oligonucleotide
  misc_feature 1..20: note = Target: SCN10A; (-) strand; PAM type: NRG; PAM sequence: CAG
  source 1..20: mol_type = other DNA
cagaggggactgtgggagcc

SEQ ID NO: 13527 - DNA, 20 bp, synthetic construct
  misc_feature 1..20: note = Description of Artificial Sequence: Synthetic oligonucleotide
  misc_feature 1..20: note = Target: SCN10A; (-) strand; PAM type: NRG; PAM sequence: GAG
  source 1..20: mol_type = other DNA
ggcaccagaggggactgtgg

SEQ ID NO: 13528 - DNA, 20 bp, synthetic construct
  misc_feature 1..20: note = Description of Artificial Sequence: Synthetic oligonucleotide
  misc_feature 1..20: note = Target: SCN10A; (-) strand; PAM type: NRG; PAM sequence: GGG
  source 1..20: mol_type = other DNA
atggcaccagaggggactgt

SEQ ID NO: 13529 - DNA, 20 bp, synthetic construct
  misc_feature 1..20: note = Description of Artificial Sequence: Synthetic oligonucleotide
  misc_feature 1..20: note = Target: SCN10A; (-) strand; PAM type: NRG; PAM sequence: TGG
  source 1..20: mol_type = other DNA
aatggcaccagaggggactg

SEQ ID NO: 13530 - DNA, 20 bp, synthetic construct
  misc_feature 1..20: note = Description of Artificial Sequence: Synthetic oligonucleotide
  misc_feature 1..20: note = Target: SCN10A; (-) strand; PAM type: NRG; PAM sequence: GGG
  source 1..20: mol_type = other DNA
caacagcaatggcaccagag

SEQ ID NO: 13531 - DNA, 20 bp, synthetic construct
  misc_feature 1..20: note = Description of Artificial Sequence: Synthetic oligonucleotide
  misc_feature 1..20: note = Target: SCN10A; (-) strand; PAM type: NRG; PAM sequence: GGG
  source 1..20: mol_type = other DNA
ccaacagcaatggcaccaga

SEQ ID NO: 13532 - DNA, 20 bp, synthetic construct
  misc_feature 1..20: note = Description of Artificial Sequence: Synthetic oligonucleotide
  misc_feature 1..20: note = Target: SCN10A; (-) strand; PAM type: NRG; PAM sequence: AGG
  source 1..20: mol_type = other DNA
cccaacagcaatggcaccag

SEQ ID NO: 13533 - DNA, 20 bp, synthetic construct
  misc_feature 1..20: note = Description of Artificial Sequence: Synthetic oligonucleotide
  misc_feature 1..20: note = Target: SCN10A; (-) strand; PAM type: NRG; PAM sequence: GAG
  source 1..20: mol_type = other DNA
gcccaacagcaatggcacca

SEQ ID NO: 13534 - DNA, 20 bp, synthetic construct
  misc_feature 1..20: note = Description of Artificial Sequence: Synthetic oligonucleotide
  misc_feature 1..20: note = Target: SCN10A; (-) strand; PAM type: NRG; PAM sequence: CAG
  source 1..20: mol_type = other DNA
ctgcccaacagcaatggcac

SEQ ID NO: 13535 - DNA, 20 bp, synthetic construct
  misc_feature 1..20: note = Description of Artificial Sequence: Synthetic oligonucleotide
  misc_feature 1..20: note = Target: SCN10A; (-) strand; PAM type: NRG; PAM sequence: TGG
  source 1..20: mol_type = other DNA
cccaatctgcccaacagcaa

SEQ ID NO: 13536 - DNA, 20 bp, synthetic construct
  misc_feature 1..20: note = Description of Artificial Sequence: Synthetic oligonucleotide
  misc_feature 1..20: note = Target: SCN10A; (-) strand; PAM type: NRG; PAM sequence: CAG
  source 1..20: mol_type = other DNA
tgtgaccccaatctgcccaa

SEQ ID NO: 13537 - DNA, 20 bp, synthetic construct
  misc_feature 1..20: note = Description of Artificial Sequence: Synthetic oligonucleotide
  misc_feature 1..20: note = Target: SCN10A; (-) strand; PAM type: NRG; PAM sequence: GGG
  source 1..20: mol_type = other DNA
tcagccccatcctcaacaca

SEQ ID NO: 13538 - DNA, 20 bp, synthetic construct
  misc_feature 1..20: note = Description of Artificial Sequence: Synthetic oligonucleotide
  misc_feature 1..20: note = Target: SCN10A; (-) strand; PAM type: NRG; PAM sequence: AGG
  source 1..20: mol_type = other DNA
ctcagccccatcctcaacac

SEQ ID NO: 13539 - DNA, 20 bp, synthetic construct
  misc_feature 1..20: note = Description of Artificial Sequence: Synthetic oligonucleotide
  misc_feature 1..20: note = Target: SCN10A; (-) strand; PAM type: NRG; PAM sequence: CAG
  source 1..20: mol_type = other DNA
cctcagccccatcctcaaca

SEQ ID NO: 13540 - DNA, 20 bp, synthetic construct
  misc_feature 1..20: note = Description of Artificial Sequence: Synthetic oligonucleotide
  misc_feature 1..20: note = Target: SCN10A; (-) strand; PAM type: NRG; PAM sequence: CAG
  source 1..20: mol_type = other DNA
gccggctgggatggcctcct

SEQ ID NO: 13541 - DNA, 20 bp, synthetic construct
  misc_feature 1..20: note = Description of Artificial Sequence: Synthetic oligonucleotide
  misc_feature 1..20: note = Target: SCN10A; (-) strand; PAM type: NRG; PAM sequence: TGG
  source 1..20: mol_type = other DNA
accacgtcggccggctggga

SEQ ID NO: 13542 - DNA, 20 bp, synthetic construct
  misc_feature 1..20: note = Description of Artificial Sequence: Synthetic oligonucleotide
  misc_feature 1..20: note = Target: SCN10A; (-) strand; PAM type: NRG; PAM sequence: GGG
  source 1..20: mol_type = other DNA
gattaccacgtcggccggct

SEQ ID NO: 13543 - DNA, 20 bp, synthetic construct
  misc_feature 1..20: note = Description of Artificial Sequence: Synthetic oligonucleotide
  misc_feature 1..20: note = Target: SCN10A; (-) strand; PAM type: NRG; PAM sequence: TGG
  source 1..20: mol_type = other DNA
agattaccacgtcggccggc

SEQ ID NO: 13544 - DNA, 20 bp, synthetic construct
  misc_feature 1..20: note = Description of Artificial Sequence: Synthetic oligonucleotide
  misc_feature 1..20: note = Target: SCN10A; (-) strand; PAM type: NRG; PAM sequence: CGG
  source 1..20: mol_type = other DNA
ttccagattaccacgtcggc

SEQ ID NO: 13545 - DNA, 20 bp, synthetic construct
  misc_feature 1..20: note = Description of Artificial Sequence: Synthetic oligonucleotide
  misc_feature 1..20: note = Target: SCN10A; (-) strand; PAM type: NRG; PAM sequence: CGG
  source 1..20: mol_type = other DNA
cctcttccagattaccacgt

SEQ ID NO: 13546 - DNA, 20 bp, synthetic construct
  misc_feature 1..20: note = Description of Artificial Sequence: Synthetic oligonucleotide
  misc_feature 1..20: note = Target: SCN10A; (-) strand; PAM type: NRG; PAM sequence: CAG
  source 1..20: mol_type = other DNA
acagcatgctgtgcctcttc

SEQ ID NO: 13547 - DNA, 20 bp, synthetic construct
  misc_feature 1..20: note = Description of Artificial Sequence: Synthetic oligonucleotide
  misc_feature 1..20: note = Target: SCN10A; (-) strand; PAM type: NRG; PAM sequence: CAG
  source 1..20: mol_type = other DNA
aacttccagaccttcgccaa

SEQ ID NO: 13548 - DNA, 20 bp, synthetic construct
  misc_feature 1..20: note = Description of Artificial Sequence: Synthetic oligonucleotide
  misc_feature 1..20: note = Target: SCN10A; (-) strand; PAM type: NRG; PAM sequence: CAG
  source 1..20: mol_type = other DNA
tcgacgacatgttcaacttc

SEQ ID NO: 13549 - DNA, 20 bp, synthetic construct
  misc_feature 1..20: note = Description of Artificial Sequence: Synthetic oligonucleotide
  misc_feature 1..20: note = Target: SCN10A; (-) strand; PAM type: NRG; PAM sequence: TGG
  source 1..20: mol_type = other DNA
ccccatgtgaggtgggaggc

SEQ ID NO: 13550 - DNA, 20 bp, synthetic construct
  misc_feature 1..20: note = Description of Artificial Sequence: Synthetic oligonucleotide
  misc_feature 1..20: note = Target: SCN10A; (-) strand; PAM type: NRG; PAM sequence: AGG
  source 1..20: mol_type = other DNA
ctttccccatgtgaggtggg

SEQ ID NO: 13551 - DNA, 20 bp, synthetic construct
  misc_feature 1..20: note = Description of Artificial Sequence: Synthetic oligonucleotide
  misc_feature 1..20: note = Target: SCN10A; (-) strand; PAM type: NRG; PAM sequence: GAG
  source 1..20: mol_type = other DNA
gctttccccatgtgaggtgg

SEQ ID NO: 13552 - DNA, 20 bp, synthetic construct
  misc_feature 1..20: note = Description of Artificial Sequence: Synthetic oligonucleotide
  misc_feature 1..20: note = Target: SCN10A; (-) strand; PAM type: NRG; PAM sequence: GGG
  source 1..20: mol_type = other DNA
cagctttccccatgtgaggt

SEQ ID NO: 13553 - DNA, 20 bp, synthetic construct
  misc_feature 1..20: note = Description of Artificial Sequence: Synthetic oligonucleotide
  misc_feature 1..20: note = Target: SCN10A; (-) strand; PAM type: NRG; PAM sequence: TGG
  source 1..20: mol_type = other DNA
ccagctttccccatgtgagg

SEQ ID NO: 13554 - DNA, 20 bp, synthetic construct
  misc_feature 1..20: note = Description of Artificial Sequence: Synthetic oligonucleotide
  misc_feature 1..20: note = Target: SCN10A; (-) strand; PAM type: NRG; PAM sequence: AGG
  source 1..20: mol_type = other DNA
tgtccagctttccccatgtg

SEQ ID NO: 13555 - DNA, 20 bp, synthetic construct
  misc_feature 1..20: note = Description of Artificial Sequence: Synthetic oligonucleotide
  misc_feature 1..20: note = Target: SCN10A; (-) strand; PAM type: NRG; PAM sequence: GAG
  source 1..20: mol_type = other DNA
atgtccagctttccccatgt

SEQ ID NO: 13556 - DNA, 20 bp, synthetic construct
  misc_feature 1..20: note = Description of Artificial Sequence: Synthetic oligonucleotide
  misc_feature 1..20: note = Target: SCN10A; (-) strand; PAM type: NRG; PAM sequence: CAG
  source 1..20: mol_type = other DNA
tactctatcttcggtatgtc

SEQ ID NO: 13557 - DNA, 20 bp, synthetic construct
  misc_feature 1..20: note = Description of Artificial Sequence: Synthetic oligonucleotide
  misc_feature 1..20: note = Target: SCN10A; (-) strand; PAM type: NRG; PAM sequence: CGG
  source 1..20: mol_type = other DNA
atgttcatctactctatctt

SEQ ID NO: 13558 - DNA, 20 bp, synthetic construct
  misc_feature 1..20: note = Description of Artificial Sequence: Synthetic oligonucleotide
  misc_feature 1..20: note = Target: SCN10A; (-) strand; PAM type: NRG; PAM sequence: GGG
  source 1..20: mol_type = other DNA
tgcctgccctcttcaacatc

SEQ ID NO: 13559 - DNA, 20 bp, synthetic construct
  misc_feature 1..20: note = Description of Artificial Sequence: Synthetic oligonucleotide
  misc_feature 1..20: note = Target: SCN10A; (-) strand; PAM type: NRG; PAM sequence: CGG
  source 1..20: mol_type = other DNA
ctgcctgccctcttcaacat

SEQ ID NO: 13560 - DNA, 20 bp, synthetic construct
  misc_feature 1..20: note = Description of Artificial Sequence: Synthetic oligonucleotide
  misc_feature 1..20: note = Target: SCN10A; (-) strand; PAM type: NRG; PAM sequence: GGG
  source 1..20: mol_type = other DNA
gactgatccgagcggccaag

SEQ ID NO: 13561 - DNA, 20 bp, synthetic construct
  misc_feature 1..20: note = Description of Artificial Sequence: Synthetic oligonucleotide
  misc_feature 1..20: note = Target: SCN10A; (-) strand; PAM type: NRG; PAM sequence: GGG
  source 1..20: mol_type = other DNA
agactgatccgagcggccaa

SEQ ID NO: 13562 - DNA, 20 bp, synthetic construct
  misc_feature 1..20: note = Description of Artificial Sequence: Synthetic oligonucleotide
  misc_feature 1..20: note = Target: SCN10A; (-) strand; PAM type: NRG; PAM sequence: AGG
  source 1..20: mol_type = other DNA
cagactgatccgagcggcca

SEQ ID NO: 13563 - DNA, 20 bp, synthetic construct
  misc_feature 1..20: note = Description of Artificial Sequence: Synthetic oligonucleotide
  misc_feature 1..20: note = Target: SCN10A; (-) strand; PAM type: NRG; PAM sequence: AAG
  source 1..20: mol_type = other DNA
tcagactgatccgagcggcc

SEQ ID NO: 13564 - DNA, 20 bp, synthetic construct
  misc_feature 1..20: note = Description of Artificial Sequence: Synthetic oligonucleotide
  misc_feature 1..20: note = Target: SCN10A; (-) strand; PAM type: NRG; PAM sequence: CGG
  source 1..20: mol_type = other DNA
catcctcagactgatccgag

SEQ ID NO: 13565 - DNA, 20 bp, synthetic construct
  misc_feature 1..20: note = Description of Artificial Sequence: Synthetic oligonucleotide
  misc_feature 1..20: note = Target: SCN10A; (-) strand; PAM type: NRG; PAM sequence: GAG
  source 1..20: mol_type = other DNA
ccgcatcctcagactgatcc

SEQ ID NO: 13566 - DNA, 20 bp, synthetic construct
  misc_feature 1..20: note = Description of Artificial Sequence: Synthetic oligonucleotide
  misc_feature 1..20: note = Target: SCN10A; (-) strand; PAM type: NRG; PAM sequence: CAG
  source 1..20: mol_type = other DNA
gcccgaattggccgcatcct

SEQ ID NO: 13567 - DNA, 20 bp, synthetic construct
  misc_feature 1..20: note = Description of Artificial Sequence: Synthetic oligonucleotide
  misc_feature 1..20: note = Target: SCN10A; (-) strand; PAM type: NRG; PAM sequence: TGG
  source 1..20: mol_type = other DNA
gtcatccgcctggcccgaat

SEQ ID NO: 13568 - DNA, 20 bp, synthetic construct
  misc_feature 1..20: note = Description of Artificial Sequence: Synthetic oligonucleotide
  misc_feature 1..20: note = Target: SCN10A; (-) strand; PAM type: NRG; PAM sequence: TGG
  source 1..20: mol_type = other DNA
gctcttcagagtcatccgcc

SEQ ID NO: 13569 - DNA, 20 bp, synthetic construct
  misc_feature 1..20: note = Description of Artificial Sequence: Synthetic oligonucleotide
  misc_feature 1..20: note = Target: SCN10A; (-) strand; PAM type: NRG; PAM sequence: GAG
  source 1..20: mol_type = other DNA
cttctccccaacgctcttca

SEQ ID NO: 13570 - DNA, 20 bp, synthetic construct
  misc_feature 1..20: note = Description of Artificial Sequence: Synthetic oligonucleotide
  misc_feature 1..20: note = Target: SCN10A; (-) strand; PAM type: NRG; PAM sequence: CAG
  source 1..20: mol_type = other DNA
tacttctccccaacgctctt

SEQ ID NO: 13571 - DNA, 20 bp, synthetic construct
  misc_feature 1..20: note = Description of Artificial Sequence: Synthetic oligonucleotide
  misc_feature 1..20: note = Target: SCN10A; (-) strand; PAM type: NRG; PAM sequence: AAG
  source 1..20: mol_type = other DNA
gcaattcttaagtcacttca

SEQ ID NO: 13572 - DNA, 20 bp, synthetic construct
  misc_feature 1..20: note = Description of Artificial Sequence: Synthetic oligonucleotide
  misc_feature 1..20: note = Target: SCN10A; (-) strand; PAM type: NRG; PAM sequence: AAG
  source 1..20: mol_type = other DNA
tgattttttctgcaattctt

SEQ ID NO: 13573 - DNA, 20 bp, synthetic construct
  misc_feature 1..20: note = Description of Artificial Sequence: Synthetic oligonucleotide
  misc_feature 1..20: note = Target: SCN10A; (-) strand; PAM type: NRG; PAM sequence: AGG
  source 1..20: mol_type = other DNA
taatttcttccttcttttaa

SEQ ID NO: 13574 - DNA, 20 bp, synthetic construct
  misc_feature 1..20: note = Description of Artificial Sequence: Synthetic oligonucleotide
  misc_feature 1..20: note = Target: SCN10A; (-) strand; PAM type: NRG; PAM sequence: AAG
  source 1..20: mol_type = other DNA
ataatttcttccttctttta

SEQ ID NO: 13575 - DNA, 20 bp, synthetic construct
  misc_feature 1..20: note = Description of Artificial Sequence: Synthetic oligonucleotide
  misc_feature 1..20: note = Target: SCN10A; (-) strand; PAM type: NRG; PAM sequence: TAG
  source 1..20: mol_type = other DNA
tcatggctggagatactaat

SEQ ID NO: 13576 - DNA, 20 bp, synthetic construct
  misc_feature 1..20: note = Description of Artificial Sequence: Synthetic oligonucleotide
  misc_feature 1..20: note = Target: SCN10A; (-) strand; PAM type: NRG; PAM sequence: GAG
  source 1..20: mol_type = other DNA
tttgtcacgtctcatggctg

SEQ ID NO: 13577 - DNA, 20 bp, synthetic construct
  misc_feature 1..20: note = Description of Artificial Sequence: Synthetic oligonucleotide
  misc_feature 1..20: note = Target: SCN10A; (-) strand; PAM type: NRG; PAM sequence: TGG
  source 1..20: mol_type = other DNA
actttgtcacgtctcatggc

SEQ ID NO: 13578 - DNA, 20 bp, synthetic construct
  misc_feature 1..20: note = Description of Artificial Sequence: Synthetic oligonucleotide
  misc_feature 1..20: note = Target: SCN10A; (-) strand; PAM type: NRG; PAM sequence: TGG
  source 1..20: mol_type = other DNA
gccaactttgtcacgtctca

SEQ ID NO: 13579 - DNA, 20 bp, synthetic construct
  misc_feature 1..20: note = Description of Artificial Sequence: Synthetic oligonucleotide
  misc_feature 1..20: note = Target: SCN10A; (-) strand; PAM type: NRG; PAM sequence: CAG
  source 1..20: mol_type = other DNA
agcaaagcagagtgtcatca

SEQ ID NO: 13580 - DNA, 20 bp, synthetic construct
  misc_feature 1..20: note = Description of Artificial Sequence: Synthetic oligonucleotide
  misc_feature 1..20: note = Target: SCN10A; (-) strand; PAM type: NRG; PAM sequence: GAG
  source 1..20: mol_type = other DNA
agtctataccaagcaaagca

SEQ ID NO: 13581 - DNA, 20 bp, synthetic construct
  misc_feature 1..20: note = Description of Artificial Sequence: Synthetic oligonucleotide
  misc_feature 1..20: note = Target: SCN10A; (-) strand; PAM type: NRG; PAM sequence: CAG
  source 1..20: mol_type = other DNA
gcagtctataccaagcaaag

SEQ ID NO: 13582 - DNA, 20 bp, synthetic construct
  misc_feature 1..20: note = Description of Artificial Sequence: Synthetic oligonucleotide
  misc_feature 1..20: note = Target: SCN10A; (-) strand; PAM type: NRG; PAM sequence: AAG
  source 1..20: mol_type = other DNA
gtggcagtctataccaagca

SEQ ID NO: 13583 - DNA, 20 bp, synthetic construct
  misc_feature 1..20: note = Description of Artificial Sequence: Synthetic oligonucleotide
  misc_feature 1..20: note = Target: SCN10A; (-) strand; PAM type: NRG; PAM sequence: AAG
  source 1..20: mol_type = other DNA
cccaagtggcagtctatacc

SEQ ID NO: 13584 - DNA, 20 bp, synthetic construct
  misc_feature 1..20: note = Description of Artificial Sequence: Synthetic oligonucleotide
  misc_feature 1..20: note = Target: SCN10A; (-) strand; PAM type: NRG; PAM sequence: CAG
  source 1..20: mol_type = other DNA
aaatgtggatgcccaagtgg

SEQ ID NO: 13585 - DNA, 20 bp, synthetic construct
  misc_feature 1..20: note = Description of Artificial Sequence: Synthetic oligonucleotide
  misc_feature 1..20: note = Target: SCN10A; (-) strand; PAM type: NRG; PAM sequence: TGG
  source 1..20: mol_type = other DNA
ctcaaatgtggatgcccaag

SEQ ID NO: 13586 - DNA, 20 bp, synthetic construct
  misc_feature 1..20: note = Description of Artificial Sequence: Synthetic oligonucleotide
  misc_feature 1..20: note = Target: SCN10A; (-) strand; PAM type: NRG; PAM sequence: AAG
  source 1..20: mol_type = other DNA
gtcctcaaatgtggatgccc

SEQ ID NO: 13587 - DNA, 20 bp, synthetic construct
  misc_feature 1..20: note = Description of Artificial Sequence: Synthetic oligonucleotide
  misc_feature 1..20: note = Target: SCN10A; (-) strand; PAM type: NRG; PAM sequence: TGG
  source 1..20: mol_type = other DNA
gggcccagagtcctcaaatg

SEQ ID NO: 13588 - DNA, 20 bp, synthetic construct
  misc_feature 1..20: note = Description of Artificial Sequence: Synthetic oligonucleotide
  misc_feature 1..20: note = Target: SCN10A; (-) strand; PAM type: NRG; PAM sequence: GAG
  source 1..20: mol_type = other DNA
tgccaggctctgagggccca

SEQ ID NO: 13589 - DNA, 20 bp, synthetic construct
  misc_feature 1..20: note = Description of Artificial Sequence: Synthetic oligonucleotide
  misc_feature 1..20: note = Target: SCN10A; (-) strand; PAM type: NRG; PAM sequence: CAG
  source 1..20: mol_type = other DNA
catgccaggctctgagggcc

SEQ ID NO: 13590 - DNA, 20 bp, synthetic construct
  misc_feature 1..20: note = Description of Artificial Sequence: Synthetic oligonucleotide
  misc_feature 1..20: note = Target: SCN10A; (-) strand; PAM type: NRG; PAM sequence: GGG
  source 1..20: mol_type = other DNA
cctaccatgccaggctctga

SEQ ID NO: 13591 - DNA, 20 bp, synthetic construct
  misc_feature 1..20: note = Description of Artificial Sequence: Synthetic oligonucleotide
  misc_feature 1..20: note = Target: SCN10A; (-) strand; PAM type: NRG; PAM sequence: AGG
  source 1..20: mol_type = other DNA
acctaccatgccaggctctg

SEQ ID NO: 13592 - DNA, 20 bp, synthetic construct
  misc_feature 1..20: note = Description of Artificial Sequence: Synthetic oligonucleotide
  misc_feature 1..20: note = Target: SCN10A; (-) strand; PAM type: NRG; PAM sequence: GAG
  source 1..20: mol_type = other DNA
tacctaccatgccaggctct

SEQ ID NO: 13593 - DNA, 20 bp, synthetic construct
  misc_feature 1..20: note = Description of Artificial Sequence: Synthetic oligonucleotide
  misc_feature 1..20: note = Target: SCN10A; (-) strand; PAM type: NRG; PAM sequence: AGG
  source 1..20: mol_type = other DNA
tttgtgctacctaccatgcc

SEQ ID NO: 13594 - DNA, 20 bp, synthetic construct
  misc_feature 1..20: note = Description of Artificial Sequence: Synthetic oligonucleotide
  misc_feature 1..20: note = Target: SCN10A; (-) strand; PAM type: NRG; PAM sequence: CAG
  source 1..20: mol_type = other DNA
ctttgtgctacctaccatgc

SEQ ID NO: 13595 - DNA, 20 bp, synthetic construct
  misc_feature 1..20: note = Description of Artificial Sequence: Synthetic oligonucleotide
  misc_feature 1..20: note = Target: SCN10A; (-) strand; PAM type: NRG; PAM sequence: GAG
  source 1..20: mol_type = other DNA
ttatgcaatgggcatttact

SEQ ID NO: 13596 - DNA, 20 bp, synthetic construct
  misc_feature 1..20: note = Description of Artificial Sequence: Synthetic oligonucleotide
  misc_feature 1..20: note = Target: SCN10A; (-) strand; PAM type: NRG; PAM sequence: GGG
  source 1..20: mol_type = other DNA
gaagagaggacttatgcaat

SEQ ID NO: 13597 - DNA, 20 bp, synthetic construct
  misc_feature 1..20: note = Description of Artificial Sequence: Synthetic oligonucleotide
  misc_feature 1..20: note = Target: SCN10A; (-) strand; PAM type: NRG; PAM sequence: TGG
  source 1..20: mol_type = other DNA
ggaagagaggacttatgcaa

SEQ ID NO: 13598 - DNA, 20 bp, synthetic construct
  misc_feature 1..20: note = Description of Artificial Sequence: Synthetic oligonucleotide
  misc_feature 1..20: note = Target: SCN10A; (-) strand; PAM type: NRG; PAM sequence: AGG
  source 1..20: mol_type = other DNA
gtaagacggaggaggaagag

SEQ ID NO: 13599 - DNA, 20 bp, synthetic construct
  misc_feature 1..20: note = Description of Artificial Sequence: Synthetic oligonucleotide
  misc_feature 1..20: note = Target: SCN10A; (-) strand; PAM type: NRG; PAM sequence: GAG
  source 1..20: mol_type = other DNA
ggtaagacggaggaggaaga

SEQ ID NO: 13600 - DNA, 20 bp, synthetic construct
  misc_feature 1..20: note = Description of Artificial Sequence: Synthetic oligonucleotide
  misc_feature 1..20: note = Target: SCN10A; (-) strand; PAM type: NRG; PAM sequence: GAG
  source 1..20: mol_type = other DNA
agggtaagacggaggaggaa

SEQ ID NO: 13601 - DNA, 20 bp, synthetic construct
  misc_feature 1..20: note = Description of Artificial Sequence: Synthetic oligonucleotide
  misc_feature 1..20: note = Target: SCN10A; (-) strand; PAM type: NRG; PAM sequence: AAG
  source 1..20: mol_type = other DNA
gaagggtaagacggaggagg

SEQ ID NO: 13602 - DNA, 20 bp, synthetic construct
  misc_feature 1..20: note = Description of Artificial Sequence: Synthetic oligonucleotide
  misc_feature 1..20: note = Target: SCN10A; (-) strand; PAM type: NRG; PAM sequence: AGG
  source 1..20: mol_type = other DNA
taggaagggtaagacggagg

SEQ ID NO: 13603 - DNA, 20 bp, synthetic construct
  misc_feature 1..20: note = Description of Artificial Sequence: Synthetic oligonucleotide
  misc_feature 1..20: note = Target: SCN10A; (-) strand; PAM type: NRG; PAM sequence: GAG
  source 1..20: mol_type = other DNA
gtaggaagggtaagacggag

SEQ ID NO: 13604 - DNA, 20 bp, synthetic construct
  misc_feature 1..20: note = Description of Artificial Sequence: Synthetic oligonucleotide
  misc_feature 1..20: note = Target: SCN10A; (-) strand; PAM type: NRG; PAM sequence: AGG
  source 1..20: mol_type = other DNA
tggtaggaagggtaagacgg

SEQ ID NO: 13605 - DNA, 20 bp, synthetic construct
  misc_feature 1..20: note = Description of Artificial Sequence: Synthetic oligonucleotide
  misc_feature 1..20: note = Target: SCN10A; (-) strand; PAM type: NRG; PAM sequence: GAG
  source 1..20: mol_type = other DNA
atggtaggaagggtaagacg

SEQ ID NO: 13606 - DNA, 20 bp, synthetic construct
  misc_feature 1..20: note = Description of Artificial Sequence: Synthetic oligonucleotide
  misc_feature 1..20: note = Target: SCN10A; (-) strand; PAM type: NRG; PAM sequence: CGG
  source 1..20: mol_type = other DNA
acatggtaggaagggtaaga

SEQ ID NO: 13607 - DNA, 20 bp, synthetic construct
  misc_feature 1..20: note = Description of Artificial Sequence: Synthetic oligonucleotide
  misc_feature 1..20: note = Target: SCN10A; (-) strand; PAM type: NRG; PAM sequence: AAG
  source 1..20: mol_type = other DNA
gataacatggtaggaagggt

SEQ ID NO: 13608 - DNA, 20 bp, synthetic construct
  misc_feature 1..20: note = Description of Artificial Sequence: Synthetic oligonucleotide
  misc_feature 1..20: note = Target: SCN10A; (-) strand; PAM type: NRG; PAM sequence: GGG
  source 1..20: mol_type = other DNA
caaagataacatggtaggaa

SEQ ID NO: 13609 - DNA, 20 bp, synthetic construct
  misc_feature 1..20: note = Description of Artificial Sequence: Synthetic oligonucleotide
  misc_feature 1..20: note = Target: SCN10A; (-) strand; PAM type: NRG; PAM sequence: AGG
  source 1..20: mol_type = other DNA
gcaaagataacatggtagga

SEQ ID NO: 13610 - DNA, 20 bp, synthetic construct
  misc_feature 1..20: note = Description of Artificial Sequence: Synthetic oligonucleotide
  misc_feature 1..20: note = Target: SCN10A; (-) strand; PAM type: NRG; PAM sequence: AAG
  source 1..20: mol_type = other DNA
ggcaaagataacatggtagg

SEQ ID NO: 13611 - DNA, 20 bp, synthetic construct
  misc_feature 1..20: note = Description of Artificial Sequence: Synthetic oligonucleotide
  misc_feature 1..20: note = Target: SCN10A; (-) strand; PAM type: NRG; PAM sequence: AGG
  source 1..20: mol_type = other DNA
ggaggcaaagataacatggt

SEQ ID NO: 13612 - DNA, 20 bp, synthetic construct
  misc_feature 1..20: note = Description of Artificial Sequence: Synthetic oligonucleotide
  misc_feature 1..20: note = Target: SCN10A; (-) strand; PAM type: NRG; PAM sequence: TAG
  source 1..20: mol_type = other DNA
cggaggcaaagataacatgg

SEQ ID NO: 13613 - DNA, 20 bp, synthetic construct
  misc_feature 1..20: note = Description of Artificial Sequence: Synthetic oligonucleotide
  misc_feature 1..20: note = Target: SCN10A; (-) strand; PAM type: NRG; PAM sequence: TGG
  source 1..20: mol_type = other DNA
aggcggaggcaaagataaca

SEQ ID NO: 13614 - DNA, 20 bp, synthetic construct
  misc_feature 1..20: note = Description of Artificial Sequence: Synthetic oligonucleotide
  misc_feature 1..20: note = Target: SCN10A; (-) strand; PAM type: NRG; PAM sequence: AAG
  source 1..20: mol_type = other DNA
ggatattctaggcggaggca

SEQ ID NO: 13615 - DNA, 20 bp, synthetic construct
  misc_feature 1..20: note = Description of Artificial Sequence: Synthetic oligonucleotide
  misc_feature 1..20: note = Target: SCN10A; (-) strand; PAM type: NRG; PAM sequence: AGG
  source 1..20: mol_type = other DNA
caagaggatattctaggcgg

SEQ ID NO: 13616 - DNA, 20 bp, synthetic construct
  misc_feature 1..20: note = Description of Artificial Sequence: Synthetic oligonucleotide
  misc_feature 1..20: note = Target: SCN10A; (-) strand; PAM type: NRG; PAM sequence: GAG
  source 1..20: mol_type = other DNA
ccaagaggatattctaggcg

SEQ ID NO: 13617 - DNA, 20 bp, synthetic construct
  misc_feature 1..20: note = Description of Artificial Sequence: Synthetic oligonucleotide
  misc_feature 1..20: note = Target: SCN10A; (-) strand; PAM type: NRG; PAM sequence: CGG
  source 1..20: mol_type = other DNA
gaccaagaggatattctagg

SEQ ID NO: 13618 - DNA, 20 bp, synthetic construct
  misc_feature 1..20: note = Description of Artificial Sequence: Synthetic oligonucleotide
  misc_feature 1..20: note = Target: SCN10A; (-) strand; PAM type: NRG; PAM sequence: AGG
  source 1..20: mol_type = other DNA
gttgaccaagaggatattct

SEQ ID NO: 13619 - DNA, 20 bp, synthetic construct
  misc_feature 1..20: note = Description of Artificial Sequence: Synthetic oligonucleotide
  misc_feature 1..20: note = Target: SCN10A; (-) strand; PAM type: NRG; PAM sequence: TAG
  source 1..20: mol_type = other DNA
ggttgaccaagaggatattc

SEQ ID NO: 13620 - DNA, 20 bp, synthetic construct
  misc_feature 1..20: note = Description of Artificial Sequence: Synthetic oligonucleotide
  misc_feature 1..20: note = Target: SCN10A; (-) strand; PAM type: NRG; PAM sequence: AGG
  source 1..20: mol_type = other DNA
gactgtggaggttgaccaag

SEQ ID NO: 13621 - DNA, 20 bp, synthetic construct
  misc_feature 1..20: note = Description of Artificial Sequence: Synthetic oligonucleotide
  misc_feature 1..20: note = Target: SCN10A; (-) strand; PAM type: NRG; PAM sequence: GAG
  source 1..20: mol_type = other DNA
tgactgtggaggttgaccaa

SEQ ID NO: 13622 - DNA, 20 bp, synthetic construct
  misc_feature 1..20: note = Description of Artificial Sequence: Synthetic oligonucleotide
  misc_feature 1..20: note = Target: SCN10A; (-) strand; PAM type: NRG; PAM sequence: AAG
  source 1..20: mol_type = other DNA
tttgactgtggaggttgacc

SEQ ID NO: 13623 - DNA, 20 bp, synthetic construct
  misc_feature 1..20: note = Description of Artificial Sequence: Synthetic oligonucleotide
  misc_feature 1..20: note = Target: SCN10A; (-) strand; PAM type: NRG; PAM sequence: AGG
  source 1..20: mol_type = other DNA
agataagtttttgactgtgg

SEQ ID NO: 13624 - DNA, 20 bp, synthetic construct
  misc_feature 1..20: note = Description of Artificial Sequence: Synthetic oligonucleotide
  misc_feature 1..20: note = Target: SCN10A; (-) strand; PAM type: NRG; PAM sequence: GAG
  source 1..20: mol_type = other DNA
aagataagtttttgactgtg

SEQ ID NO: 13625 - DNA, 20 bp, synthetic construct
  misc_feature 1..20: note = Description of Artificial Sequence: Synthetic oligonucleotide
  misc_feature 1..20: note = Target: SCN10A; (-) strand; PAM type: NRG; PAM sequence: TGG
  source 1..20: mol_type = other DNA
agaagataagtttttgactg

SEQ ID NO: 13626 - DNA, 20 bp, synthetic construct
  misc_feature 1..20: note = Description of Artificial Sequence: Synthetic oligonucleotide
  misc_feature 1..20: note = Target: SCN10A; (-) strand; PAM type: NRG; PAM sequence: AAG
  source 1..20: mol_type = other DNA
tgaacttggctgcagaagat

SEQ ID NO: 13627 - DNA, 20 bp, synthetic construct
  misc_feature 1..20: note = Description of Artificial Sequence: Synthetic oligonucleotide
  misc_feature 1..20: note = Target: SCN10A; (-) strand; PAM type: NRG; PAM sequence: AAG
  source 1..20: mol_type = other DNA
ccagctgaacttggctgcag

SEQ ID NO: 13628 - DNA, 20 bp, synthetic construct
  misc_feature 1..20: note = Description of Artificial Sequence: Synthetic oligonucleotide
  misc_feature 1..20: note = Target: SCN10A; (-) strand; PAM type: NRG; PAM sequence: CAG
  source 1..20: mol_type = other DNA
cttccagctgaacttggctg

SEQ ID NO: 13629 - DNA, 20 bp, synthetic construct
  misc_feature 1..20: note = Description of Artificial Sequence: Synthetic oligonucleotide
  misc_feature 1..20: note = Target: SCN10A; (-) strand; PAM type: NRG; PAM sequence: TGG
  source 1..20: mol_type = other DNA
cagtcacttccagctgaact

SEQ ID NO: 13630 - DNA, 20 bp, synthetic construct
  misc_feature 1..20: note = Description of Artificial Sequence: Synthetic oligonucleotide
  misc_feature 1..20: note = Target: SCN10A; (-) strand; PAM type: NRG; PAM sequence: CAG
  source 1..20: mol_type = other DNA
gaataaactgcagtcacttc

SEQ ID NO: 13631 - DNA, 20 bp, synthetic construct
  misc_feature 1..20: note = Description of Artificial Sequence: Synthetic oligonucleotide
  misc_feature 1..20: note = Target: SCN10A; (-) strand; PAM type: NRG; PAM sequence: CAG
  source 1..20: mol_type = other DNA
tgagcctgtggaataaactg

SEQ ID NO: 13632 - DNA, 20 bp, synthetic construct
  misc_feature 1..20: note = Description of Artificial Sequence: Synthetic oligonucleotide
  misc_feature 1..20: note = Target: SCN10A; (-) strand; PAM type: NRG; PAM sequence: TGG
  source 1..20: mol_type = other DNA
ggccaaagactgtgagcctg

SEQ ID NO: 13633 - DNA, 20 bp, synthetic construct
  misc_feature 1..20: note = Description of Artificial Sequence: Synthetic oligonucleotide
  misc_feature 1..20: note = Target: SCN10A; (-) strand; PAM type: NRG; PAM sequence: GAG
  source 1..20: mol_type = other DNA
aaaaacaggccaaagactgt

SEQ ID NO: 13634 - DNA, 20 bp, synthetic construct
  misc_feature 1..20: note = Description of Artificial Sequence: Synthetic oligonucleotide
  misc_feature 1..20: note = Target: SCN10A; (-) strand; PAM type: NRG; PAM sequence: AAG
  source 1..20: mol_type = other DNA
tcataggaaaaaacaggcca

SEQ ID NO: 13635 - DNA, 20 bp, synthetic construct
  misc_feature 1..20: note = Description of Artificial Sequence: Synthetic oligonucleotide
  misc_feature 1..20: note = Target: SCN10A; (-) strand; PAM type: NRG; PAM sequence: AGG
  source 1..20: mol_type = other DNA
tctgtgtcataggaaaaaac

SEQ ID NO: 13636 - DNA, 20 bp, synthetic construct
  misc_feature 1..20: note = Description of Artificial Sequence: Synthetic oligonucleotide
  misc_feature 1..20: note = Target: SCN10A; (-) strand; PAM type: NRG; PAM sequence: CAG
  source 1..20: mol_type = other DNA
gtctgtgtcataggaaaaaa

SEQ ID NO: 13637 - DNA, 20 bp, synthetic construct
  misc_feature 1..20: note = Description of Artificial Sequence: Synthetic oligonucleotide
  misc_feature 1..20: note = Target: SCN10A; (-) strand; PAM type: NRG; PAM sequence: AGG
  source 1..20: mol_type = other DNA
aggagcagggtctgtgtcat

SEQ ID NO: 13638 - DNA, 20 bp, synthetic construct
  misc_feature 1..20: note = Description of Artificial Sequence: Synthetic oligonucleotide
  misc_feature 1..20: note = Target: SCN10A; (-) strand; PAM type: NRG; PAM sequence: TAG
  source 1..20: mol_type = other DNA
gaggagcagggtctgtgtca

SEQ ID NO: 13639 - DNA, 20 bp, synthetic construct
  misc_feature 1..20: note = Description of Artificial Sequence: Synthetic oligonucleotide
  misc_feature 1..20: note = Target: SCN10A; (-) strand; PAM type: NRG; PAM sequence: GGG
  source 1..20: mol_type = other DNA
tgcagtatcagggaggagca

SEQ ID NO: 13640 - DNA, 20 bp, synthetic construct
  misc_feature 1..20: note = Description of Artificial Sequence: Synthetic oligonucleotide
  misc_feature 1..20: note = Target: SCN10A; (-) strand; PAM type: NRG; PAM sequence: AGG
  source 1..20: mol_type = other DNA
ctgcagtatcagggaggagc

SEQ ID NO: 13641 - DNA, 20 bp, synthetic construct
  misc_feature 1..20: note = Description of Artificial Sequence: Synthetic oligonucleotide
  misc_feature 1..20: note = Target: SCN10A; (-) strand; PAM type: NRG; PAM sequence: CAG
  source 1..20: mol_type = other DNA
gctgcagtatcagggaggag

SEQ ID NO: 13642 - DNA, 20 bp, synthetic construct
  misc_feature 1..20: note = Description of Artificial Sequence: Synthetic oligonucleotide
  misc_feature 1..20: note = Target: SCN10A; (-) strand; PAM type: NRG; PAM sequence: GAG
  source 1..20: mol_type = other DNA
aaggctgcagtatcagggag

SEQ ID NO: 13643 - DNA, 20 bp, synthetic construct
  misc_feature 1..20: note = Description of Artificial Sequence: Synthetic oligonucleotide
  misc_feature 1..20: note = Target: SCN10A; (-) strand; PAM type: NRG; PAM sequence: AGG
  source 1..20: mol_type = other DNA
caaaggctgcagtatcaggg

SEQ ID NO: 13644 - DNA, 20 bp, synthetic construct
  misc_feature 1..20: note = Description of Artificial Sequence: Synthetic oligonucleotide
  misc_feature 1..20: note = Target: SCN10A; (-) strand; PAM type: NRG; PAM sequence: GAG
  source 1..20: mol_type = other DNA
ccaaaggctgcagtatcagg

SEQ ID NO: 13645 - DNA, 20 bp, synthetic construct
  misc_feature 1..20: note = Description of Artificial Sequence: Synthetic oligonucleotide
  misc_feature 1..20: note = Target: SCN10A; (-) strand; PAM type: NRG; PAM sequence: GGG
  source 1..20: mol_type = other DNA
acccaaaggctgcagtatca

SEQ ID NO: 13646 - DNA, 20 bp, synthetic construct
  misc_feature 1..20: note = Description of Artificial Sequence: Synthetic oligonucleotide
  misc_feature 1..20: note = Target: SCN10A; (-) strand; PAM type: NRG; PAM sequence: AGG
  source 1..20: mol_type = other DNA
gacccaaaggctgcagtatc

SEQ ID NO: 13647 - DNA, 20 bp, synthetic construct
  misc_feature 1..20: note = Description of Artificial Sequence: Synthetic oligonucleotide
  misc_feature 1..20: note = Target: SCN10A; (-) strand; PAM type: NRG; PAM sequence: CAG
  source 1..20: mol_type = other DNA
tgacccaaaggctgcagtat

SEQ ID NO: 13648 - DNA, 20 bp, synthetic construct
  misc_feature 1..20: note = Description of Artificial Sequence: Synthetic oligonucleotide
  misc_feature 1..20: note = Target: SCN10A; (-) strand; PAM type: NRG; PAM sequence: CAG
  source 1..20: mol_type = other DNA
agggcatgacccaaaggctg

SEQ ID NO: 13649 - DNA, 20 bp, synthetic construct
  misc_feature 1..20: note = Description of Artificial Sequence: Synthetic oligonucleotide
  misc_feature 1..20: note = Target: SCN10A; (-) strand; PAM type: NRG; PAM sequence: AGG
  source 1..20: mol_type = other DNA
gaggaaagggcatgacccaa

SEQ ID NO: 13650 - DNA, 20 bp, synthetic construct
  misc_feature 1..20: note = Description of Artificial Sequence: Synthetic oligonucleotide
  misc_feature 1..20: note = Target: SCN10A; (-) strand; PAM type: NRG; PAM sequence: AAG
  source 1..20: mol_type = other DNA
ggaggaaagggcatgaccca

SEQ ID NO: 13651 - DNA, 20 bp, synthetic construct
  misc_feature 1..20: note = Description of Artificial Sequence: Synthetic oligonucleotide
  misc_feature 1..20: note = Target: SCN10A; (-) strand; PAM type: NRG; PAM sequence: GGG
  source 1..20: mol_type = other DNA
caggaccagggtggaggaaa

SEQ ID NO: 13652 - DNA, 20 bp, synthetic construct
  misc_feature 1..20: note = Description of Artificial Sequence: Synthetic oligonucleotide
  misc_feature 1..20: note = Target: SCN10A; (-) strand; PAM type: NRG; PAM sequence: AGG
  source 1..20: mol_type = other DNA
acaggaccagggtggaggaa

SEQ ID NO: 13653 - DNA, 20 bp, synthetic construct
  misc_feature 1..20: note = Description of Artificial Sequence: Synthetic oligonucleotide
  misc_feature 1..20: note = Target: SCN10A; (-) strand; PAM type: NRG; PAM sequence: AAG
  source 1..20: mol_type = other DNA
cacaggaccagggtggagga

SEQ ID NO: 13654 - DNA, 20 bp, synthetic construct
  misc_feature 1..20: note = Description of Artificial Sequence: Synthetic oligonucleotide
  misc_feature 1..20: note = Target: SCN10A; (-) strand; PAM type: NRG; PAM sequence: AGG
  source 1..20: mol_type = other DNA
agagcacaggaccagggtgg

SEQ ID NO: 13655 - DNA, 20 bp, synthetic construct
  misc_feature 1..20: note = Description of Artificial Sequence: Synthetic oligonucleotide
  misc_feature 1..20: note = Target: SCN10A; (-) strand; PAM type: NRG; PAM sequence: GAG
  source 1..20: mol_type = other DNA
cagagcacaggaccagggtg

SEQ ID NO: 13656 - DNA, 20 bp, synthetic construct
  misc_feature 1..20: note = Description of Artificial Sequence: Synthetic oligonucleotide
  misc_feature 1..20: note = Target: SCN10A; (-) strand; PAM type: NRG; PAM sequence: TGG
  source 1..20: mol_type = other DNA
cacagagcacaggaccaggg

SEQ ID NO: 13657 - DNA, 20 bp, synthetic construct
  misc_feature 1..20: note = Description of Artificial Sequence: Synthetic oligonucleotide
  misc_feature 1..20: note = Target: SCN10A; (-) strand; PAM type: NRG; PAM sequence: GGG
  source 1..20: mol_type = other DNA
cttcacagagcacaggacca

SEQ ID NO: 13658 - DNA, 20 bp, synthetic construct
  misc_feature 1..20: note = Description of Artificial Sequence: Synthetic oligonucleotide
  misc_feature 1..20: note = Target: SCN10A; (-) strand; PAM type: NRG; PAM sequence: AGG
  source 1..20: mol_type = other DNA
ccttcacagagcacaggacc

SEQ ID NO: 13659 - DNA, 20 bp, synthetic construct
  misc_feature 1..20: note = Description of Artificial Sequence: Synthetic oligonucleotide
  misc_feature 1..20: note = Target: SCN10A; (-) strand; PAM type: NRG; PAM sequence: CAG
  source 1..20: mol_type = other DNA
gccttcacagagcacaggac

SEQ ID NO: 13660 - DNA, 20 bp, synthetic construct
  misc_feature 1..20: note = Description of Artificial Sequence: Synthetic oligonucleotide
  misc_feature 1..20: note = Target: SCN10A; (-) strand; PAM type: NRG; PAM sequence: AGG
  source 1..20: mol_type = other DNA
tcctggccttcacagagcac

SEQ ID NO: 13661 - DNA, 20 bp, synthetic construct
  misc_feature 1..20: note = Description of Artificial Sequence: Synthetic oligonucleotide
  misc_feature 1..20: note = Target: SCN10A; (-) strand; PAM type: NRG; PAM sequence: CAG
  source 1..20: mol_type = other DNA
gtcctggccttcacagagca

SEQ ID NO: 13662 - DNA, 20 bp, synthetic construct
  misc_feature 1..20: note = Description of Artificial Sequence: Synthetic oligonucleotide
  misc_feature 1..20: note = Target: SCN10A; (-) strand; PAM type: NRG; PAM sequence: GAG
  source 1..20: mol_type = other DNA
aaggggtcctggccttcaca

SEQ ID NO: 13663 - DNA, 20 bp, synthetic construct
  misc_feature 1..20: note = Description of Artificial Sequence: Synthetic oligonucleotide
  misc_feature 1..20: note = Target: SCN10A; (-) strand; PAM type: NRG; PAM sequence: CAG
  source 1..20: mol_type = other DNA
ataaggggtcctggccttca

SEQ ID NO: 13664 - DNA, 20 bp, synthetic construct
  misc_feature 1..20: note = Description of Artificial Sequence: Synthetic oligonucleotide
  misc_feature 1..20: note = Target: SCN10A; (-) strand; PAM type: NRG; PAM sequence: TGG
  source 1..20: mol_type = other DNA
agaggaatcataaggggtcc

SEQ ID NO: 13665 - DNA, 20 bp, synthetic construct
  misc_feature 1..20: note = Description of Artificial Sequence: Synthetic oligonucleotide
  misc_feature 1..20: note = Target: SCN10A; (-) strand; PAM type: NRG; PAM sequence: GGG
  source 1..20: mol_type = other DNA
gtagggagaggaatcataag

SEQ ID NO: 13666 - DNA, 20 bp, synthetic construct
  misc_feature 1..20: note = Description of Artificial Sequence: Synthetic oligonucleotide
  misc_feature 1..20: note = Target: SCN10A; (-) strand; PAM type: NRG; PAM sequence: GGG
  source 1..20: mol_type = other DNA
ggtagggagaggaatcataa

SEQ ID NO: 13667 - DNA, 20 bp, synthetic construct
  misc_feature 1..20: note = Description of Artificial Sequence: Synthetic oligonucleotide
  misc_feature 1..20: note = Target: SCN10A; (-) strand; PAM type: NRG; PAM sequence: AGG
  source 1..20: mol_type = other DNA
aggtagggagaggaatcata

SEQ ID NO: 13668 - DNA, 20 bp, synthetic construct
  misc_feature 1..20: note = Description of Artificial Sequence: Synthetic oligonucleotide
  misc_feature 1..20: note = Target: SCN10A; (-) strand; PAM type: NRG; PAM sequence: AAG
  source 1..20: mol_type = other DNA
gaggtagggagaggaatcat

SEQ ID NO: 13669 - DNA, 20 bp, synthetic construct
  misc_feature 1..20: note = Description of Artificial Sequence: Synthetic oligonucleotide
  misc_feature 1..20: note = Target: SCN10A; (-) strand; PAM type: NRG; PAM sequence: AGG
  source 1..20: mol_type = other DNA
tcacagtaggaggtagggag

SEQ ID NO: 13670 - DNA, 20 bp, synthetic construct
  misc_feature 1..20: note = Description of Artificial Sequence: Synthetic oligonucleotide
  misc_feature 1..20: note = Target: SCN10A; (-) strand; PAM type: NRG; PAM sequence: GAG
  source 1..20: mol_type = other DNA
ttcacagtaggaggtaggga

SEQ ID NO: 13671 - DNA, 20 bp, synthetic construct
  misc_feature 1..20: note = Description of Artificial Sequence: Synthetic oligonucleotide
  misc_feature 1..20: note = Target: SCN10A; (-) strand; PAM type: NRG; PAM sequence: GAG
  source 1..20: mol_type = other DNA
tcttcacagtaggaggtagg

SEQ ID NO: 13672 - DNA, 20 bp, synthetic construct
  misc_feature 1..20: note = Description of Artificial Sequence: Synthetic oligonucleotide
  misc_feature 1..20: note = Target: SCN10A; (-) strand; PAM type: NRG; PAM sequence: GGG
  source 1..20: mol_type = other DNA
aatcttcacagtaggaggta

SEQ ID NO: 13673 - DNA, 20 bp, synthetic construct
  misc_feature 1..20: note = Description of Artificial Sequence: Synthetic oligonucleotide
  misc_feature 1..20: note = Target: SCN10A; (-) strand; PAM type: NRG; PAM sequence: AGG
  source 1..20: mol_type = other DNA
caatcttcacagtaggaggt

SEQ ID NO: 13674 - DNA, 20 bp, synthetic construct
  misc_feature 1..20: note = Description of Artificial Sequence: Synthetic oligonucleotide
  misc_feature 1..20: note = Target: SCN10A; (-) strand; PAM type: NRG; PAM sequence: TAG
  source 1..20: mol_type = other DNA
tcaatcttcacagtaggagg

SEQ ID NO: 13675 - DNA, 20 bp, synthetic construct
  misc_feature 1..20: note = Description of Artificial Sequence: Synthetic oligonucleotide
  misc_feature 1..20: note = Target: SCN10A; (-) strand; PAM type: NRG; PAM sequence: AGG
  source 1..20: mol_type = other DNA
gagtcaatcttcacagtagg

SEQ ID NO: 13676 - DNA, 20 bp, synthetic construct
  misc_feature 1..20: note = Description of Artificial Sequence: Synthetic oligonucleotide
  misc_feature 1..20: note = Target: SCN10A; (-) strand; PAM type: NRG; PAM sequence: GAG
  source 1..20: mol_type = other DNA
agagtcaatcttcacagtag

SEQ ID NO: 13677 - DNA, 20 bp, synthetic construct
  misc_feature 1..20: note = Description of Artificial Sequence: Synthetic oligonucleotide
  misc_feature 1..20: note = Target: SCN10A; (-) strand; PAM type: NRG; PAM sequence: AGG
  source 1..20: mol_type = other DNA
acagagtcaatcttcacagt

SEQ ID NO: 13678 - DNA, 20 bp, synthetic construct
  misc_feature 1..20: note = Description of Artificial Sequence: Synthetic oligonucleotide
  misc_feature 1..20: note = Target: SCN10A; (-) strand; PAM type: NRG; PAM sequence: TAG
  source 1..20: mol_type = other DNA
aacagagtcaatcttcacag

SEQ ID NO: 13679 - DNA, 20 bp, synthetic construct
  misc_feature 1..20: note = Description of Artificial Sequence: Synthetic oligonucleotide
  misc_feature 1..20: note = Target: SCN10A; (-) strand; PAM type: NRG; PAM sequence: CAG
  source 1..20: mol_type = other DNA
agaaacagagtcaatcttca

SEQ ID NO: 13680 - DNA, 20 bp, synthetic construct
  misc_feature 1..20: note = Description of Artificial Sequence: Synthetic oligonucleotide
  misc_feature 1..20: note = Target: SCN10A; (-) strand; PAM type: NRG; PAM sequence: GAG
  source 1..20: mol_type = other DNA
aggaccgggtgccagaaaca

SEQ ID NO: 13681 - DNA, 20 bp, synthetic construct
  misc_feature 1..20: note = Description of Artificial Sequence: Synthetic oligonucleotide
  misc_feature 1..20: note = Target: SCN10A; (-) strand; PAM type: NRG; PAM sequence: CAG
  source 1..20: mol_type = other DNA
acaggaccgggtgccagaaa

SEQ ID NO: 13682 - DNA, 20 bp, synthetic construct
  misc_feature 1..20: note = Description of Artificial Sequence: Synthetic oligonucleotide
  misc_feature 1..20: note = Target: SCN10A; (-) strand; PAM type: NRG; PAM sequence: CAG
  source 1..20: mol_type = other DNA
ttagccacaggaccgggtgc

SEQ ID NO: 13683 - DNA, 20 bp, synthetic construct
  misc_feature 1..20: note = Description of Artificial Sequence: Synthetic oligonucleotide
  misc_feature 1..20: note = Target: SCN10A; (-) strand; PAM type: NRG; PAM sequence: GGG
  source 1..20: mol_type = other DNA
gtacaattagccacaggacc

SEQ ID NO: 13684 - DNA, 20 bp, synthetic construct
  misc_feature 1..20: note = Description of Artificial Sequence: Synthetic oligonucleotide
  misc_feature 1..20: note = Target: SCN10A; (-) strand; PAM type: NRG; PAM sequence: CGG
  source 1..20: mol_type = other DNA
cgtacaattagccacaggac

SEQ ID NO: 13685 - DNA, 20 bp, synthetic construct
  misc_feature 1..20: note = Description of Artificial Sequence: Synthetic oligonucleotide
  misc_feature 1..20: note = Target: SCN10A; (-) strand; PAM type: NRG; PAM sequence: AGG
  source 1..20: mol_type = other DNA
ggctccgtacaattagccac

SEQ ID NO: 13686 - DNA, 20 bp, synthetic construct
  misc_feature 1..20: note = Description of Artificial Sequence: Synthetic oligonucleotide
  misc_feature 1..20: note = Target: SCN10A; (-) strand; PAM type: NRG; PAM sequence: CAG
  source 1..20: mol_type = other DNA
aggctccgtacaattagcca

SEQ ID NO: 13687 - DNA, 20 bp, synthetic construct
  misc_feature 1..20: note = Description of Artificial Sequence: Synthetic oligonucleotide
  misc_feature 1..20: note = Target: SCN10A; (-) strand; PAM type: NRG; PAM sequence: TAG
  source 1..20: mol_type = other DNA
aacaccaggctccgtacaat

SEQ ID NO: 13688 - DNA, 20 bp, synthetic construct
  misc_feature 1..20: note = Description of Artificial Sequence: Synthetic oligonucleotide
  misc_feature 1..20: note = Target: SCN10A; (-) strand; PAM type: NRG; PAM sequence: AGG
  source 1..20: mol_type = other DNA
gcccccttgtaattaacacc

SEQ ID NO: 13689 - DNA, 20 bp, synthetic construct
  misc_feature 1..20: note = Description of Artificial Sequence: Synthetic oligonucleotide
  misc_feature 1..20: note = Target: SCN10A; (-) strand; PAM type: NRG; PAM sequence: CAG
  source 1..20: mol_type = other DNA
ggcccccttgtaattaacac

SEQ ID NO: 13690 - DNA, 20 bp, synthetic construct
  misc_feature 1..20: note = Description of Artificial Sequence: Synthetic oligonucleotide
  misc_feature 1..20: note = Target: SCN10A; (-) strand; PAM type: NRG; PAM sequence: AGG
  source 1..20: mol_type = other DNA
agccagttgcccgaatcctc

SEQ ID NO: 13691 - DNA, 20 bp, synthetic construct
  misc_feature 1..20: note = Description of Artificial Sequence: Synthetic oligonucleotide
  misc_feature 1..20: note = Target: SCN10A; (-) strand; PAM type: NRG; PAM sequence: CAG
  source 1..20: mol_type = other DNA
cagccagttgcccgaatcct

SEQ ID NO: 13692 - DNA, 20 bp, synthetic construct
  misc_feature 1..20: note = Description of Artificial Sequence: Synthetic oligonucleotide
  misc_feature 1..20: note = Target: SCN10A; (-) strand; PAM type: NRG; PAM sequence: CAG
  source 1..20: mol_type = other DNA
cttatgctttagctgtcagc

SEQ ID NO: 13693 - DNA, 20 bp, synthetic construct
  misc_feature 1..20: note = Description of Artificial Sequence: Synthetic oligonucleotide
  misc_feature 1..20: note = Target: SCN10A; (-) strand; PAM type: NRG; PAM sequence: CAG
  source 1..20: mol_type = other DNA
atcccttatgctttagctgt

SEQ ID NO: 13694 - DNA, 20 bp, synthetic construct
  misc_feature 1..20: note = Description of Artificial Sequence: Synthetic oligonucleotide
  misc_feature 1..20: note = Target: SCN10A; (-) strand; PAM type: NRG; PAM sequence: TAG
  source 1..20: mol_type = other DNA
cattcaaatcccttatgctt

SEQ ID NO: 13695 - DNA, 20 bp, synthetic construct
  misc_feature 1..20: note = Description of Artificial Sequence: Synthetic oligonucleotide
  misc_feature 1..20: note = Target: SCN10A; (-) strand; PAM type: NRG; PAM sequence: TGG
  source 1..20: mol_type = other DNA
taaggcattgtgcagacagc

SEQ ID NO: 13696 - DNA, 20 bp, synthetic construct
  misc_feature 1..20: note = Description of Artificial Sequence: Synthetic oligonucleotide
  misc_feature 1..20: note = Target: SCN10A; (-) strand; PAM type: NRG; PAM sequence: CAG
  source 1..20: mol_type = other DNA
aaattaaggcattgtgcaga

SEQ ID NO: 13697 - DNA, 20 bp, synthetic construct
  misc_feature 1..20: note = Description of Artificial Sequence: Synthetic oligonucleotide
  misc_feature 1..20: note = Target: SCN10A; (-) strand; PAM type: NRG; PAM sequence: CAG
  source 1..20: mol_type = other DNA
aaacaaattaaggcattgtg

SEQ ID NO: 13698 - DNA, 20 bp, synthetic construct
  misc_feature 1..20: note = Description of Artificial Sequence: Synthetic oligonucleotide
  misc_feature 1..20: note = Target: SCN10A; (-) strand; PAM type: NRG; PAM sequence: AGG
  source 1..20: mol_type = other DNA
aaaaaaaaaaaaacaaatta

SEQ ID NO: 13699 - DNA, 20 bp, synthetic construct
  misc_feature 1..20: note = Description of Artificial Sequence: Synthetic oligonucleotide
  misc_feature 1..20: note = Target: SCN10A; (-) strand; PAM type: NRG; PAM sequence: AAG
  source 1..20: mol_type = other DNA
aaaaaaaaaaaaaacaaatt

SEQ ID NO: 13700 - DNA, 20 bp, synthetic construct
  misc_feature 1..20: note = Description of Artificial Sequence: Synthetic oligonucleotide
  misc_feature 1..20: note = Target: SCN10A; (-) strand; PAM type: NRG; PAM sequence: TGG
  source 1..20: mol_type = other DNA
acataaagttcaaaaacagc

SEQ ID NO: 13701 - DNA, 20 bp, synthetic construct
  misc_feature 1..20: note = Description of Artificial Sequence: Synthetic oligonucleotide
  misc_feature 1..20: note = Target: SCN10A; (-) strand; PAM type: NRG; PAM sequence: CAG
  source 1..20: mol_type = other DNA
cctaacataaagttcaaaaa

SEQ ID NO: 13702 - DNA, 20 bp, synthetic construct
  misc_feature 1..20: note = Description of Artificial Sequence: Synthetic oligonucleotide
  misc_feature 1..20: note = Target: SCN10A; (-) strand; PAM type: NRG; PAM sequence: AAG
  source 1..20: mol_type = other DNA
tatctccaggccctaacata

SEQ ID NO: 13703 - DNA, 20 bp, synthetic construct
  misc_feature 1..20: note = Description of Artificial Sequence: Synthetic oligonucleotide
  misc_feature 1..20: note = Target: SCN10A; (-) strand; PAM type: NRG; PAM sequence: AGG
  source 1..20: mol_type = other DNA
ccccaaaaaaacctatctcc

SEQ ID NO: 13704 - DNA, 20 bp, synthetic construct
  misc_feature 1..20: note = Description of Artificial Sequence: Synthetic oligonucleotide
  misc_feature 1..20: note = Target: SCN10A; (-) strand; PAM type: NRG; PAM sequence: CAG
  source 1..20: mol_type = other DNA
cccccaaaaaaacctatctc

SEQ ID NO: 13705 - DNA, 20 bp, synthetic construct
  misc_feature 1..20: note = Description of Artificial Sequence: Synthetic oligonucleotide
  misc_feature 1..20: note = Target: SCN10A; (-) strand; PAM type: NRG; PAM sequence: CAG
  source 1..20: mol_type = other DNA
ttcatagttggagttggggg

SEQ ID NO: 13706 - DNA, 20 bp, synthetic construct
  misc_feature 1..20: note = Description of Artificial Sequence: Synthetic oligonucleotide
  misc_feature 1..20: note = Target: SCN10A; (-) strand; PAM type: NRG; PAM sequence: GGG
  source 1..20: mol_type = other DNA
ttgttcatagttggagttgg

SEQ ID NO: 13707 - DNA, 20 bp, synthetic construct
  misc_feature 1..20: note = Description of Artificial Sequence: Synthetic oligonucleotide
  misc_feature 1..20: note = Target: SCN10A; (-) strand; PAM type: NRG; PAM sequence: GGG
  source 1..20: mol_type = other DNA
tttgttcatagttggagttg

SEQ ID NO: 13708 - DNA, 20 bp, synthetic construct
  misc_feature 1..20: note = Description of Artificial Sequence: Synthetic oligonucleotide
  misc_feature 1..20: note = Target: SCN10A; (-) strand; PAM type: NRG; PAM sequence: GGG
  source 1..20: mol_type = other DNA
ctttgttcatagttggagtt

SEQ ID NO: 13709 - DNA, 20 bp, synthetic construct
  misc_feature 1..20: note = Description of Artificial Sequence: Synthetic oligonucleotide
  misc_feature 1..20: note = Target: SCN10A; (-) strand; PAM type: NRG; PAM sequence: TGG
  source 1..20: mol_type = other DNA
actttgttcatagttggagt

SEQ ID NO: 13710 - DNA, 20 bp, synthetic construct
  misc_feature 1..20: note = Description of Artificial Sequence: Synthetic oligonucleotide
  misc_feature 1..20: note = Target: SCN10A; (-) strand; PAM type: NRG; PAM sequence: GAG
  source 1..20: mol_type = other DNA
tccaactttgttcatagttg

SEQ ID NO: 13711 - DNA, 20 bp, synthetic construct
  misc_feature 1..20: note = Description of Artificial Sequence: Synthetic oligonucleotide
  misc_feature 1..20: note = Target: SCN10A; (-) strand; PAM type: NRG; PAM sequence: TGG
  source 1..20: mol_type = other DNA
tttccaactttgttcatagt

SEQ ID NO: 13712 - DNA, 20 bp, synthetic construct
  misc_feature 1..20: note = Description of Artificial Sequence: Synthetic oligonucleotide
  misc_feature 1..20: note = Target: SCN10A; (-) strand; PAM type: NRG; PAM sequence: TAG
  source 1..20: mol_type = other DNA
tatatttccaactttgttca

SEQ ID NO: 13713 - DNA, 20 bp, synthetic construct
  misc_feature 1..20: note = Description of Artificial Sequence: Synthetic oligonucleotide
  misc_feature 1..20: note = Target: SCN10A; (-) strand; PAM type: NRG; PAM sequence: GGG
  source 1..20: mol_type = other DNA
caagttagacatcatataga

SEQ ID NO: 13714 - DNA, 20 bp, synthetic construct
  misc_feature 1..20: note = Description of Artificial Sequence: Synthetic oligonucleotide
  misc_feature 1..20: note = Target: SCN10A; (-) strand; PAM type: NRG; PAM sequence: AGG
  source 1..20: mol_type = other DNA
tcaagttagacatcatatag

SEQ ID NO: 13715 - DNA, 20 bp, synthetic construct
  misc_feature 1..20: note = Description of Artificial Sequence: Synthetic oligonucleotide
  misc_feature 1..20: note = Target: SCN10A; (-) strand; PAM type: NRG; PAM sequence: GAG
  source 1..20: mol_type = other DNA
ttcaagttagacatcatata

SEQ ID NO: 13716 - DNA, 20 bp, synthetic construct
  misc_feature 1..20: note = Description of Artificial Sequence: Synthetic oligonucleotide
  misc_feature 1..20: note = Target: SCN10A; (-) strand; PAM type: NRG; PAM sequence: TAG
  source 1..20: mol_type = other DNA
tcttcaagttagacatcata

SEQ ID NO: 13717 - DNA, 20 bp, synthetic construct
  misc_feature 1..20: note = Description of Artificial Sequence: Synthetic oligonucleotide
  misc_feature 1..20: note = Target: SCN10A; (-) strand; PAM type: NRG; PAM sequence: TAG
  source 1..20: mol_type = other DNA
aaaatcaaacatcttcaagt

SEQ ID NO: 13718 - DNA, 20 bp, synthetic construct
  misc_feature 1..20: note = Description of Artificial Sequence: Synthetic oligonucleotide
  misc_feature 1..20: note = Target: SCN10A; (-) strand; PAM type: NRG; PAM sequence: AAG
  source 1..20: mol_type = other DNA
accaaaaatcaaacatcttc

SEQ ID NO: 13719 - DNA, 20 bp, synthetic construct
  misc_feature 1..20: note = Description of Artificial Sequence: Synthetic oligonucleotide
  misc_feature 1..20: note = Target: SCN10A; (-) strand; PAM type: NRG; PAM sequence: AAG
  source 1..20: mol_type = other DNA
ataaggctccccaggtcccc

SEQ ID NO: 13720 - DNA, 20 bp, synthetic construct
  misc_feature 1..20: note = Description of Artificial Sequence: Synthetic oligonucleotide
  misc_feature 1..20: note = Target: SCN10A; (-) strand; PAM type: NRG; PAM sequence: AGG
  source 1..20: mol_type = other DNA
tggtacaaataaggctcccc

SEQ ID NO: 13721 - DNA, 20 bp, synthetic construct
  misc_feature 1..20: note = Description of Artificial Sequence: Synthetic oligonucleotide
  misc_feature 1..20: note = Target: SCN10A; (-) strand; PAM type: NRG; PAM sequence: CAG
  source 1..20: mol_type = other DNA
ttggtacaaataaggctccc

SEQ ID NO: 13722 - DNA, 20 bp, synthetic construct
  misc_feature 1..20: note = Description of Artificial Sequence: Synthetic oligonucleotide
  misc_feature 1..20: note = Target: SCN10A; (-) strand; PAM type: NRG; PAM sequence: AGG
  source 1..20: mol_type = other DNA
ggaggcctttggtacaaata

SEQ ID NO: 13723 - DNA, 20 bp, synthetic construct
  misc_feature 1..20: note = Description of Artificial Sequence: Synthetic oligonucleotide
  misc_feature 1..20: note = Target: SCN10A; (-) strand; PAM type: NRG; PAM sequence: AAG
  source 1..20: mol_type = other DNA
tggaggcctttggtacaaat

SEQ ID NO: 13724 - DNA, 20 bp, synthetic construct
  misc_feature 1..20: note = Description of Artificial Sequence: Synthetic oligonucleotide
  misc_feature 1..20: note = Target: SCN10A; (-) strand; PAM type: NRG; PAM sequence: TGG
  source 1..20: mol_type = other DNA
tcatctttggtggaggcctt

SEQ ID NO: 13725 - DNA, 20 bp, synthetic construct
  misc_feature 1..20: note = Description of Artificial Sequence: Synthetic oligonucleotide
  misc_feature 1..20: note = Target: SCN10A; (-) strand; PAM type: NRG; PAM sequence: AGG
  source 1..20: mol_type = other DNA
ccttgcctcatctttggtgg

SEQ ID NO: 13726 - DNA, 20 bp, synthetic construct
  misc_feature 1..20: note = Description of Artificial Sequence: Synthetic oligonucleotide
  misc_feature 1..20: note = Target: SCN10A; (-) strand; PAM type: NRG; PAM sequence: GAG
  source 1..20: mol_type = other DNA
gccttgcctcatctttggtg

SEQ ID NO: 13727 - DNA, 20 bp, synthetic construct
  misc_feature 1..20: note = Description of Artificial Sequence: Synthetic oligonucleotide
  misc_feature 1..20: note = Target: SCN10A; (-) strand; PAM type: NRG; PAM sequence: TGG
  source 1..20: mol_type = other DNA
aggccttgcctcatctttgg

SEQ ID NO: 13728 - DNA, 20 bp, synthetic construct
  misc_feature 1..20: note = Description of Artificial Sequence: Synthetic oligonucleotide
  misc_feature 1..20: note = Target: SCN10A; (-) strand; PAM type: NRG; PAM sequence: TGG
  source 1..20: mol_type = other DNA
taaaggccttgcctcatctt

SEQ ID NO: 13729 - DNA, 20 bp, synthetic construct
  misc_feature 1..20: note = Description of Artificial Sequence: Synthetic oligonucleotide
  misc_feature 1..20: note = Target: SCN10A; (-) strand; PAM type: NRG; PAM sequence: AGG
  source 1..20: mol_type = other DNA
ttgaaccctctcttacctaa

SEQ ID NO: 13730 - DNA, 20 bp, synthetic construct
  misc_feature 1..20: note = Description of Artificial Sequence: Synthetic oligonucleotide
  misc_feature 1..20: note = Target: SCN10A; (-) strand; PAM type: NRG; PAM sequence: AAG
  source 1..20: mol_type = other DNA
gttgaaccctctcttaccta

SEQ ID NO: 13731 - DNA, 20 bp, synthetic construct
  misc_feature 1..20: note = Description of Artificial Sequence: Synthetic oligonucleotide
  misc_feature 1..20: note = Target: SCN10A; (-) strand; PAM type: NRG; PAM sequence: GAG
  source 1..20: mol_type = other DNA
tccctcaccatttttcctgt

SEQ ID NO: 13732 - DNA, 20 bp, synthetic construct
  misc_feature 1..20: note = Description of Artificial Sequence: Synthetic oligonucleotide
  misc_feature 1..20: note = Target: SCN10A; (-) strand; PAM type: NRG; PAM sequence: GAG
  source 1..20: mol_type = other DNA
gggaacctggcaaggagcga

SEQ ID NO: 13733 - DNA, 20 bp, synthetic construct
  misc_feature 1..20: note = Description of Artificial Sequence: Synthetic oligonucleotide
  misc_feature 1..20: note = Target: SCN10A; (-) strand; PAM type: NRG; PAM sequence: GAG
  source 1..20: mol_type = other DNA
cagggaacctggcaaggagc

SEQ ID NO: 13734 - DNA, 20 bp, synthetic construct
  misc_feature 1..20: note = Description of Artificial Sequence: Synthetic oligonucleotide
  misc_feature 1..20: note = Target: SCN10A; (-) strand; PAM type: NRG; PAM sequence: GAG
  source 1..20: mol_type = other DNA
ggcccagggaacctggcaag

SEQ ID NO: 13735 - DNA, 20 bp, synthetic construct
  misc_feature 1..20: note = Description of Artificial Sequence: Synthetic oligonucleotide
  misc_feature 1..20: note = Target: SCN10A; (-) strand; PAM type: NRG; PAM sequence: AGG
  source 1..20: mol_type = other DNA
agggcccagggaacctggca

SEQ ID NO: 13736 - DNA, 20 bp, synthetic construct
  misc_feature 1..20: note = Description of Artificial Sequence: Synthetic oligonucleotide
  misc_feature 1..20: note = Target: SCN10A; (-) strand; PAM type: NRG; PAM sequence: AAG
  source 1..20: mol_type = other DNA
gagggcccagggaacctggc

SEQ ID NO: 13737 - DNA, 20 bp, synthetic construct
  misc_feature 1..20: note = Description of Artificial Sequence: Synthetic oligonucleotide
  misc_feature 1..20: note = Target: SCN10A; (-) strand; PAM type: NRG; PAM sequence: TGG
  source 1..20: mol_type = other DNA
gggagagggcccagggaacc

SEQ ID NO: 13738 - DNA, 20 bp, synthetic construct
  misc_feature 1..20: note = Description of Artificial Sequence: Synthetic oligonucleotide
  misc_feature 1..20: note = Target: SCN10A; (-) strand; PAM type: NRG; PAM sequence: GGG
  source 1..20: mol_type = other DNA
caagtaggggagagggccca

SEQ ID NO: 13739 - DNA, 20 bp, synthetic construct
  misc_feature 1..20: note = Description of Artificial Sequence: Synthetic oligonucleotide
  misc_feature 1..20: note = Target: SCN10A; (-) strand; PAM type: NRG; PAM sequence: AGG
  source 1..20: mol_type = other DNA
gcaagtaggggagagggccc

SEQ ID NO: 13740 - DNA, 20 bp, synthetic construct
  misc_feature 1..20: note = Description of Artificial Sequence: Synthetic oligonucleotide
  misc_feature 1..20: note = Target: SCN10A; (-) strand; PAM type: NRG; PAM sequence: CAG
  source 1..20: mol_type = other DNA
agcaagtaggggagagggcc

SEQ ID NO: 13741 - DNA, 20 bp, synthetic construct
  misc_feature 1..20: note = Description of Artificial Sequence: Synthetic oligonucleotide
  misc_feature 1..20: note = Target: SCN10A; (-) strand; PAM type: NRG; PAM sequence: GGG
  source 1..20: mol_type = other DNA
caaagagcaagtaggggaga

SEQ ID NO: 13742 - DNA, 20 bp, synthetic construct
  misc_feature 1..20: note = Description of Artificial Sequence: Synthetic oligonucleotide
  misc_feature 1..20: note = Target: SCN10A; (-) strand; PAM type: NRG; PAM sequence: AGG
  source 1..20: mol_type = other DNA
acaaagagcaagtaggggag

SEQ ID NO: 13743 - DNA, 20 bp, synthetic construct
  misc_feature 1..20: note = Description of Artificial Sequence: Synthetic oligonucleotide
  misc_feature 1..20: note = Target: SCN10A; (-) strand; PAM type: NRG; PAM sequence: GAG
  source 1..20: mol_type = other DNA
aacaaagagcaagtagggga

SEQ ID NO: 13744 - DNA, 20 bp, synthetic construct
  misc_feature 1..20: note = Description of Artificial Sequence: Synthetic oligonucleotide
  misc_feature 1..20: note = Target: SCN10A; (-) strand; PAM type: NRG; PAM sequence: GAG
  source 1..20: mol_type = other DNA
acaacaaagagcaagtaggg

SEQ ID NO: 13745 - DNA, 20 bp, synthetic construct
  misc_feature 1..20: note = Description of Artificial Sequence: Synthetic oligonucleotide
  misc_feature 1..20: note = Target: SCN10A; (-) strand; PAM type: NRG; PAM sequence: GGG
  source 1..20: mol_type = other DNA
taacaacaaagagcaagtag

SEQ ID NO: 13746 - DNA, 20 bp, synthetic construct
  misc_feature 1..20: note = Description of Artificial Sequence: Synthetic oligonucleotide
  misc_feature 1..20: note = Target: SCN10A; (-) strand; PAM type: NRG; PAM sequence: GGG
  source 1..20: mol_type = other DNA
ataacaacaaagagcaagta

SEQ ID NO: 13747 - DNA, 20 bp, synthetic construct
  misc_feature 1..20: note = Description of Artificial Sequence: Synthetic oligonucleotide
  misc_feature 1..20: note = Target: SCN10A; (-) strand; PAM type: NRG; PAM sequence: AGG
  source 1..20: mol_type = other DNA
cataacaacaaagagcaagt

SEQ ID NO: 13748 - DNA, 20 bp, synthetic construct
  misc_feature 1..20: note = Description of Artificial Sequence: Synthetic oligonucleotide
  misc_feature 1..20: note = Target: SCN10A; (-) strand; PAM type: NRG; PAM sequence: TAG
  source 1..20: mol_type = other DNA
gcataacaacaaagagcaag

SEQ ID NO: 13749 - DNA, 20 bp, synthetic construct
  misc_feature 1..20: note = Description of Artificial Sequence: Synthetic oligonucleotide
  misc_feature 1..20: note = Target: SCN10A; (-) strand; PAM type: NRG; PAM sequence: AAG
  source 1..20: mol_type = other DNA
tgtgcataacaacaaagagc

SEQ ID NO: 13750 - DNA, 20 bp, synthetic construct
  misc_feature 1..20: note = Description of Artificial Sequence: Synthetic oligonucleotide
  misc_feature 1..20: note = Target: SCN10A; (-) strand; PAM type: NRG; PAM sequence: GAG
  source 1..20: mol_type = other DNA
cccatgtgcataacaacaaa

SEQ ID NO: 13751 - DNA, 20 bp, synthetic construct
  misc_feature 1..20: note = Description of Artificial Sequence: Synthetic oligonucleotide
  misc_feature 1..20: note = Target: SCN10A; (-) strand; PAM type: NRG; PAM sequence: AAG
  source 1..20: mol_type = other DNA
gacccatgtgcataacaaca

SEQ ID NO: 13752 - DNA, 20 bp, synthetic construct
  misc_feature 1..20: note = Description of Artificial Sequence: Synthetic oligonucleotide
  misc_feature 1..20: note = Target: SCN10A; (-) strand; PAM type: NRG; PAM sequence: AAG
  source 1..20: mol_type = other DNA
caaaattataattatttccc

SEQ ID NO: 13753 - DNA, 20 bp, synthetic construct
  misc_feature 1..20: note = Description of Artificial Sequence: Synthetic oligonucleotide
  misc_feature 1..20: note = Target: SCN10A; (-) strand; PAM type: NRG; PAM sequence: AAG
  source 1..20: mol_type = other DNA
ttcacagaaggtcttccaca

SEQ ID NO: 13754 - DNA, 20 bp, synthetic construct
  misc_feature 1..20: note = Description of Artificial Sequence: Synthetic oligonucleotide
  misc_feature 1..20: note = Target: SCN10A; (-) strand; PAM type: NRG; PAM sequence: AGG
  source 1..20: mol_type = other DNA
ttaaactggaaattcacaga

SEQ ID NO: 13755 - DNA, 20 bp, synthetic construct
  misc_feature 1..20: note = Description of Artificial Sequence: Synthetic oligonucleotide
  misc_feature 1..20: note = Target: SCN10A; (-) strand; PAM type: NRG; PAM sequence: AAG
  source 1..20: mol_type = other DNA
gttaaactggaaattcacag

SEQ ID NO: 13756 - DNA, 20 bp, synthetic construct
  misc_feature 1..20: note = Description of Artificial Sequence: Synthetic oligonucleotide
  misc_feature 1..20: note = Target: SCN10A; (-) strand; PAM type: NRG; PAM sequence: CAG
  source 1..20: mol_type = other DNA
ctagttaaactggaaattca

SEQ ID NO: 13757 - DNA, 20 bp, synthetic construct
  misc_feature 1..20: note = Description of Artificial Sequence: Synthetic oligonucleotide
  misc_feature 1..20: note = Target: SCN10A; (-) strand; PAM type: NRG; PAM sequence: TGG
  source 1..20: mol_type = other DNA
ggaacatgtcctagttaaac

SEQ ID NO: 13758 - DNA, 20 bp, synthetic construct
  misc_feature 1..20: note = Description of Artificial Sequence: Synthetic oligonucleotide
  misc_feature 1..20: note = Target: SCN10A; (-) strand; PAM type: NRG; PAM sequence: TAG
  source 1..20: mol_type = other DNA
tacacgatgggaacatgtcc

SEQ ID NO: 13759 - DNA, 20 bp, synthetic construct
  misc_feature 1..20: note = Description of Artificial Sequence: Synthetic oligonucleotide
  misc_feature 1..20: note = Target: SCN10A; (-) strand; PAM type: NRG; PAM sequence: GGG
  source 1..20: mol_type = other DNA
aataatgtaccctacacgat

SEQ ID NO: 13760 - DNA, 20 bp, synthetic construct
  misc_feature 1..20: note = Description of Artificial Sequence: Synthetic oligonucleotide
  misc_feature 1..20: note = Target: SCN10A; (-) strand; PAM type: NRG; PAM sequence: TGG
  source 1..20: mol_type = other DNA
aaataatgtaccctacacga

SEQ ID NO: 13761 - DNA, 20 bp, synthetic construct
  misc_feature 1..20: note = Description of Artificial Sequence: Synthetic oligonucleotide
  misc_feature 1..20: note = Target: SCN10A; (-) strand; PAM type: NRG; PAM sequence: TAG
  source 1..20: mol_type = other DNA
gaaaattttaccagagtatg

SEQ ID NO: 13762 - DNA, 20 bp, synthetic construct
  misc_feature 1..20: note = Description of Artificial Sequence: Synthetic oligonucleotide
  misc_feature 1..20: note = Target: SCN10A; (-) strand; PAM type: NRG; PAM sequence: GAG
  source 1..20: mol_type = other DNA
tctggcagaaaattttacca

SEQ ID NO: 13763 - DNA, 20 bp, synthetic construct
  misc_feature 1..20: note = Description of Artificial Sequence: Synthetic oligonucleotide
  misc_feature 1..20: note = Target: SCN10A; (-) strand; PAM type: NRG; PAM sequence: CAG
  source 1..20: mol_type = other DNA
tgtctggcagaaaattttac

SEQ ID NO: 13764 - DNA, 20 bp, synthetic construct
  misc_feature 1..20: note = Description of Artificial Sequence: Synthetic oligonucleotide
  misc_feature 1..20: note = Target: SCN10A; (-) strand; PAM type: NRG; PAM sequence: CAG
  source 1..20: mol_type = other DNA
gctgtagaccagttgtctgg

SEQ ID NO: 13765 - DNA, 20 bp, synthetic construct
  misc_feature 1..20: note = Description of Artificial Sequence: Synthetic oligonucleotide
  misc_feature 1..20: note = Target: SCN10A; (-) strand; PAM type: NRG; PAM sequence: TGG
  source 1..20: mol_type = other DNA
tgtgctgtagaccagttgtc

SEQ ID NO: 13766 - DNA, 20 bp, synthetic construct
  misc_feature 1..20: note = Description of Artificial Sequence: Synthetic oligonucleotide
  misc_feature 1..20: note = Target: SCN10A; (-) strand; PAM type: NRG; PAM sequence: CAG
  source 1..20: mol_type = other DNA
aattaaaatgtgctgtagac

SEQ ID NO: 13767 - DNA, 20 bp, synthetic construct
  misc_feature 1..20: note = Description of Artificial Sequence: Synthetic oligonucleotide
  misc_feature 1..20: note = Target: SCN10A; (-) strand; PAM type: NRG; PAM sequence: TAG
  source 1..20: mol_type = other DNA
gagcaaattaaaatgtgctg

SEQ ID NO: 13768 - DNA, 20 bp, synthetic construct
  misc_feature 1..20: note = Description of Artificial Sequence: Synthetic oligonucleotide
  misc_feature 1..20: note = Target: SCN10A; (-) strand; PAM type: NRG; PAM sequence: GAG
  source 1..20: mol_type = other DNA
tcccttaaaataagatcctg

SEQ ID NO: 13769 - DNA, 20 bp, synthetic construct
  misc_feature 1..20: note = Description of Artificial Sequence: Synthetic oligonucleotide
  misc_feature 1..20: note = Target: SCN10A; (-) strand; PAM type: NRG; PAM sequence: TGG
  source 1..20: mol_type = other DNA
tctcccttaaaataagatcc

SEQ ID NO: 13770 - DNA, 20 bp, synthetic construct
  misc_feature 1..20: note = Description of Artificial Sequence: Synthetic oligonucleotide
  misc_feature 1..20: note = Target: SCN10A; (-) strand; PAM type: NRG; PAM sequence: AAG
  source 1..20: mol_type = other DNA
gaaccattctcccttaaaat

SEQ ID NO: 13771 - DNA, 20 bp, synthetic construct
  misc_feature 1..20: note = Description of Artificial Sequence: Synthetic oligonucleotide
  misc_feature 1..20: note = Target: SCN10A; (-) strand; PAM type: NRG; PAM sequence: AGG
  source 1..20: mol_type = other DNA
atctaattgttacaagtacg

SEQ ID NO: 13772 - DNA, 20 bp, synthetic construct
  misc_feature 1..20: note = Description of Artificial Sequence: Synthetic oligonucleotide
  misc_feature 1..20: note = Target: SCN10A; (-) strand; PAM type: NRG; PAM sequence: GAG
  source 1..20: mol_type = other DNA
tatctaattgttacaagtac

SEQ ID NO: 13773 - DNA, 20 bp, synthetic construct
  misc_feature 1..20: note = Description of Artificial Sequence: Synthetic oligonucleotide
  misc_feature 1..20: note = Target: SCN10A; (-) strand; PAM type: NRG; PAM sequence: AAG
  source 1..20: mol_type = other DNA
attgagtatctaattgttac

SEQ ID NO: 13774 - DNA, 20 bp, synthetic construct
  misc_feature 1..20: note = Description of Artificial Sequence: Synthetic oligonucleotide
  misc_feature 1..20: note = Target: SCN10A; (-) strand; PAM type: NRG; PAM sequence: GAG
  source 1..20: mol_type = other DNA
cccaccaacaagaggtgatt

SEQ ID NO: 13775 - DNA, 20 bp, synthetic construct
  misc_feature 1..20: note = Description of Artificial Sequence: Synthetic oligonucleotide
  misc_feature 1..20: note = Target: SCN10A; (-) strand; PAM type: NRG; PAM sequence: AGG
  source 1..20: mol_type = other DNA
tcttctttcccaccaacaag

SEQ ID NO: 13776 - DNA, 20 bp, synthetic construct
  misc_feature 1..20: note = Description of Artificial Sequence: Synthetic oligonucleotide
  misc_feature 1..20: note = Target: SCN10A; (-) strand; PAM type: NRG; PAM sequence: GAG
  source 1..20: mol_type = other DNA
ttcttctttcccaccaacaa

SEQ ID NO: 13777 - DNA, 20 bp, synthetic construct
  misc_feature 1..20: note = Description of Artificial Sequence: Synthetic oligonucleotide
  misc_feature 1..20: note = Target: SCN10A; (-) strand; PAM type: NRG; PAM sequence: AAG
  source 1..20: mol_type = other DNA
ctttcttctttcccaccaac

SEQ ID NO: 13778 - DNA, 20 bp, synthetic construct
  misc_feature 1..20: note = Description of Artificial Sequence: Synthetic oligonucleotide
  misc_feature 1..20: note = Target: SCN10A; (-) strand; PAM type: NRG; PAM sequence: CAG
  source 1..20: mol_type = other DNA
ttatagagctggaaaataag

SEQ ID NO: 13779 - DNA, 20 bp, synthetic construct
  misc_feature 1..20: note = Description of Artificial Sequence: Synthetic oligonucleotide
  misc_feature 1..20: note = Target: SCN10A; (-) strand; PAM type: NRG; PAM sequence: AAG
  source 1..20: mol_type = other DNA
cccttatagagctggaaaat

SEQ ID NO: 13780 - DNA, 20 bp, synthetic construct
  misc_feature 1..20: note = Description of Artificial Sequence: Synthetic oligonucleotide
  misc_feature 1..20: note = Target: SCN10A; (-) strand; PAM type: NRG; PAM sequence: TGG
  source 1..20: mol_type = other DNA
gcaggaatcccttatagagc

SEQ ID NO: 13781 - DNA, 20 bp, synthetic construct
  misc_feature 1..20: note = Description of Artificial Sequence: Synthetic oligonucleotide
  misc_feature 1..20: note = Target: SCN10A; (-) strand; PAM type: NRG; PAM sequence: GAG
  source 1..20: mol_type = other DNA
tggggcaggaatcccttata

SEQ ID NO: 13782 - DNA, 20 bp, synthetic construct
  misc_feature 1..20: note = Description of Artificial Sequence: Synthetic oligonucleotide
  misc_feature 1..20: note = Target: SCN10A; (-) strand; PAM type: NRG; PAM sequence: TAG
  source 1..20: mol_type = other DNA
gctggggcaggaatccctta

SEQ ID NO: 13783 - DNA, 20 bp, synthetic construct
  misc_feature 1..20: note = Description of Artificial Sequence: Synthetic oligonucleotide
  misc_feature 1..20: note = Target: SCN10A; (-) strand; PAM type: NRG; PAM sequence: AGG
  source 1..20: mol_type = other DNA
gtagcaccatccgctggggc

SEQ ID NO: 13784 - DNA, 20 bp, synthetic construct
  misc_feature 1..20: note = Description of Artificial Sequence: Synthetic oligonucleotide
  misc_feature 1..20: note = Target: SCN10A; (-) strand; PAM type: NRG; PAM sequence: CAG
  source 1..20: mol_type = other DNA
ggtagcaccatccgctgggg

SEQ ID NO: 13785 - DNA, 20 bp, synthetic construct
  misc_feature 1..20: note = Description of Artificial Sequence: Synthetic oligonucleotide
  misc_feature 1..20: note = Target: SCN10A; (-) strand; PAM type: NRG; PAM sequence: GGG
  source 1..20: mol_type = other DNA
cagggtagcaccatccgctg

SEQ ID NO: 13786 - DNA, 20 bp, synthetic construct
  misc_feature 1..20: note = Description of Artificial Sequence: Synthetic oligonucleotide
  misc_feature 1..20: note = Target: SCN10A; (-) strand; PAM type: NRG; PAM sequence: GGG
  source 1..20: mol_type = other DNA
acagggtagcaccatccgct

SEQ ID NO: 13787 - DNA, 20 bp, synthetic construct
  misc_feature 1..20: note = Description of Artificial Sequence: Synthetic oligonucleotide
  misc_feature 1..20: note = Target: SCN10A; (-) strand; PAM type: NRG; PAM sequence: TGG
  source 1..20: mol_type = other DNA
tacagggtagcaccatccgc

SEQ ID NO: 13788 - DNA, 20 bp, synthetic construct
  misc_feature 1..20: note = Description of Artificial Sequence: Synthetic oligonucleotide
  misc_feature 1..20: note = Target: SCN10A; (-) strand; PAM type: NRG; PAM sequence: TAG
  source 1..20: mol_type = other DNA
agttcctgtggcttacaggg

SEQ ID NO: 13789 - DNA, 20 bp, synthetic construct
  misc_feature 1..20: note = Description of Artificial Sequence: Synthetic oligonucleotide
  misc_feature 1..20: note = Target: SCN10A; (-) strand; PAM type: NRG; PAM sequence: GGG
  source 1..20: mol_type = other DNA
accagttcctgtggcttaca

SEQ ID NO: 13790 - DNA, 20 bp, synthetic construct
  misc_feature 1..20: note = Description of Artificial Sequence: Synthetic oligonucleotide
  misc_feature 1..20: note = Target: SCN10A; (-) strand; PAM type: NRG; PAM sequence: AGG
  source 1..20: mol_type = other DNA
taccagttcctgtggcttac

SEQ ID NO: 13791 - DNA, 20 bp, synthetic construct
  misc_feature 1..20: note = Description of Artificial Sequence: Synthetic oligonucleotide
  misc_feature 1..20: note = Target: SCN10A; (-) strand; PAM type: NRG; PAM sequence: CAG
  source 1..20: mol_type = other DNA
ctaccagttcctgtggctta

SEQ ID NO: 13792 - DNA, 20 bp, synthetic construct
  misc_feature 1..20: note = Description of Artificial Sequence: Synthetic oligonucleotide
  misc_feature 1..20: note = Target: SCN10A; (-) strand; PAM type: NRG; PAM sequence: TGG
  source 1..20: mol_type = other DNA
atcttaactaccagttcctg

SEQ ID NO: 13793 - DNA, 20 bp, synthetic construct
  misc_feature 1..20: note = Description of Artificial Sequence: Synthetic oligonucleotide
  misc_feature 1..20: note = Target: SCN10A; (-) strand; PAM type: NRG; PAM sequence: CAG
  source 1..20: mol_type = other DNA
gatggggatatcttaactac

SEQ ID NO: 13794 - DNA, 20 bp, synthetic construct
  misc_feature 1..20: note = Description of Artificial Sequence: Synthetic oligonucleotide
  misc_feature 1..20: note = Target: SCN10A; (-) strand; PAM type: NRG; PAM sequence: GGG
  source 1..20: mol_type = other DNA
aagtacttagttctatgatg

SEQ ID NO: 13795 - DNA, 20 bp, synthetic construct
  misc_feature 1..20: note = Description of Artificial Sequence: Synthetic oligonucleotide
  misc_feature 1..20: note = Target: SCN10A; (-) strand; PAM type: NRG; PAM sequence: GGG
  source 1..20: mol_type = other DNA
caagtacttagttctatgat

SEQ ID NO: 13796 - DNA, 20 bp, synthetic construct
  misc_feature 1..20: note = Description of Artificial Sequence: Synthetic oligonucleotide
  misc_feature 1..20: note = Target: SCN10A; (-) strand; PAM type: NRG; PAM sequence: TGG
  source 1..20: mol_type = other DNA
ccaagtacttagttctatga

SEQ ID NO: 13797 - DNA, 20 bp, synthetic construct
  misc_feature 1..20: note = Description of Artificial Sequence: Synthetic oligonucleotide
  misc_feature 1..20: note = Target: SCN10A; (-) strand; PAM type: NRG; PAM sequence: TAG
  source 1..20: mol_type = other DNA
ataaaacatagccaagtact

SEQ ID NO: 13798 - DNA, 20 bp, synthetic construct
  misc_feature 1..20: note = Description of Artificial Sequence: Synthetic oligonucleotide
  misc_feature 1..20: note = Target: SCN10A; (-) strand; PAM type: NRG; PAM sequence: AAG
  source 1..20: mol_type = other DNA
tatagaaataaaacatagcc

SEQ ID NO: 13799 - DNA, 20 bp, synthetic construct
  misc_feature 1..20: note = Description of Artificial Sequence: Synthetic oligonucleotide
  misc_feature 1..20: note = Target: SCN10A; (-) strand; PAM type: NRG; PAM sequence: TAG
  source 1..20: mol_type = other DNA
agtaatatagaaataaaaca

SEQ ID NO: 13800 - DNA, 20 bp, synthetic construct
  misc_feature 1..20: note = Description of Artificial Sequence: Synthetic oligonucleotide
  misc_feature 1..20: note = Target: SCN10A; (-) strand; PAM type: NRG; PAM sequence: TAG
  source 1..20: mol_type = other DNA
ttgtttgtgtatcagtaata

SEQ ID NO: 13801 - DNA, 20 bp, synthetic construct
  misc_feature 1..20: note = Description of Artificial Sequence: Synthetic oligonucleotide
  misc_feature 1..20: note = Target: SCN10A; (-) strand; PAM type: NRG; PAM sequence: CAG
  source 1..20: mol_type = other DNA
aagggagcttgtttgtgtat

SEQ ID NO: 13802 - DNA, 20 bp, synthetic construct
  misc_feature 1..20: note = Description of Artificial Sequence: Synthetic oligonucleotide
  misc_feature 1..20: note = Target: SCN10A; (-) strand; PAM type: NRG; PAM sequence: GAG
  source 1..20: mol_type = other DNA
tgattttatattaaagaagg

SEQ ID NO: 13803 - DNA, 20 bp, synthetic construct
  misc_feature 1..20: note = Description of Artificial Sequence: Synthetic oligonucleotide
  misc_feature 1..20: note = Target: SCN10A; (-) strand; PAM type: NRG; PAM sequence: GGG
  source 1..20: mol_type = other DNA
tttgattttatattaaagaa

SEQ ID NO: 13804 - DNA, 20 bp, synthetic construct
  misc_feature 1..20: note = Description of Artificial Sequence: Synthetic oligonucleotide
  misc_feature 1..20: note = Target: SCN10A; (-) strand; PAM type: NRG; PAM sequence: AGG
  source 1..20: mol_type = other DNA
ttttgattttatattaaaga

SEQ ID NO: 13805 - DNA, 20 bp, synthetic construct
  misc_feature 1..20: note = Description of Artificial Sequence: Synthetic oligonucleotide
  misc_feature 1..20: note = Target: SCN10A; (-) strand; PAM type: NRG; PAM sequence: AAG
  source 1..20: mol_type = other DNA
attttgattttatattaaag

SEQ ID NO: 13806 - DNA, 20 bp, synthetic construct
  misc_feature 1..20: note = Description of Artificial Sequence: Synthetic oligonucleotide
  misc_feature 1..20: note = Target: SCN10A; (-) strand; PAM type: NRG; PAM sequence: AAG
  source 1..20: mol_type = other DNA
gctattttgattttatatta

SEQ ID NO: 13807 - DNA, 20 bp, synthetic construct
  misc_feature 1..20: note = Description of Artificial Sequence: Synthetic oligonucleotide
  misc_feature 1..20: note = Target: SCN10A; (-) strand; PAM type: NRG; PAM sequence: AGG
  source 1..20: mol_type = other DNA
tccaaaatgaaagattccaa

SEQ ID NO: 13808 - DNA, 20 bp, synthetic construct
  misc_feature 1..20: note = Description of Artificial Sequence: Synthetic oligonucleotide
  misc_feature 1..20: note = Target: SCN10A; (-) strand; PAM type: NRG; PAM sequence: AAG
  source 1..20: mol_type = other DNA
ttccaaaatgaaagattcca

SEQ ID NO: 13809 - DNA, 20 bp, synthetic construct
  misc_feature 1..20: note = Description of Artificial Sequence: Synthetic oligonucleotide
  misc_feature 1..20: note = Target: SCN10A; (-) strand; PAM type: NRG; PAM sequence: AAG
  source 1..20: mol_type = other DNA
ttgtttgtcttccaaaatga

SEQ ID NO: 13810 - DNA, 20 bp, synthetic construct
  misc_feature 1..20: note = Description of Artificial Sequence: Synthetic oligonucleotide
  misc_feature 1..20: note = Target: SCN10A; (-) strand; PAM type: NRG; PAM sequence: TAG
  source 1..20: mol_type = other DNA
gtttttgttggttggttggt

SEQ ID NO: 13811 - DNA, 20 bp, synthetic construct
  misc_feature 1..20: note = Description of Artificial Sequence: Synthetic oligonucleotide
  misc_feature 1..20: note = Target: SCN10A; (-) strand; PAM type: NRG; PAM sequence: TGG
  source 1..20: mol_type = other DNA
aggagtttttgttggttggt

SEQ ID NO: 13812 - DNA, 20 bp, synthetic construct
  misc_feature 1..20: note = Description of Artificial Sequence: Synthetic oligonucleotide
  misc_feature 1..20: note = Target: SCN10A; (-) strand; PAM type: NRG; PAM sequence: TGG
  source 1..20: mol_type = other DNA
taataggagtttttgttggt

SEQ ID NO: 13813 - DNA, 20 bp, synthetic construct
  misc_feature 1..20: note = Description of Artificial Sequence: Synthetic oligonucleotide
  misc_feature 1..20: note = Target: SCN10A; (-) strand; PAM type: NRG; PAM sequence: TGG
  source 1..20: mol_type = other DNA
agcataataggagtttttgt

SEQ ID NO: 13814 - DNA, 20 bp, synthetic construct
  misc_feature 1..20: note = Description of Artificial Sequence: Synthetic oligonucleotide
  misc_feature 1..20: note = Target: SCN10A; (-) strand; PAM type: NRG; PAM sequence: GAG
  source 1..20: mol_type = other DNA
tatctcacttagcataatag

SEQ ID NO: 13815 - DNA, 20 bp, synthetic construct
  misc_feature 1..20: note = Description of Artificial Sequence: Synthetic oligonucleotide
  misc_feature 1..20: note = Target: SCN10A; (-) strand; PAM type: NRG; PAM sequence: AGG
  source 1..20: mol_type = other DNA
cttatctcacttagcataat

SEQ ID NO: 13816 - DNA, 20 bp, synthetic construct
  misc_feature 1..20: note = Description of Artificial Sequence: Synthetic oligonucleotide
  misc_feature 1..20: note = Target: SCN10A; (-) strand; PAM type: NRG; PAM sequence: TAG
  source 1..20: mol_type = other DNA
gcttatctcacttagcataa

SEQ ID NO: 13817 - DNA, 20 bp, synthetic construct
  misc_feature 1..20: note = Description of Artificial Sequence: Synthetic oligonucleotide
  misc_feature 1..20: note = Target: SCN10A; (-) strand; PAM type: NRG; PAM sequence: TAG
  source 1..20: mol_type = other DNA
tgtgtctggcttatctcact

SEQ ID NO: 13818 - DNA, 20 bp, synthetic construct
  misc_feature 1..20: note = Description of Artificial Sequence: Synthetic oligonucleotide
  misc_feature 1..20: note = Target: SCN10A; (-) strand; PAM type: NRG; PAM sequence: TGG
  source 1..20: mol_type = other DNA
cgtttttgtccttctgtgtc

SEQ ID NO: 13819 - DNA, 20 bp, synthetic construct
  misc_feature 1..20: note = Description of Artificial Sequence: Synthetic oligonucleotide
  misc_feature 1..20: note = Target: SCN10A; (-) strand; PAM type: NRG; PAM sequence: TAG
  source 1..20: mol_type = other DNA
tcccatgagtttgactattt

SEQ ID NO: 13820 - DNA, 20 bp, synthetic construct
  misc_feature 1..20: note = Description of Artificial Sequence: Synthetic oligonucleotide
  misc_feature 1..20: note = Target: SCN10A; (-) strand; PAM type: NRG; PAM sequence: GAG
  source 1..20: mol_type = other DNA
attctattctctgctcccat

SEQ ID NO: 13821 - DNA, 20 bp, synthetic construct
  misc_feature 1..20: note = Description of Artificial Sequence: Synthetic oligonucleotide
  misc_feature 1..20: note = Target: SCN10A; (-) strand; PAM type: NRG; PAM sequence: TGG
  source 1..20: mol_type = other DNA
tttcccctcctcccagctcc

SEQ ID NO: 13822 - DNA, 20 bp, synthetic construct
  misc_feature 1..20: note = Description of Artificial Sequence: Synthetic oligonucleotide
  misc_feature 1..20: note = Target: SCN10A; (-) strand; PAM type: NRG; PAM sequence: CAG
  source 1..20: mol_type = other DNA
tccccaatttcccctcctcc

SEQ ID NO: 13823 - DNA, 20 bp, synthetic construct
  misc_feature 1..20: note = Description of Artificial Sequence: Synthetic oligonucleotide
  misc_feature 1..20: note = Target: SCN10A; (-) strand; PAM type: NRG; PAM sequence: AAG
  source 1..20: mol_type = other DNA
ggaagtttgtacactttgac

SEQ ID NO: 13824 - DNA, 20 bp, synthetic construct
  misc_feature 1..20: note = Description of Artificial Sequence: Synthetic oligonucleotide
  misc_feature 1..20: note = Target: SCN10A; (-) strand; PAM type: NRG; PAM sequence: AAG
  source 1..20: mol_type = other DNA
tattcatgtcacataactgg

SEQ ID NO: 13825 - DNA, 20 bp, synthetic construct
  misc_feature 1..20: note = Description of Artificial Sequence: Synthetic oligonucleotide
  misc_feature 1..20: note = Target: SCN10A; (-) strand; PAM type: NRG; PAM sequence: TGG
  source 1..20: mol_type = other DNA
atttattcatgtcacataac

SEQ ID NO: 13826 - DNA, 20 bp, synthetic construct
  misc_feature 1..20: note = Description of Artificial Sequence: Synthetic oligonucleotide
  misc_feature 1..20: note = Target: SCN10A; (-) strand; PAM type: NRG; PAM sequence: AGG
  source 1..20: mol_type = other DNA
tatgctataagtagagctct

SEQ ID NO: 13827 - DNA, 20 bp, synthetic construct
  misc_feature 1..20: note = Description of Artificial Sequence: Synthetic oligonucleotide
  misc_feature 1..20: note = Target: SCN10A; (-) strand; PAM type: NRG; PAM sequence: TAG
  source 1..20: mol_type = other DNA
ctatgctataagtagagctc

SEQ ID NO: 13828 - DNA, 20 bp, synthetic construct
  misc_feature 1..20: note = Description of Artificial Sequence: Synthetic oligonucleotide
  misc_feature 1..20: note = Target: SCN10A; (-) strand; PAM type: NRG; PAM sequence: GAG
  source 1..20: mol_type = other DNA
tagggactatgctataagta

SEQ ID NO: 13829 - DNA, 20 bp, synthetic construct
  misc_feature 1..20: note = Description of Artificial Sequence: Synthetic oligonucleotide
  misc_feature 1..20: note = Target: SCN10A; (-) strand; PAM type: NRG; PAM sequence: TAG
  source 1..20: mol_type = other DNA
tatagggactatgctataag

SEQ ID NO: 13830 - DNA, 20 bp, synthetic construct
  misc_feature 1..20: note = Description of Artificial Sequence: Synthetic oligonucleotide
  misc_feature 1..20: note = Target: SCN10A; (-) strand; PAM type: NRG; PAM sequence: AAG
  source 1..20: mol_type = other DNA
aactatagggactatgctat

SEQ ID NO: 13831 - DNA, 20 bp, synthetic construct
  misc_feature 1..20: note = Description of Artificial Sequence: Synthetic oligonucleotide
  misc_feature 1..20: note = Target: SCN10A; (-) strand; PAM type: NRG; PAM sequence: GGG
  source 1..20: mol_type = other DNA
acacggtattgctaactata

SEQ ID NO: 13832 - DNA, 20 bp, synthetic construct
  misc_feature 1..20: note = Description of Artificial Sequence: Synthetic oligonucleotide
  misc_feature 1..20: note = Target: SCN10A; (-) strand; PAM type: NRG; PAM sequence: AGG
  source 1..20: mol_type = other DNA
aacacggtattgctaactat

SEQ ID NO: 13833 - DNA, 20 bp, synthetic construct
  misc_feature 1..20: note = Description of Artificial Sequence: Synthetic oligonucleotide
  misc_feature 1..20: note = Target: SCN10A; (-) strand; PAM type: NRG; PAM sequence: TAG
  source 1..20: mol_type = other DNA
caacacggtattgctaacta

SEQ ID NO: 13834 - DNA, 20 bp, synthetic construct
  misc_feature 1..20: note = Description of Artificial Sequence: Synthetic oligonucleotide
  misc_feature 1..20: note = Target: SCN10A; (-) strand; PAM type: NRG; PAM sequence: CGG
  source 1..20: mol_type = other DNA
aaatttttaggtagacaaca

SEQ ID NO: 13835 - DNA, 20 bp, synthetic construct
  misc_feature 1..20: note = Description of Artificial Sequence: Synthetic oligonucleotide
  misc_feature 1..20: note = Target: SCN10A; (-) strand; PAM type: NRG; PAM sequence: TAG
  source 1..20: mol_type = other DNA
tctcttggcaaatttttagg

SEQ ID NO: 13836 - DNA, 20 bp, synthetic construct
  misc_feature 1..20: note = Description of Artificial Sequence: Synthetic oligonucleotide
  misc_feature 1..20: note = Target: SCN10A; (-) strand; PAM type: NRG; PAM sequence: AGG
  source 1..20: mol_type = other DNA
tattctcttggcaaattttt

SEQ ID NO: 13837 - DNA, 20 bp, synthetic construct
  misc_feature 1..20: note = Description of Artificial Sequence: Synthetic oligonucleotide
  misc_feature 1..20: note = Target: SCN10A; (-) strand; PAM type: NRG; PAM sequence: TAG
  source 1..20: mol_type = other DNA
ttattctcttggcaaatttt

SEQ ID NO: 13838 - DNA, 20 bp, synthetic construct
  misc_feature 1..20: note = Description of Artificial Sequence: Synthetic oligonucleotide
  misc_feature 1..20: note = Target: SCN10A; (-) strand; PAM type: NRG; PAM sequence: TGG
  source 1..20: mol_type = other DNA
acacttaagatttattctct

SEQ ID NO: 13839 - DNA, 20 bp, synthetic construct
  misc_feature 1..20: note = Description of Artificial Sequence: Synthetic oligonucleotide
  misc_feature 1..20: note = Target: SCN10A; (-) strand; PAM type: NRG; PAM sequence: AAG
  source 1..20: mol_type = other DNA
attgggtgctaggaacactt

SEQ ID NO: 13840 - DNA, 20 bp, synthetic construct
  misc_feature 1..20: note = Description of Artificial Sequence: Synthetic oligonucleotide
  misc_feature 1..20: note = Target: SCN10A; (-) strand; PAM type: NRG; PAM sequence: AGG
  source 1..20: mol_type = other DNA
ttatttatttattgggtgct

SEQ ID NO: 13841 - DNA, 20 bp, synthetic construct
  misc_feature 1..20: note = Description of Artificial Sequence: Synthetic oligonucleotide
  misc_feature 1..20: note = Target: SCN10A; (-) strand; PAM type: NRG; PAM sequence: TAG
  source 1..20: mol_type = other DNA
tttatttatttattgggtgc

SEQ ID NO: 13842 - DNA, 20 bp, synthetic construct
  misc_feature 1..20: note = Description of Artificial Sequence: Synthetic oligonucleotide
  misc_feature 1..20: note = Target: SCN10A; (-) strand; PAM type: NRG; PAM sequence: GGG
  source 1..20: mol_type = other DNA
tgcctatttatttatttatt

SEQ ID NO: 13843 - DNA, 20 bp, synthetic construct
  misc_feature 1..20: note = Description of Artificial Sequence: Synthetic oligonucleotide
  misc_feature 1..20: note = Target: SCN10A; (-) strand; PAM type: NRG; PAM sequence: TGG
  source 1..20: mol_type = other DNA
ctgcctatttatttatttat

SEQ ID NO: 13844 - DNA, 20 bp, synthetic construct
  misc_feature 1..20: note = Description of Artificial Sequence: Synthetic oligonucleotide
  misc_feature 1..20: note = Target: SCN10A; (-) strand; PAM type: NRG; PAM sequence: CAG
  source 1..20: mol_type = other DNA
accatcaccaccatcaatgc

SEQ ID NO: 13845 - DNA, 20 bp, synthetic construct
  misc_feature 1..20: note = Description of Artificial Sequence: Synthetic oligonucleotide
  misc_feature 1..20: note = Target: SCN10A; (-) strand; PAM type: NRG; PAM sequence: AAG
  source 1..20: mol_type = other DNA
aactttatgagtttggagat

SEQ ID NO: 13846 - DNA, 20 bp, synthetic construct
  misc_feature 1..20: note = Description of Artificial Sequence: Synthetic oligonucleotide
  misc_feature 1..20: note = Target: SCN10A; (-) strand; PAM type: NRG; PAM sequence: GAG
  source 1..20: mol_type = other DNA
tacacaactttatgagtttg

SEQ ID NO: 13847 - DNA, 20 bp, synthetic construct
  misc_feature 1..20: note = Description of Artificial Sequence: Synthetic oligonucleotide
  misc_feature 1..20: note = Target: SCN10A; (-) strand; PAM type: NRG; PAM sequence: TGG
  source 1..20: mol_type = other DNA
tgtacacaactttatgagtt

SEQ ID NO: 13848 - DNA, 20 bp, synthetic construct
  misc_feature 1..20: note = Description of Artificial Sequence: Synthetic oligonucleotide
  misc_feature 1..20: note = Target: SCN10A; (-) strand; PAM type: NRG; PAM sequence: GAG
  source 1..20: mol_type = other DNA
tttaatgtacacaactttat

SEQ ID NO: 13849 - DNA, 20 bp, synthetic construct
  misc_feature 1..20: note = Description of Artificial Sequence: Synthetic oligonucleotide
  misc_feature 1..20: note = Target: SCN10A; (-) strand; PAM type: NRG; PAM sequence: AAG
  source 1..20: mol_type = other DNA
aggtatgatccacatgtaaa

SEQ ID NO: 13850 - DNA, 20 bp, synthetic construct
  misc_feature 1..20: note = Description of Artificial Sequence: Synthetic oligonucleotide
  misc_feature 1..20: note = Target: SCN10A; (-) strand; PAM type: NRG; PAM sequence: AGG
  source 1..20: mol_type = other DNA
tgttttttaacactttattg

SEQ ID NO: 13851 - DNA, 20 bp, synthetic construct
  misc_feature 1..20: note = Description of Artificial Sequence: Synthetic oligonucleotide
  misc_feature 1..20: note = Target: SCN10A; (-) strand; PAM type: NRG; PAM sequence: GAG
  source 1..20: mol_type = other DNA
ctgttttttaacactttatt

SEQ ID NO: 13852 - DNA, 20 bp, synthetic construct
  misc_feature 1..20: note = Description of Artificial Sequence: Synthetic oligonucleotide
  misc_feature 1..20: note = Target: SCN10A; (-) strand; PAM type: NRG; PAM sequence: CAG
  source 1..20: mol_type = other DNA
gcgtgtatttccggggattt

SEQ ID NO: 13853 - DNA, 20 bp, synthetic construct
  misc_feature 1..20: note = Description of Artificial Sequence: Synthetic oligonucleotide
  misc_feature 1..20: note = Target: SCN10A; (-) strand; PAM type: NRG; PAM sequence: GGG
  source 1..20: mol_type = other DNA
ttgggttgcgtgtatttccg

SEQ ID NO: 13854 - DNA, 20 bp, synthetic construct
  misc_feature 1..20: note = Description of Artificial Sequence: Synthetic oligonucleotide
  misc_feature 1..20: note = Target: SCN10A; (-) strand; PAM type: NRG; PAM sequence: GGG
  source 1..20: mol_type = other DNA
cttgggttgcgtgtatttcc

SEQ ID NO: 13855 - DNA, 20 bp, synthetic construct
  misc_feature 1..20: note = Description of Artificial Sequence: Synthetic oligonucleotide
  misc_feature 1..20: note = Target: SCN10A; (-) strand; PAM type: NRG; PAM sequence: CGG
  source 1..20: mol_type = other DNA
ccttgggttgcgtgtatttc

SEQ ID NO: 13856 - DNA, 20 bp, synthetic construct
  misc_feature 1..20: note = Description of Artificial Sequence: Synthetic oligonucleotide
  misc_feature 1..20: note = Target: SCN10A; (-) strand; PAM type: NRG; PAM sequence: GGG
  source 1..20: mol_type = other DNA
tggtgctgaaacacagcctt

SEQ ID NO: 13857 - DNA, 20 bp, synthetic construct
  misc_feature 1..20: note = Description of Artificial Sequence: Synthetic oligonucleotide
  misc_feature 1..20: note = Target: SCN10A; (-) strand; PAM type: NRG; PAM sequence: TGG
  source 1..20: mol_type = other DNA
ttggtgctgaaacacagcct

SEQ ID NO: 13858 - DNA, 20 bp, synthetic construct
  misc_feature 1..20: note = Description of Artificial Sequence: Synthetic oligonucleotide
  misc_feature 1..20: note = Target: SCN10A; (-) strand; PAM type: NRG; PAM sequence: CAG
  source 1..20: mol_type = other DNA
cccaccttggtgctgaaaca

SEQ ID NO: 13859 - DNA, 20 bp, synthetic construct
  misc_feature 1..20: note = Description of Artificial Sequence: Synthetic oligonucleotide
  misc_feature 1..20: note = Target: SCN10A; (-) strand; PAM type: NRG; PAM sequence: TGG
  source 1..20: mol_type = other DNA
tttcatcaacctccccacct

SEQ ID NO: 13860 - DNA, 20 bp, synthetic construct
  misc_feature 1..20: note = Description of Artificial Sequence: Synthetic oligonucleotide
  misc_feature 1..20: note = Target: SCN10A; (-) strand; PAM type: NRG; PAM sequence: CAG
  source 1..20: mol_type = other DNA
agtatctaaatacaacttaa

SEQ ID NO: 13861 - DNA, 20 bp, synthetic construct
  misc_feature 1..20: note = Description of Artificial Sequence: Synthetic oligonucleotide
  misc_feature 1..20: note = Target: SCN10A; (-) strand; PAM type: NRG; PAM sequence: GAG
  source 1..20: mol_type = other DNA
gatttagtaacaagagctga

SEQ ID NO: 13862 - DNA, 20 bp, synthetic construct
  misc_feature 1..20: note = Description of Artificial Sequence: Synthetic oligonucleotide
  misc_feature 1..20: note = Target: SCN10A; (-) strand; PAM type: NRG; PAM sequence: GAG
  source 1..20: mol_type = other DNA
ctgatttagtaacaagagct

SEQ ID NO: 13863 - DNA, 20 bp, synthetic construct
  misc_feature 1..20: note = Description of Artificial Sequence: Synthetic oligonucleotide
  misc_feature 1..20: note = Target: SCN10A; (-) strand; PAM type: NRG; PAM sequence: GAG
  source 1..20: mol_type = other DNA
tgccactgatttagtaacaa

SEQ ID NO: 13864 - DNA, 20 bp, synthetic construct
  misc_feature 1..20: note = Description of Artificial Sequence: Synthetic oligonucleotide
  misc_feature 1..20: note = Target: SCN10A; (-) strand; PAM type: NRG; PAM sequence: AAG
  source 1..20: mol_type = other DNA
tttgccactgatttagtaac

SEQ ID NO: 13865 - DNA, 20 bp, synthetic construct
  misc_feature 1..20: note = Description of Artificial Sequence: Synthetic oligonucleotide
  misc_feature 1..20: note = Target: SCN10A; (-) strand; PAM type: NRG; PAM sequence: TAG
  source 1..20: mol_type = other DNA
gatttaatttgccactgatt

SEQ ID NO: 13866 - DNA, 20 bp, synthetic construct
  misc_feature 1..20: note = Description of Artificial Sequence: Synthetic oligonucleotide
  misc_feature 1..20: note = Target: SCN10A; (-) strand; PAM type: NRG; PAM sequence: TAG
  source 1..20: mol_type = other DNA
ttcatgtcggggtgtagctg

SEQ ID NO: 13867 - DNA, 20 bp, synthetic construct
  misc_feature 1..20: note = Description of Artificial Sequence: Synthetic oligonucleotide
  misc_feature 1..20: note = Target: SCN10A; (-) strand; PAM type: NRG; PAM sequence: TAG
  source 1..20: mol_type = other DNA
ttacttttcatgtcggggtg

SEQ ID NO: 13868 - DNA, 20 bp, synthetic construct
  misc_feature 1..20: note = Description of Artificial Sequence: Synthetic oligonucleotide
  misc_feature 1..20: note = Target: SCN10A; (-) strand; PAM type: NRG; PAM sequence: GGG
  source 1..20: mol_type = other DNA
cctgcttacttttcatgtcg

SEQ ID NO: 13869 - DNA, 20 bp, synthetic construct
  misc_feature 1..20: note = Description of Artificial Sequence: Synthetic oligonucleotide
  misc_feature 1..20: note = Target: SCN10A; (-) strand; PAM type: NRG; PAM sequence: GGG
  source 1..20: mol_type = other DNA
acctgcttacttttcatgtc

SEQ ID NO: 13870 - DNA, 20 bp, synthetic construct
  misc_feature 1..20: note = Description of Artificial Sequence: Synthetic oligonucleotide
  misc_feature 1..20: note = Target: SCN10A; (-) strand; PAM type: NRG; PAM sequence: CGG
  source 1..20: mol_type = other DNA
gacctgcttacttttcatgt

SEQ ID NO: 13871 - DNA, 20 bp, synthetic construct
  misc_feature 1..20: note = Description of Artificial Sequence: Synthetic oligonucleotide
  misc_feature 1..20: note = Target: SCN10A; (-) strand; PAM type: NRG; PAM sequence: TGG
  source 1..20: mol_type = other DNA
cattataaatgtatcttgat

SEQ ID NO: 13872 - DNA, 20 bp, synthetic construct
  misc_feature 1..20: note = Description of Artificial Sequence: Synthetic oligonucleotide
  misc_feature 1..20: note = Target: SCN10A; (-) strand; PAM type: NRG; PAM sequence: TGG
  source 1..20: mol_type = other DNA
tcatgctcaccagcttcacc

SEQ ID NO: 13873 - DNA, 20 bp, synthetic construct
  misc_feature 1..20: note = Description of Artificial Sequence: Synthetic oligonucleotide
  misc_feature 1..20: note = Target: SCN10A; (-) strand; PAM type: NRG; PAM sequence: CAG
  source 1..20: mol_type = other DNA
aaaggccaaatcatgctcac

SEQ ID NO: 13874 - DNA, 20 bp, synthetic construct
  misc_feature 1..20: note = Description of Artificial Sequence: Synthetic oligonucleotide
  misc_feature 1..20: note = Target: SCN10A; (-) strand; PAM type: NRG; PAM sequence: AGG
  source 1..20: mol_type = other DNA
gctgaagtttgaccctataa

SEQ ID NO: 13875 - DNA, 20 bp, synthetic construct
  misc_feature 1..20: note = Description of Artificial Sequence: Synthetic oligonucleotide
  misc_feature 1..20: note = Target: SCN10A; (-) strand; PAM type: NRG; PAM sequence: AAG
  source 1..20: mol_type = other DNA
agctgaagtttgaccctata

SEQ ID NO: 13876 - DNA, 20 bp, synthetic construct
  misc_feature 1..20: note = Description of Artificial Sequence: Synthetic oligonucleotide
  misc_feature 1..20: note = Target: SCN10A; (-) strand; PAM type: NRG; PAM sequence: AAG
  source 1..20: mol_type = other DNA
ctgggcttatgggttagctg

SEQ ID NO: 13877 - DNA, 20 bp, synthetic construct
  misc_feature 1..20: note = Description of Artificial Sequence: Synthetic oligonucleotide
  misc_feature 1..20: note = Target: SCN10A; (-) strand; PAM type: NRG; PAM sequence: TAG
  source 1..20: mol_type = other DNA
ctgtccctgggcttatgggt

SEQ ID NO: 13878 - DNA, 20 bp, synthetic construct
  misc_feature 1..20: note = Description of Artificial Sequence: Synthetic oligonucleotide
  misc_feature 1..20: note = Target: SCN10A; (-) strand; PAM type: NRG; PAM sequence: GGG
  source 1..20: mol_type = other DNA
gagactgtccctgggcttat

SEQ ID NO: 13879 - DNA, 20 bp, synthetic construct
  misc_feature 1..20: note = Description of Artificial Sequence: Synthetic oligonucleotide
  misc_feature 1..20: note = Target: SCN10A; (-) strand; PAM type: NRG; PAM sequence: TGG
  source 1..20: mol_type = other DNA
agagactgtccctgggctta

SEQ ID NO: 13880 - DNA, 20 bp, synthetic construct
  misc_feature 1..20: note = Description of Artificial Sequence: Synthetic oligonucleotide
  misc_feature 1..20: note = Target: SCN10A; (-) strand; PAM type: NRG; PAM sequence: GGG
  source 1..20: mol_type = other DNA
acagccaagagactgtccct

SEQ ID NO: 13881 - DNA, 20 bp, synthetic construct
  misc_feature 1..20: note = Description of Artificial Sequence: Synthetic oligonucleotide
  misc_feature 1..20: note = Target: SCN10A; (-) strand; PAM type: NRG; PAM sequence: TGG
  source 1..20: mol_type = other DNA
aacagccaagagactgtccc

SEQ ID NO: 13882 - DNA, 20 bp, synthetic construct
  misc_feature 1..20: note = Description of Artificial Sequence: Synthetic oligonucleotide
  misc_feature 1..20: note = Target: SCN10A; (-) strand; PAM type: NRG; PAM sequence: GAG
  source 1..20: mol_type = other DNA
tgcctgtcaccaacagccaa

SEQ ID NO: 13883 - DNA, 20 bp, synthetic construct
  misc_feature 1..20: note = Description of Artificial Sequence: Synthetic oligonucleotide
  misc_feature 1..20: note = Target: SCN10A; (-) strand; PAM type: NRG; PAM sequence: AAG
  source 1..20: mol_type = other DNA
gctgcctgtcaccaacagcc

SEQ ID NO: 13884 - DNA, 20 bp, synthetic construct
  misc_feature 1..20: note = Description of Artificial Sequence: Synthetic oligonucleotide
  misc_feature 1..20: note = Target: SCN10A; (-) strand; PAM type: NRG; PAM sequence: CAG
  source 1..20: mol_type = other DNA
aacttgctgcctgtcaccaa

SEQ ID NO: 13885 - DNA, 20 bp, synthetic construct
  misc_feature 1..20: note = Description of Artificial Sequence: Synthetic oligonucleotide
  misc_feature 1..20: note = Target: SCN10A; (-) strand; PAM type: NRG; PAM sequence: AGG
  source 1..20: mol_type = other DNA
gttgaagctgagtttagaac

SEQ ID NO: 13886 - DNA, 20 bp, synthetic construct
  misc_feature 1..20: note = Description of Artificial Sequence: Synthetic oligonucleotide
  misc_feature 1..20: note = Target: SCN10A; (-) strand; PAM type: NRG; PAM sequence: CAG
  source 1..20: mol_type = other DNA
ggttgaagctgagtttagaa

SEQ ID NO: 13887 - DNA, 20 bp, synthetic construct
  misc_feature 1..20: note = Description of Artificial Sequence: Synthetic oligonucleotide
  misc_feature 1..20: note = Target: SCN10A; (-) strand; PAM type: NRG; PAM sequence: TAG
  source 1..20: mol_type = other DNA
ccaagggttgaagctgagtt

SEQ ID NO: 13888 - DNA, 20 bp, synthetic construct
  misc_feature 1..20: note = Description of Artificial Sequence: Synthetic oligonucleotide
  misc_feature 1..20: note = Target: SCN10A; (-) strand; PAM type: NRG; PAM sequence: GAG
  source 1..20: mol_type = other DNA
agtttccaagggttgaagct

SEQ ID NO: 13889 - DNA, 20 bp, synthetic construct
  misc_feature 1..20: note = Description of Artificial Sequence: Synthetic oligonucleotide
  misc_feature 1..20: note = Target: SCN10A; (-) strand; PAM type: NRG; PAM sequence: AAG
  source 1..20: mol_type = other DNA
cacagagtttccaagggttg

SEQ ID NO: 13890 - DNA, 20 bp, synthetic construct
  misc_feature 1..20: note = Description of Artificial Sequence: Synthetic oligonucleotide
  misc_feature 1..20: note = Target: SCN10A; (-) strand; PAM type: NRG; PAM sequence: GGG
  source 1..20: mol_type = other DNA
cagggtcacagagtttccaa

SEQ ID NO: 13891 - DNA, 20 bp, synthetic construct
  misc_feature 1..20: note = Description of Artificial Sequence: Synthetic oligonucleotide
  misc_feature 1..20: note = Target: SCN10A; (-) strand; PAM type: NRG; PAM sequence: AGG
  source 1..20: mol_type = other DNA
gcagggtcacagagtttcca

SEQ ID NO: 13892 - DNA, 20 bp, synthetic construct
  misc_feature 1..20: note = Description of Artificial Sequence: Synthetic oligonucleotide
  misc_feature 1..20: note = Target: SCN10A; (-) strand; PAM type: NRG; PAM sequence: AAG
  source 1..20: mol_type = other DNA
tgcagggtcacagagtttcc

SEQ ID NO: 13893 - DNA, 20 bp, synthetic construct
  misc_feature 1..20: note = Description of Artificial Sequence: Synthetic oligonucleotide
  misc_feature 1..20: note = Target: SCN10A; (-) strand; PAM type: NRG; PAM sequence: GAG
  source 1..20: mol_type = other DNA
gaatattatgcagggtcaca

SEQ ID NO: 13894 - DNA, 20 bp, synthetic construct
  misc_feature 1..20: note = Description of Artificial Sequence: Synthetic oligonucleotide
  misc_feature 1..20: note = Target: SCN10A; (-) strand; PAM type: NRG; PAM sequence: CAG
  source 1..20: mol_type = other DNA
aagaatattatgcagggtca

SEQ ID NO: 13895 - DNA, 20 bp, synthetic construct
  misc_feature 1..20: note = Description of Artificial Sequence: Synthetic oligonucleotide
  misc_feature 1..20: note = Target: SCN10A; (-) strand; PAM type: NRG; PAM sequence: GGG
  source 1..20: mol_type = other DNA
gagatcaagaatattatgca

SEQ ID NO: 13896 - DNA, 20 bp, synthetic construct
  misc_feature 1..20: note = Description of Artificial Sequence: Synthetic oligonucleotide
  misc_feature 1..20: note = Target: SCN10A; (-) strand; PAM type: NRG; PAM sequence: AGG
  source 1..20: mol_type = other DNA
agagatcaagaatattatgc

SEQ ID NO: 13897 - DNA, 20 bp, synthetic construct
  misc_feature 1..20: note = Description of Artificial Sequence: Synthetic oligonucleotide
  misc_feature 1..20: note = Target: SCN10A; (-) strand; PAM type: NRG; PAM sequence: CAG
  source 1..20: mol_type = other DNA
cagagatcaagaatattatg

SEQ ID NO: 13898 - DNA, 20 bp, synthetic construct
  misc_feature 1..20: note = Description of Artificial Sequence: Synthetic oligonucleotide
  misc_feature 1..20: note = Target: SCN10A; (-) strand; PAM type: NRG; PAM sequence: AAG
  source 1..20: mol_type = other DNA
aaaattgagactcagagatc

SEQ ID NO: 13899 - DNA, 20 bp, synthetic construct
  misc_feature 1..20: note = Description of Artificial Sequence: Synthetic oligonucleotide
  misc_feature 1..20: note = Target: SCN10A; (-) strand; PAM type: NRG; PAM sequence: GAG
  source 1..20: mol_type = other DNA
acatttaaaattgagactca

SEQ ID NO: 13900 - DNA, 20 bp, synthetic construct
  misc_feature 1..20: note = Description of Artificial Sequence: Synthetic oligonucleotide
  misc_feature 1..20: note = Target: SCN10A; (-) strand; PAM type: NRG; PAM sequence: CAG
  source 1..20: mol_type = other DNA
atacatttaaaattgagact

SEQ ID NO: 13901 - DNA, 20 bp, synthetic construct
  misc_feature 1..20: note = Description of Artificial Sequence: Synthetic oligonucleotide
  misc_feature 1..20: note = Target: SCN10A; (-) strand; PAM type: NRG; PAM sequence: GAG
  source 1..20: mol_type = other DNA
tattttatacatttaaaatt

SEQ ID NO: 13902 - DNA, 20 bp, synthetic construct
  misc_feature 1..20: note = Description of Artificial Sequence: Synthetic oligonucleotide
  misc_feature 1..20: note = Target: SCN10A; (-) strand; PAM type: NRG; PAM sequence: AGG
  source 1..20: mol_type = other DNA
tcacagcagccctgtcaagc

SEQ ID NO: 13903 - DNA, 20 bp, synthetic construct
  misc_feature 1..20: note = Description of Artificial Sequence: Synthetic oligonucleotide
  misc_feature 1..20: note = Target: SCN10A; (-) strand; PAM type: NRG; PAM sequence: CAG
  source 1..20: mol_type = other DNA
ttcacagcagccctgtcaag

SEQ ID NO: 13904 - DNA, 20 bp, synthetic construct
  misc_feature 1..20: note = Description of Artificial Sequence: Synthetic oligonucleotide
  misc_feature 1..20: note = Target: SCN10A; (-) strand; PAM type: NRG; PAM sequence: AAG
  source 1..20: mol_type = other DNA
atgttcacagcagccctgtc

SEQ ID NO: 13905 - DNA, 20 bp, synthetic construct
  misc_feature 1..20: note = Description of Artificial Sequence: Synthetic oligonucleotide
  misc_feature 1..20: note = Target: SCN10A; (-) strand; PAM type: NRG; PAM sequence: CAG
  source 1..20: mol_type = other DNA
ggctccatgaatgttcacag

SEQ ID NO: 13906 - DNA, 20 bp, synthetic construct
  misc_feature 1..20: note = Description of Artificial Sequence: Synthetic oligonucleotide
  misc_feature 1..20: note = Target: SCN10A; (-) strand; PAM type: NRG; PAM sequence: CAG
  source 1..20: mol_type = other DNA
ctgggctccatgaatgttca

SEQ ID NO: 13907 - DNA, 20 bp, synthetic construct
  misc_feature 1..20: note = Description of Artificial Sequence: Synthetic oligonucleotide
  misc_feature 1..20: note = Target: SCN10A; (-) strand; PAM type: NRG; PAM sequence: GGG
  source 1..20: mol_type = other DNA
taagttctgagcactgagct

SEQ ID NO: 13908 - DNA, 20 bp, synthetic construct
  misc_feature 1..20: note = Description of Artificial Sequence: Synthetic oligonucleotide
  misc_feature 1..20: note = Target: SCN10A; (-) strand; PAM type: NRG; PAM sequence: TGG
  source 1..20: mol_type = other DNA
ctaagttctgagcactgagc

SEQ ID NO: 13909 - DNA, 20 bp, synthetic construct
  misc_feature 1..20: note = Description of Artificial Sequence: Synthetic oligonucleotide
  misc_feature 1..20: note = Target: SCN10A; (-) strand; PAM type: NRG; PAM sequence: GAG
  source 1..20: mol_type = other DNA
cttcctaagttctgagcact

SEQ ID NO: 13910 - DNA, 20 bp, synthetic construct
  misc_feature 1..20: note = Description of Artificial Sequence: Synthetic oligonucleotide
  misc_feature 1..20: note = Target: SCN10A; (-) strand; PAM type: NRG; PAM sequence: GAG
  source 1..20: mol_type = other DNA
ctgaatacttcctaagttct

SEQ ID NO: 13911 - DNA, 20 bp, synthetic construct
  misc_feature 1..20: note = Description of Artificial Sequence: Synthetic oligonucleotide
  misc_feature 1..20: note = Target: SCN10A; (-) strand; PAM type: NRG; PAM sequence: AAG
  source 1..20: mol_type = other DNA
gccttgactgaatacttcct

SEQ ID NO: 13912 - DNA, 20 bp, synthetic construct
  misc_feature 1..20: note = Description of Artificial Sequence: Synthetic oligonucleotide
  misc_feature 1..20: note = Target: SCN10A; (-) strand; PAM type: NRG; PAM sequence: GAG
  source 1..20: mol_type = other DNA
gaggctaacatggggaaatg

SEQ ID NO: 13913 - DNA, 20 bp, synthetic construct
  misc_feature 1..20: note = Description of Artificial Sequence: Synthetic oligonucleotide
  misc_feature 1..20: note = Target: SCN10A; (-) strand; PAM type: NRG; PAM sequence: TGG
  source 1..20: mol_type = other DNA
tagaggctaacatggggaaa

SEQ ID NO: 13914 - DNA, 20 bp, synthetic construct
  misc_feature 1..20: note = Description of Artificial Sequence: Synthetic oligonucleotide
  misc_feature 1..20: note = Target: SCN10A; (-) strand; PAM type: NRG; PAM sequence: GGG
  source 1..20: mol_type = other DNA
tagagttagaggctaacatg

SEQ ID NO: 13915 - DNA, 20 bp, synthetic construct
  misc_feature 1..20: note = Description of Artificial Sequence: Synthetic oligonucleotide
  misc_feature 1..20: note = Target: SCN10A; (-) strand; PAM type: NRG; PAM sequence: GGG
  source 1..20: mol_type = other DNA
ctagagttagaggctaacat

SEQ ID NO: 13916 - DNA, 20 bp, synthetic construct
  misc_feature 1..20: note = Description of Artificial Sequence: Synthetic oligonucleotide
  misc_feature 1..20: note = Target: SCN10A; (-) strand; PAM type: NRG; PAM sequence: TGG
  source 1..20: mol_type = other DNA
actagagttagaggctaaca

SEQ ID NO: 13917 - DNA, 20 bp, synthetic construct
  misc_feature 1..20: note = Description of Artificial Sequence: Synthetic oligonucleotide
  misc_feature 1..20: note = Target: SCN10A; (-) strand; PAM type: NRG; PAM sequence: AGG
  source 1..20: mol_type = other DNA
gagaaaattactagagttag

SEQ ID NO: 13918 - DNA, 20 bp, synthetic construct
  misc_feature 1..20: note = Description of Artificial Sequence: Synthetic oligonucleotide
  misc_feature 1..20: note = Target: SCN10A; (-) strand; PAM type: NRG; PAM sequence: GAG
  source 1..20: mol_type = other DNA
agagaaaattactagagtta

SEQ ID NO: 13919 - DNA, 20 bp, synthetic construct
  misc_feature 1..20: note = Description of Artificial Sequence: Synthetic oligonucleotide
  misc_feature 1..20: note = Target: SCN10A; (-) strand; PAM type: NRG; PAM sequence: TAG
  source 1..20: mol_type = other DNA
tcagagaaaattactagagt

SEQ ID NO: 13920 - DNA, 20 bp, synthetic construct
  misc_feature 1..20: note = Description of Artificial Sequence: Synthetic oligonucleotide
  misc_feature 1..20: note = Target: SCN10A; (-) strand; PAM type: NRG; PAM sequence: GAG
  source 1..20: mol_type = other DNA
gtgttcagagaaaattacta

SEQ ID NO: 13921 - DNA, 20 bp, synthetic construct
  misc_feature 1..20: note = Description of Artificial Sequence: Synthetic oligonucleotide
  misc_feature 1..20: note = Target: SCN10A; (-) strand; PAM type: NRG; PAM sequence: TAG
  source 1..20: mol_type = other DNA
tggtgttcagagaaaattac

SEQ ID NO: 13922 - DNA, 20 bp, synthetic construct
  misc_feature 1..20: note = Description of Artificial Sequence: Synthetic oligonucleotide
  misc_feature 1..20: note = Target: SCN10A; (-) strand; PAM type: NRG; PAM sequence: GAG
  source 1..20: mol_type = other DNA
tttgggtccagtggtgttca

SEQ ID NO: 13923 - DNA, 20 bp, synthetic construct
  misc_feature 1..20: note = Description of Artificial Sequence: Synthetic oligonucleotide
  misc_feature 1..20: note = Target: SCN10A; (-) strand; PAM type: NRG; PAM sequence: CAG
  source 1..20: mol_type = other DNA
attttgggtccagtggtgtt

SEQ ID NO: 13924 - DNA, 20 bp, synthetic construct
  misc_feature 1..20: note = Description of Artificial Sequence: Synthetic oligonucleotide
  misc_feature 1..20: note = Target: SCN10A; (-) strand; PAM type: NRG; PAM sequence: TGG
  source 1..20: mol_type = other DNA
gcccagtattttgggtccag

SEQ ID NO: 13925 - DNA, 20 bp, synthetic construct
  misc_feature 1..20: note = Description of Artificial Sequence: Synthetic oligonucleotide
  misc_feature 1..20: note = Target: SCN10A; (-) strand; PAM type: NRG; PAM sequence: CAG
  source 1..20: mol_type = other DNA
caggcccagtattttgggtc

SEQ ID NO: 13926 - DNA, 20 bp, synthetic construct
  misc_feature 1..20: note = Description of Artificial Sequence: Synthetic oligonucleotide
  misc_feature 1..20: note = Target: SCN10A; (-) strand; PAM type: NRG; PAM sequence: GGG
  source 1..20: mol_type = other DNA
aatgacaggcccagtatttt

SEQ ID NO: 13927 - DNA, 20 bp, synthetic construct
  misc_feature 1..20: note = Description of Artificial Sequence: Synthetic oligonucleotide
  misc_feature 1..20: note = Target: SCN10A; (-) strand; PAM type: NRG; PAM sequence: TGG
  source 1..20: mol_type = other DNA
gaatgacaggcccagtattt

SEQ ID NO: 13928 - DNA, 20 bp, synthetic construct
  misc_feature 1..20: note = Description of Artificial Sequence: Synthetic oligonucleotide
  misc_feature 1..20: note = Target: SCN10A; (-) strand; PAM type: NRG; PAM sequence: CAG
  source 1..20: mol_type = other DNA
gtgttgttgaatgacaggcc

SEQ ID NO: 13929 - DNA, 20 bp, synthetic construct
  misc_feature 1..20: note = Description of Artificial Sequence: Synthetic oligonucleotide
  misc_feature 1..20: note = Target: SCN10A; (-) strand; PAM type: NRG; PAM sequence: AGG
  source 1..20: mol_type = other DNA
tctgggtgttgttgaatgac

SEQ ID NO: 13930 - DNA, 20 bp, synthetic construct
  misc_feature 1..20: note = Description of Artificial Sequence: Synthetic oligonucleotide
  misc_feature 1..20: note = Target: SCN10A; (-) strand; PAM type: NRG; PAM sequence: CAG
  source 1..20: mol_type = other DNA
gtctgggtgttgttgaatga

SEQ ID NO: 13931 - DNA, 20 bp, synthetic construct
  misc_feature 1..20: note = Description of Artificial Sequence: Synthetic oligonucleotide
  misc_feature 1..20: note = Target: SCN10A; (-) strand; PAM type: NRG; PAM sequence: GGG
  source 1..20: mol_type = other DNA
atactgttaaggcccagtct

SEQ ID NO: 13932 - DNA, 20 bp, synthetic construct
  misc_feature 1..20: note = Description of Artificial Sequence: Synthetic oligonucleotide
  misc_feature 1..20: note = Target: SCN10A; (-) strand; PAM type: NRG; PAM sequence: TGG
  source 1..20: mol_type = other DNA
aatactgttaaggcccagtc

SEQ ID NO: 13933 - DNA, 20 bp, synthetic construct
  misc_feature 1..20: note = Description of Artificial Sequence: Synthetic oligonucleotide
  misc_feature 1..20: note = Target: SCN10A; (-) strand; PAM type: NRG; PAM sequence: CAG
  source 1..20: mol_type = other DNA
aaattaatactgttaaggcc

SEQ ID NO: 13934 - DNA, 20 bp, synthetic construct
  misc_feature 1..20: note = Description of Artificial Sequence: Synthetic oligonucleotide
  misc_feature 1..20: note = Target: SCN10A; (-) strand; PAM type: NRG; PAM sequence: AGG
  source 1..20: mol_type = other DNA
ccaagaaattaatactgtta

SEQ ID NO: 13935 - DNA, 20 bp, synthetic construct
  misc_feature 1..20: note = Description of Artificial Sequence: Synthetic oligonucleotide
  misc_feature 1..20: note = Target: SCN10A; (-) strand; PAM type: NRG; PAM sequence: AAG
  source 1..20: mol_type = other DNA
gccaagaaattaatactgtt

SEQ ID NO: 13936 - DNA, 20 bp, synthetic construct
  misc_feature 1..20: note = Description of Artificial Sequence: Synthetic oligonucleotide
  misc_feature 1..20: note = Target: SCN10A; (-) strand; PAM type: NRG; PAM sequence: AAG
  source 1..20: mol_type = other DNA
aaagtcaagatatcaatgcc

SEQ ID NO: 13937 - DNA, 20 bp, synthetic construct
  misc_feature 1..20: note = Description of Artificial Sequence: Synthetic oligonucleotide
  misc_feature 1..20: note = Target: SCN10A; (-) strand; PAM type: NRG; PAM sequence: AAG
  source 1..20: mol_type = other DNA
acatgagtgatagaaaagtc

SEQ ID NO: 13938 - DNA, 20 bp, synthetic construct
  misc_feature 1..20: note = Description of Artificial Sequence: Synthetic oligonucleotide
  misc_feature 1..20: note = Target: SCN10A; (-) strand; PAM type: NRG; PAM sequence: AAG
  source 1..20: mol_type = other DNA
agggaacatgagtgatagaa

SEQ ID NO: 13939 - DNA, 20 bp, synthetic construct
  misc_feature 1..20: note = Description of Artificial Sequence: Synthetic oligonucleotide
  misc_feature 1..20: note = Target: SCN10A; (-) strand; PAM type: NRG; PAM sequence: TAG
  source 1..20: mol_type = other DNA
ctattagggaacatgagtga

SEQ ID NO: 13940 - DNA, 20 bp, synthetic construct
  misc_feature 1..20: note = Description of Artificial Sequence: Synthetic oligonucleotide
  misc_feature 1..20: note = Target: SCN10A; (-) strand; PAM type: NRG; PAM sequence: GAG
  source 1..20: mol_type = other DNA
actgttctattagggaacat

SEQ ID NO: 13941 - DNA, 20 bp, synthetic construct
  misc_feature 1..20: note = Description of Artificial Sequence: Synthetic oligonucleotide
  misc_feature 1..20: note = Target: SCN10A; (-) strand; PAM type: NRG; PAM sequence: GGG
  source 1..20: mol_type = other DNA
tctacacaactgttctatta

SEQ ID NO: 13942 - DNA, 20 bp, synthetic construct
  misc_feature 1..20: note = Description of Artificial Sequence: Synthetic oligonucleotide
  misc_feature 1..20: note = Target: SCN10A; (-) strand; PAM type: NRG; PAM sequence: AGG
  source 1..20: mol_type = other DNA
ctctacacaactgttctatt

SEQ ID NO: 13943 - DNA, 20 bp, synthetic construct
  misc_feature 1..20: note = Description of Artificial Sequence: Synthetic oligonucleotide
  misc_feature 1..20: note = Target: SCN10A; (-) strand; PAM type: NRG; PAM sequence: TAG
  source 1..20: mol_type = other DNA
tctctacacaactgttctat

SEQ ID NO: 13944 - DNA, 20 bp, synthetic construct
  misc_feature 1..20: note = Description of Artificial Sequence: Synthetic oligonucleotide
  misc_feature 1..20: note = Target: SCN10A; (-) strand; PAM type: NRG; PAM sequence: TGG
  source 1..20: mol_type = other DNA
agattctcaagtctagggtc

SEQ ID NO: 13945 - DNA, 20 bp, synthetic construct
  misc_feature 1..20: note = Description of Artificial Sequence: Synthetic oligonucleotide
  misc_feature 1..20: note = Target: SCN10A; (-) strand; PAM type: NRG; PAM sequence: GGG
  source 1..20: mol_type = other DNA
aaaggagattctcaagtcta

SEQ ID NO: 13946 - DNA, 20 bp, synthetic construct
  misc_feature 1..20: note = Description of Artificial Sequence: Synthetic oligonucleotide
  misc_feature 1..20: note = Target: SCN10A; (-) strand; PAM type: NRG; PAM sequence: AGG
  source 1..20: mol_type = other DNA
caaaggagattctcaagtct

SEQ ID NO: 13947 - DNA, 20 bp, synthetic construct
  misc_feature 1..20: note = Description of Artificial Sequence: Synthetic oligonucleotide
  misc_feature 1..20: note = Target: SCN10A; (-) strand; PAM type: NRG; PAM sequence: TAG
  source 1..20: mol_type = other DNA
tcaaaggagattctcaagtc

SEQ ID NO: 13948 - DNA, 20 bp, synthetic construct
  misc_feature 1..20: note = Description of Artificial Sequence: Synthetic oligonucleotide
  misc_feature 1..20: note = Target: SCN10A; (-) strand; PAM type: NRG; PAM sequence: AAG
  source 1..20: mol_type = other DNA
attgttcaaaggagattctc

SEQ ID NO: 13949 - DNA, 20 bp, synthetic construct
  misc_feature 1..20: note = Description of Artificial Sequence: Synthetic oligonucleotide
  misc_feature 1..20: note = Target: SCN10A; (-) strand; PAM type: NRG; PAM sequence: GAG
  source 1..20: mol_type = other DNA
tgggaggagattgttcaaag

SEQ ID NO: 13950 - DNA, 20 bp, synthetic construct
  misc_feature 1..20: note = Description of Artificial Sequence: Synthetic oligonucleotide
  misc_feature 1..20: note = Target: SCN10A; (-) strand; PAM type: NRG; PAM sequence: AGG
  source 1..20: mol_type = other DNA
actgggaggagattgttcaa

SEQ ID NO: 13951 - DNA, 20 bp, synthetic construct
  misc_feature 1..20: note = Description of Artificial Sequence: Synthetic oligonucleotide
  misc_feature 1..20: note = Target: SCN10A; (-) strand; PAM type: NRG; PAM sequence: AAG
  source 1..20: mol_type = other DNA
gactgggaggagattgttca

SEQ ID NO: 13952 - DNA, 20 bp, synthetic construct
  misc_feature 1..20: note = Description of Artificial Sequence: Synthetic oligonucleotide
  misc_feature 1..20: note = Target: SCN10A; (-) strand; PAM type: NRG; PAM sequence: GAG
  source 1..20: mol_type = other DNA
aagtgaggaaagactgggag

SEQ ID NO: 13953 - DNA, 20 bp, synthetic construct
  misc_feature 1..20: note = Description of Artificial Sequence: Synthetic oligonucleotide
  misc_feature 1..20: note = Target: SCN10A; (-) strand; PAM type: NRG; PAM sequence: AGG
  source 1..20: mol_type = other DNA
caaagtgaggaaagactggg

SEQ ID NO: 13954 - DNA, 20 bp, synthetic construct
  misc_feature 1..20: note = Description of Artificial Sequence: Synthetic oligonucleotide
  misc_feature 1..20: note = Target: SCN10A; (-) strand; PAM type: NRG; PAM sequence: GAG
  source 1..20: mol_type = other DNA
tcaaagtgaggaaagactgg

SEQ ID NO: 13955 - DNA, 20 bp, synthetic construct
  misc_feature 1..20: note = Description of Artificial Sequence: Synthetic oligonucleotide
  misc_feature 1..20: note = Target: SCN10A; (-) strand; PAM type: NRG; PAM sequence: GGG
  source 1..20: mol_type = other DNA
catcaaagtgaggaaagact

SEQ ID NO: 13956 - DNA, 20 bp, synthetic construct
  misc_feature 1..20: note = Description of Artificial Sequence: Synthetic oligonucleotide
  misc_feature 1..20: note = Target: SCN10A; (-) strand; PAM type: NRG; PAM sequence: TGG
  source 1..20: mol_type = other DNA
ccatcaaagtgaggaaagac

SEQ ID NO: 13957 - DNA, 20 bp, synthetic construct
  misc_feature 1..20: note = Description of Artificial Sequence: Synthetic oligonucleotide
  misc_feature 1..20: note = Target: SCN10A; (-) strand; PAM type: NRG; PAM sequence: AAG
  source 1..20: mol_type = other DNA
gattgccatcaaagtgagga

SEQ ID NO: 13958 - DNA, 20 bp, synthetic construct
  misc_feature 1..20: note = Description of Artificial Sequence: Synthetic oligonucleotide
  misc_feature 1..20: note = Target: SCN10A; (-) strand; PAM type: NRG; PAM sequence: AGG
  source 1..20: mol_type = other DNA
gatggattgccatcaaagtg

SEQ ID NO: 13959 - DNA, 20 bp, synthetic construct
  misc_feature 1..20: note = Description of Artificial Sequence: Synthetic oligonucleotide
  misc_feature 1..20: note = Target: SCN10A; (-) strand; PAM type: NRG; PAM sequence: GAG
  source 1..20: mol_type = other DNA
agatggattgccatcaaagt

SEQ ID NO: 13960 - DNA, 20 bp, synthetic construct
  misc_feature 1..20: note = Description of Artificial Sequence: Synthetic oligonucleotide
  misc_feature 1..20: note = Target: SCN10A; (-) strand; PAM type: NRG; PAM sequence: AAG
  source 1..20: mol_type = other DNA
aaggagatggattgccatca

SEQ ID NO: 13961 - DNA, 20 bp, synthetic construct
  misc_feature 1..20: note = Description of Artificial Sequence: Synthetic oligonucleotide
  misc_feature 1..20: note = Target: SCN10A; (-) strand; PAM type: NRG; PAM sequence: TGG
  source 1..20: mol_type = other DNA
atctgttctggaaaaggaga

SEQ ID NO: 13962 - DNA, 20 bp, synthetic construct
  misc_feature 1..20: note = Description of Artificial Sequence: Synthetic oligonucleotide
  misc_feature 1..20: note = Target: SCN10A; (-) strand; PAM type: NRG; PAM sequence: GAG
  source 1..20: mol_type = other DNA
taaaatctgttctggaaaag

SEQ ID NO: 13963 - DNA, 20 bp, synthetic construct
  misc_feature 1..20: note = Description of Artificial Sequence: Synthetic oligonucleotide
  misc_feature 1..20: note = Target: SCN10A; (-) strand; PAM type: NRG; PAM sequence: AGG
  source 1..20: mol_type = other DNA
cttaaaatctgttctggaaa

SEQ ID NO: 13964 - DNA, 20 bp, synthetic construct
  misc_feature 1..20: note = Description of Artificial Sequence: Synthetic oligonucleotide
  misc_feature 1..20: note = Target: SCN10A; (-) strand; PAM type: NRG; PAM sequence: AAG
  source 1..20: mol_type = other DNA
tcttaaaatctgttctggaa

SEQ ID NO: 13965 - DNA, 20 bp, synthetic construct
  misc_feature 1..20: note = Description of Artificial Sequence: Synthetic oligonucleotide
  misc_feature 1..20: note = Target: SCN10A; (-) strand; PAM type: NRG; PAM sequence: TGG
  source 1..20: mol_type = other DNA
atgagtcttaaaatctgttc

SEQ ID NO: 13966 - DNA, 20 bp, synthetic construct
  misc_feature 1..20: note = Description of Artificial Sequence: Synthetic oligonucleotide
  misc_feature 1..20: note = Target: SCN10A; (-) strand; PAM type: NRG; PAM sequence: GAG
  source 1..20: mol_type = other DNA
caggtggtgtaatgtgagat

SEQ ID NO: 13967 - DNA, 20 bp, synthetic construct
  misc_feature 1..20: note = Description of Artificial Sequence: Synthetic oligonucleotide
  misc_feature 1..20: note = Target: SCN10A; (-) strand; PAM type: NRG; PAM sequence: GAG
  source 1..20: mol_type = other DNA
gggggcaggtggtgtaatgt

SEQ ID NO: 13968 - DNA, 20 bp, synthetic construct
  misc_feature 1..20: note = Description of Artificial Sequence: Synthetic oligonucleotide
  misc_feature 1..20: note = Target: SCN10A; (-) strand; PAM type: NRG; PAM sequence: TGG
  source 1..20: mol_type = other DNA
tcttgaaagcagggggcagg

SEQ ID NO: 13969 - DNA, 20 bp, synthetic construct
  misc_feature 1..20: note = Description of Artificial Sequence: Synthetic oligonucleotide
  misc_feature 1..20: note = Target: SCN10A; (-) strand; PAM type: NRG; PAM sequence: AGG
  source 1..20: mol_type = other DNA
tggtcttgaaagcagggggc

SEQ ID NO: 13970 - DNA, 20 bp, synthetic construct
  misc_feature 1..20: note = Description of Artificial Sequence: Synthetic oligonucleotide
  misc_feature 1..20: note = Target: SCN10A; (-) strand; PAM type: NRG; PAM sequence: CAG
  source 1..20: mol_type = other DNA
atggtcttgaaagcaggggg

SEQ ID NO: 13971 - DNA, 20 bp, synthetic construct
  misc_feature 1..20: note = Description of Artificial Sequence: Synthetic oligonucleotide
  misc_feature 1..20: note = Target: SCN10A; (-) strand; PAM type: NRG; PAM sequence: GGG
  source 1..20: mol_type = other DNA
tttatggtcttgaaagcagg

SEQ ID NO: 13972 - DNA, 20 bp, synthetic construct
  misc_feature 1..20: note = Description of Artificial Sequence: Synthetic oligonucleotide
  misc_feature 1..20: note = Target: SCN10A; (-) strand; PAM type: NRG; PAM sequence: GGG
  source 1..20: mol_type = other DNA
ttttatggtcttgaaagcag

SEQ ID NO: 13973 - DNA, 20 bp, synthetic construct
  misc_feature 1..20: note = Description of Artificial Sequence: Synthetic oligonucleotide
  misc_feature 1..20: note = Target: SCN10A; (-) strand; PAM type: NRG; PAM sequence: GGG
  source 1..20: mol_type = other DNA
cttttatggtcttgaaagca

SEQ ID NO: 13974 - DNA, 20 bp, synthetic construct
  misc_feature 1..20: note = Description of Artificial Sequence: Synthetic oligonucleotide
  misc_feature 1..20: note = Target: SCN10A; (-) strand; PAM type: NRG; PAM sequence: AGG
  source 1..20: mol_type = other DNA
acttttatggtcttgaaagc

SEQ ID NO: 13975 - DNA, 20 bp, synthetic construct
  misc_feature 1..20: note = Description of Artificial Sequence: Synthetic oligonucleotide
  misc_feature 1..20: note = Target: SCN10A; (-) strand; PAM type: NRG; PAM sequence: CAG
  source 1..20: mol_type = other DNA
tacttttatggtcttgaaag

SEQ ID NO: 13976 - DNA, 20 bp, synthetic construct
  misc_feature 1..20: note = Description of Artificial Sequence: Synthetic oligonucleotide
  misc_feature 1..20: note = Target: SCN10A; (-) strand; PAM type: NRG; PAM sequence: AAG
  source 1..20: mol_type = other DNA
ccttacttttatggtcttga

SEQ ID NO: 13977 - DNA, 20 bp, synthetic construct
  misc_feature 1..20: note = Description of Artificial Sequence: Synthetic oligonucleotide
  misc_feature 1..20: note = Target: SCN10A; (-) strand; PAM type: NRG; PAM sequence: TGG
  source 1..20: mol_type = other DNA
tccagcagaccttactttta

SEQ ID NO: 13978 - DNA, 20 bp, synthetic construct
  misc_feature 1..20: note = Description of Artificial Sequence: Synthetic oligonucleotide
  misc_feature 1..20: note = Target: SCN10A; (-) strand; PAM type: NRG; PAM sequence: CAG
  source 1..20: mol_type = other DNA
taagatgatggagtctccag

SEQ ID NO: 13979 - DNA, 20 bp, synthetic construct
  misc_feature 1..20: note = Description of Artificial Sequence: Synthetic oligonucleotide
  misc_feature 1..20: note = Target: SCN10A; (-) strand; PAM type: NRG; PAM sequence: CAG
  source 1..20: mol_type = other DNA
ccgtaagatgatggagtctc

SEQ ID NO: 13980 - DNA, 20 bp, synthetic construct
  misc_feature 1..20: note = Description of Artificial Sequence: Synthetic oligonucleotide
  misc_feature 1..20: note = Target: SCN10A; (-) strand; PAM type: NRG; PAM sequence: GAG
  source 1..20: mol_type = other DNA
cctcagaccgtaagatgatg

SEQ ID NO: 13981 - DNA, 20 bp, synthetic construct
  misc_feature 1..20: note = Description of Artificial Sequence: Synthetic oligonucleotide
  misc_feature 1..20: note = Target: SCN10A; (-) strand; PAM type: NRG; PAM sequence: TGG
  source 1..20: mol_type = other DNA
aacctcagaccgtaagatga

SEQ ID NO: 13982 - DNA, 20 bp, synthetic construct
  misc_feature 1..20: note = Description of Artificial Sequence: Synthetic oligonucleotide
  misc_feature 1..20: note = Target: SCN10A; (-) strand; PAM type: NRG; PAM sequence: AAG
  source 1..20: mol_type = other DNA
tcctgagaacctcagaccgt

SEQ ID NO: 13983 - DNA, 20 bp, synthetic construct
  misc_feature 1..20: note = Description of Artificial Sequence: Synthetic oligonucleotide
  misc_feature 1..20: note = Target: SCN10A; (-) strand; PAM type: NRG; PAM sequence: CAG
  source 1..20: mol_type = other DNA
atcactcctcctgagaacct

SEQ ID NO: 13984 - DNA, 20 bp, synthetic construct
  misc_feature 1..20: note = Description of Artificial Sequence: Synthetic oligonucleotide
  misc_feature 1..20: note = Target: SCN10A; (-) strand; PAM type: NRG; PAM sequence: GAG
  source 1..20: mol_type = other DNA
agggaataatcactcctcct

SEQ ID NO: 13985 - DNA, 20 bp, synthetic construct
  misc_feature 1..20: note = Description of Artificial Sequence: Synthetic oligonucleotide
  misc_feature 1..20: note = Target: SCN10A; (-) strand; PAM type: NRG; PAM sequence: GGG
  source 1..20: mol_type = other DNA
tagaacctcaggggctgaca

SEQ ID NO: 13986 - DNA, 20 bp, synthetic construct
  misc_feature 1..20: note = Description of Artificial Sequence: Synthetic oligonucleotide
  misc_feature 1..20: note = Target: SCN10A; (-) strand; PAM type: NRG; PAM sequence: AGG
  source 1..20: mol_type = other DNA
ctagaacctcaggggctgac

SEQ ID NO: 13987 - DNA, 20 bp, synthetic construct
  misc_feature 1..20: note = Description of Artificial Sequence: Synthetic oligonucleotide
  misc_feature 1..20: note = Target: SCN10A; (-) strand; PAM type: NRG; PAM sequence: CAG
  source 1..20: mol_type = other DNA
gctagaacctcaggggctga

SEQ ID NO: 13988 - DNA, 20 bp, synthetic construct
  misc_feature 1..20: note = Description of Artificial Sequence: Synthetic oligonucleotide
  misc_feature 1..20: note = Target: SCN10A; (-) strand; PAM type: NRG; PAM sequence: GGG
  source 1..20: mol_type = other DNA
gcccatggctagaacctcag

SEQ ID NO: 13989 - DNA, 20 bp, synthetic construct
  misc_feature 1..20: note = Description of Artificial Sequence: Synthetic oligonucleotide
  misc_feature 1..20: note = Target: SCN10A; (-) strand; PAM type: NRG; PAM sequence: GGG
  source 1..20: mol_type = other DNA
agcccatggctagaacctca

SEQ ID NO: 13990 - DNA, 20 bp, synthetic construct
  misc_feature 1..20: note = Description of Artificial Sequence: Synthetic oligonucleotide
  misc_feature 1..20: note = Target: SCN10A; (-) strand; PAM type: NRG; PAM sequence: AGG
  source 1..20: mol_type = other DNA
cagcccatggctagaacctc

SEQ ID NO: 13991 - DNA, 20 bp, synthetic construct
  misc_feature 1..20: note = Description of Artificial Sequence: Synthetic oligonucleotide
  misc_feature 1..20: note = Target: SCN10A; (-) strand; PAM type: NRG; PAM sequence: CAG
  source 1..20: mol_type = other DNA
acagcccatggctagaacct

SEQ ID NO: 13992 - DNA, 20 bp, synthetic construct
  misc_feature 1..20: note = Description of Artificial Sequence: Synthetic oligonucleotide
  misc_feature 1..20: note = Target: SCN10A; (-) strand; PAM type: NRG; PAM sequence: TAG
  source 1..20: mol_type = other DNA
ctgtgtgcacagcccatggc

SEQ ID NO: 13993 - DNA, 20 bp, synthetic construct
  misc_feature 1..20: note = Description of Artificial Sequence: Synthetic oligonucleotide
  misc_feature 1..20: note = Target: SCN10A; (-) strand; PAM type: NRG; PAM sequence: TGG
  source 1..20: mol_type = other DNA
cctactgtgtgcacagccca

SEQ ID NO: 13994 - DNA, 20 bp, synthetic construct
  misc_feature 1..20: note = Description of Artificial Sequence: Synthetic oligonucleotide
  misc_feature 1..20: note = Target: SCN10A; (-) strand; PAM type: NRG; PAM sequence: CAG
  source 1..20: mol_type = other DNA
tcaggcacctactgtgtgca

SEQ ID NO: 13995 - DNA, 20 bp, synthetic construct
  misc_feature 1..20: note = Description of Artificial Sequence: Synthetic oligonucleotide
  misc_feature 1..20: note = Target: SCN10A; (-) strand; PAM type: NRG; PAM sequence: AGG
  source 1..20: mol_type = other DNA
tgctcacacgaagtgttttc

SEQ ID NO: 13996 - DNA, 20 bp, synthetic construct
  misc_feature 1..20: note = Description of Artificial Sequence: Synthetic oligonucleotide
  misc_feature 1..20: note = Target: SCN10A; (-) strand; PAM type: NRG; PAM sequence: CAG
  source 1..20: mol_type = other DNA
atgctcacacgaagtgtttt

SEQ ID NO: 13997 - DNA, 20 bp, synthetic construct
  misc_feature 1..20: note = Description of Artificial Sequence: Synthetic oligonucleotide
  misc_feature 1..20: note = Target: SCN10A; (-) strand; PAM type: NRG; PAM sequence: AAG
  source 1..20: mol_type = other DNA
gccttctccatgctcacacg

SEQ ID NO: 13998 - DNA, 20 bp, synthetic construct
  misc_feature 1..20: note = Description of Artificial Sequence: Synthetic oligonucleotide
  misc_feature 1..20: note = Target: SCN10A; (-) strand; PAM type: NRG; PAM sequence: TGG
  source 1..20: mol_type = other DNA
gtgaaatgaagaggttctct

SEQ ID NO: 13999 - DNA, 20 bp, synthetic construct
  misc_feature 1..20: note = Description of Artificial Sequence: Synthetic oligonucleotide
  misc_feature 1..20: note = Target: SCN10A; (-) strand; PAM type: NRG; PAM sequence: AGG
  source 1..20: mol_type = other DNA
gctctctcagtgaaatgaag

SEQ ID NO: 14000 - DNA, 20 bp, synthetic construct
  misc_feature 1..20: note = Description of Artificial Sequence: Synthetic oligonucleotide
  misc_feature 1..20: note = Target: SCN10A; (-) strand; PAM type: NRG; PAM sequence: GAG
  source 1..20: mol_type = other DNA
tgctctctcagtgaaatgaa

SEQ ID NO: 14001 - DNA, 20 bp, synthetic construct
  misc_feature 1..20: note = Description of Artificial Sequence: Synthetic oligonucleotide
  misc_feature 1..20: note = Target: SCN10A; (-) strand; PAM type: NRG; PAM sequence: AAG
  source 1..20: mol_type = other DNA
gctgctctctcagtgaaatg

SEQ ID NO: 14002 - DNA, 20 bp, synthetic construct
  misc_feature 1..20: note = Description of Artificial Sequence: Synthetic oligonucleotide
  misc_feature 1..20: note = Target: SCN10A; (-) strand; PAM type: NRG; PAM sequence: CAG
  source 1..20: mol_type = other DNA
aatgccttgggctgctctct

SEQ ID NO: 14003 - DNA, 20 bp, synthetic construct
  misc_feature 1..20: note = Description of Artificial Sequence: Synthetic oligonucleotide
  misc_feature 1..20: note = Target: SCN10A; (-) strand; PAM type: NRG; PAM sequence: GGG
  source 1..20: mol_type = other DNA
tagcaagttttaaatgcctt

SEQ ID NO: 14004 - DNA, 20 bp, synthetic construct
  misc_feature 1..20: note = Description of Artificial Sequence: Synthetic oligonucleotide
  misc_feature 1..20: note = Target: SCN10A; (-) strand; PAM type: NRG; PAM sequence: TGG
  source 1..20: mol_type = other DNA
gtagcaagttttaaatgcct

SEQ ID NO: 14005 - DNA, 20 bp, synthetic construct
  misc_feature 1..20: note = Description of Artificial Sequence: Synthetic oligonucleotide
  misc_feature 1..20: note = Target: SCN10A; (-) strand; PAM type: NRG; PAM sequence: AAG
  source 1..20: mol_type = other DNA
tgcagctttccaagagtagc

SEQ ID NO: 14006 - DNA, 20 bp, synthetic construct
  misc_feature 1..20: note = Description of Artificial Sequence: Synthetic oligonucleotide
  misc_feature 1..20: note = Target: SCN10A; (-) strand; PAM type: NRG; PAM sequence: TAG
  source 1..20: mol_type = other DNA
tatttgcagctttccaagag

SEQ ID NO: 14007 - DNA, 20 bp, synthetic construct
  misc_feature 1..20: note = Description of Artificial Sequence: Synthetic oligonucleotide
  misc_feature 1..20: note = Target: SCN10A; (-) strand; PAM type: NRG; PAM sequence: GAG
  source 1..20: mol_type = other DNA
ctgtatttgcagctttccaa

SEQ ID NO: 14008 - DNA, 20 bp, synthetic construct
  misc_feature 1..20: note = Description of Artificial Sequence: Synthetic oligonucleotide
  misc_feature 1..20: note = Target: SCN10A; (-) strand; PAM type: NRG; PAM sequence: AAG
  source 1..20: mol_type = other DNA
ccctgtatttgcagctttcc

SEQ ID NO: 14009 - DNA, 20 bp, synthetic construct
  misc_feature 1..20: note = Description of Artificial Sequence: Synthetic oligonucleotide
  misc_feature 1..20: note = Target: SCN10A; (-) strand; PAM type: NRG; PAM sequence: CAG
  source 1..20: mol_type = other DNA
ttagaagaaccctgtatttg

SEQ ID NO: 14010 - DNA, 20 bp, synthetic construct
  misc_feature 1..20: note = Description of Artificial Sequence: Synthetic oligonucleotide
  misc_feature 1..20: note = Target: SCN10A; (-) strand; PAM type: NRG; PAM sequence: AAG
  source 1..20: mol_type = other DNA
gaaatacgtgtttatgttag

SEQ ID NO: 14011 - DNA, 20 bp, synthetic construct
  misc_feature 1..20: note = Description of Artificial Sequence: Synthetic oligonucleotide
  misc_feature 1..20: note = Target: SCN10A; (-) strand; PAM type: NRG; PAM sequence: TAG
  source 1..20: mol_type = other DNA
tttgaaatacgtgtttatgt

SEQ ID NO: 14012 - DNA, 20 bp, synthetic construct
  misc_feature 1..20: note = Description of Artificial Sequence: Synthetic oligonucleotide
  misc_feature 1..20: note = Target: SCN10A; (-) strand; PAM type: NRG; PAM sequence: AGG
  source 1..20: mol_type = other DNA
gggatgctcttctaaaacca

SEQ ID NO: 14013 - DNA, 20 bp, synthetic construct
  misc_feature 1..20: note = Description of Artificial Sequence: Synthetic oligonucleotide
  misc_feature 1..20: note = Target: SCN10A; (-) strand; PAM type: NRG; PAM sequence: AAG
  source 1..20: mol_type = other DNA
tgggatgctcttctaaaacc

SEQ ID NO: 14014 - DNA, 20 bp, synthetic construct
  misc_feature 1..20: note = Description of Artificial Sequence: Synthetic oligonucleotide
  misc_feature 1..20: note = Target: SCN10A; (-) strand; PAM type: NRG; PAM sequence: GGG
  source 1..20: mol_type = other DNA
acctctgtttgggggtcttt

SEQ ID NO: 14015 - DNA, 20 bp, synthetic construct
  misc_feature 1..20: note = Description of Artificial Sequence: Synthetic oligonucleotide
  misc_feature 1..20: note = Target: SCN10A; (-) strand; PAM type: NRG; PAM sequence: TGG
  source 1..20: mol_type = other DNA
cacctctgtttgggggtctt

SEQ ID NO: 14016 - DNA, 20 bp, synthetic construct
  misc_feature 1..20: note = Description of Artificial Sequence: Synthetic oligonucleotide
  misc_feature 1..20: note = Target: SCN10A; (-) strand; PAM type: NRG; PAM sequence: GGG
  source 1..20: mol_type = other DNA
gaagccccacctctgtttgg

SEQ ID NO: 14017 - DNA, 20 bp, synthetic construct
  misc_feature 1..20: note = Description of Artificial Sequence: Synthetic oligonucleotide
  misc_feature 1..20: note = Target: SCN10A; (-) strand; PAM type: NRG; PAM sequence: GGG
  source 1..20: mol_type = other DNA
ggaagccccacctctgtttg

SEQ ID NO: 14018 - DNA, 20 bp, synthetic construct
  misc_feature 1..20: note = Description of Artificial Sequence: Synthetic oligonucleotide
  misc_feature 1..20: note = Target: SCN10A; (-) strand; PAM type: NRG; PAM sequence: GGG
  source 1..20: mol_type = other DNA
gggaagccccacctctgttt

SEQ ID NO: 14019 - DNA, 20 bp, synthetic construct
  misc_feature 1..20: note = Description of Artificial Sequence: Synthetic oligonucleotide
  misc_feature 1..20: note = Target: SCN10A; (-) strand; PAM type: NRG; PAM sequence: TGG
  source 1..20: mol_type = other DNA
ggggaagccccacctctgtt

SEQ ID NO: 14020 - DNA, 20 bp, synthetic construct
  misc_feature 1..20: note = Description of Artificial Sequence: Synthetic oligonucleotide
  misc_feature 1..20: note = Target: SCN10A; (-) strand; PAM type: NRG; PAM sequence: AAG
  source 1..20: mol_type = other DNA
tgggcagccacgtggtgggg

SEQ ID NO: 14021 - DNA, 20 bp, synthetic construct
  misc_feature 1..20: note = Description of Artificial Sequence: Synthetic oligonucleotide
  misc_feature 1..20: note = Target: SCN10A; (-) strand; PAM type: NRG; PAM sequence: GGG
  source 1..20: mol_type = other DNA
aagtgggcagccacgtggtg

SEQ ID NO: 14022 - DNA, 20 bp, synthetic construct
  misc_feature 1..20: note = Description of Artificial Sequence: Synthetic oligonucleotide
  misc_feature 1..20: note = Target: SCN10A; (-) strand; PAM type: NRG; PAM sequence: GGG
  source 1..20: mol_type = other DNA
taagtgggcagccacgtggt

SEQ ID NO: 14023 - DNA, 20 bp, synthetic construct
  misc_feature 1..20: note = Description of Artificial Sequence: Synthetic oligonucleotide
  misc_feature 1..20: note = Target: SCN10A; (-) strand; PAM type: NRG; PAM sequence: TGG
  source 1..20: mol_type = other DNA
gtaagtgggcagccacgtgg

SEQ ID NO: 14024 - DNA, 20 bp, synthetic construct
  misc_feature 1..20: note = Description of Artificial Sequence: Synthetic oligonucleotide
  misc_feature 1..20: note = Target: SCN10A; (-) strand; PAM type: NRG; PAM sequence: TGG
  source 1..20: mol_type = other DNA
cgagtaagtgggcagccacg

SEQ ID NO: 14025 - DNA, 20 bp, synthetic construct
  misc_feature 1..20: note = Description of Artificial Sequence: Synthetic oligonucleotide
  misc_feature 1..20: note = Target: SCN10A; (-) strand; PAM type: NRG; PAM sequence: CAG
  source 1..20: mol_type = other DNA
ctccattgcgagtaagtggg

SEQ ID NO: 14026 - DNA, 20 bp, synthetic construct
  misc_feature 1..20: note = Description of Artificial Sequence: Synthetic oligonucleotide
  misc_feature 1..20: note = Target: SCN10A; (-) strand; PAM type: NRG; PAM sequence: GGG
  source 1..20: mol_type = other DNA
tctctccattgcgagtaagt

SEQ ID NO: 14027 - DNA, 20 bp, synthetic construct
  misc_feature 1..20: note = Description of Artificial Sequence: Synthetic oligonucleotide
  misc_feature 1..20: note = Target: SCN10A; (-) strand; PAM type: NRG; PAM sequence: TGG
  source 1..20: mol_type = other DNA
ttctctccattgcgagtaag

SEQ ID NO: 14028 - DNA, 20 bp, synthetic construct
  misc_feature 1..20: note = Description of Artificial Sequence: Synthetic oligonucleotide
  misc_feature 1..20: note = Target: SCN10A; (-) strand; PAM type: NRG; PAM sequence: AAG
  source 1..20: mol_type = other DNA
tggttctctccattgcgagt

SEQ ID NO: 14029 - DNA, 20 bp, synthetic construct
  misc_feature 1..20: note = Description of Artificial Sequence: Synthetic oligonucleotide
  misc_feature 1..20: note = Target: SCN10A; (-) strand; PAM type: NRG; PAM sequence: GAG
  source 1..20: mol_type = other DNA
gtggtggttctctccattgc

SEQ ID NO: 14030 - DNA, 20 bp, synthetic construct
  misc_feature 1..20: note = Description of Artificial Sequence: Synthetic oligonucleotide
  misc_feature 1..20: note = Target: SCN10A; (-) strand; PAM type: NRG; PAM sequence: TGG
  source 1..20: mol_type = other DNA
tgtgtttgacttcattgtgg

SEQ ID NO: 14031 - DNA, 20 bp, synthetic construct
  misc_feature 1..20: note = Description of Artificial Sequence: Synthetic oligonucleotide
  misc_feature 1..20: note = Target: SCN10A; (-) strand; PAM type: NRG; PAM sequence: TGG
  source 1..20: mol_type = other DNA
gaatgtgtttgacttcattg

SEQ ID NO: 14032 - DNA, 20 bp, synthetic construct
  misc_feature 1..20: note = Description of Artificial Sequence: Synthetic oligonucleotide
  misc_feature 1..20: note = Target: SCN10A; (-) strand; PAM type: NRG; PAM sequence: TGG
  source 1..20: mol_type = other DNA
agtactacttcacaaatggc

SEQ ID NO: 14033 - DNA, 20 bp, synthetic construct
  misc_feature 1..20: note = Description of Artificial Sequence: Synthetic oligonucleotide
  misc_feature 1..20: note = Target: SCN10A; (-) strand; PAM type: NRG; PAM sequence: TGG
  source 1..20: mol_type = other DNA
aggcagtactacttcacaaa

SEQ ID NO: 14034 - DNA, 20 bp, synthetic construct
  misc_feature 1..20: note = Description of Artificial Sequence: Synthetic oligonucleotide
  misc_feature 1..20: note = Target: SCN10A; (-) strand; PAM type: NRG; PAM sequence: CAG
  source 1..20: mol_type = other DNA
tgaagatgttcgctttgagg

SEQ ID NO: 14035 - DNA, 20 bp, synthetic construct
  misc_feature 1..20: note = Description of Artificial Sequence: Synthetic oligonucleotide
  misc_feature 1..20: note = Target: SCN10A; (-) strand; PAM type: NRG; PAM sequence: AGG
  source 1..20: mol_type = other DNA
tcatgaagatgttcgctttg

SEQ ID NO: 14036 - DNA, 20 bp, synthetic construct
  misc_feature 1..20: note = Description of Artificial Sequence: Synthetic oligonucleotide
  misc_feature 1..20: note = Target: SCN10A; (-) strand; PAM type: NRG; PAM sequence: GAG
  source 1..20: mol_type = other DNA
gtcatgaagatgttcgcttt

SEQ ID NO: 14037 - DNA, 20 bp, synthetic construct
  misc_feature 1..20: note = Description of Artificial Sequence: Synthetic oligonucleotide
  misc_feature 1..20: note = Target: SCN10A; (-) strand; PAM type: NRG; PAM sequence: AAG
  source 1..20: mol_type = other DNA
tcacaggcgaatgtgtcatg

SEQ ID NO: 14038 - DNA, 20 bp, synthetic construct
  misc_feature 1..20: note = Description of Artificial Sequence: Synthetic oligonucleotide
  misc_feature 1..20: note = Target: SCN10A; (-) strand; PAM type: NRG; PAM sequence: AGG
  source 1..20: mol_type = other DNA
ttctttgtggccgtcttcac

SEQ ID NO: 14039 - DNA, 20 bp, synthetic construct
  misc_feature 1..20: note = Description of Artificial Sequence: Synthetic oligonucleotide
  misc_feature 1..20: note = Target: SCN10A; (-) strand; PAM type: NRG; PAM sequence: CAG
  source 1..20: mol_type = other DNA
gttctttgtggccgtcttca

SEQ ID NO: 14040 - DNA, 20 bp, synthetic construct
  misc_feature 1..20: note = Description of Artificial Sequence: Synthetic oligonucleotide
  misc_feature 1..20: note = Target: SCN10A; (-) strand; PAM type: NRG; PAM sequence: TGG
  source 1..20: mol_type = other DNA
caaaatcaaccagttctttg

SEQ ID NO: 14041 - DNA, 20 bp, synthetic construct
  misc_feature 1..20: note = Description of Artificial Sequence: Synthetic oligonucleotide
  misc_feature 1..20: note = Target: SCN10A; (-) strand; PAM type: NRG; PAM sequence: CAG
  source 1..20: mol_type = other DNA
aaattctgggcaaaatcaac

SEQ ID NO: 14042 - DNA, 20 bp, synthetic construct
  misc_feature 1..20: note = Description of Artificial Sequence: Synthetic oligonucleotide
  misc_feature 1..20: note = Target: SCN10A; (-) strand; PAM type: NRG; PAM sequence: GGG
  source 1..20: mol_type = other DNA
gaagaaaagacgaaaattct

SEQ ID NO: 14043 - DNA, 20 bp, synthetic construct
  misc_feature 1..20: note = Description of Artificial Sequence: Synthetic oligonucleotide
  misc_feature 1..20: note = Target: SCN10A; (-) strand; PAM type: NRG; PAM sequence: TGG
  source 1..20: mol_type = other DNA
tgaagaaaagacgaaaattc

SEQ ID NO: 14044 - DNA, 20 bp, synthetic construct
  misc_feature 1..20: note = Description of Artificial Sequence: Synthetic oligonucleotide
  misc_feature 1..20: note = Target: SCN10A; (-) strand; PAM type: NRG; PAM sequence: AAG
  source 1..20: mol_type = other DNA
ctgatgaccaaagtgaagaa

SEQ ID NO: 14045 - DNA, 20 bp, synthetic construct
  misc_feature 1..20: note = Description of Artificial Sequence: Synthetic oligonucleotide
  misc_feature 1..20: note = Target: SCN10A; (-) strand; PAM type: NRG; PAM sequence: AAG
  source 1..20: mol_type = other DNA
ggagactgatgaccaaagtg

SEQ ID NO: 14046 - DNA, 20 bp, synthetic construct
  misc_feature 1..20: note = Description of Artificial Sequence: Synthetic oligonucleotide
  misc_feature 1..20: note = Target: SCN10A; (-) strand; PAM type: NRG; PAM sequence: AAG
  source 1..20: mol_type = other DNA
atggtggagactgatgacca

SEQ ID NO: 14047 - DNA, 20 bp, synthetic construct
  misc_feature 1..20: note = Description of Artificial Sequence: Synthetic oligonucleotide
  misc_feature 1..20: note = Target: SCN10A; (-) strand; PAM type: NRG; PAM sequence: GAG
  source 1..20: mol_type = other DNA
acatgatcaccatgatggtg

SEQ ID NO: 14048 - DNA, 20 bp, synthetic construct
  misc_feature 1..20: note = Description of Artificial Sequence: Synthetic oligonucleotide
  misc_feature 1..20: note = Target: SCN10A; (-) strand; PAM type: NRG; PAM sequence: TGG
  source 1..20: mol_type = other DNA
caacatgatcaccatgatgg

SEQ ID NO: 14049 - DNA, 20 bp, synthetic construct
  misc_feature 1..20: note = Description of Artificial Sequence: Synthetic oligonucleotide
  misc_feature 1..20: note = Target: SCN10A; (-) strand; PAM type: NRG; PAM sequence: TGG
  source 1..20: mol_type = other DNA
cctcaacatgatcaccatga

SEQ ID NO: 14050 - DNA, 20 bp, synthetic construct
  misc_feature 1..20: note = Description of Artificial Sequence: Synthetic oligonucleotide
  misc_feature 1..20: note = Target: SCN10A; (-) strand; PAM type: NRG; PAM sequence: TGG
  source 1..20: mol_type = other DNA
agcttttgacatcaccatca

SEQ ID NO: 14051 - DNA, 20 bp, synthetic construct
  misc_feature 1..20: note = Description of Artificial Sequence: Synthetic oligonucleotide
  misc_feature 1..20: note = Target: SCN10A; (-) strand; PAM type: NRG; PAM sequence: AAG
  source 1..20: mol_type = other DNA
ctttgacatcgtgaccagac

SEQ ID NO: 14052 - DNA, 20 bp, synthetic construct
  misc_feature 1..20: note = Description of Artificial Sequence: Synthetic oligonucleotide
  misc_feature 1..20: note = Target: SCN10A; (-) strand; PAM type: NRG; PAM sequence: CAG
  source 1..20: mol_type = other DNA
tttgtctttgacatcgtgac

SEQ ID NO: 14053 - DNA, 20 bp, synthetic construct
  misc_feature 1..20: note = Description of Artificial Sequence: Synthetic oligonucleotide
  misc_feature 1..20: note = Target: SCN10A; (-) strand; PAM type: NRG; PAM sequence: GGG
  source 1..20: mol_type = other DNA
ttttctcagaacaagttcca

SEQ ID NO: 14054 - DNA, 20 bp, synthetic construct
  misc_feature 1..20: note = Description of Artificial Sequence: Synthetic oligonucleotide
  misc_feature 1..20: note = Target: SCN10A; (-) strand; PAM type: NRG; PAM sequence: AGG
  source 1..20: mol_type = other DNA
gttttctcagaacaagttcc

SEQ ID NO: 14055 - DNA, 20 bp, synthetic construct
  misc_feature 1..20: note = Description of Artificial Sequence: Synthetic oligonucleotide
  misc_feature 1..20: note = Target: SCN10A; (-) strand; PAM type: NRG; PAM sequence: CAG
  source 1..20: mol_type = other DNA
tgttttctcagaacaagttc

SEQ ID NO: 14056 - DNA, 20 bp, synthetic construct
  misc_feature 1..20: note = Description of Artificial Sequence: Synthetic oligonucleotide
  misc_feature 1..20: note = Target: SCN10A; (-) strand; PAM type: NRG; PAM sequence: AAG
  source 1..20: mol_type = other DNA
atctcttgttttctcagaac

SEQ ID NO: 14057 - DNA, 20 bp, synthetic construct
  misc_feature 1..20: note = Description of Artificial Sequence: Synthetic oligonucleotide
  misc_feature 1..20: note = Target: SCN10A; (-) strand; PAM type: NRG; PAM sequence: CAG
  source 1..20: mol_type = other DNA
gccactatctcttgttttct

SEQ ID NO: 14058 - DNA, 20 bp, synthetic construct
  misc_feature 1..20: note = Description of Artificial Sequence: Synthetic oligonucleotide
  misc_feature 1..20: note = Target: SCN10A; (-) strand; PAM type: NRG; PAM sequence: AGG
  source 1..20: mol_type = other DNA
cctggtttgtgctggcccaa

SEQ ID NO: 14059 - DNA, 20 bp, synthetic construct
  misc_feature 1..20: note = Description of Artificial Sequence: Synthetic oligonucleotide
  misc_feature 1..20: note = Target: SCN10A; (-) strand; PAM type: NRG; PAM sequence: AAG
  source 1..20: mol_type = other DNA
gcctggtttgtgctggccca

SEQ ID NO: 14060 - DNA, 20 bp, synthetic construct
  misc_feature 1..20: note = Description of Artificial Sequence: Synthetic oligonucleotide
  misc_feature 1..20: note = Target: SCN10A; (-) strand; PAM type: NRG; PAM sequence: TGG
  source 1..20: mol_type = other DNA
cacagatgcctggtttgtgc

SEQ ID NO: 14061 - DNA, 20 bp, synthetic construct
  misc_feature 1..20: note = Description of Artificial Sequence: Synthetic oligonucleotide
  misc_feature 1..20: note = Target: SCN10A; (-) strand; PAM type: NRG; PAM sequence: TGG
  source 1..20: mol_type = other DNA
ctacagataacacagatgcc

SEQ ID NO: 14062 - DNA, 20 bp, synthetic construct
  misc_feature 1..20: note = Description of Artificial Sequence: Synthetic oligonucleotide
  misc_feature 1..20: note = Target: SCN10A; (-) strand; PAM type: NRG; PAM sequence: CAG
  source 1..20: mol_type = other DNA
aaactcatctacagataaca

SEQ ID NO: 14063 - DNA, 20 bp, synthetic construct
  misc_feature 1..20: note = Description of Artificial Sequence: Synthetic oligonucleotide
  misc_feature 1..20: note = Target: SCN10A; (-) strand; PAM type: NRG; PAM sequence: CAG
  source 1..20: mol_type = other DNA
atggagacaaaactcatcta

SEQ ID NO: 14064 - DNA, 20 bp, synthetic construct
  misc_feature 1..20: note = Description of Artificial Sequence: Synthetic oligonucleotide
  misc_feature 1..20: note = Target: SCN10A; (-) strand; PAM type: NRG; PAM sequence: GAG
  source 1..20: mol_type = other DNA
ttaagatgtggagtgtgatg

SEQ ID NO: 14065 - DNA, 20 bp, synthetic construct
  misc_feature 1..20: note = Description of Artificial Sequence: Synthetic oligonucleotide
  misc_feature 1..20: note = Target: SCN10A; (-) strand; PAM type: NRG; PAM sequence: TGG
  source 1..20: mol_type = other DNA
tgttaagatgtggagtgtga

SEQ ID NO: 14066 - DNA, 20 bp, synthetic construct
  misc_feature 1..20: note = Description of Artificial Sequence: Synthetic oligonucleotide
  misc_feature 1..20: note = Target: SCN10A; (-) strand; PAM type: NRG; PAM sequence: GAG
  source 1..20: mol_type = other DNA
ttcgcttctgttaagatgtg

SEQ ID NO: 14067 - DNA, 20 bp, synthetic construct
  misc_feature 1..20: note = Description of Artificial Sequence: Synthetic oligonucleotide
  misc_feature 1..20: note = Target: SCN10A; (-) strand; PAM type: NRG; PAM sequence: TGG
  source 1..20: mol_type = other DNA
atttcgcttctgttaagatg

SEQ ID NO: 14068 - DNA, 20 bp, synthetic construct
  misc_feature 1..20: note = Description of Artificial Sequence: Synthetic oligonucleotide
  misc_feature 1..20: note = Target: SCN10A; (-) strand; PAM type: NRG; PAM sequence: AAG
  source 1..20: mol_type = other DNA
gatagtatttcgcttctgtt

SEQ ID NO: 14069 - DNA, 20 bp, synthetic construct
  misc_feature 1..20: note = Description of Artificial Sequence: Synthetic oligonucleotide
  misc_feature 1..20: note = Target: SCN10A; (-) strand; PAM type: NRG; PAM sequence: TAG
  source 1..20: mol_type = other DNA
aattttggaagaggtaagga

SEQ ID NO: 14070 - DNA, 20 bp, synthetic construct
  misc_feature 1..20: note = Description of Artificial Sequence: Synthetic oligonucleotide
  misc_feature 1..20: note = Target: SCN10A; (-) strand; PAM type: NRG; PAM sequence: AGG
  source 1..20: mol_type = other DNA
gtgaaattttggaagaggta

SEQ ID NO: 14071 - DNA, 20 bp, synthetic construct
  misc_feature 1..20: note = Description of Artificial Sequence: Synthetic oligonucleotide
  misc_feature 1..20: note = Target: SCN10A; (-) strand; PAM type: NRG; PAM sequence: AAG
  source 1..20: mol_type = other DNA
agtgaaattttggaagaggt

SEQ ID NO: 14072 - DNA, 20 bp, synthetic construct
  misc_feature 1..20: note = Description of Artificial Sequence: Synthetic oligonucleotide
  misc_feature 1..20: note = Target: SCN10A; (-) strand; PAM type: NRG; PAM sequence: AGG
  source 1..20: mol_type = other DNA
taaaagtgaaattttggaag

SEQ ID NO: 14073 - DNA, 20 bp, synthetic construct
  misc_feature 1..20: note = Description of Artificial Sequence: Synthetic oligonucleotide
  misc_feature 1..20: note = Target: SCN10A; (-) strand; PAM type: NRG; PAM sequence: GAG
  source 1..20: mol_type = other DNA
ctaaaagtgaaattttggaa

SEQ ID NO: 14074 - DNA, 20 bp, synthetic construct
  misc_feature 1..20: note = Description of Artificial Sequence: Synthetic oligonucleotide
  misc_feature 1..20: note = Target: SCN10A; (-) strand; PAM type: NRG; PAM sequence: AAG
  source 1..20: mol_type = other DNA
aactaaaagtgaaattttgg

SEQ ID NO: 14075 - DNA, 20 bp, synthetic construct
  misc_feature 1..20: note = Description of Artificial Sequence: Synthetic oligonucleotide
  misc_feature 1..20: note = Target: SCN10A; (-) strand; PAM type: NRG; PAM sequence: TGG
  source 1..20: mol_type = other DNA
gtcaactaaaagtgaaattt

SEQ ID NO: 14076 - DNA, 20 bp, synthetic construct
  misc_feature 1..20: note = Description of Artificial Sequence: Synthetic oligonucleotide
  misc_feature 1..20: note = Target: SCN10A; (-) strand; PAM type: NRG; PAM sequence: AAG
  source 1..20: mol_type = other DNA
aatgaggtagagtcaactaa

SEQ ID NO: 14077 - DNA, 20 bp, synthetic construct
  misc_feature 1..20: note = Description of Artificial Sequence: Synthetic oligonucleotide
  misc_feature 1..20: note = Target: SCN10A; (-) strand; PAM type: NRG; PAM sequence: GAG
  source 1..20: mol_type = other DNA
tgaactggggcaatgaggta

SEQ ID NO: 14078 - DNA, 20 bp, synthetic construct
  misc_feature 1..20: note = Description of Artificial Sequence: Synthetic oligonucleotide
  misc_feature 1..20: note = Target: SCN10A; (-) strand; PAM type: NRG; PAM sequence: TAG
  source 1..20: mol_type = other DNA
cttgaactggggcaatgagg

SEQ ID NO: 14079 - DNA, 20 bp, synthetic construct
  misc_feature 1..20: note = Description of Artificial Sequence: Synthetic oligonucleotide
  misc_feature 1..20: note = Target: SCN10A; (-) strand; PAM type: NRG; PAM sequence: AGG
  source 1..20: mol_type = other DNA
ggacttgaactggggcaatg

SEQ ID NO: 14080 - DNA, 20 bp, synthetic construct
  misc_feature 1..20: note = Description of Artificial Sequence: Synthetic oligonucleotide
  misc_feature 1..20: note = Target: SCN10A; (-) strand; PAM type: NRG; PAM sequence: GAG
  source 1..20: mol_type = other DNA
aggacttgaactggggcaat

SEQ ID NO: 14081 - DNA, 20 bp, synthetic construct
  misc_feature 1..20: note = Description of Artificial Sequence: Synthetic oligonucleotide
  misc_feature 1..20: note = Target: SCN10A; (-) strand; PAM type: NRG; PAM sequence: GGG
  source 1..20: mol_type = other DNA
ggtattaaggacttgaactg

SEQ ID NO: 14082 - DNA, 20 bp, synthetic construct
  misc_feature 1..20: note = Description of Artificial Sequence: Synthetic oligonucleotide
  misc_feature 1..20: note = Target: SCN10A; (-) strand; PAM type: NRG; PAM sequence: GGG
  source 1..20: mol_type = other DNA
aggtattaaggacttgaact

SEQ ID NO: 14083 - DNA, 20 bp, synthetic construct
  misc_feature 1..20: note = Description of Artificial Sequence: Synthetic oligonucleotide
  misc_feature 1..20: note = Target: SCN10A; (-) strand; PAM type: NRG; PAM sequence: TGG
  source 1..20: mol_type = other DNA
gaggtattaaggacttgaac

SEQ ID NO: 14084 - DNA, 20 bp, synthetic construct
  misc_feature 1..20: note = Description of Artificial Sequence: Synthetic oligonucleotide
  misc_feature 1..20: note = Target: SCN10A; (-) strand; PAM type: NRG; PAM sequence: AGG
  source 1..20: mol_type = other DNA
aagggccaggagaggtatta

SEQ ID NO: 14085 - DNA, 20 bp, synthetic construct
  misc_feature 1..20: note = Description of Artificial Sequence: Synthetic oligonucleotide
  misc_feature 1..20: note = Target: SCN10A; (-) strand; PAM type: NRG; PAM sequence: AAG
  source 1..20: mol_type = other DNA
aaagggccaggagaggtatt

SEQ ID NO: 14086 - DNA, 20 bp, synthetic construct
  misc_feature 1..20: note = Description of Artificial Sequence: Synthetic oligonucleotide
  misc_feature 1..20: note = Target: SCN10A; (-) strand; PAM type: NRG; PAM sequence: AGG
  source 1..20: mol_type = other DNA
tggcatcaaagggccaggag

SEQ ID NO: 14087 - DNA, 20 bp, synthetic construct
  misc_feature 1..20: note = Description of Artificial Sequence: Synthetic oligonucleotide
  misc_feature 1..20: note = Target: SCN10A; (-) strand; PAM type: NRG; PAM sequence: GAG
  source 1..20: mol_type = other DNA
gtggcatcaaagggccagga

SEQ ID NO: 14088 - DNA, 20 bp, synthetic construct
  misc_feature 1..20: note = Description of Artificial Sequence: Synthetic oligonucleotide
  misc_feature 1..20: note = Target: SCN10A; (-) strand; PAM type: NRG; PAM sequence: GAG
  source 1..20: mol_type = other DNA
tggtggcatcaaagggccag

SEQ ID NO: 14089 - DNA, 20 bp, synthetic construct
  misc_feature 1..20: note = Description of Artificial Sequence: Synthetic oligonucleotide
  misc_feature 1..20: note = Target: SCN10A; (-) strand; PAM type: NRG; PAM sequence: AGG
  source 1..20: mol_type = other DNA
cctggtggcatcaaagggcc

SEQ ID NO: 14090 - DNA, 20 bp, synthetic construct
  misc_feature 1..20: note = Description of Artificial Sequence: Synthetic oligonucleotide
  misc_feature 1..20: note = Target: SCN10A; (-) strand; PAM type: NRG; PAM sequence: CAG
  source 1..20: mol_type = other DNA
gcctggtggcatcaaagggc

SEQ ID NO: 14091 - DNA, 20 bp, synthetic construct
  misc_feature 1..20: note = Description of Artificial Sequence: Synthetic oligonucleotide
  misc_feature 1..20: note = Target: SCN10A; (-) strand; PAM type: NRG; PAM sequence: GGG
  source 1..20: mol_type = other DNA
aagggcctggtggcatcaaa

SEQ ID NO: 14092 - DNA, 20 bp, synthetic construct
  misc_feature 1..20: note = Description of Artificial Sequence: Synthetic oligonucleotide
  misc_feature 1..20: note = Target: SCN10A; (-) strand; PAM type: NRG; PAM sequence: AGG
  source 1..20: mol_type = other DNA
gaagggcctggtggcatcaa

SEQ ID NO: 14093 - DNA, 20 bp, synthetic construct
  misc_feature 1..20: note = Description of Artificial Sequence: Synthetic oligonucleotide
  misc_feature 1..20: note = Target: SCN10A; (-) strand; PAM type: NRG; PAM sequence: AAG
  source 1..20: mol_type = other DNA
agaagggcctggtggcatca

SEQ ID NO: 14094 - DNA, 20 bp, synthetic construct
  misc_feature 1..20: note = Description of Artificial Sequence: Synthetic oligonucleotide
  misc_feature 1..20: note = Target: SCN10A; (-) strand; PAM type: NRG; PAM sequence: TGG
  source 1..20: mol_type = other DNA
aggacaaaagaagggcctgg

SEQ ID NO: 14095 - DNA, 20 bp, synthetic construct
  misc_feature 1..20: note = Description of Artificial Sequence: Synthetic oligonucleotide
  misc_feature 1..20: note = Target: SCN10A; (-) strand; PAM type: NRG; PAM sequence: TGG
  source 1..20: mol_type = other DNA
accaggacaaaagaagggcc

SEQ ID NO: 14096 - DNA, 20 bp, synthetic construct
  misc_feature 1..20: note = Description of Artificial Sequence: Synthetic oligonucleotide
  misc_feature 1..20: note = Target: SCN10A; (-) strand; PAM type: NRG; PAM sequence: GGG
  source 1..20: mol_type = other DNA
cacagaccaggacaaaagaa

SEQ ID NO: 14097 - DNA, 20 bp, synthetic construct
  misc_feature 1..20: note = Description of Artificial Sequence: Synthetic oligonucleotide
  misc_feature 1..20: note = Target: SCN10A; (-) strand; PAM type: NRG; PAM sequence: AGG
  source 1..20: mol_type = other DNA
gcacagaccaggacaaaaga

SEQ ID NO: 14098 - DNA, 20 bp, synthetic construct
  misc_feature 1..20: note = Description of Artificial Sequence: Synthetic oligonucleotide
  misc_feature 1..20: note = Target: SCN10A; (-) strand; PAM type: NRG; PAM sequence: AAG
  source 1..20: mol_type = other DNA
ggcacagaccaggacaaaag

SEQ ID NO: 14099 - DNA, 20 bp, synthetic construct
  misc_feature 1..20: note = Description of Artificial Sequence: Synthetic oligonucleotide
  misc_feature 1..20: note = Target: SCN10A; (-) strand; PAM type: NRG; PAM sequence: AAG
  source 1..20: mol_type = other DNA
aagggcacagaccaggacaa

SEQ ID NO: 14100 - DNA, 20 bp, synthetic construct
  misc_feature 1..20: note = Description of Artificial Sequence: Synthetic oligonucleotide
  misc_feature 1..20: note = Target: SCN10A; (-) strand; PAM type: NRG; PAM sequence: AGG
  source 1..20: mol_type = other DNA
tagaggcaagggcacagacc

SEQ ID NO: 14101 - DNA, 20 bp, synthetic construct
  misc_feature 1..20: note = Description of Artificial Sequence: Synthetic oligonucleotide
  misc_feature 1..20: note = Target: SCN10A; (-) strand; PAM type: NRG; PAM sequence: CAG
  source 1..20: mol_type = other DNA
atagaggcaagggcacagac

SEQ ID NO: 14102 - DNA, 20 bp, synthetic construct
  misc_feature 1..20: note = Description of Artificial Sequence: Synthetic oligonucleotide
  misc_feature 1..20: note = Target: SCN10A; (-) strand; PAM type: NRG; PAM sequence: CAG
  source 1..20: mol_type = other DNA
tgtgaatagaggcaagggca

SEQ ID NO: 14103 - DNA, 20 bp, synthetic construct
  misc_feature 1..20: note = Description of Artificial Sequence: Synthetic oligonucleotide
  misc_feature 1..20: note = Target: SCN10A; (-) strand; PAM type: NRG; PAM sequence: GGG
  source 1..20: mol_type = other DNA
ggcattgtgaatagaggcaa

SEQ ID NO: 14104 - DNA, 20 bp, synthetic construct
  misc_feature 1..20: note = Description of Artificial Sequence: Synthetic oligonucleotide
  misc_feature 1..20: note = Target: SCN10A; (-) strand; PAM type: NRG; PAM sequence: AGG
  source 1..20: mol_type = other DNA
gggcattgtgaatagaggca

SEQ ID NO: 14105 - DNA, 20 bp, synthetic construct
  misc_feature 1..20: note = Description of Artificial Sequence: Synthetic oligonucleotide
  misc_feature 1..20: note = Target: SCN10A; (-) strand; PAM type: NRG; PAM sequence: AAG
  source 1..20: mol_type = other DNA
agggcattgtgaatagaggc

SEQ ID NO: 14106 - DNA, 20 bp, synthetic construct
  misc_feature 1..20: note = Description of Artificial Sequence: Synthetic oligonucleotide
  misc_feature 1..20: note = Target: SCN10A; (-) strand; PAM type: NRG; PAM sequence: AGG
  source 1..20: mol_type = other DNA
taggagggcattgtgaatag

SEQ ID NO: 14107 - DNA, 20 bp, synthetic construct
  misc_feature 1..20: note = Description of Artificial Sequence: Synthetic oligonucleotide
  misc_feature 1..20: note = Target: SCN10A; (-) strand; PAM type: NRG; PAM sequence: GAG
  source 1..20: mol_type = other DNA
ataggagggcattgtgaata

SEQ ID NO: 14108 - DNA, 20 bp, synthetic construct
  misc_feature 1..20: note = Description of Artificial Sequence: Synthetic oligonucleotide
  misc_feature 1..20: note = Target: SCN10A; (-) strand; PAM type: NRG; PAM sequence: TAG
  source 1..20: mol_type = other DNA
agataggagggcattgtgaa

SEQ ID NO: 14109 - DNA, 20 bp, synthetic construct
  misc_feature 1..20: note = Description of Artificial Sequence: Synthetic oligonucleotide
  misc_feature 1..20: note = Target: SCN10A; (-) strand; PAM type: NRG; PAM sequence: GGG
  source 1..20: mol_type = other DNA
agccaagagaggagatagga

SEQ ID NO: 14110 - DNA, 20 bp, synthetic construct
  misc_feature 1..20: note = Description of Artificial Sequence: Synthetic oligonucleotide
  misc_feature 1..20: note = Target: SCN10A; (-) strand; PAM type: NRG; PAM sequence: AGG
  source 1..20: mol_type = other DNA
cagccaagagaggagatagg

SEQ ID NO: 14111 - DNA, 20 bp, synthetic construct
  misc_feature 1..20: note = Description of Artificial Sequence: Synthetic oligonucleotide
  misc_feature 1..20: note = Target: SCN10A; (-) strand; PAM type: NRG; PAM sequence: GAG
  source 1..20: mol_type = other DNA
acagccaagagaggagatag

SEQ ID NO: 14112 - DNA, 20 bp, synthetic construct
  misc_feature 1..20: note = Description of Artificial Sequence: Synthetic oligonucleotide
  misc_feature 1..20: note = Target: SCN10A; (-) strand; PAM type: NRG; PAM sequence: AGG
  source 1..20: mol_type = other DNA
agacagccaagagaggagat

SEQ ID NO: 14113 - DNA, 20 bp, synthetic construct
  misc_feature 1..20: note = Description of Artificial Sequence: Synthetic oligonucleotide
  misc_feature 1..20: note = Target: SCN10A; (-) strand; PAM type: NRG; PAM sequence: TAG
  source 1..20: mol_type = other DNA
tagacagccaagagaggaga

SEQ ID NO: 14114 - DNA, 20 bp, synthetic construct
  misc_feature 1..20: note = Description of Artificial Sequence: Synthetic oligonucleotide
  misc_feature 1..20: note = Target: SCN10A; (-) strand; PAM type: NRG; PAM sequence: GAG
  source 1..20: mol_type = other DNA
aatttagacagccaagagag

SEQ ID NO: 14115 - DNA, 20 bp, synthetic construct
  misc_feature 1..20: note = Description of Artificial Sequence: Synthetic oligonucleotide
  misc_feature 1..20: note = Target: SCN10A; (-) strand; PAM type: NRG; PAM sequence: AGG
  source 1..20: mol_type = other DNA
ggaatttagacagccaagag

SEQ ID NO: 14116 - DNA, 20 bp, synthetic construct
  misc_feature 1..20: note = Description of Artificial Sequence: Synthetic oligonucleotide
  misc_feature 1..20: note = Target: SCN10A; (-) strand; PAM type: NRG; PAM sequence: GAG
  source 1..20: mol_type = other DNA
tggaatttagacagccaaga

SEQ ID NO: 14117 - DNA, 20 bp, synthetic construct
  misc_feature 1..20: note = Description of Artificial Sequence: Synthetic oligonucleotide
  misc_feature 1..20: note = Target: SCN10A; (-) strand; PAM type: NRG; PAM sequence: GAG
  source 1..20: mol_type = other DNA
gttggaatttagacagccaa

SEQ ID NO: 14118 - DNA, 20 bp, synthetic construct
  misc_feature 1..20: note = Description of Artificial Sequence: Synthetic oligonucleotide
  misc_feature 1..20: note = Target: SCN10A; (-) strand; PAM type: NRG; PAM sequence: AAG
  source 1..20: mol_type = other DNA
ctgttggaatttagacagcc

SEQ ID NO: 14119 - DNA, 20 bp, synthetic construct
  misc_feature 1..20: note = Description of Artificial Sequence: Synthetic oligonucleotide
  misc_feature 1..20: note = Target: SCN10A; (-) strand; PAM type: NRG; PAM sequence: CAG
  source 1..20: mol_type = other DNA
caagactgttggaatttaga

SEQ ID NO: 14120 - DNA, 20 bp, synthetic construct
  misc_feature 1..20: note = Description of Artificial Sequence: Synthetic oligonucleotide
  misc_feature 1..20: note = Target: SCN10A; (-) strand; PAM type: NRG; PAM sequence: TAG
  source 1..20: mol_type = other DNA
tactcaagactgttggaatt

SEQ ID NO: 14121 - DNA, 20 bp, synthetic construct
  misc_feature 1..20: note = Description of Artificial Sequence: Synthetic oligonucleotide
  misc_feature 1..20: note = Target: SCN10A; (-) strand; PAM type: NRG; PAM sequence: TGG
  source 1..20: mol_type = other DNA
gatggattactcaagactgt

SEQ ID NO: 14122 - DNA, 20 bp, synthetic construct
  misc_feature 1..20: note = Description of Artificial Sequence: Synthetic oligonucleotide
  misc_feature 1..20: note = Target: SCN10A; (-) strand; PAM type: NRG; PAM sequence: AAG
  source 1..20: mol_type = other DNA
ttaaaagagatggattactc

SEQ ID NO: 14123 - DNA, 20 bp, synthetic construct
  misc_feature 1..20: note = Description of Artificial Sequence: Synthetic oligonucleotide
  misc_feature 1..20: note = Target: SCN10A; (-) strand; PAM type: NRG; PAM sequence: TGG
  source 1..20: mol_type = other DNA
taagtggagcttaaaagaga

SEQ ID NO: 14124 - DNA, 20 bp, synthetic construct
  misc_feature 1..20: note = Description of Artificial Sequence: Synthetic oligonucleotide
  misc_feature 1..20: note = Target: SCN10A; (-) strand; PAM type: NRG; PAM sequence: GAG
  source 1..20: mol_type = other DNA
gcagtaagtggagcttaaaa

SEQ ID NO: 14125 - DNA, 20 bp, synthetic construct
  misc_feature 1..20: note = Description of Artificial Sequence: Synthetic oligonucleotide
  misc_feature 1..20: note = Target: SCN10A; (-) strand; PAM type: NRG; PAM sequence: AAG
  source 1..20: mol_type = other DNA
atgcagtaagtggagcttaa

SEQ ID NO: 14126 - DNA, 20 bp, synthetic construct
  misc_feature 1..20: note = Description of Artificial Sequence: Synthetic oligonucleotide
  misc_feature 1..20: note = Target: SCN10A; (-) strand; PAM type: NRG; PAM sequence: GAG
  source 1..20: mol_type = other DNA
gacactccatgcagtaagtg

SEQ ID NO: 14127 - DNA, 20 bp, synthetic construct
  misc_feature 1..20: note = Description of Artificial Sequence: Synthetic oligonucleotide
  misc_feature 1..20: note = Target: SCN10A; (-) strand; PAM type: NRG; PAM sequence: TGG
  source 1..20: mol_type = other DNA
gggacactccatgcagtaag

SEQ ID NO: 14128 - DNA, 20 bp, synthetic construct
  misc_feature 1..20: note = Description of Artificial Sequence: Synthetic oligonucleotide
  misc_feature 1..20: note = Target: SCN10A; (-) strand; PAM type: NRG; PAM sequence: AAG
  source 1..20: mol_type = other DNA
taagggacactccatgcagt

SEQ ID NO: 14129 - DNA, 20 bp, synthetic construct
  misc_feature 1..20: note = Description of Artificial Sequence: Synthetic oligonucleotide
  misc_feature 1..20: note = Target: SCN10A; (-) strand; PAM type: NRG; PAM sequence: CAG
  source 1..20: mol_type = other DNA
tgactaagggacactccatg

SEQ ID NO: 14130 - DNA, 20 bp, synthetic construct
  misc_feature 1..20: note = Description of Artificial Sequence: Synthetic oligonucleotide
  misc_feature 1..20: note = Target: SCN10A; (-) strand; PAM type: NRG; PAM sequence: GGG
  source 1..20: mol_type = other DNA
gtgtgttgtcacgtgactaa

SEQ ID NO: 14131 - DNA, 20 bp, synthetic construct
  misc_feature 1..20: note = Description of Artificial Sequence: Synthetic oligonucleotide
  misc_feature 1..20: note = Target: SCN10A; (-) strand; PAM type: NRG; PAM sequence: AGG
  source 1..20: mol_type = other DNA
agtgtgttgtcacgtgacta

SEQ ID NO: 14132 - DNA, 20 bp, synthetic construct
  misc_feature 1..20: note = Description of Artificial Sequence: Synthetic oligonucleotide
  misc_feature 1..20: note = Target: SCN10A; (-) strand; PAM type: NRG; PAM sequence: AAG
  source 1..20: mol_type = other DNA
tagtgtgttgtcacgtgact

SEQ ID NO: 14133 - DNA, 20 bp, synthetic construct
  misc_feature 1..20: note = Description of Artificial Sequence: Synthetic oligonucleotide
  misc_feature 1..20: note = Target: SCN10A; (-) strand; PAM type: NRG; PAM sequence: TAG
  source 1..20: mol_type = other DNA
ggatccccaaagggacaggg

SEQ ID NO: 14134 - DNA, 20 bp, synthetic construct
  misc_feature 1..20: note = Description of Artificial Sequence: Synthetic oligonucleotide
  misc_feature 1..20: note = Target: SCN10A; (-) strand; PAM type: NRG; PAM sequence: GGG
  source 1..20: mol_type = other DNA
gtgggatccccaaagggaca

SEQ ID NO: 14135 - DNA, 20 bp, synthetic construct
  misc_feature 1..20: note = Description of Artificial Sequence: Synthetic oligonucleotide
  misc_feature 1..20: note = Target: SCN10A; (-) strand; PAM type: NRG; PAM sequence: AGG
  source 1..20: mol_type = other DNA
agtgggatccccaaagggac

SEQ ID NO: 14136 - DNA, 20 bp, synthetic construct
  misc_feature 1..20: note = Description of Artificial Sequence: Synthetic oligonucleotide
  misc_feature 1..20: note = Target: SCN10A; (-) strand; PAM type: NRG; PAM sequence: CAG
  source 1..20: mol_type = other DNA
aagtgggatccccaaaggga

SEQ ID NO: 14137 - DNA, 20 bp, synthetic construct
  misc_feature 1..20: note = Description of Artificial Sequence: Synthetic oligonucleotide
  misc_feature 1..20: note = Target: SCN10A; (-) strand; PAM type: NRG; PAM sequence: GGG
  source 1..20: mol_type = other DNA
tgaaaagtgggatccccaaa

SEQ ID NO: 14138 - DNA, 20 bp, synthetic construct
  misc_feature 1..20: note = Description of Artificial Sequence: Synthetic oligonucleotide
  misc_feature 1..20: note = Target: SCN10A; (-) strand; PAM type: NRG; PAM sequence: AGG
  source 1..20: mol_type = other DNA
ctgaaaagtgggatccccaa

SEQ ID NO: 14139 - DNA, 20 bp, synthetic construct
  misc_feature 1..20: note = Description of Artificial Sequence: Synthetic oligonucleotide
  misc_feature 1..20: note = Target: SCN10A; (-) strand; PAM type: NRG; PAM sequence: AAG
  source 1..20: mol_type = other DNA
actgaaaagtgggatcccca

SEQ ID NO: 14140 - DNA, 20 bp, synthetic construct
  misc_feature 1..20: note = Description of Artificial Sequence: Synthetic oligonucleotide
  misc_feature 1..20: note = Target: SCN10A; (-) strand; PAM type: NRG; PAM sequence: GGG
  source 1..20: mol_type = other DNA
ctcgaggctgactgaaaagt

SEQ ID NO: 14141 - DNA, 20 bp, synthetic construct
  misc_feature 1..20: note = Description of Artificial Sequence: Synthetic oligonucleotide
  misc_feature 1..20: note = Target: SCN10A; (-) strand; PAM type: NRG; PAM sequence: TGG
  source 1..20: mol_type = other DNA
actcgaggctgactgaaaag

SEQ ID NO: 14142 - DNA, 20 bp, synthetic construct
  misc_feature 1..20: note = Description of Artificial Sequence: Synthetic oligonucleotide
  misc_feature 1..20: note = Target: SCN10A; (-) strand; PAM type: NRG; PAM sequence: AAG
  source 1..20: mol_type = other DNA
agaactcgaggctgactgaa

SEQ ID NO: 14143 - DNA, 20 bp, synthetic construct
  misc_feature 1..20: note = Description of Artificial Sequence: Synthetic oligonucleotide
  misc_feature 1..20: note = Target: SCN10A; (-) strand; PAM type: NRG; PAM sequence: AGG
  source 1..20: mol_type = other DNA
atacaaaatgctagaactcg

SEQ ID NO: 14144 - DNA, 20 bp, synthetic construct
  misc_feature 1..20: note = Description of Artificial Sequence: Synthetic oligonucleotide
  misc_feature 1..20: note = Target: SCN10A; (-) strand; PAM type: NRG; PAM sequence: GAG
  source 1..20: mol_type = other DNA
tatacaaaatgctagaactc

SEQ ID NO: 14145 - DNA, 20 bp, synthetic construct
  misc_feature 1..20: note = Description of Artificial Sequence: Synthetic oligonucleotide
  misc_feature 1..20: note = Target: SCN10A; (-) strand; PAM type: NRG; PAM sequence: TAG
  source 1..20: mol_type = other DNA
aagacgcatatacaaaatgc

SEQ ID NO: 14146 - DNA, 20 bp, synthetic construct
  misc_feature 1..20: note = Description of Artificial Sequence: Synthetic oligonucleotide
  misc_feature 1..20: note = Target: SCN10A; (-) strand; PAM type: NRG; PAM sequence: AAG
  source 1..20: mol_type = other DNA
cagctcattgtctagtagag

SEQ ID NO: 14147 - DNA, 20 bp, synthetic construct
  misc_feature 1..20: note = Description of Artificial Sequence: Synthetic oligonucleotide
  misc_feature 1..20: note = Target: SCN10A; (-) strand; PAM type: NRG; PAM sequence: GAG
  source 1..20: mol_type = other DNA
aaacagctcattgtctagta

SEQ ID NO: 14148 - DNA, 20 bp, synthetic construct
  misc_feature 1..20: note = Description of Artificial Sequence: Synthetic oligonucleotide
  misc_feature 1..20: note = Target: SCN10A; (-) strand; PAM type: NRG; PAM sequence: TAG
  source 1..20: mol_type = other DNA
tcaaacagctcattgtctag

SEQ ID NO: 14149 - DNA, 20 bp, synthetic construct
  misc_feature 1..20: note = Description of Artificial Sequence: Synthetic oligonucleotide
  misc_feature 1..20: note = Target: SCN10A; (-) strand; PAM type: NRG; PAM sequence: TAG
  source 1..20: mol_type = other DNA
tcctcaaacagctcattgtc

SEQ ID NO: 14150 - DNA, 20 bp, synthetic construct
  misc_feature 1..20: note = Description of Artificial Sequence: Synthetic oligonucleotide
  misc_feature 1..20: note = Target: SCN10A; (-) strand; PAM type: NRG; PAM sequence: CAG
  source 1..20: mol_type = other DNA
gtatagcccttgtcctcaaa

SEQ ID NO: 14151 - DNA, 20 bp, synthetic construct
  misc_feature 1..20: note = Description of Artificial Sequence: Synthetic oligonucleotide
  misc_feature 1..20: note = Target: SCN10A; (-) strand; PAM type: NRG; PAM sequence: TAG
  source 1..20: mol_type = other DNA
aaacaaagttaaggaaggta

SEQ ID NO: 14152 - DNA, 20 bp, synthetic construct
  misc_feature 1..20: note = Description of Artificial Sequence: Synthetic oligonucleotide
  misc_feature 1..20: note = Target: SCN10A; (-) strand; PAM type: NRG; PAM sequence: AGG
  source 1..20: mol_type = other DNA
cagggaaacaaagttaagga

SEQ ID NO: 14153 - DNA, 20 bp, synthetic construct
  misc_feature 1..20: note = Description of Artificial Sequence: Synthetic oligonucleotide
  misc_feature 1..20: note = Target: SCN10A; (-) strand; PAM type: NRG; PAM sequence: AAG
  source 1..20: mol_type = other DNA
gcagggaaacaaagttaagg

SEQ ID NO: 14154 - DNA, 20 bp, synthetic construct
  misc_feature 1..20: note = Description of Artificial Sequence: Synthetic oligonucleotide
  misc_feature 1..20: note = Target: SCN10A; (-) strand; PAM type: NRG; PAM sequence: AGG
  source 1..20: mol_type = other DNA
actgcagggaaacaaagtta

SEQ ID NO: 14155 - DNA, 20 bp, synthetic construct
  misc_feature 1..20: note = Description of Artificial Sequence: Synthetic oligonucleotide
  misc_feature 1..20: note = Target: SCN10A; (-) strand; PAM type: NRG; PAM sequence: AAG
  source 1..20: mol_type = other DNA
cactgcagggaaacaaagtt

SEQ ID NO: 14156 - DNA, 20 bp, synthetic construct
  misc_feature 1..20: note = Description of Artificial Sequence: Synthetic oligonucleotide
  misc_feature 1..20: note = Target: SCN10A; (-) strand; PAM type: NRG; PAM sequence: AAG
  source 1..20: mol_type = other DNA
cagggcactgcagggaaaca

SEQ ID NO: 14157 - DNA, 20 bp, synthetic construct
  misc_feature 1..20: note = Description of Artificial Sequence: Synthetic oligonucleotide
  misc_feature 1..20: note = Target: SCN10A; (-) strand; PAM type: NRG; PAM sequence: GGG
  source 1..20: mol_type = other DNA
gcaatgtgcagggcactgca

SEQ ID NO: 14158 - DNA, 20 bp, synthetic construct
  misc_feature 1..20: note = Description of Artificial Sequence: Synthetic oligonucleotide
  misc_feature 1..20: note = Target: SCN10A; (-) strand; PAM type: NRG; PAM sequence: AGG
  source 1..20: mol_type = other DNA
tgcaatgtgcagggcactgc

SEQ ID NO: 14159 - DNA, 20 bp, synthetic construct
  misc_feature 1..20: note = Description of Artificial Sequence: Synthetic oligonucleotide
  misc_feature 1..20: note = Target: SCN10A; (-) strand; PAM type: NRG; PAM sequence: CAG
  source 1..20: mol_type = other DNA
ttgcaatgtgcagggcactg

SEQ ID NO: 14160 - DNA, 20 bp, synthetic construct
  misc_feature 1..20: note = Description of Artificial Sequence: Synthetic oligonucleotide
  misc_feature 1..20: note = Target: SCN10A; (-) strand; PAM type: NRG; PAM sequence: GGG
  source 1..20: mol_type = other DNA
ttgaactcttgcaatgtgca

SEQ ID NO: 14161 - DNA, 20 bp, synthetic construct
  misc_feature 1..20: note = Description of Artificial Sequence: Synthetic oligonucleotide
  misc_feature 1..20: note = Target: SCN10A; (-) strand; PAM type: NRG; PAM sequence: AGG
  source 1..20: mol_type = other DNA
cttgaactcttgcaatgtgc

SEQ ID NO: 14162 - DNA, 20 bp, synthetic construct
  misc_feature 1..20: note = Description of Artificial Sequence: Synthetic oligonucleotide
  misc_feature 1..20: note = Target: SCN10A; (-) strand; PAM type: NRG; PAM sequence: CAG
  source 1..20: mol_type = other DNA
tcttgaactcttgcaatgtg

SEQ ID NO: 14163 - DNA, 20 bp, synthetic construct
  misc_feature 1..20: note = Description of Artificial Sequence: Synthetic oligonucleotide
  misc_feature 1..20: note = Target: SCN10A; (-) strand; PAM type: NRG; PAM sequence: CAG
  source 1..20: mol_type = other DNA
gctcaaattaatatttcaag

SEQ ID NO: 14164 - DNA, 20 bp, synthetic construct
  misc_feature 1..20: note = Description of Artificial Sequence: Synthetic oligonucleotide
  misc_feature 1..20: note = Target: SCN10A; (-) strand; PAM type: NRG; PAM sequence: AAG
  source 1..20: mol_type = other DNA
gtagctcaaattaatatttc

SEQ ID NO: 14165 - DNA, 20 bp, synthetic construct
  misc_feature 1..20: note = Description of Artificial Sequence: Synthetic oligonucleotide
  misc_feature 1..20: note = Target: SCN10A; (-) strand; PAM type: NRG; PAM sequence: TAG
  source 1..20: mol_type = other DNA
tgactttactctcagcaaag

SEQ ID NO: 14166 - DNA, 20 bp, synthetic construct
  misc_feature 1..20: note = Description of Artificial Sequence: Synthetic oligonucleotide
  misc_feature 1..20: note = Target: SCN10A; (-) strand; PAM type: NRG; PAM sequence: AAG
  source 1..20: mol_type = other DNA
acttgactttactctcagca

SEQ ID NO: 14167 - DNA, 20 bp, synthetic construct
  misc_feature 1..20: note = Description of Artificial Sequence: Synthetic oligonucleotide
  misc_feature 1..20: note = Target: SCN10A; (-) strand; PAM type: NRG; PAM sequence: CAG
  source 1..20: mol_type = other DNA
tttgcacttgactttactct

SEQ ID NO: 14168 - DNA, 20 bp, synthetic construct
  misc_feature 1..20: note = Description of Artificial Sequence: Synthetic oligonucleotide
  misc_feature 1..20: note = Target: SCN10A; (-) strand; PAM type: NRG; PAM sequence: AAG
  source 1..20: mol_type = other DNA
gagggaacatttccaagaat

SEQ ID NO: 14169 - DNA, 20 bp, synthetic construct
  misc_feature 1..20: note = Description of Artificial Sequence: Synthetic oligonucleotide
  misc_feature 1..20: note = Target: SCN10A; (-) strand; PAM type: NRG; PAM sequence: AAG
  source 1..20: mol_type = other DNA
ggaacagagggaacatttcc

SEQ ID NO: 14170 - DNA, 20 bp, synthetic construct
  misc_feature 1..20: note = Description of Artificial Sequence: Synthetic oligonucleotide
  misc_feature 1..20: note = Target: SCN10A; (-) strand; PAM type: NRG; PAM sequence: GGG
  source 1..20: mol_type = other DNA
tgcacagcaccaggaacaga

SEQ ID NO: 14171 - DNA, 20 bp, synthetic construct
  misc_feature 1..20: note = Description of Artificial Sequence: Synthetic oligonucleotide
  misc_feature 1..20: note = Target: SCN10A; (-) strand; PAM type: NRG; PAM sequence: AGG
  source 1..20: mol_type = other DNA
ttgcacagcaccaggaacag

SEQ ID NO: 14172 - DNA, 20 bp, synthetic construct
  misc_feature 1..20: note = Description of Artificial Sequence: Synthetic oligonucleotide
  misc_feature 1..20: note = Target: SCN10A; (-) strand; PAM type: NRG; PAM sequence: GAG
  source 1..20: mol_type = other DNA
tttgcacagcaccaggaaca

SEQ ID NO: 14173 - DNA, 20 bp, synthetic construct
  misc_feature 1..20: note = Description of Artificial Sequence: Synthetic oligonucleotide
  misc_feature 1..20: note = Target: SCN10A; (-) strand; PAM type: NRG; PAM sequence: CAG
  source 1..20: mol_type = other DNA
catttgcacagcaccaggaa

SEQ ID NO: 14174 - DNA, 20 bp, synthetic construct
  misc_feature 1..20: note = Description of Artificial Sequence: Synthetic oligonucleotide
  misc_feature 1..20: note = Target: SCN10A; (-) strand; PAM type: NRG; PAM sequence: AGG
  source 1..20: mol_type = other DNA
ttaggcatttgcacagcacc

SEQ ID NO: 14175 - DNA, 20 bp, synthetic construct
  misc_feature 1..20: note = Description of Artificial Sequence: Synthetic oligonucleotide
  misc_feature 1..20: note = Target: SCN10A; (-) strand; PAM type: NRG; PAM sequence: CAG
  source 1..20: mol_type = other DNA
cttaggcatttgcacagcac

SEQ ID NO: 14176 - DNA, 20 bp, synthetic construct
  misc_feature 1..20: note = Description of Artificial Sequence: Synthetic oligonucleotide
  misc_feature 1..20: note = Target: SCN10A; (-) strand; PAM type: NRG; PAM sequence: CAG
  source 1..20: mol_type = other DNA
catttgcttaggcatttgca

SEQ ID NO: 14177 - DNA, 20 bp, synthetic construct
  misc_feature 1..20: note = Description of Artificial Sequence: Synthetic oligonucleotide
  misc_feature 1..20: note = Target: SCN10A; (-) strand; PAM type: NRG; PAM sequence: AGG
  source 1..20: mol_type = other DNA
ccctatacctgcatttgctt

SEQ ID NO: 14178 - DNA, 20 bp, synthetic construct
  misc_feature 1..20: note = Description of Artificial Sequence: Synthetic oligonucleotide
  misc_feature 1..20: note = Target: SCN10A; (-) strand; PAM type: NRG; PAM sequence: TAG
  source 1..20: mol_type = other DNA
gccctatacctgcatttgct

SEQ ID NO: 14179 - DNA, 20 bp, synthetic construct
  misc_feature 1..20: note = Description of Artificial Sequence: Synthetic oligonucleotide
  misc_feature 1..20: note = Target: SCN10A; (-) strand; PAM type: NRG; PAM sequence: AAG
  source 1..20: mol_type = other DNA
cttccaagatgcaaacaacc

SEQ ID NO: 14180 - DNA, 20 bp, synthetic construct
  misc_feature 1..20: note = Description of Artificial Sequence: Synthetic oligonucleotide
  misc_feature 1..20: note = Target: SCN10A; (-) strand; PAM type: NRG; PAM sequence: AAG
  source 1..20: mol_type = other DNA
aggccactctgcctccttcc

SEQ ID NO: 14181 - DNA, 20 bp, synthetic construct
  misc_feature 1..20: note = Description of Artificial Sequence: Synthetic oligonucleotide
  misc_feature 1..20: note = Target: SCN10A; (-) strand; PAM type: NRG; PAM sequence: AGG
  source 1..20: mol_type = other DNA
aaatgatctcttggttatcc

SEQ ID NO: 14182 - DNA, 20 bp, synthetic construct
  misc_feature 1..20: note = Description of Artificial Sequence: Synthetic oligonucleotide
  misc_feature 1..20: note = Target: SCN10A; (-) strand; PAM type: NRG; PAM sequence: CAG
  source 1..20: mol_type = other DNA
taaatgatctcttggttatc

SEQ ID NO: 14183 - DNA, 20 bp, synthetic construct
  misc_feature 1..20: note = Description of Artificial Sequence: Synthetic oligonucleotide
  misc_feature 1..20: note = Target: SCN10A; (-) strand; PAM type: NRG; PAM sequence: TGG
  source 1..20: mol_type = other DNA
accagatataaatgatctct

SEQ ID NO: 14184 - DNA, 20 bp, synthetic construct
  misc_feature 1..20: note = Description of Artificial Sequence: Synthetic oligonucleotide
  misc_feature 1..20: note = Target: SCN10A; (-) strand; PAM type: NRG; PAM sequence: CAG
  source 1..20: mol_type = other DNA
aaagacaccataaaaataac

SEQ ID NO: 14185 - DNA, 20 bp, synthetic construct
  misc_feature 1..20: note = Description of Artificial Sequence: Synthetic oligonucleotide
  misc_feature 1..20: note = Target: SCN10A; (-) strand; PAM type: NRG; PAM sequence: AAG
  source 1..20: mol_type = other DNA
atcacagtaggagcttttta

SEQ ID NO: 14186 - DNA, 20 bp, synthetic construct
  misc_feature 1..20: note = Description of Artificial Sequence: Synthetic oligonucleotide
  misc_feature 1..20: note = Target: SCN10A; (-) strand; PAM type: NRG; PAM sequence: GAG
  source 1..20: mol_type = other DNA
agaagagaagatcacagtag

SEQ ID NO: 14187 - DNA, 20 bp, synthetic construct
  misc_feature 1..20: note = Description of Artificial Sequence: Synthetic oligonucleotide
  misc_feature 1..20: note = Target: SCN10A; (-) strand; PAM type: NRG; PAM sequence: AGG
  source 1..20: mol_type = other DNA
aaagaagagaagatcacagt

SEQ ID NO: 14188 - DNA, 20 bp, synthetic construct
  misc_feature 1..20: note = Description of Artificial Sequence: Synthetic oligonucleotide
  misc_feature 1..20: note = Target: SCN10A; (-) strand; PAM type: NRG; PAM sequence: TAG
  source 1..20: mol_type = other DNA
aaaagaagagaagatcacag

SEQ ID NO: 14189 - DNA, 20 bp, synthetic construct
  misc_feature 1..20: note = Description of Artificial Sequence: Synthetic oligonucleotide
  misc_feature 1..20: note = Target: SCN10A; (-) strand; PAM type: NRG; PAM sequence: CAG
  source 1..20: mol_type = other DNA
actaaaagaagagaagatca

SEQ ID NO: 14190 - DNA, 20 bp, synthetic construct
  misc_feature 1..20: note = Description of Artificial Sequence: Synthetic oligonucleotide
  misc_feature 1..20: note = Target: SCN10A; (-) strand; PAM type: NRG; PAM sequence: AAG
  source 1..20: mol_type = other DNA
tcacagcactaaaagaagag

SEQ ID NO: 14191 - DNA, 20 bp, synthetic construct
  misc_feature 1..20: note = Description of Artificial Sequence: Synthetic oligonucleotide
  misc_feature 1..20: note = Target: SCN10A; (-) strand; PAM type: NRG; PAM sequence: GAG
  source 1..20: mol_type = other DNA
tgttcacagcactaaaagaa

SEQ ID NO: 14192 - DNA, 20 bp, synthetic construct
  misc_feature 1..20: note = Description of Artificial Sequence: Synthetic oligonucleotide
  misc_feature 1..20: note = Target: SCN10A; (-) strand; PAM type: NRG; PAM sequence: AAG
  source 1..20: mol_type = other DNA
gatgttcacagcactaaaag

SEQ ID NO: 14193 - DNA, 20 bp, synthetic construct
  misc_feature 1..20: note = Description of Artificial Sequence: Synthetic oligonucleotide
  misc_feature 1..20: note = Target: SCN10A; (-) strand; PAM type: NRG; PAM sequence: AAG
  source 1..20: mol_type = other DNA
taagatgttcacagcactaa

SEQ ID NO: 14194 - DNA, 20 bp, synthetic construct
  misc_feature 1..20: note = Description of Artificial Sequence: Synthetic oligonucleotide
  misc_feature 1..20: note = Target: SCN10A; (-) strand; PAM type: NRG; PAM sequence: CAG
  source 1..20: mol_type = other DNA
acagagcagtaagatgttca

SEQ ID NO: 14195 - DNA, 20 bp, synthetic construct
  misc_feature 1..20: note = Description of Artificial Sequence: Synthetic oligonucleotide
  misc_feature 1..20: note = Target: SCN10A; (-) strand; PAM type: NRG; PAM sequence: AAG
  source 1..20: mol_type = other DNA
tcaaggactcacagagcagt

SEQ ID NO: 14196 - DNA, 20 bp, synthetic construct
  misc_feature 1..20: note = Description of Artificial Sequence: Synthetic oligonucleotide
  misc_feature 1..20: note = Target: SCN10A; (-) strand; PAM type: NRG; PAM sequence: CAG
  source 1..20: mol_type = other DNA
gggatcaaggactcacagag

SEQ ID NO: 14197 - DNA, 20 bp, synthetic construct
  misc_feature 1..20: note = Description of Artificial Sequence: Synthetic oligonucleotide
  misc_feature 1..20: note = Target: SCN10A; (-) strand; PAM type: NRG; PAM sequence: GAG
  source 1..20: mol_type = other DNA
gttgggatcaaggactcaca

SEQ ID NO: 14198 - DNA, 20 bp, synthetic construct
  misc_feature 1..20: note = Description of Artificial Sequence: Synthetic oligonucleotide
  misc_feature 1..20: note = Target: SCN10A; (-) strand; PAM type: NRG; PAM sequence: CAG
  source 1..20: mol_type = other DNA
gggttgggatcaaggactca

SEQ ID NO: 14199 - DNA, 20 bp, synthetic construct
  misc_feature 1..20: note = Description of Artificial Sequence: Synthetic oligonucleotide
  misc_feature 1..20: note = Target: SCN10A; (-) strand; PAM type: NRG; PAM sequence: AGG
  source 1..20: mol_type = other DNA
ggggaatggggttgggatca

SEQ ID NO: 14200 - DNA, 20 bp, synthetic construct
  misc_feature 1..20: note = Description of Artificial Sequence: Synthetic oligonucleotide
  misc_feature 1..20: note = Target: SCN10A; (-) strand; PAM type: NRG; PAM sequence: AAG
  source 1..20: mol_type = other DNA
tggggaatggggttgggatc

SEQ ID NO: 14201 - DNA, 20 bp, synthetic construct
  misc_feature 1..20: note = Description of Artificial Sequence: Synthetic oligonucleotide
  misc_feature 1..20: note = Target: SCN10A; (-) strand; PAM type: NRG; PAM sequence: GGG
  source 1..20: mol_type = other DNA
aaagcgtggggaatggggtt

SEQ ID NO: 14202 - DNA, 20 bp, synthetic construct
  misc_feature 1..20: note = Description of Artificial Sequence: Synthetic oligonucleotide
  misc_feature 1..20: note = Target: SCN10A; (-) strand; PAM type: NRG; PAM sequence: TGG
  source 1..20: mol_type = other DNA
caaagcgtggggaatggggt

SEQ ID NO: 14203 - DNA, 20 bp, synthetic construct
  misc_feature 1..20: note = Description of Artificial Sequence: Synthetic oligonucleotide
  misc_feature 1..20: note = Target: SCN10A; (-) strand; PAM type: NRG; PAM sequence: GGG
  source 1..20: mol_type = other DNA
aggtcaaagcgtggggaatg

SEQ ID NO: 14204 - DNA, 20 bp, synthetic construct
  misc_feature 1..20: note = Description of Artificial Sequence: Synthetic oligonucleotide
  misc_feature 1..20: note = Target: SCN10A; (-) strand; PAM type: NRG; PAM sequence: GGG
  source 1..20: mol_type = other DNA
aaggtcaaagcgtggggaat

SEQ ID NO: 14205 - DNA, 20 bp, synthetic construct
  misc_feature 1..20: note = Description of Artificial Sequence: Synthetic oligonucleotide
  misc_feature 1..20: note = Target: SCN10A; (-) strand; PAM type: NRG; PAM sequence: TGG
  source 1..20: mol_type = other DNA
gaaggtcaaagcgtggggaa

SEQ ID NO: 14206 - DNA, 20 bp, synthetic construct
  misc_feature 1..20: note = Description of Artificial Sequence: Synthetic oligonucleotide
  misc_feature 1..20: note = Target: SCN10A; (-) strand; PAM type: NRG; PAM sequence: GGG
  source 1..20: mol_type = other DNA
tgggagaaggtcaaagcgtg

SEQ ID NO: 14207 - DNA, 20 bp, synthetic construct
  misc_feature 1..20: note = Description of Artificial Sequence: Synthetic oligonucleotide
  misc_feature 1..20: note = Target: SCN10A; (-) strand; PAM type: NRG; PAM sequence: GGG
  source 1..20: mol_type = other DNA
ttgggagaaggtcaaagcgt

SEQ ID NO: 14208 - DNA, 20 bp, synthetic construct
  misc_feature 1..20: note = Description of Artificial Sequence: Synthetic oligonucleotide
  misc_feature 1..20: note = Target: SCN10A; (-) strand; PAM type: NRG; PAM sequence: TGG
  source 1..20: mol_type = other DNA
tttgggagaaggtcaaagcg

SEQ ID NO: 14209 - DNA, 20 bp, synthetic construct
  misc_feature 1..20: note = Description of Artificial Sequence: Synthetic oligonucleotide
  misc_feature 1..20: note = Target: SCN10A; (-) strand; PAM type: NRG; PAM sequence: AAG
  source 1..20: mol_type = other DNA
gaagttttgggagaaggtca

SEQ ID NO: 14210 - DNA, 20 bp, synthetic construct
  misc_feature 1..20: note = Description of Artificial Sequence: Synthetic oligonucleotide
  misc_feature 1..20: note = Target: SCN10A; (-) strand; PAM type: NRG; PAM sequence: AGG
  source 1..20: mol_type = other DNA
tcaggagaagttttgggaga

SEQ ID NO: 14211 - DNA, 20 bp, synthetic construct
  misc_feature 1..20: note = Description of Artificial Sequence: Synthetic oligonucleotide
  misc_feature 1..20: note = Target: SCN10A; (-) strand; PAM type: NRG; PAM sequence: AAG
  source 1..20: mol_type = other DNA
gtcaggagaagttttgggag

SEQ ID NO: 14212 - DNA, 20 bp, synthetic construct
  misc_feature 1..20: note = Description of Artificial Sequence: Synthetic oligonucleotide
  misc_feature 1..20: note = Target: SCN10A; (-) strand; PAM type: NRG; PAM sequence: GAG
  source 1..20: mol_type = other DNA
gaggtcaggagaagttttgg

SEQ ID NO: 14213 - DNA, 20 bp, synthetic construct
  misc_feature 1..20: note = Description of Artificial Sequence: Synthetic oligonucleotide
  misc_feature 1..20: note = Target: SCN10A; (-) strand; PAM type: NRG; PAM sequence: GGG
  source 1..20: mol_type = other DNA
tagaggtcaggagaagtttt

SEQ ID NO: 14214 - DNA, 20 bp, synthetic construct
  misc_feature 1..20: note = Description of Artificial Sequence: Synthetic oligonucleotide
  misc_feature 1..20: note = Target: SCN10A; (-) strand; PAM type: NRG; PAM sequence: TGG
  source 1..20: mol_type = other DNA
atagaggtcaggagaagttt

SEQ ID NO: 14215 - DNA, 20 bp, synthetic construct
  misc_feature 1..20: note = Description of Artificial Sequence: Synthetic oligonucleotide
  misc_feature 1..20: note = Target: SCN10A; (-) strand; PAM type: NRG; PAM sequence: AAG
  source 1..20: mol_type = other DNA
agctccatagaggtcaggag

SEQ ID NO: 14216 - DNA, 20 bp, synthetic construct
  misc_feature 1..20: note = Description of Artificial Sequence: Synthetic oligonucleotide
  misc_feature 1..20: note = Target: SCN10A; (-) strand; PAM type: NRG; PAM sequence: GAG
  source 1..20: mol_type = other DNA
gtgagctccatagaggtcag

SEQ ID NO: 14217 - DNA, 20 bp, synthetic construct
  misc_feature 1..20: note = Description of Artificial Sequence: Synthetic oligonucleotide
  misc_feature 1..20: note = Target: SCN10A; (-) strand; PAM type: NRG; PAM sequence: AGG
  source 1..20: mol_type = other DNA
aggtgagctccatagaggtc

SEQ ID NO: 14218 - DNA, 20 bp, synthetic construct
  misc_feature 1..20: note = Description of Artificial Sequence: Synthetic oligonucleotide
  misc_feature 1..20: note = Target: SCN10A; (-) strand; PAM type: NRG; PAM sequence: CAG
  source 1..20: mol_type = other DNA
caggtgagctccatagaggt

SEQ ID NO: 14219 - DNA, 20 bp, synthetic construct
  misc_feature 1..20: note = Description of Artificial Sequence: Synthetic oligonucleotide
  misc_feature 1..20: note = Target: SCN10A; (-) strand; PAM type: NRG; PAM sequence: AGG
  source 1..20: mol_type = other DNA
aaggcaggtgagctccatag

SEQ ID NO: 14220 - DNA, 20 bp, synthetic construct
  misc_feature 1..20: note = Description of Artificial Sequence: Synthetic oligonucleotide
  misc_feature 1..20: note = Target: SCN10A; (-) strand; PAM type: NRG; PAM sequence: GAG
  source 1..20: mol_type = other DNA
caaggcaggtgagctccata

SEQ ID NO: 14221 - DNA, 20 bp, synthetic construct
  misc_feature 1..20: note = Description of Artificial Sequence: Synthetic oligonucleotide
  misc_feature 1..20: note = Target: SCN10A; (-) strand; PAM type: NRG; PAM sequence: TAG
  source 1..20: mol_type = other DNA
atcaaggcaggtgagctcca

SEQ ID NO: 14222 - DNA, 20 bp, synthetic construct
  misc_feature 1..20: note = Description of Artificial Sequence: Synthetic oligonucleotide
  misc_feature 1..20: note = Target: SCN10A; (-) strand; PAM type: NRG; PAM sequence: GAG
  source 1..20: mol_type = other DNA
atgtgcagatcaaggcaggt

SEQ ID NO: 14223 - DNA, 20 bp, synthetic construct
  misc_feature 1..20: note = Description of Artificial Sequence: Synthetic oligonucleotide
  misc_feature 1..20: note = Target: SCN10A; (-) strand; PAM type: NRG; PAM sequence: AGG
  source 1..20: mol_type = other DNA
agatatgtgcagatcaaggc

SEQ ID NO: 14224 - DNA, 20 bp, synthetic construct
  misc_feature 1..20: note = Description of Artificial Sequence: Synthetic oligonucleotide
  misc_feature 1..20: note = Target: SCN10A; (-) strand; PAM type: NRG; PAM sequence: CAG
  source 1..20: mol_type = other DNA
gagatatgtgcagatcaagg

SEQ ID NO: 14225 - DNA, 20 bp, synthetic construct
  misc_feature 1..20: note = Description of Artificial Sequence: Synthetic oligonucleotide
  misc_feature 1..20: note = Target: SCN10A; (-) strand; PAM type: NRG; PAM sequence: AGG
  source 1..20: mol_type = other DNA
ggggagatatgtgcagatca

SEQ ID NO: 14226 - DNA, 20 bp, synthetic construct
  misc_feature 1..20: note = Description of Artificial Sequence: Synthetic oligonucleotide
  misc_feature 1..20: note = Target: SCN10A; (-) strand; PAM type: NRG; PAM sequence: AAG
  source 1..20: mol_type = other DNA
gggggagatatgtgcagatc

SEQ ID NO: 14227 - DNA, 20 bp, synthetic construct
  misc_feature 1..20: note = Description of Artificial Sequence: Synthetic oligonucleotide
  misc_feature 1..20: note = Target: SCN10A; (-) strand; PAM type: NRG; PAM sequence: CAG
  source 1..20: mol_type = other DNA
tgaatagggggagatatgtg

SEQ ID NO: 14228 - DNA, 20 bp, synthetic construct
  misc_feature 1..20: note = Description of Artificial Sequence: Synthetic oligonucleotide
  misc_feature 1..20: note = Target: SCN10A; (-) strand; PAM type: NRG; PAM sequence: GAG
  source 1..20: mol_type = other DNA
tggcagcctttgaatagggg

SEQ ID NO: 14229 - DNA, 20 bp, synthetic construct
  misc_feature 1..20: note = Description of Artificial Sequence: Synthetic oligonucleotide
  misc_feature 1..20: note = Target: SCN10A; (-) strand; PAM type: NRG; PAM sequence: GGG
  source 1..20: mol_type = other DNA
aatggcagcctttgaatagg

SEQ ID NO: 14230 - DNA, 20 bp, synthetic construct
  misc_feature 1..20: note = Description of Artificial Sequence: Synthetic oligonucleotide
  misc_feature 1..20: note = Target: SCN10A; (-) strand; PAM type: NRG; PAM sequence: GGG
  source 1..20: mol_type = other DNA
gaatggcagcctttgaatag

SEQ ID NO: 14231 - DNA, 20 bp, synthetic construct
  misc_feature 1..20: note = Description of Artificial Sequence: Synthetic oligonucleotide
  misc_feature 1..20: note = Target: SCN10A; (-) strand; PAM type: NRG; PAM sequence: GGG
  source 1..20: mol_type = other DNA
agaatggcagcctttgaata

SEQ ID NO: 14232 - DNA, 20 bp, synthetic construct
  misc_feature 1..20: note = Description of Artificial Sequence: Synthetic oligonucleotide
  misc_feature 1..20: note = Target: SCN10A; (-) strand; PAM type: NRG; PAM sequence: AGG
  source 1..20: mol_type = other DNA
gagaatggcagcctttgaat

SEQ ID NO: 14233 - DNA, 20 bp, synthetic construct
  misc_feature 1..20: note = Description of Artificial Sequence: Synthetic oligonucleotide
  misc_feature 1..20: note = Target: SCN10A; (-) strand; PAM type: NRG; PAM sequence: TAG
  source 1..20: mol_type = other DNA
ggagaatggcagcctttgaa

SEQ ID NO: 14234 - DNA, 20 bp, synthetic construct
  misc_feature 1..20: note = Description of Artificial Sequence: Synthetic oligonucleotide
  misc_feature 1..20: note = Target: SCN10A; (-) strand; PAM type: NRG; PAM sequence: CAG
  source 1..20: mol_type = other DNA
catggggtaggggagaatgg

SEQ ID NO: 14235 - DNA, 20 bp, synthetic construct
  misc_feature 1..20: note = Description of Artificial Sequence: Synthetic oligonucleotide
  misc_feature 1..20: note = Target: SCN10A; (-) strand; PAM type: NRG; PAM sequence: TGG
  source 1..20: mol_type = other DNA
gtacatggggtaggggagaa

SEQ ID NO: 14236 - DNA, 20 bp, synthetic construct
  misc_feature 1..20: note = Description of Artificial Sequence: Synthetic oligonucleotide
  misc_feature 1..20: note = Target: SCN10A; (-) strand; PAM type: NRG; PAM sequence: GAG
  source 1..20: mol_type = other DNA
ctgaggtacatggggtaggg

SEQ ID NO: 14237 - DNA, 20 bp, synthetic construct
  misc_feature 1..20: note = Description of Artificial Sequence: Synthetic oligonucleotide
  misc_feature 1..20: note = Target: SCN10A; (-) strand; PAM type: NRG; PAM sequence: GGG
  source 1..20: mol_type = other DNA
ccctgaggtacatggggtag

SEQ ID NO: 14238 - DNA, 20 bp, synthetic construct
  misc_feature 1..20: note = Description of Artificial Sequence: Synthetic oligonucleotide
  misc_feature 1..20: note = Target: SCN10A; (-) strand; PAM type: NRG; PAM sequence: GGG
  source 1..20: mol_type = other DNA
cccctgaggtacatggggta

SEQ ID NO: 14239 - DNA, 20 bp, synthetic construct
  misc_feature 1..20: note = Description of Artificial Sequence: Synthetic oligonucleotide
  misc_feature 1..20: note = Target: SCN10A; (-) strand; PAM type: NRG; PAM sequence: AGG
  source 1..20: mol_type = other DNA
acccctgaggtacatggggt

SEQ ID NO: 14240 - DNA, 20 bp, synthetic construct
  misc_feature 1..20: note = Description of Artificial Sequence: Synthetic oligonucleotide
  misc_feature 1..20: note = Target: SCN10A; (-) strand; PAM type: NRG; PAM sequence: TAG
  source 1..20: mol_type = other DNA
aacccctgaggtacatgggg

SEQ ID NO: 14241 - DNA, 20 bp, synthetic construct
  misc_feature 1..20: note = Description of Artificial Sequence: Synthetic oligonucleotide
  misc_feature 1..20: note = Target: SCN10A; (-) strand; PAM type: NRG; PAM sequence: GGG
  source 1..20: mol_type = other DNA
cctaacccctgaggtacatg

SEQ ID NO: 14242 - DNA, 20 bp, synthetic construct
  misc_feature 1..20: note = Description of Artificial Sequence: Synthetic oligonucleotide
  misc_feature 1..20: note = Target: SCN10A; (-) strand; PAM type: NRG; PAM sequence: GGG
  source 1..20: mol_type = other DNA
gcctaacccctgaggtacat

SEQ ID NO: 14243 - DNA, 20 bp, synthetic construct
  misc_feature 1..20: note = Description of Artificial Sequence: Synthetic oligonucleotide
  misc_feature 1..20: note = Target: SCN10A; (-) strand; PAM type: NRG; PAM sequence: TGG
  source 1..20: mol_type = other DNA
ggcctaacccctgaggtaca

SEQ ID NO: 14244 - DNA, 20 bp, synthetic construct
  misc_feature 1..20: note = Description of Artificial Sequence: Synthetic oligonucleotide
  misc_feature 1..20: note = Target: SCN10A; (-) strand; PAM type: NRG; PAM sequence: AGG
  source 1..20: mol_type = other DNA
aacgccaggcctaacccctg

SEQ ID NO: 14245 - DNA, 20 bp, synthetic construct
  misc_feature 1..20: note = Description of Artificial Sequence: Synthetic oligonucleotide
  misc_feature 1..20: note = Target: SCN10A; (-) strand; PAM type: NRG; PAM sequence: GAG
  source 1..20: mol_type = other DNA
gaacgccaggcctaacccct

SEQ ID NO: 14246 - DNA, 20 bp, synthetic construct
  misc_feature 1..20: note = Description of Artificial Sequence: Synthetic oligonucleotide
  misc_feature 1..20: note = Target: SCN10A; (-) strand; PAM type: NRG; PAM sequence: AGG
  source 1..20: mol_type = other DNA
tggtgaacaaggagaacgcc

SEQ ID NO: 14247 - DNA, 20 bp, synthetic construct
  misc_feature 1..20: note = Description of Artificial Sequence: Synthetic oligonucleotide
  misc_feature 1..20: note = Target: SCN10A; (-) strand; PAM type: NRG; PAM sequence: CAG
  source 1..20: mol_type = other DNA
gtggtgaacaaggagaacgc

SEQ ID NO: 14248 - DNA, 20 bp, synthetic construct
  misc_feature 1..20: note = Description of Artificial Sequence: Synthetic oligonucleotide
  misc_feature 1..20: note = Target: SCN10A; (-) strand; PAM type: NRG; PAM sequence: GAG
  source 1..20: mol_type = other DNA
aagggtcagtggtgaacaag

SEQ ID NO: 14249 - DNA, 20 bp, synthetic construct
  misc_feature 1..20: note = Description of Artificial Sequence: Synthetic oligonucleotide
  misc_feature 1..20: note = Target: SCN10A; (-) strand; PAM type: NRG; PAM sequence: AGG
  source 1..20: mol_type = other DNA
ggaagggtcagtggtgaaca

SEQ ID NO: 14250 - DNA, 20 bp, synthetic construct
  misc_feature 1..20: note = Description of Artificial Sequence: Synthetic oligonucleotide
  misc_feature 1..20: note = Target: SCN10A; (-) strand; PAM type: NRG; PAM sequence: AAG
  source 1..20: mol_type = other DNA
tggaagggtcagtggtgaac

SEQ ID NO: 14251 - DNA, 20 bp, synthetic construct
  misc_feature 1..20: note = Description of Artificial Sequence: Synthetic oligonucleotide
  misc_feature 1..20: note = Target: SCN10A; (-) strand; PAM type: NRG; PAM sequence: TGG
  source 1..20: mol_type = other DNA
cagtggtgtggaagggtcag

SEQ ID NO: 14252 - DNA, 20 bp, synthetic construct
  misc_feature 1..20: note = Description of Artificial Sequence: Synthetic oligonucleotide
  misc_feature 1..20: note = Target: SCN10A; (-) strand; PAM type: NRG; PAM sequence: CAG
  source 1..20: mol_type = other DNA
gagcagtggtgtggaagggt

SEQ ID NO: 14253 - DNA, 20 bp, synthetic construct
  misc_feature 1..20: note = Description of Artificial Sequence: Synthetic oligonucleotide
  misc_feature 1..20: note = Target: SCN10A; (-) strand; PAM type: NRG; PAM sequence: GGG
  source 1..20: mol_type = other DNA
ggaagagcagtggtgtggaa

SEQ ID NO: 14254 - DNA, 20 bp, synthetic construct
  misc_feature 1..20: note = Description of Artificial Sequence: Synthetic oligonucleotide
  misc_feature 1..20: note = Target: SCN10A; (-) strand; PAM type: NRG; PAM sequence: AGG
  source 1..20: mol_type = other DNA
aggaagagcagtggtgtgga

SEQ ID NO: 14255 - DNA, 20 bp, synthetic construct
  misc_feature 1..20: note = Description of Artificial Sequence: Synthetic oligonucleotide
  misc_feature 1..20: note = Target: SCN10A; (-) strand; PAM type: NRG; PAM sequence: AAG
  source 1..20: mol_type = other DNA
caggaagagcagtggtgtgg

SEQ ID NO: 14256 - DNA, 20 bp, synthetic construct
  misc_feature 1..20: note = Description of Artificial Sequence: Synthetic oligonucleotide
  misc_feature 1..20: note = Target: SCN10A; (-) strand; PAM type: NRG; PAM sequence: TGG
  source 1..20: mol_type = other DNA
acacaggaagagcagtggtg

SEQ ID NO: 14257 - DNA, 20 bp, synthetic construct
  misc_feature 1..20: note = Description of Artificial Sequence: Synthetic oligonucleotide
  misc_feature 1..20: note = Target: SCN10A; (-) strand; PAM type: NRG; PAM sequence: TGG
  source 1..20: mol_type = other DNA
acaagacacaggaagagcag

SEQ ID NO: 14258 - DNA, 20 bp, synthetic construct
  misc_feature 1..20: note = Description of Artificial Sequence: Synthetic oligonucleotide
  misc_feature 1..20: note = Target: SCN10A; (-) strand; PAM type: NRG; PAM sequence: CAG
  source 1..20: mol_type = other DNA
tttacaagacacaggaagag

SEQ ID NO: 14259 - DNA, 20 bp, synthetic construct
  misc_feature 1..20: note = Description of Artificial Sequence: Synthetic oligonucleotide
  misc_feature 1..20: note = Target: SCN10A; (-) strand; PAM type: NRG; PAM sequence: GAG
  source 1..20: mol_type = other DNA
ggttttacaagacacaggaa

SEQ ID NO: 14260 - DNA, 20 bp, synthetic construct
  misc_feature 1..20: note = Description of Artificial Sequence: Synthetic oligonucleotide
  misc_feature 1..20: note = Target: SCN10A; (-) strand; PAM type: NRG; PAM sequence: AAG
  source 1..20: mol_type = other DNA
ggggttttacaagacacagg

SEQ ID NO: 14261 - DNA, 20 bp, synthetic construct
  misc_feature 1..20: note = Description of Artificial Sequence: Synthetic oligonucleotide
  misc_feature 1..20: note = Target: SCN10A; (-) strand; PAM type: NRG; PAM sequence: AGG
  source 1..20: mol_type = other DNA
gaaggggttttacaagacac

SEQ ID NO: 14262 - DNA, 20 bp, synthetic construct
  misc_feature 1..20: note = Description of Artificial Sequence: Synthetic oligonucleotide
  misc_feature 1..20: note = Target: SCN10A; (-) strand; PAM type: NRG; PAM sequence: CAG
  source 1..20: mol_type = other DNA
agaaggggttttacaagaca

SEQ ID NO: 14263 - DNA, 20 bp, synthetic construct
  misc_feature 1..20: note = Description of Artificial Sequence: Synthetic oligonucleotide
  misc_feature 1..20: note = Target: SCN10A; (-) strand; PAM type: NRG; PAM sequence: AAG
  source 1..20: mol_type = other DNA
aaagcaagaaggggttttac

SEQ ID NO: 14264 - DNA, 20 bp, synthetic construct
  misc_feature 1..20: note = Description of Artificial Sequence: Synthetic oligonucleotide
  misc_feature 1..20: note = Target: SCN10A; (-) strand; PAM type: NRG; PAM sequence: GGG
  source 1..20: mol_type = other DNA
caaagcttcaaagcaagaag

SEQ ID NO: 14265 - DNA, 20 bp, synthetic construct
  misc_feature 1..20: note = Description of Artificial Sequence: Synthetic oligonucleotide
  misc_feature 1..20: note = Target: SCN10A; (-) strand; PAM type: NRG; PAM sequence: GGG
  source 1..20: mol_type = other DNA
gcaaagcttcaaagcaagaa

SEQ ID NO: 14266 - DNA, 20 bp, synthetic construct
  misc_feature 1..20: note = Description of Artificial Sequence: Synthetic oligonucleotide
  misc_feature 1..20: note = Target: SCN10A; (-) strand; PAM type: NRG; PAM sequence: AGG
  source 1..20: mol_type = other DNA
ggcaaagcttcaaagcaaga

SEQ ID NO: 14267 - DNA, 20 bp, synthetic construct
  misc_feature 1..20: note = Description of Artificial Sequence: Synthetic oligonucleotide
  misc_feature 1..20: note = Target: SCN10A; (-) strand; PAM type: NRG; PAM sequence: AAG
  source 1..20: mol_type = other DNA
tggcaaagcttcaaagcaag

SEQ ID NO: 14268 - DNA, 20 bp, synthetic construct
  misc_feature 1..20: note = Description of Artificial Sequence: Synthetic oligonucleotide
  misc_feature 1..20: note = Target: SCN10A; (-) strand; PAM type: NRG; PAM sequence: AAG
  source 1..20: mol_type = other DNA
aggtggcaaagcttcaaagc

SEQ ID NO: 14269 - DNA, 20 bp, synthetic construct
  misc_feature 1..20: note = Description of Artificial Sequence: Synthetic oligonucleotide
  misc_feature 1..20: note = Target: SCN10A; (-) strand; PAM type: NRG; PAM sequence: AAG
  source 1..20: mol_type = other DNA
aactaggtggcaaagcttca

SEQ ID NO: 14270 - DNA, 20 bp, synthetic construct
  misc_feature 1..20: note = Description of Artificial Sequence: Synthetic oligonucleotide
  misc_feature 1..20: note = Target: SCN10A; (-) strand; PAM type: NRG; PAM sequence: AAG
  source 1..20: mol_type = other DNA
agtgacaaaactaggtggca

SEQ ID NO: 14271 - DNA, 20 bp, synthetic construct
  misc_feature 1..20: note = Description of Artificial Sequence: Synthetic oligonucleotide
  misc_feature 1..20: note = Target: SCN10A; (-) strand; PAM type: NRG; PAM sequence: TGG
  source 1..20: mol_type = other DNA
gaagaagtgacaaaactagg

SEQ ID NO: 14272 - DNA, 20 bp, synthetic construct
  misc_feature 1..20: note = Description of Artificial Sequence: Synthetic oligonucleotide
  misc_feature 1..20: note = Target: SCN10A; (-) strand; PAM type: NRG; PAM sequence: AGG
  source 1..20: mol_type = other DNA
aatgaagaagtgacaaaact

SEQ ID NO: 14273 - DNA, 20 bp, synthetic construct
  misc_feature 1..20: note = Description of Artificial Sequence: Synthetic oligonucleotide
  misc_feature 1..20: note = Target: SCN10A; (-) strand; PAM type: NRG; PAM sequence: TAG
  source 1..20: mol_type = other DNA
taatgaagaagtgacaaaac

SEQ ID NO: 14274 - DNA, 20 bp, synthetic construct
  misc_feature 1..20: note = Description of Artificial Sequence: Synthetic oligonucleotide
  misc_feature 1..20: note = Target: SCN10A; (-) strand; PAM type: NRG; PAM sequence: AAG
  source 1..20: mol_type = other DNA
ggcaagcggcagtaatgaag

SEQ ID NO: 14275 - DNA, 20 bp, synthetic construct
  misc_feature 1..20: note = Description of Artificial Sequence: Synthetic oligonucleotide
  misc_feature 1..20: note = Target: SCN10A; (-) strand; PAM type: NRG; PAM sequence: AAG
  source 1..20: mol_type = other DNA
tttggcaagcggcagtaatg

SEQ ID NO: 14276 - DNA, 20 bp, synthetic construct
  misc_feature 1..20: note = Description of Artificial Sequence: Synthetic oligonucleotide
  misc_feature 1..20: note = Target: SCN10A; (-) strand; PAM type: NRG; PAM sequence: CAG
  source 1..20: mol_type = other DNA
accaagagtttggcaagcgg

SEQ ID NO: 14277 - DNA, 20 bp, synthetic construct
  misc_feature 1..20: note = Description of Artificial Sequence: Synthetic oligonucleotide
  misc_feature 1..20: note = Target: SCN10A; (-) strand; PAM type: NRG; PAM sequence: CGG
  source 1..20: mol_type = other DNA
gggaccaagagtttggcaag

SEQ ID NO: 14278 - DNA, 20 bp, synthetic construct
  misc_feature 1..20: note = Description of Artificial Sequence: Synthetic oligonucleotide
  misc_feature 1..20: note = Target: SCN10A; (-) strand; PAM type: NRG; PAM sequence: AAG
  source 1..20: mol_type = other DNA
agagggaccaagagtttggc

SEQ ID NO: 14279 - DNA, 20 bp, synthetic construct
  misc_feature 1..20: note = Description of Artificial Sequence: Synthetic oligonucleotide
  misc_feature 1..20: note = Target: SCN10A; (-) strand; PAM type: NRG; PAM sequence: TGG
  source 1..20: mol_type = other DNA
aggcagagggaccaagagtt

SEQ ID NO: 14280 - DNA, 20 bp, synthetic construct
  misc_feature 1..20: note = Description of Artificial Sequence: Synthetic oligonucleotide
  misc_feature 1..20: note = Target: SCN10A; (-) strand; PAM type: NRG; PAM sequence: GAG
  source 1..20: mol_type = other DNA
tactgaggcagagggaccaa

SEQ ID NO: 14281 - DNA, 20 bp, synthetic construct
  misc_feature 1..20: note = Description of Artificial Sequence: Synthetic oligonucleotide
  misc_feature 1..20: note = Target: SCN10A; (-) strand; PAM type: NRG; PAM sequence: AAG
  source 1..20: mol_type = other DNA
attactgaggcagagggacc

SEQ ID NO: 14282 - DNA, 20 bp, synthetic construct
  misc_feature 1..20: note = Description of Artificial Sequence: Synthetic oligonucleotide
  misc_feature 1..20: note = Target: SCN10A; (-) strand; PAM type: NRG; PAM sequence: GGG
  source 1..20: mol_type = other DNA
cccatcattactgaggcaga

SEQ ID NO: 14283 - DNA, 20 bp, synthetic construct
  misc_feature 1..20: note = Description of Artificial Sequence: Synthetic oligonucleotide
  misc_feature 1..20: note = Target: SCN10A; (-) strand; PAM type: NRG; PAM sequence: AGG
  source 1..20: mol_type = other DNA
acccatcattactgaggcag

SEQ ID NO: 14284 - DNA, 20 bp, synthetic construct
  misc_feature 1..20: note = Description of Artificial Sequence: Synthetic oligonucleotide
  misc_feature 1..20: note = Target: SCN10A; (-) strand; PAM type: NRG; PAM sequence: GAG
  source 1..20: mol_type = other DNA
cacccatcattactgaggca

SEQ ID NO: 14285 - DNA, 20 bp, synthetic construct
  misc_feature 1..20: note = Description of Artificial Sequence: Synthetic oligonucleotide
  misc_feature 1..20: note = Target: SCN10A; (-) strand; PAM type: NRG; PAM sequence: CAG
  source 1..20: mol_type = other DNA
ctcacccatcattactgagg

SEQ ID NO: 14286 - DNA, 20 bp, synthetic construct
  misc_feature 1..20: note = Description of Artificial Sequence: Synthetic oligonucleotide
  misc_feature 1..20: note = Target: SCN10A; (-) strand; PAM type: NRG; PAM sequence: AGG
  source 1..20: mol_type = other DNA
agcctcacccatcattactg

SEQ ID NO: 14287 - DNA, 20 bp, synthetic construct
  misc_feature 1..20: note = Description of Artificial Sequence: Synthetic oligonucleotide
  misc_feature 1..20: note = Target: SCN10A; (-) strand; PAM type: NRG; PAM sequence: GAG
  source 1..20: mol_type = other DNA
gagcctcacccatcattact

SEQ ID NO: 14288 - DNA, 20 bp, synthetic construct
  misc_feature 1..20: note = Description of Artificial Sequence: Synthetic oligonucleotide
  misc_feature 1..20: note = Target: SCN10A; (-) strand; PAM type: NRG; PAM sequence: GAG
  source 1..20: mol_type = other DNA
gagtgggcaaatatggccaa

SEQ ID NO: 14289 - DNA, 20 bp, synthetic construct
  misc_feature 1..20: note = Description of Artificial Sequence: Synthetic oligonucleotide
  misc_feature 1..20: note = Target: SCN10A; (-) strand; PAM type: NRG; PAM sequence: AAG
  source 1..20: mol_type = other DNA
aagagtgggcaaatatggcc

SEQ ID NO: 14290 - DNA, 20 bp, synthetic construct
  misc_feature 1..20: note = Description of Artificial Sequence: Synthetic oligonucleotide
  misc_feature 1..20: note = Target: SCN10A; (-) strand; PAM type: NRG; PAM sequence: TGG
  source 1..20: mol_type = other DNA
tagccaagagtgggcaaata

SEQ ID NO: 14291 - DNA, 20 bp, synthetic construct
  misc_feature 1..20: note = Description of Artificial Sequence: Synthetic oligonucleotide
  misc_feature 1..20: note = Target: SCN10A; (-) strand; PAM type: NRG; PAM sequence: GGG
  source 1..20: mol_type = other DNA
ctaggataatagccaagagt

SEQ ID NO: 14292 - DNA, 20 bp, synthetic construct
  misc_feature 1..20: note = Description of Artificial Sequence: Synthetic oligonucleotide
  misc_feature 1..20: note = Target: SCN10A; (-) strand; PAM type: NRG; PAM sequence: TGG
  source 1..20: mol_type = other DNA
cctaggataatagccaagag

SEQ ID NO: 14293 - DNA, 20 bp, synthetic construct
  misc_feature 1..20: note = Description of Artificial Sequence: Synthetic oligonucleotide
  misc_feature 1..20: note = Target: SCN10A; (-) strand; PAM type: NRG; PAM sequence: GAG
  source 1..20: mol_type = other DNA
ttgcctaggataatagccaa

SEQ ID NO: 14294 - DNA, 20 bp, synthetic construct
  misc_feature 1..20: note = Description of Artificial Sequence: Synthetic oligonucleotide
  misc_feature 1..20: note = Target: SCN10A; (-) strand; PAM type: NRG; PAM sequence: AAG
  source 1..20: mol_type = other DNA
tgttgcctaggataatagcc

SEQ ID NO: 14295 - DNA, 20 bp, synthetic construct
  misc_feature 1..20: note = Description of Artificial Sequence: Synthetic oligonucleotide
  misc_feature 1..20: note = Target: SCN10A; (-) strand; PAM type: NRG; PAM sequence: TAG
  source 1..20: mol_type = other DNA
attaatgttgcctaggataa

SEQ ID NO: 14296 - DNA, 20 bp, synthetic construct
  misc_feature 1..20: note = Description of Artificial Sequence: Synthetic oligonucleotide
  misc_feature 1..20: note = Target: SCN10A; (-) strand; PAM type: NRG; PAM sequence: AGG
  source 1..20: mol_type = other DNA
catggacattaatgttgcct

SEQ ID NO: 14297 - DNA, 20 bp, synthetic construct
  misc_feature 1..20: note = Description of Artificial Sequence: Synthetic oligonucleotide
  misc_feature 1..20: note = Target: SCN10A; (-) strand; PAM type: NRG; PAM sequence: TAG
  source 1..20: mol_type = other DNA
acatggacattaatgttgcc

SEQ ID NO: 14298 - DNA, 20 bp, synthetic construct
  misc_feature 1..20: note = Description of Artificial Sequence: Synthetic oligonucleotide
  misc_feature 1..20: note = Target: SCN10A; (-) strand; PAM type: NRG; PAM sequence: TGG
  source 1..20: mol_type = other DNA
gagacaaagagtaatgcaca

SEQ ID NO: 14299 - DNA, 20 bp, synthetic construct
  misc_feature 1..20: note = Description of Artificial Sequence: Synthetic oligonucleotide
  misc_feature 1..20: note = Target: SCN10A; (-) strand; PAM type: NRG; PAM sequence: GAG
  source 1..20: mol_type = other DNA
gcaataaaccaagagacaaa

SEQ ID NO: 14300 - DNA, 20 bp, synthetic construct
  misc_feature 1..20: note = Description of Artificial Sequence: Synthetic oligonucleotide
  misc_feature 1..20: note = Target: SCN10A; (-) strand; PAM type: NRG; PAM sequence: AAG
  source 1..20: mol_type = other DNA
gtgcaataaaccaagagaca

SEQ ID NO: 14301 - DNA, 20 bp, synthetic construct
  misc_feature 1..20: note = Description of Artificial Sequence: Synthetic oligonucleotide
  misc_feature 1..20: note = Target: SCN10A; (-) strand; PAM type: NRG; PAM sequence: GAG
  source 1..20: mol_type = other DNA
agatttgtgcaataaaccaa

SEQ ID NO: 14302 - DNA, 20 bp, synthetic construct
  misc_feature 1..20: note = Description of Artificial Sequence: Synthetic oligonucleotide
  misc_feature 1..20: note = Target: SCN10A; (-) strand; PAM type: NRG; PAM sequence: AAG
  source 1..20: mol_type = other DNA
agagatttgtgcaataaacc

SEQ ID NO: 14303 - DNA, 20 bp, synthetic construct
  misc_feature 1..20: note = Description of Artificial Sequence: Synthetic oligonucleotide
  misc_feature 1..20: note = Target: SCN10A; (-) strand; PAM type: NRG; PAM sequence: GAG
  source 1..20: mol_type = other DNA
taggagaaactaggtcatta

SEQ ID NO: 14304 - DNA, 20 bp, synthetic construct
  misc_feature 1..20: note = Description of Artificial Sequence: Synthetic oligonucleotide
  misc_feature 1..20: note = Target: SCN10A; (-) strand; PAM type: NRG; PAM sequence: TAG
  source 1..20: mol_type = other DNA
gttaggagaaactaggtcat

SEQ ID NO: 14305 - DNA, 20 bp, synthetic construct
  misc_feature 1..20: note = Description of Artificial Sequence: Synthetic oligonucleotide
  misc_feature 1..20: note = Target: SCN10A; (-) strand; PAM type: NRG; PAM sequence: AGG
  source 1..20: mol_type = other DNA
gctttaagttaggagaaact

SEQ ID NO: 14306 - DNA, 20 bp, synthetic construct
  misc_feature 1..20: note = Description of Artificial Sequence: Synthetic oligonucleotide
  misc_feature 1..20: note = Target: SCN10A; (-) strand; PAM type: NRG; PAM sequence: TAG
  source 1..20: mol_type = other DNA
tgctttaagttaggagaaac

SEQ ID NO: 14307 - DNA, 20 bp, synthetic construct
  misc_feature 1..20: note = Description of Artificial Sequence: Synthetic oligonucleotide
  misc_feature 1..20: note = Target: SCN10A; (-) strand; PAM type: NRG; PAM sequence: GAG
  source 1..20: mol_type = other DNA
aatattctgctttaagttag

SEQ ID NO: 14308 - DNA, 20 bp, synthetic construct
  misc_feature 1..20: note = Description of Artificial Sequence: Synthetic oligonucleotide
  misc_feature 1..20: note = Target: SCN10A; (-) strand; PAM type: NRG; PAM sequence: AGG
  source 1..20: mol_type = other DNA
gaaatattctgctttaagtt

SEQ ID NO: 14309 - DNA, 20 bp, synthetic construct
  misc_feature 1..20: note = Description of Artificial Sequence: Synthetic oligonucleotide
  misc_feature 1..20: note = Target: SCN10A; (-) strand; PAM type: NRG; PAM sequence: TAG
  source 1..20: mol_type = other DNA
tgaaatattctgctttaagt

SEQ ID NO: 14310 - DNA, 20 bp, synthetic construct
  misc_feature 1..20: note = Description of Artificial Sequence: Synthetic oligonucleotide
  misc_feature 1..20: note = Target: SCN10A; (-) strand; PAM type: NRG; PAM sequence: AAG
  source 1..20: mol_type = other DNA
tttctgaaatattctgcttt

SEQ ID NO: 14311 - DNA, 20 bp, synthetic construct
  misc_feature 1..20: note = Description of Artificial Sequence: Synthetic oligonucleotide
  misc_feature 1..20: note = Target: SCN10A; (-) strand; PAM type: NRG; PAM sequence: AAG
  source 1..20: mol_type = other DNA
tggtagctggagggagatgt

SEQ ID NO: 14312 - DNA, 20 bp, synthetic construct
  misc_feature 1..20: note = Description of Artificial Sequence: Synthetic oligonucleotide
  misc_feature 1..20: note = Target: SCN10A; (-) strand; PAM type: NRG; PAM sequence: GAG
  source 1..20: mol_type = other DNA
tctaagatggtagctggagg

SEQ ID NO: 14313 - DNA, 20 bp, synthetic construct
  misc_feature 1..20: note = Description of Artificial Sequence: Synthetic oligonucleotide
  misc_feature 1..20: note = Target: SCN10A; (-) strand; PAM type: NRG; PAM sequence: GGG
  source 1..20: mol_type = other DNA
gatctaagatggtagctgga

SEQ ID NO: 14314 - DNA, 20 bp, synthetic construct
  misc_feature 1..20: note = Description of Artificial Sequence: Synthetic oligonucleotide
  misc_feature 1..20: note = Target: SCN10A; (-) strand; PAM type: NRG; PAM sequence: AGG
  source 1..20: mol_type = other DNA
agatctaagatggtagctgg

SEQ ID NO: 14315 - DNA, 20 bp, synthetic construct
  misc_feature 1..20: note = Description of Artificial Sequence: Synthetic oligonucleotide
  misc_feature 1..20: note = Target: SCN10A; (-) strand; PAM type: NRG; PAM sequence: GAG
  source 1..20: mol_type = other DNA
gagatctaagatggtagctg

SEQ ID NO: 14316 - DNA, 20 bp, synthetic construct
  misc_feature 1..20: note = Description of Artificial Sequence: Synthetic oligonucleotide
  misc_feature 1..20: note = Target: SCN10A; (-) strand; PAM type: NRG; PAM sequence: TGG
  source 1..20: mol_type = other DNA
aagagatctaagatggtagc

SEQ ID NO: 14317 - DNA, 20 bp, synthetic construct
  misc_feature 1..20: note = Description of Artificial Sequence: Synthetic oligonucleotide
  misc_feature 1..20: note = Target: SCN10A; (-) strand; PAM type: NRG; PAM sequence: TAG
  source 1..20: mol_type = other DNA
tgggaagagatctaagatgg

SEQ ID NO: 14318 - DNA, 20 bp, synthetic construct
  misc_feature 1..20: note = Description of Artificial Sequence: Synthetic oligonucleotide
  misc_feature 1..20: note = Target: SCN10A; (-) strand; PAM type: NRG; PAM sequence: TGG
  source 1..20: mol_type = other DNA
aggtgggaagagatctaaga

SEQ ID NO: 14319 - DNA, 20 bp, synthetic construct
  misc_feature 1..20: note = Description of Artificial Sequence: Synthetic oligonucleotide
  misc_feature 1..20: note = Target: SCN10A; (-) strand; PAM type: NRG; PAM sequence: AAG
  source 1..20: mol_type = other DNA
ttgaaggtgggaagagatct

SEQ ID NO: 14320 - DNA, 20 bp, synthetic construct
  misc_feature 1..20: note = Description of Artificial Sequence: Synthetic oligonucleotide
  misc_feature 1..20: note = Target: SCN10A; (-) strand; PAM type: NRG; PAM sequence: GAG
  source 1..20: mol_type = other DNA
ttttgctttgaaggtgggaa

SEQ ID NO: 14321 - DNA, 20 bp, synthetic construct
  misc_feature 1..20: note = Description of Artificial Sequence: Synthetic oligonucleotide
  misc_feature 1..20: note = Target: SCN10A; (-) strand; PAM type: NRG; PAM sequence: AAG
  source 1..20: mol_type = other DNA
aattttgctttgaaggtggg

SEQ ID NO: 14322 - DNA, 20 bp, synthetic construct
  misc_feature 1..20: note = Description of Artificial Sequence: Synthetic oligonucleotide
  misc_feature 1..20: note = Target: SCN10A; (-) strand; PAM type: NRG; PAM sequence: GGG
  source 1..20: mol_type = other DNA
agaaattttgctttgaaggt

SEQ ID NO: 14323 - DNA, 20 bp, synthetic construct
  misc_feature 1..20: note = Description of Artificial Sequence: Synthetic oligonucleotide
  misc_feature 1..20: note = Target: SCN10A; (-) strand; PAM type: NRG; PAM sequence: TGG
  source 1..20: mol_type = other DNA
aagaaattttgctttgaagg

SEQ ID NO: 14324 - DNA, 20 bp, synthetic construct
  misc_feature 1..20: note = Description of Artificial Sequence: Synthetic oligonucleotide
  misc_feature 1..20: note = Target: SCN10A; (-) strand; PAM type: NRG; PAM sequence: AGG
  source 1..20: mol_type = other DNA
ttcaagaaattttgctttga

SEQ ID NO: 14325 - DNA, 20 bp, synthetic construct
  misc_feature 1..20: note = Description of Artificial Sequence: Synthetic oligonucleotide
  misc_feature 1..20: note = Target: SCN10A; (-) strand; PAM type: NRG; PAM sequence: AAG
  source 1..20: mol_type = other DNA
tttcaagaaattttgctttg

SEQ ID NO: 14326 - DNA, 20 bp, synthetic construct
  misc_feature 1..20: note = Description of Artificial Sequence: Synthetic oligonucleotide
  misc_feature 1..20: note = Target: SCN10A; (-) strand; PAM type: NRG; PAM sequence: AAG
  source 1..20: mol_type = other DNA
tgattgtacacaactctttc

SEQ ID NO: 14327 - DNA, 20 bp, synthetic construct
  misc_feature 1..20: note = Description of Artificial Sequence: Synthetic oligonucleotide
  misc_feature 1..20: note = Target: SCN10A; (-) strand; PAM type: NRG; PAM sequence: GGG
  source 1..20: mol_type = other DNA
gtgggctgaggagtgaatga

SEQ ID NO: 14328 - DNA, 20 bp, synthetic construct
  misc_feature 1..20: note = Description of Artificial Sequence: Synthetic oligonucleotide
  misc_feature 1..20: note = Target: SCN10A; (-) strand; PAM type: NRG; PAM sequence: AGG
  source 1..20: mol_type = other DNA
tgtgggctgaggagtgaatg

SEQ ID NO: 14329 - DNA, 20 bp, synthetic construct
  misc_feature 1..20: note = Description of Artificial Sequence: Synthetic oligonucleotide
  misc_feature 1..20: note = Target: SCN10A; (-) strand; PAM type: NRG; PAM sequence: GAG
  source 1..20: mol_type = other DNA
atgtgggctgaggagtgaat

SEQ ID NO: 14330 - DNA, 20 bp, synthetic construct
  misc_feature 1..20: note = Description of Artificial Sequence: Synthetic oligonucleotide
  misc_feature 1..20: note = Target: SCN10A; (-) strand; PAM type: NRG; PAM sequence: GAG
  source 1..20: mol_type = other DNA
ctctgttgatgtgggctgag

SEQ ID NO: 14331 - DNA, 20 bp, synthetic construct
  misc_feature 1..20: note = Description of Artificial Sequence: Synthetic oligonucleotide
  misc_feature 1..20: note = Target: SCN10A; (-) strand; PAM type: NRG; PAM sequence: AGG
  source 1..20: mol_type = other DNA
agctctgttgatgtgggctg

SEQ ID NO: 14332 - DNA, 20 bp, synthetic construct
  misc_feature 1..20: note = Description of Artificial Sequence: Synthetic oligonucleotide
  misc_feature 1..20: note = Target: SCN10A; (-) strand; PAM type: NRG; PAM sequence: GAG
  source 1..20: mol_type = other DNA
aagctctgttgatgtgggct

SEQ ID NO: 14333 - DNA, 20 bp, synthetic construct
  misc_feature 1..20: note = Description of Artificial Sequence: Synthetic oligonucleotide
  misc_feature 1..20: note = Target: SCN10A; (-) strand; PAM type: NRG; PAM sequence: GGG
  source 1..20: mol_type = other DNA
ggcaaaagctctgttgatgt

SEQ ID NO: 14334 - DNA, 20 bp, synthetic construct
  misc_feature 1..20: note = Description of Artificial Sequence: Synthetic oligonucleotide
  misc_feature 1..20: note = Target: SCN10A; (-) strand; PAM type: NRG; PAM sequence: TGG
  source 1..20: mol_type = other DNA
aggcaaaagctctgttgatg

SEQ ID NO: 14335 - DNA, 20 bp, synthetic construct
  misc_feature 1..20: note = Description of Artificial Sequence: Synthetic oligonucleotide
  misc_feature 1..20: note = Target: SCN10A; (-) strand; PAM type: NRG; PAM sequence: AAG
  source 1..20: mol_type = other DNA
ctctgtcaggatagaggcaa

SEQ ID NO: 14336 - DNA, 20 bp, synthetic construct
  misc_feature 1..20: note = Description of Artificial Sequence: Synthetic oligonucleotide
  misc_feature 1..20: note = Target: SCN10A; (-) strand; PAM type: NRG; PAM sequence: AGG
  source 1..20: mol_type = other DNA
aacaatctctgtcaggatag

SEQ ID NO: 14337 - DNA, 20 bp, synthetic construct
  misc_feature 1..20: note = Description of Artificial Sequence: Synthetic oligonucleotide
  misc_feature 1..20: note = Target: SCN10A; (-) strand; PAM type: NRG; PAM sequence: GAG
  source 1..20: mol_type = other DNA
gaacaatctctgtcaggata

SEQ ID NO: 14338 - DNA, 20 bp, synthetic construct
  misc_feature 1..20: note = Description of Artificial Sequence: Synthetic oligonucleotide
  misc_feature 1..20: note = Target: SCN10A; (-) strand; PAM type: NRG; PAM sequence: TAG
  source 1..20: mol_type = other DNA
gagaacaatctctgtcagga

SEQ ID NO: 14339 - DNA, 20 bp, synthetic construct
  misc_feature 1..20: note = Description of Artificial Sequence: Synthetic oligonucleotide
  misc_feature 1..20: note = Target: SCN10A; (-) strand; PAM type: NRG; PAM sequence: AGG
  source 1..20: mol_type = other DNA
tagtgagaacaatctctgtc

SEQ ID NO: 14340 - DNA, 20 bp, synthetic construct
  misc_feature 1..20: note = Description of Artificial Sequence: Synthetic oligonucleotide
  misc_feature 1..20: note = Target: SCN10A; (-) strand; PAM type: NRG; PAM sequence: CAG
  source 1..20: mol_type = other DNA
ttagtgagaacaatctctgt

SEQ ID NO: 14341 - DNA, 20 bp, synthetic construct
  misc_feature 1..20: note = Description of Artificial Sequence: Synthetic oligonucleotide
  misc_feature 1..20: note = Target: SCN10A; (-) strand; PAM type: NRG; PAM sequence: GAG
  source 1..20: mol_type = other DNA
aagtcattcatgatcttagt

SEQ ID NO: 14342 - DNA, 20 bp, synthetic construct
  misc_feature 1..20: note = Description of Artificial Sequence: Synthetic oligonucleotide
  misc_feature 1..20: note = Target: SCN10A; (-) strand; PAM type: NRG; PAM sequence: TAG
  source 1..20: mol_type = other DNA
tgggaagtcattcatgatct

SEQ ID NO: 14343 - DNA, 20 bp, synthetic construct
  misc_feature 1..20: note = Description of Artificial Sequence: Synthetic oligonucleotide
  misc_feature 1..20: note = Target: SCN10A; (-) strand; PAM type: NRG; PAM sequence: AAG
  source 1..20: mol_type = other DNA
cttggatctaatattatggg

SEQ ID NO: 14344 - DNA, 20 bp, synthetic construct
  misc_feature 1..20: note = Description of Artificial Sequence: Synthetic oligonucleotide
  misc_feature 1..20: note = Target: SCN10A; (-) strand; PAM type: NRG; PAM sequence: GGG
  source 1..20: mol_type = other DNA
gtccttggatctaatattat

SEQ ID NO: 14345 - DNA, 20 bp, synthetic construct
  misc_feature 1..20: note = Description of Artificial Sequence: Synthetic oligonucleotide
  misc_feature 1..20: note = Target: SCN10A; (-) strand; PAM type: NRG; PAM sequence: TGG
  source 1..20: mol_type = other DNA
cgtccttggatctaatatta

SEQ ID NO: 14346 - DNA, 20 bp, synthetic construct
  misc_feature 1..20: note = Description of Artificial Sequence: Synthetic oligonucleotide
  misc_feature 1..20: note = Target: SCN10A; (-) strand; PAM type: NRG; PAM sequence: TGG
  source 1..20: mol_type = other DNA
caatatcagacaagcgtcct

SEQ ID NO: 14347 - DNA, 20 bp, synthetic construct
  misc_feature 1..20: note = Description of Artificial Sequence: Synthetic oligonucleotide
  misc_feature 1..20: note = Target: SCN10A; (-) strand; PAM type: NRG; PAM sequence: AAG
  source 1..20: mol_type = other DNA
ggtactaggcaatatcagac

SEQ ID NO: 14348 - DNA, 20 bp, synthetic construct
  misc_feature 1..20: note = Description of Artificial Sequence: Synthetic oligonucleotide
  misc_feature 1..20: note = Target: SCN10A; (-) strand; PAM type: NRG; PAM sequence: CAG
  source 1..20: mol_type = other DNA
agaagggtactaggcaatat

SEQ ID NO: 14349 - DNA, 20 bp, synthetic construct
  misc_feature 1..20: note = Description of Artificial Sequence: Synthetic oligonucleotide
  misc_feature 1..20: note = Target: SCN10A; (-) strand; PAM type: NRG; PAM sequence: AGG
  source 1..20: mol_type = other DNA
tttcaaggtagaagggtact

SEQ ID NO: 14350 - DNA, 20 bp, synthetic construct
  misc_feature 1..20: note = Description of Artificial Sequence: Synthetic oligonucleotide
  misc_feature 1..20: note = Target: SCN10A; (-) strand; PAM type: NRG; PAM sequence: TAG
  source 1..20: mol_type = other DNA
atttcaaggtagaagggtac

SEQ ID NO: 14351 - DNA, 20 bp, synthetic construct
  misc_feature 1..20: note = Description of Artificial Sequence: Synthetic oligonucleotide
  misc_feature 1..20: note = Target: SCN10A; (-) strand; PAM type: NRG; PAM sequence: GGG
  source 1..20: mol_type = other DNA
agcaacatttcaaggtagaa

SEQ ID NO: 14352 - DNA, 20 bp, synthetic construct
  misc_feature 1..20: note = Description of Artificial Sequence: Synthetic oligonucleotide
  misc_feature 1..20: note = Target: SCN10A; (-) strand; PAM type: NRG; PAM sequence: AGG
  source 1..20: mol_type = other DNA
aagcaacatttcaaggtaga

SEQ ID NO: 14353 - DNA, 20 bp, synthetic construct
  misc_feature 1..20: note = Description of Artificial Sequence: Synthetic oligonucleotide
  misc_feature 1..20: note = Target: SCN10A; (-) strand; PAM type: NRG; PAM sequence: AAG
  source 1..20: mol_type = other DNA
aaagcaacatttcaaggtag

SEQ ID NO: 14354 - DNA, 20 bp, synthetic construct
  misc_feature 1..20: note = Description of Artificial Sequence: Synthetic oligonucleotide
  misc_feature 1..20: note = Target: SCN10A; (-) strand; PAM type: NRG; PAM sequence: TAG
  source 1..20: mol_type = other DNA
aagaaagcaacatttcaagg

SEQ ID NO: 14355 - DNA, 20 bp, synthetic construct
  misc_feature 1..20: note = Description of Artificial Sequence: Synthetic oligonucleotide
  misc_feature 1..20: note = Target: SCN10A; (-) strand; PAM type: NRG; PAM sequence: AGG
  source 1..20: mol_type = other DNA
accaagaaagcaacatttca

SEQ ID NO: 14356 - DNA, 20 bp, synthetic construct
  misc_feature 1..20: note = Description of Artificial Sequence: Synthetic oligonucleotide
  misc_feature 1..20: note = Target: SCN10A; (-) strand; PAM type: NRG; PAM sequence: AAG
  source 1..20: mol_type = other DNA
gaccaagaaagcaacatttc

SEQ ID NO: 14357 - DNA, 20 bp, synthetic construct
  misc_feature 1..20: note = Description of Artificial Sequence: Synthetic oligonucleotide
  misc_feature 1..20: note = Target: SCN10A; (-) strand; PAM type: NRG; PAM sequence: AAG
  source 1..20: mol_type = other DNA
aggcatggtggagaccaaga

SEQ ID NO: 14358 - DNA, 20 bp, synthetic construct
  misc_feature 1..20: note = Description of Artificial Sequence: Synthetic oligonucleotide
  misc_feature 1..20: note = Target: SCN10A; (-) strand; PAM type: NRG; PAM sequence: AAG
  source 1..20: mol_type = other DNA
tgtaaggcatggtggagacc

SEQ ID NO: 14359 - DNA, 20 bp, synthetic construct
  misc_feature 1..20: note = Description of Artificial Sequence: Synthetic oligonucleotide
  misc_feature 1..20: note = Target: SCN10A; (-) strand; PAM type: NRG; PAM sequence: GAG
  source 1..20: mol_type = other DNA
cagaaatgtaaggcatggtg

SEQ ID NO: 14360 - DNA, 20 bp, synthetic construct
  misc_feature 1..20: note = Description of Artificial Sequence: Synthetic oligonucleotide
  misc_feature 1..20: note = Target: SCN10A; (-) strand; PAM type: NRG; PAM sequence: TGG
  source 1..20: mol_type = other DNA
agcagaaatgtaaggcatgg

SEQ ID NO: 14361 - DNA, 20 bp, synthetic construct
  misc_feature 1..20: note = Description of Artificial Sequence: Synthetic oligonucleotide
  misc_feature 1..20: note = Target: SCN10A; (-) strand; PAM type: NRG; PAM sequence: TGG
  source 1..20: mol_type = other DNA
agaagcagaaatgtaaggca

SEQ ID NO: 14362 - DNA, 20 bp, synthetic construct
  misc_feature 1..20: note = Description of Artificial Sequence: Synthetic oligonucleotide
  misc_feature 1..20: note = Target: SCN10A; (-) strand; PAM type: NRG; PAM sequence: AGG
  source 1..20: mol_type = other DNA
agaaaagaagcagaaatgta

SEQ ID NO: 14363 - DNA, 20 bp, synthetic construct
  misc_feature 1..20: note = Description of Artificial Sequence: Synthetic oligonucleotide
  misc_feature 1..20: note = Target: SCN10A; (-) strand; PAM type: NRG; PAM sequence: AAG
  source 1..20: mol_type = other DNA
aagaaaagaagcagaaatgt

SEQ ID NO: 14364 - DNA, 20 bp, synthetic construct
  misc_feature 1..20: note = Description of Artificial Sequence: Synthetic oligonucleotide
  misc_feature 1..20: note = Target: SCN10A; (-) strand; PAM type: NRG; PAM sequence: CAG
  source 1..20: mol_type = other DNA
acaaatggcaagaaaagaag

SEQ ID NO: 14365 - DNA, 20 bp, synthetic construct
  misc_feature 1..20: note = Description of Artificial Sequence: Synthetic oligonucleotide
  misc_feature 1..20: note = Target: SCN10A; (-) strand; PAM type: NRG; PAM sequence: AAG
  source 1..20: mol_type = other DNA
atcacaaatggcaagaaaag

SEQ ID NO: 14366 - DNA, 20 bp, synthetic construct
  misc_feature 1..20: note = Description of Artificial Sequence: Synthetic oligonucleotide
  misc_feature 1..20: note = Target: SCN10A; (-) strand; PAM type: NRG; PAM sequence: AAG
  source 1..20: mol_type = other DNA
agcatcacaaatggcaagaa

SEQ ID NO: 14367 - DNA, 20 bp, synthetic construct
  misc_feature 1..20: note = Description of Artificial Sequence: Synthetic oligonucleotide
  misc_feature 1..20: note = Target: SCN10A; (-) strand; PAM type: NRG; PAM sequence: AAG
  source 1..20: mol_type = other DNA
aaaagagcatcacaaatggc

SEQ ID NO: 14368 - DNA, 20 bp, synthetic construct
  misc_feature 1..20: note = Description of Artificial Sequence: Synthetic oligonucleotide
  misc_feature 1..20: note = Target: SCN10A; (-) strand; PAM type: NRG; PAM sequence: TGG
  source 1..20: mol_type = other DNA
ctataaaagagcatcacaaa

SEQ ID NO: 14369 - DNA, 20 bp, synthetic construct
  misc_feature 1..20: note = Description of Artificial Sequence: Synthetic oligonucleotide
  misc_feature 1..20: note = Target: SCN10A; (-) strand; PAM type: NRG; PAM sequence: GAG
  source 1..20: mol_type = other DNA
gggtaaaggagactataaaa

SEQ ID NO: 14370 - DNA, 20 bp, synthetic construct
  misc_feature 1..20: note = Description of Artificial Sequence: Synthetic oligonucleotide
  misc_feature 1..20: note = Target: SCN10A; (-) strand; PAM type: NRG; PAM sequence: AAG
  source 1..20: mol_type = other DNA
ttgggtaaaggagactataa

SEQ ID NO: 14371 - DNA, 20 bp, synthetic construct
  misc_feature 1..20: note = Description of Artificial Sequence: Synthetic oligonucleotide
  misc_feature 1..20: note = Target: SCN10A; (-) strand; PAM type: NRG; PAM sequence: GAG
  source 1..20: mol_type = other DNA
tgtctaaaagttgggtaaag

SEQ ID NO: 14372 - DNA, 20 bp, synthetic construct
  misc_feature 1..20: note = Description of Artificial Sequence: Synthetic oligonucleotide
  misc_feature 1..20: note = Target: SCN10A; (-) strand; PAM type: NRG; PAM sequence: AGG
  source 1..20: mol_type = other DNA
gatgtctaaaagttgggtaa

SEQ ID NO: 14373 - DNA, 20 bp, synthetic construct
  misc_feature 1..20: note = Description of Artificial Sequence: Synthetic oligonucleotide
  misc_feature 1..20: note = Target: SCN10A; (-) strand; PAM type: NRG; PAM sequence: AAG
  source 1..20: mol_type = other DNA
tgatgtctaaaagttgggta

SEQ ID NO: 14374 - DNA, 20 bp, synthetic construct
  misc_feature 1..20: note = Description of Artificial Sequence: Synthetic oligonucleotide
  misc_feature 1..20: note = Target: SCN10A; (-) strand; PAM type: NRG; PAM sequence: GGG
  source 1..20: mol_type = other DNA
aactctgatgtctaaaagtt

SEQ ID NO: 14375 - DNA, 20 bp, synthetic construct
  misc_feature 1..20: note = Description of Artificial Sequence: Synthetic oligonucleotide
  misc_feature 1..20: note = Target: SCN10A; (-) strand; PAM type: NRG; PAM sequence: TGG
  source 1..20: mol_type = other DNA
gaactctgatgtctaaaagt

SEQ ID NO: 14376 - DNA, 20 bp, synthetic construct
  misc_feature 1..20: note = Description of Artificial Sequence: Synthetic oligonucleotide
  misc_feature 1..20: note = Target: SCN10A; (-) strand; PAM type: NRG; PAM sequence: AAG
  source 1..20: mol_type = other DNA
cgaagaactctgatgtctaa

SEQ ID NO: 14377 - DNA, 20 bp, synthetic construct
  misc_feature 1..20: note = Description of Artificial Sequence: Synthetic oligonucleotide
  misc_feature 1..20: note = Target: SCN10A; (-) strand; PAM type: NRG; PAM sequence: AAG
  source 1..20: mol_type = other DNA
atgctcaagactgagcctcg

SEQ ID NO: 14378 - DNA, 20 bp, synthetic construct
  misc_feature 1..20: note = Description of Artificial Sequence: Synthetic oligonucleotide
  misc_feature 1..20: note = Target: SCN10A; (-) strand; PAM type: NRG; PAM sequence: GAG
  source 1..20: mol_type = other DNA
agcaaaggatgctcaagact

SEQ ID NO: 14379 - DNA, 20 bp, synthetic construct
  misc_feature 1..20: note = Description of Artificial Sequence: Synthetic oligonucleotide
  misc_feature 1..20: note = Target: SCN10A; (-) strand; PAM type: NRG; PAM sequence: AAG
  source 1..20: mol_type = other DNA
gtgaagagcaaaggatgctc

SEQ ID NO: 14380 - DNA, 20 bp, synthetic construct
  misc_feature 1..20: note = Description of Artificial Sequence: Synthetic oligonucleotide
  misc_feature 1..20: note = Target: SCN10A; (-) strand; PAM type: NRG; PAM sequence: AGG
  source 1..20: mol_type = other DNA
aaaaatggggtgaagagcaa

SEQ ID NO: 14381 - DNA, 20 bp, synthetic construct
  misc_feature 1..20: note = Description of Artificial Sequence: Synthetic oligonucleotide
  misc_feature 1..20: note = Target: SCN10A; (-) strand; PAM type: NRG; PAM sequence: AAG
  source 1..20: mol_type = other DNA
aaaaaatggggtgaagagca

SEQ ID NO: 14382 - DNA, 20 bp, synthetic construct
  misc_feature 1..20: note = Description of Artificial Sequence: Synthetic oligonucleotide
  misc_feature 1..20: note = Target: SCN10A; (-) strand; PAM type: NRG; PAM sequence: GAG
  source 1..20: mol_type = other DNA
gggagaaaaaatggggtgaa

SEQ ID NO: 14383 - DNA, 20 bp, synthetic construct
  misc_feature 1..20: note = Description of Artificial Sequence: Synthetic oligonucleotide
  misc_feature 1..20: note = Target: SCN10A; (-) strand; PAM type: NRG; PAM sequence: AAG
  source 1..20: mol_type = other DNA
aagggagaaaaaatggggtg

SEQ ID NO: 14384 - DNA, 20 bp, synthetic construct
  misc_feature 1..20: note = Description of Artificial Sequence: Synthetic oligonucleotide
  misc_feature 1..20: note = Target: SCN10A; (-) strand; PAM type: NRG; PAM sequence: GGG
  source 1..20: mol_type = other DNA
ttgtcaagggagaaaaaatg

SEQ ID NO: 14385 - DNA, 20 bp, synthetic construct
  misc_feature 1..20: note = Description of Artificial Sequence: Synthetic oligonucleotide
  misc_feature 1..20: note = Target: SCN10A; (-) strand; PAM type: NRG; PAM sequence: GGG
  source 1..20: mol_type = other DNA
attgtcaagggagaaaaaat

SEQ ID NO: 14386 - DNA, 20 bp, synthetic construct
  misc_feature 1..20: note = Description of Artificial Sequence: Synthetic oligonucleotide
  misc_feature 1..20: note = Target: SCN10A; (-) strand; PAM type: NRG; PAM sequence: TGG
  source 1..20: mol_type = other DNA
aattgtcaagggagaaaaaa

SEQ ID NO: 14387 - DNA, 20 bp, synthetic construct
  misc_feature 1..20: note = Description of Artificial Sequence: Synthetic oligonucleotide
  misc_feature 1..20: note = Target: SCN10A; (-) strand; PAM type: NRG; PAM sequence: GAG
  source 1..20: mol_type = other DNA
ggctggataaattgtcaagg

SEQ ID NO: 14388 - DNA, 20 bp, synthetic construct
  misc_feature 1..20: note = Description of Artificial Sequence: Synthetic oligonucleotide
  misc_feature 1..20: note = Target: SCN10A; (-) strand; PAM type: NRG; PAM sequence: GGG
  source 1..20: mol_type = other DNA
ctggctggataaattgtcaa

SEQ ID NO: 14389 - DNA, 20 bp, synthetic construct
  misc_feature 1..20: note = Description of Artificial Sequence: Synthetic oligonucleotide
  misc_feature 1..20: note = Target: SCN10A; (-) strand; PAM type: NRG; PAM sequence: AGG
  source 1..20: mol_type = other DNA
cctggctggataaattgtca

SEQ ID NO: 14390 - DNA, 20 bp, synthetic construct
  misc_feature 1..20: note = Description of Artificial Sequence: Synthetic oligonucleotide
  misc_feature 1..20: note = Target: SCN10A; (-) strand; PAM type: NRG; PAM sequence: AAG
  source 1..20: mol_type = other DNA
tcctggctggataaattgtc

SEQ ID NO: 14391 - DNA, 20 bp, synthetic construct
  misc_feature 1..20: note = Description of Artificial Sequence: Synthetic oligonucleotide
  misc_feature 1..20: note = Target: SCN10A; (-) strand; PAM type: NRG; PAM sequence: TGG
  source 1..20: mol_type = other DNA
catatatgttaattcctggc

SEQ ID NO: 14392 - DNA, 20 bp, synthetic construct
  misc_feature 1..20: note = Description of Artificial Sequence: Synthetic oligonucleotide
  misc_feature 1..20: note = Target: SCN10A; (-) strand; PAM type: NRG; PAM sequence: TGG
  source 1..20: mol_type = other DNA
tgcacatatatgttaattcc

SEQ ID NO: 14393 - DNA, 20 bp, synthetic construct
  misc_feature 1..20: note = Description of Artificial Sequence: Synthetic oligonucleotide
  misc_feature 1..20: note = Target: SCN10A; (-) strand; PAM type: NRG; PAM sequence: AAG
  source 1..20: mol_type = other DNA
agaggcaaacagttggccaa

SEQ ID NO: 14394 - DNA, 20 bp, synthetic construct
  misc_feature 1..20: note = Description of Artificial Sequence: Synthetic oligonucleotide
  misc_feature 1..20: note = Target: SCN10A; (-) strand; PAM type: NRG; PAM sequence: TGG
  source 1..20: mol_type = other DNA
cagtgacagaggcaaacagt

SEQ ID NO: 14395 - DNA, 20 bp, synthetic construct
  misc_feature 1..20: note = Description of Artificial Sequence: Synthetic oligonucleotide
  misc_feature 1..20: note = Target: SCN10A; (-) strand; PAM type: NRG; PAM sequence: CAG
  source 1..20: mol_type = other DNA
agtccagtgacagaggcaaa

SEQ ID NO: 14396 - DNA, 20 bp, synthetic construct
  misc_feature 1..20: note = Description of Artificial Sequence: Synthetic oligonucleotide
  misc_feature 1..20: note = Target: SCN10A; (-) strand; PAM type: NRG; PAM sequence: AGG
  source 1..20: mol_type = other DNA
agtttacagtccagtgacag

SEQ ID NO: 14397 - DNA, 20 bp, synthetic construct
  misc_feature 1..20: note = Description of Artificial Sequence: Synthetic oligonucleotide
  misc_feature 1..20: note = Target: SCN10A; (-) strand; PAM type: NRG; PAM sequence: GAG
  source 1..20: mol_type = other DNA
cagtttacagtccagtgaca

SEQ ID NO: 14398 - DNA, 20 bp, synthetic construct
  misc_feature 1..20: note = Description of Artificial Sequence: Synthetic oligonucleotide
  misc_feature 1..20: note = Target: SCN10A; (-) strand; PAM type: NRG; PAM sequence: CAG
  source 1..20: mol_type = other DNA
tacagtttacagtccagtga

SEQ ID NO: 14399 - DNA, 20 bp, synthetic construct
  misc_feature 1..20: note = Description of Artificial Sequence: Synthetic oligonucleotide
  misc_feature 1..20: note = Target: SCN10A; (-) strand; PAM type: NRG; PAM sequence: CAG
  source 1..20: mol_type = other DNA
tactcttacagtttacagtc

SEQ ID NO: 14400 - DNA, 20 bp, synthetic construct
  misc_feature 1..20: note = Description of Artificial Sequence: Synthetic oligonucleotide
  misc_feature 1..20: note = Target: SCN10A; (-) strand; PAM type: NRG; PAM sequence: CAG
  source 1..20: mol_type = other DNA
gttcctactcttacagttta

SEQ ID NO: 14401 - DNA, 20 bp, synthetic construct
  misc_feature 1..20: note = Description of Artificial Sequence: Synthetic oligonucleotide
  misc_feature 1..20: note = Target: SCN10A; (-) strand; PAM type: NRG; PAM sequence: CAG
  source 1..20: mol_type = other DNA
agacaaagttcctactctta

SEQ ID NO: 14402 - DNA, 20 bp, synthetic construct
  misc_feature 1..20: note = Description of Artificial Sequence: Synthetic oligonucleotide
  misc_feature 1..20: note = Target: SCN10A; (-) strand; PAM type: NRG; PAM sequence: AAG
  source 1..20: mol_type = other DNA
agcagtgagcaagacagaca

SEQ ID NO: 14403 - DNA, 20 bp, synthetic construct
  misc_feature 1..20: note = Description of Artificial Sequence: Synthetic oligonucleotide
  misc_feature 1..20: note = Target: SCN10A; (-) strand; PAM type: NRG; PAM sequence: CAG
  source 1..20: mol_type = other DNA
ggttagagcagtgagcaaga

SEQ ID NO: 14404 - DNA, 20 bp, synthetic construct
  misc_feature 1..20: note = Description of Artificial Sequence: Synthetic oligonucleotide
  misc_feature 1..20: note = Target: SCN10A; (-) strand; PAM type: NRG; PAM sequence: AAG
  source 1..20: mol_type = other DNA
ccagggttagagcagtgagc

SEQ ID NO: 14405 - DNA, 20 bp, synthetic construct
  misc_feature 1..20: note = Description of Artificial Sequence: Synthetic oligonucleotide
  misc_feature 1..20: note = Target: SCN10A; (-) strand; PAM type: NRG; PAM sequence: GAG
  source 1..20: mol_type = other DNA
gacaccagggttagagcagt

SEQ ID NO: 14406 - DNA, 20 bp, synthetic construct
  misc_feature 1..20: note = Description of Artificial Sequence: Synthetic oligonucleotide
  misc_feature 1..20: note = Target: SCN10A; (-) strand; PAM type: NRG; PAM sequence: CAG
  source 1..20: mol_type = other DNA
tgcagacaccagggttagag

SEQ ID NO: 14407 - DNA, 20 bp, synthetic construct
  misc_feature 1..20: note = Description of Artificial Sequence: Synthetic oligonucleotide
  misc_feature 1..20: note = Target: SCN10A; (-) strand; PAM type: NRG; PAM sequence: GAG
  source 1..20: mol_type = other DNA
ctatgcagacaccagggtta

SEQ ID NO: 14408 - DNA, 20 bp, synthetic construct
  misc_feature 1..20: note = Description of Artificial Sequence: Synthetic oligonucleotide
  misc_feature 1..20: note = Target: SCN10A; (-) strand; PAM type: NRG; PAM sequence: TAG
  source 1..20: mol_type = other DNA
cactatgcagacaccagggt

SEQ ID NO: 14409 - DNA, 20 bp, synthetic construct
  misc_feature 1..20: note = Description of Artificial Sequence: Synthetic oligonucleotide
  misc_feature 1..20: note = Target: SCN10A; (-) strand; PAM type: NRG; PAM sequence: GGG
  source 1..20: mol_type = other DNA
caggcactatgcagacacca

SEQ ID NO: 14410 - DNA, 20 bp, synthetic construct
  misc_feature 1..20: note = Description of Artificial Sequence: Synthetic oligonucleotide
  misc_feature 1..20: note = Target: SCN10A; (-) strand; PAM type: NRG; PAM sequence: AGG
  source 1..20: mol_type = other DNA
ccaggcactatgcagacacc

SEQ ID NO: 14411 - DNA, 20 bp, synthetic construct
  misc_feature 1..20: note = Description of Artificial Sequence: Synthetic oligonucleotide
  misc_feature 1..20: note = Target: SCN10A; (-) strand; PAM type: NRG; PAM sequence: CAG
  source 1..20: mol_type = other DNA
gccaggcactatgcagacac

SEQ ID NO: 14412 - DNA, 20 bp, synthetic construct
  misc_feature 1..20: note = Description of Artificial Sequence: Synthetic oligonucleotide
  misc_feature 1..20: note = Target: SCN10A; (-) strand; PAM type: NRG; PAM sequence: CAG
  source 1..20: mol_type = other DNA
tgttgcagccaggcactatg

SEQ ID NO: 14413 - DNA, 20 bp, synthetic construct
  misc_feature 1..20: note = Description of Artificial Sequence: Synthetic oligonucleotide
  misc_feature 1..20: note = Target: SCN10A; (-) strand; PAM type: NRG; PAM sequence: AGG
  source 1..20: mol_type = other DNA
gcagagcatctgttgcagcc

SEQ ID NO: 14414 - DNA, 20 bp, synthetic construct
  misc_feature 1..20: note = Description of Artificial Sequence: Synthetic oligonucleotide
  misc_feature 1..20: note = Target: SCN10A; (-) strand; PAM type: NRG; PAM sequence: CAG
  source 1..20: mol_type = other DNA
tgcagagcatctgttgcagc

SEQ ID NO: 14415 - DNA, 20 bp, synthetic construct
  misc_feature 1..20: note = Description of Artificial Sequence: Synthetic oligonucleotide
  misc_feature 1..20: note = Target: SCN10A; (-) strand; PAM type: NRG; PAM sequence: CAG
  source 1..20: mol_type = other DNA
aatttgcagagcatctgttg

SEQ ID NO: 14416 - DNA, 20 bp, synthetic construct
  misc_feature 1..20: note = Description of Artificial Sequence: Synthetic oligonucleotide
  misc_feature 1..20: note = Target: SCN10A; (-) strand; PAM type: NRG; PAM sequence: GAG
  source 1..20: mol_type = other DNA
cattcatttacaaatttgca

SEQ ID NO: 14417 - DNA, 20 bp, synthetic construct
  misc_feature 1..20: note = Description of Artificial Sequence: Synthetic oligonucleotide
  misc_feature 1..20: note = Target: SCN10A; (-) strand; PAM type: NRG; PAM sequence: CAG
  source 1..20: mol_type = other DNA
tccattcatttacaaatttg

SEQ ID NO: 14418 - DNA, 20 bp, synthetic construct
  misc_feature 1..20: note = Description of Artificial Sequence: Synthetic oligonucleotide
  misc_feature 1..20: note = Target: SCN10A; (-) strand; PAM type: NRG; PAM sequence: GAG
  source 1..20: mol_type = other DNA
tttgagctatggttaactca

SEQ ID NO: 14419 - DNA, 20 bp, synthetic construct
  misc_feature 1..20: note = Description of Artificial Sequence: Synthetic oligonucleotide
  misc_feature 1..20: note = Target: SCN10A; (-) strand; PAM type: NRG; PAM sequence: CAG
  source 1..20: mol_type = other DNA
catttgagctatggttaact

SEQ ID NO: 14420 - DNA, 20 bp, synthetic construct
  misc_feature 1..20: note = Description of Artificial Sequence: Synthetic oligonucleotide
  misc_feature 1..20: note = Target: SCN10A; (-) strand; PAM type: NRG; PAM sequence: TGG
  source 1..20: mol_type = other DNA
ttaaattttcatttgagcta

SEQ ID NO: 14421 - DNA, 20 bp, synthetic construct
  misc_feature 1..20: note = Description of Artificial Sequence: Synthetic oligonucleotide
  misc_feature 1..20: note = Target: SCN10A; (-) strand; PAM type: NRG; PAM sequence: GAG
  source 1..20: mol_type = other DNA
gtgactttaaattttcattt

SEQ ID NO: 14422 - DNA, 20 bp, synthetic construct
  misc_feature 1..20: note = Description of Artificial Sequence: Synthetic oligonucleotide
  misc_feature 1..20: note = Target: SCN10A; (-) strand; PAM type: NRG; PAM sequence: GGG
  source 1..20: mol_type = other DNA
attgaatttagtcaaataaa

SEQ ID NO: 14423 - DNA, 20 bp, synthetic construct
  misc_feature 1..20: note = Description of Artificial Sequence: Synthetic oligonucleotide
  misc_feature 1..20: note = Target: SCN10A; (-) strand; PAM type: NRG; PAM sequence: AGG
  source 1..20: mol_type = other DNA
aattgaatttagtcaaataa

SEQ ID NO: 14424 - DNA, 20 bp, synthetic construct
  misc_feature 1..20: note = Description of Artificial Sequence: Synthetic oligonucleotide
  misc_feature 1..20: note = Target: SCN10A; (-) strand; PAM type: NRG; PAM sequence: AAG
  source 1..20: mol_type = other DNA
gaattgaatttagtcaaata

SEQ ID NO: 14425 - DNA, 20 bp, synthetic construct
  misc_feature 1..20: note = Description of Artificial Sequence: Synthetic oligonucleotide
  misc_feature 1..20: note = Target: SCN10A; (-) strand; PAM type: NRG; PAM sequence: TAG
  source 1..20: mol_type = other DNA
ccttggtacagaattgaatt

SEQ ID NO: 14426 - DNA, 20 bp, synthetic construct
  misc_feature 1..20: note = Description of Artificial Sequence: Synthetic oligonucleotide
  misc_feature 1..20: note = Target: SCN10A; (-) strand; PAM type: NRG; PAM sequence: CAG
  source 1..20: mol_type = other DNA
ttcagtatgtacccttggta

SEQ ID NO: 14427 - DNA, 20 bp, synthetic construct
  misc_feature 1..20: note = Description of Artificial Sequence: Synthetic oligonucleotide
  misc_feature 1..20: note = Target: SCN10A; (-) strand; PAM type: NRG; PAM sequence: TGG
  source 1..20: mol_type = other DNA
atacattcagtatgtaccct

SEQ ID NO: 14428 - DNA, 20 bp, synthetic construct
  misc_feature 1..20: note = Description of Artificial Sequence: Synthetic oligonucleotide
  misc_feature 1..20: note = Target: SCN10A; (-) strand; PAM type: NRG; PAM sequence: CAG
  source 1..20: mol_type = other DNA
gcttgcacatcccatacatt

SEQ ID NO: 14429 - DNA, 20 bp, synthetic construct
  misc_feature 1..20: note = Description of Artificial Sequence: Synthetic oligonucleotide
  misc_feature 1..20: note = Target: SCN10A; (-) strand; PAM type: NRG; PAM sequence: AGG
  source 1..20: mol_type = other DNA
cctcatagccactcatgcag

SEQ ID NO: 14430 - DNA, 20 bp, synthetic construct
  misc_feature 1..20: note = Description of Artificial Sequence: Synthetic oligonucleotide
  misc_feature 1..20: note = Target: SCN10A; (-) strand; PAM type: NRG; PAM sequence: GAG
  source 1..20: mol_type = other DNA
ccctcatagccactcatgca

SEQ ID NO: 14431 - DNA, 20 bp, synthetic construct
  misc_feature 1..20: note = Description of Artificial Sequence: Synthetic oligonucleotide
  misc_feature 1..20: note = Target: SCN10A; (-) strand; PAM type: NRG; PAM sequence: CAG
  source 1..20: mol_type = other DNA
ctccctcatagccactcatg

SEQ ID NO: 14432 - DNA, 20 bp, synthetic construct
  misc_feature 1..20: note = Description of Artificial Sequence: Synthetic oligonucleotide
  misc_feature 1..20: note = Target: SCN10A; (-) strand; PAM type: NRG; PAM sequence: TAG
  source 1..20: mol_type = other DNA
gttcttctcttcctccctca

SEQ ID NO: 14433 - DNA, 20 bp, synthetic construct
  misc_feature 1..20: note = Description of Artificial Sequence: Synthetic oligonucleotide
  misc_feature 1..20: note = Target: SCN10A; (-) strand; PAM type: NRG; PAM sequence: AGG
  source 1..20: mol_type = other DNA
ctccctggaagggatcagac

SEQ ID NO: 14434 - DNA, 20 bp, synthetic construct
  misc_feature 1..20: note = Description of Artificial Sequence: Synthetic oligonucleotide
  misc_feature 1..20: note = Target: SCN10A; (-) strand; PAM type: NRG; PAM sequence: CAG
  source 1..20: mol_type = other DNA
gctccctggaagggatcaga

SEQ ID NO: 14435 - DNA, 20 bp, synthetic construct
  misc_feature 1..20: note = Description of Artificial Sequence: Synthetic oligonucleotide
  misc_feature 1..20: note = Target: SCN10A; (-) strand; PAM type: NRG; PAM sequence: CAG
  source 1..20: mol_type = other DNA
gtgggctccctggaagggat

SEQ ID NO: 14436 - DNA, 20 bp, synthetic construct
  misc_feature 1..20: note = Description of Artificial Sequence: Synthetic oligonucleotide
  misc_feature 1..20: note = Target: SCN10A; (-) strand; PAM type: NRG; PAM sequence: GGG
  source 1..20: mol_type = other DNA
ctcccgtgggctccctggaa

SEQ ID NO: 14437 - DNA, 20 bp, synthetic construct
  misc_feature 1..20: note = Description of Artificial Sequence: Synthetic oligonucleotide
  misc_feature 1..20: note = Target: SCN10A; (-) strand; PAM type: NRG; PAM sequence: AGG
  source 1..20: mol_type = other DNA
gctcccgtgggctccctgga

SEQ ID NO: 14438 - DNA, 20 bp, synthetic construct
  misc_feature 1..20: note = Description of Artificial Sequence: Synthetic oligonucleotide
  misc_feature 1..20: note = Target: SCN10A; (-) strand; PAM type: NRG; PAM sequence: AAG
  source 1..20: mol_type = other DNA
agctcccgtgggctccctgg

SEQ ID NO: 14439 - DNA, 20 bp, synthetic construct
  misc_feature 1..20: note = Description of Artificial Sequence: Synthetic oligonucleotide
  misc_feature 1..20: note = Target: SCN10A; (-) strand; PAM type: NRG; PAM sequence: TGG
  source 1..20: mol_type = other DNA
tgcagctcccgtgggctccc

SEQ ID NO: 14440 - DNA, 20 bp, synthetic construct
  misc_feature 1..20: note = Description of Artificial Sequence: Synthetic oligonucleotide
  misc_feature 1..20: note = Target: SCN10A; (-) strand; PAM type: NRG; PAM sequence: GGG
  source 1..20: mol_type = other DNA
gcttgctgtgcagctcccgt

SEQ ID NO: 14441 - DNA, 20 bp, synthetic construct
  misc_feature 1..20: note = Description of Artificial Sequence: Synthetic oligonucleotide
  misc_feature 1..20: note = Target: SCN10A; (-) strand; PAM type: NRG; PAM sequence: TGG
  source 1..20: mol_type = other DNA
tgcttgctgtgcagctcccg

SEQ ID NO: 14442 - DNA, 20 bp, synthetic construct
  misc_feature 1..20: note = Description of Artificial Sequence: Synthetic oligonucleotide
  misc_feature 1..20: note = Target: SCN10A; (-) strand; PAM type: NRG; PAM sequence: CAG
  source 1..20: mol_type = other DNA
ttccccctctgcttgctgtg

SEQ ID NO: 14443 - DNA, 20 bp, synthetic construct
  misc_feature 1..20: note = Description of Artificial Sequence: Synthetic oligonucleotide
  misc_feature 1..20: note = Target: SCN10A; (-) strand; PAM type: NRG; PAM sequence: CAG
  source 1..20: mol_type = other DNA
ggcaaggatcagcctcatca

SEQ ID NO: 14444 - DNA, 20 bp, synthetic construct
  misc_feature 1..20: note = Description of Artificial Sequence: Synthetic oligonucleotide
  misc_feature 1..20: note = Target: SCN10A; (-) strand; PAM type: NRG; PAM sequence: CAG
  source 1..20: mol_type = other DNA
atgaagcagaaggcaaggat

SEQ ID NO: 14445 - DNA, 20 bp, synthetic construct
  misc_feature 1..20: note = Description of Artificial Sequence: Synthetic oligonucleotide
  misc_feature 1..20: note = Target: SCN10A; (-) strand; PAM type: NRG; PAM sequence: AGG
  source 1..20: mol_type = other DNA
ccaccatgaagcagaaggca

SEQ ID NO: 14446 - DNA, 20 bp, synthetic construct
  misc_feature 1..20: note = Description of Artificial Sequence: Synthetic oligonucleotide
  misc_feature 1..20: note = Target: SCN10A; (-) strand; PAM type: NRG; PAM sequence: AAG
  source 1..20: mol_type = other DNA
cccaccatgaagcagaaggc

SEQ ID NO: 14447 - DNA, 20 bp, synthetic construct
  misc_feature 1..20: note = Description of Artificial Sequence: Synthetic oligonucleotide
  misc_feature 1..20: note = Target: SCN10A; (-) strand; PAM type: NRG; PAM sequence: AGG
  source 1..20: mol_type = other DNA
catccccaccatgaagcaga

SEQ ID NO: 14448 - DNA, 20 bp, synthetic construct
  misc_feature 1..20: note = Description of Artificial Sequence: Synthetic oligonucleotide
  misc_feature 1..20: note = Target: SCN10A; (-) strand; PAM type: NRG; PAM sequence: AAG
  source 1..20: mol_type = other DNA
ccatccccaccatgaagcag

SEQ ID NO: 14449 - DNA, 20 bp, synthetic construct
  misc_feature 1..20: note = Description of Artificial Sequence: Synthetic oligonucleotide
  misc_feature 1..20: note = Target: SCN10A; (-) strand; PAM type: NRG; PAM sequence: CAG
  source 1..20: mol_type = other DNA
aacccatccccaccatgaag

SEQ ID NO: 14450 - DNA, 20 bp, synthetic construct
  misc_feature 1..20: note = Description of Artificial Sequence: Synthetic oligonucleotide
  misc_feature 1..20: note = Target: SCN10A; (-) strand; PAM type: NRG; PAM sequence: AAG
  source 1..20: mol_type = other DNA
agcaacccatccccaccatg

SEQ ID NO: 14451 - DNA, 20 bp, synthetic construct
  misc_feature 1..20: note = Description of Artificial Sequence: Synthetic oligonucleotide
  misc_feature 1..20: note = Target: SCN10A; (-) strand; PAM type: NRG; PAM sequence: TAG
  source 1..20: mol_type = other DNA
tttgctctaacccaacagga

SEQ ID NO: 14452 - DNA, 20 bp, synthetic construct
  misc_feature 1..20: note = Description of Artificial Sequence: Synthetic oligonucleotide
  misc_feature 1..20: note = Target: SCN10A; (-) strand; PAM type: NRG; PAM sequence: AGG
  source 1..20: mol_type = other DNA
attctttgctctaacccaac

SEQ ID NO: 14453 - DNA, 20 bp, synthetic construct
  misc_feature 1..20: note = Description of Artificial Sequence: Synthetic oligonucleotide
  misc_feature 1..20: note = Target: SCN10A; (-) strand; PAM type: NRG; PAM sequence: CAG
  source 1..20: mol_type = other DNA
gattctttgctctaacccaa

SEQ ID NO: 14454 - DNA, 20 bp, synthetic construct
  misc_feature 1..20: note = Description of Artificial Sequence: Synthetic oligonucleotide
  misc_feature 1..20: note = Target: SCN10A; (-) strand; PAM type: NRG; PAM sequence: TGG
  source 1..20: mol_type = other DNA
gccatgagcaaaggccactt

SEQ ID NO: 14455 - DNA, 20 bp, synthetic construct
  misc_feature 1..20: note = Description of Artificial Sequence: Synthetic oligonucleotide
  misc_feature 1..20: note = Target: SCN10A; (-) strand; PAM type: NRG; PAM sequence: AGG
  source 1..20: mol_type = other DNA
agcagttctgccatgagcaa

SEQ ID NO: 14456 - DNA, 20 bp, synthetic construct
  misc_feature 1..20: note = Description of Artificial Sequence: Synthetic oligonucleotide
  misc_feature 1..20: note = Target: SCN10A; (-) strand; PAM type: NRG; PAM sequence: AAG
  source 1..20: mol_type = other DNA
cagcagttctgccatgagca

SEQ ID NO: 14457 - DNA, 20 bp, synthetic construct
  misc_feature 1..20: note = Description of Artificial Sequence: Synthetic oligonucleotide
  misc_feature 1..20: note = Target: SCN10A; (-) strand; PAM type: NRG; PAM sequence: GAG
  source 1..20: mol_type = other DNA
tgagccagcagttctgccat

SEQ ID NO: 14458 - DNA, 20 bp, synthetic construct
  misc_feature 1..20: note = Description of Artificial Sequence: Synthetic oligonucleotide
  misc_feature 1..20: note = Target: SCN10A; (-) strand; PAM type: NRG; PAM sequence: CAG
  source 1..20: mol_type = other DNA
ccaggaaagatgtgagccag

SEQ ID NO: 14459 - DNA, 20 bp, synthetic construct
  misc_feature 1..20: note = Description of Artificial Sequence: Synthetic oligonucleotide
  misc_feature 1..20: note = Target: SCN10A; (-) strand; PAM type: NRG; PAM sequence: CAG
  source 1..20: mol_type = other DNA
gccccaggaaagatgtgagc

SEQ ID NO: 14460 - DNA, 20 bp, synthetic construct
  misc_feature 1..20: note = Description of Artificial Sequence: Synthetic oligonucleotide
  misc_feature 1..20: note = Target: SCN10A; (-) strand; PAM type: NRG; PAM sequence: GAG
  source 1..20: mol_type = other DNA
tcctgccccaggaaagatgt

SEQ ID NO: 14461 - DNA, 20 bp, synthetic construct
  misc_feature 1..20: note = Description of Artificial Sequence: Synthetic oligonucleotide
  misc_feature 1..20: note = Target: SCN10A; (-) strand; PAM type: NRG; PAM sequence: AAG
  source 1..20: mol_type = other DNA
atccccctcctgccccagga

SEQ ID NO: 14462 - DNA, 20 bp, synthetic construct
  misc_feature 1..20: note = Description of Artificial Sequence: Synthetic oligonucleotide
  misc_feature 1..20: note = Target: SCN10A; (-) strand; PAM type: NRG; PAM sequence: AGG
  source 1..20: mol_type = other DNA
agcaatccccctcctgcccc

SEQ ID NO: 14463 - DNA, 20 bp, synthetic construct
  misc_feature 1..20: note = Description of Artificial Sequence: Synthetic oligonucleotide
  misc_feature 1..20: note = Target: SCN10A; (-) strand; PAM type: NRG; PAM sequence: CAG
  source 1..20: mol_type = other DNA
cagcaatccccctcctgccc

SEQ ID NO: 14464 - DNA, 20 bp, synthetic construct
  misc_feature 1..20: note = Description of Artificial Sequence: Synthetic oligonucleotide
  misc_feature 1..20: note = Target: SCN10A; (-) strand; PAM type: NRG; PAM sequence: CAG
  source 1..20: mol_type = other DNA
aatggaagggattagtggct

SEQ ID NO: 14465 - DNA, 20 bp, synthetic construct
  misc_feature 1..20: note = Description of Artificial Sequence: Synthetic oligonucleotide
  misc_feature 1..20: note = Target: SCN10A; (-) strand; PAM type: NRG; PAM sequence: TGG
  source 1..20: mol_type = other DNA
gatgaaatggaagggattag

SEQ ID NO: 14466 - DNA, 20 bp, synthetic construct
  misc_feature 1..20: note = Description of Artificial Sequence: Synthetic oligonucleotide
  misc_feature 1..20: note = Target: SCN10A; (-) strand; PAM type: NRG; PAM sequence: TAG
  source 1..20: mol_type = other DNA
agtgatgaaatggaagggat

SEQ ID NO: 14467 - DNA, 20 bp, synthetic construct
  misc_feature 1..20: note = Description of Artificial Sequence: Synthetic oligonucleotide
  misc_feature 1..20: note = Target: SCN10A; (-) strand; PAM type: NRG; PAM sequence: GGG
  source 1..20: mol_type = other DNA
ttttcagtgatgaaatggaa

SEQ ID NO: 14468 - DNA, 20 bp, synthetic construct
  misc_feature 1..20: note = Description of Artificial Sequence: Synthetic oligonucleotide
  misc_feature 1..20: note = Target: SCN10A; (-) strand; PAM type: NRG; PAM sequence: AGG
  source 1..20: mol_type = other DNA
attttcagtgatgaaatgga

SEQ ID NO: 14469 - DNA, 20 bp, synthetic construct
  misc_feature 1..20: note = Description of Artificial Sequence: Synthetic oligonucleotide
  misc_feature 1..20: note = Target: SCN10A; (-) strand; PAM type: NRG; PAM sequence: AAG
  source 1..20: mol_type = other DNA
cattttcagtgatgaaatgg

SEQ ID NO: 14470 - DNA, 20 bp, synthetic construct
  misc_feature 1..20: note = Description of Artificial Sequence: Synthetic oligonucleotide
  misc_feature 1..20: note = Target: SCN10A; (-) strand; PAM type: NRG; PAM sequence: TGG
  source 1..20: mol_type = other DNA
caccattttcagtgatgaaa

SEQ ID NO: 14471 - DNA, 20 bp, synthetic construct
  misc_feature 1..20: note = Description of Artificial Sequence: Synthetic oligonucleotide
  misc_feature 1..20: note = Target: SCN10A; (-) strand; PAM type: NRG; PAM sequence: CAG
  source 1..20: mol_type = other DNA
ctgtattttttcaccatttt

SEQ ID NO: 14472 - DNA, 20 bp, synthetic construct
  misc_feature 1..20: note = Description of Artificial Sequence: Synthetic oligonucleotide
  misc_feature 1..20: note = Target: SCN10A; (-) strand; PAM type: NRG; PAM sequence: GGG
  source 1..20: mol_type = other DNA
gaagtcatgtgaccatgaat

SEQ ID NO: 14473 - DNA, 20 bp, synthetic construct
  misc_feature 1..20: note = Description of Artificial Sequence: Synthetic oligonucleotide
  misc_feature 1..20: note = Target: SCN10A; (-) strand; PAM type: NRG; PAM sequence: TGG
  source 1..20: mol_type = other DNA
agaagtcatgtgaccatgaa

SEQ ID NO: 14474 - DNA, 20 bp, synthetic construct
  misc_feature 1..20: note = Description of Artificial Sequence: Synthetic oligonucleotide
  misc_feature 1..20: note = Target: SCN10A; (-) strand; PAM type: NRG; PAM sequence: AAG
  source 1..20: mol_type = other DNA
tgcctgctctgtttaattag

SEQ ID NO: 14475 - DNA, 20 bp, synthetic construct
  misc_feature 1..20: note = Description of Artificial Sequence: Synthetic oligonucleotide
  misc_feature 1..20: note = Target: SCN10A; (-) strand; PAM type: NRG; PAM sequence: TAG
  source 1..20: mol_type = other DNA
cgttgcctgctctgtttaat

SEQ ID NO: 14476 - DNA, 20 bp, synthetic construct
  misc_feature 1..20: note = Description of Artificial Sequence: Synthetic oligonucleotide
  misc_feature 1..20: note = Target: SCN10A; (-) strand; PAM type: NRG; PAM sequence: CAG
  source 1..20: mol_type = other DNA
tccagggcaaacttcacacc

SEQ ID NO: 14477 - DNA, 20 bp, synthetic construct
  misc_feature 1..20: note = Description of Artificial Sequence: Synthetic oligonucleotide
  misc_feature 1..20: note = Target: SCN10A; (-) strand; PAM type: NRG; PAM sequence: GGG
  source 1..20: mol_type = other DNA
ccctaaagtcagaatatcca

SEQ ID NO: 14478 - DNA, 20 bp, synthetic construct
  misc_feature 1..20: note = Description of Artificial Sequence: Synthetic oligonucleotide
  misc_feature 1..20: note = Target: SCN10A; (-) strand; PAM type: NRG; PAM sequence: AGG
  source 1..20: mol_type = other DNA
tccctaaagtcagaatatcc

SEQ ID NO: 14479 - DNA, 20 bp, synthetic construct
  misc_feature 1..20: note = Description of Artificial Sequence: Synthetic oligonucleotide
  misc_feature 1..20: note = Target: SCN10A; (-) strand; PAM type: NRG; PAM sequence: CAG
  source 1..20: mol_type = other DNA
ttccctaaagtcagaatatc

SEQ ID NO: 14480 - DNA, 20 bp, synthetic construct
  misc_feature 1..20: note = Description of Artificial Sequence: Synthetic oligonucleotide
  misc_feature 1..20: note = Target: SCN10A; (-) strand; PAM type: NRG; PAM sequence: CAG
  source 1..20: mol_type = other DNA
gctactccattccctaaagt

SEQ ID NO: 14481 - DNA, 20 bp, synthetic construct
  misc_feature 1..20: note = Description of Artificial Sequence: Synthetic oligonucleotide
  misc_feature 1..20: note = Target: SCN10A; (-) strand; PAM type: NRG; PAM sequence: AAG
  source 1..20: mol_type = other DNA
gcaagctactccattcccta

SEQ ID NO: 14482 - DNA, 20 bp, synthetic construct
  misc_feature 1..20: note = Description of Artificial Sequence: Synthetic oligonucleotide
  misc_feature 1..20: note = Target: SCN10A; (-) strand; PAM type: NRG; PAM sequence: AAG
  source 1..20: mol_type = other DNA
ctaatccaagagcagctagc

SEQ ID NO: 14483 - DNA, 20 bp, synthetic construct
  misc_feature 1..20: note = Description of Artificial Sequence: Synthetic oligonucleotide
  misc_feature 1..20: note = Target: SCN10A; (-) strand; PAM type: NRG; PAM sequence: TAG
  source 1..20: mol_type = other DNA
tgggctaatccaagagcagc

SEQ ID NO: 14484 - DNA, 20 bp, synthetic construct
  misc_feature 1..20: note = Description of Artificial Sequence: Synthetic oligonucleotide
  misc_feature 1..20: note = Target: SCN10A; (-) strand; PAM type: NRG; PAM sequence: CAG
  source 1..20: mol_type = other DNA
accgtgggctaatccaagag

SEQ ID NO: 14485 - DNA, 20 bp, synthetic construct
  misc_feature 1..20: note = Description of Artificial Sequence: Synthetic oligonucleotide
  misc_feature 1..20: note = Target: SCN10A; (-) strand; PAM type: NRG; PAM sequence: GAG
  source 1..20: mol_type = other DNA
ctgaccgtgggctaatccaa

SEQ ID NO: 14486 - DNA, 20 bp, synthetic construct
  misc_feature 1..20: note = Description of Artificial Sequence: Synthetic oligonucleotide
  misc_feature 1..20: note = Target: SCN10A; (-) strand; PAM type: NRG; PAM sequence: AAG
  source 1..20: mol_type = other DNA
ccctgaccgtgggctaatcc

SEQ ID NO: 14487 - DNA, 20 bp, synthetic construct
  misc_feature 1..20: note = Description of Artificial Sequence: Synthetic oligonucleotide
  misc_feature 1..20: note = Target: SCN10A; (-) strand; PAM type: NRG; PAM sequence: GGG
  source 1..20: mol_type = other DNA
aaggtatgatccctgaccgt

SEQ ID NO: 14488 - DNA, 20 bp, synthetic construct
  misc_feature 1..20: note = Description of Artificial Sequence: Synthetic oligonucleotide
  misc_feature 1..20: note = Target: SCN10A; (-) strand; PAM type: NRG; PAM sequence: TGG
  source 1..20: mol_type = other DNA
aaaggtatgatccctgaccg

SEQ ID NO: 14489 - DNA, 20 bp, synthetic construct
  misc_feature 1..20: note = Description of Artificial Sequence: Synthetic oligonucleotide
  misc_feature 1..20: note = Target: SCN10A; (-) strand; PAM type: NRG; PAM sequence: AGG
  source 1..20: mol_type = other DNA
gagagcaccaagggttgcaa

SEQ ID NO: 14490 - DNA, 20 bp, synthetic construct
  misc_feature 1..20: note = Description of Artificial Sequence: Synthetic oligonucleotide
  misc_feature 1..20: note = Target: SCN10A; (-) strand; PAM type: NRG; PAM sequence: AAG
  source 1..20: mol_type = other DNA
tgagagcaccaagggttgca

SEQ ID NO: 14491 - DNA, 20 bp, synthetic construct
  misc_feature 1..20: note = Description of Artificial Sequence: Synthetic oligonucleotide
  misc_feature 1..20: note = Target: SCN10A; (-) strand; PAM type: NRG; PAM sequence: GGG
  source 1..20: mol_type = other DNA
atcgtctctgagagcaccaa

SEQ ID NO: 14492 - DNA, 20 bp, synthetic construct
  misc_feature 1..20: note = Description of Artificial Sequence: Synthetic oligonucleotide
  misc_feature 1..20: note = Target: SCN10A; (-) strand; PAM type: NRG; PAM sequence: AGG
  source 1..20: mol_type = other DNA
catcgtctctgagagcacca

SEQ ID NO: 14493 - DNA, 20 bp, synthetic construct
  misc_feature 1..20: note = Description of Artificial Sequence: Synthetic oligonucleotide
  misc_feature 1..20: note = Target: SCN10A; (-) strand; PAM type: NRG; PAM sequence: AAG
  source 1..20: mol_type = other DNA
tcatcgtctctgagagcacc

SEQ ID NO: 14494 - DNA, 20 bp, synthetic construct
  misc_feature 1..20: note = Description of Artificial Sequence: Synthetic oligonucleotide
  misc_feature 1..20: note = Target: SCN10A; (-) strand; PAM type: NRG; PAM sequence: GAG
  source 1..20: mol_type = other DNA
acccacttcatcgtctctga

SEQ ID NO: 14495 - DNA, 20 bp, synthetic construct
  misc_feature 1..20: note = Description of Artificial Sequence: Synthetic oligonucleotide
  misc_feature 1..20: note = Target: SCN10A; (-) strand; PAM type: NRG; PAM sequence: GAG
  source 1..20: mol_type = other DNA
tcacccacttcatcgtctct

SEQ ID NO: 14496 - DNA, 20 bp, synthetic construct
  misc_feature 1..20: note = Description of Artificial Sequence: Synthetic oligonucleotide
  misc_feature 1..20: note = Target: SCN10A; (-) strand; PAM type: NRG; PAM sequence: GAG
  source 1..20: mol_type = other DNA
tagaaatataataggctcta

SEQ ID NO: 14497 - DNA, 20 bp, synthetic construct
  misc_feature 1..20: note = Description of Artificial Sequence: Synthetic oligonucleotide
  misc_feature 1..20: note = Target: SCN10A; (-) strand; PAM type: NRG; PAM sequence: TAG
  source 1..20: mol_type = other DNA
tatagaaatataataggctc

SEQ ID NO: 14498 - DNA, 20 bp, synthetic construct
  misc_feature 1..20: note = Description of Artificial Sequence: Synthetic oligonucleotide
  misc_feature 1..20: note = Target: SCN10A; (-) strand; PAM type: NRG; PAM sequence: AGG
  source 1..20: mol_type = other DNA
ccactttatagaaatataat

SEQ ID NO: 14499 - DNA, 20 bp, synthetic construct
  misc_feature 1..20: note = Description of Artificial Sequence: Synthetic oligonucleotide
  misc_feature 1..20: note = Target: SCN10A; (-) strand; PAM type: NRG; PAM sequence: TAG
  source 1..20: mol_type = other DNA
tccactttatagaaatataa

SEQ ID NO: 14500 - DNA, 20 bp, synthetic construct
  misc_feature 1..20: note = Description of Artificial Sequence: Synthetic oligonucleotide
  misc_feature 1..20: note = Target: SCN10A; (-) strand; PAM type: NRG; PAM sequence: TAG
  source 1..20: mol_type = other DNA
ctctcacatactccacttta

SEQ ID NO: 14501 - DNA, 20 bp, synthetic construct
  misc_feature 1..20: note = Description of Artificial Sequence: Synthetic oligonucleotide
  misc_feature 1..20: note = Target: SCN10A; (-) strand; PAM type: NRG; PAM sequence: CAG
  source 1..20: mol_type = other DNA
gctacagaaatcaataaaag

SEQ ID NO: 14502 - DNA, 20 bp, synthetic construct
  misc_feature 1..20: note = Description of Artificial Sequence: Synthetic oligonucleotide
  misc_feature 1..20: note = Target: SCN10A; (-) strand; PAM type: NRG; PAM sequence: AAG
  source 1..20: mol_type = other DNA
cctgctacagaaatcaataa

SEQ ID NO: 14503 - DNA, 20 bp, synthetic construct
  misc_feature 1..20: note = Description of Artificial Sequence: Synthetic oligonucleotide
  misc_feature 1..20: note = Target: SCN10A; (-) strand; PAM type: NRG; PAM sequence: CAG
  source 1..20: mol_type = other DNA
ttctttaacattccctgcta

SEQ ID NO: 14504 - DNA, 20 bp, synthetic construct
  misc_feature 1..20: note = Description of Artificial Sequence: Synthetic oligonucleotide
  misc_feature 1..20: note = Target: SCN10A; (-) strand; PAM type: NRG; PAM sequence: GGG
  source 1..20: mol_type = other DNA
gttaaggattccacaagact

SEQ ID NO: 14505 - DNA, 20 bp, synthetic construct
  misc_feature 1..20: note = Description of Artificial Sequence: Synthetic oligonucleotide
  misc_feature 1..20: note = Target: SCN10A; (-) strand; PAM type: NRG; PAM sequence: TGG
  source 1..20: mol_type = other DNA
agttaaggattccacaagac

SEQ ID NO: 14506 - DNA, 20 bp, synthetic construct
  misc_feature 1..20: note = Description of Artificial Sequence: Synthetic oligonucleotide
  misc_feature 1..20: note = Target: SCN10A; (-) strand; PAM type: NRG; PAM sequence: AAG
  source 1..20: mol_type = other DNA
ggaaaagttaaggattccac

SEQ ID NO: 14507 - DNA, 20 bp, synthetic construct
  misc_feature 1..20: note = Description of Artificial Sequence: Synthetic oligonucleotide
  misc_feature 1..20: note = Target: SCN10A; (-) strand; PAM type: NRG; PAM sequence: AGG
  source 1..20: mol_type = other DNA
ttcttccataggaaaagtta

SEQ ID NO: 14508 - DNA, 20 bp, synthetic construct
  misc_feature 1..20: note = Description of Artificial Sequence: Synthetic oligonucleotide
  misc_feature 1..20: note = Target: SCN10A; (-) strand; PAM type: NRG; PAM sequence: AAG
  source 1..20: mol_type = other DNA
tttcttccataggaaaagtt

SEQ ID NO: 14509 - DNA, 20 bp, synthetic construct
  misc_feature 1..20: note = Description of Artificial Sequence: Synthetic oligonucleotide
  misc_feature 1..20: note = Target: SCN10A; (-) strand; PAM type: NRG; PAM sequence: AAG
  source 1..20: mol_type = other DNA
tcttgtttcttccataggaa

SEQ ID NO: 14510 - DNA, 20 bp, synthetic construct
  misc_feature 1..20: note = Description of Artificial Sequence: Synthetic oligonucleotide
  misc_feature 1..20: note = Target: SCN10A; (-) strand; PAM type: NRG; PAM sequence: AGG
  source 1..20: mol_type = other DNA
ctaaatcttgtttcttccat

SEQ ID NO: 14511 - DNA, 20 bp, synthetic construct
  misc_feature 1..20: note = Description of Artificial Sequence: Synthetic oligonucleotide
  misc_feature 1..20: note = Target: SCN10A; (-) strand; PAM type: NRG; PAM sequence: TAG
  source 1..20: mol_type = other DNA
tctaaatcttgtttcttcca

SEQ ID NO: 14512 - DNA, 20 bp, synthetic construct
  misc_feature 1..20: note = Description of Artificial Sequence: Synthetic oligonucleotide
  misc_feature 1..20: note = Target: SCN10A; (-) strand; PAM type: NRG; PAM sequence: AGG
  source 1..20: mol_type = other DNA
tctcacctctgatgatgctc

SEQ ID NO: 14513 - DNA, 20 bp, synthetic construct
  misc_feature 1..20: note = Description of Artificial Sequence: Synthetic oligonucleotide
  misc_feature 1..20: note = Target: SCN10A; (-) strand; PAM type: NRG; PAM sequence: CAG
  source 1..20: mol_type = other DNA
ctctcacctctgatgatgct

SEQ ID NO: 14514 - DNA, 20 bp, synthetic construct
  misc_feature 1..20: note = Description of Artificial Sequence: Synthetic oligonucleotide
  misc_feature 1..20: note = Target: SCN10A; (-) strand; PAM type: NRG; PAM sequence: GAG
  source 1..20: mol_type = other DNA
gcttacctgggaccacatag

SEQ ID NO: 14515 - DNA, 20 bp, synthetic construct
  misc_feature 1..20: note = Description of Artificial Sequence: Synthetic oligonucleotide
  misc_feature 1..20: note = Target: SCN10A; (-) strand; PAM type: NRG; PAM sequence: AGG
  source 1..20: mol_type = other DNA
gagcttacctgggaccacat

SEQ ID NO: 14516 - DNA, 20 bp, synthetic construct
  misc_feature 1..20: note = Description of Artificial Sequence: Synthetic oligonucleotide
  misc_feature 1..20: note = Target: SCN10A; (-) strand; PAM type: NRG; PAM sequence: TAG
  source 1..20: mol_type = other DNA
agagcttacctgggaccaca

SEQ ID NO: 14517 - DNA, 20 bp, synthetic construct
  misc_feature 1..20: note = Description of Artificial Sequence: Synthetic oligonucleotide
  misc_feature 1..20: note = Target: SCN10A; (-) strand; PAM type: NRG; PAM sequence: GGG
  source 1..20: mol_type = other DNA
tttcatgacagagcttacct

SEQ ID NO: 14518 - DNA, 20 bp, synthetic construct
  misc_feature 1..20: note = Description of Artificial Sequence: Synthetic oligonucleotide
  misc_feature 1..20: note = Target: SCN10A; (-) strand; PAM type: NRG; PAM sequence: TGG
  source 1..20: mol_type = other DNA
atttcatgacagagcttacc

SEQ ID NO: 14519 - DNA, 20 bp, synthetic construct
  misc_feature 1..20: note = Description of Artificial Sequence: Synthetic oligonucleotide
  misc_feature 1..20: note = Target: SCN10A; (-) strand; PAM type: NRG; PAM sequence: GAG
  source 1..20: mol_type = other DNA
atgggtgccatttcatgaca

SEQ ID NO: 14520 - DNA, 20 bp, synthetic construct
  misc_feature 1..20: note = Description of Artificial Sequence: Synthetic oligonucleotide
  misc_feature 1..20: note = Target: SCN10A; (-) strand; PAM type: NRG; PAM sequence: CAG
  source 1..20: mol_type = other DNA
gcatgggtgccatttcatga

SEQ ID NO: 14521 - DNA, 20 bp, synthetic construct
  misc_feature 1..20: note = Description of Artificial Sequence: Synthetic oligonucleotide
  misc_feature 1..20: note = Target: SCN10A; (-) strand; PAM type: NRG; PAM sequence: GGG
  source 1..20: mol_type = other DNA
tttctgccccatcagtgcat

SEQ ID NO: 14522 - DNA, 20 bp, synthetic construct
  misc_feature 1..20: note = Description of Artificial Sequence: Synthetic oligonucleotide
  misc_feature 1..20: note = Target: SCN10A; (-) strand; PAM type: NRG; PAM sequence: TGG
  source 1..20: mol_type = other DNA
atttctgccccatcagtgca

SEQ ID NO: 14523 - DNA, 20 bp, synthetic construct
  misc_feature 1..20: note = Description of Artificial Sequence: Synthetic oligonucleotide
  misc_feature 1..20: note = Target: SCN10A; (-) strand; PAM type: NRG; PAM sequence: CAG
  source 1..20: mol_type = other DNA
acacaggatttctgccccat

SEQ ID NO: 14524 - DNA, 20 bp, synthetic construct
  misc_feature 1..20: note = Description of Artificial Sequence: Synthetic oligonucleotide
  misc_feature 1..20: note = Target: SCN10A; (-) strand; PAM type: NRG; PAM sequence: AGG
  source 1..20: mol_type = other DNA
taccagcaaagcactgacac

SEQ ID NO: 14525 - DNA, 20 bp, synthetic construct
  misc_feature 1..20: note = Description of Artificial Sequence: Synthetic oligonucleotide
  misc_feature 1..20: note = Target: SCN10A; (-) strand; PAM type: NRG; PAM sequence: CAG
  source 1..20: mol_type = other DNA
ataccagcaaagcactgaca

SEQ ID NO: 14526 - DNA, 20 bp, synthetic construct
  misc_feature 1..20: note = Description of Artificial Sequence: Synthetic oligonucleotide
  misc_feature 1..20: note = Target: SCN10A; (-) strand; PAM type: NRG; PAM sequence: AAG
  source 1..20: mol_type = other DNA
tcaagctggtcataccagca

SEQ ID NO: 14527 - DNA, 20 bp, synthetic construct
  misc_feature 1..20: note = Description of Artificial Sequence: Synthetic oligonucleotide
  misc_feature 1..20: note = Target: SCN10A; (-) strand; PAM type: NRG; PAM sequence: CAG
  source 1..20: mol_type = other DNA
aaaggtcaagctggtcatac

SEQ ID NO: 14528 - DNA, 20 bp, synthetic construct
  misc_feature 1..20: note = Description of Artificial Sequence: Synthetic oligonucleotide
  misc_feature 1..20: note = Target: SCN10A; (-) strand; PAM type: NRG; PAM sequence: TGG
  source 1..20: mol_type = other DNA
aggagccccaaaggtcaagc

SEQ ID NO: 14529 - DNA, 20 bp, synthetic construct
  misc_feature 1..20: note = Description of Artificial Sequence: Synthetic oligonucleotide
  misc_feature 1..20: note = Target: SCN10A; (-) strand; PAM type: NRG; PAM sequence: AAG
  source 1..20: mol_type = other DNA
ccttaggagccccaaaggtc

SEQ ID NO: 14530 - DNA, 20 bp, synthetic construct
  misc_feature 1..20: note = Description of Artificial Sequence: Synthetic oligonucleotide
  misc_feature 1..20: note = Target: SCN10A; (-) strand; PAM type: NRG; PAM sequence: AGG
  source 1..20: mol_type = other DNA
tctccccttaggagccccaa

SEQ ID NO: 14531 - DNA, 20 bp, synthetic construct
  misc_feature 1..20: note = Description of Artificial Sequence: Synthetic oligonucleotide
  misc_feature 1..20: note = Target: SCN10A; (-) strand; PAM type: NRG; PAM sequence: AAG
  source 1..20: mol_type = other DNA
ttctccccttaggagcccca

SEQ ID NO: 14532 - DNA, 20 bp, synthetic construct
  misc_feature 1..20: note = Description of Artificial Sequence: Synthetic oligonucleotide
  misc_feature 1..20: note = Target: SCN10A; (-) strand; PAM type: NRG; PAM sequence: GAG
  source 1..20: mol_type = other DNA
tgtccaccttctccccttag

SEQ ID NO: 14533 - DNA, 20 bp, synthetic construct
  misc_feature 1..20: note = Description of Artificial Sequence: Synthetic oligonucleotide
  misc_feature 1..20: note = Target: SCN10A; (-) strand; PAM type: NRG; PAM sequence: AGG
  source 1..20: mol_type = other DNA
aatgtccaccttctcccctt

SEQ ID NO: 14534 - DNA, 20 bp, synthetic construct
  misc_feature 1..20: note = Description of Artificial Sequence: Synthetic oligonucleotide
  misc_feature 1..20: note = Target: SCN10A; (-) strand; PAM type: NRG; PAM sequence: TAG
  source 1..20: mol_type = other DNA
gaatgtccaccttctcccct

SEQ ID NO: 14535 - DNA, 20 bp, synthetic construct
  misc_feature 1..20: note = Description of Artificial Sequence: Synthetic oligonucleotide
  misc_feature 1..20: note = Target: SCN10A; (-) strand; PAM type: NRG; PAM sequence: TGG
  source 1..20: mol_type = other DNA
tttggccagattattggccc

SEQ ID NO: 14536 - DNA, 20 bp, synthetic construct
  misc_feature 1..20: note = Description of Artificial Sequence: Synthetic oligonucleotide
  misc_feature 1..20: note = Target: SCN10A; (-) strand; PAM type: NRG; PAM sequence: TGG
  source 1..20: mol_type = other DNA
cttgcttttggccagattat

SEQ ID NO: 14537 - DNA, 20 bp, synthetic construct
  misc_feature 1..20: note = Description of Artificial Sequence: Synthetic oligonucleotide
  misc_feature 1..20: note = Target: SCN10A; (-) strand; PAM type: NRG; PAM sequence: CAG
  source 1..20: mol_type = other DNA
aggcccagcttgcttttggc

SEQ ID NO: 14538 - DNA, 20 bp, synthetic construct
  misc_feature 1..20: note = Description of Artificial Sequence: Synthetic oligonucleotide
  misc_feature 1..20: note = Target: SCN10A; (-) strand; PAM type: NRG; PAM sequence: TGG
  source 1..20: mol_type = other DNA
tcccaggcccagcttgcttt

SEQ ID NO: 14539 - DNA, 20 bp, synthetic construct
  misc_feature 1..20: note = Description of Artificial Sequence: Synthetic oligonucleotide
  misc_feature 1..20: note = Target: SCN10A; (-) strand; PAM type: NRG; PAM sequence: CAG
  source 1..20: mol_type = other DNA
aagacccttcttcccaggcc

SEQ ID NO: 14540 - DNA, 20 bp, synthetic construct
  misc_feature 1..20: note = Description of Artificial Sequence: Synthetic oligonucleotide
  misc_feature 1..20: note = Target: SCN10A; (-) strand; PAM type: NRG; PAM sequence: AGG
  source 1..20: mol_type = other DNA
caactaagacccttcttccc

SEQ ID NO: 14541 - DNA, 20 bp, synthetic construct
  misc_feature 1..20: note = Description of Artificial Sequence: Synthetic oligonucleotide
  misc_feature 1..20: note = Target: SCN10A; (-) strand; PAM type: NRG; PAM sequence: CAG
  source 1..20: mol_type = other DNA
ccaactaagacccttcttcc

SEQ ID NO: 14542 - DNA, 20 bp, synthetic construct
  misc_feature 1..20: note = Description of Artificial Sequence: Synthetic oligonucleotide
  misc_feature 1..20: note = Target: SCN10A; (-) strand; PAM type: NRG; PAM sequence: AAG
  source 1..20: mol_type = other DNA
ggaaattcccactcccaact

SEQ ID NO: 14543 - DNA, 20 bp, synthetic construct
  misc_feature 1..20: note = Description of Artificial Sequence: Synthetic oligonucleotide
  misc_feature 1..20: note = Target: SCN10A; (-) strand; PAM type: NRG; PAM sequence: AGG
  source 1..20: mol_type = other DNA
agaaagaaatccaaggcaaa

SEQ ID NO: 14544 - DNA, 20 bp, synthetic construct
  misc_feature 1..20: note = Description of Artificial Sequence: Synthetic oligonucleotide
  misc_feature 1..20: note = Target: SCN10A; (-) strand; PAM type: NRG; PAM sequence: AAG
  source 1..20: mol_type = other DNA
aagaaagaaatccaaggcaa

SEQ ID NO: 14545 - DNA, 20 bp, synthetic construct
  misc_feature 1..20: note = Description of Artificial Sequence: Synthetic oligonucleotide
  misc_feature 1..20: note = Target: SCN10A; (-) strand; PAM type: NRG; PAM sequence: AGG
  source 1..20: mol_type = other DNA
agaaccaagaaagaaatcca

SEQ ID NO: 14546 - DNA, 20 bp, synthetic construct
  misc_feature 1..20: note = Description of Artificial Sequence: Synthetic oligonucleotide
  misc_feature 1..20: note = Target: SCN10A; (-) strand; PAM type: NRG; PAM sequence: AAG
  source 1..20: mol_type = other DNA
tagaaccaagaaagaaatcc

SEQ ID NO: 14547 - DNA, 20 bp, synthetic construct
  misc_feature 1..20: note = Description of Artificial Sequence: Synthetic oligonucleotide
  misc_feature 1..20: note = Target: SCN10A; (-) strand; PAM type: NRG; PAM sequence: AAG
  source 1..20: mol_type = other DNA
ttcaaagtctagaaccaaga

SEQ ID NO: 14548 - DNA, 20 bp, synthetic construct
  misc_feature 1..20: note = Description of Artificial Sequence: Synthetic oligonucleotide
  misc_feature 1..20: note = Target: SCN10A; (-) strand; PAM type: NRG; PAM sequence: AAG
  source 1..20: mol_type = other DNA
cctcttcaaagtctagaacc

SEQ ID NO: 14549 - DNA, 20 bp, synthetic construct
  misc_feature 1..20: note = Description of Artificial Sequence: Synthetic oligonucleotide
  misc_feature 1..20: note = Target: SCN10A; (-) strand; PAM type: NRG; PAM sequence: TAG
  source 1..20: mol_type = other DNA
catcttccctcttcaaagtc

SEQ ID NO: 14550 - DNA, 20 bp, synthetic construct
  misc_feature 1..20: note = Description of Artificial Sequence: Synthetic oligonucleotide
  misc_feature 1..20: note = Target: SCN10A; (-) strand; PAM type: NRG; PAM sequence: AAG
  source 1..20: mol_type = other DNA
cggatcatcttccctcttca

SEQ ID NO: 14551 - DNA, 20 bp, synthetic construct
  misc_feature 1..20: note = Description of Artificial Sequence: Synthetic oligonucleotide
  misc_feature 1..20: note = Target: SCN10A; (-) strand; PAM type: NRG; PAM sequence: CGG
  source 1..20: mol_type = other DNA
acatgcccagtggcacaagc

SEQ ID NO: 14552 - DNA, 20 bp, synthetic construct
  misc_feature 1..20: note = Description of Artificial Sequence: Synthetic oligonucleotide
  misc_feature 1..20: note = Target: SCN10A; (-) strand; PAM type: NRG; PAM sequence: AAG
  source 1..20: mol_type = other DNA
acccacatgcccagtggcac

SEQ ID NO: 14553 - DNA, 20 bp, synthetic construct
  misc_feature 1..20: note = Description of Artificial Sequence: Synthetic oligonucleotide
  misc_feature 1..20: note = Target: SCN10A; (-) strand; PAM type: NRG; PAM sequence: TGG
  source 1..20: mol_type = other DNA
tttgacacccacatgcccag

SEQ ID NO: 14554 - DNA, 20 bp, synthetic construct
  misc_feature 1..20: note = Description of Artificial Sequence: Synthetic oligonucleotide
  misc_feature 1..20: note = Target: SCN10A; (-) strand; PAM type: NRG; PAM sequence: CAG
  source 1..20: mol_type = other DNA
atctttgacacccacatgcc

SEQ ID NO: 14555 - DNA, 20 bp, synthetic construct
  misc_feature 1..20: note = Description of Artificial Sequence: Synthetic oligonucleotide
  misc_feature 1..20: note = Target: SCN10A; (-) strand; PAM type: NRG; PAM sequence: AGG
  source 1..20: mol_type = other DNA
ctgaccagcatccaaatggc

SEQ ID NO: 14556 - DNA, 20 bp, synthetic construct
  misc_feature 1..20: note = Description of Artificial Sequence: Synthetic oligonucleotide
  misc_feature 1..20: note = Target: SCN10A; (-) strand; PAM type: NRG; PAM sequence: CAG
  source 1..20: mol_type = other DNA
cctgaccagcatccaaatgg

SEQ ID NO: 14557 - DNA, 20 bp, synthetic construct
  misc_feature 1..20: note = Description of Artificial Sequence: Synthetic oligonucleotide
  misc_feature 1..20: note = Target: SCN10A; (-) strand; PAM type: NRG; PAM sequence: TGG
  source 1..20: mol_type = other DNA
gctcctgaccagcatccaaa

SEQ ID NO: 14558 - DNA, 20 bp, synthetic construct
  misc_feature 1..20: note = Description of Artificial Sequence: Synthetic oligonucleotide
  misc_feature 1..20: note = Target: SCN10A; (-) strand; PAM type: NRG; PAM sequence: CAG
  source 1..20: mol_type = other DNA
ggaccatcctagctcctgac

SEQ ID NO: 14559 - DNA, 20 bp, synthetic construct
  misc_feature 1..20: note = Description of Artificial Sequence: Synthetic oligonucleotide
  misc_feature 1..20: note = Target: SCN10A; (-) strand; PAM type: NRG; PAM sequence: TAG
  source 1..20: mol_type = other DNA
ccataggtcttggaccatcc

SEQ ID NO: 14560 - DNA, 20 bp, synthetic construct
  misc_feature 1..20: note = Description of Artificial Sequence: Synthetic oligonucleotide
  misc_feature 1..20: note = Target: SCN10A; (-) strand; PAM type: NRG; PAM sequence: TGG
  source 1..20: mol_type = other DNA
actccaggacccataggtct

SEQ ID NO: 14561 - DNA, 20 bp, synthetic construct
  misc_feature 1..20: note = Description of Artificial Sequence: Synthetic oligonucleotide
  misc_feature 1..20: note = Target: SCN10A; (-) strand; PAM type: NRG; PAM sequence: AGG
  source 1..20: mol_type = other DNA
ggctgcactccaggacccat

SEQ ID NO: 14562 - DNA, 20 bp, synthetic construct
  misc_feature 1..20: note = Description of Artificial Sequence: Synthetic oligonucleotide
  misc_feature 1..20: note = Target: SCN10A; (-) strand; PAM type: NRG; PAM sequence: TAG
  source 1..20: mol_type = other DNA
tggctgcactccaggaccca

SEQ ID NO: 14563 - DNA, 20 bp, synthetic construct
  misc_feature 1..20: note = Description of Artificial Sequence: Synthetic oligonucleotide
  misc_feature 1..20: note = Target: SCN10A; (-) strand; PAM type: NRG; PAM sequence: AGG
  source 1..20: mol_type = other DNA
cctgcagatggctgcactcc

SEQ ID NO: 14564 - DNA, 20 bp, synthetic construct
  misc_feature 1..20: note = Description of Artificial Sequence: Synthetic oligonucleotide
  misc_feature 1..20: note = Target: SCN10A; (-) strand; PAM type: NRG; PAM sequence: CAG
  source 1..20: mol_type = other DNA
acctgcagatggctgcactc

SEQ ID NO: 14565 - DNA, 20 bp, synthetic construct
  misc_feature 1..20: note = Description of Artificial Sequence: Synthetic oligonucleotide
  misc_feature 1..20: note = Target: SCN10A; (-) strand; PAM type: NRG; PAM sequence: TGG
  source 1..20: mol_type = other DNA
gtccaagcagcacctgcaga

SEQ ID NO: 14566 - DNA, 20 bp, synthetic construct
  misc_feature 1..20: note = Description of Artificial Sequence: Synthetic oligonucleotide
  misc_feature 1..20: note = Target: SCN10A; (-) strand; PAM type: NRG; PAM sequence: CAG
  source 1..20: mol_type = other DNA
cagagtccaagcagcacctg

SEQ ID NO: 14567 - DNA, 20 bp, synthetic construct
  misc_feature 1..20: note = Description of Artificial Sequence: Synthetic oligonucleotide
  misc_feature 1..20: note = Target: SCN10A; (-) strand; PAM type: NRG; PAM sequence: CAG
  source 1..20: mol_type = other DNA
agcacaaagcagagtccaag

SEQ ID NO: 14568 - DNA, 20 bp, synthetic construct
  misc_feature 1..20: note = Description of Artificial Sequence: Synthetic oligonucleotide
  misc_feature 1..20: note = Target: SCN10A; (-) strand; PAM type: NRG; PAM sequence: AAG
  source 1..20: mol_type = other DNA
atcagcacaaagcagagtcc

SEQ ID NO: 14569 - DNA, 20 bp, synthetic construct
  misc_feature 1..20: note = Description of Artificial Sequence: Synthetic oligonucleotide
  misc_feature 1..20: note = Target: SCN10A; (-) strand; PAM type: NRG; PAM sequence: GAG
  source 1..20: mol_type = other DNA
agagaaatcagcacaaagca

SEQ ID NO: 14570 - DNA, 20 bp, synthetic construct
  misc_feature 1..20: note = Description of Artificial Sequence: Synthetic oligonucleotide
  misc_feature 1..20: note = Target: SCN10A; (-) strand; PAM type: NRG; PAM sequence: CAG
  source 1..20: mol_type = other DNA
acagagaaatcagcacaaag

SEQ ID NO: 14571 - DNA, 20 bp, synthetic construct
  misc_feature 1..20: note = Description of Artificial Sequence: Synthetic oligonucleotide
  misc_feature 1..20: note = Target: SCN10A; (-) strand; PAM type: NRG; PAM sequence: AAG
  source 1..20: mol_type = other DNA
ccaacagagaaatcagcaca

SEQ ID NO: 14572 - DNA, 20 bp, synthetic construct
  misc_feature 1..20: note = Description of Artificial Sequence: Synthetic oligonucleotide
  misc_feature 1..20: note = Target: SCN10A; (-) strand; PAM type: NRG; PAM sequence: CAG
  source 1..20: mol_type = other DNA
agggatgccaacagagaaat

SEQ ID NO: 14573 - DNA, 20 bp, synthetic construct
  misc_feature 1..20: note = Description of Artificial Sequence: Synthetic oligonucleotide
  misc_feature 1..20: note = Target: SCN10A; (-) strand; PAM type: NRG; PAM sequence: GAG
  source 1..20: mol_type = other DNA
aagtggcagggatgccaaca

SEQ ID NO: 14574 - DNA, 20 bp, synthetic construct
  misc_feature 1..20: note = Description of Artificial Sequence: Synthetic oligonucleotide
  misc_feature 1..20: note = Target: SCN10A; (-) strand; PAM type: NRG; PAM sequence: CAG
  source 1..20: mol_type = other DNA
tgaagtggcagggatgccaa

SEQ ID NO: 14575 - DNA, 20 bp, synthetic construct
  misc_feature 1..20: note = Description of Artificial Sequence: Synthetic oligonucleotide
  misc_feature 1..20: note = Target: SCN10A; (-) strand; PAM type: NRG; PAM sequence: GGG
  source 1..20: mol_type = other DNA
aacaaaactttgaagtggca

SEQ ID NO: 14576 - DNA, 20 bp, synthetic construct
  misc_feature 1..20: note = Description of Artificial Sequence: Synthetic oligonucleotide
  misc_feature 1..20: note = Target: SCN10A; (-) strand; PAM type: NRG; PAM sequence: AGG
  source 1..20: mol_type = other DNA
aaacaaaactttgaagtggc

SEQ ID NO: 14577 - DNA, 20 bp, synthetic construct
  misc_feature 1..20: note = Description of Artificial Sequence: Synthetic oligonucleotide
  misc_feature 1..20: note = Target: SCN10A; (-) strand; PAM type: NRG; PAM sequence: CAG
  source 1..20: mol_type = other DNA
taaacaaaactttgaagtgg

SEQ ID NO: 14578 - DNA, 20 bp, synthetic construct
  misc_feature 1..20: note = Description of Artificial Sequence: Synthetic oligonucleotide
  misc_feature 1..20: note = Target: SCN10A; (-) strand; PAM type: NRG; PAM sequence: TGG
  source 1..20: mol_type = other DNA
atttaaacaaaactttgaag

SEQ ID NO: 14579 - DNA, 20 bp, synthetic construct
  misc_feature 1..20: note = Description of Artificial Sequence: Synthetic oligonucleotide
  misc_feature 1..20: note = Target: SCN10A; (-) strand; PAM type: NRG; PAM sequence: AAG
  source 1..20: mol_type = other DNA
aacatttaaacaaaactttg

SEQ ID NO: 14580 - DNA, 20 bp, synthetic construct
  misc_feature 1..20: note = Description of Artificial Sequence: Synthetic oligonucleotide
  misc_feature 1..20: note = Target: SCN10A; (-) strand; PAM type: NRG; PAM sequence: TAG
  source 1..20: mol_type = other DNA
tcgcatagctgaggcaaggc

SEQ ID NO: 14581 - DNA, 20 bp, synthetic construct
  misc_feature 1..20: note = Description of Artificial Sequence: Synthetic oligonucleotide
  misc_feature 1..20: note = Target: SCN10A; (-) strand; PAM type: NRG; PAM sequence: AGG
  source 1..20: mol_type = other DNA
aatttcgcatagctgaggca

SEQ ID NO: 14582 - DNA, 20 bp, synthetic construct
  misc_feature 1..20: note = Description of Artificial Sequence: Synthetic oligonucleotide
  misc_feature 1..20: note = Target: SCN10A; (-) strand; PAM type: NRG; PAM sequence: AAG
  source 1..20: mol_type = other DNA
taatttcgcatagctgaggc

SEQ ID NO: 14583 - DNA, 20 bp, synthetic construct
  misc_feature 1..20: note = Description of Artificial Sequence: Synthetic oligonucleotide
  misc_feature 1..20: note = Target: SCN10A; (-) strand; PAM type: NRG; PAM sequence: AGG
  source 1..20: mol_type = other DNA
tccctaatttcgcatagctg

SEQ ID NO: 14584 - DNA, 20 bp, synthetic construct
  misc_feature 1..20: note = Description of Artificial Sequence: Synthetic oligonucleotide
  misc_feature 1..20: note = Target: SCN10A; (-) strand; PAM type: NRG; PAM sequence: GAG
  source 1..20: mol_type = other DNA
ttccctaatttcgcatagct

SEQ ID NO: 14585 - DNA, 20 bp, synthetic construct
  misc_feature 1..20: note = Description of Artificial Sequence: Synthetic oligonucleotide
  misc_feature 1..20: note = Target: SCN10A; (-) strand; PAM type: NRG; PAM sequence: TAG
  source 1..20: mol_type = other DNA
ctttgttccctaatttcgca

SEQ ID NO: 14586 - DNA, 20 bp, synthetic construct
  misc_feature 1..20: note = Description of Artificial Sequence: Synthetic oligonucleotide
  misc_feature 1..20: note = Target: SCN10A; (-) strand; PAM type: NRG; PAM sequence: AGG
  source 1..20: mol_type = other DNA
ttaatattctggcccaagca

SEQ ID NO: 14587 - DNA, 20 bp, synthetic construct
  misc_feature 1..20: note = Description of Artificial Sequence: Synthetic oligonucleotide
  misc_feature 1..20: note = Target: SCN10A; (-) strand; PAM type: NRG; PAM sequence: AAG
  source 1..20: mol_type = other DNA
cttaatattctggcccaagc

SEQ ID NO: 14588 - DNA, 20 bp, synthetic construct
  misc_feature 1..20: note = Description of Artificial Sequence: Synthetic oligonucleotide
  misc_feature 1..20: note = Target: SCN10A; (-) strand; PAM type: NRG; PAM sequence: AAG
  source 1..20: mol_type = other DNA
tccccttaatattctggccc

SEQ ID NO: 14589 - DNA, 20 bp, synthetic construct
  misc_feature 1..20: note = Description of Artificial Sequence: Synthetic oligonucleotide
  misc_feature 1..20: note = Target: SCN10A; (-) strand; PAM type: NRG; PAM sequence: TGG
  source 1..20: mol_type = other DNA
tggctctccccttaatattc

SEQ ID NO: 14590 - DNA, 20 bp, synthetic construct
  misc_feature 1..20: note = Description of Artificial Sequence: Synthetic oligonucleotide
  misc_feature 1..20: note = Target: SCN10A; (-) strand; PAM type: NRG; PAM sequence: TGG
  source 1..20: mol_type = other DNA
ctagccttagtggaggaacg

SEQ ID NO: 14591 - DNA, 20 bp, synthetic construct
  misc_feature 1..20: note = Description of Artificial Sequence: Synthetic oligonucleotide
  misc_feature 1..20: note = Target: SCN10A; (-) strand; PAM type: NRG; PAM sequence: AGG
  source 1..20: mol_type = other DNA
ccttttgctagccttagtgg

SEQ ID NO: 14592 - DNA, 20 bp, synthetic construct
  misc_feature 1..20: note = Description of Artificial Sequence: Synthetic oligonucleotide
  misc_feature 1..20: note = Target: SCN10A; (-) strand; PAM type: NRG; PAM sequence: GAG
  source 1..20: mol_type = other DNA
accttttgctagccttagtg

SEQ ID NO: 14593 - DNA, 20 bp, synthetic construct
  misc_feature 1..20: note = Description of Artificial Sequence: Synthetic oligonucleotide
  misc_feature 1..20: note = Target: SCN10A; (-) strand; PAM type: NRG; PAM sequence: TGG
  source 1..20: mol_type = other DNA
caaccttttgctagccttag

SEQ ID NO: 14594 - DNA, 20 bp, synthetic construct
  misc_feature 1..20: note = Description of Artificial Sequence: Synthetic oligonucleotide
  misc_feature 1..20: note = Target: SCN10A; (-) strand; PAM type: NRG; PAM sequence: TAG
  source 1..20: mol_type = other DNA
tctcaaccttttgctagcct

SEQ ID NO: 14595 - DNA, 20 bp, synthetic construct
  misc_feature 1..20: note = Description of Artificial Sequence: Synthetic oligonucleotide
  misc_feature 1..20: note = Target: SCN10A; (-) strand; PAM type: NRG; PAM sequence: TAG
  source 1..20: mol_type = other DNA
attcactctcaaccttttgc

SEQ ID NO: 14596 - DNA, 20 bp, synthetic construct
  misc_feature 1..20: note = Description of Artificial Sequence: Synthetic oligonucleotide
  misc_feature 1..20: note = Target: SCN10A; (-) strand; PAM type: NRG; PAM sequence: TAG
  source 1..20: mol_type = other DNA
tgaatggaagaagagtggat

SEQ ID NO: 14597 - DNA, 20 bp, synthetic construct
  misc_feature 1..20: note = Description of Artificial Sequence: Synthetic oligonucleotide
  misc_feature 1..20: note = Target: SCN10A; (-) strand; PAM type: NRG; PAM sequence: TGG
  source 1..20: mol_type = other DNA
tcctttgaatggaagaagag

SEQ ID NO: 14598 - DNA, 20 bp, synthetic construct
  misc_feature 1..20: note = Description of Artificial Sequence: Synthetic oligonucleotide
  misc_feature 1..20: note = Target: SCN10A; (-) strand; PAM type: NRG; PAM sequence: GAG
  source 1..20: mol_type = other DNA
ccatcctttgaatggaagaa

SEQ ID NO: 14599 - DNA, 20 bp, synthetic construct
  misc_feature 1..20: note = Description of Artificial Sequence: Synthetic oligonucleotide
  misc_feature 1..20: note = Target: SCN10A; (-) strand; PAM type: NRG; PAM sequence: AAG
  source 1..20: mol_type = other DNA
ctccatcctttgaatggaag

SEQ ID NO: 14600 - DNA, 20 bp, synthetic construct
  misc_feature 1..20: note = Description of Artificial Sequence: Synthetic oligonucleotide
  misc_feature 1..20: note = Target: SCN10A; (-) strand; PAM type: NRG; PAM sequence: AAG
  source 1..20: mol_type = other DNA
attctccatcctttgaatgg

SEQ ID NO: 14601 - DNA, 20 bp, synthetic construct
  misc_feature 1..20: note = Description of Artificial Sequence: Synthetic oligonucleotide
  misc_feature 1..20: note = Target: SCN10A; (-) strand; PAM type: NRG; PAM sequence: TGG
  source 1..20: mol_type = other DNA
gagattctccatcctttgaa

SEQ ID NO: 14602 - DNA, 20 bp, synthetic construct
  misc_feature 1..20: note = Description of Artificial Sequence: Synthetic oligonucleotide
  misc_feature 1..20: note = Target: SCN10A; (-) strand; PAM type: NRG; PAM sequence: GAG
  source 1..20: mol_type = other DNA
tcataaccaattctgttcct

SEQ ID NO: 14603 - DNA, 20 bp, synthetic construct
  misc_feature 1..20: note = Description of Artificial Sequence: Synthetic oligonucleotide
  misc_feature 1..20: note = Target: SCN10A; (-) strand; PAM type: NRG; PAM sequence: AAG
  source 1..20: mol_type = other DNA
gacctccacatgtggagggg

SEQ ID NO: 14604 - DNA, 20 bp, synthetic construct
  misc_feature 1..20: note = Description of Artificial Sequence: Synthetic oligonucleotide
  misc_feature 1..20: note = Target: SCN10A; (-) strand; PAM type: NRG; PAM sequence: GGG
  source 1..20: mol_type = other DNA
ggagacctccacatgtggag

SEQ ID NO: 14605 - DNA, 20 bp, synthetic construct
  misc_feature 1..20: note = Description of Artificial Sequence: Synthetic oligonucleotide
  misc_feature 1..20: note = Target: SCN10A; (-) strand; PAM type: NRG; PAM sequence: GGG
  source 1..20: mol_type = other DNA
gggagacctccacatgtgga

SEQ ID NO: 14606 - DNA, 20 bp, synthetic construct
  misc_feature 1..20: note = Description of Artificial Sequence: Synthetic oligonucleotide
  misc_feature 1..20: note = Target: SCN10A; (-) strand; PAM type: NRG; PAM sequence: AGG
  source 1..20: mol_type = other DNA
ggggagacctccacatgtgg

SEQ ID NO: 14607 - DNA, 20 bp, synthetic construct
  misc_feature 1..20: note = Description of Artificial Sequence: Synthetic oligonucleotide
  misc_feature 1..20: note = Target: SCN10A; (-) strand; PAM type: NRG; PAM sequence: GAG
  source 1..20: mol_type = other DNA
gggggagacctccacatgtg

SEQ ID NO: 14608 - DNA, 20 bp, synthetic construct
  misc_feature 1..20: note = Description of Artificial Sequence: Synthetic oligonucleotide
  misc_feature 1..20: note = Target: SCN10A; (-) strand; PAM type: NRG; PAM sequence: TGG
  source 1..20: mol_type = other DNA
cagggggagacctccacatg

SEQ ID NO: 14609 - DNA, 20 bp, synthetic construct
  misc_feature 1..20: note = Description of Artificial Sequence: Synthetic oligonucleotide
  misc_feature 1..20: note = Target: SCN10A; (-) strand; PAM type: NRG; PAM sequence: GAG
  source 1..20: mol_type = other DNA
ctccgaggatggcacagggg

SEQ ID NO: 14610 - DNA, 20 bp, synthetic construct
  misc_feature 1..20: note = Description of Artificial Sequence: Synthetic oligonucleotide
  misc_feature 1..20: note = Target: SCN10A; (-) strand; PAM type: NRG; PAM sequence: GGG
  source 1..20: mol_type = other DNA
tcctccgaggatggcacagg

SEQ ID NO: 14611 - DNA, 20 bp, synthetic construct
  misc_feature 1..20: note = Description of Artificial Sequence: Synthetic oligonucleotide
  misc_feature 1..20: note = Target: SCN10A; (-) strand; PAM type: NRG; PAM sequence: GGG
  source 1..20: mol_type = other DNA
atcctccgaggatggcacag

SEQ ID NO: 14612 - DNA, 20 bp, synthetic construct
  misc_feature 1..20: note = Description of Artificial Sequence: Synthetic oligonucleotide
  misc_feature 1..20: note = Target: SCN10A; (-) strand; PAM type: NRG; PAM sequence: GGG
  source 1..20: mol_type = other DNA
gatcctccgaggatggcaca

SEQ ID NO: 14613 - DNA, 20 bp, synthetic construct
  misc_feature 1..20: note = Description of Artificial Sequence: Synthetic oligonucleotide
  misc_feature 1..20: note = Target: SCN10A; (-) strand; PAM type: NRG; PAM sequence: AGG
  source 1..20: mol_type = other DNA
agatcctccgaggatggcac

SEQ ID NO: 14614 - DNA, 20 bp, synthetic construct
  misc_feature 1..20: note = Description of Artificial Sequence: Synthetic oligonucleotide
  misc_feature 1..20: note = Target: SCN10A; (-) strand; PAM type: NRG; PAM sequence: CAG
  source 1..20: mol_type = other DNA
aagatcctccgaggatggca

SEQ ID NO: 14615 - DNA, 20 bp, synthetic construct
  misc_feature 1..20: note = Description of Artificial Sequence: Synthetic oligonucleotide
  misc_feature 1..20: note = Target: SCN10A; (-) strand; PAM type: NRG; PAM sequence: TGG
  source 1..20: mol_type = other DNA
caactaagatcctccgagga

SEQ ID NO: 14616 - DNA, 20 bp, synthetic construct
  misc_feature 1..20: note = Description of Artificial Sequence: Synthetic oligonucleotide
  misc_feature 1..20: note = Target: SCN10A; (-) strand; PAM type: NRG; PAM sequence: AGG
  source 1..20: mol_type = other DNA
gctgcaactaagatcctccg

SEQ ID NO: 14617 - DNA, 20 bp, synthetic construct
  misc_feature 1..20: note = Description of Artificial Sequence: Synthetic oligonucleotide
  misc_feature 1..20: note = Target: SCN10A; (-) strand; PAM type: NRG; PAM sequence: GAG
  source 1..20: mol_type = other DNA
agctgcaactaagatcctcc

SEQ ID NO: 14618 - DNA, 20 bp, synthetic construct
  misc_feature 1..20: note = Description of Artificial Sequence: Synthetic oligonucleotide
  misc_feature 1..20: note = Target: SCN10A; (-) strand; PAM type: NRG; PAM sequence: AAG
  source 1..20: mol_type = other DNA
ctcctaattaagctgcaact

SEQ ID NO: 14619 - DNA, 20 bp, synthetic construct
  misc_feature 1..20: note = Description of Artificial Sequence: Synthetic oligonucleotide
  misc_feature 1..20: note = Target: SCN10A; (-) strand; PAM type: NRG; PAM sequence: AAG
  source 1..20: mol_type = other DNA
aatcaccatttctcctaatt

SEQ ID NO: 14620 - DNA, 20 bp, synthetic construct
  misc_feature 1..20: note = Description of Artificial Sequence: Synthetic oligonucleotide
  misc_feature 1..20: note = Target: SCN10A; (-) strand; PAM type: NRG; PAM sequence: AAG
  source 1..20: mol_type = other DNA
ggagttgatggtcaggcagg

SEQ ID NO: 14621 - DNA, 20 bp, synthetic construct
  misc_feature 1..20: note = Description of Artificial Sequence: Synthetic oligonucleotide
  misc_feature 1..20: note = Target: SCN10A; (-) strand; PAM type: NRG; PAM sequence: AGG
  source 1..20: mol_type = other DNA
gacggagttgatggtcaggc

SEQ ID NO: 14622 - DNA, 20 bp, synthetic construct
  misc_feature 1..20: note = Description of Artificial Sequence: Synthetic oligonucleotide
  misc_feature 1..20: note = Target: SCN10A; (-) strand; PAM type: NRG; PAM sequence: CAG
  source 1..20: mol_type = other DNA
agacggagttgatggtcagg

SEQ ID NO: 14623 - DNA, 20 bp, synthetic construct
  misc_feature 1..20: note = Description of Artificial Sequence: Synthetic oligonucleotide
  misc_feature 1..20: note = Target: SCN10A; (-) strand; PAM type: NRG; PAM sequence: AGG
  source 1..20: mol_type = other DNA
gggagacggagttgatggtc

SEQ ID NO: 14624 - DNA, 20 bp, synthetic construct
  misc_feature 1..20: note = Description of Artificial Sequence: Synthetic oligonucleotide
  misc_feature 1..20: note = Target: SCN10A; (-) strand; PAM type: NRG; PAM sequence: CAG
  source 1..20: mol_type = other DNA
tgggagacggagttgatggt

SEQ ID NO: 14625 - DNA, 20 bp, synthetic construct
  misc_feature 1..20: note = Description of Artificial Sequence: Synthetic oligonucleotide
  misc_feature 1..20: note = Target: SCN10A; (-) strand; PAM type: NRG; PAM sequence: TGG
  source 1..20: mol_type = other DNA
ggagtgggagacggagttga

SEQ ID NO: 14626 - DNA, 20 bp, synthetic construct
  misc_feature 1..20: note = Description of Artificial Sequence: Synthetic oligonucleotide
  misc_feature 1..20: note = Target: SCN10A; (-) strand; PAM type: NRG; PAM sequence: GAG
  source 1..20: mol_type = other DNA
gtaaataggagtgggagacg

SEQ ID NO: 14627 - DNA, 20 bp, synthetic construct
  misc_feature 1..20: note = Description of Artificial Sequence: Synthetic oligonucleotide
  misc_feature 1..20: note = Target: SCN10A; (-) strand; PAM type: NRG; PAM sequence: CGG
  source 1..20: mol_type = other DNA
cagtaaataggagtgggaga

SEQ ID NO: 14628 - DNA, 20 bp, synthetic construct
  misc_feature 1..20: note = Description of Artificial Sequence: Synthetic oligonucleotide
  misc_feature 1..20: note = Target: SCN10A; (-) strand; PAM type: NRG; PAM sequence: GAG
  source 1..20: mol_type = other DNA
caggcagtaaataggagtgg

SEQ ID NO: 14629 - DNA, 20 bp, synthetic construct
  misc_feature 1..20: note = Description of Artificial Sequence: Synthetic oligonucleotide
  misc_feature 1..20: note = Target: SCN10A; (-) strand; PAM type: NRG; PAM sequence: GGG
  source 1..20: mol_type = other DNA
tccaggcagtaaataggagt

SEQ ID NO: 14630 - DNA, 20 bp, synthetic construct
  misc_feature 1..20: note = Description of Artificial Sequence: Synthetic oligonucleotide
  misc_feature 1..20: note = Target: SCN10A; (-) strand; PAM type: NRG; PAM sequence: TGG
  source 1..20: mol_type = other DNA
ttccaggcagtaaataggag

SEQ ID NO: 14631 - DNA, 20 bp, synthetic construct
  misc_feature 1..20: note = Description of Artificial Sequence: Synthetic oligonucleotide
  misc_feature 1..20: note = Target: SCN10A; (-) strand; PAM type: NRG; PAM sequence: GAG
  source 1..20: mol_type = other DNA
aaattccaggcagtaaatag

SEQ ID NO: 14632 - DNA, 20 bp, synthetic construct
  misc_feature 1..20: note = Description of Artificial Sequence: Synthetic oligonucleotide
  misc_feature 1..20: note = Target: SCN10A; (-) strand; PAM type: NRG; PAM sequence: AGG
  source 1..20: mol_type = other DNA
tgaaattccaggcagtaaat

SEQ ID NO: 14633 - DNA, 20 bp, synthetic construct
  misc_feature 1..20: note = Description of Artificial Sequence: Synthetic oligonucleotide
  misc_feature 1..20: note = Target: SCN10A; (-) strand; PAM type: NRG; PAM sequence: TAG
  source 1..20: mol_type = other DNA
ttgaaattccaggcagtaaa

SEQ ID NO: 14634 - DNA, 20 bp, synthetic construct
  misc_feature 1..20: note = Description of Artificial Sequence: Synthetic oligonucleotide
  misc_feature 1..20: note = Target: SCN10A; (-) strand; PAM type: NRG; PAM sequence: CAG
  source 1..20: mol_type = other DNA
cctaatgttgaaattccagg

SEQ ID NO: 14635 - DNA, 20 bp, synthetic construct
  misc_feature 1..20: note = Description of Artificial Sequence: Synthetic oligonucleotide
  misc_feature 1..20: note = Target: SCN10A; (-) strand; PAM type: NRG; PAM sequence: AGG
  source 1..20: mol_type = other DNA
gaccctaatgttgaaattcc

SEQ ID NO: 14636 - DNA, 20 bp, synthetic construct
  misc_feature 1..20: note = Description of Artificial Sequence: Synthetic oligonucleotide
  misc_feature 1..20: note = Target: SCN10A; (-) strand; PAM type: NRG; PAM sequence: CAG
  source 1..20: mol_type = other DNA
tgaccctaatgttgaaattc

SEQ ID NO: 14637 - DNA, 20 bp, synthetic construct
  misc_feature 1..20: note = Description of Artificial Sequence: Synthetic oligonucleotide
  misc_feature 1..20: note = Target: SCN10A; (-) strand; PAM type: NRG; PAM sequence: AGG
  source 1..20: mol_type = other DNA
gagagggcatctacctacaa

SEQ ID NO: 14638 - DNA, 20 bp, synthetic construct
  misc_feature 1..20: note = Description of Artificial Sequence: Synthetic oligonucleotide
  misc_feature 1..20: note = Target: SCN10A; (-) strand; PAM type: NRG; PAM sequence: AAG
  source 1..20: mol_type = other DNA
ggagagggcatctacctaca

SEQ ID NO: 14639 - DNA, 20 bp, synthetic construct
  misc_feature 1..20: note = Description of Artificial Sequence: Synthetic oligonucleotide
  misc_feature 1..20: note = Target: SCN10A; (-) strand; PAM type: NRG; PAM sequence: GGG
  source 1..20: mol_type = other DNA
tcaaaaagggaccctggaga

SEQ ID NO: 14640 - DNA, 20 bp, synthetic construct
  misc_feature 1..20: note = Description of Artificial Sequence: Synthetic oligonucleotide
  misc_feature 1..20: note = Target: SCN10A; (-) strand; PAM type: NRG; PAM sequence: AGG
  source 1..20: mol_type = other DNA
ttcaaaaagggaccctggag

SEQ ID NO: 14641 - DNA, 20 bp, synthetic construct
  misc_feature 1..20: note = Description of Artificial Sequence: Synthetic oligonucleotide
  misc_feature 1..20: note = Target: SCN10A; (-) strand; PAM type: NRG; PAM sequence: GAG
  source 1..20: mol_type = other DNA
tttcaaaaagggaccctgga

SEQ ID NO: 14642 - DNA, 20 bp, synthetic construct
  misc_feature 1..20: note = Description of Artificial Sequence: Synthetic oligonucleotide
  misc_feature 1..20: note = Target: SCN10A; (-) strand; PAM type: NRG; PAM sequence: GAG
  source 1..20: mol_type = other DNA
tatttcaaaaagggaccctg

SEQ ID NO: 14643 - DNA, 20 bp, synthetic construct
  misc_feature 1..20: note = Description of Artificial Sequence: Synthetic oligonucleotide
  misc_feature 1..20: note = Target: SCN10A; (-) strand; PAM type: NRG; PAM sequence: TGG
  source 1..20: mol_type = other DNA
catatttcaaaaagggaccc

SEQ ID NO: 14644 - DNA, 20 bp, synthetic construct
  misc_feature 1..20: note = Description of Artificial Sequence: Synthetic oligonucleotide
  misc_feature 1..20: note = Target: SCN10A; (-) strand; PAM type: NRG; PAM sequence: GGG
  source 1..20: mol_type = other DNA
gataaatcatatttcaaaaa

SEQ ID NO: 14645 - DNA, 20 bp, synthetic construct
  misc_feature 1..20: note = Description of Artificial Sequence: Synthetic oligonucleotide
  misc_feature 1..20: note = Target: SCN10A; (-) strand; PAM type: NRG; PAM sequence: AGG
  source 1..20: mol_type = other DNA
agataaatcatatttcaaaa

SEQ ID NO: 14646 - DNA, 20 bp, synthetic construct
  misc_feature 1..20: note = Description of Artificial Sequence: Synthetic oligonucleotide
  misc_feature 1..20: note = Target: SCN10A; (-) strand; PAM type: NRG; PAM sequence: AAG
  source 1..20: mol_type = other DNA
aagataaatcatatttcaaa

SEQ ID NO: 14647 - DNA, 20 bp, synthetic construct
  misc_feature 1..20: note = Description of Artificial Sequence: Synthetic oligonucleotide
  misc_feature 1..20: note = Target: SCN10A; (-) strand; PAM type: NRG; PAM sequence: AAG
  source 1..20: mol_type = other DNA
gaagacaacattcttaggac

SEQ ID NO: 14648 - DNA, 20 bp, synthetic construct
  misc_feature 1..20: note = Description of Artificial Sequence: Synthetic oligonucleotide
  misc_feature 1..20: note = Target: SCN10A; (-) strand; PAM type: NRG; PAM sequence: AGG
  source 1..20: mol_type = other DNA
tcaaggaagacaacattctt

SEQ ID NO: 14649 - DNA, 20 bp, synthetic construct
  misc_feature 1..20: note = Description of Artificial Sequence: Synthetic oligonucleotide
  misc_feature 1..20: note = Target: SCN10A; (-) strand; PAM type: NRG; PAM sequence: TAG
  source 1..20: mol_type = other DNA
ctcaaggaagacaacattct

SEQ ID NO: 14650 - DNA, 20 bp, synthetic construct
  misc_feature 1..20: note = Description of Artificial Sequence: Synthetic oligonucleotide
  misc_feature 1..20: note = Target: SCN10A; (-) strand; PAM type: NRG; PAM sequence: AAG
  source 1..20: mol_type = other DNA
aaagcttcctcccctcaagg

SEQ ID NO: 14651 - DNA, 20 bp, synthetic construct
  misc_feature 1..20: note = Description of Artificial Sequence: Synthetic oligonucleotide
  misc_feature 1..20: note = Target: SCN10A; (-) strand; PAM type: NRG; PAM sequence: AGG
  source 1..20: mol_type = other DNA
aagaaagcttcctcccctca

SEQ ID NO: 14652 - DNA, 20 bp, synthetic construct
  misc_feature 1..20: note = Description of Artificial Sequence: Synthetic oligonucleotide
  misc_feature 1..20: note = Target: SCN10A; (-) strand; PAM type: NRG; PAM sequence: AAG
  source 1..20: mol_type = other DNA
aaagaaagcttcctcccctc

SEQ ID NO: 14653 - DNA, 20 bp, synthetic construct
  misc_feature 1..20: note = Description of Artificial Sequence: Synthetic oligonucleotide
  misc_feature 1..20: note = Target: SCN10A; (-) strand; PAM type: NRG; PAM sequence: AAG
  source 1..20: mol_type = other DNA
accccataggctgccaaaga

SEQ ID NO: 14654 - DNA, 20 bp, synthetic construct
  misc_feature 1..20: note = Description of Artificial Sequence: Synthetic oligonucleotide
  misc_feature 1..20: note = Target: SCN10A; (-) strand; PAM type: NRG; PAM sequence: AAG
  source 1..20: mol_type = other DNA
cccaaccccataggctgcca

SEQ ID NO: 14655 - DNA, 20 bp, synthetic construct
  misc_feature 1..20: note = Description of Artificial Sequence: Synthetic oligonucleotide
  misc_feature 1..20: note = Target: SCN10A; (-) strand; PAM type: NRG; PAM sequence: AGG
  source 1..20: mol_type = other DNA
ctgtcatcacccaaccccat

SEQ ID NO: 14656 - DNA, 20 bp, synthetic construct
  misc_feature 1..20: note = Description of Artificial Sequence: Synthetic oligonucleotide
  misc_feature 1..20: note = Target: SCN10A; (-) strand; PAM type: NRG; PAM sequence: TAG
  source 1..20: mol_type = other DNA
cctgtcatcacccaacccca

SEQ ID NO: 14657 - DNA, 20 bp, synthetic construct
  misc_feature 1..20: note = Description of Artificial Sequence: Synthetic oligonucleotide
  misc_feature 1..20: note = Target: SCN10A; (-) strand; PAM type: NRG; PAM sequence: CAG
  source 1..20: mol_type = other DNA
tcaatctctctttgacatcc

SEQ ID NO: 14658 - DNA, 20 bp, synthetic construct
  misc_feature 1..20: note = Description of Artificial Sequence: Synthetic oligonucleotide
  misc_feature 1..20: note = Target: SCN10A; (-) strand; PAM type: NRG; PAM sequence: TGG
  source 1..20: mol_type = other DNA
ggcaaaaacatgaaagtttt

SEQ ID NO: 14659 - DNA, 20 bp, synthetic construct
  misc_feature 1..20: note = Description of Artificial Sequence: Synthetic oligonucleotide
  misc_feature 1..20: note = Target: SCN10A; (-) strand; PAM type: NRG; PAM sequence: AAG
  source 1..20: mol_type = other DNA
aacccttggcaaaaacatga

SEQ ID NO: 14660 - DNA, 20 bp, synthetic construct
  misc_feature 1..20: note = Description of Artificial Sequence: Synthetic oligonucleotide
  misc_feature 1..20: note = Target: SCN10A; (-) strand; PAM type: NRG; PAM sequence: TGG
  source 1..20: mol_type = other DNA
tgtgtgctagggacaaccct

SEQ ID NO: 14661 - DNA, 20 bp, synthetic construct
  misc_feature 1..20: note = Description of Artificial Sequence: Synthetic oligonucleotide
  misc_feature 1..20: note = Target: SCN10A; (-) strand; PAM type: NRG; PAM sequence: GGG
  source 1..20: mol_type = other DNA
tgccaaggaggtgtgtgcta

SEQ ID NO: 14662 - DNA, 20 bp, synthetic construct
  misc_feature 1..20: note = Description of Artificial Sequence: Synthetic oligonucleotide
  misc_feature 1..20: note = Target: SCN10A; (-) strand; PAM type: NRG; PAM sequence: AGG
  source 1..20: mol_type = other DNA
atgccaaggaggtgtgtgct

SEQ ID NO: 14663 - DNA, 20 bp, synthetic construct
  misc_feature 1..20: note = Description of Artificial Sequence: Synthetic oligonucleotide
  misc_feature 1..20: note = Target: SCN10A; (-) strand; PAM type: NRG; PAM sequence: TAG
  source 1..20: mol_type = other DNA
gatgccaaggaggtgtgtgc

SEQ ID NO: 14664 - DNA, 20 bp, synthetic construct
  misc_feature 1..20: note = Description of Artificial Sequence: Synthetic oligonucleotide
  misc_feature 1..20: note = Target: SCN10A; (-) strand; PAM type: NRG; PAM sequence: AGG
  source 1..20: mol_type = other DNA
atttgagccagatgccaagg

SEQ ID NO: 14665 - DNA, 20 bp, synthetic construct
  misc_feature 1..20: note = Description of Artificial Sequence: Synthetic oligonucleotide
  misc_feature 1..20: note = Target: SCN10A; (-) strand; PAM type: NRG; PAM sequence: GAG
  source 1..20: mol_type = other DNA
catttgagccagatgccaag

SEQ ID NO: 14666 - DNA, 20 bp, synthetic construct
  misc_feature 1..20: note = Description of Artificial Sequence: Synthetic oligonucleotide
  misc_feature 1..20: note = Target: SCN10A; (-) strand; PAM type: NRG; PAM sequence: AGG
  source 1..20: mol_type = other DNA
cacatttgagccagatgcca

SEQ ID NO: 14667 - DNA, 20 bp, synthetic construct
  misc_feature 1..20: note = Description of Artificial Sequence: Synthetic oligonucleotide
  misc_feature 1..20: note = Target: SCN10A; (-) strand; PAM type: NRG; PAM sequence: AAG
  source 1..20: mol_type = other DNA
ccacatttgagccagatgcc

SEQ ID NO: 14668 - DNA, 20 bp, synthetic construct
  misc_feature 1..20: note = Description of Artificial Sequence: Synthetic oligonucleotide
  misc_feature 1..20: note = Target: SCN10A; (-) strand; PAM type: NRG; PAM sequence: CAG
  source 1..20: mol_type = other DNA
gattgaatccacatttgagc

SEQ ID NO: 14669 - DNA, 20 bp, synthetic construct
  misc_feature 1..20: note = Description of Artificial Sequence: Synthetic oligonucleotide
  misc_feature 1..20: note = Target: SCN10A; (-) strand; PAM type: NRG; PAM sequence: GAG
  source 1..20: mol_type = other DNA
gtaagattgaatccacattt

SEQ ID NO: 14670 - DNA, 20 bp, synthetic construct
  misc_feature 1..20: note = Description of Artificial Sequence: Synthetic oligonucleotide
  misc_feature 1..20: note = Target: SCN10A; (-) strand; PAM type: NRG; PAM sequence: AAG
  source 1..20: mol_type = other DNA
cctttacttgtggctggagt

SEQ ID NO: 14671 - DNA, 20 bp, synthetic construct
  misc_feature 1..20: note = Description of Artificial Sequence: Synthetic oligonucleotide
  misc_feature 1..20: note = Target: SCN10A; (-) strand; PAM type: NRG; PAM sequence: GAG
  source 1..20: mol_type = other DNA
ctggcctttacttgtggctg

SEQ ID NO: 14672 - DNA, 20 bp, synthetic construct
  misc_feature 1..20: note = Description of Artificial Sequence: Synthetic oligonucleotide
  misc_feature 1..20: note = Target: SCN10A; (-) strand; PAM type: NRG; PAM sequence: TGG
  source 1..20: mol_type = other DNA
cactggcctttacttgtggc

SEQ ID NO: 14673 - DNA, 20 bp, synthetic construct
  misc_feature 1..20: note = Description of Artificial Sequence: Synthetic oligonucleotide
  misc_feature 1..20: note = Target: SCN10A; (-) strand; PAM type: NRG; PAM sequence: TGG
  source 1..20: mol_type = other DNA
tccacactggcctttacttg

SEQ ID NO: 14674 - DNA, 20 bp, synthetic construct
  misc_feature 1..20: note = Description of Artificial Sequence: Synthetic oligonucleotide
  misc_feature 1..20: note = Target: SCN10A; (-) strand; PAM type: NRG; PAM sequence: TGG
  source 1..20: mol_type = other DNA
gcaagcagctgagtccacac

SEQ ID NO: 14675 - DNA, 20 bp, synthetic construct
  misc_feature 1..20: note = Description of Artificial Sequence: Synthetic oligonucleotide
  misc_feature 1..20: note = Target: SCN10A; (-) strand; PAM type: NRG; PAM sequence: GAG
  source 1..20: mol_type = other DNA
ttactgagaagcaagcagct

SEQ ID NO: 14676 - DNA, 20 bp, synthetic construct
  misc_feature 1..20: note = Description of Artificial Sequence: Synthetic oligonucleotide
  misc_feature 1..20: note = Target: SCN10A; (-) strand; PAM type: NRG; PAM sequence: CAG
  source 1..20: mol_type = other DNA
aagacttactgagaagcaag

SEQ ID NO: 14677 - DNA, 20 bp, synthetic construct
  misc_feature 1..20: note = Description of Artificial Sequence: Synthetic oligonucleotide
  misc_feature 1..20: note = Target: SCN10A; (-) strand; PAM type: NRG; PAM sequence: AAG
  source 1..20: mol_type = other DNA
cctaagacttactgagaagc

SEQ ID NO: 14678 - DNA, 20 bp, synthetic construct
  misc_feature 1..20: note = Description of Artificial Sequence: Synthetic oligonucleotide
  misc_feature 1..20: note = Target: SCN10A; (-) strand; PAM type: NRG; PAM sequence: AAG
  source 1..20: mol_type = other DNA
ggaccctaagacttactgag

SEQ ID NO: 14679 - DNA, 20 bp, synthetic construct
  misc_feature 1..20: note = Description of Artificial Sequence: Synthetic oligonucleotide
  misc_feature 1..20: note = Target: SCN10A; (-) strand; PAM type: NRG; PAM sequence: GAG
  source 1..20: mol_type = other DNA
ggaggaccctaagacttact

SEQ ID NO: 14680 - DNA, 20 bp, synthetic construct
  misc_feature 1..20: note = Description of Artificial Sequence: Synthetic oligonucleotide
  misc_feature 1..20: note = Target: SCN10A; (-) strand; PAM type: NRG; PAM sequence: AAG
  source 1..20: mol_type = other DNA
ggtaatgagaggaggaccct

SEQ ID NO: 14681 - DNA, 20 bp, synthetic construct
  misc_feature 1..20: note = Description of Artificial Sequence: Synthetic oligonucleotide
  misc_feature 1..20: note = Target: SCN10A; (-) strand; PAM type: NRG; PAM sequence: AGG
  source 1..20: mol_type = other DNA
aagtcatgggtaatgagagg

SEQ ID NO: 14682 - DNA, 20 bp, synthetic construct
  misc_feature 1..20: note = Description of Artificial Sequence: Synthetic oligonucleotide
  misc_feature 1..20: note = Target: SCN10A; (-) strand; PAM type: NRG; PAM sequence: GAG
  source 1..20: mol_type = other DNA
caagtcatgggtaatgagag

SEQ ID NO: 14683 - DNA, 20 bp, synthetic construct
  misc_feature 1..20: note = Description of Artificial Sequence: Synthetic oligonucleotide
  misc_feature 1..20: note = Target: SCN10A; (-) strand; PAM type: NRG; PAM sequence: AGG
  source 1..20: mol_type = other DNA
ttcaagtcatgggtaatgag

SEQ ID NO: 14684 - DNA, 20 bp, synthetic construct
  misc_feature 1..20: note = Description of Artificial Sequence: Synthetic oligonucleotide
  misc_feature 1..20: note = Target: SCN10A; (-) strand; PAM type: NRG; PAM sequence: GAG
  source 1..20: mol_type = other DNA
attcaagtcatgggtaatga

SEQ ID NO: 14685 - DNA, 20 bp, synthetic construct
  misc_feature 1..20: note = Description of Artificial Sequence: Synthetic oligonucleotide
  misc_feature 1..20: note = Target: SCN10A; (-) strand; PAM type: NRG; PAM sequence: GAG
  source 1..20: mol_type = other DNA
acattcaagtcatgggtaat

SEQ ID NO: 14686 - DNA, 20 bp, synthetic construct
  misc_feature 1..20: note = Description of Artificial Sequence: Synthetic oligonucleotide
  misc_feature 1..20: note = Target: SCN10A; (-) strand; PAM type: NRG; PAM sequence: GGG
  source 1..20: mol_type = other DNA
cccaaccacattcaagtcat

SEQ ID NO: 14687 - DNA, 20 bp, synthetic construct
  misc_feature 1..20: note = Description of Artificial Sequence: Synthetic oligonucleotide
  misc_feature 1..20: note = Target: SCN10A; (-) strand; PAM type: NRG; PAM sequence: TGG
  source 1..20: mol_type = other DNA
tcccaaccacattcaagtca

SEQ ID NO: 14688 - DNA, 20 bp, synthetic construct
  misc_feature 1..20: note = Description of Artificial Sequence: Synthetic oligonucleotide
  misc_feature 1..20: note = Target: SCN10A; (-) strand; PAM type: NRG; PAM sequence: AAG
  source 1..20: mol_type = other DNA
gctgagtcccaaccacattc

SEQ ID NO: 14689 - DNA, 20 bp, synthetic construct
  misc_feature 1..20: note = Description of Artificial Sequence: Synthetic oligonucleotide
  misc_feature 1..20: note = Target: SCN10A; (-) strand; PAM type: NRG; PAM sequence: GAG
  source 1..20: mol_type = other DNA
ttaaaattaggtgaaaggct

SEQ ID NO: 14690 - DNA, 20 bp, synthetic construct
  misc_feature 1..20: note = Description of Artificial Sequence: Synthetic oligonucleotide
  misc_feature 1..20: note = Target: SCN10A; (-) strand; PAM type: NRG; PAM sequence: AGG
  source 1..20: mol_type = other DNA
caaaattaaaattaggtgaa

SEQ ID NO: 14691 - DNA, 20 bp, synthetic construct
  misc_feature 1..20: note = Description of Artificial Sequence: Synthetic oligonucleotide
  misc_feature 1..20: note = Target: SCN10A; (-) strand; PAM type: NRG; PAM sequence: AAG
  source 1..20: mol_type = other DNA
tcaaaattaaaattaggtga

SEQ ID NO: 14692 - DNA, 20 bp, synthetic construct
  misc_feature 1..20: note = Description of Artificial Sequence: Synthetic oligonucleotide
  misc_feature 1..20: note = Target: SCN10A; (-) strand; PAM type: NRG; PAM sequence: AGG
  source 1..20: mol_type = other DNA
gcaggctcaaaattaaaatt

SEQ ID NO: 14693 - DNA, 20 bp, synthetic construct
  misc_feature 1..20: note = Description of Artificial Sequence: Synthetic oligonucleotide
  misc_feature 1..20: note = Target: SCN10A; (-) strand; PAM type: NRG; PAM sequence: TAG
  source 1..20: mol_type = other DNA
agcaggctcaaaattaaaat

SEQ ID NO: 14694 - DNA, 20 bp, synthetic construct
  misc_feature 1..20: note = Description of Artificial Sequence: Synthetic oligonucleotide
  misc_feature 1..20: note = Target: SCN10A; (-) strand; PAM type: NRG; PAM sequence: AGG
  source 1..20: mol_type = other DNA
caagttcagtggagaggagc

SEQ ID NO: 14695 - DNA, 20 bp, synthetic construct
  misc_feature 1..20: note = Description of Artificial Sequence: Synthetic oligonucleotide
  misc_feature 1..20: note = Target: SCN10A; (-) strand; PAM type: NRG; PAM sequence: CAG
  source 1..20: mol_type = other DNA
acaagttcagtggagaggag

SEQ ID NO: 14696 - DNA, 20 bp, synthetic construct
  misc_feature 1..20: note = Description of Artificial Sequence: Synthetic oligonucleotide
  misc_feature 1..20: note = Target: SCN10A; (-) strand; PAM type: NRG; PAM sequence: GAG
  source 1..20: mol_type = other DNA
tcaacaagttcagtggagag

SEQ ID NO: 14697 - DNA, 20 bp, synthetic construct
  misc_feature 1..20: note = Description of Artificial Sequence: Synthetic oligonucleotide
  misc_feature 1..20: note = Target: SCN10A; (-) strand; PAM type: NRG; PAM sequence: AGG
  source 1..20: mol_type = other DNA
catcaacaagttcagtggag

SEQ ID NO: 14698 - DNA, 20 bp, synthetic construct
  misc_feature 1..20: note = Description of Artificial Sequence: Synthetic oligonucleotide
  misc_feature 1..20: note = Target: SCN10A; (-) strand; PAM type: NRG; PAM sequence: GAG
  source 1..20: mol_type = other DNA
ccatcaacaagttcagtgga

SEQ ID NO: 14699 - DNA, 20 bp, synthetic construct
  misc_feature 1..20: note = Description of Artificial Sequence: Synthetic oligonucleotide
  misc_feature 1..20: note = Target: SCN10A; (-) strand; PAM type: NRG; PAM sequence: GAG
  source 1..20: mol_type = other DNA
ctccatcaacaagttcagtg

SEQ ID NO: 14700 - DNA, 20 bp, synthetic construct
  misc_feature 1..20: note = Description of Artificial Sequence: Synthetic oligonucleotide
  misc_feature 1..20: note = Target: SCN10A; (-) strand; PAM type: NRG; PAM sequence: TGG
  source 1..20: mol_type = other DNA
ccctccatcaacaagttcag

SEQ ID NO: 14701 - DNA, 20 bp, synthetic construct
  misc_feature 1..20: note = Description of Artificial Sequence: Synthetic oligonucleotide
  misc_feature 1..20: note = Target: SCN10A; (-) strand; PAM type: NRG; PAM sequence: CAG
  source 1..20: mol_type = other DNA
tatccctccatcaacaagtt

SEQ ID NO: 14702 - DNA, 20 bp, synthetic construct
  misc_feature 1..20: note = Description of Artificial Sequence: Synthetic oligonucleotide
  misc_feature 1..20: note = Target: SCN10A; (-) strand; PAM type: NRG; PAM sequence: AAG
  source 1..20: mol_type = other DNA
ttgagtatccctccatcaac

SEQ ID NO: 14703 - DNA, 20 bp, synthetic construct
  misc_feature 1..20: note = Description of Artificial Sequence: Synthetic oligonucleotide
  misc_feature 1..20: note = Target: SCN10A; (-) strand; PAM type: NRG; PAM sequence: GAG
  source 1..20: mol_type = other DNA
caaaagtccttaggctcatt

SEQ ID NO: 14704 - DNA, 20 bp, synthetic construct
  misc_feature 1..20: note = Description of Artificial Sequence: Synthetic oligonucleotide
  misc_feature 1..20: note = Target: SCN10A; (-) strand; PAM type: NRG; PAM sequence: AGG
  source 1..20: mol_type = other DNA
gaacctgagcaaaagtcctt

SEQ ID NO: 14705 - DNA, 20 bp, synthetic construct
  misc_feature 1..20: note = Description of Artificial Sequence: Synthetic oligonucleotide
  misc_feature 1..20: note = Target: SCN10A; (-) strand; PAM type: NRG; PAM sequence: TAG
  source 1..20: mol_type = other DNA
tgaacctgagcaaaagtcct

SEQ ID NO: 14706 - DNA, 20 bp, synthetic construct
  misc_feature 1..20: note = Description of Artificial Sequence: Synthetic oligonucleotide
  misc_feature 1..20: note = Target: SCN10A; (-) strand; PAM type: NRG; PAM sequence: AAG
  source 1..20: mol_type = other DNA
atttgagtgaacctgagcaa

SEQ ID NO: 14707 - DNA, 20 bp, synthetic construct
  misc_feature 1..20: note = Description of Artificial Sequence: Synthetic oligonucleotide
  misc_feature 1..20: note = Target: SCN10A; (-) strand; PAM type: NRG; PAM sequence: GAG
  source 1..20: mol_type = other DNA
aactggatttgagtgaacct

SEQ ID NO: 14708 - DNA, 20 bp, synthetic construct
  misc_feature 1..20: note = Description of Artificial Sequence: Synthetic oligonucleotide
  misc_feature 1..20: note = Target: SCN10A; (-) strand; PAM type: NRG; PAM sequence: GAG
  source 1..20: mol_type = other DNA
caatcaagataactggattt

SEQ ID NO: 14709 - DNA, 20 bp, synthetic construct
  misc_feature 1..20: note = Description of Artificial Sequence: Synthetic oligonucleotide
  misc_feature 1..20: note = Target: SCN10A; (-) strand; PAM type: NRG; PAM sequence: TGG
  source 1..20: mol_type = other DNA
acccatacaatcaagataac

SEQ ID NO: 14710 - DNA, 20 bp, synthetic construct
  misc_feature 1..20: note = Description of Artificial Sequence: Synthetic oligonucleotide
  misc_feature 1..20: note = Target: SCN10A; (-) strand; PAM type: NRG; PAM sequence: AAG
  source 1..20: mol_type = other DNA
cctaaatcacccatacaatc

SEQ ID NO: 14711 - DNA, 20 bp, synthetic construct
  misc_feature 1..20: note = Description of Artificial Sequence: Synthetic oligonucleotide
  misc_feature 1..20: note = Target: SCN10A; (-) strand; PAM type: NRG; PAM sequence: CAG
  source 1..20: mol_type = other DNA
ttcagacctctgtaggggca

SEQ ID NO: 14712 - DNA, 20 bp, synthetic construct
  misc_feature 1..20: note = Description of Artificial Sequence: Synthetic oligonucleotide
  misc_feature 1..20: note = Target: SCN10A; (-) strand; PAM type: NRG; PAM sequence: GGG
  source 1..20: mol_type = other DNA
ggaggttcagacctctgtag

SEQ ID NO: 14713 - DNA, 20 bp, synthetic construct
  misc_feature 1..20: note = Description of Artificial Sequence: Synthetic oligonucleotide
  misc_feature 1..20: note = Target: SCN10A; (-) strand; PAM type: NRG; PAM sequence: GGG
  source 1..20: mol_type = other DNA
aggaggttcagacctctgta

SEQ ID NO: 14714 - DNA, 20 bp, synthetic construct
  misc_feature 1..20: note = Description of Artificial Sequence: Synthetic oligonucleotide
  misc_feature 1..20: note = Target: SCN10A; (-) strand; PAM type: NRG; PAM sequence: AGG
  source 1..20: mol_type = other DNA
taggaggttcagacctctgt

SEQ ID NO: 14715 - DNA, 20 bp, synthetic construct
  misc_feature 1..20: note = Description of Artificial Sequence: Synthetic oligonucleotide
  misc_feature 1..20: note = Target: SCN10A; (-) strand; PAM type: NRG; PAM sequence: TAG
  source 1..20: mol_type = other DNA
ataggaggttcagacctctg

SEQ ID NO: 14716 - DNA, 20 bp, synthetic construct
  misc_feature 1..20: note = Description of Artificial Sequence: Synthetic oligonucleotide
  misc_feature 1..20: note = Target: SCN10A; (-) strand; PAM type: NRG; PAM sequence: CAG
  source 1..20: mol_type = other DNA
gtggggagtgataggaggtt

SEQ ID NO: 14717 - DNA, 20 bp, synthetic construct
  misc_feature 1..20: note = Description of Artificial Sequence: Synthetic oligonucleotide
  misc_feature 1..20: note = Target: SCN10A; (-) strand; PAM type: NRG; PAM sequence: AGG
  source 1..20: mol_type = other DNA
ggggagtggggagtgatagg

SEQ ID NO: 14718 - DNA, 20 bp, synthetic construct
  misc_feature 1..20: note = Description of Artificial Sequence: Synthetic oligonucleotide
  misc_feature 1..20: note = Target: SCN10A; (-) strand; PAM type: NRG; PAM sequence: GAG
  source 1..20: mol_type = other DNA
tggggagtggggagtgatag

SEQ ID NO: 14719 - DNA, 20 bp, synthetic construct
  misc_feature 1..20: note = Description of Artificial Sequence: Synthetic oligonucleotide
  misc_feature 1..20: note = Target: SCN10A; (-) strand; PAM type: NRG; PAM sequence: AGG
  source 1..20: mol_type = other DNA
aatggggagtggggagtgat

SEQ ID NO: 14720 - DNA, 20 bp, synthetic construct
  misc_feature 1..20: note = Description of Artificial Sequence: Synthetic oligonucleotide
  misc_feature 1..20: note = Target: SCN10A; (-) strand; PAM type: NRG; PAM sequence: TAG
  source 1..20: mol_type = other DNA
caatggggagtggggagtga

SEQ ID NO: 14721 - DNA, 20 bp, synthetic construct
  misc_feature 1..20: note = Description of Artificial Sequence: Synthetic oligonucleotide
  misc_feature 1..20: note = Target: SCN10A; (-) strand; PAM type: NRG; PAM sequence: GAG
  source 1..20: mol_type = other DNA
gtattacaatggggagtggg

SEQ ID NO: 14722 - DNA, 20 bp, synthetic construct
  misc_feature 1..20: note = Description of Artificial Sequence: Synthetic oligonucleotide
  misc_feature 1..20: note = Target: SCN10A; (-) strand; PAM type: NRG; PAM sequence: GGG
  source 1..20: mol_type = other DNA
aagtattacaatggggagtg

SEQ ID NO: 14723 - DNA, 20 bp, synthetic construct
  misc_feature 1..20: note = Description of Artificial Sequence: Synthetic oligonucleotide
  misc_feature 1..20: note = Target: SCN10A; (-) strand; PAM type: NRG; PAM sequence: GGG
  source 1..20: mol_type = other DNA
gaagtattacaatggggagt

SEQ ID NO: 14724 - DNA, 20 bp, synthetic construct
  misc_feature 1..20: note = Description of Artificial Sequence: Synthetic oligonucleotide
  misc_feature 1..20: note = Target: SCN10A; (-) strand; PAM type: NRG; PAM sequence: TGG
  source 1..20: mol_type = other DNA
agaagtattacaatggggag

SEQ ID NO: 14725 - DNA, 20 bp, synthetic construct
  misc_feature 1..20: note = Description of Artificial Sequence: Synthetic oligonucleotide
  misc_feature 1..20: note = Target: SCN10A; (-) strand; PAM type: NRG; PAM sequence: GAG
  source 1..20: mol_type = other DNA
ataagaagtattacaatggg

SEQ ID NO: 14726 - DNA, 20 bp, synthetic construct
  misc_feature 1..20: note = Description of Artificial Sequence: Synthetic oligonucleotide
  misc_feature 1..20: note = Target: SCN10A; (-) strand; PAM type: NRG; PAM sequence: GGG
  source 1..20: mol_type = other DNA
tgataagaagtattacaatg

SEQ ID NO: 14727 - DNA, 20 bp, synthetic construct
  misc_feature 1..20: note = Description of Artificial Sequence: Synthetic oligonucleotide
  misc_feature 1..20: note = Target: SCN10A; (-) strand; PAM type: NRG; PAM sequence: GGG
  source 1..20: mol_type = other DNA
ctgataagaagtattacaat

SEQ ID NO: 14728 - DNA, 20 bp, synthetic construct
  misc_feature 1..20: note = Description of Artificial Sequence: Synthetic oligonucleotide
  misc_feature 1..20: note = Target: SCN10A; (-) strand; PAM type: NRG; PAM sequence: TGG
  source 1..20: mol_type = other DNA
tctgataagaagtattacaa

SEQ ID NO: 14729 - DNA, 20 bp, synthetic construct
  misc_feature 1..20: note = Description of Artificial Sequence: Synthetic oligonucleotide
  misc_feature 1..20: note = Target: SCN10A; (-) strand; PAM type: NRG; PAM sequence: AAG
  source 1..20: mol_type = other DNA
ctagtctagattctgataag

SEQ ID NO: 14730 - DNA, 20 bp, synthetic construct
  misc_feature 1..20: note = Description of Artificial Sequence: Synthetic oligonucleotide
  misc_feature 1..20: note = Target: SCN10A; (-) strand; PAM type: NRG; PAM sequence: AAG
  source 1..20: mol_type = other DNA
ttactagtctagattctgat

SEQ ID NO: 14731 - DNA, 20 bp, synthetic construct
  misc_feature 1..20: note = Description of Artificial Sequence: Synthetic oligonucleotide
  misc_feature 1..20: note = Target: SCN10A; (-) strand; PAM type: NRG; PAM sequence: TAG
  source 1..20: mol_type = other DNA
tcatgaatttattactagtc

SEQ ID NO: 14732 - DNA, 20 bp, synthetic construct
  misc_feature 1..20: note = Description of Artificial Sequence: Synthetic oligonucleotide
  misc_feature 1..20: note = Target: SCN10A; (-) strand; PAM type: NRG; PAM sequence: TAG
  source 1..20: mol_type = other DNA
agtggtcatgaatttattac

SEQ ID NO: 14733 - DNA, 20 bp, synthetic construct
  misc_feature 1..20: note = Description of Artificial Sequence: Synthetic oligonucleotide
  misc_feature 1..20: note = Target: SCN10A; (-) strand; PAM type: NRG; PAM sequence: TGG
  source 1..20: mol_type = other DNA
gacactgtattttgaaatag

SEQ ID NO: 14734 - DNA, 20 bp, synthetic construct
  misc_feature 1..20: note = Description of Artificial Sequence: Synthetic oligonucleotide
  misc_feature 1..20: note = Target: SCN10A; (-) strand; PAM type: NRG; PAM sequence: TAG
  source 1..20: mol_type = other DNA
tttgacactgtattttgaaa

SEQ ID NO: 14735 - DNA, 20 bp, synthetic construct
  misc_feature 1..20: note = Description of Artificial Sequence: Synthetic oligonucleotide
  misc_feature 1..20: note = Target: SCN10A; (-) strand; PAM type: NRG; PAM sequence: AAG
  source 1..20: mol_type = other DNA
aaaacatttacaagagaaaa

SEQ ID NO: 14736 - DNA, 20 bp, synthetic construct
  misc_feature 1..20: note = Description of Artificial Sequence: Synthetic oligonucleotide
  misc_feature 1..20: note = Target: SCN10A; (-) strand; PAM type: NRG; PAM sequence: GAG
  source 1..20: mol_type = other DNA
aaagtgaaaaacatttacaa

SEQ ID NO: 14737 - DNA, 20 bp, synthetic construct
  misc_feature 1..20: note = Description of Artificial Sequence: Synthetic oligonucleotide
  misc_feature 1..20: note = Target: SCN10A; (-) strand; PAM type: NRG; PAM sequence: AAG
  source 1..20: mol_type = other DNA
acaaagtgaaaaacatttac

SEQ ID NO: 14738 - DNA, 20 bp, synthetic construct
  misc_feature 1..20: note = Description of Artificial Sequence: Synthetic oligonucleotide
  misc_feature 1..20: note = Target: SCN10A; (-) strand; PAM type: NRG; PAM sequence: AAG
  source 1..20: mol_type = other DNA
cttcaaactttgtcagaaca

SEQ ID NO: 14739 - DNA, 20 bp, synthetic construct
  misc_feature 1..20: note = Description of Artificial Sequence: Synthetic oligonucleotide
  misc_feature 1..20: note = Target: SCN10A; (-) strand; PAM type: NRG; PAM sequence: CAG
  source 1..20: mol_type = other DNA
taatttacttcaaactttgt

SEQ ID NO: 14740 - DNA, 20 bp, synthetic construct
  misc_feature 1..20: note = Description of Artificial Sequence: Synthetic oligonucleotide
  misc_feature 1..20: note = Target: SCN10A; (-) strand; PAM type: NRG; PAM sequence: AGG
  source 1..20: mol_type = other DNA
atttttttaaatcaaggtat

SEQ ID NO: 14741 - DNA, 20 bp, synthetic construct
  misc_feature 1..20: note = Description of Artificial Sequence: Synthetic oligonucleotide
  misc_feature 1..20: note = Target: SCN10A; (-) strand; PAM type: NRG; PAM sequence: TAG
  source 1..20: mol_type = other DNA
gatttttttaaatcaaggta

SEQ ID NO: 14742 - DNA, 20 bp, synthetic construct
  misc_feature 1..20: note = Description of Artificial Sequence: Synthetic oligonucleotide
  misc_feature 1..20: note = Target: SCN10A; (-) strand; PAM type: NRG; PAM sequence: AGG
  source 1..20: mol_type = other DNA
tattagatttttttaaatca

SEQ ID NO: 14743 - DNA, 20 bp, synthetic construct
  misc_feature 1..20: note = Description of Artificial Sequence: Synthetic oligonucleotide
  misc_feature 1..20: note = Target: SCN10A; (-) strand; PAM type: NRG; PAM sequence: AAG
  source 1..20: mol_type = other DNA
ctattagatttttttaaatc

SEQ ID NO: 14744 - DNA, 20 bp, synthetic construct
  misc_feature 1..20: note = Description of Artificial Sequence: Synthetic oligonucleotide
  misc_feature 1..20: note = Target: SCN10A; (-) strand; PAM type: NRG; PAM sequence: TAG
  source 1..20: mol_type = other DNA
cattctgttagccaagctat

SEQ ID NO: 14745 - DNA, 20 bp, synthetic construct
  misc_feature 1..20: note = Description of Artificial Sequence: Synthetic oligonucleotide
  misc_feature 1..20: note = Target: SCN10A; (-) strand; PAM type: NRG; PAM sequence: AAG
  source 1..20: mol_type = other DNA
agacatgcattctgttagcc

SEQ ID NO: 14746 - DNA, 20 bp, synthetic construct
  misc_feature 1..20: note = Description of Artificial Sequence: Synthetic oligonucleotide
  misc_feature 1..20: note = Target: SCN10A; (-) strand; PAM type: NRG; PAM sequence: TAG
  source 1..20: mol_type = other DNA
tatggagacatgcattctgt

SEQ ID NO: 14747 - DNA, 20 bp, synthetic construct
  misc_feature 1..20: note = Description of Artificial Sequence: Synthetic oligonucleotide
  misc_feature 1..20: note = Target: SCN10A; (-) strand; PAM type: NRG; PAM sequence: GAG
  source 1..20: mol_type = other DNA
ctttccctaaatgaattatg

SEQ ID NO: 14748 - DNA, 20 bp, synthetic construct
  misc_feature 1..20: note = Description of Artificial Sequence: Synthetic oligonucleotide
  misc_feature 1..20: note = Target: SCN10A; (-) strand; PAM type: NRG; PAM sequence: TGG
  source 1..20: mol_type = other DNA
gcctttccctaaatgaatta

SEQ ID NO: 14749 - DNA, 20 bp, synthetic construct
  misc_feature 1..20: note = Description of Artificial Sequence: Synthetic oligonucleotide
  misc_feature 1..20: note = Target: SCN10A; (-) strand; PAM type: NRG; PAM sequence: AAG
  source 1..20: mol_type = other DNA
aggacatttaacaaaggaac

SEQ ID NO: 14750 - DNA, 20 bp, synthetic construct
  misc_feature 1..20: note = Description of Artificial Sequence: Synthetic oligonucleotide
  misc_feature 1..20: note = Target: SCN10A; (-) strand; PAM type: NRG; PAM sequence: AGG
  source 1..20: mol_type = other DNA
gtccaaaggacatttaacaa

SEQ ID NO: 14751 - DNA, 20 bp, synthetic construct
  misc_feature 1..20: note = Description of Artificial Sequence: Synthetic oligonucleotide
  misc_feature 1..20: note = Target: SCN10A; (-) strand; PAM type: NRG; PAM sequence: AAG
  source 1..20: mol_type = other DNA
agtccaaaggacatttaaca

SEQ ID NO: 14752 - DNA, 20 bp, synthetic construct
  misc_feature 1..20: note = Description of Artificial Sequence: Synthetic oligonucleotide
  misc_feature 1..20: note = Target: SCN10A; (-) strand; PAM type: NRG; PAM sequence: AGG
  source 1..20: mol_type = other DNA
cacacaagggaaaagtccaa

SEQ ID NO: 14753 - DNA, 20 bp, synthetic construct
  misc_feature 1..20: note = Description of Artificial Sequence: Synthetic oligonucleotide
  misc_feature 1..20: note = Target: SCN10A; (-) strand; PAM type: NRG; PAM sequence: AAG
  source 1..20: mol_type = other DNA
ccacacaagggaaaagtcca

SEQ ID NO: 14754 - DNA, 20 bp, synthetic construct
  misc_feature 1..20: note = Description of Artificial Sequence: Synthetic oligonucleotide
  misc_feature 1..20: note = Target: SCN10A; (-) strand; PAM type: NRG; PAM sequence: AAG
  source 1..20: mol_type = other DNA
cccttccccacacaagggaa

SEQ ID NO: 14755 - DNA, 20 bp, synthetic construct
  misc_feature 1..20: note = Description of Artificial Sequence: Synthetic oligonucleotide
  misc_feature 1..20: note = Target: SCN10A; (-) strand; PAM type: NRG; PAM sequence: GGG
  source 1..20: mol_type = other DNA
attagcccttccccacacaa

SEQ ID NO: 14756 - DNA, 20 bp, synthetic construct
  misc_feature 1..20: note = Description of Artificial Sequence: Synthetic oligonucleotide
  misc_feature 1..20: note = Target: SCN10A; (-) strand; PAM type: NRG; PAM sequence: AGG
  source 1..20: mol_type = other DNA
cattagcccttccccacaca

SEQ ID NO: 14757 - DNA, 20 bp, synthetic construct
  misc_feature 1..20: note = Description of Artificial Sequence: Synthetic oligonucleotide
  misc_feature 1..20: note = Target: SCN10A; (-) strand; PAM type: NRG; PAM sequence: AAG
  source 1..20: mol_type = other DNA
tcattagcccttccccacac

SEQ ID NO: 14758 - DNA, 20 bp, synthetic construct
  misc_feature 1..20: note = Description of Artificial Sequence: Synthetic oligonucleotide
  misc_feature 1..20: note = Target: SCN10A; (-) strand; PAM type: NRG; PAM sequence: TAG
  source 1..20: mol_type = other DNA
tgctgatgacacaatttcat

SEQ ID NO: 14759 - DNA, 20 bp, synthetic construct
  misc_feature 1..20: note = Description of Artificial Sequence: Synthetic oligonucleotide
  misc_feature 1..20: note = Target: SCN10A; (-) strand; PAM type: NRG; PAM sequence: AGG
  source 1..20: mol_type = other DNA
gcattagtgaagaaaatcac

SEQ ID NO: 14760 - DNA, 20 bp, synthetic construct
  misc_feature 1..20: note = Description of Artificial Sequence: Synthetic oligonucleotide
  misc_feature 1..20: note = Target: SCN10A; (-) strand; PAM type: NRG; PAM sequence: CAG
  source 1..20: mol_type = other DNA
agcattagtgaagaaaatca

SEQ ID NO: 14761 - DNA, 20 bp, synthetic construct
  misc_feature 1..20: note = Description of Artificial Sequence: Synthetic oligonucleotide
  misc_feature 1..20: note = Target: SCN10A; (-) strand; PAM type: NRG; PAM sequence: AAG
  source 1..20: mol_type = other DNA
gctaagatgcagcattagtg

SEQ ID NO: 14762 - DNA, 20 bp, synthetic construct
  misc_feature 1..20: note = Description of Artificial Sequence: Synthetic oligonucleotide
  misc_feature 1..20: note = Target: SCN10A; (-) strand; PAM type: NRG; PAM sequence: TAG
  source 1..20: mol_type = other DNA
ctgtggctaagatgcagcat

SEQ ID NO: 14763 - DNA, 20 bp, synthetic construct
  misc_feature 1..20: note = Description of Artificial Sequence: Synthetic oligonucleotide
  misc_feature 1..20: note = Target: SCN10A; (-) strand; PAM type: NRG; PAM sequence: CAG
  source 1..20: mol_type = other DNA
aactttctgtggctaagatg

SEQ ID NO: 14764 - DNA, 20 bp, synthetic construct
  misc_feature 1..20: note = Description of Artificial Sequence: Synthetic oligonucleotide
  misc_feature 1..20: note = Target: SCN10A; (-) strand; PAM type: NRG; PAM sequence: AAG
  source 1..20: mol_type = other DNA
tacataaactttctgtggct

SEQ ID NO: 14765 - DNA, 20 bp, synthetic construct
  misc_feature 1..20: note = Description of Artificial Sequence: Synthetic oligonucleotide
  misc_feature 1..20: note = Target: SCN10A; (-) strand; PAM type: NRG; PAM sequence: TGG
  source 1..20: mol_type = other DNA
ccttctacataaactttctg

SEQ ID NO: 14766 - DNA, 20 bp, synthetic construct
  misc_feature 1..20: note = Description of Artificial Sequence: Synthetic oligonucleotide
  misc_feature 1..20: note = Target: SCN10A; (-) strand; PAM type: NRG; PAM sequence: TGG
  source 1..20: mol_type = other DNA
tccactccagtgaatggaat

SEQ ID NO: 14767 - DNA, 20 bp, synthetic construct
  misc_feature 1..20: note = Description of Artificial Sequence: Synthetic oligonucleotide
  misc_feature 1..20: note = Target: SCN10A; (-) strand; PAM type: NRG; PAM sequence: TGG
  source 1..20: mol_type = other DNA
gagccatccactccagtgaa

SEQ ID NO: 14768 - DNA, 20 bp, synthetic construct
  misc_feature 1..20: note = Description of Artificial Sequence: Synthetic oligonucleotide
  misc_feature 1..20: note = Target: SCN10A; (-) strand; PAM type: NRG; PAM sequence: CAG
  source 1..20: mol_type = other DNA
aatttctgagccatccactc

SEQ ID NO: 14769 - DNA, 20 bp, synthetic construct
  misc_feature 1..20: note = Description of Artificial Sequence: Synthetic oligonucleotide
  misc_feature 1..20: note = Target: SCN10A; (-) strand; PAM type: NRG; PAM sequence: GAG
  source 1..20: mol_type = other DNA
atcgtcttcaaagaatttct

SEQ ID NO: 14770 - DNA, 20 bp, synthetic construct
  misc_feature 1..20: note = Description of Artificial Sequence: Synthetic oligonucleotide
  misc_feature 1..20: note = Target: SCN10A; (-) strand; PAM type: NRG; PAM sequence: AAG
  source 1..20: mol_type = other DNA
attattgttgatcgtcttca

SEQ ID NO: 14771 - DNA, 20 bp, synthetic construct
  misc_feature 1..20: note = Description of Artificial Sequence: Synthetic oligonucleotide
  misc_feature 1..20: note = Target: SCN10A; (-) strand; PAM type: NRG; PAM sequence: CAG
  source 1..20: mol_type = other DNA
gggtgaagatgttgatgtgt

SEQ ID NO: 14772 - DNA, 20 bp, synthetic construct
  misc_feature 1..20: note = Description of Artificial Sequence: Synthetic oligonucleotide
  misc_feature 1..20: note = Target: SCN10A; (-) strand; PAM type: NRG; PAM sequence: AAG
  source 1..20: mol_type = other DNA
gatgaacaggtttgggggtg

SEQ ID NO: 14773 - DNA, 20 bp, synthetic construct
  misc_feature 1..20: note = Description of Artificial Sequence: Synthetic oligonucleotide
  misc_feature 1..20: note = Target: SCN10A; (-) strand; PAM type: NRG; PAM sequence: GGG
  source 1..20: mol_type = other DNA
gaatggatgaacaggtttgg

SEQ ID NO: 14774 - DNA, 20 bp, synthetic construct
  misc_feature 1..20: note = Description of Artificial Sequence: Synthetic oligonucleotide
  misc_feature 1..20: note = Target: SCN10A; (-) strand; PAM type: NRG; PAM sequence: GGG
  source 1..20: mol_type = other DNA
ggaatggatgaacaggtttg

SEQ ID NO: 14775 - DNA, 20 bp, synthetic construct
  misc_feature 1..20: note = Description of Artificial Sequence: Synthetic oligonucleotide
  misc_feature 1..20: note = Target: SCN10A; (-) strand; PAM type: NRG; PAM sequence: GGG
  source 1..20: mol_type = other DNA
gggaatggatgaacaggttt

SEQ ID NO: 14776 - DNA, 20 bp, synthetic construct
  misc_feature 1..20: note = Description of Artificial Sequence: Synthetic oligonucleotide
  misc_feature 1..20: note = Target: SCN10A; (-) strand; PAM type: NRG; PAM sequence: TGG
  source 1..20: mol_type = other DNA
tgggaatggatgaacaggtt

SEQ ID NO: 14777 - DNA, 20 bp, synthetic construct
  misc_feature 1..20: note = Description of Artificial Sequence: Synthetic oligonucleotide
  misc_feature 1..20: note = Target: SCN10A; (-) strand; PAM type: NRG; PAM sequence: AGG
  source 1..20: mol_type = other DNA
ttttttgggaatggatgaac

SEQ ID NO: 14778 - DNA, 20 bp, synthetic construct
  misc_feature 1..20: note = Description of Artificial Sequence: Synthetic oligonucleotide
  misc_feature 1..20: note = Target: SCN10A; (-) strand; PAM type: NRG; PAM sequence: CAG
  source 1..20: mol_type = other DNA
cttttttgggaatggatgaa

SEQ ID NO: 14779 - DNA, 20 bp, synthetic construct
  misc_feature 1..20: note = Description of Artificial Sequence: Synthetic oligonucleotide
  misc_feature 1..20: note = Target: SCN10A; (-) strand; PAM type: NRG; PAM sequence: TGG
  source 1..20: mol_type = other DNA
agatagcacttttttgggaa

SEQ ID NO: 14780 - DNA, 20 bp, synthetic construct
  misc_feature 1..20: note = Description of Artificial Sequence: Synthetic oligonucleotide
  misc_feature 1..20: note = Target: SCN10A; (-) strand; PAM type: NRG; PAM sequence: GGG
  source 1..20: mol_type = other DNA
ccctaagatagcactttttt

SEQ ID NO: 14781 - DNA, 20 bp, synthetic construct
  misc_feature 1..20: note = Description of Artificial Sequence: Synthetic oligonucleotide
  misc_feature 1..20: note = Target: SCN10A; (-) strand; PAM type: NRG; PAM sequence: TGG
  source 1..20: mol_type = other DNA
gccctaagatagcacttttt

SEQ ID NO: 14782 - DNA, 20 bp, synthetic construct
  misc_feature 1..20: note = Description of Artificial Sequence: Synthetic oligonucleotide
  misc_feature 1..20: note = Target: SCN10A; (-) strand; PAM type: NRG; PAM sequence: TAG
  source 1..20: mol_type = other DNA
gcctctgagaggccctaaga

SEQ ID NO: 14783 - DNA, 20 bp, synthetic construct
  misc_feature 1..20: note = Description of Artificial Sequence: Synthetic oligonucleotide
  misc_feature 1..20: note = Target: SCN10A; (-) strand; PAM type: NRG; PAM sequence: AAG
  source 1..20: mol_type = other DNA
tcaagcctctgagaggccct

SEQ ID NO: 14784 - DNA, 20 bp, synthetic construct
  misc_feature 1..20: note = Description of Artificial Sequence: Synthetic oligonucleotide
  misc_feature 1..20: note = Target: SCN10A; (-) strand; PAM type: NRG; PAM sequence: AGG
  source 1..20: mol_type = other DNA
gaaaacatcaagcctctgag

SEQ ID NO: 14785 - DNA, 20 bp, synthetic construct
  misc_feature 1..20: note = Description of Artificial Sequence: Synthetic oligonucleotide
  misc_feature 1..20: note = Target: SCN10A; (-) strand; PAM type: NRG; PAM sequence: GAG
  source 1..20: mol_type = other DNA
agaaaacatcaagcctctga

SEQ ID NO: 14786 - DNA, 20 bp, synthetic construct
  misc_feature 1..20: note = Description of Artificial Sequence: Synthetic oligonucleotide
  misc_feature 1..20: note = Target: SCN10A; (-) strand; PAM type: NRG; PAM sequence: GAG
  source 1..20: mol_type = other DNA
atagaaaacatcaagcctct

SEQ ID NO: 14787 - DNA, 20 bp, synthetic construct
  misc_feature 1..20: note = Description of Artificial Sequence: Synthetic oligonucleotide
  misc_feature 1..20: note = Target: SCN10A; (-) strand; PAM type: NRG; PAM sequence: AAG
  source 1..20: mol_type = other DNA
gccagaagatagaaaacatc

SEQ ID NO: 14788 - DNA, 20 bp, synthetic construct
  misc_feature 1..20: note = Description of Artificial Sequence: Synthetic oligonucleotide
  misc_feature 1..20: note = Target: SCN10A; (-) strand; PAM type: NRG; PAM sequence: TAG
  source 1..20: mol_type = other DNA
ctcagtcttctgccagaaga

SEQ ID NO: 14789 - DNA, 20 bp, synthetic construct
  misc_feature 1..20: note = Description of Artificial Sequence: Synthetic oligonucleotide
  misc_feature 1..20: note = Target: SCN10A; (-) strand; PAM type: NRG; PAM sequence: AAG
  source 1..20: mol_type = other DNA
tcttctcagtcttctgccag

SEQ ID NO: 14790 - DNA, 20 bp, synthetic construct
  misc_feature 1..20: note = Description of Artificial Sequence: Synthetic oligonucleotide
  misc_feature 1..20: note = Target: SCN10A; (-) strand; PAM type: NRG; PAM sequence: CAG
  source 1..20: mol_type = other DNA
agttcttctcagtcttctgc

SEQ ID NO: 14791 - DNA, 20 bp, synthetic construct
  misc_feature 1..20: note = Description of Artificial Sequence: Synthetic oligonucleotide
  misc_feature 1..20: note = Target: SCN10A; (-) strand; PAM type: NRG; PAM sequence: CAG
  source 1..20: mol_type = other DNA
gatatcacctaagttcttct

SEQ ID NO: 14792 - DNA, 20 bp, synthetic construct
  misc_feature 1..20: note = Description of Artificial Sequence: Synthetic oligonucleotide
  misc_feature 1..20: note = Target: SCN10A; (-) strand; PAM type: NRG; PAM sequence: AAG
  source 1..20: mol_type = other DNA
taccacacatgatatcacct

SEQ ID NO: 14793 - DNA, 20 bp, synthetic construct
  misc_feature 1..20: note = Description of Artificial Sequence: Synthetic oligonucleotide
  misc_feature 1..20: note = Target: SCN10A; (-) strand; PAM type: NRG; PAM sequence: TGG
  source 1..20: mol_type = other DNA
cataaagatctcaagagaca

SEQ ID NO: 14794 - DNA, 20 bp, synthetic construct
  misc_feature 1..20: note = Description of Artificial Sequence: Synthetic oligonucleotide
  misc_feature 1..20: note = Target: SCN10A; (-) strand; PAM type: NRG; PAM sequence: GAG
  source 1..20: mol_type = other DNA
ttttttcataaagatctcaa

SEQ ID NO: 14795 - DNA, 20 bp, synthetic construct
  misc_feature 1..20: note = Description of Artificial Sequence: Synthetic oligonucleotide
  misc_feature 1..20: note = Target: SCN10A; (-) strand; PAM type: NRG; PAM sequence: AAG
  source 1..20: mol_type = other DNA
ccttttttcataaagatctc

SEQ ID NO: 14796 - DNA, 20 bp, synthetic construct
  misc_feature 1..20: note = Description of Artificial Sequence: Synthetic oligonucleotide
  misc_feature 1..20: note = Target: SCN10A; (-) strand; PAM type: NRG; PAM sequence: AAG
  source 1..20: mol_type = other DNA
gtttcactccttttttcata

SEQ ID NO: 14797 - DNA, 20 bp, synthetic construct
  misc_feature 1..20: note = Description of Artificial Sequence: Synthetic oligonucleotide
  misc_feature 1..20: note = Target: SCN10A; (-) strand; PAM type: NRG; PAM sequence: TAG
  source 1..20: mol_type = other DNA
caaaaattagggccagactc

SEQ ID NO: 14798 - DNA, 20 bp, synthetic construct
  misc_feature 1..20: note = Description of Artificial Sequence: Synthetic oligonucleotide
  misc_feature 1..20: note = Target: SCN10A; (-) strand; PAM type: NRG; PAM sequence: CAG
  source 1..20: mol_type = other DNA
gattgggcaaaaattagggc

SEQ ID NO: 14799 - DNA, 20 bp, synthetic construct
  misc_feature 1..20: note = Description of Artificial Sequence: Synthetic oligonucleotide
  misc_feature 1..20: note = Target: SCN10A; (-) strand; PAM type: NRG; PAM sequence: GGG
  source 1..20: mol_type = other DNA
taaagattgggcaaaaatta

SEQ ID NO: 14800 - DNA, 20 bp, synthetic construct
  misc_feature 1..20: note = Description of Artificial Sequence: Synthetic oligonucleotide
  misc_feature 1..20: note = Target: SCN10A; (-) strand; PAM type: NRG; PAM sequence: AGG
  source 1..20: mol_type = other DNA
ttaaagattgggcaaaaatt

SEQ ID NO: 14801 - DNA, 20 bp, synthetic construct
  misc_feature 1..20: note = Description of Artificial Sequence: Synthetic oligonucleotide
  misc_feature 1..20: note = Target: SCN10A; (-) strand; PAM type: NRG; PAM sequence: TAG
  source 1..20: mol_type = other DNA
tttaaagattgggcaaaaat

SEQ ID NO: 14802 - DNA, 20 bp, synthetic construct
  misc_feature 1..20: note = Description of Artificial Sequence: Synthetic oligonucleotide
  misc_feature 1..20: note = Target: SCN10A; (-) strand; PAM type: NRG; PAM sequence: GGG
  source 1..20: mol_type = other DNA
cccactcgagtttaaagatt

SEQ ID NO: 14803 - DNA, 20 bp, synthetic construct
  misc_feature 1..20: note = Description of Artificial Sequence: Synthetic oligonucleotide
  misc_feature 1..20: note = Target: SCN10A; (-) strand; PAM type: NRG; PAM sequence: TGG
  source 1..20: mol_type = other DNA
tcccactcgagtttaaagat

SEQ ID NO: 14804 - DNA, 20 bp, synthetic construct
  misc_feature 1..20: note = Description of Artificial Sequence: Synthetic oligonucleotide
  misc_feature 1..20: note = Target: SCN10A; (-) strand; PAM type: NRG; PAM sequence: AAG
  source 1..20: mol_type = other DNA
agttatcccactcgagttta

SEQ ID NO: 14805 - DNA, 20 bp, synthetic construct
  misc_feature 1..20: note = Description of Artificial Sequence: Synthetic oligonucleotide
  misc_feature 1..20: note = Target: SCN10A; (-) strand; PAM type: NRG; PAM sequence: GAG
  source 1..20: mol_type = other DNA
aaccaaaagttatcccactc

SEQ ID NO: 14806 - DNA, 20 bp, synthetic construct
  misc_feature 1..20: note = Description of Artificial Sequence: Synthetic oligonucleotide
  misc_feature 1..20: note = Target: SCN10A; (-) strand; PAM type: NRG; PAM sequence: AAG
  source 1..20: mol_type = other DNA
agtggcccagtaggaaccaa

SEQ ID NO: 14807 - DNA, 20 bp, synthetic construct
  misc_feature 1..20: note = Description of Artificial Sequence: Synthetic oligonucleotide
  misc_feature 1..20: note = Target: SCN10A; (-) strand; PAM type: NRG; PAM sequence: AGG
  source 1..20: mol_type = other DNA
tagtggtcaagtggcccagt

SEQ ID NO: 14808 - DNA, 20 bp, synthetic construct
  misc_feature 1..20: note = Description of Artificial Sequence: Synthetic oligonucleotide
  misc_feature 1..20: note = Target: SCN10A; (-) strand; PAM type: NRG; PAM sequence: TAG
  source 1..20: mol_type = other DNA
gtagtggtcaagtggcccag

SEQ ID NO: 14809 - DNA, 20 bp, synthetic construct
  misc_feature 1..20: note = Description of Artificial Sequence: Synthetic oligonucleotide
  misc_feature 1..20: note = Target: SCN10A; (-) strand; PAM type: NRG; PAM sequence: CAG
  source 1..20: mol_type = other DNA
atggtagtggtcaagtggcc

SEQ ID NO: 14810 - DNA, 20 bp, synthetic construct
  misc_feature 1..20: note = Description of Artificial Sequence: Synthetic oligonucleotide
  misc_feature 1..20: note = Target: SCN10A; (-) strand; PAM type: NRG; PAM sequence: TGG
  source 1..20: mol_type = other DNA
cagtcatggtagtggtcaag

SEQ ID NO: 14811 - DNA, 20 bp, synthetic construct
  misc_feature 1..20: note = Description of Artificial Sequence: Synthetic oligonucleotide
  misc_feature 1..20: note = Target: SCN10A; (-) strand; PAM type: NRG; PAM sequence: AAG
  source 1..20: mol_type = other DNA
atgcagtcatggtagtggtc

SEQ ID NO: 14812 - DNA, 20 bp, synthetic construct
  misc_feature 1..20: note = Description of Artificial Sequence: Synthetic oligonucleotide
  misc_feature 1..20: note = Target: SCN10A; (-) strand; PAM type: NRG; PAM sequence: TGG
  source 1..20: mol_type = other DNA
ccaagatgcagtcatggtag

SEQ ID NO: 14813 - DNA, 20 bp, synthetic construct
  misc_feature 1..20: note = Description of Artificial Sequence: Synthetic oligonucleotide
  misc_feature 1..20: note = Target: SCN10A; (-) strand; PAM type: NRG; PAM sequence: TAG
  source 1..20: mol_type = other DNA
gatccaagatgcagtcatgg

SEQ ID NO: 14814 - DNA, 20 bp, synthetic construct
  misc_feature 1..20: note = Description of Artificial Sequence: Synthetic oligonucleotide
  misc_feature 1..20: note = Target: SCN10A; (-) strand; PAM type: NRG; PAM sequence: TGG
  source 1..20: mol_type = other DNA
caggatccaagatgcagtca

SEQ ID NO: 14815 - DNA, 20 bp, synthetic construct
  misc_feature 1..20: note = Description of Artificial Sequence: Synthetic oligonucleotide
  misc_feature 1..20: note = Target: SCN10A; (-) strand; PAM type: NRG; PAM sequence: CAG
  source 1..20: mol_type = other DNA
ccctgtcaggatccaagatg

SEQ ID NO: 14816 - DNA, 20 bp, synthetic construct
  misc_feature 1..20: note = Description of Artificial Sequence: Synthetic oligonucleotide
  misc_feature 1..20: note = Target: SCN10A; (-) strand; PAM type: NRG; PAM sequence: AAG
  source 1..20: mol_type = other DNA
caactcccctgtcaggatcc

SEQ ID NO: 14817 - DNA, 20 bp, synthetic construct
  misc_feature 1..20: note = Description of Artificial Sequence: Synthetic oligonucleotide
  misc_feature 1..20: note = Target: SCN10A; (-) strand; PAM type: NRG; PAM sequence: AGG
  source 1..20: mol_type = other DNA
aacaacccaactcccctgtc

SEQ ID NO: 14818 - DNA, 20 bp, synthetic construct
  misc_feature 1..20: note = Description of Artificial Sequence: Synthetic oligonucleotide
  misc_feature 1..20: note = Target: SCN10A; (-) strand; PAM type: NRG; PAM sequence: CAG
  source 1..20: mol_type = other DNA
caacaacccaactcccctgt

SEQ ID NO: 14819 - DNA, 20 bp, synthetic construct
  misc_feature 1..20: note = Description of Artificial Sequence: Synthetic oligonucleotide
  misc_feature 1..20: note = Target: SCN10A; (-) strand; PAM type: NRG; PAM sequence: AGG
  source 1..20: mol_type = other DNA
ccacgcctacaggtatagag

SEQ ID NO: 14820 - DNA, 20 bp, synthetic construct
  misc_feature 1..20: note = Description of Artificial Sequence: Synthetic oligonucleotide
  misc_feature 1..20: note = Target: SCN10A; (-) strand; PAM type: NRG; PAM sequence: GAG
  source 1..20: mol_type = other DNA
cccacgcctacaggtataga

SEQ ID NO: 14821 - DNA, 20 bp, synthetic construct
  misc_feature 1..20: note = Description of Artificial Sequence: Synthetic oligonucleotide
  misc_feature 1..20: note = Target: SCN10A; (-) strand; PAM type: NRG; PAM sequence: GAG
  source 1..20: mol_type = other DNA
accccacgcctacaggtata

SEQ ID NO: 14822 - DNA, 20 bp, synthetic construct
  misc_feature 1..20: note = Description of Artificial Sequence: Synthetic oligonucleotide
  misc_feature 1..20: note = Target: SCN10A; (-) strand; PAM type: NRG; PAM sequence: TAG
  source 1..20: mol_type = other DNA
ctaccccacgcctacaggta

SEQ ID NO: 14823 - DNA, 20 bp, synthetic construct
  misc_feature 1..20: note = Description of Artificial Sequence: Synthetic oligonucleotide
  misc_feature 1..20: note = Target: SCN10A; (-) strand; PAM type: NRG; PAM sequence: AGG
  source 1..20: mol_type = other DNA
atattctaccccacgcctac

SEQ ID NO: 14824 - DNA, 20 bp, synthetic construct
  misc_feature 1..20: note = Description of Artificial Sequence: Synthetic oligonucleotide
  misc_feature 1..20: note = Target: SCN10A; (-) strand; PAM type: NRG; PAM sequence: CAG
  source 1..20: mol_type = other DNA
tatattctaccccacgccta

SEQ ID NO: 14825 - DNA, 20 bp, synthetic construct
  misc_feature 1..20: note = Description of Artificial Sequence: Synthetic oligonucleotide
  misc_feature 1..20: note = Target: SCN10A; (-) strand; PAM type: NRG; PAM sequence: CAG
  source 1..20: mol_type = other DNA
tctaggtcgcagtagatctc

SEQ ID NO: 14826 - DNA, 20 bp, synthetic construct
  misc_feature 1..20: note = Description of Artificial Sequence: Synthetic oligonucleotide
  misc_feature 1..20: note = Target: SCN10A; (-) strand; PAM type: NRG; PAM sequence: TAG
  source 1..20: mol_type = other DNA
tatcatggtctaggtcgcag

SEQ ID NO: 14827 - DNA, 20 bp, synthetic construct
  misc_feature 1..20: note = Description of Artificial Sequence: Synthetic oligonucleotide
  misc_feature 1..20: note = Target: SCN10A; (-) strand; PAM type: NRG; PAM sequence: CAG
  source 1..20: mol_type = other DNA
atgtatcatggtctaggtcg

SEQ ID NO: 14828 - DNA, 20 bp, synthetic construct
  misc_feature 1..20: note = Description of Artificial Sequence: Synthetic oligonucleotide
  misc_feature 1..20: note = Target: SCN10A; (-) strand; PAM type: NRG; PAM sequence: AGG
  source 1..20: mol_type = other DNA
gtggttatgtatcatggtct

SEQ ID NO: 14829 - DNA, 20 bp, synthetic construct
  misc_feature 1..20: note = Description of Artificial Sequence: Synthetic oligonucleotide
  misc_feature 1..20: note = Target: SCN10A; (-) strand; PAM type: NRG; PAM sequence: TAG
  source 1..20: mol_type = other DNA
tgtggttatgtatcatggtc

SEQ ID NO: 14830 - DNA, 20 bp, synthetic construct
  misc_feature 1..20: note = Description of Artificial Sequence: Synthetic oligonucleotide
  misc_feature 1..20: note = Target: SCN10A; (-) strand; PAM type: NRG; PAM sequence: TGG
  source 1..20: mol_type = other DNA
acttgtgtggttatgtatca

SEQ ID NO: 14831 - DNA, 20 bp, synthetic construct
  misc_feature 1..20: note = Description of Artificial Sequence: Synthetic oligonucleotide
  misc_feature 1..20: note = Target: SCN10A; (-) strand; PAM type: NRG; PAM sequence: TGG
  source 1..20: mol_type = other DNA
acccagggattaaacttgtg

SEQ ID NO: 14832 - DNA, 20 bp, synthetic construct
  misc_feature 1..20: note = Description of Artificial Sequence: Synthetic oligonucleotide
  misc_feature 1..20: note = Target: SCN10A; (-) strand; PAM type: NRG; PAM sequence: GGG
  source 1..20: mol_type = other DNA
gtaagggtagttagaaccca

SEQ ID NO: 14833 - DNA, 20 bp, synthetic construct
  misc_feature 1..20: note = Description of Artificial Sequence: Synthetic oligonucleotide
  misc_feature 1..20: note = Target: SCN10A; (-) strand; PAM type: NRG; PAM sequence: AGG
  source 1..20: mol_type = other DNA
agtaagggtagttagaaccc

SEQ ID NO: 14834 - DNA, 20 bp, synthetic construct
  misc_feature 1..20: note = Description of Artificial Sequence: Synthetic oligonucleotide
  misc_feature 1..20: note = Target: SCN10A; (-) strand; PAM type: NRG; PAM sequence: CAG
  source 1..20: mol_type = other DNA
cagtaagggtagttagaacc

SEQ ID NO: 14835 - DNA, 20 bp, synthetic construct
  misc_feature 1..20: note = Description of Artificial Sequence: Synthetic oligonucleotide
  misc_feature 1..20: note = Target: SCN10A; (-) strand; PAM type: NRG; PAM sequence: TAG
  source 1..20: mol_type = other DNA
taagtgacagtaagggtagt

SEQ ID NO: 14836 - DNA, 20 bp, synthetic construct
  misc_feature 1..20: note = Description of Artificial Sequence: Synthetic oligonucleotide
  misc_feature 1..20: note = Target: SCN10A; (-) strand; PAM type: NRG; PAM sequence: TAG
  source 1..20: mol_type = other DNA
aagctaagtgacagtaaggg

SEQ ID NO: 14837 - DNA, 20 bp, synthetic construct
  misc_feature 1..20: note = Description of Artificial Sequence: Synthetic oligonucleotide
  misc_feature 1..20: note = Target: SCN10A; (-) strand; PAM type: NRG; PAM sequence: GGG
  source 1..20: mol_type = other DNA
gttaagctaagtgacagtaa

SEQ ID NO: 14838 - DNA, 20 bp, synthetic construct
  misc_feature 1..20: note = Description of Artificial Sequence: Synthetic oligonucleotide
  misc_feature 1..20: note = Target: SCN10A; (-) strand; PAM type: NRG; PAM sequence: AGG
  source 1..20: mol_type = other DNA
ggttaagctaagtgacagta

SEQ ID NO: 14839 - DNA, 20 bp, synthetic construct
  misc_feature 1..20: note = Description of Artificial Sequence: Synthetic oligonucleotide
  misc_feature 1..20: note = Target: SCN10A; (-) strand; PAM type: NRG; PAM sequence: AAG
  source 1..20: mol_type = other DNA
aggttaagctaagtgacagt

SEQ ID NO: 14840 - DNA, 20 bp, synthetic construct
  misc_feature 1..20: note = Description of Artificial Sequence: Synthetic oligonucleotide
  misc_feature 1..20: note = Target: SCN10A; (-) strand; PAM type: NRG; PAM sequence: CAG
  source 1..20: mol_type = other DNA
aggcaggttaagctaagtga

SEQ ID NO: 14841 - DNA, 20 bp, synthetic construct
  misc_feature 1..20: note = Description of Artificial Sequence: Synthetic oligonucleotide
  misc_feature 1..20: note = Target: SCN10A; (-) strand; PAM type: NRG; PAM sequence: AAG
  source 1..20: mol_type = other DNA
gattggaggcaggttaagct

SEQ ID NO: 14842 - DNA, 20 bp, synthetic construct
  misc_feature 1..20: note = Description of Artificial Sequence: Synthetic oligonucleotide
  misc_feature 1..20: note = Target: SCN10A; (-) strand; PAM type: NRG; PAM sequence: AAG
  source 1..20: mol_type = other DNA
tacaggattggaggcaggtt

SEQ ID NO: 14843 - DNA, 20 bp, synthetic construct
  misc_feature 1..20: note = Description of Artificial Sequence: Synthetic oligonucleotide
  misc_feature 1..20: note = Target: SCN10A; (-) strand; PAM type: NRG; PAM sequence: AGG
  source 1..20: mol_type = other DNA
tcaagtacaggattggaggc

SEQ ID NO: 14844 - DNA, 20 bp, synthetic construct
  misc_feature 1..20: note = Description of Artificial Sequence: Synthetic oligonucleotide
  misc_feature 1..20: note = Target: SCN10A; (-) strand; PAM type: NRG; PAM sequence: CAG
  source 1..20: mol_type = other DNA
ttcaagtacaggattggagg

SEQ ID NO: 14845 - DNA, 20 bp, synthetic construct
  misc_feature 1..20: note = Description of Artificial Sequence: Synthetic oligonucleotide
  misc_feature 1..20: note = Target: SCN10A; (-) strand; PAM type: NRG; PAM sequence: AGG
  source 1..20: mol_type = other DNA
gagttcaagtacaggattgg

SEQ ID NO: 14846 - DNA, 20 bp, synthetic construct
  misc_feature 1..20: note = Description of Artificial Sequence: Synthetic oligonucleotide
  misc_feature 1..20: note = Target: SCN10A; (-) strand; PAM type: NRG; PAM sequence: GAG
  source 1..20: mol_type = other DNA
agagttcaagtacaggattg

SEQ ID NO: 14847 - DNA, 20 bp, synthetic construct
  misc_feature 1..20: note = Description of Artificial Sequence: Synthetic oligonucleotide
  misc_feature 1..20: note = Target: SCN10A; (-) strand; PAM type: NRG; PAM sequence: TGG
  source 1..20: mol_type = other DNA
ttagagttcaagtacaggat

SEQ ID NO: 14848 - DNA, 20 bp, synthetic construct
  misc_feature 1..20: note = Description of Artificial Sequence: Synthetic oligonucleotide
  misc_feature 1..20: note = Target: SCN10A; (-) strand; PAM type: NRG; PAM sequence: AGG
  source 1..20: mol_type = other DNA
cagttttagagttcaagtac

SEQ ID NO: 14849 - DNA, 20 bp, synthetic construct
  misc_feature 1..20: note = Description of Artificial Sequence: Synthetic oligonucleotide
  misc_feature 1..20: note = Target: SCN10A; (-) strand; PAM type: NRG; PAM sequence: CAG
  source 1..20: mol_type = other DNA
acagttttagagttcaagta

SEQ ID NO: 14850 - DNA, 20 bp, synthetic construct
  misc_feature 1..20: note = Description of Artificial Sequence: Synthetic oligonucleotide
  misc_feature 1..20: note = Target: SCN10A; (-) strand; PAM type: NRG; PAM sequence: AAG
  source 1..20: mol_type = other DNA
ctccaacagttttagagttc

SEQ ID NO: 14851 - DNA, 20 bp, synthetic construct
  misc_feature 1..20: note = Description of Artificial Sequence: Synthetic oligonucleotide
  misc_feature 1..20: note = Target: SCN10A; (-) strand; PAM type: NRG; PAM sequence: GAG
  source 1..20: mol_type = other DNA
gagtttctccaacagtttta

SEQ ID NO: 14852 - DNA, 20 bp, synthetic construct
  misc_feature 1..20: note = Description of Artificial Sequence: Synthetic oligonucleotide
  misc_feature 1..20: note = Target: SCN10A; (-) strand; PAM type: NRG; PAM sequence: TAG
  source 1..20: mol_type = other DNA
ctgagtttctccaacagttt

SEQ ID NO: 14853 - DNA, 20 bp, synthetic construct
  misc_feature 1..20: note = Description of Artificial Sequence: Synthetic oligonucleotide
  misc_feature 1..20: note = Target: SCN10A; (-) strand; PAM type: NRG; PAM sequence: CAG
  source 1..20: mol_type = other DNA
gaagcactgagtttctccaa

SEQ ID NO: 14854 - DNA, 20 bp, synthetic construct
  misc_feature 1..20: note = Description of Artificial Sequence: Synthetic oligonucleotide
  misc_feature 1..20: note = Target: SCN10A; (-) strand; PAM type: NRG; PAM sequence: GAG
  source 1..20: mol_type = other DNA
aatctgttgggggaagcact

SEQ ID NO: 14855 - DNA, 20 bp, synthetic construct
  misc_feature 1..20: note = Description of Artificial Sequence: Synthetic oligonucleotide
  misc_feature 1..20: note = Target: SCN10A; (-) strand; PAM type: NRG; PAM sequence: AAG
  source 1..20: mol_type = other DNA
tgaaatgaatctgttggggg

SEQ ID NO: 14856 - DNA, 20 bp, synthetic construct
  misc_feature 1..20: note = Description of Artificial Sequence: Synthetic oligonucleotide
  misc_feature 1..20: note = Target: SCN10A; (-) strand; PAM type: NRG; PAM sequence: GGG
  source 1..20: mol_type = other DNA
atttgaaatgaatctgttgg

SEQ ID NO: 14857 - DNA, 20 bp, synthetic construct
  misc_feature 1..20: note = Description of Artificial Sequence: Synthetic oligonucleotide
  misc_feature 1..20: note = Target: SCN10A; (-) strand; PAM type: NRG; PAM sequence: GGG
  source 1..20: mol_type = other DNA
tatttgaaatgaatctgttg

SEQ ID NO: 14858 - DNA, 20 bp, synthetic construct
  misc_feature 1..20: note = Description of Artificial Sequence: Synthetic oligonucleotide
  misc_feature 1..20: note = Target: SCN10A; (-) strand; PAM type: NRG; PAM sequence: GGG
  source 1..20: mol_type = other DNA
ctatttgaaatgaatctgtt

SEQ ID NO: 14859 - DNA, 20 bp, synthetic construct
  misc_feature 1..20: note = Description of Artificial Sequence: Synthetic oligonucleotide
  misc_feature 1..20: note = Target: SCN10A; (-) strand; PAM type: NRG; PAM sequence: TGG
  source 1..20: mol_type = other DNA
gctatttgaaatgaatctgt

SEQ ID NO: 14860 - DNA, 20 bp, synthetic construct
  misc_feature 1..20: note = Description of Artificial Sequence: Synthetic oligonucleotide
  misc_feature 1..20: note = Target: SCN10A; (-) strand; PAM type: NRG; PAM sequence: CAG
  source 1..20: mol_type = other DNA
tggagtaaacatacctttta

SEQ ID NO: 14861 - DNA, 20 bp, synthetic construct
  misc_feature 1..20: note = Description of Artificial Sequence: Synthetic oligonucleotide
  misc_feature 1..20: note = Target: SCN10A; (-) strand; PAM type: NRG; PAM sequence: GAG
  source 1..20: mol_type = other DNA
gaagcaactctggtcttctg

SEQ ID NO: 14862 - DNA, 20 bp, synthetic construct
  misc_feature 1..20: note = Description of Artificial Sequence: Synthetic oligonucleotide
  misc_feature 1..20: note = Target: SCN10A; (-) strand; PAM type: NRG; PAM sequence: TGG
  source 1..20: mol_type = other DNA
aagaagcaactctggtcttc

SEQ ID NO: 14863 - DNA, 20 bp, synthetic construct
  misc_feature 1..20: note = Description of Artificial Sequence: Synthetic oligonucleotide
  misc_feature 1..20: note = Target: SCN10A; (-) strand; PAM type: NRG; PAM sequence: TGG
  source 1..20: mol_type = other DNA
aagttcaaaagaagcaactc

SEQ ID NO: 14864 - DNA, 20 bp, synthetic construct
  misc_feature 1..20: note = Description of Artificial Sequence: Synthetic oligonucleotide
  misc_feature 1..20: note = Target: SCN10A; (-) strand; PAM type: NRG; PAM sequence: AAG
  source 1..20: mol_type = other DNA
aggaatgagaagttcaaaag

SEQ ID NO: 14865 - DNA, 20 bp, synthetic construct
  misc_feature 1..20: note = Description of Artificial Sequence: Synthetic oligonucleotide
  misc_feature 1..20: note = Target: SCN10A; (-) strand; PAM type: NRG; PAM sequence: AAG
  source 1..20: mol_type = other DNA
ccaaggaatgagaagttcaa

SEQ ID NO: 14866 - DNA, 20 bp, synthetic construct
  misc_feature 1..20: note = Description of Artificial Sequence: Synthetic oligonucleotide
  misc_feature 1..20: note = Target: SCN10A; (-) strand; PAM type: NRG; PAM sequence: AAG
  source 1..20: mol_type = other DNA
tcctaggcccaaggaatgag

SEQ ID NO: 14867 - DNA, 20 bp, synthetic construct
  misc_feature 1..20: note = Description of Artificial Sequence: Synthetic oligonucleotide
  misc_feature 1..20: note = Target: SCN10A; (-) strand; PAM type: NRG; PAM sequence: GAG
  source 1..20: mol_type = other DNA
ggttcctaggcccaaggaat

SEQ ID NO: 14868 - DNA, 20 bp, synthetic construct
  misc_feature 1..20: note = Description of Artificial Sequence: Synthetic oligonucleotide
  misc_feature 1..20: note = Target: SCN10A; (-) strand; PAM type: NRG; PAM sequence: AGG
  source 1..20: mol_type = other DNA
gatgagggttcctaggccca

SEQ ID NO: 14869 - DNA, 20 bp, synthetic construct
  misc_feature 1..20: note = Description of Artificial Sequence: Synthetic oligonucleotide
  misc_feature 1..20: note = Target: SCN10A; (-) strand; PAM type: NRG; PAM sequence: AAG
  source 1..20: mol_type = other DNA
tgatgagggttcctaggccc

SEQ ID NO: 14870 - DNA, 20 bp, synthetic construct
  misc_feature 1..20: note = Description of Artificial Sequence: Synthetic oligonucleotide
  misc_feature 1..20: note = Target: SCN10A; (-) strand; PAM type: NRG; PAM sequence: AGG
  source 1..20: mol_type = other DNA
tgagggtgatgagggttcct

SEQ ID NO: 14871 - DNA, 20 bp, synthetic construct
  misc_feature 1..20: note = Description of Artificial Sequence: Synthetic oligonucleotide
  misc_feature 1..20: note = Target: SCN10A; (-) strand; PAM type: NRG; PAM sequence: TAG
  source 1..20: mol_type = other DNA
atgagggtgatgagggttcc

SEQ ID NO: 14872 - DNA, 20 bp, synthetic construct
  misc_feature 1..20: note = Description of Artificial Sequence: Synthetic oligonucleotide
  misc_feature 1..20: note = Target: SCN10A; (-) strand; PAM type: NRG; PAM sequence: GGG
  source 1..20: mol_type = other DNA
cgttgggatgagggtgatga

SEQ ID NO: 14873 - DNA, 20 bp, synthetic construct
  misc_feature 1..20: note = Description of Artificial Sequence: Synthetic oligonucleotide
  misc_feature 1..20: note = Target: SCN10A; (-) strand; PAM type: NRG; PAM sequence: AGG
  source 1..20: mol_type = other DNA
acgttgggatgagggtgatg

SEQ ID NO: 14874 - DNA, 20 bp, synthetic construct
  misc_feature 1..20: note = Description of Artificial Sequence: Synthetic oligonucleotide
  misc_feature 1..20: note = Target: SCN10A; (-) strand; PAM type: NRG; PAM sequence: GAG
  source 1..20: mol_type = other DNA
gacgttgggatgagggtgat

SEQ ID NO: 14875 - DNA, 20 bp, synthetic construct
  misc_feature 1..20: note = Description of Artificial Sequence: Synthetic oligonucleotide
  misc_feature 1..20: note = Target: SCN10A; (-) strand; PAM type: NRG; PAM sequence: GGG
  source 1..20: mol_type = other DNA
ctgggttgacgttgggatga

SEQ ID NO: 14876 - DNA, 20 bp, synthetic construct
  misc_feature 1..20: note = Description of Artificial Sequence: Synthetic oligonucleotide
  misc_feature 1..20: note = Target: SCN10A; (-) strand; PAM type: NRG; PAM sequence: AGG
  source 1..20: mol_type = other DNA
tctgggttgacgttgggatg

SEQ ID NO: 14877 - DNA, 20 bp, synthetic construct
  misc_feature 1..20: note = Description of Artificial Sequence: Synthetic oligonucleotide
  misc_feature 1..20: note = Target: SCN10A; (-) strand; PAM type: NRG; PAM sequence: GAG
  source 1..20: mol_type = other DNA
atctgggttgacgttgggat

SEQ ID NO: 14878 - DNA, 20 bp, synthetic construct
  misc_feature 1..20: note = Description of Artificial Sequence: Synthetic oligonucleotide
  misc_feature 1..20: note = Target: SCN10A; (-) strand; PAM type: NRG; PAM sequence: GGG
  source 1..20: mol_type = other DNA
agaagatctgggttgacgtt

SEQ ID NO: 14879 - DNA, 20 bp, synthetic construct
  misc_feature 1..20: note = Description of Artificial Sequence: Synthetic oligonucleotide
  misc_feature 1..20: note = Target: SCN10A; (-) strand; PAM type: NRG; PAM sequence: TGG
  source 1..20: mol_type = other DNA
gagaagatctgggttgacgt

SEQ ID NO: 14880 - DNA, 20 bp, synthetic construct
  misc_feature 1..20: note = Description of Artificial Sequence: Synthetic oligonucleotide
  misc_feature 1..20: note = Target: SCN10A; (-) strand; PAM type: NRG; PAM sequence: GGG
  source 1..20: mol_type = other DNA
gtttatggaagagaagatct

SEQ ID NO: 14881 - DNA, 20 bp, synthetic construct
  misc_feature 1..20: note = Description of Artificial Sequence: Synthetic oligonucleotide
  misc_feature 1..20: note = Target: SCN10A; (-) strand; PAM type: NRG; PAM sequence: TGG
  source 1..20: mol_type = other DNA
tgtttatggaagagaagatc

SEQ ID NO: 14882 - DNA, 20 bp, synthetic construct
  misc_feature 1..20: note = Description of Artificial Sequence: Synthetic oligonucleotide
  misc_feature 1..20: note = Target: SCN10A; (-) strand; PAM type: NRG; PAM sequence: AAG
  source 1..20: mol_type = other DNA
gagtgctgtttatggaagag

SEQ ID NO: 14883 - DNA, 20 bp, synthetic construct
  misc_feature 1..20: note = Description of Artificial Sequence: Synthetic oligonucleotide
  misc_feature 1..20: note = Target: SCN10A; (-) strand; PAM type: NRG; PAM sequence: GAG
  source 1..20: mol_type = other DNA
agggagtgctgtttatggaa

SEQ ID NO: 14884 - DNA, 20 bp, synthetic construct
  misc_feature 1..20: note = Description of Artificial Sequence: Synthetic oligonucleotide
  misc_feature 1..20: note = Target: SCN10A; (-) strand; PAM type: NRG; PAM sequence: AAG
  source 1..20: mol_type = other DNA
tgagggagtgctgtttatgg

SEQ ID NO: 14885 - DNA, 20 bp, synthetic construct
  misc_feature 1..20: note = Description of Artificial Sequence: Synthetic oligonucleotide
  misc_feature 1..20: note = Target: SCN10A; (-) strand; PAM type: NRG; PAM sequence: TGG
  source 1..20: mol_type = other DNA
gcctgagggagtgctgttta

SEQ ID NO: 14886 - DNA, 20 bp, synthetic construct
  misc_feature 1..20: note = Description of Artificial Sequence: Synthetic oligonucleotide
  misc_feature 1..20: note = Target: SCN10A; (-) strand; PAM type: NRG; PAM sequence: GAG
  source 1..20: mol_type = other DNA
tgtcaggcaggggcctgagg

SEQ ID NO: 14887 - DNA, 20 bp, synthetic construct
  misc_feature 1..20: note = Description of Artificial Sequence: Synthetic oligonucleotide
  misc_feature 1..20: note = Target: SCN10A; (-) strand; PAM type: NRG; PAM sequence: GGG
  source 1..20: mol_type = other DNA
tgtgtcaggcaggggcctga

SEQ ID NO: 14888 - DNA, 20 bp, synthetic construct
  misc_feature 1..20: note = Description of Artificial Sequence: Synthetic oligonucleotide
  misc_feature 1..20: note = Target: SCN10A; (-) strand; PAM type: NRG; PAM sequence: AGG
  source 1..20: mol_type = other DNA
ctgtgtcaggcaggggcctg

SEQ ID NO: 14889 - DNA, 20 bp, synthetic construct
  misc_feature 1..20: note = Description of Artificial Sequence: Synthetic oligonucleotide
  misc_feature 1..20: note = Target: SCN10A; (-) strand; PAM type: NRG; PAM sequence: GAG
  source 1..20: mol_type = other DNA
cctgtgtcaggcaggggcct

SEQ ID NO: 14890 - DNA, 20 bp, synthetic construct
  misc_feature 1..20: note = Description of Artificial Sequence: Synthetic oligonucleotide
  misc_feature 1..20: note = Target: SCN10A; (-) strand; PAM type: NRG; PAM sequence: GGG
  source 1..20: mol_type = other DNA
tctatgcctgtgtcaggcag

SEQ ID NO: 14891 - DNA, 20 bp, synthetic construct
  misc_feature 1..20: note = Description of Artificial Sequence: Synthetic oligonucleotide
  misc_feature 1..20: note = Target: SCN10A; (-) strand; PAM type: NRG; PAM sequence: GGG
  source 1..20: mol_type = other DNA
gtctatgcctgtgtcaggca

SEQ ID NO: 14892 - DNA, 20 bp, synthetic construct
  misc_feature 1..20: note = Description of Artificial Sequence: Synthetic oligonucleotide
  misc_feature 1..20: note = Target: SCN10A; (-) strand; PAM type: NRG; PAM sequence: AGG
  source 1..20: mol_type = other DNA
agtctatgcctgtgtcaggc

SEQ ID NO: 14893 - DNA, 20 bp, synthetic construct
  misc_feature 1..20: note = Description of Artificial Sequence: Synthetic oligonucleotide
  misc_feature 1..20: note = Target: SCN10A; (-) strand; PAM type: NRG; PAM sequence: CAG
  source 1..20: mol_type = other DNA
cagtctatgcctgtgtcagg

SEQ ID NO: 14894 - DNA, 20 bp, synthetic construct
  misc_feature 1..20: note = Description of Artificial Sequence: Synthetic oligonucleotide
  misc_feature 1..20: note = Target: SCN10A; (-) strand; PAM type: NRG; PAM sequence: AGG
  source 1..20: mol_type = other DNA
tgacagtctatgcctgtgtc

SEQ ID NO: 14895 - DNA, 20 bp, synthetic construct
  misc_feature 1..20: note = Description of Artificial Sequence: Synthetic oligonucleotide
  misc_feature 1..20: note = Target: SCN10A; (-) strand; PAM type: NRG; PAM sequence: CAG
  source 1..20: mol_type = other DNA
atgacagtctatgcctgtgt

SEQ ID NO: 14896 - DNA, 20 bp, synthetic construct
  misc_feature 1..20: note = Description of Artificial Sequence: Synthetic oligonucleotide
  misc_feature 1..20: note = Target: SCN10A; (-) strand; PAM type: NRG; PAM sequence: CAG
  source 1..20: mol_type = other DNA
tgtctgtgaatccaacatga

SEQ ID NO: 14897 - DNA, 20 bp, synthetic construct
  misc_feature 1..20: note = Description of Artificial Sequence: Synthetic oligonucleotide
  misc_feature 1..20: note = Target: SCN10A; (-) strand; PAM type: NRG; PAM sequence: CAG
  source 1..20: mol_type = other DNA
cccagaggtttcctctagca

SEQ ID NO: 14898 - DNA, 20 bp, synthetic construct
  misc_feature 1..20: note = Description of Artificial Sequence: Synthetic oligonucleotide
  misc_feature 1..20: note = Target: SCN10A; (-) strand; PAM type: NRG; PAM sequence: TAG
  source 1..20: mol_type = other DNA
tgagccccagaggtttcctc

SEQ ID NO: 14899 - DNA, 20 bp, synthetic construct
  misc_feature 1..20: note = Description of Artificial Sequence: Synthetic oligonucleotide
  misc_feature 1..20: note = Target: SCN10A; (-) strand; PAM type: NRG; PAM sequence: AGG
  source 1..20: mol_type = other DNA
cggcccctggtgagccccag

SEQ ID NO: 14900 - DNA, 20 bp, synthetic construct
  misc_feature 1..20: note = Description of Artificial Sequence: Synthetic oligonucleotide
  misc_feature 1..20: note = Target: SCN10A; (-) strand; PAM type: NRG; PAM sequence: GAG
  source 1..20: mol_type = other DNA
acggcccctggtgagcccca

SEQ ID NO: 14901 - DNA, 20 bp, synthetic construct
  misc_feature 1..20: note = Description of Artificial Sequence: Synthetic oligonucleotide
  misc_feature 1..20: note = Target: SCN10A; (-) strand; PAM type: NRG; PAM sequence: CAG
  source 1..20: mol_type = other DNA
ccacggcccctggtgagccc

SEQ ID NO: 14902 - DNA, 20 bp, synthetic construct
  misc_feature 1..20: note = Description of Artificial Sequence: Synthetic oligonucleotide
  misc_feature 1..20: note = Target: SCN10A; (-) strand; PAM type: NRG; PAM sequence: GAG
  source 1..20: mol_type = other DNA
cccatcccacggcccctggt

SEQ ID NO: 14903 - DNA, 20 bp, synthetic construct
  misc_feature 1..20: note = Description of Artificial Sequence: Synthetic oligonucleotide
  misc_feature 1..20: note = Target: SCN10A; (-) strand; PAM type: NRG; PAM sequence: TGG
  source 1..20: mol_type = other DNA
gaagcccatcccacggcccc

SEQ ID NO: 14904 - DNA, 20 bp, synthetic construct
  misc_feature 1..20: note = Description of Artificial Sequence: Synthetic oligonucleotide
  misc_feature 1..20: note = Target: SCN10A; (-) strand; PAM type: NRG; PAM sequence: CGG
  source 1..20: mol_type = other DNA
agccccagaagcccatccca

SEQ ID NO: 14905 - DNA, 20 bp, synthetic construct
  misc_feature 1..20: note = Description of Artificial Sequence: Synthetic oligonucleotide
  misc_feature 1..20: note = Target: SCN10A; (-) strand; PAM type: NRG; PAM sequence: AAG
  source 1..20: mol_type = other DNA
tgggctccaagaagccccag

SEQ ID NO: 14906 - DNA, 20 bp, synthetic construct
  misc_feature 1..20: note = Description of Artificial Sequence: Synthetic oligonucleotide
  misc_feature 1..20: note = Target: SCN10A; (-) strand; PAM type: NRG; PAM sequence: CAG
  source 1..20: mol_type = other DNA
agttgggctccaagaagccc

SEQ ID NO: 14907 - DNA, 20 bp, synthetic construct
  misc_feature 1..20: note = Description of Artificial Sequence: Synthetic oligonucleotide
  misc_feature 1..20: note = Target: SCN10A; (-) strand; PAM type: NRG; PAM sequence: AAG
  source 1..20: mol_type = other DNA
tgaagaagttgggctccaag

SEQ ID NO: 14908 - DNA, 20 bp, synthetic construct
  misc_feature 1..20: note = Description of Artificial Sequence: Synthetic oligonucleotide
  misc_feature 1..20: note = Target: SCN10A; (-) strand; PAM type: NRG; PAM sequence: AAG
  source 1..20: mol_type = other DNA
ccatgaagaagttgggctcc

SEQ ID NO: 14909 - DNA, 20 bp, synthetic construct
  misc_feature 1..20: note = Description of Artificial Sequence: Synthetic oligonucleotide
  misc_feature 1..20: note = Target: SCN10A; (-) strand; PAM type: NRG; PAM sequence: GGG
  source 1..20: mol_type = other DNA
tacaatgccatgaagaagtt

SEQ ID NO: 14910 - DNA, 20 bp, synthetic construct
  misc_feature 1..20: note = Description of Artificial Sequence: Synthetic oligonucleotide
  misc_feature 1..20: note = Target: SCN10A; (-) strand; PAM type: NRG; PAM sequence: TGG
  source 1..20: mol_type = other DNA
ctacaatgccatgaagaagt

SEQ ID NO: 14911 - DNA, 20 bp, synthetic construct
  misc_feature 1..20: note = Description of Artificial Sequence: Synthetic oligonucleotide
  misc_feature 1..20: note = Target: SCN10A; (-) strand; PAM type: NRG; PAM sequence: AAG
  source 1..20: mol_type = other DNA
aatactacaatgccatgaag

SEQ ID NO: 14912 - DNA, 20 bp, synthetic construct
  misc_feature 1..20: note = Description of Artificial Sequence: Synthetic oligonucleotide
  misc_feature 1..20: note = Target: SCN10A; (-) strand; PAM type: NRG; PAM sequence: AAG
  source 1..20: mol_type = other DNA
agaaatactacaatgccatg

SEQ ID NO: 14913 - DNA, 20 bp, synthetic construct
  misc_feature 1..20: note = Description of Artificial Sequence: Synthetic oligonucleotide
  misc_feature 1..20: note = Target: SCN10A; (-) strand; PAM type: NRG; PAM sequence: AAG
  source 1..20: mol_type = other DNA
tcttcatgacagaggagcag

SEQ ID NO: 14914 - DNA, 20 bp, synthetic construct
  misc_feature 1..20: note = Description of Artificial Sequence: Synthetic oligonucleotide
  misc_feature 1..20: note = Target: SCN10A; (-) strand; PAM type: NRG; PAM sequence: CAG
  source 1..20: mol_type = other DNA
acatcttcatgacagaggag

SEQ ID NO: 14915 - DNA, 20 bp, synthetic construct
  misc_feature 1..20: note = Description of Artificial Sequence: Synthetic oligonucleotide
  misc_feature 1..20: note = Target: SCN10A; (-) strand; PAM type: NRG; PAM sequence: GAG
  source 1..20: mol_type = other DNA
aggacatcttcatgacagag

SEQ ID NO: 14916 - DNA, 20 bp, synthetic construct
  misc_feature 1..20: note = Description of Artificial Sequence: Synthetic oligonucleotide
  misc_feature 1..20: note = Target: SCN10A; (-) strand; PAM type: NRG; PAM sequence: AGG
  source 1..20: mol_type = other DNA
ccaggacatcttcatgacag

SEQ ID NO: 14917 - DNA, 20 bp, synthetic construct
  misc_feature 1..20: note = Description of Artificial Sequence: Synthetic oligonucleotide
  misc_feature 1..20: note = Target: SCN10A; (-) strand; PAM type: NRG; PAM sequence: GAG
  source 1..20: mol_type = other DNA
gccaggacatcttcatgaca

SEQ ID NO: 14918 - DNA, 20 bp, synthetic construct
  misc_feature 1..20: note = Description of Artificial Sequence: Synthetic oligonucleotide
  misc_feature 1..20: note = Target: SCN10A; (-) strand; PAM type: NRG; PAM sequence: CAG
  source 1..20: mol_type = other DNA
gggccaggacatcttcatga

SEQ ID NO: 14919 - DNA, 20 bp, synthetic construct
  misc_feature 1..20: note = Description of Artificial Sequence: Synthetic oligonucleotide
  misc_feature 1..20: note = Target: SCN10A; (-) strand; PAM type: NRG; PAM sequence: AGG
  source 1..20: mol_type = other DNA
ctctctgcacttagggggcc

SEQ ID NO: 14920 - DNA, 20 bp, synthetic construct
  misc_feature 1..20: note = Description of Artificial Sequence: Synthetic oligonucleotide
  misc_feature 1..20: note = Target: SCN10A; (-) strand; PAM type: NRG; PAM sequence: CAG
  source 1..20: mol_type = other DNA
cctctctgcacttagggggc

SEQ ID NO: 14921 - DNA, 20 bp, synthetic construct
  misc_feature 1..20: note = Description of Artificial Sequence: Synthetic oligonucleotide
  misc_feature 1..20: note = Target: SCN10A; (-) strand; PAM type: NRG; PAM sequence: GGG
  source 1..20: mol_type = other DNA
tggccctctctgcacttagg

SEQ ID NO: 14922 - DNA, 20 bp, synthetic construct
  misc_feature 1..20: note = Description of Artificial Sequence: Synthetic oligonucleotide
  misc_feature 1..20: note = Target: SCN10A; (-) strand; PAM type: NRG; PAM sequence: GGG
  source 1..20: mol_type = other DNA
gtggccctctctgcacttag

SEQ ID NO: 14923 - DNA, 20 bp, synthetic construct
  misc_feature 1..20: note = Description of Artificial Sequence: Synthetic oligonucleotide
  misc_feature 1..20: note = Target: SCN10A; (-) strand; PAM type: NRG; PAM sequence: GGG
  source 1..20: mol_type = other DNA
tgtggccctctctgcactta

SEQ ID NO: 14924 - DNA, 20 bp, synthetic construct
  misc_feature 1..20: note = Description of Artificial Sequence: Synthetic oligonucleotide
  misc_feature 1..20: note = Target: SCN10A; (-) strand; PAM type: NRG; PAM sequence: AGG
  source 1..20: mol_type = other DNA
gtgtggccctctctgcactt

SEQ ID NO: 14925 - DNA, 20 bp, synthetic construct
  misc_feature 1..20: note = Description of Artificial Sequence: Synthetic oligonucleotide
  misc_feature 1..20: note = Target: SCN10A; (-) strand; PAM type: NRG; PAM sequence: TAG
  source 1..20: mol_type = other DNA
agtgtggccctctctgcact

SEQ ID NO: 14926 - DNA, 20 bp, synthetic construct
  misc_feature 1..20: note = Description of Artificial Sequence: Synthetic oligonucleotide
  misc_feature 1..20: note = Target: SCN10A; (-) strand; PAM type: NRG; PAM sequence: TGG
  source 1..20: mol_type = other DNA
ctcttgctttagtaacagtg

SEQ ID NO: 14927 - DNA, 20 bp, synthetic construct
  misc_feature 1..20: note = Description of Artificial Sequence: Synthetic oligonucleotide
  misc_feature 1..20: note = Target: SCN10A; (-) strand; PAM type: NRG; PAM sequence: CAG
  source 1..20: mol_type = other DNA
ggttcctcttgctttagtaa

SEQ ID NO: 14928 - DNA, 20 bp, synthetic construct
  misc_feature 1..20: note = Description of Artificial Sequence: Synthetic oligonucleotide
  misc_feature 1..20: note = Target: SCN10A; (-) strand; PAM type: NRG; PAM sequence: TAG
  source 1..20: mol_type = other DNA
gtagggggttcctcttgctt

SEQ ID NO: 14929 - DNA, 20 bp, synthetic construct
  misc_feature 1..20: note = Description of Artificial Sequence: Synthetic oligonucleotide
  misc_feature 1..20: note = Target: SCN10A; (-) strand; PAM type: NRG; PAM sequence: GGG
  source 1..20: mol_type = other DNA
ctgattttggtatccgtagg

SEQ ID NO: 14930 - DNA, 20 bp, synthetic construct
  misc_feature 1..20: note = Description of Artificial Sequence: Synthetic oligonucleotide
  misc_feature 1..20: note = Target: SCN10A; (-) strand; PAM type: NRG; PAM sequence: GGG
  source 1..20: mol_type = other DNA
tctgattttggtatccgtag

SEQ ID NO: 14931 - DNA, 20 bp, synthetic construct
  misc_feature 1..20: note = Description of Artificial Sequence: Synthetic oligonucleotide
  misc_feature 1..20: note = Target: SCN10A; (-) strand; PAM type: NRG; PAM sequence: GGG
  source 1..20: mol_type = other DNA
ttctgattttggtatccgta

SEQ ID NO: 14932 - DNA, 20 bp, synthetic construct
  misc_feature 1..20: note = Description of Artificial Sequence: Synthetic oligonucleotide
  misc_feature 1..20: note = Target: SCN10A; (-) strand; PAM type: NRG; PAM sequence: AGG
  source 1..20: mol_type = other DNA
gttctgattttggtatccgt

SEQ ID NO: 14933 - DNA, 20 bp, synthetic construct
  misc_feature 1..20: note = Description of Artificial Sequence: Synthetic oligonucleotide
  misc_feature 1..20: note = Target: SCN10A; (-) strand; PAM type: NRG; PAM sequence: TAG
  source 1..20: mol_type = other DNA
tgttctgattttggtatccg

SEQ ID NO: 14934 - DNA, 20 bp, synthetic construct
  misc_feature 1..20: note = Description of Artificial Sequence: Synthetic oligonucleotide
  misc_feature 1..20: note = Target: SCN10A; (-) strand; PAM type: NRG; PAM sequence: TGG
  source 1..20: mol_type = other DNA
tctcctgcctgttctgattt

SEQ ID NO: 14935 - DNA, 20 bp, synthetic construct
  misc_feature 1..20: note = Description of Artificial Sequence: Synthetic oligonucleotide
  misc_feature 1..20: note = Target: SCN10A; (-) strand; PAM type: NRG; PAM sequence: AGG
  source 1..20: mol_type = other DNA
tatctgcagaggaggggaga

SEQ ID NO: 14936 - DNA, 20 bp, synthetic construct
  misc_feature 1..20: note = Description of Artificial Sequence: Synthetic oligonucleotide
  misc_feature 1..20: note = Target: SCN10A; (-) strand; PAM type: NRG; PAM sequence: AAG
  source 1..20: mol_type = other DNA
ctatctgcagaggaggggag

SEQ ID NO: 14937 - DNA, 20 bp, synthetic construct
  misc_feature 1..20: note = Description of Artificial Sequence: Synthetic oligonucleotide
  misc_feature 1..20: note = Target: SCN10A; (-) strand; PAM type: NRG; PAM sequence: GAG
  source 1..20: mol_type = other DNA
tgtctatctgcagaggaggg

SEQ ID NO: 14938 - DNA, 20 bp, synthetic construct
  misc_feature 1..20: note = Description of Artificial Sequence: Synthetic oligonucleotide
  misc_feature 1..20: note = Target: SCN10A; (-) strand; PAM type: NRG; PAM sequence: GGG
  source 1..20: mol_type = other DNA
tttgtctatctgcagaggag

SEQ ID NO: 14939 - DNA, 20 bp, synthetic construct
  misc_feature 1..20: note = Description of Artificial Sequence: Synthetic oligonucleotide
  misc_feature 1..20: note = Target: SCN10A; (-) strand; PAM type: NRG; PAM sequence: GGG
  source 1..20: mol_type = other DNA
gtttgtctatctgcagagga

SEQ ID NO: 14940 - DNA, 20 bp, synthetic construct
  misc_feature 1..20: note = Description of Artificial Sequence: Synthetic oligonucleotide
  misc_feature 1..20: note = Target: SCN10A; (-) strand; PAM type: NRG; PAM sequence: AGG
  source 1..20: mol_type = other DNA
ggtttgtctatctgcagagg

SEQ ID NO: 14941 - DNA, 20 bp, synthetic construct
  misc_feature 1..20: note = Description of Artificial Sequence: Synthetic oligonucleotide
  misc_feature 1..20: note = Target: SCN10A; (-) strand; PAM type: NRG; PAM sequence: GAG
  source 1..20: mol_type = other DNA
tggtttgtctatctgcagag

SEQ ID NO: 14942 - DNA, 20 bp, synthetic construct
  misc_feature 1..20: note = Description of Artificial Sequence: Synthetic oligonucleotide
  misc_feature 1..20: note = Target: SCN10A; (-) strand; PAM type: NRG; PAM sequence: AGG
  source 1..20: mol_type = other DNA
cttggtttgtctatctgcag

SEQ ID NO: 14943 - DNA, 20 bp, synthetic construct
  misc_feature 1..20: note = Description of Artificial Sequence: Synthetic oligonucleotide
  misc_feature 1..20: note = Target: SCN10A; (-) strand; PAM type: NRG; PAM sequence: GAG
  source 1..20: mol_type = other DNA
gcttggtttgtctatctgca

SEQ ID NO: 14944 - DNA, 20 bp, synthetic construct
  misc_feature 1..20: note = Description of Artificial Sequence: Synthetic oligonucleotide
  misc_feature 1..20: note = Target: SCN10A; (-) strand; PAM type: NRG; PAM sequence: CAG
  source 1..20: mol_type = other DNA
gggcttggtttgtctatctg

SEQ ID NO: 14945 - DNA, 20 bp, synthetic construct
  misc_feature 1..20: note = Description of Artificial Sequence: Synthetic oligonucleotide
  misc_feature 1..20: note = Target: SCN10A; (-) strand; PAM type: NRG; PAM sequence: TGG
  source 1..20: mol_type = other DNA
acactccttgatgctgggct

SEQ ID NO: 14946 - DNA, 20 bp, synthetic construct
  misc_feature 1..20: note = Description of Artificial Sequence: Synthetic oligonucleotide
  misc_feature 1..20: note = Target: SCN10A; (-) strand; PAM type: NRG; PAM sequence: GGG
  source 1..20: mol_type = other DNA
gcaagacactccttgatgct

SEQ ID NO: 14947 - DNA, 20 bp, synthetic construct
  misc_feature 1..20: note = Description of Artificial Sequence: Synthetic oligonucleotide
  misc_feature 1..20: note = Target: SCN10A; (-) strand; PAM type: NRG; PAM sequence: TGG
  source 1..20: mol_type = other DNA
ggcaagacactccttgatgc

SEQ ID NO: 14948 - DNA, 20 bp, synthetic construct
  misc_feature 1..20: note = Description of Artificial Sequence: Synthetic oligonucleotide
  misc_feature 1..20: note = Target: SCN10A; (-) strand; PAM type: NRG; PAM sequence: AAG
  source 1..20: mol_type = other DNA
gttccgacactggatgtggc

SEQ ID NO: 14949 - DNA, 20 bp, synthetic construct
  misc_feature 1..20: note = Description of Artificial Sequence: Synthetic oligonucleotide
  misc_feature 1..20: note = Target: SCN10A; (-) strand; PAM type: NRG; PAM sequence: TGG
  source 1..20: mol_type = other DNA
caccgttccgacactggatg

SEQ ID NO: 14950 - DNA, 20 bp, synthetic construct
  misc_feature 1..20: note = Description of Artificial Sequence: Synthetic oligonucleotide
  misc_feature 1..20: note = Target: SCN10A; (-) strand; PAM type: NRG; PAM sequence: TGG
  source 1..20: mol_type = other DNA
cagtcccaccgttccgacac

SEQ ID NO: 14951 - DNA, 20 bp, synthetic construct
  misc_feature 1..20: note = Description of Artificial Sequence: Synthetic oligonucleotide
  misc_feature 1..20: note = Target: SCN10A; (-) strand; PAM type: NRG; PAM sequence: CAG
  source 1..20: mol_type = other DNA
agggagtcagcaatggaact

SEQ ID NO: 14952 - DNA, 20 bp, synthetic construct
  misc_feature 1..20: note = Description of Artificial Sequence: Synthetic oligonucleotide
  misc_feature 1..20: note = Target: SCN10A; (-) strand; PAM type: NRG; PAM sequence: TGG
  source 1..20: mol_type = other DNA
cccaggcagggagtcagcaa

SEQ ID NO: 14953 - DNA, 20 bp, synthetic construct
  misc_feature 1..20: note = Description of Artificial Sequence: Synthetic oligonucleotide
  misc_feature 1..20: note = Target: SCN10A; (-) strand; PAM type: NRG; PAM sequence: CAG
  source 1..20: mol_type = other DNA
tagagacccaggcagggagt

SEQ ID NO: 14954 - DNA, 20 bp, synthetic construct
  misc_feature 1..20: note = Description of Artificial Sequence: Synthetic oligonucleotide
  misc_feature 1..20: note = Target: SCN10A; (-) strand; PAM type: NRG; PAM sequence: GAG
  source 1..20: mol_type = other DNA
gctttagagacccaggcagg

SEQ ID NO: 14955 - DNA, 20 bp, synthetic construct
  misc_feature 1..20: note = Description of Artificial Sequence: Synthetic oligonucleotide
  misc_feature 1..20: note = Target: SCN10A; (-) strand; PAM type: NRG; PAM sequence: GGG
  source 1..20: mol_type = other DNA
ttgctttagagacccaggca

SEQ ID NO: 14956 - DNA, 20 bp, synthetic construct
  misc_feature 1..20: note = Description of Artificial Sequence: Synthetic oligonucleotide
  misc_feature 1..20: note = Target: SCN10A; (-) strand; PAM type: NRG; PAM sequence: AGG
  source 1..20: mol_type = other DNA
tttgctttagagacccaggc

SEQ ID NO: 14957 - DNA, 20 bp, synthetic construct
  misc_feature 1..20: note = Description of Artificial Sequence: Synthetic oligonucleotide
  misc_feature 1..20: note = Target: SCN10A; (-) strand; PAM type: NRG; PAM sequence: CAG
  source 1..20: mol_type = other DNA
ctttgctttagagacccagg

SEQ ID NO: 14958 - DNA, 20 bp, synthetic construct
  misc_feature 1..20: note = Description of Artificial Sequence: Synthetic oligonucleotide
  misc_feature 1..20: note = Target: SCN10A; (-) strand; PAM type: NRG; PAM sequence: AGG
  source 1..20: mol_type = other DNA
tggctttgctttagagaccc

SEQ ID NO: 14959 - DNA, 20 bp, synthetic construct
  misc_feature 1..20: note = Description of Artificial Sequence: Synthetic oligonucleotide
  misc_feature 1..20: note = Target: SCN10A; (-) strand; PAM type: NRG; PAM sequence: CAG
  source 1..20: mol_type = other DNA
ctggctttgctttagagacc

SEQ ID NO: 14960 - DNA, 20 bp, synthetic construct
  misc_feature 1..20: note = Description of Artificial Sequence: Synthetic oligonucleotide
  misc_feature 1..20: note = Target: SCN10A; (-) strand; PAM type: NRG; PAM sequence: GAG
  source 1..20: mol_type = other DNA
cagaaactggctttgcttta

SEQ ID NO: 14961 - DNA, 20 bp, synthetic construct
  misc_feature 1..20: note = Description of Artificial Sequence: Synthetic oligonucleotide
  misc_feature 1..20: note = Target: SCN10A; (-) strand; PAM type: NRG; PAM sequence: TAG
  source 1..20: mol_type = other DNA
aacagaaactggctttgctt

SEQ ID NO: 14962 - DNA, 20 bp, synthetic construct
  misc_feature 1..20: note = Description of Artificial Sequence: Synthetic oligonucleotide
  misc_feature 1..20: note = Target: SCN10A; (-) strand; PAM type: NRG; PAM sequence: TGG
  source 1..20: mol_type = other DNA
gatccctggagaacagaaac

SEQ ID NO: 14963 - DNA, 20 bp, synthetic construct
  misc_feature 1..20: note = Description of Artificial Sequence: Synthetic oligonucleotide
  misc_feature 1..20: note = Target: SCN10A; (-) strand; PAM type: NRG; PAM sequence: CAG
  source 1..20: mol_type = other DNA
atctctggatccctggagaa

SEQ ID NO: 14964 - DNA, 20 bp, synthetic construct
  misc_feature 1..20: note = Description of Artificial Sequence: Synthetic oligonucleotide
  misc_feature 1..20: note = Target: SCN10A; (-) strand; PAM type: NRG; PAM sequence: GAG
  source 1..20: mol_type = other DNA
ccagcatctctggatccctg

SEQ ID NO: 14965 - DNA, 20 bp, synthetic construct
  misc_feature 1..20: note = Description of Artificial Sequence: Synthetic oligonucleotide
  misc_feature 1..20: note = Target: SCN10A; (-) strand; PAM type: NRG; PAM sequence: TGG
  source 1..20: mol_type = other DNA
atccagcatctctggatccc

SEQ ID NO: 14966 - DNA, 20 bp, synthetic construct
  misc_feature 1..20: note = Description of Artificial Sequence: Synthetic oligonucleotide
  misc_feature 1..20: note = Target: SCN10A; (-) strand; PAM type: NRG; PAM sequence: TGG
  source 1..20: mol_type = other DNA
caccctttatccagcatctc

SEQ ID NO: 14967 - DNA, 20 bp, synthetic construct
  misc_feature 1..20: note = Description of Artificial Sequence: Synthetic oligonucleotide
  misc_feature 1..20: note = Target: SCN10A; (-) strand; PAM type: NRG; PAM sequence: CAG
  source 1..20: mol_type = other DNA
aaccctccccaccctttatc

SEQ ID NO: 14968 - DNA, 20 bp, synthetic construct
  misc_feature 1..20: note = Description of Artificial Sequence: Synthetic oligonucleotide
  misc_feature 1..20: note = Target: SCN10A; (-) strand; PAM type: NRG; PAM sequence: GAG
  source 1..20: mol_type = other DNA
ccaacatgtaccttctcctt

SEQ ID NO: 14969 - DNA, 20 bp, synthetic construct
  misc_feature 1..20: note = Description of Artificial Sequence: Synthetic oligonucleotide
  misc_feature 1..20: note = Target: SCN10A; (-) strand; PAM type: NRG; PAM sequence: CAG
  source 1..20: mol_type = other DNA
aacaggctagatccaaggct

SEQ ID NO: 14970 - DNA, 20 bp, synthetic construct
  misc_feature 1..20: note = Description of Artificial Sequence: Synthetic oligonucleotide
  misc_feature 1..20: note = Target: SCN10A; (-) strand; PAM type: NRG; PAM sequence: AGG
  source 1..20: mol_type = other DNA
gaatgaacaggctagatcca

SEQ ID NO: 14971 - DNA, 20 bp, synthetic construct
  misc_feature 1..20: note = Description of Artificial Sequence: Synthetic oligonucleotide
  misc_feature 1..20: note = Target: SCN10A; (-) strand; PAM type: NRG; PAM sequence: AAG
  source 1..20: mol_type = other DNA
ggaatgaacaggctagatcc

SEQ ID NO: 14972 - DNA, 20 bp, synthetic construct
  misc_feature 1..20: note = Description of Artificial Sequence: Synthetic oligonucleotide
  misc_feature 1..20: note = Target: SCN10A; (-) strand; PAM type: NRG; PAM sequence: TAG
  source 1..20: mol_type = other DNA
ttttactggaatgaacaggc

SEQ ID NO: 14973 - DNA, 20 bp, synthetic construct
  misc_feature 1..20: note = Description of Artificial Sequence: Synthetic oligonucleotide
  misc_feature 1..20: note = Target: SCN10A; (-) strand; PAM type: NRG; PAM sequence: AGG
  source 1..20: mol_type = other DNA
agaattttactggaatgaac

SEQ ID NO: 14974 - DNA, 20 bp, synthetic construct
  misc_feature 1..20: note = Description of Artificial Sequence: Synthetic oligonucleotide
  misc_feature 1..20: note = Target: SCN10A; (-) strand; PAM type: NRG; PAM sequence: CAG
  source 1..20: mol_type = other DNA
aagaattttactggaatgaa

SEQ ID NO: 14975 - DNA, 20 bp, synthetic construct
  misc_feature 1..20: note = Description of Artificial Sequence: Synthetic oligonucleotide
  misc_feature 1..20: note = Target: SCN10A; (-) strand; PAM type: NRG; PAM sequence: TGG
  source 1..20: mol_type = other DNA
agaagcccaaagaattttac

SEQ ID NO: 14976 - DNA, 20 bp, synthetic construct
  misc_feature 1..20: note = Description of Artificial Sequence: Synthetic oligonucleotide
  misc_feature 1..20: note = Target: SCN10A; (-) strand; PAM type: NRG; PAM sequence: AAG
  source 1..20: mol_type = other DNA
actgtgactctagaagccca

SEQ ID NO: 14977 - DNA, 20 bp, synthetic construct
  misc_feature 1..20: note = Description of Artificial Sequence: Synthetic oligonucleotide
  misc_feature 1..20: note = Target: SCN10A; (-) strand; PAM type: NRG; PAM sequence: AAG
  source 1..20: mol_type = other DNA
gggagggactgtgactctag

SEQ ID NO: 14978 - DNA, 20 bp, synthetic construct
  misc_feature 1..20: note = Description of Artificial Sequence: Synthetic oligonucleotide
  misc_feature 1..20: note = Target: SCN10A; (-) strand; PAM type: NRG; PAM sequence: TAG
  source 1..20: mol_type = other DNA
cctgggagggactgtgactc

SEQ ID NO: 14979 - DNA, 20 bp, synthetic construct
  misc_feature 1..20: note = Description of Artificial Sequence: Synthetic oligonucleotide
  misc_feature 1..20: note = Target: SCN10A; (-) strand; PAM type: NRG; PAM sequence: GGG
  source 1..20: mol_type = other DNA
aaatctcttgccccctggga

SEQ ID NO: 14980 - DNA, 20 bp, synthetic construct
  misc_feature 1..20: note = Description of Artificial Sequence: Synthetic oligonucleotide
  misc_feature 1..20: note = Target: SCN10A; (-) strand; PAM type: NRG; PAM sequence: AGG
  source 1..20: mol_type = other DNA
gaaatctcttgccccctggg

SEQ ID NO: 14981 - DNA, 20 bp, synthetic construct
  misc_feature 1..20: note = Description of Artificial Sequence: Synthetic oligonucleotide
  misc_feature 1..20: note = Target: SCN10A; (-) strand; PAM type: NRG; PAM sequence: GAG
  source 1..20: mol_type = other DNA
ggaaatctcttgccccctgg

SEQ ID NO: 14982 - DNA, 20 bp, synthetic construct
  misc_feature 1..20: note = Description of Artificial Sequence: Synthetic oligonucleotide
  misc_feature 1..20: note = Target: SCN10A; (-) strand; PAM type: NRG; PAM sequence: GGG
  source 1..20: mol_type = other DNA
caggaaatctcttgccccct

SEQ ID NO: 14983 - DNA, 20 bp, synthetic construct
  misc_feature 1..20: note = Description of Artificial Sequence: Synthetic oligonucleotide
  misc_feature 1..20: note = Target: SCN10A; (-) strand; PAM type: NRG; PAM sequence: TGG
  source 1..20: mol_type = other DNA
tcaggaaatctcttgccccc

SEQ ID NO: 14984 - DNA, 20 bp, synthetic construct
  misc_feature 1..20: note = Description of Artificial Sequence: Synthetic oligonucleotide
  misc_feature 1..20: note = Target: SCN10A; (-) strand; PAM type: NRG; PAM sequence: AGG
  source 1..20: mol_type = other DNA
gtctttgcttcaaggtcctc

SEQ ID NO: 14985 - DNA, 20 bp, synthetic construct
  misc_feature 1..20: note = Description of Artificial Sequence: Synthetic oligonucleotide
  misc_feature 1..20: note = Target: SCN10A; (-) strand; PAM type: NRG; PAM sequence: CAG
  source 1..20: mol_type = other DNA
agtctttgcttcaaggtcct

SEQ ID NO: 14986 - DNA, 20 bp, synthetic construct
  misc_feature 1..20: note = Description of Artificial Sequence: Synthetic oligonucleotide
  misc_feature 1..20: note = Target: SCN10A; (-) strand; PAM type: NRG; PAM sequence: AGG
  source 1..20: mol_type = other DNA
ctcccagagtctttgcttca

SEQ ID NO: 14987 - DNA, 20 bp, synthetic construct
  misc_feature 1..20: note = Description of Artificial Sequence: Synthetic oligonucleotide
  misc_feature 1..20: note = Target: SCN10A; (-) strand; PAM type: NRG; PAM sequence: AAG
  source 1..20: mol_type = other DNA
cctcccagagtctttgcttc

SEQ ID NO: 14988 - DNA, 20 bp, synthetic construct
  misc_feature 1..20: note = Description of Artificial Sequence: Synthetic oligonucleotide
  misc_feature 1..20: note = Target: SCN10A; (-) strand; PAM type: NRG; PAM sequence: GAG
  source 1..20: mol_type = other DNA
gagggcttctgtccctccca

SEQ ID NO: 14989 - DNA, 20 bp, synthetic construct
  misc_feature 1..20: note = Description of Artificial Sequence: Synthetic oligonucleotide
  misc_feature 1..20: note = Target: SCN10A; (-) strand; PAM type: NRG; PAM sequence: CAG
  source 1..20: mol_type = other DNA
ttgagggcttctgtccctcc

SEQ ID NO: 14990 - DNA, 20 bp, synthetic construct
  misc_feature 1..20: note = Description of Artificial Sequence: Synthetic oligonucleotide
  misc_feature 1..20: note = Target: SCN10A; (-) strand; PAM type: NRG; PAM sequence: GGG
  source 1..20: mol_type = other DNA
cctctccagaaaagatttga

SEQ ID NO: 14991 - DNA, 20 bp, synthetic construct
  misc_feature 1..20: note = Description of Artificial Sequence: Synthetic oligonucleotide
  misc_feature 1..20: note = Target: SCN10A; (-) strand; PAM type: NRG; PAM sequence: AGG
  source 1..20: mol_type = other DNA
tcctctccagaaaagatttg

SEQ ID NO: 14992 - DNA, 20 bp, synthetic construct
  misc_feature 1..20: note = Description of Artificial Sequence: Synthetic oligonucleotide
  misc_feature 1..20: note = Target: SCN10A; (-) strand; PAM type: NRG; PAM sequence: GAG
  source 1..20: mol_type = other DNA
ctcctctccagaaaagattt

SEQ ID NO: 14993 - DNA, 20 bp, synthetic construct
  misc_feature 1..20: note = Description of Artificial Sequence: Synthetic oligonucleotide
  misc_feature 1..20: note = Target: SCN10A; (-) strand; PAM type: NRG; PAM sequence: AAG
  source 1..20: mol_type = other DNA
tcatctcctcctctccagaa

SEQ ID NO: 14994 - DNA, 20 bp, synthetic construct
  misc_feature 1..20: note = Description of Artificial Sequence: Synthetic oligonucleotide
  misc_feature 1..20: note = Target: SCN10A; (-) strand; PAM type: NRG; PAM sequence: CAG
  source 1..20: mol_type = other DNA
tgtcctcatctcctcctctc

SEQ ID NO: 14995 - DNA, 20 bp, synthetic construct
  misc_feature 1..20: note = Description of Artificial Sequence: Synthetic oligonucleotide
  misc_feature 1..20: note = Target: SCN10A; (-) strand; PAM type: NRG; PAM sequence: CAG
  source 1..20: mol_type = other DNA
ccaaggacccaaggataagg

SEQ ID NO: 14996 - DNA, 20 bp, synthetic construct
  misc_feature 1..20: note = Description of Artificial Sequence: Synthetic oligonucleotide
  misc_feature 1..20: note = Target: SCN10A; (-) strand; PAM type: NRG; PAM sequence: AGG
  source 1..20: mol_type = other DNA
agaccaaggacccaaggata

SEQ ID NO: 14997 - DNA, 20 bp, synthetic construct
  misc_feature 1..20: note = Description of Artificial Sequence: Synthetic oligonucleotide
  misc_feature 1..20: note = Target: SCN10A; (-) strand; PAM type: NRG; PAM sequence: AAG
  source 1..20: mol_type = other DNA
gagaccaaggacccaaggat

SEQ ID NO: 14998 - DNA, 20 bp, synthetic construct
  misc_feature 1..20: note = Description of Artificial Sequence: Synthetic oligonucleotide
  misc_feature 1..20: note = Target: SCN10A; (-) strand; PAM type: NRG; PAM sequence: AGG
  source 1..20: mol_type = other DNA
cctctgagaccaaggaccca

SEQ ID NO: 14999 - DNA, 20 bp, synthetic construct
  misc_feature 1..20: note = Description of Artificial Sequence: Synthetic oligonucleotide
  misc_feature 1..20: note = Target: SCN10A; (-) strand; PAM type: NRG; PAM sequence: AAG
  source 1..20: mol_type = other DNA
ccctctgagaccaaggaccc

SEQ ID NO: 15000 - DNA, 20 bp, synthetic construct
  misc_feature 1..20: note = Description of Artificial Sequence: Synthetic oligonucleotide
  misc_feature 1..20: note = Target: SCN10A; (-) strand; PAM type: NRG; PAM sequence: AGG
  source 1..20: mol_type = other DNA
cagaggtccctctgagacca

SEQ ID NO: 15001 - DNA, 20 bp, synthetic construct
  misc_feature 1..20: note = Description of Artificial Sequence: Synthetic oligonucleotide
  misc_feature 1..20: note = Target: SCN10A; (-) strand; PAM type: NRG; PAM sequence: AAG
  source 1..20: mol_type = other DNA
ccagaggtccctctgagacc

SEQ ID NO: 15002 - DNA, 20 bp, synthetic construct
  misc_feature 1..20: note = Description of Artificial Sequence: Synthetic oligonucleotide
  misc_feature 1..20: note = Target: SCN10A; (-) strand; PAM type: NRG; PAM sequence: GAG
  source 1..20: mol_type = other DNA
agagaaccagaggtccctct

SEQ ID NO: 15003 - DNA, 20 bp, synthetic construct
  misc_feature 1..20: note = Description of Artificial Sequence: Synthetic oligonucleotide
  misc_feature 1..20: note = Target: SCN10A; (-) strand; PAM type: NRG; PAM sequence: AGG
  source 1..20: mol_type = other DNA
cagggcctcaagagaaccag

SEQ ID NO: 15004 - DNA, 20 bp, synthetic construct
  misc_feature 1..20: note = Description of Artificial Sequence: Synthetic oligonucleotide
  misc_feature 1..20: note = Target: SCN10A; (-) strand; PAM type: NRG; PAM sequence: GAG
  source 1..20: mol_type = other DNA
gcagggcctcaagagaacca

SEQ ID NO: 15005 - DNA, 20 bp, synthetic construct
  misc_feature 1..20: note = Description of Artificial Sequence: Synthetic oligonucleotide
  misc_feature 1..20: note = Target: SCN10A; (-) strand; PAM type: NRG; PAM sequence: CAG
  source 1..20: mol_type = other DNA
tggcagggcctcaagagaac

SEQ ID NO: 15006 - DNA, 20 bp, synthetic construct
  misc_feature 1..20: note = Description of Artificial Sequence: Synthetic oligonucleotide
  misc_feature 1..20: note = Target: SCN10A; (-) strand; PAM type: NRG; PAM sequence: GAG
  source 1..20: mol_type = other DNA
tgtgactggcagggcctcaa

SEQ ID NO: 15007 - DNA, 20 bp, synthetic construct
  misc_feature 1..20: note = Description of Artificial Sequence: Synthetic oligonucleotide
  misc_feature 1..20: note = Target: SCN10A; (-) strand; PAM type: NRG; PAM sequence: AAG
  source 1..20: mol_type = other DNA
agtgtgactggcagggcctc

SEQ ID NO: 15008 - DNA, 20 bp, synthetic construct
  misc_feature 1..20: note = Description of Artificial Sequence: Synthetic oligonucleotide
  misc_feature 1..20: note = Target: SCN10A; (-) strand; PAM type: NRG; PAM sequence: GGG
  source 1..20: mol_type = other DNA
agagggcagtgtgactggca

SEQ ID NO: 15009 - DNA, 20 bp, synthetic construct
  misc_feature 1..20: note = Description of Artificial Sequence: Synthetic oligonucleotide
  misc_feature 1..20: note = Target: SCN10A; (-) strand; PAM type: NRG; PAM sequence: AGG
  source 1..20: mol_type = other DNA
cagagggcagtgtgactggc

SEQ ID NO: 15010 - DNA, 20 bp, synthetic construct
  misc_feature 1..20: note = Description of Artificial Sequence: Synthetic oligonucleotide
  misc_feature 1..20: note = Target: SCN10A; (-) strand; PAM type: NRG; PAM sequence: CAG
  source 1..20: mol_type = other DNA
gcagagggcagtgtgactgg

SEQ ID NO: 15011 - DNA, 20 bp, synthetic construct
  misc_feature 1..20: note = Description of Artificial Sequence: Synthetic oligonucleotide
  misc_feature 1..20: note = Target: SCN10A; (-) strand; PAM type: NRG; PAM sequence: TGG
  source 1..20: mol_type = other DNA
acagcagagggcagtgtgac

SEQ ID NO: 15012 - DNA, 20 bp, synthetic construct
  misc_feature 1..20: note = Description of Artificial Sequence: Synthetic oligonucleotide
  misc_feature 1..20: note = Target: SCN10A; (-) strand; PAM type: NRG; PAM sequence: CAG
  source 1..20: mol_type = other DNA
ggcactgtaacagcagaggg

SEQ ID NO: 15013 - DNA, 20 bp, synthetic construct
  misc_feature 1..20: note = Description of Artificial Sequence: Synthetic oligonucleotide
  misc_feature 1..20: note = Target: SCN10A; (-) strand; PAM type: NRG; PAM sequence: GGG
  source 1..20: mol_type = other DNA
tctggcactgtaacagcaga

SEQ ID NO: 15014 - DNA, 20 bp, synthetic construct
  misc_feature 1..20: note = Description of Artificial Sequence: Synthetic oligonucleotide
  misc_feature 1..20: note = Target: SCN10A; (-) strand; PAM type: NRG; PAM sequence: AGG
  source 1..20: mol_type = other DNA
ttctggcactgtaacagcag

SEQ ID NO: 15015 - DNA, 20 bp, synthetic construct
  misc_feature 1..20: note = Description of Artificial Sequence: Synthetic oligonucleotide
  misc_feature 1..20: note = Target: SCN10A; (-) strand; PAM type: NRG; PAM sequence: GAG
  source 1..20: mol_type = other DNA
tttctggcactgtaacagca

SEQ ID NO: 15016 - DNA, 20 bp, synthetic construct
  misc_feature 1..20: note = Description of Artificial Sequence: Synthetic oligonucleotide
  misc_feature 1..20: note = Target: SCN10A; (-) strand; PAM type: NRG; PAM sequence: CAG
  source 1..20: mol_type = other DNA
agtttctggcactgtaacag

SEQ ID NO: 15017 - DNA, 20 bp, synthetic construct
  misc_feature 1..20: note = Description of Artificial Sequence: Synthetic oligonucleotide
  misc_feature 1..20: note = Target: SCN10A; (-) strand; PAM type: NRG; PAM sequence: CAG
  source 1..20: mol_type = other DNA
tgcagtttctggcactgtaa

SEQ ID NO: 15018 - DNA, 20 bp, synthetic construct
  misc_feature 1..20: note = Description of Artificial Sequence: Synthetic oligonucleotide
  misc_feature 1..20: note = Target: SCN10A; (-) strand; PAM type: NRG; PAM sequence: TGG
  source 1..20: mol_type = other DNA
atcttcgttggtgcagtttc

SEQ ID NO: 15019 - DNA, 20 bp, synthetic construct
  misc_feature 1..20: note = Description of Artificial Sequence: Synthetic oligonucleotide
  misc_feature 1..20: note = Target: SCN10A; (-) strand; PAM type: NRG; PAM sequence: CAG
  source 1..20: mol_type = other DNA
ggaaaacatcttcgttggtg

SEQ ID NO: 15020 - DNA, 20 bp, synthetic construct
  misc_feature 1..20: note = Description of Artificial Sequence: Synthetic oligonucleotide
  misc_feature 1..20: note = Target: SCN10A; (-) strand; PAM type: NRG; PAM sequence: TGG
  source 1..20: mol_type = other DNA
agggaggaaaacatcttcgt

SEQ ID NO: 15021 - DNA, 20 bp, synthetic construct
  misc_feature 1..20: note = Description of Artificial Sequence: Synthetic oligonucleotide
  misc_feature 1..20: note = Target: SCN10A; (-) strand; PAM type: NRG; PAM sequence: AGG
  source 1..20: mol_type = other DNA
ctaatacccaatcctaaggg

SEQ ID NO: 15022 - DNA, 20 bp, synthetic construct
  misc_feature 1..20: note = Description of Artificial Sequence: Synthetic oligonucleotide
  misc_feature 1..20: note = Target: SCN10A; (-) strand; PAM type: NRG; PAM sequence: GAG
  source 1..20: mol_type = other DNA
actaatacccaatcctaagg

SEQ ID NO: 15023 - DNA, 20 bp, synthetic construct
  misc_feature 1..20: note = Description of Artificial Sequence: Synthetic oligonucleotide
  misc_feature 1..20: note = Target: SCN10A; (-) strand; PAM type: NRG; PAM sequence: GGG
  source 1..20: mol_type = other DNA
aaactaatacccaatcctaa

SEQ ID NO: 15024 - DNA, 20 bp, synthetic construct
  misc_feature 1..20: note = Description of Artificial Sequence: Synthetic oligonucleotide
  misc_feature 1..20: note = Target: SCN10A; (-) strand; PAM type: NRG; PAM sequence: AGG
  source 1..20: mol_type = other DNA
aaaactaatacccaatccta

SEQ ID NO: 15025 - DNA, 20 bp, synthetic construct
  misc_feature 1..20: note = Description of Artificial Sequence: Synthetic oligonucleotide
  misc_feature 1..20: note = Target: SCN10A; (-) strand; PAM type: NRG; PAM sequence: AAG
  source 1..20: mol_type = other DNA
aaaaactaatacccaatcct

SEQ ID NO: 15026 - DNA, 20 bp, synthetic construct
  misc_feature 1..20: note = Description of Artificial Sequence: Synthetic oligonucleotide
  misc_feature 1..20: note = Target: SCN10A; (-) strand; PAM type: NRG; PAM sequence: AAG
  source 1..20: mol_type = other DNA
gaaaatccaaagggccccta

SEQ ID NO: 15027 - DNA, 20 bp, synthetic construct
  misc_feature 1..20: note = Description of Artificial Sequence: Synthetic oligonucleotide
  misc_feature 1..20: note = Target: SCN10A; (-) strand; PAM type: NRG; PAM sequence: GGG
  source 1..20: mol_type = other DNA
ttgaatgaagaaaatccaaa

SEQ ID NO: 15028 - DNA, 20 bp, synthetic construct
  misc_feature 1..20: note = Description of Artificial Sequence: Synthetic oligonucleotide
  misc_feature 1..20: note = Target: SCN10A; (-) strand; PAM type: NRG; PAM sequence: AGG
  source 1..20: mol_type = other DNA
tttgaatgaagaaaatccaa

SEQ ID NO: 15029 - DNA, 20 bp, synthetic construct
  misc_feature 1..20: note = Description of Artificial Sequence: Synthetic oligonucleotide
  misc_feature 1..20: note = Target: SCN10A; (-) strand; PAM type: NRG; PAM sequence: AAG
  source 1..20: mol_type = other DNA
gtttgaatgaagaaaatcca

SEQ ID NO: 15030 - DNA, 20 bp, synthetic construct
  misc_feature 1..20: note = Description of Artificial Sequence: Synthetic oligonucleotide
  misc_feature 1..20: note = Target: SCN10A; (-) strand; PAM type: NRG; PAM sequence: AAG
  source 1..20: mol_type = other DNA
taaaggtgagagtttgaatg

SEQ ID NO: 15031 - DNA, 20 bp, synthetic construct
  misc_feature 1..20: note = Description of Artificial Sequence: Synthetic oligonucleotide
  misc_feature 1..20: note = Target: SCN10A; (-) strand; PAM type: NRG; PAM sequence: GAG
  source 1..20: mol_type = other DNA
tgtcaggaagctaaaggtga

SEQ ID NO: 15032 - DNA, 20 bp, synthetic construct
  misc_feature 1..20: note = Description of Artificial Sequence: Synthetic oligonucleotide
  misc_feature 1..20: note = Target: SCN10A; (-) strand; PAM type: NRG; PAM sequence: GAG
  source 1..20: mol_type = other DNA
tatgtcaggaagctaaaggt

SEQ ID NO: 15033 - DNA, 20 bp, synthetic construct
  misc_feature 1..20: note = Description of Artificial Sequence: Synthetic oligonucleotide
  misc_feature 1..20: note = Target: SCN10A; (-) strand; PAM type: NRG; PAM sequence: AGG
  source 1..20: mol_type = other DNA
aaattatgtcaggaagctaa

SEQ ID NO: 15034 - DNA, 20 bp, synthetic construct
  misc_feature 1..20: note = Description of Artificial Sequence: Synthetic oligonucleotide
  misc_feature 1..20: note = Target: SCN10A; (-) strand; PAM type: NRG; PAM sequence: AAG
  source 1..20: mol_type = other DNA
caaattatgtcaggaagcta

SEQ ID NO: 15035 - DNA, 20 bp, synthetic construct
  misc_feature 1..20: note = Description of Artificial Sequence: Synthetic oligonucleotide
  misc_feature 1..20: note = Target: SCN10A; (-) strand; PAM type: NRG; PAM sequence: AAG
  source 1..20: mol_type = other DNA
ggctttcaaattatgtcagg

SEQ ID NO: 15036 - DNA, 20 bp, synthetic construct
  misc_feature 1..20: note = Description of Artificial Sequence: Synthetic oligonucleotide
  misc_feature 1..20: note = Target: SCN10A; (-) strand; PAM type: NRG; PAM sequence: AGG
  source 1..20: mol_type = other DNA
ggtggctttcaaattatgtc

SEQ ID NO: 15037 - DNA, 20 bp, synthetic construct
  misc_feature 1..20: note = Description of Artificial Sequence: Synthetic oligonucleotide
  misc_feature 1..20: note = Target: SCN10A; (-) strand; PAM type: NRG; PAM sequence: CAG
  source 1..20: mol_type = other DNA
aggtggctttcaaattatgt

SEQ ID NO: 15038 - DNA, 20 bp, synthetic construct
  misc_feature 1..20: note = Description of Artificial Sequence: Synthetic oligonucleotide
  misc_feature 1..20: note = Target: SCN10A; (-) strand; PAM type: NRG; PAM sequence: TGG
  source 1..20: mol_type = other DNA
aaacatgttattaaaatagg

SEQ ID NO: 15039 - DNA, 20 bp, synthetic construct
  misc_feature 1..20: note = Description of Artificial Sequence: Synthetic oligonucleotide
  misc_feature 1..20: note = Target: SCN10A; (-) strand; PAM type: NRG; PAM sequence: AGG
  source 1..20: mol_type = other DNA
cataaacatgttattaaaat

SEQ ID NO: 15040 - DNA, 20 bp, synthetic construct
  misc_feature 1..20: note = Description of Artificial Sequence: Synthetic oligonucleotide
  misc_feature 1..20: note = Target: SCN10A; (-) strand; PAM type: NRG; PAM sequence: TAG
  source 1..20: mol_type = other DNA
acataaacatgttattaaaa

SEQ ID NO: 15041 - DNA, 20 bp, synthetic construct
  misc_feature 1..20: note = Description of Artificial Sequence: Synthetic oligonucleotide
  misc_feature 1..20: note = Target: SCN10A; (-) strand; PAM type: NRG; PAM sequence: GGG
  source 1..20: mol_type = other DNA
ccagtttcccagcatttgca

SEQ ID NO: 15042 - DNA, 20 bp, synthetic construct
  misc_feature 1..20: note = Description of Artificial Sequence: Synthetic oligonucleotide
  misc_feature 1..20: note = Target: SCN10A; (-) strand; PAM type: NRG; PAM sequence: AGG
  source 1..20: mol_type = other DNA
cccagtttcccagcatttgc

SEQ ID NO: 15043 - DNA, 20 bp, synthetic construct
  misc_feature 1..20: note = Description of Artificial Sequence: Synthetic oligonucleotide
  misc_feature 1..20: note = Target: SCN10A; (-) strand; PAM type: NRG; PAM sequence: CAG
  source 1..20: mol_type = other DNA
gcccagtttcccagcatttg

SEQ ID NO: 15044 - DNA, 20 bp, synthetic construct
  misc_feature 1..20: note = Description of Artificial Sequence: Synthetic oligonucleotide
  misc_feature 1..20: note = Target: SCN10A; (-) strand; PAM type: NRG; PAM sequence: CAG
  source 1..20: mol_type = other DNA
cagatctcagcccagtttcc

SEQ ID NO: 15045 - DNA, 20 bp, synthetic construct
  misc_feature 1..20: note = Description of Artificial Sequence: Synthetic oligonucleotide
  misc_feature 1..20: note = Target: SCN10A; (-) strand; PAM type: NRG; PAM sequence: CAG
  source 1..20: mol_type = other DNA
aaattccacagatctcagcc

SEQ ID NO: 15046 - DNA, 20 bp, synthetic construct
  misc_feature 1..20: note = Description of Artificial Sequence: Synthetic oligonucleotide
  misc_feature 1..20: note = Target: SCN10A; (-) strand; PAM type: NRG; PAM sequence: CAG
  source 1..20: mol_type = other DNA
ctttcaaattccacagatct

SEQ ID NO: 15047 - DNA, 20 bp, synthetic construct
  misc_feature 1..20: note = Description of Artificial Sequence: Synthetic oligonucleotide
  misc_feature 1..20: note = Target: SCN10A; (-) strand; PAM type: NRG; PAM sequence: CAG
  source 1..20: mol_type = other DNA
agatctcctttcaaattcca

SEQ ID NO: 15048 - DNA, 20 bp, synthetic construct
  misc_feature 1..20: note = Description of Artificial Sequence: Synthetic oligonucleotide
  misc_feature 1..20: note = Target: SCN10A; (-) strand; PAM type: NRG; PAM sequence: CAG
  source 1..20: mol_type = other DNA
tttgtgtccacagatcttct

SEQ ID NO: 15049 - DNA, 20 bp, synthetic construct
  misc_feature 1..20: note = Description of Artificial Sequence: Synthetic oligonucleotide
  misc_feature 1..20: note = Target: SCN10A; (-) strand; PAM type: NRG; PAM sequence: CAG
  source 1..20: mol_type = other DNA
caggaagccctttgtgtcca

SEQ ID NO: 15050 - DNA, 20 bp, synthetic construct
  misc_feature 1..20: note = Description of Artificial Sequence: Synthetic oligonucleotide
  misc_feature 1..20: note = Target: SCN10A; (-) strand; PAM type: NRG; PAM sequence: AAG
  source 1..20: mol_type = other DNA
ataaagatggtcctcccagg

SEQ ID NO: 15051 - DNA, 20 bp, synthetic construct
  misc_feature 1..20: note = Description of Artificial Sequence: Synthetic oligonucleotide
  misc_feature 1..20: note = Target: SCN10A; (-) strand; PAM type: NRG; PAM sequence: AGG
  source 1..20: mol_type = other DNA
cccataaagatggtcctccc

SEQ ID NO: 15052 - DNA, 20 bp, synthetic construct
  misc_feature 1..20: note = Description of Artificial Sequence: Synthetic oligonucleotide
  misc_feature 1..20: note = Target: SCN10A; (-) strand; PAM type: NRG; PAM sequence: CAG
  source 1..20: mol_type = other DNA
ccccataaagatggtcctcc

SEQ ID NO: 15053 - DNA, 20 bp, synthetic construct
  misc_feature 1..20: note = Description of Artificial Sequence: Synthetic oligonucleotide
  misc_feature 1..20: note = Target: SCN10A; (-) strand; PAM type: NRG; PAM sequence: TGG
  source 1..20: mol_type = other DNA
cttctctccccccataaaga

SEQ ID NO: 15054 - DNA, 20 bp, synthetic construct
  misc_feature 1..20: note = Description of Artificial Sequence: Synthetic oligonucleotide
  misc_feature 1..20: note = Target: SCN10A; (-) strand; PAM type: NRG; PAM sequence: AAG
  source 1..20: mol_type = other DNA
tttccttctctccccccata

SEQ ID NO: 15055 - DNA, 20 bp, synthetic construct
  misc_feature 1..20: note = Description of Artificial Sequence: Synthetic oligonucleotide
  misc_feature 1..20: note = Target: SCN10A; (-) strand; PAM type: NRG; PAM sequence: GAG
  source 1..20: mol_type = other DNA
tctcagcatgacctcacctg

SEQ ID NO: 15056 - DNA, 20 bp, synthetic construct
  misc_feature 1..20: note = Description of Artificial Sequence: Synthetic oligonucleotide
  misc_feature 1..20: note = Target: SCN10A; (-) strand; PAM type: NRG; PAM sequence: TGG
  source 1..20: mol_type = other DNA
gttctcagcatgacctcacc

SEQ ID NO: 15057 - DNA, 20 bp, synthetic construct
  misc_feature 1..20: note = Description of Artificial Sequence: Synthetic oligonucleotide
  misc_feature 1..20: note = Target: SCN10A; (-) strand; PAM type: NRG; PAM sequence: CAG
  source 1..20: mol_type = other DNA
gaatccttggtcagagttct

SEQ ID NO: 15058 - DNA, 20 bp, synthetic construct
  misc_feature 1..20: note = Description of Artificial Sequence: Synthetic oligonucleotide
  misc_feature 1..20: note = Target: SCN10A; (-) strand; PAM type: NRG; PAM sequence: GAG
  source 1..20: mol_type = other DNA
atctactgaatccttggtca

SEQ ID NO: 15059 - DNA, 20 bp, synthetic construct
  misc_feature 1..20: note = Description of Artificial Sequence: Synthetic oligonucleotide
  misc_feature 1..20: note = Target: SCN10A; (-) strand; PAM type: NRG; PAM sequence: CAG
  source 1..20: mol_type = other DNA
gcatctactgaatccttggt

SEQ ID NO: 15060 - DNA, 20 bp, synthetic construct
  misc_feature 1..20: note = Description of Artificial Sequence: Synthetic oligonucleotide
  misc_feature 1..20: note = Target: SCN10A; (-) strand; PAM type: NRG; PAM sequence: TGG
  source 1..20: mol_type = other DNA
aactgcatctactgaatcct

SEQ ID NO: 15061 - DNA, 20 bp, synthetic construct
  misc_feature 1..20: note = Description of Artificial Sequence: Synthetic oligonucleotide
  misc_feature 1..20: note = Target: SCN10A; (-) strand; PAM type: NRG; PAM sequence: GAG
  source 1..20: mol_type = other DNA
gtgaccaggctggggtcact

SEQ ID NO: 15062 - DNA, 20 bp, synthetic construct
  misc_feature 1..20: note = Description of Artificial Sequence: Synthetic oligonucleotide
  misc_feature 1..20: note = Target: SCN10A; (-) strand; PAM type: NRG; PAM sequence: GGG
  source 1..20: mol_type = other DNA
atgagctagtgaccaggctg

SEQ ID NO: 15063 - DNA, 20 bp, synthetic construct
  misc_feature 1..20: note = Description of Artificial Sequence: Synthetic oligonucleotide
  misc_feature 1..20: note = Target: SCN10A; (-) strand; PAM type: NRG; PAM sequence: GGG
  source 1..20: mol_type = other DNA
gatgagctagtgaccaggct

SEQ ID NO: 15064 - DNA, 20 bp, synthetic construct
  misc_feature 1..20: note = Description of Artificial Sequence: Synthetic oligonucleotide
  misc_feature 1..20: note = Target: SCN10A; (-) strand; PAM type: NRG; PAM sequence: TGG
  source 1..20: mol_type = other DNA
agatgagctagtgaccaggc

SEQ ID NO: 15065 - DNA, 20 bp, synthetic construct
  misc_feature 1..20: note = Description of Artificial Sequence: Synthetic oligonucleotide
  misc_feature 1..20: note = Target: SCN10A; (-) strand; PAM type: NRG; PAM sequence: AGG
  source 1..20: mol_type = other DNA
aaggagatgagctagtgacc

SEQ ID NO: 15066 - DNA, 20 bp, synthetic construct
  misc_feature 1..20: note = Description of Artificial Sequence: Synthetic oligonucleotide
  misc_feature 1..20: note = Target: SCN10A; (-) strand; PAM type: NRG; PAM sequence: CAG
  source 1..20: mol_type = other DNA
gaaggagatgagctagtgac

SEQ ID NO: 15067 - DNA, 20 bp, synthetic construct
  misc_feature 1..20: note = Description of Artificial Sequence: Synthetic oligonucleotide
  misc_feature 1..20: note = Target: SCN10A; (-) strand; PAM type: NRG; PAM sequence: TAG
  source 1..20: mol_type = other DNA
ggtaacggaaggagatgagc

SEQ ID NO: 15068 - DNA, 20 bp, synthetic construct
  misc_feature 1..20: note = Description of Artificial Sequence: Synthetic oligonucleotide
  misc_feature 1..20: note = Target: SCN10A; (-) strand; PAM type: NRG; PAM sequence: GAG
  source 1..20: mol_type = other DNA
attaggtaacggaaggagat

SEQ ID NO: 15069 - DNA, 20 bp, synthetic construct
  misc_feature 1..20: note = Description of Artificial Sequence: Synthetic oligonucleotide
  misc_feature 1..20: note = Target: SCN10A; (-) strand; PAM type: NRG; PAM sequence: GAG
  source 1..20: mol_type = other DNA
gagatattaggtaacggaag

SEQ ID NO: 15070 - DNA, 20 bp, synthetic construct
  misc_feature 1..20: note = Description of Artificial Sequence: Synthetic oligonucleotide
  misc_feature 1..20: note = Target: SCN10A; (-) strand; PAM type: NRG; PAM sequence: AGG
  source 1..20: mol_type = other DNA
gggagatattaggtaacgga

SEQ ID NO: 15071 - DNA, 20 bp, synthetic construct
  misc_feature 1..20: note = Description of Artificial Sequence: Synthetic oligonucleotide
  misc_feature 1..20: note = Target: SCN10A; (-) strand; PAM type: NRG; PAM sequence: AAG
  source 1..20: mol_type = other DNA
agggagatattaggtaacgg

SEQ ID NO: 15072 - DNA, 20 bp, synthetic construct
  misc_feature 1..20: note = Description of Artificial Sequence: Synthetic oligonucleotide
  misc_feature 1..20: note = Target: SCN10A; (-) strand; PAM type: NRG; PAM sequence: CGG
  source 1..20: mol_type = other DNA
cagagggagatattaggtaa

SEQ ID NO: 15073 - DNA, 20 bp, synthetic construct
  misc_feature 1..20: note = Description of Artificial Sequence: Synthetic oligonucleotide
  misc_feature 1..20: note = Target: SCN10A; (-) strand; PAM type: NRG; PAM sequence: AGG
  source 1..20: mol_type = other DNA
agattacagagggagatatt

SEQ ID NO: 15074 - DNA, 20 bp, synthetic construct
  misc_feature 1..20: note = Description of Artificial Sequence: Synthetic oligonucleotide
  misc_feature 1..20: note = Target: SCN10A; (-) strand; PAM type: NRG; PAM sequence: TAG
  source 1..20: mol_type = other DNA
cagattacagagggagatat

SEQ ID NO: 15075 - DNA, 20 bp, synthetic construct
  misc_feature 1..20: note = Description of Artificial Sequence: Synthetic oligonucleotide
  misc_feature 1..20: note = Target: SCN10A; (-) strand; PAM type: NRG; PAM sequence: GAG
  source 1..20: mol_type = other DNA
caagaaacagattacagagg

SEQ ID NO: 15076 - DNA, 20 bp, synthetic construct
  misc_feature 1..20: note = Description of Artificial Sequence: Synthetic oligonucleotide
  misc_feature 1..20: note = Target: SCN10A; (-) strand; PAM type: NRG; PAM sequence: GGG
  source 1..20: mol_type = other DNA
gtcaagaaacagattacaga

SEQ ID NO: 15077 - DNA, 20 bp, synthetic construct
  misc_feature 1..20: note = Description of Artificial Sequence: Synthetic oligonucleotide
  misc_feature 1..20: note = Target: SCN10A; (-) strand; PAM type: NRG; PAM sequence: AGG
  source 1..20: mol_type = other DNA
ggtcaagaaacagattacag

SEQ ID NO: 15078 - DNA, 20 bp, synthetic construct
  misc_feature 1..20: note = Description of Artificial Sequence: Synthetic oligonucleotide
  misc_feature 1..20: note = Target: SCN10A; (-) strand; PAM type: NRG; PAM sequence: GAG
  source 1..20: mol_type = other DNA
aggtcaagaaacagattaca

SEQ ID NO: 15079 - DNA, 20 bp, synthetic construct
  misc_feature 1..20: note = Description of Artificial Sequence: Synthetic oligonucleotide
  misc_feature 1..20: note = Target: SCN10A; (-) strand; PAM type: NRG; PAM sequence: CAG
  source 1..20: mol_type = other DNA
tgaggtcaagaaacagatta

SEQ ID NO: 15080 - DNA, 20 bp, synthetic construct
  misc_feature 1..20: note = Description of Artificial Sequence: Synthetic oligonucleotide
  misc_feature 1..20: note = Target: SCN10A; (-) strand; PAM type: NRG; PAM sequence: CAG
  source 1..20: mol_type = other DNA
agaaaactgaggtcaagaaa

SEQ ID NO: 15081 - DNA, 20 bp, synthetic construct
  misc_feature 1..20: note = Description of Artificial Sequence: Synthetic oligonucleotide
  misc_feature 1..20: note = Target: SCN10A; (-) strand; PAM type: NRG; PAM sequence: AAG
  source 1..20: mol_type = other DNA
cagatgagaaaactgaggtc

SEQ ID NO: 15082 - DNA, 20 bp, synthetic construct
  misc_feature 1..20: note = Description of Artificial Sequence: Synthetic oligonucleotide
  misc_feature 1..20: note = Target: SCN10A; (-) strand; PAM type: NRG; PAM sequence: AGG
  source 1..20: mol_type = other DNA
ttttacagatgagaaaactg

SEQ ID NO: 15083 - DNA, 20 bp, synthetic construct
  misc_feature 1..20: note = Description of Artificial Sequence: Synthetic oligonucleotide
  misc_feature 1..20: note = Target: SCN10A; (-) strand; PAM type: NRG; PAM sequence: GAG
  source 1..20: mol_type = other DNA
attttacagatgagaaaact

SEQ ID NO: 15084 - DNA, 20 bp, synthetic construct
  misc_feature 1..20: note = Description of Artificial Sequence: Synthetic oligonucleotide
  misc_feature 1..20: note = Target: SCN10A; (-) strand; PAM type: NRG; PAM sequence: GAG
  source 1..20: mol_type = other DNA
atttctctcattttacagat

SEQ ID NO: 15085 - DNA, 20 bp, synthetic construct
  misc_feature 1..20: note = Description of Artificial Sequence: Synthetic oligonucleotide
  misc_feature 1..20: note = Target: SCN10A; (-) strand; PAM type: NRG; PAM sequence: CAG
  source 1..20: mol_type = other DNA
caatcatttctctcatttta

SEQ ID NO: 15086 - DNA, 20 bp, synthetic construct
  misc_feature 1..20: note = Description of Artificial Sequence: Synthetic oligonucleotide
  misc_feature 1..20: note = Target: SCN10A; (-) strand; PAM type: NRG; PAM sequence: AAG
  source 1..20: mol_type = other DNA
ggggaggtttgagattattg

SEQ ID NO: 15087 - DNA, 20 bp, synthetic construct
  misc_feature 1..20: note = Description of Artificial Sequence: Synthetic oligonucleotide
  misc_feature 1..20: note = Target: SCN10A; (-) strand; PAM type: NRG; PAM sequence: GAG
  source 1..20: mol_type = other DNA
ttagtaccctggggaggttt

SEQ ID NO: 15088 - DNA, 20 bp, synthetic construct
  misc_feature 1..20: note = Description of Artificial Sequence: Synthetic oligonucleotide
  misc_feature 1..20: note = Target: SCN10A; (-) strand; PAM type: NRG; PAM sequence: AGG
  source 1..20: mol_type = other DNA
tgctatttagtaccctgggg

SEQ ID NO: 15089 - DNA, 20 bp, synthetic construct
  misc_feature 1..20: note = Description of Artificial Sequence: Synthetic oligonucleotide
  misc_feature 1..20: note = Target: SCN10A; (-) strand; PAM type: NRG; PAM sequence: GAG
  source 1..20: mol_type = other DNA
gtgctatttagtaccctggg

SEQ ID NO: 15090 - DNA, 20 bp, synthetic construct
  misc_feature 1..20: note = Description of Artificial Sequence: Synthetic oligonucleotide
  misc_feature 1..20: note = Target: SCN10A; (-) strand; PAM type: NRG; PAM sequence: GGG
  source 1..20: mol_type = other DNA
cagtgctatttagtaccctg

SEQ ID NO: 15091 - DNA, 20 bp, synthetic construct
  misc_feature 1..20: note = Description of Artificial Sequence: Synthetic oligonucleotide
  misc_feature 1..20: note = Target: SCN10A; (-) strand; PAM type: NRG; PAM sequence: GGG
  source 1..20: mol_type = other DNA
acagtgctatttagtaccct

SEQ ID NO: 15092 - DNA, 20 bp, synthetic construct
  misc_feature 1..20: note = Description of Artificial Sequence: Synthetic oligonucleotide
  misc_feature 1..20: note = Target: SCN10A; (-) strand; PAM type: NRG; PAM sequence: TGG
  source 1..20: mol_type = other DNA
gacagtgctatttagtaccc

SEQ ID NO: 15093 - DNA, 20 bp, synthetic construct
  misc_feature 1..20: note = Description of Artificial Sequence: Synthetic oligonucleotide
  misc_feature 1..20: note = Target: SCN10A; (-) strand; PAM type: NRG; PAM sequence: TAG
  source 1..20: mol_type = other DNA
tgggacaagacagtgctatt

SEQ ID NO: 15094 - DNA, 20 bp, synthetic construct
  misc_feature 1..20: note = Description of Artificial Sequence: Synthetic oligonucleotide
  misc_feature 1..20: note = Target: SCN10A; (-) strand; PAM type: NRG; PAM sequence: CAG
  source 1..20: mol_type = other DNA
aggataggtctgggacaaga

SEQ ID NO: 15095 - DNA, 20 bp, synthetic construct
  misc_feature 1..20: note = Description of Artificial Sequence: Synthetic oligonucleotide
  misc_feature 1..20: note = Target: SCN10A; (-) strand; PAM type: NRG; PAM sequence: AAG
  source 1..20: mol_type = other DNA
ggacaggataggtctgggac

SEQ ID NO: 15096 - DNA, 20 bp, synthetic construct
  misc_feature 1..20: note = Description of Artificial Sequence: Synthetic oligonucleotide
  misc_feature 1..20: note = Target: SCN10A; (-) strand; PAM type: NRG; PAM sequence: GGG
  source 1..20: mol_type = other DNA
gaagaggacaggataggtct

SEQ ID NO: 15097 - DNA, 20 bp, synthetic construct
  misc_feature 1..20: note = Description of Artificial Sequence: Synthetic oligonucleotide
  misc_feature 1..20: note = Target: SCN10A; (-) strand; PAM type: NRG; PAM sequence: TGG
  source 1..20: mol_type = other DNA
agaagaggacaggataggtc

SEQ ID NO: 15098 - DNA, 20 bp, synthetic construct
  misc_feature 1..20: note = Description of Artificial Sequence: Synthetic oligonucleotide
  misc_feature 1..20: note = Target: SCN10A; (-) strand; PAM type: NRG; PAM sequence: AGG
  source 1..20: mol_type = other DNA
gcataagaagaggacaggat

SEQ ID NO: 15099 - DNA, 20 bp, synthetic construct
  misc_feature 1..20: note = Description of Artificial Sequence: Synthetic oligonucleotide
  misc_feature 1..20: note = Target: SCN10A; (-) strand; PAM type: NRG; PAM sequence: TAG
  source 1..20: mol_type = other DNA
agcataagaagaggacagga

SEQ ID NO: 15100 - DNA, 20 bp, synthetic construct
  misc_feature 1..20: note = Description of Artificial Sequence: Synthetic oligonucleotide
  misc_feature 1..20: note = Target: SCN10A; (-) strand; PAM type: NRG; PAM sequence: AGG
  source 1..20: mol_type = other DNA
tctgagcataagaagaggac

SEQ ID NO: 15101 - DNA, 20 bp, synthetic construct
  misc_feature 1..20: note = Description of Artificial Sequence: Synthetic oligonucleotide
  misc_feature 1..20: note = Target: SCN10A; (-) strand; PAM type: NRG; PAM sequence: CAG
  source 1..20: mol_type = other DNA
ttctgagcataagaagagga

SEQ ID NO: 15102 - DNA, 20 bp, synthetic construct
  misc_feature 1..20: note = Description of Artificial Sequence: Synthetic oligonucleotide
  misc_feature 1..20: note = Target: SCN10A; (-) strand; PAM type: NRG; PAM sequence: AGG
  source 1..20: mol_type = other DNA
agggttctgagcataagaag

SEQ ID NO: 15103 - DNA, 20 bp, synthetic construct
  misc_feature 1..20: note = Description of Artificial Sequence: Synthetic oligonucleotide
  misc_feature 1..20: note = Target: SCN10A; (-) strand; PAM type: NRG; PAM sequence: GAG
  source 1..20: mol_type = other DNA
cagggttctgagcataagaa

SEQ ID NO: 15104 - DNA, 20 bp, synthetic construct
  misc_feature 1..20: note = Description of Artificial Sequence: Synthetic oligonucleotide
  misc_feature 1..20: note = Target: SCN10A; (-) strand; PAM type: NRG; PAM sequence: AAG
  source 1..20: mol_type = other DNA
cccagggttctgagcataag

SEQ ID NO: 15105 - DNA, 20 bp, synthetic construct
  misc_feature 1..20: note = Description of Artificial Sequence: Synthetic oligonucleotide
  misc_feature 1..20: note = Target: SCN10A; (-) strand; PAM type: NRG; PAM sequence: AAG
  source 1..20: mol_type = other DNA
ttgcccagggttctgagcat

SEQ ID NO: 15106 - DNA, 20 bp, synthetic construct
  misc_feature 1..20: note = Description of Artificial Sequence: Synthetic oligonucleotide
  misc_feature 1..20: note = Target: SCN10A; (-) strand; PAM type: NRG; PAM sequence: GAG
  source 1..20: mol_type = other DNA
aaatccttgcccagggttct

SEQ ID NO: 15107 - DNA, 20 bp, synthetic construct
  misc_feature 1..20: note = Description of Artificial Sequence: Synthetic oligonucleotide
  misc_feature 1..20: note = Target: SCN10A; (-) strand; PAM type: NRG; PAM sequence: GGG
  source 1..20: mol_type = other DNA
ttacaggaaatccttgccca

SEQ ID NO: 15108 - DNA, 20 bp, synthetic construct
  misc_feature 1..20: note = Description of Artificial Sequence: Synthetic oligonucleotide
  misc_feature 1..20: note = Target: SCN10A; (-) strand; PAM type: NRG; PAM sequence: AGG
  source 1..20: mol_type = other DNA
cttacaggaaatccttgccc

SEQ ID NO: 15109 - DNA, 20 bp, synthetic construct
  misc_feature 1..20: note = Description of Artificial Sequence: Synthetic oligonucleotide
  misc_feature 1..20: note = Target: SCN10A; (-) strand; PAM type: NRG; PAM sequence: CAG
  source 1..20: mol_type = other DNA
acttacaggaaatccttgcc

SEQ ID NO: 15110 - DNA, 20 bp, synthetic construct
  misc_feature 1..20: note = Description of Artificial Sequence: Synthetic oligonucleotide
  misc_feature 1..20: note = Target: SCN10A; (-) strand; PAM type: NRG; PAM sequence: AGG
  source 1..20: mol_type = other DNA
agggcaggcattccacttac

SEQ ID NO: 15111 - DNA, 20 bp, synthetic construct
  misc_feature 1..20: note = Description of Artificial Sequence: Synthetic oligonucleotide
  misc_feature 1..20: note = Target: SCN10A; (-) strand; PAM type: NRG; PAM sequence: CAG
  source 1..20: mol_type = other DNA
tagggcaggcattccactta

SEQ ID NO: 15112 - DNA, 20 bp, synthetic construct
  misc_feature 1..20: note = Description of Artificial Sequence: Synthetic oligonucleotide
  misc_feature 1..20: note = Target: SCN10A; (-) strand; PAM type: NRG; PAM sequence: AGG
  source 1..20: mol_type = other DNA
aaatatatacctactagggc

SEQ ID NO: 15113 - DNA, 20 bp, synthetic construct
  misc_feature 1..20: note = Description of Artificial Sequence: Synthetic oligonucleotide
  misc_feature 1..20: note = Target: SCN10A; (-) strand; PAM type: NRG; PAM sequence: CAG
  source 1..20: mol_type = other DNA
aaaatatatacctactaggg

SEQ ID NO: 15114 - DNA, 20 bp, synthetic construct
  misc_feature 1..20: note = Description of Artificial Sequence: Synthetic oligonucleotide
  misc_feature 1..20: note = Target: SCN10A; (-) strand; PAM type: NRG; PAM sequence: GGG
  source 1..20: mol_type = other DNA
tttaaaatatatacctacta

SEQ ID NO: 15115 - DNA, 20 bp, synthetic construct
  misc_feature 1..20: note = Description of Artificial Sequence: Synthetic oligonucleotide
  misc_feature 1..20: note = Target: SCN10A; (-) strand; PAM type: NRG; PAM sequence: AGG
  source 1..20: mol_type = other DNA
atttaaaatatatacctact

SEQ ID NO: 15116 - DNA, 20 bp, synthetic construct
  misc_feature 1..20: note = Description of Artificial Sequence: Synthetic oligonucleotide
  misc_feature 1..20: note = Target: SCN10A; (-) strand; PAM type: NRG; PAM sequence: TAG
  source 1..20: mol_type = other DNA
aatttaaaatatatacctac

SEQ ID NO: 15117 - DNA, 20 bp, synthetic construct
  misc_feature 1..20: note = Description of Artificial Sequence: Synthetic oligonucleotide
  misc_feature 1..20: note = Target: SCN10A; (-) strand; PAM type: NRG; PAM sequence: CAG
  source 1..20: mol_type = other DNA
tggcagcgcctcaagagcac

SEQ ID NO: 15118 - DNA, 20 bp, synthetic construct
  misc_feature 1..20: note = Description of Artificial Sequence: Synthetic oligonucleotide
  misc_feature 1..20: note = Target: SCN10A; (-) strand; PAM type: NRG; PAM sequence: GAG
  source 1..20: mol_type = other DNA
tgtgactggcagcgcctcaa

SEQ ID NO: 15119 - DNA, 20 bp, synthetic construct
  misc_feature 1..20: note = Description of Artificial Sequence: Synthetic oligonucleotide
  misc_feature 1..20: note = Target: SCN10A; (-) strand; PAM type: NRG; PAM sequence: AAG
  source 1..20: mol_type = other DNA
agtgtgactggcagcgcctc

SEQ ID NO: 15120 - DNA, 20 bp, synthetic construct
  misc_feature 1..20: note = Description of Artificial Sequence: Synthetic oligonucleotide
  misc_feature 1..20: note = Target: SCN10A; (-) strand; PAM type: NRG; PAM sequence: CAG
  source 1..20: mol_type = other DNA
gcagaggggagtgtgactgg

SEQ ID NO: 15121 - DNA, 20 bp, synthetic construct
  misc_feature 1..20: note = Description of Artificial Sequence: Synthetic oligonucleotide
  misc_feature 1..20: note = Target: SCN10A; (-) strand; PAM type: NRG; PAM sequence: TGG
  source 1..20: mol_type = other DNA
acagcagaggggagtgtgac

SEQ ID NO: 15122 - DNA, 20 bp, synthetic construct
  misc_feature 1..20: note = Description of Artificial Sequence: Synthetic oligonucleotide
  misc_feature 1..20: note = Target: SCN10A; (-) strand; PAM type: NRG; PAM sequence: GAG
  source 1..20: mol_type = other DNA
ggcactgtaacagcagaggg

SEQ ID NO: 15123 - DNA, 20 bp, synthetic construct
  misc_feature 1..20: note = Description of Artificial Sequence: Synthetic oligonucleotide
  misc_feature 1..20: note = Target: SCN10A; (-) strand; PAM type: NRG; PAM sequence: GGG
  source 1..20: mol_type = other DNA
ctggcactgtaacagcagag

SEQ ID NO: 15124 - DNA, 20 bp, synthetic construct
  misc_feature 1..20: note = Description of Artificial Sequence: Synthetic oligonucleotide
  misc_feature 1..20: note = Target: SCN10A; (-) strand; PAM type: NRG; PAM sequence: GGG
  source 1..20: mol_type = other DNA
tctggcactgtaacagcaga

SEQ ID NO: 15125 - DNA, 20 bp, synthetic construct
  misc_feature 1..20: note = Description of Artificial Sequence: Synthetic oligonucleotide
  misc_feature 1..20: note = Target: SCN10A; (-) strand; PAM type: NRG; PAM sequence: AGG
  source 1..20: mol_type = other DNA
ttctggcactgtaacagcag

SEQ ID NO: 15126 - DNA, 20 bp, synthetic construct
  misc_feature 1..20: note = Description of Artificial Sequence: Synthetic oligonucleotide
  misc_feature 1..20: note = Target: SCN10A; (-) strand; PAM type: NRG; PAM sequence: GAG
  source 1..20: mol_type = other DNA
tttctggcactgtaacagca

SEQ ID NO: 15127 - DNA, 20 bp, synthetic construct
  misc_feature 1..20: note = Description of Artificial Sequence: Synthetic oligonucleotide
  misc_feature 1..20: note = Target: SCN10A; (-) strand; PAM type: NRG; PAM sequence: CAG
  source 1..20: mol_type = other DNA
agtttctggcactgtaacag

SEQ ID NO: 15128 - DNA, 20 bp, synthetic construct
  misc_feature 1..20: note = Description of Artificial Sequence: Synthetic oligonucleotide
  misc_feature 1..20: note = Target: SCN10A; (-) strand; PAM type: NRG; PAM sequence: CAG
  source 1..20: mol_type = other DNA
tgcagtttctggcactgtaa

SEQ ID NO: 15129 - DNA, 20 bp, synthetic construct
  misc_feature 1..20: note = Description of Artificial Sequence: Synthetic oligonucleotide
  misc_feature 1..20: note = Target: SCN10A; (-) strand; PAM type: NRG; PAM sequence: TGG
  source 1..20: mol_type = other DNA
aactttggtggtgcagtttc

SEQ ID NO: 15130 - DNA, 20 bp, synthetic construct
  misc_feature 1..20: note = Description of Artificial Sequence: Synthetic oligonucleotide
  misc_feature 1..20: note = Target: SCN10A; (-) strand; PAM type: NRG; PAM sequence: CAG
  source 1..20: mol_type = other DNA
ataagacaactttggtggtg

SEQ ID NO: 15131 - DNA, 20 bp, synthetic construct
  misc_feature 1..20: note = Description of Artificial Sequence: Synthetic oligonucleotide
  misc_feature 1..20: note = Target: SCN10A; (-) strand; PAM type: NRG; PAM sequence: TGG
  source 1..20: mol_type = other DNA
tgagcataagacaactttgg

SEQ ID NO: 15132 - DNA, 20 bp, synthetic construct
  misc_feature 1..20: note = Description of Artificial Sequence: Synthetic oligonucleotide
  misc_feature 1..20: note = Target: SCN10A; (-) strand; PAM type: NRG; PAM sequence: TGG
  source 1..20: mol_type = other DNA
cactgagcataagacaactt

SEQ ID NO: 15133 - DNA, 20 bp, synthetic construct
  misc_feature 1..20: note = Description of Artificial Sequence: Synthetic oligonucleotide
  misc_feature 1..20: note = Target: SCN10A; (-) strand; PAM type: NRG; PAM sequence: AAG
  source 1..20: mol_type = other DNA
gaacaaagatcactgagcat

SEQ ID NO: 15134 - DNA, 20 bp, synthetic construct
  misc_feature 1..20: note = Description of Artificial Sequence: Synthetic oligonucleotide
  misc_feature 1..20: note = Target: SCN10A; (-) strand; PAM type: NRG; PAM sequence: GAG
  source 1..20: mol_type = other DNA
aatcctgaacaaagatcact

SEQ ID NO: 15135 - DNA, 20 bp, synthetic construct
  misc_feature 1..20: note = Description of Artificial Sequence: Synthetic oligonucleotide
  misc_feature 1..20: note = Target: SCN10A; (-) strand; PAM type: NRG; PAM sequence: AAG
  source 1..20: mol_type = other DNA
ggtaaacaaaatcctgaaca

SEQ ID NO: 15136 - DNA, 20 bp, synthetic construct
  misc_feature 1..20: note = Description of Artificial Sequence: Synthetic oligonucleotide
  misc_feature 1..20: note = Target: SCN10A; (-) strand; PAM type: NRG; PAM sequence: GGG
  source 1..20: mol_type = other DNA
actctctggattgtggtgag

SEQ ID NO: 15137 - DNA, 20 bp, synthetic construct
  misc_feature 1..20: note = Description of Artificial Sequence: Synthetic oligonucleotide
  misc_feature 1..20: note = Target: SCN10A; (-) strand; PAM type: NRG; PAM sequence: GGG
  source 1..20: mol_type = other DNA
tactctctggattgtggtga

SEQ ID NO: 15138 - DNA, 20 bp, synthetic construct
  misc_feature 1..20: note = Description of Artificial Sequence: Synthetic oligonucleotide
  misc_feature 1..20: note = Target: SCN10A; (-) strand; PAM type: NRG; PAM sequence: AGG
  source 1..20: mol_type = other DNA
ctactctctggattgtggtg

SEQ ID NO: 15139 - DNA, 20 bp, synthetic construct
  misc_feature 1..20: note = Description of Artificial Sequence: Synthetic oligonucleotide
  misc_feature 1..20: note = Target: SCN10A; (-) strand; PAM type: NRG; PAM sequence: GAG
  source 1..20: mol_type = other DNA
cctactctctggattgtggt

SEQ ID NO: 15140 - DNA, 20 bp, synthetic construct
  misc_feature 1..20: note = Description of Artificial Sequence: Synthetic oligonucleotide
  misc_feature 1..20: note = Target: SCN10A; (-) strand; PAM type: NRG; PAM sequence: TGG
  source 1..20: mol_type = other DNA
aatacctactctctggattg

SEQ ID NO: 15141 - DNA, 20 bp, synthetic construct
  misc_feature 1..20: note = Description of Artificial Sequence: Synthetic oligonucleotide
  misc_feature 1..20: note = Target: SCN10A; (-) strand; PAM type: NRG; PAM sequence: TGG
  source 1..20: mol_type = other DNA
ggctaataatacctactctc

SEQ ID NO: 15142 - DNA, 20 bp, synthetic construct
  misc_feature 1..20: note = Description of Artificial Sequence: Synthetic oligonucleotide
  misc_feature 1..20: note = Target: SCN10A; (-) strand; PAM type: NRG; PAM sequence: GGG
  source 1..20: mol_type = other DNA
gttttctcattcattcaatg

SEQ ID NO: 15143 - DNA, 20 bp, synthetic construct
  misc_feature 1..20: note = Description of Artificial Sequence: Synthetic oligonucleotide
  misc_feature 1..20: note = Target: SCN10A; (-) strand; PAM type: NRG; PAM sequence: GGG
  source 1..20: mol_type = other DNA
agttttctcattcattcaat

SEQ ID NO: 15144 - DNA, 20 bp, synthetic construct
  misc_feature 1..20: note = Description of Artificial Sequence: Synthetic oligonucleotide
  misc_feature 1..20: note = Target: SCN10A; (-) strand; PAM type: NRG; PAM sequence: TGG
  source 1..20: mol_type = other DNA
cagttttctcattcattcaa

SEQ ID NO: 15145 - DNA, 20 bp, synthetic construct
  misc_feature 1..20: note = Description of Artificial Sequence: Synthetic oligonucleotide
  misc_feature 1..20: note = Target: SCN10A; (-) strand; PAM type: NRG; PAM sequence: CAG
  source 1..20: mol_type = other DNA
ttttaaacccctctgagtct

SEQ ID NO: 15146 - DNA, 20 bp, synthetic construct
  misc_feature 1..20: note = Description of Artificial Sequence: Synthetic oligonucleotide
  misc_feature 1..20: note = Target: SCN10A; (-) strand; PAM type: NRG; PAM sequence: GAG
  source 1..20: mol_type = other DNA
gcaatattttaaacccctct

SEQ ID NO: 15147 - DNA, 20 bp, synthetic construct
  misc_feature 1..20: note = Description of Artificial Sequence: Synthetic oligonucleotide
  misc_feature 1..20: note = Target: SCN10A; (-) strand; PAM type: NRG; PAM sequence: TGG
  source 1..20: mol_type = other DNA
tacttgtggatggctcatgc

SEQ ID NO: 15148 - DNA, 20 bp, synthetic construct
  misc_feature 1..20: note = Description of Artificial Sequence: Synthetic oligonucleotide
  misc_feature 1..20: note = Target: SCN10A; (-) strand; PAM type: NRG; PAM sequence: TGG
  source 1..20: mol_type = other DNA
ctgactcaactacttgtgga

SEQ ID NO: 15149 - DNA, 20 bp, synthetic construct
  misc_feature 1..20: note = Description of Artificial Sequence: Synthetic oligonucleotide
  misc_feature 1..20: note = Target: SCN10A; (-) strand; PAM type: NRG; PAM sequence: TGG
  source 1..20: mol_type = other DNA
attcctgactcaactacttg

SEQ ID NO: 15150 - DNA, 20 bp, synthetic construct
  misc_feature 1..20: note = Description of Artificial Sequence: Synthetic oligonucleotide
  misc_feature 1..20: note = Target: SCN10A; (-) strand; PAM type: NRG; PAM sequence: GGG
  source 1..20: mol_type = other DNA
cacagagtacatgcaaacct

SEQ ID NO: 15151 - DNA, 20 bp, synthetic construct
  misc_feature 1..20: note = Description of Artificial Sequence: Synthetic oligonucleotide
  misc_feature 1..20: note = Target: SCN10A; (-) strand; PAM type: NRG; PAM sequence: TGG
  source 1..20: mol_type = other DNA
tcacagagtacatgcaaacc

SEQ ID NO: 15152 - DNA, 20 bp, synthetic construct
  misc_feature 1..20: note = Description of Artificial Sequence: Synthetic oligonucleotide
  misc_feature 1..20: note = Target: SCN10A; (-) strand; PAM type: NRG; PAM sequence: GAG
  source 1..20: mol_type = other DNA
ggctacatggataagtcaca

SEQ ID NO: 15153 - DNA, 20 bp, synthetic construct
  misc_feature 1..20: note = Description of Artificial Sequence: Synthetic oligonucleotide
  misc_feature 1..20: note = Target: SCN10A; (-) strand; PAM type: NRG; PAM sequence: CAG
  source 1..20: mol_type = other DNA
ggggctacatggataagtca

SEQ ID NO: 15154 - DNA, 20 bp, synthetic construct
  misc_feature 1..20: note = Description of Artificial Sequence: Synthetic oligonucleotide
  misc_feature 1..20: note = Target: SCN10A; (-) strand; PAM type: NRG; PAM sequence: AAG
  source 1..20: mol_type = other DNA
agaaaaggggctacatggat

SEQ ID NO: 15155 - DNA, 20 bp, synthetic construct
  misc_feature 1..20: note = Description of Artificial Sequence: Synthetic oligonucleotide
  misc_feature 1..20: note = Target: SCN10A; (-) strand; PAM type: NRG; PAM sequence: TGG
  source 1..20: mol_type = other DNA
ccgagagaaaaggggctaca

SEQ ID NO: 15156 - DNA, 20 bp, synthetic construct
  misc_feature 1..20: note = Description of Artificial Sequence: Synthetic oligonucleotide
  misc_feature 1..20: note = Target: SCN10A; (-) strand; PAM type: NRG; PAM sequence: GGG
  source 1..20: mol_type = other DNA
ctgagatcccgagagaaaag

SEQ ID NO: 15157 - DNA, 20 bp, synthetic construct
  misc_feature 1..20: note = Description of Artificial Sequence: Synthetic oligonucleotide
  misc_feature 1..20: note = Target: SCN10A; (-) strand; PAM type: NRG; PAM sequence: GGG
  source 1..20: mol_type = other DNA
actgagatcccgagagaaaa

SEQ ID NO: 15158 - DNA, 20 bp, synthetic construct
  misc_feature 1..20: note = Description of Artificial Sequence: Synthetic oligonucleotide
  misc_feature 1..20: note = Target: SCN10A; (-) strand; PAM type: NRG; PAM sequence: AGG
  source 1..20: mol_type = other DNA
aactgagatcccgagagaaa

SEQ ID NO: 15159 - DNA, 20 bp, synthetic construct
  misc_feature 1..20: note = Description of Artificial Sequence: Synthetic oligonucleotide
  misc_feature 1..20: note = Target: SCN10A; (-) strand; PAM type: NRG; PAM sequence: AAG
  source 1..20: mol_type = other DNA
taactgagatcccgagagaa

SEQ ID NO: 15160 - DNA, 20 bp, synthetic construct
  misc_feature 1..20: note = Description of Artificial Sequence: Synthetic oligonucleotide
  misc_feature 1..20: note = Target: SCN10A; (-) strand; PAM type: NRG; PAM sequence: GAG
  source 1..20: mol_type = other DNA
ttgcgtaactgagatcccga

SEQ ID NO: 15161 - DNA, 20 bp, synthetic construct
  misc_feature 1..20: note = Description of Artificial Sequence: Synthetic oligonucleotide
  misc_feature 1..20: note = Target: SCN10A; (-) strand; PAM type: NRG; PAM sequence: GAG
  source 1..20: mol_type = other DNA
atttgcgtaactgagatccc

SEQ ID NO: 15162 - DNA, 20 bp, synthetic construct
  misc_feature 1..20: note = Description of Artificial Sequence: Synthetic oligonucleotide
  misc_feature 1..20: note = Target: SCN10A; (-) strand; PAM type: NRG; PAM sequence: GAG
  source 1..20: mol_type = other DNA
tgttctagatttgcgtaact

SEQ ID NO: 15163 - DNA, 20 bp, synthetic construct
  misc_feature 1..20: note = Description of Artificial Sequence: Synthetic oligonucleotide
  misc_feature 1..20: note = Target: SCN10A; (-) strand; PAM type: NRG; PAM sequence: TAG
  source 1..20: mol_type = other DNA
gaggtagataggcgctgttc

SEQ ID NO: 15164 - DNA, 20 bp, synthetic construct
  misc_feature 1..20: note = Description of Artificial Sequence: Synthetic oligonucleotide
  misc_feature 1..20: note = Target: SCN10A; (-) strand; PAM type: NRG; PAM sequence: AGG
  source 1..20: mol_type = other DNA
tccatacccctgaggtagat

SEQ ID NO: 15165 - DNA, 20 bp, synthetic construct
  misc_feature 1..20: note = Description of Artificial Sequence: Synthetic oligonucleotide
  misc_feature 1..20: note = Target: SCN10A; (-) strand; PAM type: NRG; PAM sequence: TAG
  source 1..20: mol_type = other DNA
ttccatacccctgaggtaga

SEQ ID NO: 15166 - DNA, 20 bp, synthetic construct
  misc_feature 1..20: note = Description of Artificial Sequence: Synthetic oligonucleotide
  misc_feature 1..20: note = Target: SCN10A; (-) strand; PAM type: NRG; PAM sequence: TAG
  source 1..20: mol_type = other DNA
tgccttccatacccctgagg

SEQ ID NO: 15167 - DNA, 20 bp, synthetic construct
  misc_feature 1..20: note = Description of Artificial Sequence: Synthetic oligonucleotide
  misc_feature 1..20: note = Target: SCN10A; (-) strand; PAM type: NRG; PAM sequence: AGG
  source 1..20: mol_type = other DNA
taatgccttccatacccctg

SEQ ID NO: 15168 - DNA, 20 bp, synthetic construct
  misc_feature 1..20: note = Description of Artificial Sequence: Synthetic oligonucleotide
  misc_feature 1..20: note = Target: SCN10A; (-) strand; PAM type: NRG; PAM sequence: GAG
  source 1..20: mol_type = other DNA
ttaatgccttccatacccct

SEQ ID NO: 15169 - DNA, 20 bp, synthetic construct
  misc_feature 1..20: note = Description of Artificial Sequence: Synthetic oligonucleotide
  misc_feature 1..20: note = Target: SCN10A; (-) strand; PAM type: NRG; PAM sequence: AAG
  source 1..20: mol_type = other DNA
gtcagggcaataaaggtata

SEQ ID NO: 15170 - DNA, 20 bp, synthetic construct
  misc_feature 1..20: note = Description of Artificial Sequence: Synthetic oligonucleotide
  misc_feature 1..20: note = Target: SCN10A; (-) strand; PAM type: NRG; PAM sequence: AGG
  source 1..20: mol_type = other DNA
agaaaatgtcagggcaataa

SEQ ID NO: 15171 - DNA, 20 bp, synthetic construct
  misc_feature 1..20: note = Description of Artificial Sequence: Synthetic oligonucleotide
  misc_feature 1..20: note = Target: SCN10A; (-) strand; PAM type: NRG; PAM sequence: AAG
  source 1..20: mol_type = other DNA
aagaaaatgtcagggcaata

SEQ ID NO: 15172 - DNA, 20 bp, synthetic construct
  misc_feature 1..20: note = Description of Artificial Sequence: Synthetic oligonucleotide
  misc_feature 1..20: note = Target: SCN10A; (-) strand; PAM type: NRG; PAM sequence: GGG
  source 1..20: mol_type = other DNA
atgtttataagaaaatgtca

SEQ ID NO: 15173 - DNA, 20 bp, synthetic construct
  misc_feature 1..20: note = Description of Artificial Sequence: Synthetic oligonucleotide
  misc_feature 1..20: note = Target: SCN10A; (-) strand; PAM type: NRG; PAM sequence: AGG
  source 1..20: mol_type = other DNA
catgtttataagaaaatgtc

SEQ ID NO: 15174 - DNA, 20 bp, synthetic construct
  misc_feature 1..20: note = Description of Artificial Sequence: Synthetic oligonucleotide
  misc_feature 1..20: note = Target: SCN10A; (-) strand; PAM type: NRG; PAM sequence: CAG
  source 1..20: mol_type = other DNA
tcatgtttataagaaaatgt

SEQ ID NO: 15175 - DNA, 20 bp, synthetic construct
  misc_feature 1..20: note = Description of Artificial Sequence: Synthetic oligonucleotide
  misc_feature 1..20: note = Target: SCN10A; (-) strand; PAM type: NRG; PAM sequence: AAG
  source 1..20: mol_type = other DNA
agataacctctcatgtttat

SEQ ID NO: 15176 - DNA, 20 bp, synthetic construct
  misc_feature 1..20: note = Description of Artificial Sequence: Synthetic oligonucleotide
  misc_feature 1..20: note = Target: SCN10A; (-) strand; PAM type: NRG; PAM sequence: CAG
  source 1..20: mol_type = other DNA
gattaataggaatcgaatcc

SEQ ID NO: 15177 - DNA, 20 bp, synthetic construct
  misc_feature 1..20: note = Description of Artificial Sequence: Synthetic oligonucleotide
  misc_feature 1..20: note = Target: SCN10A; (-) strand; PAM type: NRG; PAM sequence: AGG
  source 1..20: mol_type = other DNA
gggtgccgactctgattaat

SEQ ID NO: 15178 - DNA, 20 bp, synthetic construct
  misc_feature 1..20: note = Description of Artificial Sequence: Synthetic oligonucleotide
  misc_feature 1..20: note = Target: SCN10A; (-) strand; PAM type: NRG; PAM sequence: TAG
  source 1..20: mol_type = other DNA
agggtgccgactctgattaa

SEQ ID NO: 15179 - DNA, 20 bp, synthetic construct
  misc_feature 1..20: note = Description of Artificial Sequence: Synthetic oligonucleotide
  misc_feature 1..20: note = Target: SCN10A; (-) strand; PAM type: NRG; PAM sequence: GGG
  source 1..20: mol_type = other DNA
aggaaggcttgtgcctccaa

SEQ ID NO: 15180 - DNA, 20 bp, synthetic construct
  misc_feature 1..20: note = Description of Artificial Sequence: Synthetic oligonucleotide
  misc_feature 1..20: note = Target: SCN10A; (-) strand; PAM type: NRG; PAM sequence: AGG
  source 1..20: mol_type = other DNA
gaggaaggcttgtgcctcca

SEQ ID NO: 15181 - DNA, 20 bp, synthetic construct
  misc_feature 1..20: note = Description of Artificial Sequence: Synthetic oligonucleotide
  misc_feature 1..20: note = Target: SCN10A; (-) strand; PAM type: NRG; PAM sequence: AAG
  source 1..20: mol_type = other DNA
ggaggaaggcttgtgcctcc

SEQ ID NO: 15182 - DNA, 20 bp, synthetic construct
  misc_feature 1..20: note = Description of Artificial Sequence: Synthetic oligonucleotide
  misc_feature 1..20: note = Target: SCN10A; (-) strand; PAM type: NRG; PAM sequence: AGG
  source 1..20: mol_type = other DNA
cctccttgggatggggagga

SEQ ID NO: 15183 - DNA, 20 bp, synthetic construct
  misc_feature 1..20: note = Description of Artificial Sequence: Synthetic oligonucleotide
  misc_feature 1..20: note = Target: SCN10A; (-) strand; PAM type: NRG; PAM sequence: AAG
  source 1..20: mol_type = other DNA
ccctccttgggatggggagg

SEQ ID NO: 15184 - DNA, 20 bp, synthetic construct
  misc_feature 1..20: note = Description of Artificial Sequence: Synthetic oligonucleotide
  misc_feature 1..20: note = Target: SCN10A; (-) strand; PAM type: NRG; PAM sequence: AGG
  source 1..20: mol_type = other DNA
caaccctccttgggatgggg

SEQ ID NO: 15185 - DNA, 20 bp, synthetic construct
  misc_feature 1..20: note = Description of Artificial Sequence: Synthetic oligonucleotide
  misc_feature 1..20: note = Target: SCN10A; (-) strand; PAM type: NRG; PAM sequence: GAG
  source 1..20: mol_type = other DNA
ccaaccctccttgggatggg

SEQ ID NO: 15186 - DNA, 20 bp, synthetic construct
  misc_feature 1..20: note = Description of Artificial Sequence: Synthetic oligonucleotide
  misc_feature 1..20: note = Target: SCN10A; (-) strand; PAM type: NRG; PAM sequence: GGG
  source 1..20: mol_type = other DNA
tcccaaccctccttgggatg

SEQ ID NO: 15187 - DNA, 20 bp, synthetic construct
  misc_feature 1..20: note = Description of Artificial Sequence: Synthetic oligonucleotide
  misc_feature 1..20: note = Target: SCN10A; (-) strand; PAM type: NRG; PAM sequence: GGG
  source 1..20: mol_type = other DNA
atcccaaccctccttgggat

SEQ ID NO: 15188 - DNA, 20 bp, synthetic construct
  misc_feature 1..20: note = Description of Artificial Sequence: Synthetic oligonucleotide
  misc_feature 1..20: note = Target: SCN10A; (-) strand; PAM type: NRG; PAM sequence: TGG
  source 1..20: mol_type = other DNA
aatcccaaccctccttggga

SEQ ID NO: 15189 - DNA, 20 bp, synthetic construct
  misc_feature 1..20: note = Description of Artificial Sequence: Synthetic oligonucleotide
  misc_feature 1..20: note = Target: SCN10A; (-) strand; PAM type: NRG; PAM sequence: GGG
  source 1..20: mol_type = other DNA
gcagaatcccaaccctcctt

SEQ ID NO: 15190 - DNA, 20 bp, synthetic construct
  misc_feature 1..20: note = Description of Artificial Sequence: Synthetic oligonucleotide
  misc_feature 1..20: note = Target: SCN10A; (-) strand; PAM type: NRG; PAM sequence: TGG
  source 1..20: mol_type = other DNA
ggcagaatcccaaccctcct

SEQ ID NO: 15191 - DNA, 20 bp, synthetic construct
  misc_feature 1..20: note = Description of Artificial Sequence: Synthetic oligonucleotide
  misc_feature 1..20: note = Target: SCN10A; (-) strand; PAM type: NRG; PAM sequence: CAG
  source 1..20: mol_type = other DNA
aggccatggcccagcactgg

SEQ ID NO: 15192 - DNA, 20 bp, synthetic construct
  misc_feature 1..20: note = Description of Artificial Sequence: Synthetic oligonucleotide
  misc_feature 1..20: note = Target: SCN10A; (-) strand; PAM type: NRG; PAM sequence: TGG
  source 1..20: mol_type = other DNA
gaaaggccatggcccagcac

SEQ ID NO: 15193 - DNA, 20 bp, synthetic construct
  misc_feature 1..20: note = Description of Artificial Sequence: Synthetic oligonucleotide
  misc_feature 1..20: note = Target: SCN10A; (-) strand; PAM type: NRG; PAM sequence: CAG
  source 1..20: mol_type = other DNA
cctcaggaaaggccatggcc

SEQ ID NO: 15194 - DNA, 20 bp, synthetic construct
  misc_feature 1..20: note = Description of Artificial Sequence: Synthetic oligonucleotide
  misc_feature 1..20: note = Target: SCN10A; (-) strand; PAM type: NRG; PAM sequence: TGG
  source 1..20: mol_type = other DNA
gggcacctcaggaaaggcca

SEQ ID NO: 15195 - DNA, 20 bp, synthetic construct
  misc_feature 1..20: note = Description of Artificial Sequence: Synthetic oligonucleotide
  misc_feature 1..20: note = Target: SCN10A; (-) strand; PAM type: NRG; PAM sequence: AGG
  source 1..20: mol_type = other DNA
gagtcagggcacctcaggaa

SEQ ID NO: 15196 - DNA, 20 bp, synthetic construct
  misc_feature 1..20: note = Description of Artificial Sequence: Synthetic oligonucleotide
  misc_feature 1..20: note = Target: SCN10A; (-) strand; PAM type: NRG; PAM sequence: AAG
  source 1..20: mol_type = other DNA
tgagtcagggcacctcagga

SEQ ID NO: 15197 - DNA, 20 bp, synthetic construct
  misc_feature 1..20: note = Description of Artificial Sequence: Synthetic oligonucleotide
  misc_feature 1..20: note = Target: SCN10A; (-) strand; PAM type: NRG; PAM sequence: AGG
  source 1..20: mol_type = other DNA
ggactgagtcagggcacctc

SEQ ID NO: 15198 - DNA, 20 bp, synthetic construct
  misc_feature 1..20: note = Description of Artificial Sequence: Synthetic oligonucleotide
  misc_feature 1..20: note = Target: SCN10A; (-) strand; PAM type: NRG; PAM sequence: CAG
  source 1..20: mol_type = other DNA
aggactgagtcagggcacct

SEQ ID NO: 15199 - DNA, 20 bp, synthetic construct
  misc_feature 1..20: note = Description of Artificial Sequence: Synthetic oligonucleotide
  misc_feature 1..20: note = Target: SCN10A; (-) strand; PAM type: NRG; PAM sequence: GGG
  source 1..20: mol_type = other DNA
ccccacaaaggactgagtca

SEQ ID NO: 15200 - DNA, 20 bp, synthetic construct
  misc_feature 1..20: note = Description of Artificial Sequence: Synthetic oligonucleotide
  misc_feature 1..20: note = Target: SCN10A; (-) strand; PAM type: NRG; PAM sequence: AGG
  source 1..20: mol_type = other DNA
tccccacaaaggactgagtc

SEQ ID NO: 15201 - DNA, 20 bp, synthetic construct
  misc_feature 1..20: note = Description of Artificial Sequence: Synthetic oligonucleotide
  misc_feature 1..20: note = Target: SCN10A; (-) strand; PAM type: NRG; PAM sequence: CAG
  source 1..20: mol_type = other DNA
atccccacaaaggactgagt

SEQ ID NO: 15202 - DNA, 20 bp, synthetic construct
  misc_feature 1..20: note = Description of Artificial Sequence: Synthetic oligonucleotide
  misc_feature 1..20: note = Target: SCN10A; (-) strand; PAM type: NRG; PAM sequence: GAG
  source 1..20: mol_type = other DNA
tatgatccccacaaaggact

SEQ ID NO: 15203 - DNA, 20 bp, synthetic construct
  misc_feature 1..20: note = Description of Artificial Sequence: Synthetic oligonucleotide
  misc_feature 1..20: note = Target: SCN10A; (-) strand; PAM type: NRG; PAM sequence: AGG
  source 1..20: mol_type = other DNA
gggggatatgatccccacaa

SEQ ID NO: 15204 - DNA, 20 bp, synthetic construct
  misc_feature 1..20: note = Description of Artificial Sequence: Synthetic oligonucleotide
  misc_feature 1..20: note = Target: SCN10A; (-) strand; PAM type: NRG; PAM sequence: AAG
  source 1..20: mol_type = other DNA
tgggggatatgatccccaca

SEQ ID NO: 15205 - DNA, 20 bp, synthetic construct
  misc_feature 1..20: note = Description of Artificial Sequence: Synthetic oligonucleotide
  misc_feature 1..20: note = Target: SCN10A; (-) strand; PAM type: NRG; PAM sequence: GGG
  source 1..20: mol_type = other DNA
agaacttgctgacctgttgg

SEQ ID NO: 15206 - DNA, 20 bp, synthetic construct
  misc_feature 1..20: note = Description of Artificial Sequence: Synthetic oligonucleotide
  misc_feature 1..20: note = Target: SCN10A; (-) strand; PAM type: NRG; PAM sequence: GGG
  source 1..20: mol_type = other DNA
tagaacttgctgacctgttg

SEQ ID NO: 15207 - DNA, 20 bp, synthetic construct
  misc_feature 1..20: note = Description of Artificial Sequence: Synthetic oligonucleotide
  misc_feature 1..20: note = Target: SCN10A; (-) strand; PAM type: NRG; PAM sequence: GGG
  source 1..20: mol_type = other DNA
ctagaacttgctgacctgtt

SEQ ID NO: 15208 - DNA, 20 bp, synthetic construct
  misc_feature 1..20: note = Description of Artificial Sequence: Synthetic oligonucleotide
  misc_feature 1..20: note = Target: SCN10A; (-) strand; PAM type: NRG; PAM sequence: TGG
  source 1..20: mol_type = other DNA
tctagaacttgctgacctgt

SEQ ID NO: 15209 - DNA, 20 bp, synthetic construct
  misc_feature 1..20: note = Description of Artificial Sequence: Synthetic oligonucleotide
  misc_feature 1..20: note = Target: SCN10A; (-) strand; PAM type: NRG; PAM sequence: TAG
  source 1..20: mol_type = other DNA
agcagggaaagaaagggatc

SEQ ID NO: 15210 - DNA, 20 bp, synthetic construct
  misc_feature 1..20: note = Description of Artificial Sequence: Synthetic oligonucleotide
  misc_feature 1..20: note = Target: SCN10A; (-) strand; PAM type: NRG; PAM sequence: GGG
  source 1..20: mol_type = other DNA
aatacaagcagggaaagaaa

SEQ ID NO: 15211 - DNA, 20 bp, synthetic construct
  misc_feature 1..20: note = Description of Artificial Sequence: Synthetic oligonucleotide
  misc_feature 1..20: note = Target: SCN10A; (-) strand; PAM type: NRG; PAM sequence: AGG
  source 1..20: mol_type = other DNA
gaatacaagcagggaaagaa

SEQ ID NO: 15212 - DNA, 20 bp, synthetic construct
  misc_feature 1..20: note = Description of Artificial Sequence: Synthetic oligonucleotide
  misc_feature 1..20: note = Target: SCN10A; (-) strand; PAM type: NRG; PAM sequence: AAG
  source 1..20: mol_type = other DNA
agaatacaagcagggaaaga

SEQ ID NO: 15213 - DNA, 20 bp, synthetic construct
  misc_feature 1..20: note = Description of Artificial Sequence: Synthetic oligonucleotide
  misc_feature 1..20: note = Target: SCN10A; (-) strand; PAM type: NRG; PAM sequence: AAG
  source 1..20: mol_type = other DNA
tgggagaatacaagcaggga

SEQ ID NO: 15214 - DNA, 20 bp, synthetic construct
  misc_feature 1..20: note = Description of Artificial Sequence: Synthetic oligonucleotide
  misc_feature 1..20: note = Target: SCN10A; (-) strand; PAM type: NRG; PAM sequence: GGG
  source 1..20: mol_type = other DNA
gccctgggagaatacaagca

SEQ ID NO: 15215 - DNA, 20 bp, synthetic construct
  misc_feature 1..20: note = Description of Artificial Sequence: Synthetic oligonucleotide
  misc_feature 1..20: note = Target: SCN10A; (-) strand; PAM type: NRG; PAM sequence: AGG
  source 1..20: mol_type = other DNA
agccctgggagaatacaagc

SEQ ID NO: 15216 - DNA, 20 bp, synthetic construct
  misc_feature 1..20: note = Description of Artificial Sequence: Synthetic oligonucleotide
  misc_feature 1..20: note = Target: SCN10A; (-) strand; PAM type: NRG; PAM sequence: CAG
  source 1..20: mol_type = other DNA
gagccctgggagaatacaag

SEQ ID NO: 15217 - DNA, 20 bp, synthetic construct
  misc_feature 1..20: note = Description of Artificial Sequence: Synthetic oligonucleotide
  misc_feature 1..20: note = Target: SCN10A; (-) strand; PAM type: NRG; PAM sequence: AAG
  source 1..20: mol_type = other DNA
agtgagccctgggagaatac

SEQ ID NO: 15218 - DNA, 20 bp, synthetic construct
  misc_feature 1..20: note = Description of Artificial Sequence: Synthetic oligonucleotide
  misc_feature 1..20: note = Target: SCN10A; (-) strand; PAM type: NRG; PAM sequence: GAG
  source 1..20: mol_type = other DNA
gtgttccaagtgagccctgg

SEQ ID NO: 15219 - DNA, 20 bp, synthetic construct
  misc_feature 1..20: note = Description of Artificial Sequence: Synthetic oligonucleotide
  misc_feature 1..20: note = Target: SCN10A; (-) strand; PAM type: NRG; PAM sequence: GGG
  source 1..20: mol_type = other DNA
atgtgttccaagtgagccct

SEQ ID NO: 15220 - DNA, 20 bp, synthetic construct
  misc_feature 1..20: note = Description of Artificial Sequence: Synthetic oligonucleotide
  misc_feature 1..20: note = Target: SCN10A; (-) strand; PAM type: NRG; PAM sequence: TGG
  source 1..20: mol_type = other DNA
gatgtgttccaagtgagccc

SEQ ID NO: 15221 - DNA, 20 bp, synthetic construct
  misc_feature 1..20: note = Description of Artificial Sequence: Synthetic oligonucleotide
  misc_feature 1..20: note = Target: SCN10A; (-) strand; PAM type: NRG; PAM sequence: GAG
  source 1..20: mol_type = other DNA
gtgttagatgtgttccaagt

SEQ ID NO: 15222 - DNA, 20 bp, synthetic construct
  misc_feature 1..20: note = Description of Artificial Sequence: Synthetic oligonucleotide
  misc_feature 1..20: note = Target: SCN10A; (-) strand; PAM type: NRG; PAM sequence: AAG
  source 1..20: mol_type = other DNA
aggtgtgttagatgtgttcc

SEQ ID NO: 15223 - DNA, 20 bp, synthetic construct
  misc_feature 1..20: note = Description of Artificial Sequence: Synthetic oligonucleotide
  misc_feature 1..20: note = Target: SCN10A; (-) strand; PAM type: NRG; PAM sequence: TAG
  source 1..20: mol_type = other DNA
ccaactggaaccaggtgtgt

SEQ ID NO: 15224 - DNA, 20 bp, synthetic construct
  misc_feature 1..20: note = Description of Artificial Sequence: Synthetic oligonucleotide
  misc_feature 1..20: note = Target: SCN10A; (-) strand; PAM type: NRG; PAM sequence: AGG
  source 1..20: mol_type = other DNA
tggtcttcccaactggaacc

SEQ ID NO: 15225 - DNA, 20 bp, synthetic construct
  misc_feature 1..20: note = Description of Artificial Sequence: Synthetic oligonucleotide
  misc_feature 1..20: note = Target: SCN10A; (-) strand; PAM type: NRG; PAM sequence: CAG
  source 1..20: mol_type = other DNA
ttggtcttcccaactggaac

SEQ ID NO: 15226 - DNA, 20 bp, synthetic construct
  misc_feature 1..20: note = Description of Artificial Sequence: Synthetic oligonucleotide
  misc_feature 1..20: note = Target: SCN10A; (-) strand; PAM type: NRG; PAM sequence: TGG
  source 1..20: mol_type = other DNA
gggatcttggtcttcccaac

SEQ ID NO: 15227 - DNA, 20 bp, synthetic construct
  misc_feature 1..20: note = Description of Artificial Sequence: Synthetic oligonucleotide
  misc_feature 1..20: note = Target: SCN10A; (-) strand; PAM type: NRG; PAM sequence: TGG
  source 1..20: mol_type = other DNA
ttcacatctcaaagggatct

SEQ ID NO: 15228 - DNA, 20 bp, synthetic construct
  misc_feature 1..20: note = Description of Artificial Sequence: Synthetic oligonucleotide
  misc_feature 1..20: note = Target: SCN10A; (-) strand; PAM type: NRG; PAM sequence: GGG
  source 1..20: mol_type = other DNA
ctcaggattcacatctcaaa

SEQ ID NO: 15229 - DNA, 20 bp, synthetic construct
  misc_feature 1..20: note = Description of Artificial Sequence: Synthetic oligonucleotide
  misc_feature 1..20: note = Target: SCN10A; (-) strand; PAM type: NRG; PAM sequence: AGG
  source 1..20: mol_type = other DNA
actcaggattcacatctcaa

SEQ ID NO: 15230 - DNA, 20 bp, synthetic construct
  misc_feature 1..20: note = Description of Artificial Sequence: Synthetic oligonucleotide
  misc_feature 1..20: note = Target: SCN10A; (-) strand; PAM type: NRG; PAM sequence: AAG
  source 1..20: mol_type = other DNA
cactcaggattcacatctca

SEQ ID NO: 15231 - DNA, 20 bp, synthetic construct
  misc_feature 1..20: note = Description of Artificial Sequence: Synthetic oligonucleotide
  misc_feature 1..20: note = Target: SCN10A; (-) strand; PAM type: NRG; PAM sequence: AGG
  source 1..20: mol_type = other DNA
ccccactaacatcctcactc

SEQ ID NO: 15232 - DNA, 20 bp, synthetic construct
  misc_feature 1..20: note = Description of Artificial Sequence: Synthetic oligonucleotide
  misc_feature 1..20: note = Target: SCN10A; (-) strand; PAM type: NRG; PAM sequence: CAG
  source 1..20: mol_type = other DNA
gccccactaacatcctcact

SEQ ID NO: 15233 - DNA, 20 bp, synthetic construct
  misc_feature 1..20: note = Description of Artificial Sequence: Synthetic oligonucleotide
  misc_feature 1..20: note = Target: SCN10A; (-) strand; PAM type: NRG; PAM sequence: CAG
  source 1..20: mol_type = other DNA
agagttgcatttctctctgt

SEQ ID NO: 15234 - DNA, 20 bp, synthetic construct
  misc_feature 1..20: note = Description of Artificial Sequence: Synthetic oligonucleotide
  misc_feature 1..20: note = Target: SCN10A; (-) strand; PAM type: NRG; PAM sequence: GAG
  source 1..20: mol_type = other DNA
tgtgattgctgttgcaggaa

SEQ ID NO: 15235 - DNA, 20 bp, synthetic construct
  misc_feature 1..20: note = Description of Artificial Sequence: Synthetic oligonucleotide
  misc_feature 1..20: note = Target: SCN10A; (-) strand; PAM type: NRG; PAM sequence: AAG
  source 1..20: mol_type = other DNA
cctgtgattgctgttgcagg

SEQ ID NO: 15236 - DNA, 20 bp, synthetic construct
  misc_feature 1..20: note = Description of Artificial Sequence: Synthetic oligonucleotide
  misc_feature 1..20: note = Target: SCN10A; (-) strand; PAM type: NRG; PAM sequence: AGG
  source 1..20: mol_type = other DNA
tgccctgtgattgctgttgc

SEQ ID NO: 15237 - DNA, 20 bp, synthetic construct
  misc_feature 1..20: note = Description of Artificial Sequence: Synthetic oligonucleotide
  misc_feature 1..20: note = Target: SCN10A; (-) strand; PAM type: NRG; PAM sequence: CAG
  source 1..20: mol_type = other DNA
ttgccctgtgattgctgttg

SEQ ID NO: 15238 - DNA, 20 bp, synthetic construct
  misc_feature 1..20: note = Description of Artificial Sequence: Synthetic oligonucleotide
  misc_feature 1..20: note = Target: SCN10A; (-) strand; PAM type: NRG; PAM sequence: CAG
  source 1..20: mol_type = other DNA
acagcccatcactttaatat

SEQ ID NO: 15239 - DNA, 20 bp, synthetic construct
  misc_feature 1..20: note = Description of Artificial Sequence: Synthetic oligonucleotide
  misc_feature 1..20: note = Target: SCN10A; (-) strand; PAM type: NRG; PAM sequence: CAG
  source 1..20: mol_type = other DNA
acaaaagccaacactactca

SEQ ID NO: 15240 - DNA, 20 bp, synthetic construct
  misc_feature 1..20: note = Description of Artificial Sequence: Synthetic oligonucleotide
  misc_feature 1..20: note = Target: SCN10A; (-) strand; PAM type: NRG; PAM sequence: AAG
  source 1..20: mol_type = other DNA
cagctctggcctcctgacaa

SEQ ID NO: 15241 - DNA, 20 bp, synthetic construct
  misc_feature 1..20: note = Description of Artificial Sequence: Synthetic oligonucleotide
  misc_feature 1..20: note = Target: SCN10A; (-) strand; PAM type: NRG; PAM sequence: TGG
  source 1..20: mol_type = other DNA
tcctgttccctgcccagctc

SEQ ID NO: 15242 - DNA, 20 bp, synthetic construct
  misc_feature 1..20: note = Description of Artificial Sequence: Synthetic oligonucleotide
  misc_feature 1..20: note = Target: SCN10A; (-) strand; PAM type: NRG; PAM sequence: CAG
  source 1..20: mol_type = other DNA
tatatttcctgttccctgcc

SEQ ID NO: 15243 - DNA, 20 bp, synthetic construct
  misc_feature 1..20: note = Description of Artificial Sequence: Synthetic oligonucleotide
  misc_feature 1..20: note = Target: SCN10A; (-) strand; PAM type: NRG; PAM sequence: AAG
  source 1..20: mol_type = other DNA
ctggtttctgctgtagtggt

SEQ ID NO: 15244 - DNA, 20 bp, synthetic construct
  misc_feature 1..20: note = Description of Artificial Sequence: Synthetic oligonucleotide
  misc_feature 1..20: note = Target: SCN10A; (-) strand; PAM type: NRG; PAM sequence: TGG
  source 1..20: mol_type = other DNA
gtttctggtttctgctgtag

SEQ ID NO: 15245 - DNA, 20 bp, synthetic construct
  misc_feature 1..20: note = Description of Artificial Sequence: Synthetic oligonucleotide
  misc_feature 1..20: note = Target: SCN10A; (-) strand; PAM type: NRG; PAM sequence: TAG
  source 1..20: mol_type = other DNA
ggagtttctggtttctgctg

SEQ ID NO: 15246 - DNA, 20 bp, synthetic construct
  misc_feature 1..20: note = Description of Artificial Sequence: Synthetic oligonucleotide
  misc_feature 1..20: note = Target: SCN10A; (-) strand; PAM type: NRG; PAM sequence: TGG
  source 1..20: mol_type = other DNA
aagtggtgctcaggagtttc

SEQ ID NO: 15247 - DNA, 20 bp, synthetic construct
  misc_feature 1..20: note = Description of Artificial Sequence: Synthetic oligonucleotide
  misc_feature 1..20: note = Target: SCN10A; (-) strand; PAM type: NRG; PAM sequence: GAG
  source 1..20: mol_type = other DNA
aaaagataagtggtgctcag

SEQ ID NO: 15248 - DNA, 20 bp, synthetic construct
  misc_feature 1..20: note = Description of Artificial Sequence: Synthetic oligonucleotide
  misc_feature 1..20: note = Target: SCN10A; (-) strand; PAM type: NRG; PAM sequence: AGG
  source 1..20: mol_type = other DNA
aaaaaagataagtggtgctc

SEQ ID NO: 15249 - DNA, 20 bp, synthetic construct
  misc_feature 1..20: note = Description of Artificial Sequence: Synthetic oligonucleotide
  misc_feature 1..20: note = Target: SCN10A; (-) strand; PAM type: NRG; PAM sequence: CAG
  source 1..20: mol_type = other DNA
aaaaaaagataagtggtgct

SEQ ID NO: 15250 - DNA, 20 bp, synthetic construct
  misc_feature 1..20: note = Description of Artificial Sequence: Synthetic oligonucleotide
  misc_feature 1..20: note = Target: SCN10A; (-) strand; PAM type: NRG; PAM sequence: TGG
  source 1..20: mol_type = other DNA
caacagaaaaaaaagataag

SEQ ID NO: 15251 - DNA, 20 bp, synthetic construct
  misc_feature 1..20: note = Description of Artificial Sequence: Synthetic oligonucleotide
  misc_feature 1..20: note = Target: SCN10A; (-) strand; PAM type: NRG; PAM sequence: AAG
  source 1..20: mol_type = other DNA
aatcaacagaaaaaaaagat

SEQ ID NO: 15252 - DNA, 20 bp, synthetic construct
  misc_feature 1..20: note = Description of Artificial Sequence: Synthetic oligonucleotide
  misc_feature 1..20: note = Target: SCN10A; (-) strand; PAM type: NRG; PAM sequence: AAG
  source 1..20: mol_type = other DNA
acttcaatcaacagaaaaaa

SEQ ID NO: 15253 - DNA, 20 bp, synthetic construct
  misc_feature 1..20: note = Description of Artificial Sequence: Synthetic oligonucleotide
  misc_feature 1..20: note = Target: SCN10A; (-) strand; PAM type: NRG; PAM sequence: CAG
  source 1..20: mol_type = other DNA
taattgacaacttcaatcaa

SEQ ID NO: 15254 - DNA, 20 bp, synthetic construct
  misc_feature 1..20: note = Description of Artificial Sequence: Synthetic oligonucleotide
  misc_feature 1..20: note = Target: SCN10A; (-) strand; PAM type: NRG; PAM sequence: GGG
  source 1..20: mol_type = other DNA
cacactgaatctctttgttg

SEQ ID NO: 15255 - DNA, 20 bp, synthetic construct
  misc_feature 1..20: note = Description of Artificial Sequence: Synthetic oligonucleotide
  misc_feature 1..20: note = Target: SCN10A; (-) strand; PAM type: NRG; PAM sequence: GGG
  source 1..20: mol_type = other DNA
tcacactgaatctctttgtt

SEQ ID NO: 15256 - DNA, 20 bp, synthetic construct
  misc_feature 1..20: note = Description of Artificial Sequence: Synthetic oligonucleotide
  misc_feature 1..20: note = Target: SCN10A; (-) strand; PAM type: NRG; PAM sequence: TGG
  source 1..20: mol_type = other DNA
ttcacactgaatctctttgt

SEQ ID NO: 15257 - DNA, 20 bp, synthetic construct
  misc_feature 1..20: note = Description of Artificial Sequence: Synthetic oligonucleotide
  misc_feature 1..20: note = Target: SCN10A; (-) strand; PAM type: NRG; PAM sequence: AGG
  source 1..20: mol_type = other DNA
gtcatcttcatcatttttgg

SEQ ID NO: 15258 - DNA, 20 bp, synthetic construct
  misc_feature 1..20: note = Description of Artificial Sequence: Synthetic oligonucleotide
  misc_feature 1..20: note = Target: SCN10A; (-) strand; PAM type: NRG; PAM sequence: GAG
  source 1..20: mol_type = other DNA
tgtcatcttcatcatttttg

SEQ ID NO: 15259 - DNA, 20 bp, synthetic construct
  misc_feature 1..20: note = Description of Artificial Sequence: Synthetic oligonucleotide
  misc_feature 1..20: note = Target: SCN10A; (-) strand; PAM type: NRG; PAM sequence: TGG
  source 1..20: mol_type = other DNA
tttgtcatcttcatcatttt

SEQ ID NO: 15260 - DNA, 20 bp, synthetic construct
  misc_feature 1..20: note = Description of Artificial Sequence: Synthetic oligonucleotide
  misc_feature 1..20: note = Target: SCN10A; (-) strand; PAM type: NRG; PAM sequence: AGG
  source 1..20: mol_type = other DNA
caacatgcaacccaagtggg

SEQ ID NO: 15261 - DNA, 20 bp, synthetic construct
  misc_feature 1..20: note = Description of Artificial Sequence: Synthetic oligonucleotide
  misc_feature 1..20: note = Target: SCN10A; (-) strand; PAM type: NRG; PAM sequence: GAG
  source 1..20: mol_type = other DNA
tcaacatgcaacccaagtgg

SEQ ID NO: 15262 - DNA, 20 bp, synthetic construct
  misc_feature 1..20: note = Description of Artificial Sequence: Synthetic oligonucleotide
  misc_feature 1..20: note = Target: SCN10A; (-) strand; PAM type: NRG; PAM sequence: GGG
  source 1..20: mol_type = other DNA
ggtcaacatgcaacccaagt

SEQ ID NO: 15263 - DNA, 20 bp, synthetic construct
  misc_feature 1..20: note = Description of Artificial Sequence: Synthetic oligonucleotide
  misc_feature 1..20: note = Target: SCN10A; (-) strand; PAM type: NRG; PAM sequence: TGG
  source 1..20: mol_type = other DNA
aggtcaacatgcaacccaag

SEQ ID NO: 15264 - DNA, 20 bp, synthetic construct
  misc_feature 1..20: note = Description of Artificial Sequence: Synthetic oligonucleotide
  misc_feature 1..20: note = Target: SCN10A; (-) strand; PAM type: NRG; PAM sequence: AAG
  source 1..20: mol_type = other DNA
cacaggtcaacatgcaaccc

SEQ ID NO: 15265 - DNA, 20 bp, synthetic construct
  misc_feature 1..20: note = Description of Artificial Sequence: Synthetic oligonucleotide
  misc_feature 1..20: note = Target: SCN10A; (-) strand; PAM type: NRG; PAM sequence: AGG
  source 1..20: mol_type = other DNA
actctcccttgtctggtcac

SEQ ID NO: 15266 - DNA, 20 bp, synthetic construct
  misc_feature 1..20: note = Description of Artificial Sequence: Synthetic oligonucleotide
  misc_feature 1..20: note = Target: SCN10A; (-) strand; PAM type: NRG; PAM sequence: CAG
  source 1..20: mol_type = other DNA
cactctcccttgtctggtca

SEQ ID NO: 15267 - DNA, 20 bp, synthetic construct
  misc_feature 1..20: note = Description of Artificial Sequence: Synthetic oligonucleotide
  misc_feature 1..20: note = Target: SCN10A; (-) strand; PAM type: NRG; PAM sequence: TGG
  source 1..20: mol_type = other DNA
ccttcccactctcccttgtc

SEQ ID NO: 15268 - DNA, 20 bp, synthetic construct
  misc_feature 1..20: note = Description of Artificial Sequence: Synthetic oligonucleotide
  misc_feature 1..20: note = Target: SCN10A; (-) strand; PAM type: NRG; PAM sequence: AAG
  source 1..20: mol_type = other DNA
tttcagagtgaacctgaact

SEQ ID NO: 15269 - DNA, 20 bp, synthetic construct
  misc_feature 1..20: note = Description of Artificial Sequence: Synthetic oligonucleotide
  misc_feature 1..20: note = Target: SCN10A; (-) strand; PAM type: NRG; PAM sequence: GAG
  source 1..20: mol_type = other DNA
tgtcttaggcttggctttca

SEQ ID NO: 15270 - DNA, 20 bp, synthetic construct
  misc_feature 1..20: note = Description of Artificial Sequence: Synthetic oligonucleotide
  misc_feature 1..20: note = Target: SCN10A; (-) strand; PAM type: NRG; PAM sequence: CAG
  source 1..20: mol_type = other DNA
catgtcttaggcttggcttt

SEQ ID NO: 15271 - DNA, 20 bp, synthetic construct
  misc_feature 1..20: note = Description of Artificial Sequence: Synthetic oligonucleotide
  misc_feature 1..20: note = Target: SCN10A; (-) strand; PAM type: NRG; PAM sequence: TGG
  source 1..20: mol_type = other DNA
ccaggtccatgtcttaggct

SEQ ID NO: 15272 - DNA, 20 bp, synthetic construct
  misc_feature 1..20: note = Description of Artificial Sequence: Synthetic oligonucleotide
  misc_feature 1..20: note = Target: SCN10A; (-) strand; PAM type: NRG; PAM sequence: AGG
  source 1..20: mol_type = other DNA
tgcacccaggtccatgtctt

SEQ ID NO: 15273 - DNA, 20 bp, synthetic construct
  misc_feature 1..20: note = Description of Artificial Sequence: Synthetic oligonucleotide
  misc_feature 1..20: note = Target: SCN10A; (-) strand; PAM type: NRG; PAM sequence: TAG
  source 1..20: mol_type = other DNA
ctgcacccaggtccatgtct

SEQ ID NO: 15274 - DNA, 20 bp, synthetic construct
  misc_feature 1..20: note = Description of Artificial Sequence: Synthetic oligonucleotide
  misc_feature 1..20: note = Target: SCN10A; (-) strand; PAM type: NRG; PAM sequence: AGG
  source 1..20: mol_type = other DNA
cagataaatcacctgcaccc

SEQ ID NO: 15275 - DNA, 20 bp, synthetic construct
  misc_feature 1..20: note = Description of Artificial Sequence: Synthetic oligonucleotide
  misc_feature 1..20: note = Target: SCN10A; (-) strand; PAM type: NRG; PAM sequence: CAG
  source 1..20: mol_type = other DNA
ccagataaatcacctgcacc

SEQ ID NO: 15276 - DNA, 20 bp, synthetic construct
  misc_feature 1..20: note = Description of Artificial Sequence: Synthetic oligonucleotide
  misc_feature 1..20: note = Target: SCN10A; (-) strand; PAM type: NRG; PAM sequence: CAG
  source 1..20: mol_type = other DNA
tgcttccttggatcacctcc

SEQ ID NO: 15277 - DNA, 20 bp, synthetic construct
  misc_feature 1..20: note = Description of Artificial Sequence: Synthetic oligonucleotide
  misc_feature 1..20: note = Target: SCN10A; (-) strand; PAM type: NRG; PAM sequence: TGG
  source 1..20: mol_type = other DNA
ctccctcattcctgcttcct

SEQ ID NO: 15278 - DNA, 20 bp, synthetic construct
  misc_feature 1..20: note = Description of Artificial Sequence: Synthetic oligonucleotide
  misc_feature 1..20: note = Target: SCN10A; (-) strand; PAM type: NRG; PAM sequence: AGG
  source 1..20: mol_type = other DNA
cttaacaacatcctcttcac

SEQ ID NO: 15279 - DNA, 20 bp, synthetic construct
  misc_feature 1..20: note = Description of Artificial Sequence: Synthetic oligonucleotide
  misc_feature 1..20: note = Target: SCN10A; (-) strand; PAM type: NRG; PAM sequence: CAG
  source 1..20: mol_type = other DNA
gcttaacaacatcctcttca

SEQ ID NO: 15280 - DNA, 20 bp, synthetic construct
  misc_feature 1..20: note = Description of Artificial Sequence: Synthetic oligonucleotide
  misc_feature 1..20: note = Target: SCN10A; (-) strand; PAM type: NRG; PAM sequence: CAG
  source 1..20: mol_type = other DNA
accccagtaggattgcgctt

SEQ ID NO: 15281 - DNA, 20 bp, synthetic construct
  misc_feature 1..20: note = Description of Artificial Sequence: Synthetic oligonucleotide
  misc_feature 1..20: note = Target: SCN10A; (-) strand; PAM type: NRG; PAM sequence: AGG
  source 1..20: mol_type = other DNA
gttactcagaggaccccagt

SEQ ID NO: 15282 - DNA, 20 bp, synthetic construct
  misc_feature 1..20: note = Description of Artificial Sequence: Synthetic oligonucleotide
  misc_feature 1..20: note = Target: SCN10A; (-) strand; PAM type: NRG; PAM sequence: TAG
  source 1..20: mol_type = other DNA
agttactcagaggaccccag

SEQ ID NO: 15283 - DNA, 20 bp, synthetic construct
  misc_feature 1..20: note = Description of Artificial Sequence: Synthetic oligonucleotide
  misc_feature 1..20: note = Target: SCN10A; (-) strand; PAM type: NRG; PAM sequence: CAG
  source 1..20: mol_type = other DNA
cacagttactcagaggaccc

SEQ ID NO: 15284 - DNA, 20 bp, synthetic construct
  misc_feature 1..20: note = Description of Artificial Sequence: Synthetic oligonucleotide
  misc_feature 1..20: note = Target: SCN10A; (-) strand; PAM type: NRG; PAM sequence: AGG
  source 1..20: mol_type = other DNA
tgctctacacagttactcag

SEQ ID NO: 15285 - DNA, 20 bp, synthetic construct
  misc_feature 1..20: note = Description of Artificial Sequence: Synthetic oligonucleotide
  misc_feature 1..20: note = Target: SCN10A; (-) strand; PAM type: NRG; PAM sequence: GAG
  source 1..20: mol_type = other DNA
gtgctctacacagttactca

SEQ ID NO: 15286 - DNA, 20 bp, synthetic construct
  misc_feature 1..20: note = Description of Artificial Sequence: Synthetic oligonucleotide
  misc_feature 1..20: note = Target: SCN10A; (-) strand; PAM type: NRG; PAM sequence: CAG
  source 1..20: mol_type = other DNA
atgtgctctacacagttact

SEQ ID NO: 15287 - DNA, 20 bp, synthetic construct
  misc_feature 1..20: note = Description of Artificial Sequence: Synthetic oligonucleotide
  misc_feature 1..20: note = Target: SCN10A; (-) strand; PAM type: NRG; PAM sequence: CAG
  source 1..20: mol_type = other DNA
aatcctgcatgtgctctaca

SEQ ID NO: 15288 - DNA, 20 bp, synthetic construct
  misc_feature 1..20: note = Description of Artificial Sequence: Synthetic oligonucleotide
  misc_feature 1..20: note = Target: SCN10A; (-) strand; PAM type: NRG; PAM sequence: TGG
  source 1..20: mol_type = other DNA
actccagtttccctgtccct

SEQ ID NO: 15289 - DNA, 20 bp, synthetic construct
  misc_feature 1..20: note = Description of Artificial Sequence: Synthetic oligonucleotide
  misc_feature 1..20: note = Target: SCN10A; (-) strand; PAM type: NRG; PAM sequence: CAG
  source 1..20: mol_type = other DNA
gagtctgaggataaatactc

SEQ ID NO: 15290 - DNA, 20 bp, synthetic construct
  misc_feature 1..20: note = Description of Artificial Sequence: Synthetic oligonucleotide
  misc_feature 1..20: note = Target: SCN10A; (-) strand; PAM type: NRG; PAM sequence: AGG
  source 1..20: mol_type = other DNA
caataagttttgggagtctg

SEQ ID NO: 15291 - DNA, 20 bp, synthetic construct
  misc_feature 1..20: note = Description of Artificial Sequence: Synthetic oligonucleotide
  misc_feature 1..20: note = Target: SCN10A; (-) strand; PAM type: NRG; PAM sequence: GAG
  source 1..20: mol_type = other DNA
ccaataagttttgggagtct

SEQ ID NO: 15292 - DNA, 20 bp, synthetic construct
  misc_feature 1..20: note = Description of Artificial Sequence: Synthetic oligonucleotide
  misc_feature 1..20: note = Target: SCN10A; (-) strand; PAM type: NRG; PAM sequence: GAG
  source 1..20: mol_type = other DNA
cccttaccaataagttttgg

SEQ ID NO: 15293 - DNA, 20 bp, synthetic construct
  misc_feature 1..20: note = Description of Artificial Sequence: Synthetic oligonucleotide
  misc_feature 1..20: note = Target: SCN10A; (-) strand; PAM type: NRG; PAM sequence: GGG
  source 1..20: mol_type = other DNA
aacccttaccaataagtttt

SEQ ID NO: 15294 - DNA, 20 bp, synthetic construct
  misc_feature 1..20: note = Description of Artificial Sequence: Synthetic oligonucleotide
  misc_feature 1..20: note = Target: SCN10A; (-) strand; PAM type: NRG; PAM sequence: TGG
  source 1..20: mol_type = other DNA
caacccttaccaataagttt

SEQ ID NO: 15295 - DNA, 20 bp, synthetic construct
  misc_feature 1..20: note = Description of Artificial Sequence: Synthetic oligonucleotide
  misc_feature 1..20: note = Target: SCN10A; (-) strand; PAM type: NRG; PAM sequence: AAG
  source 1..20: mol_type = other DNA
taggggcaacccttaccaat

SEQ ID NO: 15296 - DNA, 20 bp, synthetic construct
  misc_feature 1..20: note = Description of Artificial Sequence: Synthetic oligonucleotide
  misc_feature 1..20: note = Target: SCN10A; (-) strand; PAM type: NRG; PAM sequence: GGG
  source 1..20: mol_type = other DNA
cagggatttaatgtccctag

SEQ ID NO: 15297 - DNA, 20 bp, synthetic construct
  misc_feature 1..20: note = Description of Artificial Sequence: Synthetic oligonucleotide
  misc_feature 1..20: note = Target: SCN10A; (-) strand; PAM type: NRG; PAM sequence: GGG
  source 1..20: mol_type = other DNA
ccagggatttaatgtcccta

SEQ ID NO: 15298 - DNA, 20 bp, synthetic construct
  misc_feature 1..20: note = Description of Artificial Sequence: Synthetic oligonucleotide
  misc_feature 1..20: note = Target: SCN10A; (-) strand; PAM type: NRG; PAM sequence: AGG
  source 1..20: mol_type = other DNA
accagggatttaatgtccct

SEQ ID NO: 15299 - DNA, 20 bp, synthetic construct
  misc_feature 1..20: note = Description of Artificial Sequence: Synthetic oligonucleotide
  misc_feature 1..20: note = Target: SCN10A; (-) strand; PAM type: NRG; PAM sequence: TAG
  source 1..20: mol_type = other DNA
taccagggatttaatgtccc

SEQ ID NO: 15300 - DNA, 20 bp, synthetic construct
  misc_feature 1..20: note = Description of Artificial Sequence: Synthetic oligonucleotide
  misc_feature 1..20: note = Target: SCN10A; (-) strand; PAM type: NRG; PAM sequence: GGG
  source 1..20: mol_type = other DNA
aacttctcccccaagtacca

SEQ ID NO: 15301 - DNA, 20 bp, synthetic construct
  misc_feature 1..20: note = Description of Artificial Sequence: Synthetic oligonucleotide
  misc_feature 1..20: note = Target: SCN10A; (-) strand; PAM type: NRG; PAM sequence: AGG
  source 1..20: mol_type = other DNA
caacttctcccccaagtacc

SEQ ID NO: 15302 - DNA, 20 bp, synthetic construct
  misc_feature 1..20: note = Description of Artificial Sequence: Synthetic oligonucleotide
  misc_feature 1..20: note = Target: SCN10A; (-) strand; PAM type: NRG; PAM sequence: CAG
  source 1..20: mol_type = other DNA
gcaacttctcccccaagtac

SEQ ID NO: 15303 - DNA, 20 bp, synthetic construct
  misc_feature 1..20: note = Description of Artificial Sequence: Synthetic oligonucleotide
  misc_feature 1..20: note = Target: SCN10A; (-) strand; PAM type: NRG; PAM sequence: AAG
  source 1..20: mol_type = other DNA
tgtgcagcaacttctccccc

SEQ ID NO: 15304 - DNA, 20 bp, synthetic construct
  misc_feature 1..20: note = Description of Artificial Sequence: Synthetic oligonucleotide
  misc_feature 1..20: note = Target: SCN10A; (-) strand; PAM type: NRG; PAM sequence: CAG
  source 1..20: mol_type = other DNA
ccagggcttaggagcttgtg

SEQ ID NO: 15305 - DNA, 20 bp, synthetic construct
  misc_feature 1..20: note = Description of Artificial Sequence: Synthetic oligonucleotide
  misc_feature 1..20: note = Target: SCN10A; (-) strand; PAM type: NRG; PAM sequence: GAG
  source 1..20: mol_type = other DNA
ataaagactccagggcttag

SEQ ID NO: 15306 - DNA, 20 bp, synthetic construct
  misc_feature 1..20: note = Description of Artificial Sequence: Synthetic oligonucleotide
  misc_feature 1..20: note = Target: SCN10A; (-) strand; PAM type: NRG; PAM sequence: AGG
  source 1..20: mol_type = other DNA
gtataaagactccagggctt

SEQ ID NO: 15307 - DNA, 20 bp, synthetic construct
  misc_feature 1..20: note = Description of Artificial Sequence: Synthetic oligonucleotide
  misc_feature 1..20: note = Target: SCN10A; (-) strand; PAM type: NRG; PAM sequence: TAG
  source 1..20: mol_type = other DNA
tgtataaagactccagggct

SEQ ID NO: 15308 - DNA, 20 bp, synthetic construct
  misc_feature 1..20: note = Description of Artificial Sequence: Synthetic oligonucleotide
  misc_feature 1..20: note = Target: SCN10A; (-) strand; PAM type: NRG; PAM sequence: GGG
  source 1..20: mol_type = other DNA
ttctctgtataaagactcca

SEQ ID NO: 15309 - DNA, 20 bp, synthetic construct
  misc_feature 1..20: note = Description of Artificial Sequence: Synthetic oligonucleotide
  misc_feature 1..20: note = Target: SCN10A; (-) strand; PAM type: NRG; PAM sequence: AGG
  source 1..20: mol_type = other DNA
attctctgtataaagactcc

SEQ ID NO: 15310 - DNA, 20 bp, synthetic construct
  misc_feature 1..20: note = Description of Artificial Sequence: Synthetic oligonucleotide
  misc_feature 1..20: note = Target: SCN10A; (-) strand; PAM type: NRG; PAM sequence: CAG
  source 1..20: mol_type = other DNA
gattctctgtataaagactc

SEQ ID NO: 15311 - DNA, 20 bp, synthetic construct
  misc_feature 1..20: note = Description of Artificial Sequence: Synthetic oligonucleotide
  misc_feature 1..20: note = Target: SCN10A; (-) strand; PAM type: NRG; PAM sequence: AAG
  source 1..20: mol_type = other DNA
cacttctgattctctgtata

SEQ ID NO: 15312 - DNA, 20 bp, synthetic construct
  misc_feature 1..20: note = Description of Artificial Sequence: Synthetic oligonucleotide
  misc_feature 1..20: note = Target: SCN10A; (-) strand; PAM type: NRG; PAM sequence: AGG
  source 1..20: mol_type = other DNA
ccacttctgatttcacctgc

SEQ ID NO: 15313 - DNA, 20 bp, synthetic construct
  misc_feature 1..20: note = Description of Artificial Sequence: Synthetic oligonucleotide
  misc_feature 1..20: note = Target: SCN10A; (-) strand; PAM type: NRG; PAM sequence: CAG
  source 1..20: mol_type = other DNA
cccacttctgatttcacctg

SEQ ID NO: 15314 - DNA, 20 bp, synthetic construct
  misc_feature 1..20: note = Description of Artificial Sequence: Synthetic oligonucleotide
  misc_feature 1..20: note = Target: SCN10A; (-) strand; PAM type: NRG; PAM sequence: TAG
  source 1..20: mol_type = other DNA
ttccctgccacctcttccct

SEQ ID NO: 15315 - DNA, 20 bp, synthetic construct
  misc_feature 1..20: note = Description of Artificial Sequence: Synthetic oligonucleotide
  misc_feature 1..20: note = Target: SCN10A; (-) strand; PAM type: NRG; PAM sequence: AGG
  source 1..20: mol_type = other DNA
tgaccacttcctgctgtggc

SEQ ID NO: 15316 - DNA, 20 bp, synthetic construct
  misc_feature 1..20: note = Description of Artificial Sequence: Synthetic oligonucleotide
  misc_feature 1..20: note = Target: SCN10A; (-) strand; PAM type: NRG; PAM sequence: CAG
  source 1..20: mol_type = other DNA
atgaccacttcctgctgtgg

SEQ ID NO: 15317 - DNA, 20 bp, synthetic construct
  misc_feature 1..20: note = Description of Artificial Sequence: Synthetic oligonucleotide
  misc_feature 1..20: note = Target: SCN10A; (-) strand; PAM type: NRG; PAM sequence: TGG
  source 1..20: mol_type = other DNA
ggaatgaccacttcctgctg

SEQ ID NO: 15318 - DNA, 20 bp, synthetic construct
  misc_feature 1..20: note = Description of Artificial Sequence: Synthetic oligonucleotide
  misc_feature 1..20: note = Target: SCN10A; (-) strand; PAM type: NRG; PAM sequence: GGG
  source 1..20: mol_type = other DNA
aggctggggagacactattg

SEQ ID NO: 15319 - DNA, 20 bp, synthetic construct
  misc_feature 1..20: note = Description of Artificial Sequence: Synthetic oligonucleotide
  misc_feature 1..20: note = Target: SCN10A; (-) strand; PAM type: NRG; PAM sequence: GGG
  source 1..20: mol_type = other DNA
caggctggggagacactatt

SEQ ID NO: 15320 - DNA, 20 bp, synthetic construct
  misc_feature 1..20: note = Description of Artificial Sequence: Synthetic oligonucleotide
  misc_feature 1..20: note = Target: SCN10A; (-) strand; PAM type: NRG; PAM sequence: TGG
  source 1..20: mol_type = other DNA
ccaggctggggagacactat

SEQ ID NO: 15321 - DNA, 20 bp, synthetic construct
  misc_feature 1..20: note = Description of Artificial Sequence: Synthetic oligonucleotide
  misc_feature 1..20: note = Target: SCN10A; (-) strand; PAM type: NRG; PAM sequence: GAG
  source 1..20: mol_type = other DNA
aaagaaaaagccaggctggg

SEQ ID NO: 15322 - DNA, 20 bp, synthetic construct
  misc_feature 1..20: note = Description of Artificial Sequence: Synthetic oligonucleotide
  misc_feature 1..20: note = Target: SCN10A; (-) strand; PAM type: NRG; PAM sequence: GGG
  source 1..20: mol_type = other DNA
gaaaagaaaaagccaggctg

SEQ ID NO: 15323 - DNA, 20 bp, synthetic construct
  misc_feature 1..20: note = Description of Artificial Sequence: Synthetic oligonucleotide
  misc_feature 1..20: note = Target: SCN10A; (-) strand; PAM type: NRG; PAM sequence: GGG
  source 1..20: mol_type = other DNA
agaaaagaaaaagccaggct

SEQ ID NO: 15324 - DNA, 20 bp, synthetic construct
  misc_feature 1..20: note = Description of Artificial Sequence: Synthetic oligonucleotide
  misc_feature 1..20: note = Target: SCN10A; (-) strand; PAM type: NRG; PAM sequence: TGG
  source 1..20: mol_type = other DNA
aagaaaagaaaaagccaggc

SEQ ID NO: 15325 - DNA, 20 bp, synthetic construct
  misc_feature 1..20: note = Description of Artificial Sequence: Synthetic oligonucleotide
  misc_feature 1..20: note = Target: SCN10A; (-) strand; PAM type: NRG; PAM sequence: AGG
  source 1..20: mol_type = other DNA
agaaaagaaaagaaaaagcc

SEQ ID NO: 15326 - DNA, 20 bp, synthetic construct
  misc_feature 1..20: note = Description of Artificial Sequence: Synthetic oligonucleotide
  misc_feature 1..20: note = Target: SCN10A; (-) strand; PAM type: NRG; PAM sequence: CAG
  source 1..20: mol_type = other DNA
aagaaaagaaaagaaaaagc

SEQ ID NO: 15327 - DNA, 20 bp, synthetic construct
  misc_feature 1..20: note = Description of Artificial Sequence: Synthetic oligonucleotide
  misc_feature 1..20: note = Target: SCN10A; (-) strand; PAM type: NRG; PAM sequence: AAG
  source 1..20: mol_type = other DNA
aaaaaagaaaagaaaagaaa

SEQ ID NO: 15328 - DNA, 20 bp, synthetic construct
  misc_feature 1..20: note = Description of Artificial Sequence: Synthetic oligonucleotide
  misc_feature 1..20: note = Target: SCN10A; (-) strand; PAM type: NRG; PAM sequence: AAG
  source 1..20: mol_type = other DNA
ctcaaaaaaaaagaaaagaa

SEQ ID NO: 15329 - DNA, 20 bp, synthetic construct
  misc_feature 1..20: note = Description of Artificial Sequence: Synthetic oligonucleotide
  misc_feature 1..20: note = Target: SCN10A; (-) strand; PAM type: NRG; PAM sequence: AAG
  source 1..20: mol_type = other DNA
tcaatctcaaaaaaaaagaa

SEQ ID NO: 15330 - DNA, 20 bp, synthetic construct
  misc_feature 1..20: note = Description of Artificial Sequence: Synthetic oligonucleotide
  misc_feature 1..20: note = Target: SCN10A; (-) strand; PAM type: NRG; PAM sequence: AAG
  source 1..20: mol_type = other DNA
gagactcaatctcaaaaaaa

SEQ ID NO: 15331 - DNA, 20 bp, synthetic construct
  misc_feature 1..20: note = Description of Artificial Sequence: Synthetic oligonucleotide
  misc_feature 1..20: note = Target: SCN10A; (-) strand; PAM type: NRG; PAM sequence: GAG
  source 1..20: mol_type = other DNA
tccagcttgggcgagacagc

SEQ ID NO: 15332 - DNA, 20 bp, synthetic construct
  misc_feature 1..20: note = Description of Artificial Sequence: Synthetic oligonucleotide
  misc_feature 1..20: note = Target: SCN10A; (-) strand; PAM type: NRG; PAM sequence: CAG
  source 1..20: mol_type = other DNA
gcactccagcttgggcgaga

SEQ ID NO: 15333 - DNA, 20 bp, synthetic construct
  misc_feature 1..20: note = Description of Artificial Sequence: Synthetic oligonucleotide
  misc_feature 1..20: note = Target: SCN10A; (-) strand; PAM type: NRG; PAM sequence: GAG
  source 1..20: mol_type = other DNA
cactgcactccagcttgggc

SEQ ID NO: 15334 - DNA, 20 bp, synthetic construct
  misc_feature 1..20: note = Description of Artificial Sequence: Synthetic oligonucleotide
  misc_feature 1..20: note = Target: SCN10A; (-) strand; PAM type: NRG; PAM sequence: GGG
  source 1..20: mol_type = other DNA
gcgtcactgcactccagctt

SEQ ID NO: 15335 - DNA, 20 bp, synthetic construct
  misc_feature 1..20: note = Description of Artificial Sequence: Synthetic oligonucleotide
  misc_feature 1..20: note = Target: SCN10A; (-) strand; PAM type: NRG; PAM sequence: TGG
  source 1..20: mol_type = other DNA
tgcgtcactgcactccagct

SEQ ID NO: 15336 - DNA, 20 bp, synthetic construct
  misc_feature 1..20: note = Description of Artificial Sequence: Synthetic oligonucleotide
  misc_feature 1..20: note = Target: SCN10A; (-) strand; PAM type: NRG; PAM sequence: CAG
  source 1..20: mol_type = other DNA
gagattgcgtcactgcactc

SEQ ID NO: 15337 - DNA, 20 bp, synthetic construct
  misc_feature 1..20: note = Description of Artificial Sequence: Synthetic oligonucleotide
  misc_feature 1..20: note = Target: SCN10A; (-) strand; PAM type: NRG; PAM sequence: GAG
  source 1..20: mol_type = other DNA
ggcagaagttgcagtgagct

SEQ ID NO: 15338 - DNA, 20 bp, synthetic construct
  misc_feature 1..20: note = Description of Artificial Sequence: Synthetic oligonucleotide
  misc_feature 1..20: note = Target: SCN10A; (-) strand; PAM type: NRG; PAM sequence: GAG
  source 1..20: mol_type = other DNA
cgggaggcagaagttgcagt

SEQ ID NO: 15339 - DNA, 20 bp, synthetic construct
  misc_feature 1..20: note = Description of Artificial Sequence: Synthetic oligonucleotide
  misc_feature 1..20: note = Target: SCN10A; (-) strand; PAM type: NRG; PAM sequence: CAG
  source 1..20: mol_type = other DNA
aacccgggaggcagaagttg

SEQ ID NO: 15340 - DNA, 20 bp, synthetic construct
  misc_feature 1..20: note = Description of Artificial Sequence: Synthetic oligonucleotide
  misc_feature 1..20: note = Target: SCN10A; (-) strand; PAM type: NRG; PAM sequence: AAG
  source 1..20: mol_type = other DNA
ctcttgaacccgggaggcag

SEQ ID NO: 15341 - DNA, 20 bp, synthetic construct
  misc_feature 1..20: note = Description of Artificial Sequence: Synthetic oligonucleotide
  misc_feature 1..20: note = Target: SCN10A; (-) strand; PAM type: NRG; PAM sequence: CAG
  source 1..20: mol_type = other DNA
aatctcttgaacccgggagg

SEQ ID NO: 15342 - DNA, 20 bp, synthetic construct
  misc_feature 1..20: note = Description of Artificial Sequence: Synthetic oligonucleotide
  misc_feature 1..20: note = Target: SCN10A; (-) strand; PAM type: NRG; PAM sequence: AGG
  source 1..20: mol_type = other DNA
gagaatctcttgaacccggg

SEQ ID NO: 15343 - DNA, 20 bp, synthetic construct
  misc_feature 1..20: note = Description of Artificial Sequence: Synthetic oligonucleotide
  misc_feature 1..20: note = Target: SCN10A; (-) strand; PAM type: NRG; PAM sequence: GAG
  source 1..20: mol_type = other DNA
ggagaatctcttgaacccgg

SEQ ID NO: 15344 - DNA, 20 bp, synthetic construct
  misc_feature 1..20: note = Description of Artificial Sequence: Synthetic oligonucleotide
  misc_feature 1..20: note = Target: SCN10A; (-) strand; PAM type: NRG; PAM sequence: GGG
  source 1..20: mol_type = other DNA
caggagaatctcttgaaccc

SEQ ID NO: 15345 - DNA, 20 bp, synthetic construct
  misc_feature 1..20: note = Description of Artificial Sequence: Synthetic oligonucleotide
  misc_feature 1..20: note = Target: SCN10A; (-) strand; PAM type: NRG; PAM sequence: CGG
  source 1..20: mol_type = other DNA
acaggagaatctcttgaacc

SEQ ID NO: 15346 - DNA, 20 bp, synthetic construct
  misc_feature 1..20: note = Description of Artificial Sequence: Synthetic oligonucleotide
  misc_feature 1..20: note = Target: SCN10A; (-) strand; PAM type: NRG; PAM sequence: GAG
  source 1..20: mol_type = other DNA
tgctcgggagactgagacag

SEQ ID NO: 15347 - DNA, 20 bp, synthetic construct
  misc_feature 1..20: note = Description of Artificial Sequence: Synthetic oligonucleotide
  misc_feature 1..20: note = Target: SCN10A; (-) strand; PAM type: NRG; PAM sequence: AGG
  source 1..20: mol_type = other DNA
gctgctcgggagactgagac

SEQ ID NO: 15348 - DNA, 20 bp, synthetic construct
  misc_feature 1..20: note = Description of Artificial Sequence: Synthetic oligonucleotide
  misc_feature 1..20: note = Target: SCN10A; (-) strand; PAM type: NRG; PAM sequence: CAG
  source 1..20: mol_type = other DNA
agctgctcgggagactgaga

SEQ ID NO: 15349 - DNA, 20 bp, synthetic construct
  misc_feature 1..20: note = Description of Artificial Sequence: Synthetic oligonucleotide
  misc_feature 1..20: note = Target: SCN10A; (-) strand; PAM type: NRG; PAM sequence: GAG
  source 1..20: mol_type = other DNA
tcccagctgctcgggagact

SEQ ID NO: 15350 - DNA, 20 bp, synthetic construct
  misc_feature 1..20: note = Description of Artificial Sequence: Synthetic oligonucleotide
  misc_feature 1..20: note = Target: SCN10A; (-) strand; PAM type: NRG; PAM sequence: GAG
  source 1..20: mol_type = other DNA
ctgtagtcccagctgctcgg

SEQ ID NO: 15351 - DNA, 20 bp, synthetic construct
  misc_feature 1..20: note = Description of Artificial Sequence: Synthetic oligonucleotide
  misc_feature 1..20: note = Target: SCN10A; (-) strand; PAM type: NRG; PAM sequence: GGG
  source 1..20: mol_type = other DNA
gcctgtagtcccagctgctc

SEQ ID NO: 15352 - DNA, 20 bp, synthetic construct
  misc_feature 1..20: note = Description of Artificial Sequence: Synthetic oligonucleotide
  misc_feature 1..20: note = Target: SCN10A; (-) strand; PAM type: NRG; PAM sequence: CGG
  source 1..20: mol_type = other DNA
tgcctgtagtcccagctgct

SEQ ID NO: 15353 - DNA, 20 bp, synthetic construct
  misc_feature 1..20: note = Description of Artificial Sequence: Synthetic oligonucleotide
  misc_feature 1..20: note = Target: SCN10A; (-) strand; PAM type: NRG; PAM sequence: CAG
  source 1..20: mol_type = other DNA
gcggcttgtgcctgtagtcc

SEQ ID NO: 15354 - DNA, 20 bp, synthetic construct
  misc_feature 1..20: note = Description of Artificial Sequence: Synthetic oligonucleotide
  misc_feature 1..20: note = Target: SCN10A; (-) strand; PAM type: NRG; PAM sequence: TAG
  source 1..20: mol_type = other DNA
ggcatggcggcttgtgcctg

SEQ ID NO: 15355 - DNA, 20 bp, synthetic construct
  misc_feature 1..20: note = Description of Artificial Sequence: Synthetic oligonucleotide
  misc_feature 1..20: note = Target: SCN10A; (-) strand; PAM type: NRG; PAM sequence: CGG
  source 1..20: mol_type = other DNA
aagaaattagcagggcatgg

SEQ ID NO: 15356 - DNA, 20 bp, synthetic construct
  misc_feature 1..20: note = Description of Artificial Sequence: Synthetic oligonucleotide
  misc_feature 1..20: note = Target: SCN10A; (-) strand; PAM type: NRG; PAM sequence: TGG
  source 1..20: mol_type = other DNA
tgaaagaaattagcagggca

SEQ ID NO: 15357 - DNA, 20 bp, synthetic construct
  misc_feature 1..20: note = Description of Artificial Sequence: Synthetic oligonucleotide
  misc_feature 1..20: note = Target: SCN10A; (-) strand; PAM type: NRG; PAM sequence: GGG
  source 1..20: mol_type = other DNA
aaatatgaaagaaattagca

SEQ ID NO: 15358 - DNA, 20 bp, synthetic construct
  misc_feature 1..20: note = Description of Artificial Sequence: Synthetic oligonucleotide
  misc_feature 1..20: note = Target: SCN10A; (-) strand; PAM type: NRG; PAM sequence: AGG
  source 1..20: mol_type = other DNA
aaaatatgaaagaaattagc

SEQ ID NO: 15359 - DNA, 20 bp, synthetic construct
  misc_feature 1..20: note = Description of Artificial Sequence: Synthetic oligonucleotide
  misc_feature 1..20: note = Target: SCN10A; (-) strand; PAM type: NRG; PAM sequence: CAG
  source 1..20: mol_type = other DNA
taaaatatgaaagaaattag

SEQ ID NO: 15360 - DNA, 20 bp, synthetic construct
  misc_feature 1..20: note = Description of Artificial Sequence: Synthetic oligonucleotide
  misc_feature 1..20: note = Target: SCN10A; (-) strand; PAM type: NRG; PAM sequence: TAG
  source 1..20: mol_type = other DNA
tactaaaatatgaaagaaat

SEQ ID NO: 15361 - DNA, 20 bp, synthetic construct
  misc_feature 1..20: note = Description of Artificial Sequence: Synthetic oligonucleotide
  misc_feature 1..20: note = Target: SCN10A; (-) strand; PAM type: NRG; PAM sequence: AAG
  source 1..20: mol_type = other DNA
ccatctctactaaaatatga

SEQ ID NO: 15362 - DNA, 20 bp, synthetic construct
  misc_feature 1..20: note = Description of Artificial Sequence: Synthetic oligonucleotide
  misc_feature 1..20: note = Target: SCN10A; (-) strand; PAM type: NRG; PAM sequence: CGG
  source 1..20: mol_type = other DNA
ggagaccagcctgggcaata

SEQ ID NO: 15363 - DNA, 20 bp, synthetic construct
  misc_feature 1..20: note = Description of Artificial Sequence: Synthetic oligonucleotide
  misc_feature 1..20: note = Target: SCN10A; (-) strand; PAM type: NRG; PAM sequence: GGG
  source 1..20: mol_type = other DNA
tgagctcaggagaccagcct

SEQ ID NO: 15364 - DNA, 20 bp, synthetic construct
  misc_feature 1..20: note = Description of Artificial Sequence: Synthetic oligonucleotide
  misc_feature 1..20: note = Target: SCN10A; (-) strand; PAM type: NRG; PAM sequence: TGG
  source 1..20: mol_type = other DNA
ctgagctcaggagaccagcc

SEQ ID NO: 15365 - DNA, 20 bp, synthetic construct
  misc_feature 1..20: note = Description of Artificial Sequence: Synthetic oligonucleotide
  misc_feature 1..20: note = Target: SCN10A; (-) strand; PAM type: NRG; PAM sequence: CAG
  source 1..20: mol_type = other DNA
attgcctgagctcaggagac

SEQ ID NO: 15366 - DNA, 20 bp, synthetic construct
  misc_feature 1..20: note = Description of Artificial Sequence: Synthetic oligonucleotide
  misc_feature 1..20: note = Target: SCN10A; (-) strand; PAM type: NRG; PAM sequence: GAG
  source 1..20: mol_type = other DNA
ggcagattgcctgagctcag

SEQ ID NO: 15367 - DNA, 20 bp, synthetic construct
  misc_feature 1..20: note = Description of Artificial Sequence: Synthetic oligonucleotide
  misc_feature 1..20: note = Target: SCN10A; (-) strand; PAM type: NRG; PAM sequence: AGG
  source 1..20: mol_type = other DNA
tgggcagattgcctgagctc

SEQ ID NO: 15368 - DNA, 20 bp, synthetic construct
  misc_feature 1..20: note = Description of Artificial Sequence: Synthetic oligonucleotide
  misc_feature 1..20: note = Target: SCN10A; (-) strand; PAM type: NRG; PAM sequence: CAG
  source 1..20: mol_type = other DNA
gtgggcagattgcctgagct

SEQ ID NO: 15369 - DNA, 20 bp, synthetic construct
  misc_feature 1..20: note = Description of Artificial Sequence: Synthetic oligonucleotide
  misc_feature 1..20: note = Target: SCN10A; (-) strand; PAM type: NRG; PAM sequence: GAG
  source 1..20: mol_type = other DNA
ccgaggtgggcagattgcct

SEQ ID NO: 15370 - DNA, 20 bp, synthetic construct
  misc_feature 1..20: note = Description of Artificial Sequence: Synthetic oligonucleotide
  misc_feature 1..20: note = Target: SCN10A; (-) strand; PAM type: NRG; PAM sequence: CAG
  source 1..20: mol_type = other DNA
ctttgggaggccgaggtggg

SEQ ID NO: 15371 - DNA, 20 bp, synthetic construct
  misc_feature 1..20: note = Description of Artificial Sequence: Synthetic oligonucleotide
  misc_feature 1..20: note = Target: SCN10A; (-) strand; PAM type: NRG; PAM sequence: GGG
  source 1..20: mol_type = other DNA
gcactttgggaggccgaggt

SEQ ID NO: 15372 - DNA, 20 bp, synthetic construct
  misc_feature 1..20: note = Description of Artificial Sequence: Synthetic oligonucleotide
  misc_feature 1..20: note = Target: SCN10A; (-) strand; PAM type: NRG; PAM sequence: TGG
  source 1..20: mol_type = other DNA
agcactttgggaggccgagg

SEQ ID NO: 15373 - DNA, 20 bp, synthetic construct
  misc_feature 1..20: note = Description of Artificial Sequence: Synthetic oligonucleotide
  misc_feature 1..20: note = Target: SCN10A; (-) strand; PAM type: NRG; PAM sequence: AGG
  source 1..20: mol_type = other DNA
cctagcactttgggaggccg

SEQ ID NO: 15374 - DNA, 20 bp, synthetic construct
  misc_feature 1..20: note = Description of Artificial Sequence: Synthetic oligonucleotide
  misc_feature 1..20: note = Target: SCN10A; (-) strand; PAM type: NRG; PAM sequence: GAG
  source 1..20: mol_type = other DNA
tcctagcactttgggaggcc

SEQ ID NO: 15375 - DNA, 20 bp, synthetic construct
  misc_feature 1..20: note = Description of Artificial Sequence: Synthetic oligonucleotide
  misc_feature 1..20: note = Target: SCN10A; (-) strand; PAM type: NRG; PAM sequence: AGG
  source 1..20: mol_type = other DNA
tgtaatcctagcactttggg

SEQ ID NO: 15376 - DNA, 20 bp, synthetic construct
  misc_feature 1..20: note = Description of Artificial Sequence: Synthetic oligonucleotide
  misc_feature 1..20: note = Target: SCN10A; (-) strand; PAM type: NRG; PAM sequence: GAG
  source 1..20: mol_type = other DNA
ctgtaatcctagcactttgg

SEQ ID NO: 15377 - DNA, 20 bp, synthetic construct
  misc_feature 1..20: note = Description of Artificial Sequence: Synthetic oligonucleotide
  misc_feature 1..20: note = Target: SCN10A; (-) strand; PAM type: NRG; PAM sequence: GGG
  source 1..20: mol_type = other DNA
gcctgtaatcctagcacttt

SEQ ID NO: 15378 - DNA, 20 bp, synthetic construct
  misc_feature 1..20: note = Description of Artificial Sequence: Synthetic oligonucleotide
  misc_feature 1..20: note = Target: SCN10A; (-) strand; PAM type: NRG; PAM sequence: TGG
  source 1..20: mol_type = other DNA
tgcctgtaatcctagcactt

SEQ ID NO: 15379 - DNA, 20 bp, synthetic construct
  misc_feature 1..20: note = Description of Artificial Sequence: Synthetic oligonucleotide
  misc_feature 1..20: note = Target: SCN10A; (-) strand; PAM type: NRG; PAM sequence: TAG
  source 1..20: mol_type = other DNA
gtggttcatgcctgtaatcc

SEQ ID NO: 15380 - DNA, 20 bp, synthetic construct
  misc_feature 1..20: note = Description of Artificial Sequence: Synthetic oligonucleotide
  misc_feature 1..20: note = Target: SCN10A; (-) strand; PAM type: NRG; PAM sequence: TGG
  source 1..20: mol_type = other DNA
ccaggatgggccaggcgcag

SEQ ID NO: 15381 - DNA, 20 bp, synthetic construct
  misc_feature 1..20: note = Description of Artificial Sequence: Synthetic oligonucleotide
  misc_feature 1..20: note = Target: SCN10A; (-) strand; PAM type: NRG; PAM sequence: CAG
  source 1..20: mol_type = other DNA
aacccaggatgggccaggcg

SEQ ID NO: 15382 - DNA, 20 bp, synthetic construct
  misc_feature 1..20: note = Description of Artificial Sequence: Synthetic oligonucleotide
  misc_feature 1..20: note = Target: SCN10A; (-) strand; PAM type: NRG; PAM sequence: AGG
  source 1..20: mol_type = other DNA
cataaaacccaggatgggcc

SEQ ID NO: 15383 - DNA, 20 bp, synthetic construct
  misc_feature 1..20: note = Description of Artificial Sequence: Synthetic oligonucleotide
  misc_feature 1..20: note = Target: SCN10A; (-) strand; PAM type: NRG; PAM sequence: CAG
  source 1..20: mol_type = other DNA
tcataaaacccaggatgggc

SEQ ID NO: 15384 - DNA, 20 bp, synthetic construct
  misc_feature 1..20: note = Description of Artificial Sequence: Synthetic oligonucleotide
  misc_feature 1..20: note = Target: SCN10A; (-) strand; PAM type: NRG; PAM sequence: GGG
  source 1..20: mol_type = other DNA
actatcataaaacccaggat

SEQ ID NO: 15385 - DNA, 20 bp, synthetic construct
  misc_feature 1..20: note = Description of Artificial Sequence: Synthetic oligonucleotide
  misc_feature 1..20: note = Target: SCN10A; (-) strand; PAM type: NRG; PAM sequence: TGG
  source 1..20: mol_type = other DNA
aactatcataaaacccagga

SEQ ID NO: 15386 - DNA, 20 bp, synthetic construct
  misc_feature 1..20: note = Description of Artificial Sequence: Synthetic oligonucleotide
  misc_feature 1..20: note = Target: SCN10A; (-) strand; PAM type: NRG; PAM sequence: AGG
  source 1..20: mol_type = other DNA
caggaactatcataaaaccc

SEQ ID NO: 15387 - DNA, 20 bp, synthetic construct
  misc_feature 1..20: note = Description of Artificial Sequence: Synthetic oligonucleotide
  misc_feature 1..20: note = Target: SCN10A; (-) strand; PAM type: NRG; PAM sequence: CAG
  source 1..20: mol_type = other DNA
tcaggaactatcataaaacc

SEQ ID NO: 15388 - DNA, 20 bp, synthetic construct
  misc_feature 1..20: note = Description of Artificial Sequence: Synthetic oligonucleotide
  misc_feature 1..20: note = Target: SCN10A; (-) strand; PAM type: NRG; PAM sequence: AGG
  source 1..20: mol_type = other DNA
gaggaatgaggtagaatctc

SEQ ID NO: 15389 - DNA, 20 bp, synthetic construct
  misc_feature 1..20: note = Description of Artificial Sequence: Synthetic oligonucleotide
  misc_feature 1..20: note = Target: SCN10A; (-) strand; PAM type: NRG; PAM sequence: CAG
  source 1..20: mol_type = other DNA
ggaggaatgaggtagaatct

SEQ ID NO: 15390 - DNA, 20 bp, synthetic construct
  misc_feature 1..20: note = Description of Artificial Sequence: Synthetic oligonucleotide
  misc_feature 1..20: note = Target: SCN10A; (-) strand; PAM type: NRG; PAM sequence: TAG
  source 1..20: mol_type = other DNA
gtgcatagggaggaatgagg

SEQ ID NO: 15391 - DNA, 20 bp, synthetic construct
  misc_feature 1..20: note = Description of Artificial Sequence: Synthetic oligonucleotide
  misc_feature 1..20: note = Target: SCN10A; (-) strand; PAM type: NRG; PAM sequence: AGG
  source 1..20: mol_type = other DNA
aaggtgcatagggaggaatg

SEQ ID NO: 15392 - DNA, 20 bp, synthetic construct
  misc_feature 1..20: note = Description of Artificial Sequence: Synthetic oligonucleotide
  misc_feature 1..20: note = Target: SCN10A; (-) strand; PAM type: NRG; PAM sequence: GAG
  source 1..20: mol_type = other DNA
caaggtgcatagggaggaat

SEQ ID NO: 15393 - DNA, 20 bp, synthetic construct
  misc_feature 1..20: note = Description of Artificial Sequence: Synthetic oligonucleotide
  misc_feature 1..20: note = Target: SCN10A; (-) strand; PAM type: NRG; PAM sequence: AGG
  source 1..20: mol_type = other DNA
ctaaatcaaggtgcataggg

SEQ ID NO: 15394 - DNA, 20 bp, synthetic construct
  misc_feature 1..20: note = Description of Artificial Sequence: Synthetic oligonucleotide
  misc_feature 1..20: note = Target: SCN10A; (-) strand; PAM type: NRG; PAM sequence: GAG
  source 1..20: mol_type = other DNA
gctaaatcaaggtgcatagg

SEQ ID NO: 15395 - DNA, 20 bp, synthetic construct
  misc_feature 1..20: note = Description of Artificial Sequence: Synthetic oligonucleotide
  misc_feature 1..20: note = Target: SCN10A; (-) strand; PAM type: NRG; PAM sequence: GGG
  source 1..20: mol_type = other DNA
tagctaaatcaaggtgcata

SEQ ID NO: 15396 - DNA, 20 bp, synthetic construct
  misc_feature 1..20: note = Description of Artificial Sequence: Synthetic oligonucleotide
  misc_feature 1..20: note = Target: SCN10A; (-) strand; PAM type: NRG; PAM sequence: AGG
  source 1..20: mol_type = other DNA
gtagctaaatcaaggtgcat

SEQ ID NO: 15397 - DNA, 20 bp, synthetic construct
  misc_feature 1..20: note = Description of Artificial Sequence: Synthetic oligonucleotide
  misc_feature 1..20: note = Target: SCN10A; (-) strand; PAM type: NRG; PAM sequence: TAG
  source 1..20: mol_type = other DNA
agtagctaaatcaaggtgca

SEQ ID NO: 15398 - DNA, 20 bp, synthetic construct
  misc_feature 1..20: note = Description of Artificial Sequence: Synthetic oligonucleotide
  misc_feature 1..20: note = Target: SCN10A; (-) strand; PAM type: NRG; PAM sequence: AGG
  source 1..20: mol_type = other DNA
caagggtagtagctaaatca

SEQ ID NO: 15399 - DNA, 20 bp, synthetic construct
  misc_feature 1..20: note = Description of Artificial Sequence: Synthetic oligonucleotide
  misc_feature 1..20: note = Target: SCN10A; (-) strand; PAM type: NRG; PAM sequence: AAG
  source 1..20: mol_type = other DNA
gcaagggtagtagctaaatc

SEQ ID NO: 15400 - DNA, 20 bp, synthetic construct
  misc_feature 1..20: note = Description of Artificial Sequence: Synthetic oligonucleotide
  misc_feature 1..20: note = Target: SCN10A; (-) strand; PAM type: NRG; PAM sequence: TAG
  source 1..20: mol_type = other DNA
tgggagcaaagcaagggtag

SEQ ID NO: 15401 - DNA, 20 bp, synthetic construct
  misc_feature 1..20: note = Description of Artificial Sequence: Synthetic oligonucleotide
  misc_feature 1..20: note = Target: SCN10A; (-) strand; PAM type: NRG; PAM sequence: TAG
  source 1..20: mol_type = other DNA
gggtgggagcaaagcaaggg

SEQ ID NO: 15402 - DNA, 20 bp, synthetic construct
  misc_feature 1..20: note = Description of Artificial Sequence: Synthetic oligonucleotide
  misc_feature 1..20: note = Target: SCN10A; (-) strand; PAM type: NRG; PAM sequence: GGG
  source 1..20: mol_type = other DNA
caagggtgggagcaaagcaa

SEQ ID NO: 15403 - DNA, 20 bp, synthetic construct
  misc_feature 1..20: note = Description of Artificial Sequence: Synthetic oligonucleotide
  misc_feature 1..20: note = Target: SCN10A; (-) strand; PAM type: NRG; PAM sequence: AGG
  source 1..20: mol_type = other DNA
acaagggtgggagcaaagca

SEQ ID NO: 15404 - DNA, 20 bp, synthetic construct
  misc_feature 1..20: note = Description of Artificial Sequence: Synthetic oligonucleotide
  misc_feature 1..20: note = Target: SCN10A; (-) strand; PAM type: NRG; PAM sequence: AAG
  source 1..20: mol_type = other DNA
gacaagggtgggagcaaagc

SEQ ID NO: 15405 - DNA, 20 bp, synthetic construct
  misc_feature 1..20: note = Description of Artificial Sequence: Synthetic oligonucleotide
  misc_feature 1..20: note = Target: SCN10A; (-) strand; PAM type: NRG; PAM sequence: AAG
  source 1..20: mol_type = other DNA
cctggacaagggtgggagca

SEQ ID NO: 15406 - DNA, 20 bp, synthetic construct
  misc_feature 1..20: note = Description of Artificial Sequence: Synthetic oligonucleotide
  misc_feature 1..20: note = Target: SCN10A; (-) strand; PAM type: NRG; PAM sequence: GAG
  source 1..20: mol_type = other DNA
cactccctggacaagggtgg

SEQ ID NO: 15407 - DNA, 20 bp, synthetic construct
  misc_feature 1..20: note = Description of Artificial Sequence: Synthetic oligonucleotide
  misc_feature 1..20: note = Target: SCN10A; (-) strand; PAM type: NRG; PAM sequence: GGG
  source 1..20: mol_type = other DNA
gccactccctggacaagggt

SEQ ID NO: 15408 - DNA, 20 bp, synthetic construct
  misc_feature 1..20: note = Description of Artificial Sequence: Synthetic oligonucleotide
  misc_feature 1..20: note = Target: SCN10A; (-) strand; PAM type: NRG; PAM sequence: TGG
  source 1..20: mol_type = other DNA
agccactccctggacaaggg

SEQ ID NO: 15409 - DNA, 20 bp, synthetic construct
  misc_feature 1..20: note = Description of Artificial Sequence: Synthetic oligonucleotide
  misc_feature 1..20: note = Target: SCN10A; (-) strand; PAM type: NRG; PAM sequence: GGG
  source 1..20: mol_type = other DNA
gtgagccactccctggacaa

SEQ ID NO: 15410 - DNA, 20 bp, synthetic construct
  misc_feature 1..20: note = Description of Artificial Sequence: Synthetic oligonucleotide
  misc_feature 1..20: note = Target: SCN10A; (-) strand; PAM type: NRG; PAM sequence: AGG
  source 1..20: mol_type = other DNA
tgtgagccactccctggaca

SEQ ID NO: 15411 - DNA, 20 bp, synthetic construct
  misc_feature 1..20: note = Description of Artificial Sequence: Synthetic oligonucleotide
  misc_feature 1..20: note = Target: SCN10A; (-) strand; PAM type: NRG; PAM sequence: AAG
  source 1..20: mol_type = other DNA
atgtgagccactccctggac

SEQ ID NO: 15412 - DNA, 20 bp, synthetic construct
  misc_feature 1..20: note = Description of Artificial Sequence: Synthetic oligonucleotide
  misc_feature 1..20: note = Target: SCN10A; (-) strand; PAM type: NRG; PAM sequence: TGG
  source 1..20: mol_type = other DNA
agttcatgtgagccactccc

SEQ ID NO: 15413 - DNA, 20 bp, synthetic construct
  misc_feature 1..20: note = Description of Artificial Sequence: Synthetic oligonucleotide
  misc_feature 1..20: note = Target: SCN10A; (-) strand; PAM type: NRG; PAM sequence: GAG
  source 1..20: mol_type = other DNA
ctctaagagacagttcatgt

SEQ ID NO: 15414 - DNA, 20 bp, synthetic construct
  misc_feature 1..20: note = Description of Artificial Sequence: Synthetic oligonucleotide
  misc_feature 1..20: note = Target: SCN10A; (-) strand; PAM type: NRG; PAM sequence: CAG
  source 1..20: mol_type = other DNA
atcagataacctctaagaga

SEQ ID NO: 15415 - DNA, 20 bp, synthetic construct
  misc_feature 1..20: note = Description of Artificial Sequence: Synthetic oligonucleotide
  misc_feature 1..20: note = Target: SCN10A; (-) strand; PAM type: NRG; PAM sequence: GAG
  source 1..20: mol_type = other DNA
aagcatcagataacctctaa

SEQ ID NO: 15416 - DNA, 20 bp, synthetic construct
  misc_feature 1..20: note = Description of Artificial Sequence: Synthetic oligonucleotide
  misc_feature 1..20: note = Target: SCN10A; (-) strand; PAM type: NRG; PAM sequence: AAG
  source 1..20: mol_type = other DNA
gaaagcatcagataacctct

SEQ ID NO: 15417 - DNA, 20 bp, synthetic construct
  misc_feature 1..20: note = Description of Artificial Sequence: Synthetic oligonucleotide
  misc_feature 1..20: note = Target: SCN10A; (-) strand; PAM type: NRG; PAM sequence: CAG
  source 1..20: mol_type = other DNA
ttcactgttgaggaaagcat

SEQ ID NO: 15418 - DNA, 20 bp, synthetic construct
  misc_feature 1..20: note = Description of Artificial Sequence: Synthetic oligonucleotide
  misc_feature 1..20: note = Target: SCN10A; (-) strand; PAM type: NRG; PAM sequence: AAG
  source 1..20: mol_type = other DNA
cctctgttcactgttgagga

SEQ ID NO: 15419 - DNA, 20 bp, synthetic construct
  misc_feature 1..20: note = Description of Artificial Sequence: Synthetic oligonucleotide
  misc_feature 1..20: note = Target: SCN10A; (-) strand; PAM type: NRG; PAM sequence: AGG
  source 1..20: mol_type = other DNA
ttttcctctgttcactgttg

SEQ ID NO: 15420 - DNA, 20 bp, synthetic construct
  misc_feature 1..20: note = Description of Artificial Sequence: Synthetic oligonucleotide
  misc_feature 1..20: note = Target: SCN10A; (-) strand; PAM type: NRG; PAM sequence: GAG
  source 1..20: mol_type = other DNA
gttttcctctgttcactgtt

SEQ ID NO: 15421 - DNA, 20 bp, synthetic construct
  misc_feature 1..20: note = Description of Artificial Sequence: Synthetic oligonucleotide
  misc_feature 1..20: note = Target: SCN10A; (-) strand; PAM type: NRG; PAM sequence: AGG
  source 1..20: mol_type = other DNA
tacactccccaggcttctcg

SEQ ID NO: 15422 - DNA, 20 bp, synthetic construct
  misc_feature 1..20: note = Description of Artificial Sequence: Synthetic oligonucleotide
  misc_feature 1..20: note = Target: SCN10A; (-) strand; PAM type: NRG; PAM sequence: GAG
  source 1..20: mol_type = other DNA
ctacactccccaggcttctc

SEQ ID NO: 15423 - DNA, 20 bp, synthetic construct
  misc_feature 1..20: note = Description of Artificial Sequence: Synthetic oligonucleotide
  misc_feature 1..20: note = Target: SCN10A; (-) strand; PAM type: NRG; PAM sequence: AGG
  source 1..20: mol_type = other DNA
ccctttcatctacactcccc

SEQ ID NO: 15424 - DNA, 20 bp, synthetic construct
  misc_feature 1..20: note = Description of Artificial Sequence: Synthetic oligonucleotide
  misc_feature 1..20: note = Target: SCN10A; (-) strand; PAM type: NRG; PAM sequence: CAG
  source 1..20: mol_type = other DNA
cccctttcatctacactccc

SEQ ID NO: 15425 - DNA, 20 bp, synthetic construct
  misc_feature 1..20: note = Description of Artificial Sequence: Synthetic oligonucleotide
  misc_feature 1..20: note = Target: SCN10A; (-) strand; PAM type: NRG; PAM sequence: AGG
  source 1..20: mol_type = other DNA
gttgagtgtttcagccaccg

SEQ ID NO: 15426 - DNA, 20 bp, synthetic construct
  misc_feature 1..20: note = Description of Artificial Sequence: Synthetic oligonucleotide
  misc_feature 1..20: note = Target: SCN10A; (-) strand; PAM type: NRG; PAM sequence: GAG
  source 1..20: mol_type = other DNA
tgttgagtgtttcagccacc

SEQ ID NO: 15427 - DNA, 20 bp, synthetic construct
  misc_feature 1..20: note = Description of Artificial Sequence: Synthetic oligonucleotide
  misc_feature 1..20: note = Target: SCN10A; (-) strand; PAM type: NRG; PAM sequence: CAG
  source 1..20: mol_type = other DNA
tggctctctgttgagtgttt

SEQ ID NO: 15428 - DNA, 20 bp, synthetic construct
  misc_feature 1..20: note = Description of Artificial Sequence: Synthetic oligonucleotide
  misc_feature 1..20: note = Target: SCN10A; (-) strand; PAM type: NRG; PAM sequence: GAG
  source 1..20: mol_type = other DNA
tgtccagctggctctctgtt

SEQ ID NO: 15429 - DNA, 20 bp, synthetic construct
  misc_feature 1..20: note = Description of Artificial Sequence: Synthetic oligonucleotide
  misc_feature 1..20: note = Target: SCN10A; (-) strand; PAM type: NRG; PAM sequence: TGG
  source 1..20: mol_type = other DNA
tccttgcagcagtgtccagc

SEQ ID NO: 15430 - DNA, 20 bp, synthetic construct
  misc_feature 1..20: note = Description of Artificial Sequence: Synthetic oligonucleotide
  misc_feature 1..20: note = Target: SCN10A; (-) strand; PAM type: NRG; PAM sequence: CAG
  source 1..20: mol_type = other DNA
tccctccttgcagcagtgtc

SEQ ID NO: 15431 - DNA, 20 bp, synthetic construct
  misc_feature 1..20: note = Description of Artificial Sequence: Synthetic oligonucleotide
  misc_feature 1..20: note = Target: SCN10A; (-) strand; PAM type: NRG; PAM sequence: CAG
  source 1..20: mol_type = other DNA
cacactgtccctccttgcag

SEQ ID NO: 15432 - DNA, 20 bp, synthetic construct
  misc_feature 1..20: note = Description of Artificial Sequence: Synthetic oligonucleotide
  misc_feature 1..20: note = Target: SCN10A; (-) strand; PAM type: NRG; PAM sequence: CAG
  source 1..20: mol_type = other DNA
cctcacactgtccctccttg

SEQ ID NO: 15433 - DNA, 20 bp, synthetic construct
  misc_feature 1..20: note = Description of Artificial Sequence: Synthetic oligonucleotide
  misc_feature 1..20: note = Target: SCN10A; (-) strand; PAM type: NRG; PAM sequence: CAG
  source 1..20: mol_type = other DNA
tactggaagaggcgatcacc

SEQ ID NO: 15434 - DNA, 20 bp, synthetic construct
  misc_feature 1..20: note = Description of Artificial Sequence: Synthetic oligonucleotide
  misc_feature 1..20: note = Target: SCN10A; (-) strand; PAM type: NRG; PAM sequence: AGG
  source 1..20: mol_type = other DNA
gatgaccctggtactggaag

SEQ ID NO: 15435 - DNA, 20 bp, synthetic construct
  misc_feature 1..20: note = Description of Artificial Sequence: Synthetic oligonucleotide
  misc_feature 1..20: note = Target: SCN10A; (-) strand; PAM type: NRG; PAM sequence: GAG
  source 1..20: mol_type = other DNA
cgatgaccctggtactggaa

SEQ ID NO: 15436 - DNA, 20 bp, synthetic construct
  misc_feature 1..20: note = Description of Artificial Sequence: Synthetic oligonucleotide
  misc_feature 1..20: note = Target: SCN10A; (-) strand; PAM type: NRG; PAM sequence: AAG
  source 1..20: mol_type = other DNA
gacgatgaccctggtactgg

SEQ ID NO: 15437 - DNA, 20 bp, synthetic construct
  misc_feature 1..20: note = Description of Artificial Sequence: Synthetic oligonucleotide
  misc_feature 1..20: note = Target: SCN10A; (-) strand; PAM type: NRG; PAM sequence: TGG
  source 1..20: mol_type = other DNA
agtgacgatgaccctggtac

SEQ ID NO: 15438 - DNA, 20 bp, synthetic construct
  misc_feature 1..20: note = Description of Artificial Sequence: Synthetic oligonucleotide
  misc_feature 1..20: note = Target: SCN10A; (-) strand; PAM type: NRG; PAM sequence: TGG
  source 1..20: mol_type = other DNA
aaatgaagtgacgatgaccc

SEQ ID NO: 15439 - DNA, 20 bp, synthetic construct
  misc_feature 1..20: note = Description of Artificial Sequence: Synthetic oligonucleotide
  misc_feature 1..20: note = Target: SCN10A; (-) strand; PAM type: NRG; PAM sequence: AAG
  source 1..20: mol_type = other DNA
atcagtctgcatttgaaatg

SEQ ID NO: 15440 - DNA, 20 bp, synthetic construct
  misc_feature 1..20: note = Description of Artificial Sequence: Synthetic oligonucleotide
  misc_feature 1..20: note = Target: SCN10A; (-) strand; PAM type: NRG; PAM sequence: CAG
  source 1..20: mol_type = other DNA
tctgtgcattctacccatat

SEQ ID NO: 15441 - DNA, 20 bp, synthetic construct
  misc_feature 1..20: note = Description of Artificial Sequence: Synthetic oligonucleotide
  misc_feature 1..20: note = Target: SCN10A; (-) strand; PAM type: NRG; PAM sequence: CAG
  source 1..20: mol_type = other DNA
gtctcagcccactgtcccta

SEQ ID NO: 15442 - DNA, 20 bp, synthetic construct
  misc_feature 1..20: note = Description of Artificial Sequence: Synthetic oligonucleotide
  misc_feature 1..20: note = Target: SCN10A; (-) strand; PAM type: NRG; PAM sequence: CAG
  source 1..20: mol_type = other DNA
gattcccgggaggtgagtct

SEQ ID NO: 15443 - DNA, 20 bp, synthetic construct
  misc_feature 1..20: note = Description of Artificial Sequence: Synthetic oligonucleotide
  misc_feature 1..20: note = Target: SCN10A; (-) strand; PAM type: NRG; PAM sequence: GAG
  source 1..20: mol_type = other DNA
gctgttgattcccgggaggt

SEQ ID NO: 15444 - DNA, 20 bp, synthetic construct
  misc_feature 1..20: note = Description of Artificial Sequence: Synthetic oligonucleotide
  misc_feature 1..20: note = Target: SCN10A; (-) strand; PAM type: NRG; PAM sequence: AGG
  source 1..20: mol_type = other DNA
tgcagctgttgattcccggg

SEQ ID NO: 15445 - DNA, 20 bp, synthetic construct
  misc_feature 1..20: note = Description of Artificial Sequence: Synthetic oligonucleotide
  misc_feature 1..20: note = Target: SCN10A; (-) strand; PAM type: NRG; PAM sequence: GAG
  source 1..20: mol_type = other DNA
atgcagctgttgattcccgg

SEQ ID NO: 15446 - DNA, 20 bp, synthetic construct
  misc_feature 1..20: note = Description of Artificial Sequence: Synthetic oligonucleotide
  misc_feature 1..20: note = Target: SCN10A; (-) strand; PAM type: NRG; PAM sequence: GGG
  source 1..20: mol_type = other DNA
gtatgcagctgttgattccc

SEQ ID NO: 15447 - DNA, 20 bp, synthetic construct
  misc_feature 1..20: note = Description of Artificial Sequence: Synthetic oligonucleotide
  misc_feature 1..20: note = Target: SCN10A; (-) strand; PAM type: NRG; PAM sequence: CGG
  source 1..20: mol_type = other DNA
tgtatgcagctgttgattcc

SEQ ID NO: 15448 - DNA, 20 bp, synthetic construct
  misc_feature 1..20: note = Description of Artificial Sequence: Synthetic oligonucleotide
  misc_feature 1..20: note = Target: SCN10A; (-) strand; PAM type: NRG; PAM sequence: CAG
  source 1..20: mol_type = other DNA
ctggatggacattatgtatg

SEQ ID NO: 15449 - DNA, 20 bp, synthetic construct
  misc_feature 1..20: note = Description of Artificial Sequence: Synthetic oligonucleotide
  misc_feature 1..20: note = Target: SCN10A; (-) strand; PAM type: NRG; PAM sequence: TGG
  source 1..20: mol_type = other DNA
ggcaacctttaaaggctgga

SEQ ID NO: 15450 - DNA, 20 bp, synthetic construct
  misc_feature 1..20: note = Description of Artificial Sequence: Synthetic oligonucleotide
  misc_feature 1..20: note = Target: SCN10A; (-) strand; PAM type: NRG; PAM sequence: TGG
  source 1..20: mol_type = other DNA
tccaggcaacctttaaaggc

SEQ ID NO: 15451 - DNA, 20 bp, synthetic construct
  misc_feature 1..20: note = Description of Artificial Sequence: Synthetic oligonucleotide
  misc_feature 1..20: note = Target: SCN10A; (-) strand; PAM type: NRG; PAM sequence: AGG
  source 1..20: mol_type = other DNA
tgtctccaggcaacctttaa

SEQ ID NO: 15452 - DNA, 20 bp, synthetic construct
  misc_feature 1..20: note = Description of Artificial Sequence: Synthetic oligonucleotide
  misc_feature 1..20: note = Target: SCN10A; (-) strand; PAM type: NRG; PAM sequence: AAG
  source 1..20: mol_type = other DNA
ttgtctccaggcaaccttta

SEQ ID NO: 15453 - DNA, 20 bp, synthetic construct
  misc_feature 1..20: note = Description of Artificial Sequence: Synthetic oligonucleotide
  misc_feature 1..20: note = Target: SCN10A; (-) strand; PAM type: NRG; PAM sequence: AGG
  source 1..20: mol_type = other DNA
ggcctctgctccttgtctcc

SEQ ID NO: 15454 - DNA, 20 bp, synthetic construct
  misc_feature 1..20: note = Description of Artificial Sequence: Synthetic oligonucleotide
  misc_feature 1..20: note = Target: SCN10A; (-) strand; PAM type: NRG; PAM sequence: CAG
  source 1..20: mol_type = other DNA
tggcctctgctccttgtctc

SEQ ID NO: 15455 - DNA, 20 bp, synthetic construct
  misc_feature 1..20: note = Description of Artificial Sequence: Synthetic oligonucleotide
  misc_feature 1..20: note = Target: SCN10A; (-) strand; PAM type: NRG; PAM sequence: TGG
  source 1..20: mol_type = other DNA
atggatgggcagacactgag

SEQ ID NO: 15456 - DNA, 20 bp, synthetic construct
  misc_feature 1..20: note = Description of Artificial Sequence: Synthetic oligonucleotide
  misc_feature 1..20: note = Target: SCN10A; (-) strand; PAM type: NRG; PAM sequence: GAG
  source 1..20: mol_type = other DNA
tagatggatgggcagacact

SEQ ID NO: 15457 - DNA, 20 bp, synthetic construct
  misc_feature 1..20: note = Description of Artificial Sequence: Synthetic oligonucleotide
  misc_feature 1..20: note = Target: SCN10A; (-) strand; PAM type: NRG; PAM sequence: CAG
  source 1..20: mol_type = other DNA
gtccagtatagatggatggg

SEQ ID NO: 15458 - DNA, 20 bp, synthetic construct
  misc_feature 1..20: note = Description of Artificial Sequence: Synthetic oligonucleotide
  misc_feature 1..20: note = Target: SCN10A; (-) strand; PAM type: NRG; PAM sequence: GGG
  source 1..20: mol_type = other DNA
agggtccagtatagatggat

SEQ ID NO: 15459 - DNA, 20 bp, synthetic construct
  misc_feature 1..20: note = Description of Artificial Sequence: Synthetic oligonucleotide
  misc_feature 1..20: note = Target: SCN10A; (-) strand; PAM type: NRG; PAM sequence: TGG
  source 1..20: mol_type = other DNA
aagggtccagtatagatgga

SEQ ID NO: 15460 - DNA, 20 bp, synthetic construct
  misc_feature 1..20: note = Description of Artificial Sequence: Synthetic oligonucleotide
  misc_feature 1..20: note = Target: SCN10A; (-) strand; PAM type: NRG; PAM sequence: TGG
  source 1..20: mol_type = other DNA
tgggaagggtccagtataga

SEQ ID NO: 15461 - DNA, 20 bp, synthetic construct
  misc_feature 1..20: note = Description of Artificial Sequence: Synthetic oligonucleotide
  misc_feature 1..20: note = Target: SCN10A; (-) strand; PAM type: NRG; PAM sequence: TAG
  source 1..20: mol_type = other DNA
ggcttgggaagggtccagta

SEQ ID NO: 15462 - DNA, 20 bp, synthetic construct
  misc_feature 1..20: note = Description of Artificial Sequence: Synthetic oligonucleotide
  misc_feature 1..20: note = Target: SCN10A; (-) strand; PAM type: NRG; PAM sequence: CAG
  source 1..20: mol_type = other DNA
accatggcttgggaagggtc

SEQ ID NO: 15463 - DNA, 20 bp, synthetic construct
  misc_feature 1..20: note = Description of Artificial Sequence: Synthetic oligonucleotide
  misc_feature 1..20: note = Target: SCN10A; (-) strand; PAM type: NRG; PAM sequence: GGG
  source 1..20: mol_type = other DNA
gggccaccatggcttgggaa

SEQ ID NO: 15464 - DNA, 20 bp, synthetic construct
  misc_feature 1..20: note = Description of Artificial Sequence: Synthetic oligonucleotide
  misc_feature 1..20: note = Target: SCN10A; (-) strand; PAM type: NRG; PAM sequence: AGG
  source 1..20: mol_type = other DNA
tgggccaccatggcttggga

SEQ ID NO: 15465 - DNA, 20 bp, synthetic construct
  misc_feature 1..20: note = Description of Artificial Sequence: Synthetic oligonucleotide
  misc_feature 1..20: note = Target: SCN10A; (-) strand; PAM type: NRG; PAM sequence: AAG
  source 1..20: mol_type = other DNA
ctgggccaccatggcttggg

SEQ ID NO: 15466 - DNA, 20 bp, synthetic construct
  misc_feature 1..20: note = Description of Artificial Sequence: Synthetic oligonucleotide
  misc_feature 1..20: note = Target: SCN10A; (-) strand; PAM type: NRG; PAM sequence: GGG
  source 1..20: mol_type = other DNA
tcactgggccaccatggctt

SEQ ID NO: 15467 - DNA, 20 bp, synthetic construct
  misc_feature 1..20: note = Description of Artificial Sequence: Synthetic oligonucleotide
  misc_feature 1..20: note = Target: SCN10A; (-) strand; PAM type: NRG; PAM sequence: TGG
  source 1..20: mol_type = other DNA
ctcactgggccaccatggct

SEQ ID NO: 15468 - DNA, 20 bp, synthetic construct
  misc_feature 1..20: note = Description of Artificial Sequence: Synthetic oligonucleotide
  misc_feature 1..20: note = Target: SCN10A; (-) strand; PAM type: NRG; PAM sequence: TGG
  source 1..20: mol_type = other DNA
cctctctcactgggccacca

SEQ ID NO: 15469 - DNA, 20 bp, synthetic construct
  misc_feature 1..20: note = Description of Artificial Sequence: Synthetic oligonucleotide
  misc_feature 1..20: note = Target: SCN10A; (-) strand; PAM type: NRG; PAM sequence: GGG
  source 1..20: mol_type = other DNA
ggactctctcctctctcact

SEQ ID NO: 15470 - DNA, 20 bp, synthetic construct
  misc_feature 1..20: note = Description of Artificial Sequence: Synthetic oligonucleotide
  misc_feature 1..20: note = Target: SCN10A; (-) strand; PAM type: NRG; PAM sequence: TGG
  source 1..20: mol_type = other DNA
aggactctctcctctctcac

SEQ ID NO: 15471 - DNA, 20 bp, synthetic construct
  misc_feature 1..20: note = Description of Artificial Sequence: Synthetic oligonucleotide
  misc_feature 1..20: note = Target: SCN10A; (-) strand; PAM type: NRG; PAM sequence: AGG
  source 1..20: mol_type = other DNA
gcacaagccctttccaacac

SEQ ID NO: 15472 - DNA, 20 bp, synthetic construct
  misc_feature 1..20: note = Description of Artificial Sequence: Synthetic oligonucleotide
  misc_feature 1..20: note = Target: SCN10A; (-) strand; PAM type: NRG; PAM sequence: CAG
  source 1..20: mol_type = other DNA
tgcacaagccctttccaaca

SEQ ID NO: 15473 - DNA, 20 bp, synthetic construct
  misc_feature 1..20: note = Description of Artificial Sequence: Synthetic oligonucleotide
  misc_feature 1..20: note = Target: SCN10A; (-) strand; PAM type: NRG; PAM sequence: AAG
  source 1..20: mol_type = other DNA
tcctttcattctttctgcac

SEQ ID NO: 15474 - DNA, 20 bp, synthetic construct
  misc_feature 1..20: note = Description of Artificial Sequence: Synthetic oligonucleotide
  misc_feature 1..20: note = Target: SCN10A; (-) strand; PAM type: NRG; PAM sequence: GGG
  source 1..20: mol_type = other DNA
agattagtcaagtaacccaa

SEQ ID NO: 15475 - DNA, 20 bp, synthetic construct
  misc_feature 1..20: note = Description of Artificial Sequence: Synthetic oligonucleotide
  misc_feature 1..20: note = Target: SCN10A; (-) strand; PAM type: NRG; PAM sequence: AGG
  source 1..20: mol_type = other DNA
gagattagtcaagtaaccca

SEQ ID NO: 15476 - DNA, 20 bp, synthetic construct
  misc_feature 1..20: note = Description of Artificial Sequence: Synthetic oligonucleotide
  misc_feature 1..20: note = Target: SCN10A; (-) strand; PAM type: NRG; PAM sequence: AAG
  source 1..20: mol_type = other DNA
tgagattagtcaagtaaccc

SEQ ID NO: 15477 - DNA, 20 bp, synthetic construct
  misc_feature 1..20: note = Description of Artificial Sequence: Synthetic oligonucleotide
  misc_feature 1..20: note = Target: SCN10A; (-) strand; PAM type: NRG; PAM sequence: AAG
  source 1..20: mol_type = other DNA
atcatcatatgagattagtc

SEQ ID NO: 15478 - DNA, 20 bp, synthetic construct
  misc_feature 1..20: note = Description of Artificial Sequence: Synthetic oligonucleotide
  misc_feature 1..20: note = Target: SCN10A; (-) strand; PAM type: NRG; PAM sequence: TAG
  source 1..20: mol_type = other DNA
tttaaatcatcatatgagat

SEQ ID NO: 15479 - DNA, 20 bp, synthetic construct
  misc_feature 1..20: note = Description of Artificial Sequence: Synthetic oligonucleotide
  misc_feature 1..20: note = Target: SCN10A; (-) strand; PAM type: NRG; PAM sequence: GAG
  source 1..20: mol_type = other DNA
attactttaaatcatcatat

SEQ ID NO: 15480 - DNA, 20 bp, synthetic construct
  misc_feature 1..20: note = Description of Artificial Sequence: Synthetic oligonucleotide
  misc_feature 1..20: note = Target: SCN10A; (-) strand; PAM type: NRG; PAM sequence: GGG
  source 1..20: mol_type = other DNA
attcttaaacagccacatgt

SEQ ID NO: 15481 - DNA, 20 bp, synthetic construct
  misc_feature 1..20: note = Description of Artificial Sequence: Synthetic oligonucleotide
  misc_feature 1..20: note = Target: SCN10A; (-) strand; PAM type: NRG; PAM sequence: TGG
  source 1..20: mol_type = other DNA
tattcttaaacagccacatg

SEQ ID NO: 15482 - DNA, 20 bp, synthetic construct
  misc_feature 1..20: note = Description of Artificial Sequence: Synthetic oligonucleotide
  misc_feature 1..20: note = Target: SCN10A; (-) strand; PAM type: NRG; PAM sequence: CAG
  source 1..20: mol_type = other DNA
aatgctactctattcttaaa

SEQ ID NO: 15483 - DNA, 20 bp, synthetic construct
  misc_feature 1..20: note = Description of Artificial Sequence: Synthetic oligonucleotide
  misc_feature 1..20: note = Target: SCN10A; (-) strand; PAM type: NRG; PAM sequence: AGG
  source 1..20: mol_type = other DNA
agtccatactacattctgaa

SEQ ID NO: 15484 - DNA, 20 bp, synthetic construct
  misc_feature 1..20: note = Description of Artificial Sequence: Synthetic oligonucleotide
  misc_feature 1..20: note = Target: SCN10A; (-) strand; PAM type: NRG; PAM sequence: AAG
  source 1..20: mol_type = other DNA
cagtccatactacattctga

SEQ ID NO: 15485 - DNA, 20 bp, synthetic construct
  misc_feature 1..20: note = Description of Artificial Sequence: Synthetic oligonucleotide
  misc_feature 1..20: note = Target: SCN10A; (-) strand; PAM type: NRG; PAM sequence: CAG
  source 1..20: mol_type = other DNA
acacctagacactcagtcct

SEQ ID NO: 15486 - DNA, 20 bp, synthetic construct
  misc_feature 1..20: note = Description of Artificial Sequence: Synthetic oligonucleotide
  misc_feature 1..20: note = Target: SCN10A; (-) strand; PAM type: NRG; PAM sequence: CAG
  source 1..20: mol_type = other DNA
gaaccagacacctagacact

SEQ ID NO: 15487 - DNA, 20 bp, synthetic construct
  misc_feature 1..20: note = Description of Artificial Sequence: Synthetic oligonucleotide
  misc_feature 1..20: note = Target: SCN10A; (-) strand; PAM type: NRG; PAM sequence: TAG
  source 1..20: mol_type = other DNA
tggcactagaaccagacacc

SEQ ID NO: 15488 - DNA, 20 bp, synthetic construct
  misc_feature 1..20: note = Description of Artificial Sequence: Synthetic oligonucleotide
  misc_feature 1..20: note = Target: SCN10A; (-) strand; PAM type: NRG; PAM sequence: CAG
  source 1..20: mol_type = other DNA
gtagcaattggcactagaac

SEQ ID NO: 15489 - DNA, 20 bp, synthetic construct
  misc_feature 1..20: note = Description of Artificial Sequence: Synthetic oligonucleotide
  misc_feature 1..20: note = Target: SCN10A; (-) strand; PAM type: NRG; PAM sequence: TAG
  source 1..20: mol_type = other DNA
agacttgtagcaattggcac

SEQ ID NO: 15490 - DNA, 20 bp, synthetic construct
  misc_feature 1..20: note = Description of Artificial Sequence: Synthetic oligonucleotide
  misc_feature 1..20: note = Target: SCN10A; (-) strand; PAM type: NRG; PAM sequence: TGG
  source 1..20: mol_type = other DNA
cagagcagacttgtagcaat

SEQ ID NO: 15491 - DNA, 20 bp, synthetic construct
  misc_feature 1..20: note = Description of Artificial Sequence: Synthetic oligonucleotide
  misc_feature 1..20: note = Target: SCN10A; (-) strand; PAM type: NRG; PAM sequence: TAG
  source 1..20: mol_type = other DNA
aagtgcacagagcagacttg

SEQ ID NO: 15492 - DNA, 20 bp, synthetic construct
  misc_feature 1..20: note = Description of Artificial Sequence: Synthetic oligonucleotide
  misc_feature 1..20: note = Target: SCN10A; (-) strand; PAM type: NRG; PAM sequence: CAG
  source 1..20: mol_type = other DNA
ccttaggcaagtgcacagag

SEQ ID NO: 15493 - DNA, 20 bp, synthetic construct
  misc_feature 1..20: note = Description of Artificial Sequence: Synthetic oligonucleotide
  misc_feature 1..20: note = Target: SCN10A; (-) strand; PAM type: NRG; PAM sequence: GAG
  source 1..20: mol_type = other DNA
aaaccttaggcaagtgcaca

SEQ ID NO: 15494 - DNA, 20 bp, synthetic construct
  misc_feature 1..20: note = Description of Artificial Sequence: Synthetic oligonucleotide
  misc_feature 1..20: note = Target: SCN10A; (-) strand; PAM type: NRG; PAM sequence: CAG
  source 1..20: mol_type = other DNA
ggaaaccttaggcaagtgca

SEQ ID NO: 15495 - DNA, 20 bp, synthetic construct
  misc_feature 1..20: note = Description of Artificial Sequence: Synthetic oligonucleotide
  misc_feature 1..20: note = Target: SCN10A; (-) strand; PAM type: NRG; PAM sequence: AAG
  source 1..20: mol_type = other DNA
tgagaggggaaaccttaggc

SEQ ID NO: 15496 - DNA, 20 bp, synthetic construct
  misc_feature 1..20: note = Description of Artificial Sequence: Synthetic oligonucleotide
  misc_feature 1..20: note = Target: SCN10A; (-) strand; PAM type: NRG; PAM sequence: AGG
  source 1..20: mol_type = other DNA
gccctgagaggggaaacctt

SEQ ID NO: 15497 - DNA, 20 bp, synthetic construct
  misc_feature 1..20: note = Description of Artificial Sequence: Synthetic oligonucleotide
  misc_feature 1..20: note = Target: SCN10A; (-) strand; PAM type: NRG; PAM sequence: TAG
  source 1..20: mol_type = other DNA
agccctgagaggggaaacct

SEQ ID NO: 15498 - DNA, 20 bp, synthetic construct
  misc_feature 1..20: note = Description of Artificial Sequence: Synthetic oligonucleotide
  misc_feature 1..20: note = Target: SCN10A; (-) strand; PAM type: NRG; PAM sequence: GGG
  source 1..20: mol_type = other DNA
gaaaatggcagccctgagag

SEQ ID NO: 15499 - DNA, 20 bp, synthetic construct
  misc_feature 1..20: note = Description of Artificial Sequence: Synthetic oligonucleotide
  misc_feature 1..20: note = Target: SCN10A; (-) strand; PAM type: NRG; PAM sequence: GGG
  source 1..20: mol_type = other DNA
agaaaatggcagccctgaga

SEQ ID NO: 15500 - DNA, 20 bp, synthetic construct
  misc_feature 1..20: note = Description of Artificial Sequence: Synthetic oligonucleotide
  misc_feature 1..20: note = Target: SCN10A; (-) strand; PAM type: NRG; PAM sequence: AGG
  source 1..20: mol_type = other DNA
gagaaaatggcagccctgag

SEQ ID NO: 15501 - DNA, 20 bp, synthetic construct
  misc_feature 1..20: note = Description of Artificial Sequence: Synthetic oligonucleotide
  misc_feature 1..20: note = Target: SCN10A; (-) strand; PAM type: NRG; PAM sequence: GAG
  source 1..20: mol_type = other DNA
tgagaaaatggcagccctga

SEQ ID NO: 15502 - DNA, 20 bp, synthetic construct
  misc_feature 1..20: note = Description of Artificial Sequence: Synthetic oligonucleotide
  misc_feature 1..20: note = Target: SCN10A; (-) strand; PAM type: NRG; PAM sequence: GAG
  source 1..20: mol_type = other DNA
gctgagaaaatggcagccct

SEQ ID NO: 15503 - DNA, 20 bp, synthetic construct
  misc_feature 1..20: note = Description of Artificial Sequence: Synthetic oligonucleotide
  misc_feature 1..20: note = Target: SCN10A; (-) strand; PAM type: NRG; PAM sequence: CAG
  source 1..20: mol_type = other DNA
gaaagtggctgagaaaatgg

SEQ ID NO: 15504 - DNA, 20 bp, synthetic construct
  misc_feature 1..20: note = Description of Artificial Sequence: Synthetic oligonucleotide
  misc_feature 1..20: note = Target: SCN10A; (-) strand; PAM type: NRG; PAM sequence: TGG
  source 1..20: mol_type = other DNA
tgggaaagtggctgagaaaa

SEQ ID NO: 15505 - DNA, 20 bp, synthetic construct
  misc_feature 1..20: note = Description of Artificial Sequence: Synthetic oligonucleotide
  misc_feature 1..20: note = Target: SCN10A; (-) strand; PAM type: NRG; PAM sequence: GAG
  source 1..20: mol_type = other DNA
cataaggtgggaaagtggct

SEQ ID NO: 15506 - DNA, 20 bp, synthetic construct
  misc_feature 1..20: note = Description of Artificial Sequence: Synthetic oligonucleotide
  misc_feature 1..20: note = Target: SCN10A; (-) strand; PAM type: NRG; PAM sequence: TGG
  source 1..20: mol_type = other DNA
atgtgcataaggtgggaaag

SEQ ID NO: 15507 - DNA, 20 bp, synthetic construct
  misc_feature 1..20: note = Description of Artificial Sequence: Synthetic oligonucleotide
  misc_feature 1..20: note = Target: SCN10A; (-) strand; PAM type: NRG; PAM sequence: AAG
  source 1..20: mol_type = other DNA
atcatgtgcataaggtggga

SEQ ID NO: 15508 - DNA, 20 bp, synthetic construct
  misc_feature 1..20: note = Description of Artificial Sequence: Synthetic oligonucleotide
  misc_feature 1..20: note = Target: SCN10A; (-) strand; PAM type: NRG; PAM sequence: GGG
  source 1..20: mol_type = other DNA
ttacatcatgtgcataaggt

SEQ ID NO: 15509 - DNA, 20 bp, synthetic construct
  misc_feature 1..20: note = Description of Artificial Sequence: Synthetic oligonucleotide
  misc_feature 1..20: note = Target: SCN10A; (-) strand; PAM type: NRG; PAM sequence: TGG
  source 1..20: mol_type = other DNA
cttacatcatgtgcataagg

SEQ ID NO: 15510 - DNA, 20 bp, synthetic construct
  misc_feature 1..20: note = Description of Artificial Sequence: Synthetic oligonucleotide
  misc_feature 1..20: note = Target: SCN10A; (-) strand; PAM type: NRG; PAM sequence: AGG
  source 1..20: mol_type = other DNA
attcttacatcatgtgcata

SEQ ID NO: 15511 - DNA, 20 bp, synthetic construct
  misc_feature 1..20: note = Description of Artificial Sequence: Synthetic oligonucleotide
  misc_feature 1..20: note = Target: SCN10A; (-) strand; PAM type: NRG; PAM sequence: AAG
  source 1..20: mol_type = other DNA
cattcttacatcatgtgcat

SEQ ID NO: 15512 - DNA, 20 bp, synthetic construct
  misc_feature 1..20: note = Description of Artificial Sequence: Synthetic oligonucleotide
  misc_feature 1..20: note = Target: SCN10A; (-) strand; PAM type: NRG; PAM sequence: AAG
  source 1..20: mol_type = other DNA
ttctcaacttctccatctgg

SEQ ID NO: 15513 - DNA, 20 bp, synthetic construct
  misc_feature 1..20: note = Description of Artificial Sequence: Synthetic oligonucleotide
  misc_feature 1..20: note = Target: SCN10A; (-) strand; PAM type: NRG; PAM sequence: TGG
  source 1..20: mol_type = other DNA
ctattctcaacttctccatc

SEQ ID NO: 15514 - DNA, 20 bp, synthetic construct
  misc_feature 1..20: note = Description of Artificial Sequence: Synthetic oligonucleotide
  misc_feature 1..20: note = Target: SCN10A; (-) strand; PAM type: NRG; PAM sequence: AGG
  source 1..20: mol_type = other DNA
agctgaaggcaggaacatgg

SEQ ID NO: 15515 - DNA, 20 bp, synthetic construct
  misc_feature 1..20: note = Description of Artificial Sequence: Synthetic oligonucleotide
  misc_feature 1..20: note = Target: SCN10A; (-) strand; PAM type: NRG; PAM sequence: GAG
  source 1..20: mol_type = other DNA
aagctgaaggcaggaacatg

SEQ ID NO: 15516 - DNA, 20 bp, synthetic construct
  misc_feature 1..20: note = Description of Artificial Sequence: Synthetic oligonucleotide
  misc_feature 1..20: note = Target: SCN10A; (-) strand; PAM type: NRG; PAM sequence: TGG
  source 1..20: mol_type = other DNA
taaagctgaaggcaggaaca

SEQ ID NO: 15517 - DNA, 20 bp, synthetic construct
  misc_feature 1..20: note = Description of Artificial Sequence: Synthetic oligonucleotide
  misc_feature 1..20: note = Target: SCN10A; (-) strand; PAM type: NRG; PAM sequence: AGG
  source 1..20: mol_type = other DNA
agaatgctaaagctgaaggc

SEQ ID NO: 15518 - DNA, 20 bp, synthetic construct
  misc_feature 1..20: note = Description of Artificial Sequence: Synthetic oligonucleotide
  misc_feature 1..20: note = Target: SCN10A; (-) strand; PAM type: NRG; PAM sequence: CAG
  source 1..20: mol_type = other DNA
aagaatgctaaagctgaagg

SEQ ID NO: 15519 - DNA, 20 bp, synthetic construct
  misc_feature 1..20: note = Description of Artificial Sequence: Synthetic oligonucleotide
  misc_feature 1..20: note = Target: SCN10A; (-) strand; PAM type: NRG; PAM sequence: AGG
  source 1..20: mol_type = other DNA
ctcaagaatgctaaagctga

SEQ ID NO: 15520 - DNA, 20 bp, synthetic construct
  misc_feature 1..20: note = Description of Artificial Sequence: Synthetic oligonucleotide
  misc_feature 1..20: note = Target: SCN10A; (-) strand; PAM type: NRG; PAM sequence: AAG
  source 1..20: mol_type = other DNA
cctcaagaatgctaaagctg

SEQ ID NO: 15521 - DNA, 20 bp, synthetic construct
  misc_feature 1..20: note = Description of Artificial Sequence: Synthetic oligonucleotide
  misc_feature 1..20: note = Target: SCN10A; (-) strand; PAM type: NRG; PAM sequence: AAG
  source 1..20: mol_type = other DNA
tctagacctcaagaatgcta

SEQ ID NO: 15522 - DNA, 20 bp, synthetic construct
  misc_feature 1..20: note = Description of Artificial Sequence: Synthetic oligonucleotide
  misc_feature 1..20: note = Target: SCN10A; (-) strand; PAM type: NRG; PAM sequence: AAG
  source 1..20: mol_type = other DNA
acacccagtttctagacctc

SEQ ID NO: 15523 - DNA, 20 bp, synthetic construct
  misc_feature 1..20: note = Description of Artificial Sequence: Synthetic oligonucleotide
  misc_feature 1..20: note = Target: SCN10A; (-) strand; PAM type: NRG; PAM sequence: TAG
  source 1..20: mol_type = other DNA
tggaaggcacacccagtttc

SEQ ID NO: 15524 - DNA, 20 bp, synthetic construct
  misc_feature 1..20: note = Description of Artificial Sequence: Synthetic oligonucleotide
  misc_feature 1..20: note = Target: SCN10A; (-) strand; PAM type: NRG; PAM sequence: CAG
  source 1..20: mol_type = other DNA
aacatgctggaaggcacacc

SEQ ID NO: 15525 - DNA, 20 bp, synthetic construct
  misc_feature 1..20: note = Description of Artificial Sequence: Synthetic oligonucleotide
  misc_feature 1..20: note = Target: SCN10A; (-) strand; PAM type: NRG; PAM sequence: AGG
  source 1..20: mol_type = other DNA
catgctctgaacatgctgga

SEQ ID NO: 15526 - DNA, 20 bp, synthetic construct
  misc_feature 1..20: note = Description of Artificial Sequence: Synthetic oligonucleotide
  misc_feature 1..20: note = Target: SCN10A; (-) strand; PAM type: NRG; PAM sequence: AAG
  source 1..20: mol_type = other DNA
gcatgctctgaacatgctgg

SEQ ID NO: 15527 - DNA, 20 bp, synthetic construct
  misc_feature 1..20: note = Description of Artificial Sequence: Synthetic oligonucleotide
  misc_feature 1..20: note = Target: SCN10A; (-) strand; PAM type: NRG; PAM sequence: TGG
  source 1..20: mol_type = other DNA
cttgcatgctctgaacatgc

SEQ ID NO: 15528 - DNA, 20 bp, synthetic construct
  misc_feature 1..20: note = Description of Artificial Sequence: Synthetic oligonucleotide
  misc_feature 1..20: note = Target: SCN10A; (-) strand; PAM type: NRG; PAM sequence: AAG
  source 1..20: mol_type = other DNA
ggcctaggagtgtaagaact

SEQ ID NO: 15529 - DNA, 20 bp, synthetic construct
  misc_feature 1..20: note = Description of Artificial Sequence: Synthetic oligonucleotide
  misc_feature 1..20: note = Target: SCN10A; (-) strand; PAM type: NRG; PAM sequence: AAG
  source 1..20: mol_type = other DNA
tgtaacaggcctaggagtgt

SEQ ID NO: 15530 - DNA, 20 bp, synthetic construct
  misc_feature 1..20: note = Description of Artificial Sequence: Synthetic oligonucleotide
  misc_feature 1..20: note = Target: SCN10A; (-) strand; PAM type: NRG; PAM sequence: GAG
  source 1..20: mol_type = other DNA
aagtgctgtaacaggcctag

SEQ ID NO: 15531 - DNA, 20 bp, synthetic construct
  misc_feature 1..20: note = Description of Artificial Sequence: Synthetic oligonucleotide
  misc_feature 1..20: note = Target: SCN10A; (-) strand; PAM type: NRG; PAM sequence: AGG
  source 1..20: mol_type = other DNA
ttaagtgctgtaacaggcct

SEQ ID NO: 15532 - DNA, 20 bp, synthetic construct
  misc_feature 1..20: note = Description of Artificial Sequence: Synthetic oligonucleotide
  misc_feature 1..20: note = Target: SCN10A; (-) strand; PAM type: NRG; PAM sequence: TAG
  source 1..20: mol_type = other DNA
attaagtgctgtaacaggcc

SEQ ID NO: 15533 - DNA, 20 bp, synthetic construct
  misc_feature 1..20: note = Description of Artificial Sequence: Synthetic oligonucleotide
  misc_feature 1..20: note = Target: SCN10A; (-) strand; PAM type: NRG; PAM sequence: AGG
  source 1..20: mol_type = other DNA
agctcattaagtgctgtaac

SEQ ID NO: 15534 - DNA, 20 bp, synthetic construct
  misc_feature 1..20: note = Description of Artificial Sequence: Synthetic oligonucleotide
  misc_feature 1..20: note = Target: SCN10A; (-) strand; PAM type: NRG; PAM sequence: CAG
  source 1..20: mol_type = other DNA
cagctcattaagtgctgtaa

SEQ ID NO: 15535 - DNA, 20 bp, synthetic construct
  misc_feature 1..20: note = Description of Artificial Sequence: Synthetic oligonucleotide
  misc_feature 1..20: note = Target: SCN10A; (-) strand; PAM type: NRG; PAM sequence: AAG
  source 1..20: mol_type = other DNA
gtgaattaaaacagctcatt

SEQ ID NO: 15536 - DNA, 20 bp, synthetic construct
  misc_feature 1..20: note = Description of Artificial Sequence: Synthetic oligonucleotide
  misc_feature 1..20: note = Target: SCN10A; (-) strand; PAM type: NRG; PAM sequence: CAG
  source 1..20: mol_type = other DNA
gactaataggtgaattaaaa

SEQ ID NO: 15537 - DNA, 20 bp, synthetic construct
  misc_feature 1..20: note = Description of Artificial Sequence: Synthetic oligonucleotide
  misc_feature 1..20: note = Target: SCN10A; (-) strand; PAM type: NRG; PAM sequence: AGG
  source 1..20: mol_type = other DNA
tgtatgagaaacagactaat

SEQ ID NO: 15538 - DNA, 20 bp, synthetic construct
  misc_feature 1..20: note = Description of Artificial Sequence: Synthetic oligonucleotide
  misc_feature 1..20: note = Target: SCN10A; (-) strand; PAM type: NRG; PAM sequence: TAG
  source 1..20: mol_type = other DNA
ctgtatgagaaacagactaa

SEQ ID NO: 15539 - DNA, 20 bp, synthetic construct
  misc_feature 1..20: note = Description of Artificial Sequence: Synthetic oligonucleotide
  misc_feature 1..20: note = Target: SCN10A; (-) strand; PAM type: NRG; PAM sequence: CAG
  source 1..20: mol_type = other DNA
cactgatgctgtatgagaaa

SEQ ID NO: 15540 - DNA, 20 bp, synthetic construct
  misc_feature 1..20: note = Description of Artificial Sequence: Synthetic oligonucleotide
  misc_feature 1..20: note = Target: SCN10A; (-) strand; PAM type: NRG; PAM sequence: GAG
  source 1..20: mol_type = other DNA
cttggacactgatgctgtat

SEQ ID NO: 15541 - DNA, 20 bp, synthetic construct
  misc_feature 1..20: note = Description of Artificial Sequence: Synthetic oligonucleotide
  misc_feature 1..20: note = Target: SCN10A; (-) strand; PAM type: NRG; PAM sequence: TGG
  source 1..20: mol_type = other DNA
gatacagtcagaactgggct

SEQ ID NO: 15542 - DNA, 20 bp, synthetic construct
  misc_feature 1..20: note = Description of Artificial Sequence: Synthetic oligonucleotide
  misc_feature 1..20: note = Target: SCN10A; (-) strand; PAM type: NRG; PAM sequence: GGG
  source 1..20: mol_type = other DNA
tgggagatacagtcagaact

SEQ ID NO: 15543 - DNA, 20 bp, synthetic construct
  misc_feature 1..20: note = Description of Artificial Sequence: Synthetic oligonucleotide
  misc_feature 1..20: note = Target: SCN10A; (-) strand; PAM type: NRG; PAM sequence: TGG
  source 1..20: mol_type = other DNA
ctgggagatacagtcagaac

SEQ ID NO: 15544 - DNA, 20 bp, synthetic construct
  misc_feature 1..20: note = Description of Artificial Sequence: Synthetic oligonucleotide
  misc_feature 1..20: note = Target: SCN10A; (-) strand; PAM type: NRG; PAM sequence: CAG
  source 1..20: mol_type = other DNA
tcagccctgggagatacagt

SEQ ID NO: 15545 - DNA, 20 bp, synthetic construct
  misc_feature 1..20: note = Description of Artificial Sequence: Synthetic oligonucleotide
  misc_feature 1..20: note = Target: SCN10A; (-) strand; PAM type: NRG; PAM sequence: CAG
  source 1..20: mol_type = other DNA
ctactcagccctgggagata

SEQ ID NO: 15546 - DNA, 20 bp, synthetic construct
  misc_feature 1..20: note = Description of Artificial Sequence: Synthetic oligonucleotide
  misc_feature 1..20: note = Target: SCN10A; (-) strand; PAM type: NRG; PAM sequence: GAG
  source 1..20: mol_type = other DNA
atggtactactcagccctgg

SEQ ID NO: 15547 - DNA, 20 bp, synthetic construct
  misc_feature 1..20: note = Description of Artificial Sequence: Synthetic oligonucleotide
  misc_feature 1..20: note = Target: SCN10A; (-) strand; PAM type: NRG; PAM sequence: GGG
  source 1..20: mol_type = other DNA
gcatggtactactcagccct

SEQ ID NO: 15548 - DNA, 20 bp, synthetic construct
  misc_feature 1..20: note = Description of Artificial Sequence: Synthetic oligonucleotide
  misc_feature 1..20: note = Target: SCN10A; (-) strand; PAM type: NRG; PAM sequence: TGG
  source 1..20: mol_type = other DNA
ggcatggtactactcagccc

SEQ ID NO: 15549 - DNA, 20 bp, synthetic construct
  misc_feature 1..20: note = Description of Artificial Sequence: Synthetic oligonucleotide
  misc_feature 1..20: note = Target: SCN10A; (-) strand; PAM type: NRG; PAM sequence: CAG
  source 1..20: mol_type = other DNA
atgccaggcatggtactact

SEQ ID NO: 15550 - DNA, 20 bp, synthetic construct
  misc_feature 1..20: note = Description of Artificial Sequence: Synthetic oligonucleotide
  misc_feature 1..20: note = Target: SCN10A; (-) strand; PAM type: NRG; PAM sequence: TGG
  source 1..20: mol_type = other DNA
tagctctggtatgccaggca

SEQ ID NO: 15551 - DNA, 20 bp, synthetic construct
  misc_feature 1..20: note = Description of Artificial Sequence: Synthetic oligonucleotide
  misc_feature 1..20: note = Target: SCN10A; (-) strand; PAM type: NRG; PAM sequence: AGG
  source 1..20: mol_type = other DNA
ctgagtagctctggtatgcc

SEQ ID NO: 15552 - DNA, 20 bp, synthetic construct
  misc_feature 1..20: note = Description of Artificial Sequence: Synthetic oligonucleotide
  misc_feature 1..20: note = Target: SCN10A; (-) strand; PAM type: NRG; PAM sequence: CAG
  source 1..20: mol_type = other DNA
tctgagtagctctggtatgc

SEQ ID NO: 15553 - DNA, 20 bp, synthetic construct
  misc_feature 1..20: note = Description of Artificial Sequence: Synthetic oligonucleotide
  misc_feature 1..20: note = Target: SCN10A; (-) strand; PAM type: NRG; PAM sequence: TGG
  source 1..20: mol_type = other DNA
aaataatctctgagtagctc

SEQ ID NO: 15554 - DNA, 20 bp, synthetic construct
  misc_feature 1..20: note = Description of Artificial Sequence: Synthetic oligonucleotide
  misc_feature 1..20: note = Target: SCN10A; (-) strand; PAM type: NRG; PAM sequence: TAG
  source 1..20: mol_type = other DNA
ttcaacaaataatctctgag

SEQ ID NO: 15555 - DNA, 20 bp, synthetic construct
  misc_feature 1..20: note = Description of Artificial Sequence: Synthetic oligonucleotide
  misc_feature 1..20: note = Target: SCN10A; (-) strand; PAM type: NRG; PAM sequence: GAG
  source 1..20: mol_type = other DNA
ttattcaacaaataatctct

SEQ ID NO: 15556 - DNA, 20 bp, synthetic construct
  misc_feature 1..20: note = Description of Artificial Sequence: Synthetic oligonucleotide
  misc_feature 1..20: note = Target: SCN10A; (-) strand; PAM type: NRG; PAM sequence: TGG
  source 1..20: mol_type = other DNA
gagtgtctacattccaccat

SEQ ID NO: 15557 - DNA, 20 bp, synthetic construct
  misc_feature 1..20: note = Description of Artificial Sequence: Synthetic oligonucleotide
  misc_feature 1..20: note = Target: SCN10A; (-) strand; PAM type: NRG; PAM sequence: GAG
  source 1..20: mol_type = other DNA
tttgtcatgcagttactctt

SEQ ID NO: 15558 - DNA, 20 bp, synthetic construct
  misc_feature 1..20: note = Description of Artificial Sequence: Synthetic oligonucleotide
  misc_feature 1..20: note = Target: SCN10A; (-) strand; PAM type: NRG; PAM sequence: CAG
  source 1..20: mol_type = other DNA
ttacttatacatttgtcatg

SEQ ID NO: 15559 - DNA, 20 bp, synthetic construct
  misc_feature 1..20: note = Description of Artificial Sequence: Synthetic oligonucleotide
  misc_feature 1..20: note = Target: SCN10A; (-) strand; PAM type: NRG; PAM sequence: AAG
  source 1..20: mol_type = other DNA
attcagtcctctgttcattc

SEQ ID NO: 15560 - DNA, 20 bp, synthetic construct
  misc_feature 1..20: note = Description of Artificial Sequence: Synthetic oligonucleotide
  misc_feature 1..20: note = Target: SCN10A; (-) strand; PAM type: NRG; PAM sequence: CAG
  source 1..20: mol_type = other DNA
ccttcatctacctgttcatt

SEQ ID NO: 15561 - DNA, 20 bp, synthetic construct
  misc_feature 1..20: note = Description of Artificial Sequence: Synthetic oligonucleotide
  misc_feature 1..20: note = Target: SCN10A; (-) strand; PAM type: NRG; PAM sequence: CAG
  source 1..20: mol_type = other DNA
tctttctttctttcatcatc

SEQ ID NO: 15562 - DNA, 20 bp, synthetic construct
  misc_feature 1..20: note = Description of Artificial Sequence: Synthetic oligonucleotide
  misc_feature 1..20: note = Target: SCN10A; (-) strand; PAM type: NRG; PAM sequence: CAG
  source 1..20: mol_type = other DNA
tataatgttggtgataatga

SEQ ID NO: 15563 - DNA, 20 bp, synthetic construct
  misc_feature 1..20: note = Description of Artificial Sequence: Synthetic oligonucleotide
  misc_feature 1..20: note = Target: SCN10A; (-) strand; PAM type: NRG; PAM sequence: TGG
  source 1..20: mol_type = other DNA
attgtaatgatatataatgt

SEQ ID NO: 15564 - DNA, 20 bp, synthetic construct
  misc_feature 1..20: note = Description of Artificial Sequence: Synthetic oligonucleotide
  misc_feature 1..20: note = Target: SCN10A; (-) strand; PAM type: NRG; PAM sequence: AGG
  source 1..20: mol_type = other DNA
gtaataaattatgtctcatt

SEQ ID NO: 15565 - DNA, 20 bp, synthetic construct
  misc_feature 1..20: note = Description of Artificial Sequence: Synthetic oligonucleotide
  misc_feature 1..20: note = Target: SCN10A; (-) strand; PAM type: NRG; PAM sequence: TAG
  source 1..20: mol_type = other DNA
ggtaataaattatgtctcat

SEQ ID NO: 15566 - DNA, 20 bp, synthetic construct
  misc_feature 1..20: note = Description of Artificial Sequence: Synthetic oligonucleotide
  misc_feature 1..20: note = Target: SCN10A; (-) strand; PAM type: NRG; PAM sequence: TGG
  source 1..20: mol_type = other DNA
acttcacatcatttcctaaa

SEQ ID NO: 15567 - DNA, 20 bp, synthetic construct
  misc_feature 1..20: note = Description of Artificial Sequence: Synthetic oligonucleotide
  misc_feature 1..20: note = Target: SCN10A; (-) strand; PAM type: NRG; PAM sequence: CAG
  source 1..20: mol_type = other DNA
acacggcatagccacatgtt

SEQ ID NO: 15568 - DNA, 20 bp, synthetic construct
  misc_feature 1..20: note = Description of Artificial Sequence: Synthetic oligonucleotide
  misc_feature 1..20: note = Target: SCN10A; (-) strand; PAM type: NRG; PAM sequence: TAG
  source 1..20: mol_type = other DNA
tgtacaaaatagacacggca

SEQ ID NO: 15569 - DNA, 20 bp, synthetic construct
  misc_feature 1..20: note = Description of Artificial Sequence: Synthetic oligonucleotide
  misc_feature 1..20: note = Target: SCN10A; (-) strand; PAM type: NRG; PAM sequence: CGG
  source 1..20: mol_type = other DNA
gaacctgtacaaaatagaca

SEQ ID NO: 15570 - DNA, 20 bp, synthetic construct
  misc_feature 1..20: note = Description of Artificial Sequence: Synthetic oligonucleotide
  misc_feature 1..20: note = Target: SCN10A; (-) strand; PAM type: NRG; PAM sequence: TAG
  source 1..20: mol_type = other DNA
aacacagaacctgtacaaaa

SEQ ID NO: 15571 - DNA, 20 bp, synthetic construct
  misc_feature 1..20: note = Description of Artificial Sequence: Synthetic oligonucleotide
  misc_feature 1..20: note = Target: SCN10A; (-) strand; PAM type: NRG; PAM sequence: CAG
  source 1..20: mol_type = other DNA
tcaggtggtgagttaaaaca

SEQ ID NO: 15572 - DNA, 20 bp, synthetic construct
  misc_feature 1..20: note = Description of Artificial Sequence: Synthetic oligonucleotide
  misc_feature 1..20: note = Target: SCN10A; (-) strand; PAM type: NRG; PAM sequence: GAG
  source 1..20: mol_type = other DNA
ccatgggattatcaggtggt

SEQ ID NO: 15573 - DNA, 20 bp, synthetic construct
  misc_feature 1..20: note = Description of Artificial Sequence: Synthetic oligonucleotide
  misc_feature 1..20: note = Target: SCN10A; (-) strand; PAM type: NRG; PAM sequence: TGG
  source 1..20: mol_type = other DNA
cctgccatgggattatcagg

SEQ ID NO: 15574 - DNA, 20 bp, synthetic construct
  misc_feature 1..20: note = Description of Artificial Sequence: Synthetic oligonucleotide
  misc_feature 1..20: note = Target: SCN10A; (-) strand; PAM type: NRG; PAM sequence: AGG
  source 1..20: mol_type = other DNA
gggcctgccatgggattatc

SEQ ID NO: 15575 - DNA, 20 bp, synthetic construct
  misc_feature 1..20: note = Description of Artificial Sequence: Synthetic oligonucleotide
  misc_feature 1..20: note = Target: SCN10A; (-) strand; PAM type: NRG; PAM sequence: CAG
  source 1..20: mol_type = other DNA
tgggcctgccatgggattat

SEQ ID NO: 15576 - DNA, 20 bp, synthetic construct
  misc_feature 1..20: note = Description of Artificial Sequence: Synthetic oligonucleotide
  misc_feature 1..20: note = Target: SCN10A; (-) strand; PAM type: NRG; PAM sequence: GGG
  source 1..20: mol_type = other DNA
taaagggatgggcctgccat

SEQ ID NO: 15577 - DNA, 20 bp, synthetic construct
  misc_feature 1..20: note = Description of Artificial Sequence: Synthetic oligonucleotide
  misc_feature 1..20: note = Target: SCN10A; (-) strand; PAM type: NRG; PAM sequence: TGG
  source 1..20: mol_type = other DNA
ataaagggatgggcctgcca

SEQ ID NO: 15578 - DNA, 20 bp, synthetic construct
  misc_feature 1..20: note = Description of Artificial Sequence: Synthetic oligonucleotide
  misc_feature 1..20: note = Target: SCN10A; (-) strand; PAM type: NRG; PAM sequence: GGG
  source 1..20: mol_type = other DNA
gtagaatagcataaagggat

SEQ ID NO: 15579 - DNA, 20 bp, synthetic construct
  misc_feature 1..20: note = Description of Artificial Sequence: Synthetic oligonucleotide
  misc_feature 1..20: note = Target: SCN10A; (-) strand; PAM type: NRG; PAM sequence: TGG
  source 1..20: mol_type = other DNA
agtagaatagcataaaggga

SEQ ID NO: 15580 - DNA, 20 bp, synthetic construct
  misc_feature 1..20: note = Description of Artificial Sequence: Synthetic oligonucleotide
  misc_feature 1..20: note = Target: SCN10A; (-) strand; PAM type: NRG; PAM sequence: GGG
  source 1..20: mol_type = other DNA
ggctagtagaatagcataaa

SEQ ID NO: 15581 - DNA, 20 bp, synthetic construct
  misc_feature 1..20: note = Description of Artificial Sequence: Synthetic oligonucleotide
  misc_feature 1..20: note = Target: SCN10A; (-) strand; PAM type: NRG; PAM sequence: AGG
  source 1..20: mol_type = other DNA
gggctagtagaatagcataa

SEQ ID NO: 15582 - DNA, 20 bp, synthetic construct
  misc_feature 1..20: note = Description of Artificial Sequence: Synthetic oligonucleotide
  misc_feature 1..20: note = Target: SCN10A; (-) strand; PAM type: NRG; PAM sequence: AAG
  source 1..20: mol_type = other DNA
tgggctagtagaatagcata

SEQ ID NO: 15583 - DNA, 20 bp, synthetic construct
  misc_feature 1..20: note = Description of Artificial Sequence: Synthetic oligonucleotide
  misc_feature 1..20: note = Target: SCN10A; (-) strand; PAM type: NRG; PAM sequence: TAG
  source 1..20: mol_type = other DNA
acaagtgtgggctagtagaa

SEQ ID NO: 15584 - DNA, 20 bp, synthetic construct
  misc_feature 1..20: note = Description of Artificial Sequence: Synthetic oligonucleotide
  misc_feature 1..20: note = Target: SCN10A; (-) strand; PAM type: NRG; PAM sequence: TAG
  source 1..20: mol_type = other DNA
attacacaagtgtgggctag

SEQ ID NO: 15585 - DNA, 20 bp, synthetic construct
  misc_feature 1..20: note = Description of Artificial Sequence: Synthetic oligonucleotide
  misc_feature 1..20: note = Target: SCN10A; (-) strand; PAM type: NRG; PAM sequence: TAG
  source 1..20: mol_type = other DNA
gcaattacacaagtgtgggc

SEQ ID NO: 15586 - DNA, 20 bp, synthetic construct
  misc_feature 1..20: note = Description of Artificial Sequence: Synthetic oligonucleotide
  misc_feature 1..20: note = Target: SCN10A; (-) strand; PAM type: NRG; PAM sequence: GGG
  source 1..20: mol_type = other DNA
tggtgcaattacacaagtgt

SEQ ID NO: 15587 - DNA, 20 bp, synthetic construct
  misc_feature 1..20: note = Description of Artificial Sequence: Synthetic oligonucleotide
  misc_feature 1..20: note = Target: SCN10A; (-) strand; PAM type: NRG; PAM sequence: TGG
  source 1..20: mol_type = other DNA
gtggtgcaattacacaagtg

SEQ ID NO: 15588 - DNA, 20 bp, synthetic construct
  misc_feature 1..20: note = Description of Artificial Sequence: Synthetic oligonucleotide
  misc_feature 1..20: note = Target: SCN10A; (-) strand; PAM type: NRG; PAM sequence: AAG
  source 1..20: mol_type = other DNA
tcacagtggtgcaattacac

SEQ ID NO: 15589 - DNA, 20 bp, synthetic construct
  misc_feature 1..20: note = Description of Artificial Sequence: Synthetic oligonucleotide
  misc_feature 1..20: note = Target: SCN10A; (-) strand; PAM type: NRG; PAM sequence: TGG
  source 1..20: mol_type = other DNA
tagtgaatatgatatcacag

SEQ ID NO: 15590 - DNA, 20 bp, synthetic construct
  misc_feature 1..20: note = Description of Artificial Sequence: Synthetic oligonucleotide
  misc_feature 1..20: note = Target: SCN10A; (-) strand; PAM type: NRG; PAM sequence: CAG
  source 1..20: mol_type = other DNA
tcctagtgaatatgatatca

SEQ ID NO: 15591 - DNA, 20 bp, synthetic construct
  misc_feature 1..20: note = Description of Artificial Sequence: Synthetic oligonucleotide
  misc_feature 1..20: note = Target: SCN10A; (-) strand; PAM type: NRG; PAM sequence: TAG
  source 1..20: mol_type = other DNA
atgaggctagagggccttcc

SEQ ID NO: 15592 - DNA, 20 bp, synthetic construct
  misc_feature 1..20: note = Description of Artificial Sequence: Synthetic oligonucleotide
  misc_feature 1..20: note = Target: SCN10A; (-) strand; PAM type: NRG; PAM sequence: GGG
  source 1..20: mol_type = other DNA
gactacaccatgaggctaga

SEQ ID NO: 15593 - DNA, 20 bp, synthetic construct
  misc_feature 1..20: note = Description of Artificial Sequence: Synthetic oligonucleotide
  misc_feature 1..20: note = Target: SCN10A; (-) strand; PAM type: NRG; PAM sequence: AGG
  source 1..20: mol_type = other DNA
agactacaccatgaggctag

SEQ ID NO: 15594 - DNA, 20 bp, synthetic construct
  misc_feature 1..20: note = Description of Artificial Sequence: Synthetic oligonucleotide
  misc_feature 1..20: note = Target: SCN10A; (-) strand; PAM type: NRG; PAM sequence: GAG
  source 1..20: mol_type = other DNA
cagactacaccatgaggcta

SEQ ID NO: 15595 - DNA, 20 bp, synthetic construct
  misc_feature 1..20: note = Description of Artificial Sequence: Synthetic oligonucleotide
  misc_feature 1..20: note = Target: SCN10A; (-) strand; PAM type: NRG; PAM sequence: TAG
  source 1..20: mol_type = other DNA
tacagactacaccatgaggc

SEQ ID NO: 15596 - DNA, 20 bp, synthetic construct
  misc_feature 1..20: note = Description of Artificial Sequence: Synthetic oligonucleotide
  misc_feature 1..20: note = Target: SCN10A; (-) strand; PAM type: NRG; PAM sequence: AGG
  source 1..20: mol_type = other DNA
ttcctacagactacaccatg

SEQ ID NO: 15597 - DNA, 20 bp, synthetic construct
  misc_feature 1..20: note = Description of Artificial Sequence: Synthetic oligonucleotide
  misc_feature 1..20: note = Target: SCN10A; (-) strand; PAM type: NRG; PAM sequence: GAG
  source 1..20: mol_type = other DNA
attcctacagactacaccat

SEQ ID NO: 15598 - DNA, 20 bp, synthetic construct
  misc_feature 1..20: note = Description of Artificial Sequence: Synthetic oligonucleotide
  misc_feature 1..20: note = Target: SCN10A; (-) strand; PAM type: NRG; PAM sequence: CAG
  source 1..20: mol_type = other DNA
gaggtcattctctattccta

SEQ ID NO: 15599 - DNA, 20 bp, synthetic construct
  misc_feature 1..20: note = Description of Artificial Sequence: Synthetic oligonucleotide
  misc_feature 1..20: note = Target: SCN10A; (-) strand; PAM type: NRG; PAM sequence: AGG
  source 1..20: mol_type = other DNA
gtagcactcagtgtgaactg

SEQ ID NO: 15600 - DNA, 20 bp, synthetic construct
  misc_feature 1..20: note = Description of Artificial Sequence: Synthetic oligonucleotide
  misc_feature 1..20: note = Target: SCN10A; (-) strand; PAM type: NRG; PAM sequence: GAG
  source 1..20: mol_type = other DNA
agtagcactcagtgtgaact

SEQ ID NO: 15601 - DNA, 20 bp, synthetic construct
  misc_feature 1..20: note = Description of Artificial Sequence: Synthetic oligonucleotide
  misc_feature 1..20: note = Target: SCN10A; (-) strand; PAM type: NRG; PAM sequence: CAG
  source 1..20: mol_type = other DNA
actttgcaaggagtagcact

SEQ ID NO: 15602 - DNA, 20 bp, synthetic construct
  misc_feature 1..20: note = Description of Artificial Sequence: Synthetic oligonucleotide
  misc_feature 1..20: note = Target: SCN10A; (-) strand; PAM type: NRG; PAM sequence: TAG
  source 1..20: mol_type = other DNA
tgtggggactttgcaaggag

SEQ ID NO: 15603 - DNA, 20 bp, synthetic construct
  misc_feature 1..20: note = Description of Artificial Sequence: Synthetic oligonucleotide
  misc_feature 1..20: note = Target: SCN10A; (-) strand; PAM type: NRG; PAM sequence: GAG
  source 1..20: mol_type = other DNA
ctatgtggggactttgcaag

SEQ ID NO: 15604 - DNA, 20 bp, synthetic construct
  misc_feature 1..20: note = Description of Artificial Sequence: Synthetic oligonucleotide
  misc_feature 1..20: note = Target: SCN10A; (-) strand; PAM type: NRG; PAM sequence: AGG
  source 1..20: mol_type = other DNA
tgctatgtggggactttgca

SEQ ID NO: 15605 - DNA, 20 bp, synthetic construct
  misc_feature 1..20: note = Description of Artificial Sequence: Synthetic oligonucleotide
  misc_feature 1..20: note = Target: SCN10A; (-) strand; PAM type: NRG; PAM sequence: AAG
  source 1..20: mol_type = other DNA
atgctatgtggggactttgc

SEQ ID NO: 15606 - DNA, 20 bp, synthetic construct
  misc_feature 1..20: note = Description of Artificial Sequence: Synthetic oligonucleotide
  misc_feature 1..20: note = Target: SCN10A; (-) strand; PAM type: NRG; PAM sequence: GGG
  source 1..20: mol_type = other DNA
ttcccagaagatgctatgtg

SEQ ID NO: 15607 - DNA, 20 bp, synthetic construct
  misc_feature 1..20: note = Description of Artificial Sequence: Synthetic oligonucleotide
  misc_feature 1..20: note = Target: SCN10A; (-) strand; PAM type: NRG; PAM sequence: GGG
  source 1..20: mol_type = other DNA
gttcccagaagatgctatgt

SEQ ID NO: 15608 - DNA, 20 bp, synthetic construct
  misc_feature 1..20: note = Description of Artificial Sequence: Synthetic oligonucleotide
  misc_feature 1..20: note = Target: SCN10A; (-) strand; PAM type: NRG; PAM sequence: TGG
  source 1..20: mol_type = other DNA
ggttcccagaagatgctatg

SEQ ID NO: 15609 - DNA, 20 bp, synthetic construct
  misc_feature 1..20: note = Description of Artificial Sequence: Synthetic oligonucleotide
  misc_feature 1..20: note = Target: SCN10A; (-) strand; PAM type: NRG; PAM sequence: AAG
  source 1..20: mol_type = other DNA
tggagagtctaggttcccag

SEQ ID NO: 15610 - DNA, 20 bp, synthetic construct
  misc_feature 1..20: note = Description of Artificial Sequence: Synthetic oligonucleotide
  misc_feature 1..20: note = Target: SCN10A; (-) strand; PAM type: NRG; PAM sequence: CAG
  source 1..20: mol_type = other DNA
aaatggagagtctaggttcc

SEQ ID NO: 15611 - DNA, 20 bp, synthetic construct
  misc_feature 1..20: note = Description of Artificial Sequence: Synthetic oligonucleotide
  misc_feature 1..20: note = Target: SCN10A; (-) strand; PAM type: NRG; PAM sequence: AGG
  source 1..20: mol_type = other DNA
ctcaataaaatggagagtct

SEQ ID NO: 15612 - DNA, 20 bp, synthetic construct
  misc_feature 1..20: note = Description of Artificial Sequence: Synthetic oligonucleotide
  misc_feature 1..20: note = Target: SCN10A; (-) strand; PAM type: NRG; PAM sequence: TAG
  source 1..20: mol_type = other DNA
gctcaataaaatggagagtc

SEQ ID NO: 15613 - DNA, 20 bp, synthetic construct
  misc_feature 1..20: note = Description of Artificial Sequence: Synthetic oligonucleotide
  misc_feature 1..20: note = Target: SCN10A; (-) strand; PAM type: NRG; PAM sequence: GAG
  source 1..20: mol_type = other DNA
tggccgctcaataaaatgga

SEQ ID NO: 15614 - DNA, 20 bp, synthetic construct
  misc_feature 1..20: note = Description of Artificial Sequence: Synthetic oligonucleotide
  misc_feature 1..20: note = Target: SCN10A; (-) strand; PAM type: NRG; PAM sequence: GAG
  source 1..20: mol_type = other DNA
tttggccgctcaataaaatg

SEQ ID NO: 15615 - DNA, 20 bp, synthetic construct
  misc_feature 1..20: note = Description of Artificial Sequence: Synthetic oligonucleotide
  misc_feature 1..20: note = Target: SCN10A; (-) strand; PAM type: NRG; PAM sequence: TGG
  source 1..20: mol_type = other DNA
gctttggccgctcaataaaa

SEQ ID NO: 15616 - DNA, 20 bp, synthetic construct
  misc_feature 1..20: note = Description of Artificial Sequence: Synthetic oligonucleotide
  misc_feature 1..20: note = Target: SCN10A; (-) strand; PAM type: NRG; PAM sequence: TGG
  source 1..20: mol_type = other DNA
atcaaccatatctcttgctt

SEQ ID NO: 15617 - DNA, 20 bp, synthetic construct
  misc_feature 1..20: note = Description of Artificial Sequence: Synthetic oligonucleotide
  misc_feature 1..20: note = Target: SCN10A; (-) strand; PAM type: NRG; PAM sequence: GAG
  source 1..20: mol_type = other DNA
gcaggtggtgagtcaaccat

SEQ ID NO: 15618 - DNA, 20 bp, synthetic construct
  misc_feature 1..20: note = Description of Artificial Sequence: Synthetic oligonucleotide
  misc_feature 1..20: note = Target: SCN10A; (-) strand; PAM type: NRG; PAM sequence: GAG
  source 1..20: mol_type = other DNA
cttgcacttctgcaggtggt

SEQ ID NO: 15619 - DNA, 20 bp, synthetic construct
  misc_feature 1..20: note = Description of Artificial Sequence: Synthetic oligonucleotide
  misc_feature 1..20: note = Target: SCN10A; (-) strand; PAM type: NRG; PAM sequence: TGG
  source 1..20: mol_type = other DNA
ttaccttgcacttctgcagg

SEQ ID NO: 15620 - DNA, 20 bp, synthetic construct
  misc_feature 1..20: note = Description of Artificial Sequence: Synthetic oligonucleotide
  misc_feature 1..20: note = Target: SCN10A; (-) strand; PAM type: NRG; PAM sequence: AGG
  source 1..20: mol_type = other DNA
gggttaccttgcacttctgc

SEQ ID NO: 15621 - DNA, 20 bp, synthetic construct
  misc_feature 1..20: note = Description of Artificial Sequence: Synthetic oligonucleotide
  misc_feature 1..20: note = Target: SCN10A; (-) strand; PAM type: NRG; PAM sequence: CAG
  source 1..20: mol_type = other DNA
tgggttaccttgcacttctg

SEQ ID NO: 15622 - DNA, 20 bp, synthetic construct
  misc_feature 1..20: note = Description of Artificial Sequence: Synthetic oligonucleotide
  misc_feature 1..20: note = Target: SCN10A; (-) strand; PAM type: NRG; PAM sequence: GGG
  source 1..20: mol_type = other DNA
aactttgataatgttgcaat

SEQ ID NO: 15623 - DNA, 20 bp, synthetic construct
  misc_feature 1..20: note = Description of Artificial Sequence: Synthetic oligonucleotide
  misc_feature 1..20: note = Target: SCN10A; (-) strand; PAM type: NRG; PAM sequence: TGG
  source 1..20: mol_type = other DNA
caactttgataatgttgcaa

SEQ ID NO: 15624 - DNA, 20 bp, synthetic construct
  misc_feature 1..20: note = Description of Artificial Sequence: Synthetic oligonucleotide
  misc_feature 1..20: note = Target: SCN10A; (-) strand; PAM type: NRG; PAM sequence: AAG
  source 1..20: mol_type = other DNA
cttcttctgggtcaatgtga

SEQ ID NO: 15625 - DNA, 20 bp, synthetic construct
  misc_feature 1..20: note = Description of Artificial Sequence: Synthetic oligonucleotide
  misc_feature 1..20: note = Target: SCN10A; (-) strand; PAM type: NRG; PAM sequence: GGG
  source 1..20: mol_type = other DNA
ctccactggcagcttcttct

SEQ ID NO: 15626 - DNA, 20 bp, synthetic construct
  misc_feature 1..20: note = Description of Artificial Sequence: Synthetic oligonucleotide
  misc_feature 1..20: note = Target: SCN10A; (-) strand; PAM type: NRG; PAM sequence: TGG
  source 1..20: mol_type = other DNA
actccactggcagcttcttc

SEQ ID NO: 15627 - DNA, 20 bp, synthetic construct
  misc_feature 1..20: note = Description of Artificial Sequence: Synthetic oligonucleotide
  misc_feature 1..20: note = Target: SCN10A; (-) strand; PAM type: NRG; PAM sequence: CAG
  source 1..20: mol_type = other DNA
aagattcaaaactccactgg

SEQ ID NO: 15628 - DNA, 20 bp, synthetic construct
  misc_feature 1..20: note = Description of Artificial Sequence: Synthetic oligonucleotide
  misc_feature 1..20: note = Target: SCN10A; (-) strand; PAM type: NRG; PAM sequence: TGG
  source 1..20: mol_type = other DNA
tgcaagattcaaaactccac

SEQ ID NO: 15629 - DNA, 20 bp, synthetic construct
  misc_feature 1..20: note = Description of Artificial Sequence: Synthetic oligonucleotide
  misc_feature 1..20: note = Target: SCN10A; (-) strand; PAM type: NRG; PAM sequence: AAG
  source 1..20: mol_type = other DNA
tgaataacaagtctgactgc

SEQ ID NO: 15630 - DNA, 20 bp, synthetic construct
  misc_feature 1..20: note = Description of Artificial Sequence: Synthetic oligonucleotide
  misc_feature 1..20: note = Target: SCN10A; (-) strand; PAM type: NRG; PAM sequence: AAG
  source 1..20: mol_type = other DNA
ctttgtcgattgtgaataac

SEQ ID NO: 15631 - DNA, 20 bp, synthetic construct
  misc_feature 1..20: note = Description of Artificial Sequence: Synthetic oligonucleotide
  misc_feature 1..20: note = Target: SCN10A; (-) strand; PAM type: NRG; PAM sequence: GAG
  source 1..20: mol_type = other DNA
gcatcaactataccgatgga

SEQ ID NO: 15632 - DNA, 20 bp, synthetic construct
  misc_feature 1..20: note = Description of Artificial Sequence: Synthetic oligonucleotide
  misc_feature 1..20: note = Target: SCN10A; (-) strand; PAM type: NRG; PAM sequence: GAG
  source 1..20: mol_type = other DNA
gtgcatcaactataccgatg

SEQ ID NO: 15633 - DNA, 20 bp, synthetic construct
  misc_feature 1..20: note = Description of Artificial Sequence: Synthetic oligonucleotide
  misc_feature 1..20: note = Target: SCN10A; (-) strand; PAM type: NRG; PAM sequence: TGG
  source 1..20: mol_type = other DNA
aggtgcatcaactataccga

SEQ ID NO: 15634 - DNA, 20 bp, synthetic construct
  misc_feature 1..20: note = Description of Artificial Sequence: Synthetic oligonucleotide
  misc_feature 1..20: note = Target: SCN10A; (-) strand; PAM type: NRG; PAM sequence: AGG
  source 1..20: mol_type = other DNA
tcttcgcagggaagttttgg

SEQ ID NO: 15635 - DNA, 20 bp, synthetic construct
  misc_feature 1..20: note = Description of Artificial Sequence: Synthetic oligonucleotide
  misc_feature 1..20: note = Target: SCN10A; (-) strand; PAM type: NRG; PAM sequence: GAG
  source 1..20: mol_type = other DNA
ctcttcgcagggaagttttg

SEQ ID NO: 15636 - DNA, 20 bp, synthetic construct
  misc_feature 1..20: note = Description of Artificial Sequence: Synthetic oligonucleotide
  misc_feature 1..20: note = Target: SCN10A; (-) strand; PAM type: NRG; PAM sequence: TGG
  source 1..20: mol_type = other DNA
acctcttcgcagggaagttt

SEQ ID NO: 15637 - DNA, 20 bp, synthetic construct
  misc_feature 1..20: note = Description of Artificial Sequence: Synthetic oligonucleotide
  misc_feature 1..20: note = Target: SCN10A; (-) strand; PAM type: NRG; PAM sequence: AAG
  source 1..20: mol_type = other DNA
gtgtgaacctcttcgcaggg

SEQ ID NO: 15638 - DNA, 20 bp, synthetic construct
  misc_feature 1..20: note = Description of Artificial Sequence: Synthetic oligonucleotide
  misc_feature 1..20: note = Target: SCN10A; (-) strand; PAM type: NRG; PAM sequence: GGG
  source 1..20: mol_type = other DNA
tgggtgtgaacctcttcgca

SEQ ID NO: 15639 - DNA, 20 bp, synthetic construct
  misc_feature 1..20: note = Description of Artificial Sequence: Synthetic oligonucleotide
  misc_feature 1..20: note = Target: SCN10A; (-) strand; PAM type: NRG; PAM sequence: AGG
  source 1..20: mol_type = other DNA
atgggtgtgaacctcttcgc

SEQ ID NO: 15640 - DNA, 20 bp, synthetic construct
  misc_feature 1..20: note = Description of Artificial Sequence: Synthetic oligonucleotide
  misc_feature 1..20: note = Target: SCN10A; (-) strand; PAM type: NRG; PAM sequence: CAG
  source 1..20: mol_type = other DNA
catgggtgtgaacctcttcg

SEQ ID NO: 15641 - DNA, 20 bp, synthetic construct
  misc_feature 1..20: note = Description of Artificial Sequence: Synthetic oligonucleotide
  misc_feature 1..20: note = Target: SCN10A; (-) strand; PAM type: NRG; PAM sequence: GGG
  source 1..20: mol_type = other DNA
tggctcatcttcagcatcat

SEQ ID NO: 15642 - DNA, 20 bp, synthetic construct
  misc_feature 1..20: note = Description of Artificial Sequence: Synthetic oligonucleotide
  misc_feature 1..20: note = Target: SCN10A; (-) strand; PAM type: NRG; PAM sequence: TGG
  source 1..20: mol_type = other DNA
ctggctcatcttcagcatca

SEQ ID NO: 15643 - DNA, 20 bp, synthetic construct
  misc_feature 1..20: note = Description of Artificial Sequence: Synthetic oligonucleotide
  misc_feature 1..20: note = Target: SCN10A; (-) strand; PAM type: NRG; PAM sequence: CAG
  source 1..20: mol_type = other DNA
ctcatcttctggctcatctt

SEQ ID NO: 15644 - DNA, 20 bp, synthetic construct
  misc_feature 1..20: note = Description of Artificial Sequence: Synthetic oligonucleotide
  misc_feature 1..20: note = Target: SCN10A; (-) strand; PAM type: NRG; PAM sequence: TGG
  source 1..20: mol_type = other DNA
tcctcgtctgcctcatcttc

SEQ ID NO: 15645 - DNA, 20 bp, synthetic construct
  misc_feature 1..20: note = Description of Artificial Sequence: Synthetic oligonucleotide
  misc_feature 1..20: note = Target: SCN10A; (-) strand; PAM type: NRG; PAM sequence: GGG
  source 1..20: mol_type = other DNA
gtggtggtggatgccctggt

SEQ ID NO: 15646 - DNA, 20 bp, synthetic construct
  misc_feature 1..20: note = Description of Artificial Sequence: Synthetic oligonucleotide
  misc_feature 1..20: note = Target: SCN10A; (-) strand; PAM type: NRG; PAM sequence: TGG
  source 1..20: mol_type = other DNA
ggtggtggtggatgccctgg

SEQ ID NO: 15647 - DNA, 20 bp, synthetic construct
  misc_feature 1..20: note = Description of Artificial Sequence: Synthetic oligonucleotide
  misc_feature 1..20: note = Target: SCN10A; (-) strand; PAM type: NRG; PAM sequence: TGG
  source 1..20: mol_type = other DNA
ccaggtggtggtggatgccc

SEQ ID NO: 15648 - DNA, 20 bp, synthetic construct
  misc_feature 1..20: note = Description of Artificial Sequence: Synthetic oligonucleotide
  misc_feature 1..20: note = Target: SCN10A; (-) strand; PAM type: NRG; PAM sequence: TGG
  source 1..20: mol_type = other DNA
tatctcccaccaggtggtgg

SEQ ID NO: 15649 - DNA, 20 bp, synthetic construct
  misc_feature 1..20: note = Description of Artificial Sequence: Synthetic oligonucleotide
  misc_feature 1..20: note = Target: SCN10A; (-) strand; PAM type: NRG; PAM sequence: TGG
  source 1..20: mol_type = other DNA
ctctatctcccaccaggtgg

SEQ ID NO: 15650 - DNA, 20 bp, synthetic construct
  misc_feature 1..20: note = Description of Artificial Sequence: Synthetic oligonucleotide
  misc_feature 1..20: note = Target: SCN10A; (-) strand; PAM type: NRG; PAM sequence: TGG
  source 1..20: mol_type = other DNA
tttctctatctcccaccagg

SEQ ID NO: 15651 - DNA, 20 bp, synthetic construct
  misc_feature 1..20: note = Description of Artificial Sequence: Synthetic oligonucleotide
  misc_feature 1..20: note = Target: SCN10A; (-) strand; PAM type: NRG; PAM sequence: AGG
  source 1..20: mol_type = other DNA
gtctttctctatctcccacc

SEQ ID NO: 15652 - DNA, 20 bp, synthetic construct
  misc_feature 1..20: note = Description of Artificial Sequence: Synthetic oligonucleotide
  misc_feature 1..20: note = Target: SCN10A; (-) strand; PAM type: NRG; PAM sequence: CAG
  source 1..20: mol_type = other DNA
ggtctttctctatctcccac

SEQ ID NO: 15653 - DNA, 20 bp, synthetic construct
  misc_feature 1..20: note = Description of Artificial Sequence: Synthetic oligonucleotide
  misc_feature 1..20: note = Target: SCN10A; (-) strand; PAM type: NRG; PAM sequence: AGG
  source 1..20: mol_type = other DNA
gtggggcattgggaggttcc

SEQ ID NO: 15654 - DNA, 20 bp, synthetic construct
  misc_feature 1..20: note = Description of Artificial Sequence: Synthetic oligonucleotide
  misc_feature 1..20: note = Target: SCN10A; (-) strand; PAM type: NRG; PAM sequence: CAG
  source 1..20: mol_type = other DNA
ggtggggcattgggaggttc

SEQ ID NO: 15655 - DNA, 20 bp, synthetic construct
  misc_feature 1..20: note = Description of Artificial Sequence: Synthetic oligonucleotide
  misc_feature 1..20: note = Target: SCN10A; (-) strand; PAM type: NRG; PAM sequence: AGG
  source 1..20: mol_type = other DNA
agagggggtggggcattggg

SEQ ID NO: 15656 - DNA, 20 bp, synthetic construct
  misc_feature 1..20: note = Description of Artificial Sequence: Synthetic oligonucleotide
  misc_feature 1..20: note = Target: SCN10A; (-) strand; PAM type: NRG; PAM sequence: GAG
  source 1..20: mol_type = other DNA
cagagggggtggggcattgg

SEQ ID NO: 15657 - DNA, 20 bp, synthetic construct
  misc_feature 1..20: note = Description of Artificial Sequence: Synthetic oligonucleotide
  misc_feature 1..20: note = Target: SCN10A; (-) strand; PAM type: NRG; PAM sequence: GGG
  source 1..20: mol_type = other DNA
agcagagggggtggggcatt

SEQ ID NO: 15658 - DNA, 20 bp, synthetic construct
  misc_feature 1..20: note = Description of Artificial Sequence: Synthetic oligonucleotide
  misc_feature 1..20: note = Target: SCN10A; (-) strand; PAM type: NRG; PAM sequence: TGG
  source 1..20: mol_type = other DNA
cagcagagggggtggggcat

SEQ ID NO: 15659 - DNA, 20 bp, synthetic construct
  misc_feature 1..20: note = Description of Artificial Sequence: Synthetic oligonucleotide
  misc_feature 1..20: note = Target: SCN10A; (-) strand; PAM type: NRG; PAM sequence: GGG
  source 1..20: mol_type = other DNA
agaatccagcagagggggtg

SEQ ID NO: 15660 - DNA, 20 bp, synthetic construct
  misc_feature 1..20: note = Description of Artificial Sequence: Synthetic oligonucleotide
  misc_feature 1..20: note = Target: SCN10A; (-) strand; PAM type: NRG; PAM sequence: GGG
  source 1..20: mol_type = other DNA
tagaatccagcagagggggt

SEQ ID NO: 15661 - DNA, 20 bp, synthetic construct
  misc_feature 1..20: note = Description of Artificial Sequence: Synthetic oligonucleotide
  misc_feature 1..20: note = Target: SCN10A; (-) strand; PAM type: NRG; PAM sequence: TGG
  source 1..20: mol_type = other DNA
atagaatccagcagaggggg

SEQ ID NO: 15662 - DNA, 20 bp, synthetic construct
  misc_feature 1..20: note = Description of Artificial Sequence: Synthetic oligonucleotide
  misc_feature 1..20: note = Target: SCN10A; (-) strand; PAM type: NRG; PAM sequence: GGG
  source 1..20: mol_type = other DNA
gagatagaatccagcagagg

SEQ ID NO: 15663 - DNA, 20 bp, synthetic construct
  misc_feature 1..20: note = Description of Artificial Sequence: Synthetic oligonucleotide
  misc_feature 1..20: note = Target: SCN10A; (-) strand; PAM type: NRG; PAM sequence: GGG
  source 1..20: mol_type = other DNA
agagatagaatccagcagag

SEQ ID NO: 15664 - DNA, 20 bp, synthetic construct
  misc_feature 1..20: note = Description of Artificial Sequence: Synthetic oligonucleotide
  misc_feature 1..20: note = Target: SCN10A; (-) strand; PAM type: NRG; PAM sequence: GGG
  source 1..20: mol_type = other DNA
aagagatagaatccagcaga

SEQ ID NO: 15665 - DNA, 20 bp, synthetic construct
  misc_feature 1..20: note = Description of Artificial Sequence: Synthetic oligonucleotide
  misc_feature 1..20: note = Target: SCN10A; (-) strand; PAM type: NRG; PAM sequence: AGG
  source 1..20: mol_type = other DNA
aaagagatagaatccagcag

SEQ ID NO: 15666 - DNA, 20 bp, synthetic construct
  misc_feature 1..20: note = Description of Artificial Sequence: Synthetic oligonucleotide
  misc_feature 1..20: note = Target: SCN10A; (-) strand; PAM type: NRG; PAM sequence: GAG
  source 1..20: mol_type = other DNA
gaaagagatagaatccagca

SEQ ID NO: 15667 - DNA, 20 bp, synthetic construct
  misc_feature 1..20: note = Description of Artificial Sequence: Synthetic oligonucleotide
  misc_feature 1..20: note = Target: SCN10A; (-) strand; PAM type: NRG; PAM sequence: CAG
  source 1..20: mol_type = other DNA
tagaaagagatagaatccag

SEQ ID NO: 15668 - DNA, 20 bp, synthetic construct
  misc_feature 1..20: note = Description of Artificial Sequence: Synthetic oligonucleotide
  misc_feature 1..20: note = Target: SCN10A; (-) strand; PAM type: NRG; PAM sequence: CAG
  source 1..20: mol_type = other DNA
gtatagaaagagatagaatc

SEQ ID NO: 15669 - DNA, 20 bp, synthetic construct
  misc_feature 1..20: note = Description of Artificial Sequence: Synthetic oligonucleotide
  misc_feature 1..20: note = Target: SCN10A; (-) strand; PAM type: NRG; PAM sequence: TAG
  source 1..20: mol_type = other DNA
tgaatgagtatagaaagaga

SEQ ID NO: 15670 - DNA, 20 bp, synthetic construct
  misc_feature 1..20: note = Description of Artificial Sequence: Synthetic oligonucleotide
  misc_feature 1..20: note = Target: SCN10A; (-) strand; PAM type: NRG; PAM sequence: GAG
  source 1..20: mol_type = other DNA
agcctgaatgagtatagaaa

SEQ ID NO: 15671 - DNA, 20 bp, synthetic construct
  misc_feature 1..20: note = Description of Artificial Sequence: Synthetic oligonucleotide
  misc_feature 1..20: note = Target: SCN10A; (-) strand; PAM type: NRG; PAM sequence: AAG
  source 1..20: mol_type = other DNA
gcagcctgaatgagtataga

SEQ ID NO: 15672 - DNA, 20 bp, synthetic construct
  misc_feature 1..20: note = Description of Artificial Sequence: Synthetic oligonucleotide
  misc_feature 1..20: note = Target: SCN10A; (-) strand; PAM type: NRG; PAM sequence: TAG
  source 1..20: mol_type = other DNA
tgaagcagcctgaatgagta

SEQ ID NO: 15673 - DNA, 20 bp, synthetic construct
  misc_feature 1..20: note = Description of Artificial Sequence: Synthetic oligonucleotide
  misc_feature 1..20: note = Target: SCN10A; (-) strand; PAM type: NRG; PAM sequence: GAG
  source 1..20: mol_type = other DNA
gctcatgaagcagcctgaat

SEQ ID NO: 15674 - DNA, 20 bp, synthetic construct
  misc_feature 1..20: note = Description of Artificial Sequence: Synthetic oligonucleotide
  misc_feature 1..20: note = Target: SCN10A; (-) strand; PAM type: NRG; PAM sequence: CAG
  source 1..20: mol_type = other DNA
aaggccactggctcatgaag

SEQ ID NO: 15675 - DNA, 20 bp, synthetic construct
  misc_feature 1..20: note = Description of Artificial Sequence: Synthetic oligonucleotide
  misc_feature 1..20: note = Target: SCN10A; (-) strand; PAM type: NRG; PAM sequence: AAG
  source 1..20: mol_type = other DNA
ccaaaggccactggctcatg

SEQ ID NO: 15676 - DNA, 20 bp, synthetic construct
  misc_feature 1..20: note = Description of Artificial Sequence: Synthetic oligonucleotide
  misc_feature 1..20: note = Target: SCN10A; (-) strand; PAM type: NRG; PAM sequence: TGG
  source 1..20: mol_type = other DNA
ttgcttcttccaaaggccac

SEQ ID NO: 15677 - DNA, 20 bp, synthetic construct
  misc_feature 1..20: note = Description of Artificial Sequence: Synthetic oligonucleotide
  misc_feature 1..20: note = Target: SCN10A; (-) strand; PAM type: NRG; PAM sequence: AGG
  source 1..20: mol_type = other DNA
acttctcttgcttcttccaa

SEQ ID NO: 15678 - DNA, 20 bp, synthetic construct
  misc_feature 1..20: note = Description of Artificial Sequence: Synthetic oligonucleotide
  misc_feature 1..20: note = Target: SCN10A; (-) strand; PAM type: NRG; PAM sequence: AAG
  source 1..20: mol_type = other DNA
cacttctcttgcttcttcca

SEQ ID NO: 15679 - DNA, 20 bp, synthetic construct
  misc_feature 1..20: note = Description of Artificial Sequence: Synthetic oligonucleotide
  misc_feature 1..20: note = Target: SCN10A; (-) strand; PAM type: NRG; PAM sequence: GAG
  source 1..20: mol_type = other DNA
ccaatgtctctcagtcttct

SEQ ID NO: 15680 - DNA, 20 bp, synthetic construct
  misc_feature 1..20: note = Description of Artificial Sequence: Synthetic oligonucleotide
  misc_feature 1..20: note = Target: SCN10A; (-) strand; PAM type: NRG; PAM sequence: CAG
  source 1..20: mol_type = other DNA
ttcagctgcccaatgtctct

SEQ ID NO: 15681 - DNA, 20 bp, synthetic construct
  misc_feature 1..20: note = Description of Artificial Sequence: Synthetic oligonucleotide
  misc_feature 1..20: note = Target: SCN10A; (-) strand; PAM type: NRG; PAM sequence: CAG
  source 1..20: mol_type = other DNA
agaaggtctaaatccatctt

SEQ ID NO: 15682 - DNA, 20 bp, synthetic construct
  misc_feature 1..20: note = Description of Artificial Sequence: Synthetic oligonucleotide
  misc_feature 1..20: note = Target: SCN10A; (-) strand; PAM type: NRG; PAM sequence: AGG
  source 1..20: mol_type = other DNA
tgaatgaggttaagggaaga

SEQ ID NO: 15683 - DNA, 20 bp, synthetic construct
  misc_feature 1..20: note = Description of Artificial Sequence: Synthetic oligonucleotide
  misc_feature 1..20: note = Target: SCN10A; (-) strand; PAM type: NRG; PAM sequence: AAG
  source 1..20: mol_type = other DNA
ctgaatgaggttaagggaag

SEQ ID NO: 15684 - DNA, 20 bp, synthetic construct
  misc_feature 1..20: note = Description of Artificial Sequence: Synthetic oligonucleotide
  misc_feature 1..20: note = Target: SCN10A; (-) strand; PAM type: NRG; PAM sequence: AAG
  source 1..20: mol_type = other DNA
accctgaatgaggttaaggg

SEQ ID NO: 15685 - DNA, 20 bp, synthetic construct
  misc_feature 1..20: note = Description of Artificial Sequence: Synthetic oligonucleotide
  misc_feature 1..20: note = Target: SCN10A; (-) strand; PAM type: NRG; PAM sequence: GGG
  source 1..20: mol_type = other DNA
cccaccctgaatgaggttaa

SEQ ID NO: 15686 - DNA, 20 bp, synthetic construct
  misc_feature 1..20: note = Description of Artificial Sequence: Synthetic oligonucleotide
  misc_feature 1..20: note = Target: SCN10A; (-) strand; PAM type: NRG; PAM sequence: AGG
  source 1..20: mol_type = other DNA
acccaccctgaatgaggtta

SEQ ID NO: 15687 - DNA, 20 bp, synthetic construct
  misc_feature 1..20: note = Description of Artificial Sequence: Synthetic oligonucleotide
  misc_feature 1..20: note = Target: SCN10A; (-) strand; PAM type: NRG; PAM sequence: AAG
  source 1..20: mol_type = other DNA
aacccaccctgaatgaggtt

SEQ ID NO: 15688 - DNA, 20 bp, synthetic construct
  misc_feature 1..20: note = Description of Artificial Sequence: Synthetic oligonucleotide
  misc_feature 1..20: note = Target: SCN10A; (-) strand; PAM type: NRG; PAM sequence: AGG
  source 1..20: mol_type = other DNA
actgcaacccaccctgaatg

SEQ ID NO: 15689 - DNA, 20 bp, synthetic construct
  misc_feature 1..20: note = Description of Artificial Sequence: Synthetic oligonucleotide
  misc_feature 1..20: note = Target: SCN10A; (-) strand; PAM type: NRG; PAM sequence: GAG
  source 1..20: mol_type = other DNA
cactgcaacccaccctgaat

SEQ ID NO: 15690 - DNA, 20 bp, synthetic construct
  misc_feature 1..20: note = Description of Artificial Sequence: Synthetic oligonucleotide
  misc_feature 1..20: note = Target: SCN10A; (-) strand; PAM type: NRG; PAM sequence: CAG
  source 1..20: mol_type = other DNA
ctcacacttctaaatgagtg

SEQ ID NO: 15691 - DNA, 20 bp, synthetic construct
  misc_feature 1..20: note = Description of Artificial Sequence: Synthetic oligonucleotide
  misc_feature 1..20: note = Target: SCN10A; (-) strand; PAM type: NRG; PAM sequence: GAG
  source 1..20: mol_type = other DNA
acacactcacacttctaaat

SEQ ID NO: 15692 - DNA, 20 bp, synthetic construct
  misc_feature 1..20: note = Description of Artificial Sequence: Synthetic oligonucleotide
  misc_feature 1..20: note = Target: SCN10A; (-) strand; PAM type: NRG; PAM sequence: AAG
  source 1..20: mol_type = other DNA
ttctagaagtctgtatgtgc

SEQ ID NO: 15693 - DNA, 20 bp, synthetic construct
  misc_feature 1..20: note = Description of Artificial Sequence: Synthetic oligonucleotide
  misc_feature 1..20: note = Target: SCN10A; (-) strand; PAM type: NRG; PAM sequence: AAG
  source 1..20: mol_type = other DNA
agaataagtcaaggttctag

SEQ ID NO: 15694 - DNA, 20 bp, synthetic construct
  misc_feature 1..20: note = Description of Artificial Sequence: Synthetic oligonucleotide
  misc_feature 1..20: note = Target: SCN10A; (-) strand; PAM type: NRG; PAM sequence: TAG
  source 1..20: mol_type = other DNA
aggagaataagtcaaggttc

SEQ ID NO: 15695 - DNA, 20 bp, synthetic construct
  misc_feature 1..20: note = Description of Artificial Sequence: Synthetic oligonucleotide
  misc_feature 1..20: note = Target: SCN10A; (-) strand; PAM type: NRG; PAM sequence: AGG
  source 1..20: mol_type = other DNA
tatttaaggagaataagtca

SEQ ID NO: 15696 - DNA, 20 bp, synthetic construct
  misc_feature 1..20: note = Description of Artificial Sequence: Synthetic oligonucleotide
  misc_feature 1..20: note = Target: SCN10A; (-) strand; PAM type: NRG; PAM sequence: AAG
  source 1..20: mol_type = other DNA
gtatttaaggagaataagtc

SEQ ID NO: 15697 - DNA, 20 bp, synthetic construct
  misc_feature 1..20: note = Description of Artificial Sequence: Synthetic oligonucleotide
  misc_feature 1..20: note = Target: SCN10A; (-) strand; PAM type: NRG; PAM sequence: AAG
  source 1..20: mol_type = other DNA
gtatggtatttaaggagaat

SEQ ID NO: 15698 - DNA, 20 bp, synthetic construct
  misc_feature 1..20: note = Description of Artificial Sequence: Synthetic oligonucleotide
  misc_feature 1..20: note = Target: SCN10A; (-) strand; PAM type: NRG; PAM sequence: GAG
  source 1..20: mol_type = other DNA
ttttatgtatggtatttaag

SEQ ID NO: 15699 - DNA, 20 bp, synthetic construct
  misc_feature 1..20: note = Description of Artificial Sequence: Synthetic oligonucleotide
  misc_feature 1..20: note = Target: SCN10A; (-) strand; PAM type: NRG; PAM sequence: AGG
  source 1..20: mol_type = other DNA
tgttttatgtatggtattta

SEQ ID NO: 15700 - DNA, 20 bp, synthetic construct
  misc_feature 1..20: note = Description of Artificial Sequence: Synthetic oligonucleotide
  misc_feature 1..20: note = Target: SCN10A; (-) strand; PAM type: NRG; PAM sequence: AAG
  source 1..20: mol_type = other DNA
gtgttttatgtatggtattt

SEQ ID NO: 15701 - DNA, 20 bp, synthetic construct
  misc_feature 1..20: note = Description of Artificial Sequence: Synthetic oligonucleotide
  misc_feature 1..20: note = Target: SCN10A; (-) strand; PAM type: NRG; PAM sequence: TGG
  source 1..20: mol_type = other DNA
ttgtgtttgtgttttatgta

SEQ ID NO: 15702 - DNA, 20 bp, synthetic construct
  misc_feature 1..20: note = Description of Artificial Sequence: Synthetic oligonucleotide
  misc_feature 1..20: note = Target: SCN10A; (-) strand; PAM type: NRG; PAM sequence: CGG
  source 1..20: mol_type = other DNA
ttttcactggttcttgacca

SEQ ID NO: 15703 - DNA, 20 bp, synthetic construct
  misc_feature 1..20: note = Description of Artificial Sequence: Synthetic oligonucleotide
  misc_feature 1..20: note = Target: SCN10A; (-) strand; PAM type: NRG; PAM sequence: TGG
  source 1..20: mol_type = other DNA
atatggatttaggttttcac

SEQ ID NO: 15704 - DNA, 20 bp, synthetic construct
  misc_feature 1..20: note = Description of Artificial Sequence: Synthetic oligonucleotide
  misc_feature 1..20: note = Target: SCN10A; (-) strand; PAM type: NRG; PAM sequence: AGG
  source 1..20: mol_type = other DNA
tattttgtgaatatggattt

SEQ ID NO: 15705 - DNA, 20 bp, synthetic construct
  misc_feature 1..20: note = Description of Artificial Sequence: Synthetic oligonucleotide
  misc_feature 1..20: note = Target: SCN10A; (-) strand; PAM type: NRG; PAM sequence: TAG
  source 1..20: mol_type = other DNA
ctattttgtgaatatggatt

SEQ ID NO: 15706 - DNA, 20 bp, synthetic construct
  misc_feature 1..20: note = Description of Artificial Sequence: Synthetic oligonucleotide
  misc_feature 1..20: note = Target: SCN10A; (-) strand; PAM type: NRG; PAM sequence: TGG
  source 1..20: mol_type = other DNA
aataagctattttgtgaata

SEQ ID NO: 15707 - DNA, 20 bp, synthetic construct
  misc_feature 1..20: note = Description of Artificial Sequence: Synthetic oligonucleotide
  misc_feature 1..20: note = Target: SCN10A; (-) strand; PAM type: NRG; PAM sequence: AAG
  source 1..20: mol_type = other DNA
tcatttgcttatttacaaat

SEQ ID NO: 15708 - DNA, 20 bp, synthetic construct
  misc_feature 1..20: note = Description of Artificial Sequence: Synthetic oligonucleotide
  misc_feature 1..20: note = Target: SCN10A; (-) strand; PAM type: NRG; PAM sequence: TAG
  source 1..20: mol_type = other DNA
ttattctattttgtatctaa

SEQ ID NO: 15709 - DNA, 20 bp, synthetic construct
  misc_feature 1..20: note = Description of Artificial Sequence: Synthetic oligonucleotide
  misc_feature 1..20: note = Target: SCN10A; (-) strand; PAM type: NRG; PAM sequence: TAG
  source 1..20: mol_type = other DNA
ctaggacccgaagattgaaa

SEQ ID NO: 15710 - DNA, 20 bp, synthetic construct
  misc_feature 1..20: note = Description of Artificial Sequence: Synthetic oligonucleotide
  misc_feature 1..20: note = Target: SCN10A; (-) strand; PAM type: NRG; PAM sequence: AAG
  source 1..20: mol_type = other DNA
tttacaaacactaggacccg

SEQ ID NO: 15711 - DNA, 20 bp, synthetic construct
  misc_feature 1..20: note = Description of Artificial Sequence: Synthetic oligonucleotide
  misc_feature 1..20: note = Target: SCN10A; (-) strand; PAM type: NRG; PAM sequence: AGG
  source 1..20: mol_type = other DNA
cttgtacctttacaaacact

SEQ ID NO: 15712 - DNA, 20 bp, synthetic construct
  misc_feature 1..20: note = Description of Artificial Sequence: Synthetic oligonucleotide
  misc_feature 1..20: note = Target: SCN10A; (-) strand; PAM type: NRG; PAM sequence: TAG
  source 1..20: mol_type = other DNA
acttgtacctttacaaacac

SEQ ID NO: 15713 - DNA, 20 bp, synthetic construct
  misc_feature 1..20: note = Description of Artificial Sequence: Synthetic oligonucleotide
  misc_feature 1..20: note = Target: SCN10A; (-) strand; PAM type: NRG; PAM sequence: GGG
  source 1..20: mol_type = other DNA
atagcttcaaaaacaaaagt

SEQ ID NO: 15714 - DNA, 20 bp, synthetic construct
  misc_feature 1..20: note = Description of Artificial Sequence: Synthetic oligonucleotide
  misc_feature 1..20: note = Target: SCN10A; (-) strand; PAM type: NRG; PAM sequence: TGG
  source 1..20: mol_type = other DNA
catagcttcaaaaacaaaag

SEQ ID NO: 15715 - DNA, 20 bp, synthetic construct
  misc_feature 1..20: note = Description of Artificial Sequence: Synthetic oligonucleotide
  misc_feature 1..20: note = Target: SCN10A; (-) strand; PAM type: NRG; PAM sequence: AAG
  source 1..20: mol_type = other DNA
catcatagcttcaaaaacaa

SEQ ID NO: 15716 - DNA, 20 bp, synthetic construct
  misc_feature 1..20: note = Description of Artificial Sequence: Synthetic oligonucleotide
  misc_feature 1..20: note = Target: SCN10A; (-) strand; PAM type: NRG; PAM sequence: TAG
  source 1..20: mol_type = other DNA
ttggctggaagtagtcatca

SEQ ID NO: 15717 - DNA, 20 bp, synthetic construct
  misc_feature 1..20: note = Description of Artificial Sequence: Synthetic oligonucleotide
  misc_feature 1..20: note = Target: SCN10A; (-) strand; PAM type: NRG; PAM sequence: TAG
  source 1..20: mol_type = other DNA
ccactatcattggctggaag

SEQ ID NO: 15718 - DNA, 20 bp, synthetic construct
  misc_feature 1..20: note = Description of Artificial Sequence: Synthetic oligonucleotide
  misc_feature 1..20: note = Target: SCN10A; (-) strand; PAM type: NRG; PAM sequence: AAG
  source 1..20: mol_type = other DNA
gctccactatcattggctgg

SEQ ID NO: 15719 - DNA, 20 bp, synthetic construct
  misc_feature 1..20: note = Description of Artificial Sequence: Synthetic oligonucleotide
  misc_feature 1..20: note = Target: SCN10A; (-) strand; PAM type: NRG; PAM sequence: TGG
  source 1..20: mol_type = other DNA
tttgctccactatcattggc

SEQ ID NO: 15720 - DNA, 20 bp, synthetic construct
  misc_feature 1..20: note = Description of Artificial Sequence: Synthetic oligonucleotide
  misc_feature 1..20: note = Target: SCN10A; (-) strand; PAM type: NRG; PAM sequence: TGG
  source 1..20: mol_type = other DNA
ttgctttgctccactatcat

SEQ ID NO: 15721 - DNA, 20 bp, synthetic construct
  misc_feature 1..20: note = Description of Artificial Sequence: Synthetic oligonucleotide
  misc_feature 1..20: note = Target: SCN10A; (-) strand; PAM type: NRG; PAM sequence: AGG
  source 1..20: mol_type = other DNA
tggctccccagcagaaagta

SEQ ID NO: 15722 - DNA, 20 bp, synthetic construct
  misc_feature 1..20: note = Description of Artificial Sequence: Synthetic oligonucleotide
  misc_feature 1..20: note = Target: SCN10A; (-) strand; PAM type: NRG; PAM sequence: AAG
  source 1..20: mol_type = other DNA
atggctccccagcagaaagt

SEQ ID NO: 15723 - DNA, 20 bp, synthetic construct
  misc_feature 1..20: note = Description of Artificial Sequence: Synthetic oligonucleotide
  misc_feature 1..20: note = Target: SCN10A; (-) strand; PAM type: NRG; PAM sequence: AAG
  source 1..20: mol_type = other DNA
acaaatggctccccagcaga

SEQ ID NO: 15724 - DNA, 20 bp, synthetic construct
  misc_feature 1..20: note = Description of Artificial Sequence: Synthetic oligonucleotide
  misc_feature 1..20: note = Target: SCN10A; (-) strand; PAM type: NRG; PAM sequence: CAG
  source 1..20: mol_type = other DNA
aattacaaatggctccccag

SEQ ID NO: 15725 - DNA, 20 bp, synthetic construct
  misc_feature 1..20: note = Description of Artificial Sequence: Synthetic oligonucleotide
  misc_feature 1..20: note = Target: SCN10A; (-) strand; PAM type: NRG; PAM sequence: CAG
  source 1..20: mol_type = other DNA
cataattacaaatggctccc

SEQ ID NO: 15726 - DNA, 20 bp, synthetic construct
  misc_feature 1..20: note = Description of Artificial Sequence: Synthetic oligonucleotide
  misc_feature 1..20: note = Target: SCN10A; (-) strand; PAM type: NRG; PAM sequence: TGG
  source 1..20: mol_type = other DNA
ctcttcctcataattacaaa

SEQ ID NO: 15727 - DNA, 20 bp, synthetic construct
  misc_feature 1..20: note = Description of Artificial Sequence: Synthetic oligonucleotide
  misc_feature 1..20: note = Target: SCN10A; (-) strand; PAM type: NRG; PAM sequence: GAG
  source 1..20: mol_type = other DNA
acagccagagccttgtctta

SEQ ID NO: 15728 - DNA, 20 bp, synthetic construct
  misc_feature 1..20: note = Description of Artificial Sequence: Synthetic oligonucleotide
  misc_feature 1..20: note = Target: SCN10A; (-) strand; PAM type: NRG; PAM sequence: TAG
  source 1..20: mol_type = other DNA
tcacagccagagccttgtct

SEQ ID NO: 15729 - DNA, 20 bp, synthetic construct
  misc_feature 1..20: note = Description of Artificial Sequence: Synthetic oligonucleotide
  misc_feature 1..20: note = Target: SCN10A; (-) strand; PAM type: NRG; PAM sequence: GAG
  source 1..20: mol_type = other DNA
ggacagaatgctcacagcca

SEQ ID NO: 15730 - DNA, 20 bp, synthetic construct
  misc_feature 1..20: note = Description of Artificial Sequence: Synthetic oligonucleotide
  misc_feature 1..20: note = Target: SCN10A; (-) strand; PAM type: NRG; PAM sequence: CAG
  source 1..20: mol_type = other DNA
caggacagaatgctcacagc

SEQ ID NO: 15731 - DNA, 20 bp, synthetic construct
  misc_feature 1..20: note = Description of Artificial Sequence: Synthetic oligonucleotide
  misc_feature 1..20: note = Target: SCN10A; (-) strand; PAM type: NRG; PAM sequence: CAG
  source 1..20: mol_type = other DNA
ccgtcaggacagaatgctca

SEQ ID NO: 15732 - DNA, 20 bp, synthetic construct
  misc_feature 1..20: note = Description of Artificial Sequence: Synthetic oligonucleotide
  misc_feature 1..20: note = Target: SCN10A; (-) strand; PAM type: NRG; PAM sequence: CAG
  source 1..20: mol_type = other DNA
cctaactgcctccgtcagga

SEQ ID NO: 15733 - DNA, 20 bp, synthetic construct
  misc_feature 1..20: note = Description of Artificial Sequence: Synthetic oligonucleotide
  misc_feature 1..20: note = Target: SCN10A; (-) strand; PAM type: NRG; PAM sequence: AGG
  source 1..20: mol_type = other DNA
ttgccctaactgcctccgtc

SEQ ID NO: 15734 - DNA, 20 bp, synthetic construct
  misc_feature 1..20: note = Description of Artificial Sequence: Synthetic oligonucleotide
  misc_feature 1..20: note = Target: SCN10A; (-) strand; PAM type: NRG; PAM sequence: CAG
  source 1..20: mol_type = other DNA
cttgccctaactgcctccgt

SEQ ID NO: 15735 - DNA, 20 bp, synthetic construct
  misc_feature 1..20: note = Description of Artificial Sequence: Synthetic oligonucleotide
  misc_feature 1..20: note = Target: SCN10A; (-) strand; PAM type: NRG; PAM sequence: CAG
  source 1..20: mol_type = other DNA
ctttccttatccaccactgt

SEQ ID NO: 15736 - DNA, 20 bp, synthetic construct
  misc_feature 1..20: note = Description of Artificial Sequence: Synthetic oligonucleotide
  misc_feature 1..20: note = Target: SCN10A; (-) strand; PAM type: NRG; PAM sequence: AGG
  source 1..20: mol_type = other DNA
tcctacttaatgcaatcatc

SEQ ID NO: 15737 - DNA, 20 bp, synthetic construct
  misc_feature 1..20: note = Description of Artificial Sequence: Synthetic oligonucleotide
  misc_feature 1..20: note = Target: SCN10A; (-) strand; PAM type: NRG; PAM sequence: CAG
  source 1..20: mol_type = other DNA
ctcctacttaatgcaatcat

SEQ ID NO: 15738 - DNA, 20 bp, synthetic construct
  misc_feature 1..20: note = Description of Artificial Sequence: Synthetic oligonucleotide
  misc_feature 1..20: note = Target: SCN10A; (-) strand; PAM type: NRG; PAM sequence: TGG
  source 1..20: mol_type = other DNA
ttacctcagctgccacccac

SEQ ID NO: 15739 - DNA, 20 bp, synthetic construct
  misc_feature 1..20: note = Description of Artificial Sequence: Synthetic oligonucleotide
  misc_feature 1..20: note = Target: SCN10A; (-) strand; PAM type: NRG; PAM sequence: CAG
  source 1..20: mol_type = other DNA
acatcatcagctcattacct

SEQ ID NO: 15740 - DNA, 20 bp, synthetic construct
  misc_feature 1..20: note = Description of Artificial Sequence: Synthetic oligonucleotide
  misc_feature 1..20: note = Target: SCN10A; (-) strand; PAM type: NRG; PAM sequence: CAG
  source 1..20: mol_type = other DNA
tactccatgagtgacatcat

SEQ ID NO: 15741 - DNA, 20 bp, synthetic construct
  misc_feature 1..20: note = Description of Artificial Sequence: Synthetic oligonucleotide
  misc_feature 1..20: note = Target: SCN10A; (-) strand; PAM type: NRG; PAM sequence: GAG
  source 1..20: mol_type = other DNA
tctttcctctaatactccat

SEQ ID NO: 15742 - DNA, 20 bp, synthetic construct
  misc_feature 1..20: note = Description of Artificial Sequence: Synthetic oligonucleotide
  misc_feature 1..20: note = Target: SCN10A; (-) strand; PAM type: NRG; PAM sequence: GAG
  source 1..20: mol_type = other DNA
tctgtctttccatgacaaat

SEQ ID NO: 15743 - DNA, 20 bp, synthetic construct
  misc_feature 1..20: note = Description of Artificial Sequence: Synthetic oligonucleotide
  misc_feature 1..20: note = Target: SCN10A; (-) strand; PAM type: NRG; PAM sequence: AAG
  source 1..20: mol_type = other DNA
caacatctccagaacatccc

SEQ ID NO: 15744 - DNA, 20 bp, synthetic construct
  misc_feature 1..20: note = Description of Artificial Sequence: Synthetic oligonucleotide
  misc_feature 1..20: note = Target: SCN10A; (-) strand; PAM type: NRG; PAM sequence: CAG
  source 1..20: mol_type = other DNA
cctcttattgccaacatctc

SEQ ID NO: 15745 - DNA, 20 bp, synthetic construct
  misc_feature 1..20: note = Description of Artificial Sequence: Synthetic oligonucleotide
  misc_feature 1..20: note = Target: SCN10A; (-) strand; PAM type: NRG; PAM sequence: AAG
  source 1..20: mol_type = other DNA
atcctgaatcatcgctccac

SEQ ID NO: 15746 - DNA, 20 bp, synthetic construct
  misc_feature 1..20: note = Description of Artificial Sequence: Synthetic oligonucleotide
  misc_feature 1..20: note = Target: SCN10A; (-) strand; PAM type: NRG; PAM sequence: AAG
  source 1..20: mol_type = other DNA
caccccctttgctcttagtg

SEQ ID NO: 15747 - DNA, 20 bp, synthetic construct
  misc_feature 1..20: note = Description of Artificial Sequence: Synthetic oligonucleotide
  misc_feature 1..20: note = Target: SCN10A; (-) strand; PAM type: NRG; PAM sequence: TAG
  source 1..20: mol_type = other DNA
gacctcaccccctttgctct

SEQ ID NO: 15748 - DNA, 20 bp, synthetic construct
  misc_feature 1..20: note = Description of Artificial Sequence: Synthetic oligonucleotide
  misc_feature 1..20: note = Target: SCN10A; (-) strand; PAM type: NRG; PAM sequence: CAG
  source 1..20: mol_type = other DNA
atattacagccaccaggacc

SEQ ID NO: 15749 - DNA, 20 bp, synthetic construct
  misc_feature 1..20: note = Description of Artificial Sequence: Synthetic oligonucleotide
  misc_feature 1..20: note = Target: SCN10A; (-) strand; PAM type: NRG; PAM sequence: AGG
  source 1..20: mol_type = other DNA
ccataaatattacagccacc

SEQ ID NO: 15750 - DNA, 20 bp, synthetic construct
  misc_feature 1..20: note = Description of Artificial Sequence: Synthetic oligonucleotide
  misc_feature 1..20: note = Target: SCN10A; (-) strand; PAM type: NRG; PAM sequence: CAG
  source 1..20: mol_type = other DNA
cccataaatattacagccac

SEQ ID NO: 15751 - DNA, 20 bp, synthetic construct
  misc_feature 1..20: note = Description of Artificial Sequence: Synthetic oligonucleotide
  misc_feature 1..20: note = Target: SCN10A; (-) strand; PAM type: NRG; PAM sequence: CAG
  source 1..20: mol_type = other DNA
cttgtcacccataaatatta

SEQ ID NO: 15752 - DNA, 20 bp, synthetic construct
  misc_feature 1..20: note = Description of Artificial Sequence: Synthetic oligonucleotide
  misc_feature 1..20: note = Target: SCN10A; (-) strand; PAM type: NRG; PAM sequence: GGG
  source 1..20: mol_type = other DNA
tctctttcaagtctttttgt

SEQ ID NO: 15753 - DNA, 20 bp, synthetic construct
  misc_feature 1..20: note = Description of Artificial Sequence: Synthetic oligonucleotide
  misc_feature 1..20: note = Target: SCN10A; (-) strand; PAM type: NRG; PAM sequence: TGG
  source 1..20: mol_type = other DNA
ttctctttcaagtctttttg

SEQ ID NO: 15754 - DNA, 20 bp, synthetic construct
  misc_feature 1..20: note = Description of Artificial Sequence: Synthetic oligonucleotide
  misc_feature 1..20: note = Target: SCN10A; (-) strand; PAM type: NRG; PAM sequence: AAG
  source 1..20: mol_type = other DNA
aactctcttagttctctttc

SEQ ID NO: 15755 - DNA, 20 bp, synthetic construct
  misc_feature 1..20: note = Description of Artificial Sequence: Synthetic oligonucleotide
  misc_feature 1..20: note = Target: SCN10A; (-) strand; PAM type: NRG; PAM sequence: TAG
  source 1..20: mol_type = other DNA
gctgcatgtcctaactctct

SEQ ID NO: 15756 - DNA, 20 bp, synthetic construct
  misc_feature 1..20: note = Description of Artificial Sequence: Synthetic oligonucleotide
  misc_feature 1..20: note = Target: SCN10A; (-) strand; PAM type: NRG; PAM sequence: TGG
  source 1..20: mol_type = other DNA
acttcctgctctgactttgg

SEQ ID NO: 15757 - DNA, 20 bp, synthetic construct
  misc_feature 1..20: note = Description of Artificial Sequence: Synthetic oligonucleotide
  misc_feature 1..20: note = Target: SCN10A; (-) strand; PAM type: NRG; PAM sequence: TGG
  source 1..20: mol_type = other DNA
ttcacttcctgctctgactt

SEQ ID NO: 15758 - DNA, 20 bp, synthetic construct
  misc_feature 1..20: note = Description of Artificial Sequence: Synthetic oligonucleotide
  misc_feature 1..20: note = Target: SCN10A; (-) strand; PAM type: NRG; PAM sequence: GAG
  source 1..20: mol_type = other DNA
cacctccaaaggtaggctct

SEQ ID NO: 15759 - DNA, 20 bp, synthetic construct
  misc_feature 1..20: note = Description of Artificial Sequence: Synthetic oligonucleotide
  misc_feature 1..20: note = Target: SCN10A; (-) strand; PAM type: NRG; PAM sequence: AGG
  source 1..20: mol_type = other DNA
ggggccccacctccaaaggt

SEQ ID NO: 15760 - DNA, 20 bp, synthetic construct
  misc_feature 1..20: note = Description of Artificial Sequence: Synthetic oligonucleotide
  misc_feature 1..20: note = Target: SCN10A; (-) strand; PAM type: NRG; PAM sequence: TAG
  source 1..20: mol_type = other DNA
cggggccccacctccaaagg

SEQ ID NO: 15761 - DNA, 20 bp, synthetic construct
  misc_feature 1..20: note = Description of Artificial Sequence: Synthetic oligonucleotide
  misc_feature 1..20: note = Target: SCN10A; (-) strand; PAM type: NRG; PAM sequence: AGG
  source 1..20: mol_type = other DNA
ctccggggccccacctccaa

SEQ ID NO: 15762 - DNA, 20 bp, synthetic construct
  misc_feature 1..20: note = Description of Artificial Sequence: Synthetic oligonucleotide
  misc_feature 1..20: note = Target: SCN10A; (-) strand; PAM type: NRG; PAM sequence: AAG
  source 1..20: mol_type = other DNA
gctccggggccccacctcca

SEQ ID NO: 15763 - DNA, 20 bp, synthetic construct
  misc_feature 1..20: note = Description of Artificial Sequence: Synthetic oligonucleotide
  misc_feature 1..20: note = Target: SCN10A; (-) strand; PAM type: NRG; PAM sequence: GGG
  source 1..20: mol_type = other DNA
cccaccaaccctgagctccg

SEQ ID NO: 15764 - DNA, 20 bp, synthetic construct
  misc_feature 1..20: note = Description of Artificial Sequence: Synthetic oligonucleotide
  misc_feature 1..20: note = Target: SCN10A; (-) strand; PAM type: NRG; PAM sequence: GGG
  source 1..20: mol_type = other DNA
tcccaccaaccctgagctcc

SEQ ID NO: 15765 - DNA, 20 bp, synthetic construct
  misc_feature 1..20: note = Description of Artificial Sequence: Synthetic oligonucleotide
  misc_feature 1..20: note = Target: SCN10A; (-) strand; PAM type: NRG; PAM sequence: CGG
  source 1..20: mol_type = other DNA
atcccaccaaccctgagctc

SEQ ID NO: 15766 - DNA, 20 bp, synthetic construct
  misc_feature 1..20: note = Description of Artificial Sequence: Synthetic oligonucleotide
  misc_feature 1..20: note = Target: SCN10A; (-) strand; PAM type: NRG; PAM sequence: GAG
  source 1..20: mol_type = other DNA
ccctccatcccaccaaccct

SEQ ID NO: 15767 - DNA, 20 bp, synthetic construct
  misc_feature 1..20: note = Description of Artificial Sequence: Synthetic oligonucleotide
  misc_feature 1..20: note = Target: SCN10A; (-) strand; PAM type: NRG; PAM sequence: TGG
  source 1..20: mol_type = other DNA
cttctctggtctgcaggttt

SEQ ID NO: 15768 - DNA, 20 bp, synthetic construct
  misc_feature 1..20: note = Description of Artificial Sequence: Synthetic oligonucleotide
  misc_feature 1..20: note = Target: SCN10A; (-) strand; PAM type: NRG; PAM sequence: AGG
  source 1..20: mol_type = other DNA
aaaaaacttctctggtctgc

SEQ ID NO: 15769 - DNA, 20 bp, synthetic construct
  misc_feature 1..20: note = Description of Artificial Sequence: Synthetic oligonucleotide
  misc_feature 1..20: note = Target: SCN10A; (-) strand; PAM type: NRG; PAM sequence: CAG
  source 1..20: mol_type = other DNA
caaaaaacttctctggtctg

SEQ ID NO: 15770 - DNA, 20 bp, synthetic construct
  misc_feature 1..20: note = Description of Artificial Sequence: Synthetic oligonucleotide
  misc_feature 1..20: note = Target: SCN10A; (-) strand; PAM type: NRG; PAM sequence: TGG
  source 1..20: mol_type = other DNA
aaacaaacaaaaaacttctc

SEQ ID NO: 15771 - DNA, 20 bp, synthetic construct
  misc_feature 1..20: note = Description of Artificial Sequence: Synthetic oligonucleotide
  misc_feature 1..20: note = Target: SCN10A; (-) strand; PAM type: NRG; PAM sequence: GAG
  source 1..20: mol_type = other DNA
tccagcctgggtgacagagc

SEQ ID NO: 15772 - DNA, 20 bp, synthetic construct
  misc_feature 1..20: note = Description of Artificial Sequence: Synthetic oligonucleotide
  misc_feature 1..20: note = Target: SCN10A; (-) strand; PAM type: NRG; PAM sequence: GAG
  source 1..20: mol_type = other DNA
atactccagcctgggtgaca

SEQ ID NO: 15773 - DNA, 20 bp, synthetic construct
  misc_feature 1..20: note = Description of Artificial Sequence: Synthetic oligonucleotide
  misc_feature 1..20: note = Target: SCN10A; (-) strand; PAM type: NRG; PAM sequence: CAG
  source 1..20: mol_type = other DNA
ttatactccagcctgggtga

SEQ ID NO: 15774 - DNA, 20 bp, synthetic construct
  misc_feature 1..20: note = Description of Artificial Sequence: Synthetic oligonucleotide
  misc_feature 1..20: note = Target: SCN10A; (-) strand; PAM type: NRG; PAM sequence: GGG
  source 1..20: mol_type = other DNA
gtgccattatactccagcct

SEQ ID NO: 15775 - DNA, 20 bp, synthetic construct
  misc_feature 1..20: note = Description of Artificial Sequence: Synthetic oligonucleotide
  misc_feature 1..20: note = Target: SCN10A; (-) strand; PAM type: NRG; PAM sequence: TGG
  source 1..20: mol_type = other DNA
tgtgccattatactccagcc

SEQ ID NO: 15776 - DNA, 20 bp, synthetic construct
  misc_feature 1..20: note = Description of Artificial Sequence: Synthetic oligonucleotide
  misc_feature 1..20: note = Target: SCN10A; (-) strand; PAM type: NRG; PAM sequence: CAG
  source 1..20: mol_type = other DNA
gagattgtgccattatactc

SEQ ID NO: 15777 - DNA, 20 bp, synthetic construct
  misc_feature 1..20: note = Description of Artificial Sequence: Synthetic oligonucleotide
  misc_feature 1..20: note = Target: SCN10A; (-) strand; PAM type: NRG; PAM sequence: GAG
  source 1..20: mol_type = other DNA
aggtgtggtggtagtgagcc

SEQ ID NO: 15778 - DNA, 20 bp, synthetic construct
  misc_feature 1..20: note = Description of Artificial Sequence: Synthetic oligonucleotide
  misc_feature 1..20: note = Target: SCN10A; (-) strand; PAM type: NRG; PAM sequence: GAG
  source 1..20: mol_type = other DNA
ccacgaggtgtggtggtagt

SEQ ID NO: 15779 - DNA, 20 bp, synthetic construct
  misc_feature 1..20: note = Description of Artificial Sequence: Synthetic oligonucleotide
  misc_feature 1..20: note = Target: SCN10A; (-) strand; PAM type: NRG; PAM sequence: TAG
  source 1..20: mol_type = other DNA
accaccacgaggtgtggtgg

SEQ ID NO: 15780 - DNA, 20 bp, synthetic construct
  misc_feature 1..20: note = Description of Artificial Sequence: Synthetic oligonucleotide
  misc_feature 1..20: note = Target: SCN10A; (-) strand; PAM type: NRG; PAM sequence: TGG
  source 1..20: mol_type = other DNA
actaccaccacgaggtgtgg

SEQ ID NO: 15781 - DNA, 20 bp, synthetic construct
  misc_feature 1..20: note = Description of Artificial Sequence: Synthetic oligonucleotide
  misc_feature 1..20: note = Target: SCN10A; (-) strand; PAM type: NRG; PAM sequence: TGG
  source 1..20: mol_type = other DNA
atcactaccaccacgaggtg

SEQ ID NO: 15782 - DNA, 20 bp, synthetic construct
  misc_feature 1..20: note = Description of Artificial Sequence: Synthetic oligonucleotide
  misc_feature 1..20: note = Target: SCN10A; (-) strand; PAM type: NRG; PAM sequence: AGG
  source 1..20: mol_type = other DNA
caaaaatcactaccaccacg

SEQ ID NO: 15783 - DNA, 20 bp, synthetic construct
  misc_feature 1..20: note = Description of Artificial Sequence: Synthetic oligonucleotide
  misc_feature 1..20: note = Target: SCN10A; (-) strand; PAM type: NRG; PAM sequence: GAG
  source 1..20: mol_type = other DNA
acaaaaatcactaccaccac

SEQ ID NO: 15784 - DNA, 20 bp, synthetic construct
  misc_feature 1..20: note = Description of Artificial Sequence: Synthetic oligonucleotide
  misc_feature 1..20: note = Target: SCN10A; (-) strand; PAM type: NRG; PAM sequence: AAG
  source 1..20: mol_type = other DNA
cgaaaccctgtctctgctaa

SEQ ID NO: 15785 - DNA, 20 bp, synthetic construct
  misc_feature 1..20: note = Description of Artificial Sequence: Synthetic oligonucleotide
  misc_feature 1..20: note = Target: SCN10A; (-) strand; PAM type: NRG; PAM sequence: TGG
  source 1..20: mol_type = other DNA
ttaggagttcaaaaccaccc

SEQ ID NO: 15786 - DNA, 20 bp, synthetic construct
  misc_feature 1..20: note = Description of Artificial Sequence: Synthetic oligonucleotide
  misc_feature 1..20: note = Target: SCN10A; (-) strand; PAM type: NRG; PAM sequence: GAG
  source 1..20: mol_type = other DNA
ggcggatcacctgaggttag

SEQ ID NO: 15787 - DNA, 20 bp, synthetic construct
  misc_feature 1..20: note = Description of Artificial Sequence: Synthetic oligonucleotide
  misc_feature 1..20: note = Target: SCN10A; (-) strand; PAM type: NRG; PAM sequence: AGG
  source 1..20: mol_type = other DNA
cgggcggatcacctgaggtt

SEQ ID NO: 15788 - DNA, 20 bp, synthetic construct
  misc_feature 1..20: note = Description of Artificial Sequence: Synthetic oligonucleotide
  misc_feature 1..20: note = Target: SCN10A; (-) strand; PAM type: NRG; PAM sequence: TAG
  source 1..20: mol_type = other DNA
gcgggcggatcacctgaggt

SEQ ID NO: 15789 - DNA, 20 bp, synthetic construct
  misc_feature 1..20: note = Description of Artificial Sequence: Synthetic oligonucleotide
  misc_feature 1..20: note = Target: SCN10A; (-) strand; PAM type: NRG; PAM sequence: AGG
  source 1..20: mol_type = other DNA
tgaggcgggcggatcacctg

SEQ ID NO: 15790 - DNA, 20 bp, synthetic construct
  misc_feature 1..20: note = Description of Artificial Sequence: Synthetic oligonucleotide
  misc_feature 1..20: note = Target: SCN10A; (-) strand; PAM type: NRG; PAM sequence: GAG
  source 1..20: mol_type = other DNA
ctgaggcgggcggatcacct

SEQ ID NO: 15791 - DNA, 20 bp, synthetic construct
  misc_feature 1..20: note = Description of Artificial Sequence: Synthetic oligonucleotide
  misc_feature 1..20: note = Target: SCN10A; (-) strand; PAM type: NRG; PAM sequence: CGG
  source 1..20: mol_type = other DNA
ctttgggaggctgaggcggg

SEQ ID NO: 15792 - DNA, 20 bp, synthetic construct
  misc_feature 1..20: note = Description of Artificial Sequence: Synthetic oligonucleotide
  misc_feature 1..20: note = Target: SCN10A; (-) strand; PAM type: NRG; PAM sequence: GGG
  source 1..20: mol_type = other DNA
gcactttgggaggctgaggc

SEQ ID NO: 15793 - DNA, 20 bp, synthetic construct
  misc_feature 1..20: note = Description of Artificial Sequence: Synthetic oligonucleotide
  misc_feature 1..20: note = Target: SCN10A; (-) strand; PAM type: NRG; PAM sequence: CGG
  source 1..20: mol_type = other DNA
agcactttgggaggctgagg

SEQ ID NO: 15794 - DNA, 20 bp, synthetic construct
  misc_feature 1..20: note = Description of Artificial Sequence: Synthetic oligonucleotide
  misc_feature 1..20: note = Target: SCN10A; (-) strand; PAM type: NRG; PAM sequence: AGG
  source 1..20: mol_type = other DNA
cccagcactttgggaggctg

SEQ ID NO: 15795 - DNA, 20 bp, synthetic construct
  misc_feature 1..20: note = Description of Artificial Sequence: Synthetic oligonucleotide
  misc_feature 1..20: note = Target: SCN10A; (-) strand; PAM type: NRG; PAM sequence: GAG
  source 1..20: mol_type = other DNA
tcccagcactttgggaggct

SEQ ID NO: 15796 - DNA, 20 bp, synthetic construct
  misc_feature 1..20: note = Description of Artificial Sequence: Synthetic oligonucleotide
  misc_feature 1..20: note = Target: SCN10A; (-) strand; PAM type: NRG; PAM sequence: AGG
  source 1..20: mol_type = other DNA
tgtaatcccagcactttggg

SEQ ID NO: 15797 - DNA, 20 bp, synthetic construct
  misc_feature 1..20: note = Description of Artificial Sequence: Synthetic oligonucleotide
  misc_feature 1..20: note = Target: SCN10A; (-) strand; PAM type: NRG; PAM sequence: GAG
  source 1..20: mol_type = other DNA
ctgtaatcccagcactttgg

SEQ ID NO: 15798 - DNA, 20 bp, synthetic construct
  misc_feature 1..20: note = Description of Artificial Sequence: Synthetic oligonucleotide
  misc_feature 1..20: note = Target: SCN10A; (-) strand; PAM type: NRG; PAM sequence: GGG
  source 1..20: mol_type = other DNA
gcctgtaatcccagcacttt

SEQ ID NO: 15799 - DNA, 20 bp, synthetic construct
  misc_feature 1..20: note = Description of Artificial Sequence: Synthetic oligonucleotide
  misc_feature 1..20: note = Target: SCN10A; (-) strand; PAM type: NRG; PAM sequence: TGG
  source 1..20: mol_type = other DNA
tgcctgtaatcccagcactt

SEQ ID NO: 15800 - DNA, 20 bp, synthetic construct
  misc_feature 1..20: note = Description of Artificial Sequence: Synthetic oligonucleotide
  misc_feature 1..20: note = Target: SCN10A; (-) strand; PAM type: NRG; PAM sequence: CAG
  source 1..20: mol_type = other DNA
gtggttcatgcctgtaatcc

SEQ ID NO: 15801 - DNA, 20 bp, synthetic construct
  misc_feature 1..20: note = Description of Artificial Sequence: Synthetic oligonucleotide
  misc_feature 1..20: note = Target: SCN10A; (-) strand; PAM type: NRG; PAM sequence: TGG
  source 1..20: mol_type = other DNA
tctcatctggccaggcacgg

SEQ ID NO: 15802 - DNA, 20 bp, synthetic construct
  misc_feature 1..20: note = Description of Artificial Sequence: Synthetic oligonucleotide
  misc_feature 1..20: note = Target: SCN10A; (-) strand; PAM type: NRG; PAM sequence: CGG
  source 1..20: mol_type = other DNA
ttctctcatctggccaggca

SEQ ID NO: 15803 - DNA, 20 bp, synthetic construct
  misc_feature 1..20: note = Description of Artificial Sequence: Synthetic oligonucleotide
  misc_feature 1..20: note = Target: SCN10A; (-) strand; PAM type: NRG; PAM sequence: AGG
  source 1..20: mol_type = other DNA
aaaacttctctcatctggcc

SEQ ID NO: 15804 - DNA, 20 bp, synthetic construct
  misc_feature 1..20: note = Description of Artificial Sequence: Synthetic oligonucleotide
  misc_feature 1..20: note = Target: SCN10A; (-) strand; PAM type: NRG; PAM sequence: CAG
  source 1..20: mol_type = other DNA
caaaacttctctcatctggc

SEQ ID NO: 15805 - DNA, 20 bp, synthetic construct
  misc_feature 1..20: note = Description of Artificial Sequence: Synthetic oligonucleotide
  misc_feature 1..20: note = Target: SCN10A; (-) strand; PAM type: NRG; PAM sequence: TGG
  source 1..20: mol_type = other DNA
atctcaaaacttctctcatc

SEQ ID NO: 15806 - DNA, 20 bp, synthetic construct
  misc_feature 1..20: note = Description of Artificial Sequence: Synthetic oligonucleotide
  misc_feature 1..20: note = Target: SCN10A; (-) strand; PAM type: NRG; PAM sequence: AAG
  source 1..20: mol_type = other DNA
cgatttgaaggcatgcgggt

SEQ ID NO: 15807 - DNA, 20 bp, synthetic construct
  misc_feature 1..20: note = Description of Artificial Sequence: Synthetic oligonucleotide
  misc_feature 1..20: note = Target: SCN10A; (-) strand; PAM type: NRG; PAM sequence: GGG
  source 1..20: mol_type = other DNA
ttctcgatttgaaggcatgc

SEQ ID NO: 15808 - DNA, 20 bp, synthetic construct
  misc_feature 1..20: note = Description of Artificial Sequence: Synthetic oligonucleotide
  misc_feature 1..20: note = Target: SCN10A; (-) strand; PAM type: NRG; PAM sequence: CGG
  source 1..20: mol_type = other DNA
tttctcgatttgaaggcatg

SEQ ID NO: 15809 - DNA, 20 bp, synthetic construct
  misc_feature 1..20: note = Description of Artificial Sequence: Synthetic oligonucleotide
  misc_feature 1..20: note = Target: SCN10A; (-) strand; PAM type: NRG; PAM sequence: AGG
  source 1..20: mol_type = other DNA
cgggctctttctcgatttga

SEQ ID NO: 15810 - DNA, 20 bp, synthetic construct
  misc_feature 1..20: note = Description of Artificial Sequence: Synthetic oligonucleotide
  misc_feature 1..20: note = Target: SCN10A; (-) strand; PAM type: NRG; PAM sequence: AAG
  source 1..20: mol_type = other DNA
gcgggctctttctcgatttg

SEQ ID NO: 15811 - DNA, 20 bp, synthetic construct
  misc_feature 1..20: note = Description of Artificial Sequence: Synthetic oligonucleotide
  misc_feature 1..20: note = Target: SCN10A; (-) strand; PAM type: NRG; PAM sequence: GGG
  source 1..20: mol_type = other DNA
tcgcgctctgcggccactgc

SEQ ID NO: 15812 - DNA, 20 bp, synthetic construct
  misc_feature 1..20: note = Description of Artificial Sequence: Synthetic oligonucleotide
  misc_feature 1..20: note = Target: SCN10A; (-) strand; PAM type: NRG; PAM sequence: CGG
  source 1..20: mol_type = other DNA
ttcgcgctctgcggccactg

SEQ ID NO: 15813 - DNA, 20 bp, synthetic construct
  misc_feature 1..20: note = Description of Artificial Sequence: Synthetic oligonucleotide
  misc_feature 1..20: note = Target: SCN10A; (-) strand; PAM type: NRG; PAM sequence: CGG
  source 1..20: mol_type = other DNA
ttcgaacccttcgcgctctg

SEQ ID NO: 15814 - DNA, 20 bp, synthetic construct
  misc_feature 1..20: note = Description of Artificial Sequence: Synthetic oligonucleotide
  misc_feature 1..20: note = Target: SCN10A; (-) strand; PAM type: NRG; PAM sequence: AAG
  source 1..20: mol_type = other DNA
ttctgaagtggctcccatca

SEQ ID NO: 15815 - DNA, 20 bp, synthetic construct
  misc_feature 1..20: note = Description of Artificial Sequence: Synthetic oligonucleotide
  misc_feature 1..20: note = Target: SCN10A; (-) strand; PAM type: NRG; PAM sequence: TGG
  source 1..20: mol_type = other DNA
gattctggaatattctgaag

SEQ ID NO: 15816 - DNA, 20 bp, synthetic construct
  misc_feature 1..20: note = Description of Artificial Sequence: Synthetic oligonucleotide
  misc_feature 1..20: note = Target: SCN10A; (-) strand; PAM type: NRG; PAM sequence: AAG
  source 1..20: mol_type = other DNA
gaagattctggaatattctg

SEQ ID NO: 15817 - DNA, 20 bp, synthetic construct
  misc_feature 1..20: note = Description of Artificial Sequence: Synthetic oligonucleotide
  misc_feature 1..20: note = Target: SCN10A; (-) strand; PAM type: NRG; PAM sequence: TGG
  source 1..20: mol_type = other DNA
aagtctcacagcgaagattc

SEQ ID NO: 15818 - DNA, 20 bp, synthetic construct
  misc_feature 1..20: note = Description of Artificial Sequence: Synthetic oligonucleotide
  misc_feature 1..20: note = Target: SCN10A; (-) strand; PAM type: NRG; PAM sequence: AAG
  source 1..20: mol_type = other DNA
cactgataagtctcacagcg

SEQ ID NO: 15819 - DNA, 20 bp, synthetic construct
  misc_feature 1..20: note = Description of Artificial Sequence: Synthetic oligonucleotide
  misc_feature 1..20: note = Target: SCN10A; (-) strand; PAM type: NRG; PAM sequence: CAG
  source 1..20: mol_type = other DNA
gatctcactgataagtctca

SEQ ID NO: 15820 - DNA, 20 bp, synthetic construct
  misc_feature 1..20: note = Description of Artificial Sequence: Synthetic oligonucleotide
  misc_feature 1..20: note = Target: SCN10A; (-) strand; PAM type: NRG; PAM sequence: AAG
  source 1..20: mol_type = other DNA
tgcactcagatctcactgat

SEQ ID NO: 15821 - DNA, 20 bp, synthetic construct
  misc_feature 1..20: note = Description of Artificial Sequence: Synthetic oligonucleotide
  misc_feature 1..20: note = Target: SCN10A; (-) strand; PAM type: NRG; PAM sequence: CAG
  source 1..20: mol_type = other DNA
tttctgccctctcctgcact

SEQ ID NO: 15822 - DNA, 20 bp, synthetic construct
  misc_feature 1..20: note = Description of Artificial Sequence: Synthetic oligonucleotide
  misc_feature 1..20: note = Target: SCN10A; (-) strand; PAM type: NRG; PAM sequence: GAG
  source 1..20: mol_type = other DNA
actgcctttctggaaaccta

SEQ ID NO: 15823 - DNA, 20 bp, synthetic construct
  misc_feature 1..20: note = Description of Artificial Sequence: Synthetic oligonucleotide
  misc_feature 1..20: note = Target: SCN10A; (-) strand; PAM type: NRG; PAM sequence: TAG
  source 1..20: mol_type = other DNA
ggactgcctttctggaaacc

SEQ ID NO: 15824 - DNA, 20 bp, synthetic construct
  misc_feature 1..20: note = Description of Artificial Sequence: Synthetic oligonucleotide
  misc_feature 1..20: note = Target: SCN10A; (-) strand; PAM type: NRG; PAM sequence: TGG
  source 1..20: mol_type = other DNA
ttccacgaggactgcctttc

SEQ ID NO: 15825 - DNA, 20 bp, synthetic construct
  misc_feature 1..20: note = Description of Artificial Sequence: Synthetic oligonucleotide
  misc_feature 1..20: note = Target: SCN10A; (-) strand; PAM type: NRG; PAM sequence: AGG
  source 1..20: mol_type = other DNA
agttcctgtctccttccacg

SEQ ID NO: 15826 - DNA, 20 bp, synthetic construct
  misc_feature 1..20: note = Description of Artificial Sequence: Synthetic oligonucleotide
  misc_feature 1..20: note = Target: SCN10A; (-) strand; PAM type: NRG; PAM sequence: GAG
  source 1..20: mol_type = other DNA
gagttcctgtctccttccac

SEQ ID NO: 15827 - DNA, 20 bp, synthetic construct
  misc_feature 1..20: note = Description of Artificial Sequence: Synthetic oligonucleotide
  misc_feature 1..20: note = Target: SCN10A; (-) strand; PAM type: NRG; PAM sequence: GAG
  source 1..20: mol_type = other DNA
ggaatgggaggctgggcagg

SEQ ID NO: 15828 - DNA, 20 bp, synthetic construct
  misc_feature 1..20: note = Description of Artificial Sequence: Synthetic oligonucleotide
  misc_feature 1..20: note = Target: SCN10A; (-) strand; PAM type: NRG; PAM sequence: GGG
  source 1..20: mol_type = other DNA
taggaatgggaggctgggca

SEQ ID NO: 15829 - DNA, 20 bp, synthetic construct
  misc_feature 1..20: note = Description of Artificial Sequence: Synthetic oligonucleotide
  misc_feature 1..20: note = Target: SCN10A; (-) strand; PAM type: NRG; PAM sequence: AGG
  source 1..20: mol_type = other DNA
gtaggaatgggaggctgggc

SEQ ID NO: 15830 - DNA, 20 bp, synthetic construct
  misc_feature 1..20: note = Description of Artificial Sequence: Synthetic oligonucleotide
  misc_feature 1..20: note = Target: SCN10A; (-) strand; PAM type: NRG; PAM sequence: CAG
  source 1..20: mol_type = other DNA
tgtaggaatgggaggctggg

SEQ ID NO: 15831 - DNA, 20 bp, synthetic construct
  misc_feature 1..20: note = Description of Artificial Sequence: Synthetic oligonucleotide
  misc_feature 1..20: note = Target: SCN10A; (-) strand; PAM type: NRG; PAM sequence: GGG
  source 1..20: mol_type = other DNA
acgtgtaggaatgggaggct

SEQ ID NO: 15832 - DNA, 20 bp, synthetic construct
  misc_feature 1..20: note = Description of Artificial Sequence: Synthetic oligonucleotide
  misc_feature 1..20: note = Target: SCN10A; (-) strand; PAM type: NRG; PAM sequence: TGG
  source 1..20: mol_type = other DNA
gacgtgtaggaatgggaggc

SEQ ID NO: 15833 - DNA, 20 bp, synthetic construct
  misc_feature 1..20: note = Description of Artificial Sequence: Synthetic oligonucleotide
  misc_feature 1..20: note = Target: SCN10A; (-) strand; PAM type: NRG; PAM sequence: AGG
  source 1..20: mol_type = other DNA
cttagacgtgtaggaatggg

SEQ ID NO: 15834 - DNA, 20 bp, synthetic construct
  misc_feature 1..20: note = Description of Artificial Sequence: Synthetic oligonucleotide
  misc_feature 1..20: note = Target: SCN10A; (-) strand; PAM type: NRG; PAM sequence: GAG
  source 1..20: mol_type = other DNA
gcttagacgtgtaggaatgg

SEQ ID NO: 15835 - DNA, 20 bp, synthetic construct
  misc_feature 1..20: note = Description of Artificial Sequence: Synthetic oligonucleotide
  misc_feature 1..20: note = Target: SCN10A; (-) strand; PAM type: NRG; PAM sequence: GGG
  source 1..20: mol_type = other DNA
tggcttagacgtgtaggaat

SEQ ID NO: 15836 - DNA, 20 bp, synthetic construct
  misc_feature 1..20: note = Description of Artificial Sequence: Synthetic oligonucleotide
  misc_feature 1..20: note = Target: SCN10A; (-) strand; PAM type: NRG; PAM sequence: TGG
  source 1..20: mol_type = other DNA
atggcttagacgtgtaggaa

SEQ ID NO: 15837 - DNA, 20 bp, synthetic construct
  misc_feature 1..20: note = Description of Artificial Sequence: Synthetic oligonucleotide
  misc_feature 1..20: note = Target: SCN10A; (-) strand; PAM type: NRG; PAM sequence: AGG
  source 1..20: mol_type = other DNA
ggatgatggcttagacgtgt

SEQ ID NO: 15838 - DNA, 20 bp, synthetic construct
  misc_feature 1..20: note = Description of Artificial Sequence: Synthetic oligonucleotide
  misc_feature 1..20: note = Target: SCN10A; (-) strand; PAM type: NRG; PAM sequence: TAG
  source 1..20: mol_type = other DNA
aggatgatggcttagacgtg

SEQ ID NO: 15839 - DNA, 20 bp, synthetic construct
  misc_feature 1..20: note = Description of Artificial Sequence: Synthetic oligonucleotide
  misc_feature 1..20: note = Target: SCN10A; (-) strand; PAM type: NRG; PAM sequence: TAG
  source 1..20: mol_type = other DNA
tgggagctaggatgatggct

SEQ ID NO: 15840 - DNA, 20 bp, synthetic construct
  misc_feature 1..20: note = Description of Artificial Sequence: Synthetic oligonucleotide
  misc_feature 1..20: note = Target: SCN10A; (-) strand; PAM type: NRG; PAM sequence: TGG
  source 1..20: mol_type = other DNA
taaggtgggagctaggatga

SEQ ID NO: 15841 - DNA, 20 bp, synthetic construct
  misc_feature 1..20: note = Description of Artificial Sequence: Synthetic oligonucleotide
  misc_feature 1..20: note = Target: SCN10A; (-) strand; PAM type: NRG; PAM sequence: AGG
  source 1..20: mol_type = other DNA
ttccgaataaggtgggagct

SEQ ID NO: 15842 - DNA, 20 bp, synthetic construct
  misc_feature 1..20: note = Description of Artificial Sequence: Synthetic oligonucleotide
  misc_feature 1..20: note = Target: SCN10A; (-) strand; PAM type: NRG; PAM sequence: TAG
  source 1..20: mol_type = other DNA
gttccgaataaggtgggagc

SEQ ID NO: 15843 - DNA, 20 bp, synthetic construct
  misc_feature 1..20: note = Description of Artificial Sequence: Synthetic oligonucleotide
  misc_feature 1..20: note = Target: SCN10A; (-) strand; PAM type: NRG; PAM sequence: GAG
  source 1..20: mol_type = other DNA
tggagttccgaataaggtgg

SEQ ID NO: 15844 - DNA, 20 bp, synthetic construct
  misc_feature 1..20: note = Description of Artificial Sequence: Synthetic oligonucleotide
  misc_feature 1..20: note = Target: SCN10A; (-) strand; PAM type: NRG; PAM sequence: GGG
  source 1..20: mol_type = other DNA
attggagttccgaataaggt

SEQ ID NO: 15845 - DNA, 20 bp, synthetic construct
  misc_feature 1..20: note = Description of Artificial Sequence: Synthetic oligonucleotide
  misc_feature 1..20: note = Target: SCN10A; (-) strand; PAM type: NRG; PAM sequence: TGG
  source 1..20: mol_type = other DNA
cattggagttccgaataagg

SEQ ID NO: 15846 - DNA, 20 bp, synthetic construct
  misc_feature 1..20: note = Description of Artificial Sequence: Synthetic oligonucleotide
  misc_feature 1..20: note = Target: SCN10A; (-) strand; PAM type: NRG; PAM sequence: AGG
  source 1..20: mol_type = other DNA
tctcattggagttccgaata

SEQ ID NO: 15847 - DNA, 20 bp, synthetic construct
  misc_feature 1..20: note = Description of Artificial Sequence: Synthetic oligonucleotide
  misc_feature 1..20: note = Target: SCN10A; (-) strand; PAM type: NRG; PAM sequence: AAG
  source 1..20: mol_type = other DNA
ctctcattggagttccgaat

SEQ ID NO: 15848 - DNA, 20 bp, synthetic construct
  misc_feature 1..20: note = Description of Artificial Sequence: Synthetic oligonucleotide
  misc_feature 1..20: note = Target: SCN10A; (-) strand; PAM type: NRG; PAM sequence: GAG
  source 1..20: mol_type = other DNA
tctttctagacctctcattg

SEQ ID NO: 15849 - DNA, 20 bp, synthetic construct
  misc_feature 1..20: note = Description of Artificial Sequence: Synthetic oligonucleotide
  misc_feature 1..20: note = Target: SCN10A; (-) strand; PAM type: NRG; PAM sequence: TGG
  source 1..20: mol_type = other DNA
actctttctagacctctcat

SEQ ID NO: 15850 - DNA, 20 bp, synthetic construct
  misc_feature 1..20: note = Description of Artificial Sequence: Synthetic oligonucleotide
  misc_feature 1..20: note = Target: SCN10A; (-) strand; PAM type: NRG; PAM sequence: TAG
  source 1..20: mol_type = other DNA
ggaagagacaaaactctttc

SEQ ID NO: 15851 - DNA, 20 bp, synthetic construct
  misc_feature 1..20: note = Description of Artificial Sequence: Synthetic oligonucleotide
  misc_feature 1..20: note = Target: SCN10A; (-) strand; PAM type: NRG; PAM sequence: GAG
  source 1..20: mol_type = other DNA
aaatttttaataaaagggaa

SEQ ID NO: 15852 - DNA, 20 bp, synthetic construct
  misc_feature 1..20: note = Description of Artificial Sequence: Synthetic oligonucleotide
  misc_feature 1..20: note = Target: SCN10A; (-) strand; PAM type: NRG; PAM sequence: AAG
  source 1..20: mol_type = other DNA
taaaatttttaataaaaggg

SEQ ID NO: 15853 - DNA, 20 bp, synthetic construct
  misc_feature 1..20: note = Description of Artificial Sequence: Synthetic oligonucleotide
  misc_feature 1..20: note = Target: SCN10A; (-) strand; PAM type: NRG; PAM sequence: GGG
  source 1..20: mol_type = other DNA
gaataaaatttttaataaaa

SEQ ID NO: 15854 - DNA, 20 bp, synthetic construct
  misc_feature 1..20: note = Description of Artificial Sequence: Synthetic oligonucleotide
  misc_feature 1..20: note = Target: SCN10A; (-) strand; PAM type: NRG; PAM sequence: AGG
  source 1..20: mol_type = other DNA
tgaataaaatttttaataaa

SEQ ID NO: 15855 - DNA, 20 bp, synthetic construct
  misc_feature 1..20: note = Description of Artificial Sequence: Synthetic oligonucleotide
  misc_feature 1..20: note = Target: SCN10A; (-) strand; PAM type: NRG; PAM sequence: AAG
  source 1..20: mol_type = other DNA
gtgaataaaatttttaataa

SEQ ID NO: 15856 - DNA, 20 bp, synthetic construct
  misc_feature 1..20: note = Description of Artificial Sequence: Synthetic oligonucleotide
  misc_feature 1..20: note = Target: SCN10A; (-) strand; PAM type: NRG; PAM sequence: TGG
  source 1..20: mol_type = other DNA
gcccagattgtttaagagag

SEQ ID NO: 15857 - DNA, 20 bp, synthetic construct
  misc_feature 1..20: note = Description of Artificial Sequence: Synthetic oligonucleotide
  misc_feature 1..20: note = Target: SCN10A; (-) strand; PAM type: NRG; PAM sequence: GAG
  source 1..20: mol_type = other DNA
cttgcccagattgtttaaga

SEQ ID NO: 15858 - DNA, 20 bp, synthetic construct
  misc_feature 1..20: note = Description of Artificial Sequence: Synthetic oligonucleotide
  misc_feature 1..20: note = Target: SCN10A; (-) strand; PAM type: NRG; PAM sequence: GAG
  source 1..20: mol_type = other DNA
ttcttgcccagattgtttaa

SEQ ID NO: 15859 - DNA, 20 bp, synthetic construct
  misc_feature 1..20: note = Description of Artificial Sequence: Synthetic oligonucleotide
  misc_feature 1..20: note = Target: SCN10A; (-) strand; PAM type: NRG; PAM sequence: AAG
  source 1..20: mol_type = other DNA
ttttcttgcccagattgttt

SEQ ID NO: 15860 - DNA, 20 bp, synthetic construct
  misc_feature 1..20: note = Description of Artificial Sequence: Synthetic oligonucleotide
  misc_feature 1..20: note = Target: SCN10A; (-) strand; PAM type: NRG; PAM sequence: CAG
  source 1..20: mol_type = other DNA
gagactgagtttttcttgcc

SEQ ID NO: 15861 - DNA, 20 bp, synthetic construct
  misc_feature 1..20: note = Description of Artificial Sequence: Synthetic oligonucleotide
  misc_feature 1..20: note = Target: SCN10A; (-) strand; PAM type: NRG; PAM sequence: GAG
  source 1..20: mol_type = other DNA
ggttggtgatgttagagact

SEQ ID NO: 15862 - DNA, 20 bp, synthetic construct
  misc_feature 1..20: note = Description of Artificial Sequence: Synthetic oligonucleotide
  misc_feature 1..20: note = Target: SCN10A; (-) strand; PAM type: NRG; PAM sequence: GAG
  source 1..20: mol_type = other DNA
accagaggttggtgatgtta

SEQ ID NO: 15863 - DNA, 20 bp, synthetic construct
  misc_feature 1..20: note = Description of Artificial Sequence: Synthetic oligonucleotide
  misc_feature 1..20: note = Target: SCN10A; (-) strand; PAM type: NRG; PAM sequence: TAG
  source 1..20: mol_type = other DNA
gtaccagaggttggtgatgt

SEQ ID NO: 15864 - DNA, 20 bp, synthetic construct
  misc_feature 1..20: note = Description of Artificial Sequence: Synthetic oligonucleotide
  misc_feature 1..20: note = Target: SCN10A; (-) strand; PAM type: NRG; PAM sequence: TGG
  source 1..20: mol_type = other DNA
gccacctacgtaccagaggt

SEQ ID NO: 15865 - DNA, 20 bp, synthetic construct
  misc_feature 1..20: note = Description of Artificial Sequence: Synthetic oligonucleotide
  misc_feature 1..20: note = Target: SCN10A; (-) strand; PAM type: NRG; PAM sequence: AGG
  source 1..20: mol_type = other DNA
cttggccacctacgtaccag

SEQ ID NO: 15866 - DNA, 20 bp, synthetic construct
  misc_feature 1..20: note = Description of Artificial Sequence: Synthetic oligonucleotide
  misc_feature 1..20: note = Target: SCN10A; (-) strand; PAM type: NRG; PAM sequence: GAG
  source 1..20: mol_type = other DNA
gcttggccacctacgtacca

SEQ ID NO: 15867 - DNA, 20 bp, synthetic construct
  misc_feature 1..20: note = Description of Artificial Sequence: Synthetic oligonucleotide
  misc_feature 1..20: note = Target: SCN10A; (-) strand; PAM type: NRG; PAM sequence: CAG
  source 1..20: mol_type = other DNA
aagcttggccacctacgtac

SEQ ID NO: 15868 - DNA, 20 bp, synthetic construct
  misc_feature 1..20: note = Description of Artificial Sequence: Synthetic oligonucleotide
  misc_feature 1..20: note = Target: SCN10A; (-) strand; PAM type: NRG; PAM sequence: TGG
  source 1..20: mol_type = other DNA
gatttaatacactggaagct

SEQ ID NO: 15869 - DNA, 20 bp, synthetic construct
  misc_feature 1..20: note = Description of Artificial Sequence: Synthetic oligonucleotide
  misc_feature 1..20: note = Target: SCN10A; (-) strand; PAM type: NRG; PAM sequence: AAG
  source 1..20: mol_type = other DNA
gagttgatttaatacactgg

SEQ ID NO: 15870 - DNA, 20 bp, synthetic construct
  misc_feature 1..20: note = Description of Artificial Sequence: Synthetic oligonucleotide
  misc_feature 1..20: note = Target: SCN10A; (-) strand; PAM type: NRG; PAM sequence: TGG
  source 1..20: mol_type = other DNA
gaagagttgatttaatacac

SEQ ID NO: 15871 - DNA, 20 bp, synthetic construct
  misc_feature 1..20: note = Description of Artificial Sequence: Synthetic oligonucleotide
  misc_feature 1..20: note = Target: SCN10A; (-) strand; PAM type: NRG; PAM sequence: GAG
  source 1..20: mol_type = other DNA
gcccctagaaggaaaaggaa

SEQ ID NO: 15872 - DNA, 20 bp, synthetic construct
  misc_feature 1..20: note = Description of Artificial Sequence: Synthetic oligonucleotide
  misc_feature 1..20: note = Target: SCN10A; (-) strand; PAM type: NRG; PAM sequence: AAG
  source 1..20: mol_type = other DNA
ctgcccctagaaggaaaagg

SEQ ID NO: 15873 - DNA, 20 bp, synthetic construct
  misc_feature 1..20: note = Description of Artificial Sequence: Synthetic oligonucleotide
  misc_feature 1..20: note = Target: SCN10A; (-) strand; PAM type: NRG; PAM sequence: AGG
  source 1..20: mol_type = other DNA
ctgctgcccctagaaggaaa

SEQ ID NO: 15874 - DNA, 20 bp, synthetic construct
  misc_feature 1..20: note = Description of Artificial Sequence: Synthetic oligonucleotide
  misc_feature 1..20: note = Target: SCN10A; (-) strand; PAM type: NRG; PAM sequence: AAG
  source 1..20: mol_type = other DNA
actgctgcccctagaaggaa

SEQ ID NO: 15875 - DNA, 20 bp, synthetic construct
  misc_feature 1..20: note = Description of Artificial Sequence: Synthetic oligonucleotide
  misc_feature 1..20: note = Target: SCN10A; (-) strand; PAM type: NRG; PAM sequence: AGG
  source 1..20: mol_type = other DNA
gcctgactgctgcccctaga

SEQ ID NO: 15876 - DNA, 20 bp, synthetic construct
  misc_feature 1..20: note = Description of Artificial Sequence: Synthetic oligonucleotide
  misc_feature 1..20: note = Target: SCN10A; (-) strand; PAM type: NRG; PAM sequence: AAG
  source 1..20: mol_type = other DNA
ggcctgactgctgcccctag

SEQ ID NO: 15877 - DNA, 20 bp, synthetic construct
  misc_feature 1..20: note = Description of Artificial Sequence: Synthetic oligonucleotide
  misc_feature 1..20: note = Target: SCN10A; (-) strand; PAM type: NRG; PAM sequence: TAG
  source 1..20: mol_type = other DNA
tgaggcctgactgctgcccc

SEQ ID NO: 15878 - DNA, 20 bp, synthetic construct
  misc_feature 1..20: note = Description of Artificial Sequence: Synthetic oligonucleotide
  misc_feature 1..20: note = Target: SCN10A; (-) strand; PAM type: NRG; PAM sequence: AGG
  source 1..20: mol_type = other DNA
aatcagtttcaaggttgttg

SEQ ID NO: 15879 - DNA, 20 bp, synthetic construct
  misc_feature 1..20: note = Description of Artificial Sequence: Synthetic oligonucleotide
  misc_feature 1..20: note = Target: SCN10A; (-) strand; PAM type: NRG; PAM sequence: GAG
  source 1..20: mol_type = other DNA
aaatcagtttcaaggttgtt

SEQ ID NO: 15880 - DNA, 20 bp, synthetic construct
  misc_feature 1..20: note = Description of Artificial Sequence: Synthetic oligonucleotide
  misc_feature 1..20: note = Target: SCN10A; (-) strand; PAM type: NRG; PAM sequence: AGG
  source 1..20: mol_type = other DNA
gtctctgaaaatcagtttca

SEQ ID NO: 15881 - DNA, 20 bp, synthetic construct
  misc_feature 1..20: note = Description of Artificial Sequence: Synthetic oligonucleotide
  misc_feature 1..20: note = Target: SCN10A; (-) strand; PAM type: NRG; PAM sequence: AAG
  source 1..20: mol_type = other DNA
agtctctgaaaatcagtttc

SEQ ID NO: 15882 - DNA, 20 bp, synthetic construct
  misc_feature 1..20: note = Description of Artificial Sequence: Synthetic oligonucleotide
  misc_feature 1..20: note = Target: SCN10A; (-) strand; PAM type: NRG; PAM sequence: CAG
  source 1..20: mol_type = other DNA
gtctccaagtctctgaaaat

SEQ ID NO: 15883 - DNA, 20 bp, synthetic construct
  misc_feature 1..20: note = Description of Artificial Sequence: Synthetic oligonucleotide
  misc_feature 1..20: note = Target: SCN10A; (-) strand; PAM type: NRG; PAM sequence: AAG
  source 1..20: mol_type = other DNA
ggagggaacatcatgtctcc

SEQ ID NO: 15884 - DNA, 20 bp, synthetic construct
  misc_feature 1..20: note = Description of Artificial Sequence: Synthetic oligonucleotide
  misc_feature 1..20: note = Target: SCN10A; (-) strand; PAM type: NRG; PAM sequence: GGG
  source 1..20: mol_type = other DNA
tctcagcatagcccctagga

SEQ ID NO: 15885 - DNA, 20 bp, synthetic construct
  misc_feature 1..20: note = Description of Artificial Sequence: Synthetic oligonucleotide
  misc_feature 1..20: note = Target: SCN10A; (-) strand; PAM type: NRG; PAM sequence: AGG
  source 1..20: mol_type = other DNA
ctctcagcatagcccctagg

SEQ ID NO: 15886 - DNA, 20 bp, synthetic construct
  misc_feature 1..20: note = Description of Artificial Sequence: Synthetic oligonucleotide
  misc_feature 1..20: note = Target: SCN10A; (-) strand; PAM type: NRG; PAM sequence: GAG
  source 1..20: mol_type = other DNA
actctcagcatagcccctag

SEQ ID NO: 15887 - DNA, 20 bp, synthetic construct
  misc_feature 1..20: note = Description of Artificial Sequence: Synthetic oligonucleotide
  misc_feature 1..20: note = Target: SCN10A; (-) strand; PAM type: NRG; PAM sequence: AGG
  source 1..20: mol_type = other DNA
agactctcagcatagcccct

SEQ ID NO: 15888 - DNA, 20 bp, synthetic construct
  misc_feature 1..20: note = Description of Artificial Sequence: Synthetic oligonucleotide
  misc_feature 1..20: note = Target: SCN10A; (-) strand; PAM type: NRG; PAM sequence: TAG
  source 1..20: mol_type = other DNA
tagactctcagcatagcccc

SEQ ID NO: 15889 - DNA, 20 bp, synthetic construct
  misc_feature 1..20: note = Description of Artificial Sequence: Synthetic oligonucleotide
  misc_feature 1..20: note = Target: SCN10A; (-) strand; PAM type: NRG; PAM sequence: TAG
  source 1..20: mol_type = other DNA
ctcagaatagactctcagca

SEQ ID NO: 15890 - DNA, 20 bp, synthetic construct
  misc_feature 1..20: note = Description of Artificial Sequence: Synthetic oligonucleotide
  misc_feature 1..20: note = Target: SCN10A; (-) strand; PAM type: NRG; PAM sequence: CAG
  source 1..20: mol_type = other DNA
tattcctcagaatagactct

SEQ ID NO: 15891 - DNA, 20 bp, synthetic construct
  misc_feature 1..20: note = Description of Artificial Sequence: Synthetic oligonucleotide
  misc_feature 1..20: note = Target: SCN10A; (-) strand; PAM type: NRG; PAM sequence: TAG
  source 1..20: mol_type = other DNA
gattactatattcctcagaa

SEQ ID NO: 15892 - DNA, 20 bp, synthetic construct
  misc_feature 1..20: note = Description of Artificial Sequence: Synthetic oligonucleotide
  misc_feature 1..20: note = Target: SCN10A; (-) strand; PAM type: NRG; PAM sequence: CAG
  source 1..20: mol_type = other DNA
attcagattactatattcct

SEQ ID NO: 15893 - DNA, 20 bp, synthetic construct
  misc_feature 1..20: note = Description of Artificial Sequence: Synthetic oligonucleotide
  misc_feature 1..20: note = Target: SCN10A; (-) strand; PAM type: NRG; PAM sequence: CAG
  source 1..20: mol_type = other DNA
ttctctgagcaaatataatt

SEQ ID NO: 15894 - DNA, 20 bp, synthetic construct
  misc_feature 1..20: note = Description of Artificial Sequence: Synthetic oligonucleotide
  misc_feature 1..20: note = Target: SCN10A; (-) strand; PAM type: NRG; PAM sequence: GAG
  source 1..20: mol_type = other DNA
tctttccaccccacttctct

SEQ ID NO: 15895 - DNA, 20 bp, synthetic construct
  misc_feature 1..20: note = Description of Artificial Sequence: Synthetic oligonucleotide
  misc_feature 1..20: note = Target: SCN10A; (-) strand; PAM type: NRG; PAM sequence: TAG
  source 1..20: mol_type = other DNA
atcagggttcaaatgggaat

SEQ ID NO: 15896 - DNA, 20 bp, synthetic construct
  misc_feature 1..20: note = Description of Artificial Sequence: Synthetic oligonucleotide
  misc_feature 1..20: note = Target: SCN10A; (-) strand; PAM type: NRG; PAM sequence: GGG
  source 1..20: mol_type = other DNA
caaaaaatcagggttcaaat

SEQ ID NO: 15897 - DNA, 20 bp, synthetic construct
  misc_feature 1..20: note = Description of Artificial Sequence: Synthetic oligonucleotide
  misc_feature 1..20: note = Target: SCN10A; (-) strand; PAM type: NRG; PAM sequence: TGG
  source 1..20: mol_type = other DNA
acaaaaaatcagggttcaaa

SEQ ID NO: 15898 - DNA, 20 bp, synthetic construct
  misc_feature 1..20: note = Description of Artificial Sequence: Synthetic oligonucleotide
  misc_feature 1..20: note = Target: SCN10A; (-) strand; PAM type: NRG; PAM sequence: GGG
  source 1..20: mol_type = other DNA
cccaagctcacaaaaaatca

SEQ ID NO: 15899 - DNA, 20 bp, synthetic construct
  misc_feature 1..20: note = Description of Artificial Sequence: Synthetic oligonucleotide
  misc_feature 1..20: note = Target: SCN10A; (-) strand; PAM type: NRG; PAM sequence: AGG
  source 1..20: mol_type = other DNA
acccaagctcacaaaaaatc

SEQ ID NO: 15900 - DNA, 20 bp, synthetic construct
  misc_feature 1..20: note = Description of Artificial Sequence: Synthetic oligonucleotide
  misc_feature 1..20: note = Target: SCN10A; (-) strand; PAM type: NRG; PAM sequence: CAG
  source 1..20: mol_type = other DNA
aacccaagctcacaaaaaat

SEQ ID NO: 15901 - DNA, 20 bp, synthetic construct
  misc_feature 1..20: note = Description of Artificial Sequence: Synthetic oligonucleotide
  misc_feature 1..20: note = Target: SCN10A; (-) strand; PAM type: NRG; PAM sequence: AAG
  source 1..20: mol_type = other DNA
gactagccaggcactaaccc

SEQ ID NO: 15902 - DNA, 20 bp, synthetic construct
  misc_feature 1..20: note = Description of Artificial Sequence: Synthetic oligonucleotide
  misc_feature 1..20: note = Target: SCN10A; (-) strand; PAM type: NRG; PAM sequence: AGG
  source 1..20: mol_type = other DNA
gaaagtaccctggactagcc

SEQ ID NO: 15903 - DNA, 20 bp, synthetic construct
  misc_feature 1..20: note = Description of Artificial Sequence: Synthetic oligonucleotide
  misc_feature 1..20: note = Target: SCN10A; (-) strand; PAM type: NRG; PAM sequence: CAG
  source 1..20: mol_type = other DNA
tgaaagtaccctggactagc

SEQ ID NO: 15904 - DNA, 20 bp, synthetic construct
  misc_feature 1..20: note = Description of Artificial Sequence: Synthetic oligonucleotide
  misc_feature 1..20: note = Target: SCN10A; (-) strand; PAM type: NRG; PAM sequence: TAG
  source 1..20: mol_type = other DNA
agggtgaaagtaccctggac

SEQ ID NO: 15905 - DNA, 20 bp, synthetic construct
  misc_feature 1..20: note = Description of Artificial Sequence: Synthetic oligonucleotide
  misc_feature 1..20: note = Target: SCN10A; (-) strand; PAM type: NRG; PAM sequence: TGG
  source 1..20: mol_type = other DNA
tacaaagggtgaaagtaccc

SEQ ID NO: 15906 - DNA, 20 bp, synthetic construct
  misc_feature 1..20: note = Description of Artificial Sequence: Synthetic oligonucleotide
  misc_feature 1..20: note = Target: SCN10A; (-) strand; PAM type: NRG; PAM sequence: AAG
  source 1..20: mol_type = other DNA
tttcattttacaaagggtga

SEQ ID NO: 15907 - DNA, 20 bp, synthetic construct
  misc_feature 1..20: note = Description of Artificial Sequence: Synthetic oligonucleotide
  misc_feature 1..20: note = Target: SCN10A; (-) strand; PAM type: NRG; PAM sequence: GGG
  source 1..20: mol_type = other DNA
tgactttttcattttacaaa

SEQ ID NO: 15908 - DNA, 20 bp, synthetic construct
  misc_feature 1..20: note = Description of Artificial Sequence: Synthetic oligonucleotide
  misc_feature 1..20: note = Target: SCN10A; (-) strand; PAM type: NRG; PAM sequence: AGG
  source 1..20: mol_type = other DNA
ctgactttttcattttacaa

SEQ ID NO: 15909 - DNA, 20 bp, synthetic construct
  misc_feature 1..20: note = Description of Artificial Sequence: Synthetic oligonucleotide
  misc_feature 1..20: note = Target: SCN10A; (-) strand; PAM type: NRG; PAM sequence: AAG
  source 1..20: mol_type = other DNA
tctgactttttcattttaca

SEQ ID NO: 15910 - DNA, 20 bp, synthetic construct
  misc_feature 1..20: note = Description of Artificial Sequence: Synthetic oligonucleotide
  misc_feature 1..20: note = Target: SCN10A; (-) strand; PAM type: NRG; PAM sequence: TAG
  source 1..20: mol_type = other DNA
tcagaactttggaattctct

SEQ ID NO: 15911 - DNA, 20 bp, synthetic construct
  misc_feature 1..20: note = Description of Artificial Sequence: Synthetic oligonucleotide
  misc_feature 1..20: note = Target: SCN10A; (-) strand; PAM type: NRG; PAM sequence: TGG
  source 1..20: mol_type = other DNA
ctgcagagctatcagaactt

SEQ ID NO: 15912 - DNA, 20 bp, synthetic construct
  misc_feature 1..20: note = Description of Artificial Sequence: Synthetic oligonucleotide
  misc_feature 1..20: note = Target: SCN10A; (-) strand; PAM type: NRG; PAM sequence: CAG
  source 1..20: mol_type = other DNA
ttgaagaactgcagagctat

SEQ ID NO: 15913 - DNA, 20 bp, synthetic construct
  misc_feature 1..20: note = Description of Artificial Sequence: Synthetic oligonucleotide
  misc_feature 1..20: note = Target: SCN10A; (-) strand; PAM type: NRG; PAM sequence: GAG
  source 1..20: mol_type = other DNA
aaactttttgaagaactgca

SEQ ID NO: 15914 - DNA, 20 bp, synthetic construct
  misc_feature 1..20: note = Description of Artificial Sequence: Synthetic oligonucleotide
  misc_feature 1..20: note = Target: SCN10A; (-) strand; PAM type: NRG; PAM sequence: CAG
  source 1..20: mol_type = other DNA
agaaactttttgaagaactg

SEQ ID NO: 15915 - DNA, 20 bp, synthetic construct
  misc_feature 1..20: note = Description of Artificial Sequence: Synthetic oligonucleotide
  misc_feature 1..20: note = Target: SCN10A; (-) strand; PAM type: NRG; PAM sequence: AAG
  source 1..20: mol_type = other DNA
cccataccagaaactttttg

SEQ ID NO: 15916 - DNA, 20 bp, synthetic construct
  misc_feature 1..20: note = Description of Artificial Sequence: Synthetic oligonucleotide
  misc_feature 1..20: note = Target: SCN10A; (-) strand; PAM type: NRG; PAM sequence: CAG
  source 1..20: mol_type = other DNA
tagatctcatggacccatac

SEQ ID NO: 15917 - DNA, 20 bp, synthetic construct
  misc_feature 1..20: note = Description of Artificial Sequence: Synthetic oligonucleotide
  misc_feature 1..20: note = Target: SCN10A; (-) strand; PAM type: NRG; PAM sequence: TGG
  source 1..20: mol_type = other DNA
tctattgaagctagatctca

SEQ ID NO: 15918 - DNA, 20 bp, synthetic construct
  misc_feature 1..20: note = Description of Artificial Sequence: Synthetic oligonucleotide
  misc_feature 1..20: note = Target: SCN10A; (-) strand; PAM type: NRG; PAM sequence: TAG
  source 1..20: mol_type = other DNA
tctcagatatctattgaagc

SEQ ID NO: 15919 - DNA, 20 bp, synthetic construct
  misc_feature 1..20: note = Description of Artificial Sequence: Synthetic oligonucleotide
  misc_feature 1..20: note = Target: SCN10A; (-) strand; PAM type: NRG; PAM sequence: AAG
  source 1..20: mol_type = other DNA
tatatctcagatatctattg

SEQ ID NO: 15920 - DNA, 20 bp, synthetic construct
  misc_feature 1..20: note = Description of Artificial Sequence: Synthetic oligonucleotide
  misc_feature 1..20: note = Target: SCN10A; (-) strand; PAM type: NRG; PAM sequence: CAG
  source 1..20: mol_type = other DNA
acaagtcagtcattatatct

SEQ ID NO: 15921 - DNA, 20 bp, synthetic construct
  misc_feature 1..20: note = Description of Artificial Sequence: Synthetic oligonucleotide
  misc_feature 1..20: note = Target: SCN10A; (-) strand; PAM type: NRG; PAM sequence: CAG
  source 1..20: mol_type = other DNA
accaaaaggggctcacaagt

SEQ ID NO: 15922 - DNA, 20 bp, synthetic construct
  misc_feature 1..20: note = Description of Artificial Sequence: Synthetic oligonucleotide
  misc_feature 1..20: note = Target: SCN10A; (-) strand; PAM type: NRG; PAM sequence: AAG
  source 1..20: mol_type = other DNA
acagaccaaaaggggctcac

SEQ ID NO: 15923 - DNA, 20 bp, synthetic construct
  misc_feature 1..20: note = Description of Artificial Sequence: Synthetic oligonucleotide
  misc_feature 1..20: note = Target: SCN10A; (-) strand; PAM type: NRG; PAM sequence: GGG
  source 1..20: mol_type = other DNA
gaaaactgacagaccaaaag

SEQ ID NO: 15924 - DNA, 20 bp, synthetic construct
  misc_feature 1..20: note = Description of Artificial Sequence: Synthetic oligonucleotide
  misc_feature 1..20: note = Target: SCN10A; (-) strand; PAM type: NRG; PAM sequence: GGG
  source 1..20: mol_type = other DNA
agaaaactgacagaccaaaa

SEQ ID NO: 15925 - DNA, 20 bp, synthetic construct
  misc_feature 1..20: note = Description of Artificial Sequence: Synthetic oligonucleotide
  misc_feature 1..20: note = Target: SCN10A; (-) strand; PAM type: NRG; PAM sequence: AGG
  source 1..20: mol_type = other DNA
aagaaaactgacagaccaaa

SEQ ID NO: 15926 - DNA, 20 bp, synthetic construct
  misc_feature 1..20: note = Description of Artificial Sequence: Synthetic oligonucleotide
  misc_feature 1..20: note = Target: SCN10A; (-) strand; PAM type: NRG; PAM sequence: AAG
  source 1..20: mol_type = other DNA
aaagaaaactgacagaccaa

SEQ ID NO: 15927 - DNA, 20 bp, synthetic construct
  misc_feature 1..20: note = Description of Artificial Sequence: Synthetic oligonucleotide
  misc_feature 1..20: note = Target: SCN10A; (-) strand; PAM type: NRG; PAM sequence: CAG
  source 1..20: mol_type = other DNA
caccacttaaagaaaactga

SEQ ID NO: 15928 - DNA, 20 bp, synthetic construct
  misc_feature 1..20: note = Description of Artificial Sequence: Synthetic oligonucleotide
  misc_feature 1..20: note = Target: SCN10A; (-) strand; PAM type: NRG; PAM sequence: AAG
  source 1..20: mol_type = other DNA
agtctttggaccaccactta

SEQ ID NO: 15929 - DNA, 20 bp, synthetic construct
  misc_feature 1..20: note = Description of Artificial Sequence: Synthetic oligonucleotide
  misc_feature 1..20: note = Target: SCN10A; (-) strand; PAM type: NRG; PAM sequence: TGG
  source 1..20: mol_type = other DNA
tttctgtcctttgcagtctt

SEQ ID NO: 15930 - DNA, 20 bp, synthetic construct
  misc_feature 1..20: note = Description of Artificial Sequence: Synthetic oligonucleotide
  misc_feature 1..20: note = Target: SCN10A; (-) strand; PAM type: NRG; PAM sequence: CAG
  source 1..20: mol_type = other DNA
atgtaagtttctgtcctttg

SEQ ID NO: 15931 - DNA, 20 bp, synthetic construct
  misc_feature 1..20: note = Description of Artificial Sequence: Synthetic oligonucleotide
  misc_feature 1..20: note = Target: SCN10A; (-) strand; PAM type: NRG; PAM sequence: AAG
  source 1..20: mol_type = other DNA
caggggaacttttttcatgt

SEQ ID NO: 15932 - DNA, 20 bp, synthetic construct
  misc_feature 1..20: note = Description of Artificial Sequence: Synthetic oligonucleotide
  misc_feature 1..20: note = Target: SCN10A; (-) strand; PAM type: NRG; PAM sequence: GGG
  source 1..20: mol_type = other DNA
accttcaaagttcctagcag

SEQ ID NO: 15933 - DNA, 20 bp, synthetic construct
  misc_feature 1..20: note = Description of Artificial Sequence: Synthetic oligonucleotide
  misc_feature 1..20: note = Target: SCN10A; (-) strand; PAM type: NRG; PAM sequence: GGG
  source 1..20: mol_type = other DNA
caccttcaaagttcctagca

SEQ ID NO: 15934 - DNA, 20 bp, synthetic construct
  misc_feature 1..20: note = Description of Artificial Sequence: Synthetic oligonucleotide
  misc_feature 1..20: note = Target: SCN10A; (-) strand; PAM type: NRG; PAM sequence: AGG
  source 1..20: mol_type = other DNA
gcaccttcaaagttcctagc

SEQ ID NO: 15935 - DNA, 20 bp, synthetic construct
  misc_feature 1..20: note = Description of Artificial Sequence: Synthetic oligonucleotide
  misc_feature 1..20: note = Target: SCN10A; (-) strand; PAM type: NRG; PAM sequence: CAG
  source 1..20: mol_type = other DNA
ggcaccttcaaagttcctag

SEQ ID NO: 15936 - DNA, 20 bp, synthetic construct
  misc_feature 1..20: note = Description of Artificial Sequence: Synthetic oligonucleotide
  misc_feature 1..20: note = Target: SCN10A; (-) strand; PAM type: NRG; PAM sequence: TAG
  source 1..20: mol_type = other DNA
cctggcaccttcaaagttcc

SEQ ID NO: 15937 - DNA, 20 bp, synthetic construct
  misc_feature 1..20: note = Description of Artificial Sequence: Synthetic oligonucleotide
  misc_feature 1..20: note = Target: SCN10A; (-) strand; PAM type: NRG; PAM sequence: AAG
  source 1..20: mol_type = other DNA
acatctccctggcaccttca

SEQ ID NO: 15938 - DNA, 20 bp, synthetic construct
  misc_feature 1..20: note = Description of Artificial Sequence: Synthetic oligonucleotide
  misc_feature 1..20: note = Target: SCN10A; (-) strand; PAM type: NRG; PAM sequence: TGG
  source 1..20: mol_type = other DNA
ccgtatctatgacatctccc

SEQ ID NO: 15939 - DNA, 20 bp, synthetic construct
  misc_feature 1..20: note = Description of Artificial Sequence: Synthetic oligonucleotide
  misc_feature 1..20: note = Target: SCN10A; (-) strand; PAM type: NRG; PAM sequence: TAG
  source 1..20: mol_type = other DNA
gatctcacaggacagggtca

SEQ ID NO: 15940 - DNA, 20 bp, synthetic construct
  misc_feature 1..20: note = Description of Artificial Sequence: Synthetic oligonucleotide
  misc_feature 1..20: note = Target: SCN10A; (-) strand; PAM type: NRG; PAM sequence: GGG
  source 1..20: mol_type = other DNA
ggctaagatctcacaggaca

SEQ ID NO: 15941 - DNA, 20 bp, synthetic construct
  misc_feature 1..20: note = Description of Artificial Sequence: Synthetic oligonucleotide
  misc_feature 1..20: note = Target: SCN10A; (-) strand; PAM type: NRG; PAM sequence: AGG
  source 1..20: mol_type = other DNA
tggctaagatctcacaggac

SEQ ID NO: 15942 - DNA, 20 bp, synthetic construct
  misc_feature 1..20: note = Description of Artificial Sequence: Synthetic oligonucleotide
  misc_feature 1..20: note = Target: SCN10A; (-) strand; PAM type: NRG; PAM sequence: CAG
  source 1..20: mol_type = other DNA
gtggctaagatctcacagga

SEQ ID NO: 15943 - DNA, 20 bp, synthetic construct
  misc_feature 1..20: note = Description of Artificial Sequence: Synthetic oligonucleotide
  misc_feature 1..20: note = Target: SCN10A; (-) strand; PAM type: NRG; PAM sequence: AGG
  source 1..20: mol_type = other DNA
tggtgtggctaagatctcac

SEQ ID NO: 15944 - DNA, 20 bp, synthetic construct
  misc_feature 1..20: note = Description of Artificial Sequence: Synthetic oligonucleotide
  misc_feature 1..20: note = Target: SCN10A; (-) strand; PAM type: NRG; PAM sequence: CAG
  source 1..20: mol_type = other DNA
gtggtgtggctaagatctca

SEQ ID NO: 15945 - DNA, 20 bp, synthetic construct
  misc_feature 1..20: note = Description of Artificial Sequence: Synthetic oligonucleotide
  misc_feature 1..20: note = Target: SCN10A; (-) strand; PAM type: NRG; PAM sequence: AAG
  source 1..20: mol_type = other DNA
ccaccatctgtggtgtggct

SEQ ID NO: 15946 - DNA, 20 bp, synthetic construct
  misc_feature 1..20: note = Description of Artificial Sequence: Synthetic oligonucleotide
  misc_feature 1..20: note = Target: SCN10A; (-) strand; PAM type: NRG; PAM sequence: TGG
  source 1..20: mol_type = other DNA
tcagcccaccatctgtggtg

SEQ ID NO: 15947 - DNA, 20 bp, synthetic construct
  misc_feature 1..20: note = Description of Artificial Sequence: Synthetic oligonucleotide
  misc_feature 1..20: note = Target: SCN10A; (-) strand; PAM type: NRG; PAM sequence: TGG
  source 1..20: mol_type = other DNA
tgaattcagcccaccatctg

SEQ ID NO: 15948 - DNA, 20 bp, synthetic construct
  misc_feature 1..20: note = Description of Artificial Sequence: Synthetic oligonucleotide
  misc_feature 1..20: note = Target: SCN10A; (-) strand; PAM type: NRG; PAM sequence: CAG
  source 1..20: mol_type = other DNA
ggataagctgagcctgaatt

SEQ ID NO: 15949 - DNA, 20 bp, synthetic construct
  misc_feature 1..20: note = Description of Artificial Sequence: Synthetic oligonucleotide
  misc_feature 1..20: note = Target: SCN10A; (-) strand; PAM type: NRG; PAM sequence: GAG
  source 1..20: mol_type = other DNA
cctaactgccaggataagct

SEQ ID NO: 15950 - DNA, 20 bp, synthetic construct
  misc_feature 1..20: note = Description of Artificial Sequence: Synthetic oligonucleotide
  misc_feature 1..20: note = Target: SCN10A; (-) strand; PAM type: NRG; PAM sequence: AAG
  source 1..20: mol_type = other DNA
tcccacctaactgccaggat

SEQ ID NO: 15951 - DNA, 20 bp, synthetic construct
  misc_feature 1..20: note = Description of Artificial Sequence: Synthetic oligonucleotide
  misc_feature 1..20: note = Target: SCN10A; (-) strand; PAM type: NRG; PAM sequence: AGG
  source 1..20: mol_type = other DNA
gtgcatcccacctaactgcc

SEQ ID NO: 15952 - DNA, 20 bp, synthetic construct
  misc_feature 1..20: note = Description of Artificial Sequence: Synthetic oligonucleotide
  misc_feature 1..20: note = Target: SCN10A; (-) strand; PAM type: NRG; PAM sequence: CAG
  source 1..20: mol_type = other DNA
tgtgcatcccacctaactgc

SEQ ID NO: 15953 - DNA, 20 bp, synthetic construct
  misc_feature 1..20: note = Description of Artificial Sequence: Synthetic oligonucleotide
  misc_feature 1..20: note = Target: SCN10A; (-) strand; PAM type: NRG; PAM sequence: AAG
  source 1..20: mol_type = other DNA
tataaagcccttcttttctg

SEQ ID NO: 15954 - DNA, 20 bp, synthetic construct
  misc_feature 1..20: note = Description of Artificial Sequence: Synthetic oligonucleotide
  misc_feature 1..20: note = Target: SCN10A; (-) strand; PAM type: NRG; PAM sequence: AAG
  source 1..20: mol_type = other DNA
ggctctgccactcaagtata

SEQ ID NO: 15955 - DNA, 20 bp, synthetic construct
  misc_feature 1..20: note = Description of Artificial Sequence: Synthetic oligonucleotide
  misc_feature 1..20: note = Target: SCN10A; (-) strand; PAM type: NRG; PAM sequence: AAG
  source 1..20: mol_type = other DNA
tgcttggggctctgccactc

SEQ ID NO: 15956 - DNA, 20 bp, synthetic construct
  misc_feature 1..20: note = Description of Artificial Sequence: Synthetic oligonucleotide
  misc_feature 1..20: note = Target: SCN10A; (-) strand; PAM type: NRG; PAM sequence: GGG
  source 1..20: mol_type = other DNA
caaagaatggacattgcttg

SEQ ID NO: 15957 - DNA, 20 bp, synthetic construct
  misc_feature 1..20: note = Description of Artificial Sequence: Synthetic oligonucleotide
  misc_feature 1..20: note = Target: SCN10A; (-) strand; PAM type: NRG; PAM sequence: GGG
  source 1..20: mol_type = other DNA
ccaaagaatggacattgctt

SEQ ID NO: 15958 - DNA, 20 bp, synthetic construct
  misc_feature 1..20: note = Description of Artificial Sequence: Synthetic oligonucleotide
  misc_feature 1..20: note = Target: SCN10A; (-) strand; PAM type: NRG; PAM sequence: TGG
  source 1..20: mol_type = other DNA
tccaaagaatggacattgct

SEQ ID NO: 15959 - DNA, 20 bp, synthetic construct
  misc_feature 1..20: note = Description of Artificial Sequence: Synthetic oligonucleotide
  misc_feature 1..20: note = Target: SCN10A; (-) strand; PAM type: NRG; PAM sequence: TGG
  source 1..20: mol_type = other DNA
taagccactcatccaaagaa

SEQ ID NO: 15960 - DNA, 20 bp, synthetic construct
  misc_feature 1..20: note = Description of Artificial Sequence: Synthetic oligonucleotide
  misc_feature 1..20: note = Target: SCN10A; (-) strand; PAM type: NRG; PAM sequence: AAG
  source 1..20: mol_type = other DNA
tgcaataagccactcatcca

SEQ ID NO: 15961 - DNA, 20 bp, synthetic construct
  misc_feature 1..20: note = Description of Artificial Sequence: Synthetic oligonucleotide
  misc_feature 1..20: note = Target: SCN10A; (-) strand; PAM type: NRG; PAM sequence: AAG
  source 1..20: mol_type = other DNA
gttctttgtcctggtgcaat

SEQ ID NO: 15962 - DNA, 20 bp, synthetic construct
  misc_feature 1..20: note = Description of Artificial Sequence: Synthetic oligonucleotide
  misc_feature 1..20: note = Target: SCN10A; (-) strand; PAM type: NRG; PAM sequence: TGG
  source 1..20: mol_type = other DNA
tccattccggttctttgtcc

SEQ ID NO: 15963 - DNA, 20 bp, synthetic construct
  misc_feature 1..20: note = Description of Artificial Sequence: Synthetic oligonucleotide
  misc_feature 1..20: note = Target: SCN10A; (-) strand; PAM type: NRG; PAM sequence: CGG
  source 1..20: mol_type = other DNA
gaagagggtcccttccattc

SEQ ID NO: 15964 - DNA, 20 bp, synthetic construct
  misc_feature 1..20: note = Description of Artificial Sequence: Synthetic oligonucleotide
  misc_feature 1..20: note = Target: SCN10A; (-) strand; PAM type: NRG; PAM sequence: GGG
  source 1..20: mol_type = other DNA
cttgcatgaatgaaggaaga

SEQ ID NO: 15965 - DNA, 20 bp, synthetic construct
  misc_feature 1..20: note = Description of Artificial Sequence: Synthetic oligonucleotide
  misc_feature 1..20: note = Target: SCN10A; (-) strand; PAM type: NRG; PAM sequence: AGG
  source 1..20: mol_type = other DNA
ccttgcatgaatgaaggaag

SEQ ID NO: 15966 - DNA, 20 bp, synthetic construct
  misc_feature 1..20: note = Description of Artificial Sequence: Synthetic oligonucleotide
  misc_feature 1..20: note = Target: SCN10A; (-) strand; PAM type: NRG; PAM sequence: GAG
  source 1..20: mol_type = other DNA
gccttgcatgaatgaaggaa

SEQ ID NO: 15967 - DNA, 20 bp, synthetic construct
  misc_feature 1..20: note = Description of Artificial Sequence: Synthetic oligonucleotide
  misc_feature 1..20: note = Target: SCN10A; (-) strand; PAM type: NRG; PAM sequence: AAG
  source 1..20: mol_type = other DNA
gagccttgcatgaatgaagg

SEQ ID NO: 15968 - DNA, 20 bp, synthetic construct
  misc_feature 1..20: note = Description of Artificial Sequence: Synthetic oligonucleotide
  misc_feature 1..20: note = Target: SCN10A; (-) strand; PAM type: NRG; PAM sequence: AGG
  source 1..20: mol_type = other DNA
ctggagccttgcatgaatga

SEQ ID NO: 15969 - DNA, 20 bp, synthetic construct
  misc_feature 1..20: note = Description of Artificial Sequence: Synthetic oligonucleotide
  misc_feature 1..20: note = Target: SCN10A; (-) strand; PAM type: NRG; PAM sequence: AAG
  source 1..20: mol_type = other DNA
tctggagccttgcatgaatg

SEQ ID NO: 15970 - DNA, 20 bp, synthetic construct
  misc_feature 1..20: note = Description of Artificial Sequence: Synthetic oligonucleotide
  misc_feature 1..20: note = Target: SCN10A; (-) strand; PAM type: NRG; PAM sequence: GAG
  source 1..20: mol_type = other DNA
gtctcacctgctgatgtctg

SEQ ID NO: 15971 - DNA, 20 bp, synthetic construct
  misc_feature 1..20: note = Description of Artificial Sequence: Synthetic oligonucleotide
  misc_feature 1..20: note = Target: SCN10A; (-) strand; PAM type: NRG; PAM sequence: TGG
  source 1..20: mol_type = other DNA
gggtctcacctgctgatgtc

SEQ ID NO: 15972 - DNA, 20 bp, synthetic construct
  misc_feature 1..20: note = Description of Artificial Sequence: Synthetic oligonucleotide
  misc_feature 1..20: note = Target: SCN10A; (-) strand; PAM type: NRG; PAM sequence: GGG
  source 1..20: mol_type = other DNA
cctcatgcacccaggcagct

SEQ ID NO: 15973 - DNA, 20 bp, synthetic construct
  misc_feature 1..20: note = Description of Artificial Sequence: Synthetic oligonucleotide
  misc_feature 1..20: note = Target: SCN10A; (-) strand; PAM type: NRG; PAM sequence: TGG
  source 1..20: mol_type = other DNA
ccctcatgcacccaggcagc

SEQ ID NO: 15974 - DNA, 20 bp, synthetic construct
  misc_feature 1..20: note = Description of Artificial Sequence: Synthetic oligonucleotide
  misc_feature 1..20: note = Target: SCN10A; (-) strand; PAM type: NRG; PAM sequence: CAG
  source 1..20: mol_type = other DNA
cctaccctcatgcacccagg

SEQ ID NO: 15975 - DNA, 20 bp, synthetic construct
  misc_feature 1..20: note = Description of Artificial Sequence: Synthetic oligonucleotide
  misc_feature 1..20: note = Target: SCN10A; (-) strand; PAM type: NRG; PAM sequence: AGG
  source 1..20: mol_type = other DNA
ctccctaccctcatgcaccc

SEQ ID NO: 15976 - DNA, 20 bp, synthetic construct
  misc_feature 1..20: note = Description of Artificial Sequence: Synthetic oligonucleotide
  misc_feature 1..20: note = Target: SCN10A; (-) strand; PAM type: NRG; PAM sequence: CAG
  source 1..20: mol_type = other DNA
cctccctaccctcatgcacc

SEQ ID NO: 15977 - DNA, 20 bp, synthetic construct
  misc_feature 1..20: note = Description of Artificial Sequence: Synthetic oligonucleotide
  misc_feature 1..20: note = Target: SCN10A; (-) strand; PAM type: NRG; PAM sequence: TGG
  source 1..20: mol_type = other DNA
aatagggttcagcatggaac

SEQ ID NO: 15978 - DNA, 20 bp, synthetic construct
  misc_feature 1..20: note = Description of Artificial Sequence: Synthetic oligonucleotide
  misc_feature 1..20: note = Target: SCN10A; (-) strand; PAM type: NRG; PAM sequence: TGG
  source 1..20: mol_type = other DNA
agactgaatagggttcagca

SEQ ID NO: 15979 - DNA, 20 bp, synthetic construct
  misc_feature 1..20: note = Description of Artificial Sequence: Synthetic oligonucleotide
  misc_feature 1..20: note = Target: SCN10A; (-) strand; PAM type: NRG; PAM sequence: CAG
  source 1..20: mol_type = other DNA
gcaaaagactgaatagggtt

SEQ ID NO: 15980 - DNA, 20 bp, synthetic construct
  misc_feature 1..20: note = Description of Artificial Sequence: Synthetic oligonucleotide
  misc_feature 1..20: note = Target: SCN10A; (-) strand; PAM type: NRG; PAM sequence: GGG
  source 1..20: mol_type = other DNA
gctgagcaaaagactgaata

SEQ ID NO: 15981 - DNA, 20 bp, synthetic construct
  misc_feature 1..20: note = Description of Artificial Sequence: Synthetic oligonucleotide
  misc_feature 1..20: note = Target: SCN10A; (-) strand; PAM type: NRG; PAM sequence: AGG
  source 1..20: mol_type = other DNA
ggctgagcaaaagactgaat

SEQ ID NO: 15982 - DNA, 20 bp, synthetic construct
  misc_feature 1..20: note = Description of Artificial Sequence: Synthetic oligonucleotide
  misc_feature 1..20: note = Target: SCN10A; (-) strand; PAM type: NRG; PAM sequence: TAG
  source 1..20: mol_type = other DNA
gggctgagcaaaagactgaa

SEQ ID NO: 15983 - DNA, 20 bp, synthetic construct
  misc_feature 1..20: note = Description of Artificial Sequence: Synthetic oligonucleotide
  misc_feature 1..20: note = Target: SCN10A; (-) strand; PAM type: NRG; PAM sequence: AAG
  source 1..20: mol_type = other DNA
cttcccagggggctgagcaa

SEQ ID NO: 15984 - DNA, 20 bp, synthetic construct
  misc_feature 1..20: note = Description of Artificial Sequence: Synthetic oligonucleotide
  misc_feature 1..20: note = Target: SCN10A; (-) strand; PAM type: NRG; PAM sequence: GAG
  source 1..20: mol_type = other DNA
ggcagacttcccagggggct

SEQ ID NO: 15985 - DNA, 20 bp, synthetic construct
  misc_feature 1..20: note = Description of Artificial Sequence: Synthetic oligonucleotide
  misc_feature 1..20: note = Target: SCN10A; (-) strand; PAM type: NRG; PAM sequence: GGG
  source 1..20: mol_type = other DNA
tgtgaggcagacttcccagg

SEQ ID NO: 15986 - DNA, 20 bp, synthetic construct
  misc_feature 1..20: note = Description of Artificial Sequence: Synthetic oligonucleotide
  misc_feature 1..20: note = Target: SCN10A; (-) strand; PAM type: NRG; PAM sequence: GGG
  source 1..20: mol_type = other DNA
atgtgaggcagacttcccag

SEQ ID NO: 15987 - DNA, 20 bp, synthetic construct
  misc_feature 1..20: note = Description of Artificial Sequence: Synthetic oligonucleotide
  misc_feature 1..20: note = Target: SCN10A; (-) strand; PAM type: NRG; PAM sequence: GGG
  source 1..20: mol_type = other DNA
catgtgaggcagacttccca

SEQ ID NO: 15988 - DNA, 20 bp, synthetic construct
  misc_feature 1..20: note = Description of Artificial Sequence: Synthetic oligonucleotide
  misc_feature 1..20: note = Target: SCN10A; (-) strand; PAM type: NRG; PAM sequence: AGG
  source 1..20: mol_type = other DNA
ccatgtgaggcagacttccc

SEQ ID NO: 15989 - DNA, 20 bp, synthetic construct
  misc_feature 1..20: note = Description of Artificial Sequence: Synthetic oligonucleotide
  misc_feature 1..20: note = Target: SCN10A; (-) strand; PAM type: NRG; PAM sequence: CAG
  source 1..20: mol_type = other DNA
tccatgtgaggcagacttcc

SEQ ID NO: 15990 - DNA, 20 bp, synthetic construct
  misc_feature 1..20: note = Description of Artificial Sequence: Synthetic oligonucleotide
  misc_feature 1..20: note = Target: SCN10A; (-) strand; PAM type: NRG; PAM sequence: CAG
  source 1..20: mol_type = other DNA
tgcagattatccatgtgagg

SEQ ID NO: 15991 - DNA, 20 bp, synthetic construct
  misc_feature 1..20: note = Description of Artificial Sequence: Synthetic oligonucleotide
  misc_feature 1..20: note = Target: SCN10A; (-) strand; PAM type: NRG; PAM sequence: AGG
  source 1..20: mol_type = other DNA
agctgcagattatccatgtg

SEQ ID NO: 15992 - DNA, 20 bp, synthetic construct
  misc_feature 1..20: note = Description of Artificial Sequence: Synthetic oligonucleotide
  misc_feature 1..20: note = Target: SCN10A; (-) strand; PAM type: NRG; PAM sequence: GAG
  source 1..20: mol_type = other DNA
cagctgcagattatccatgt

SEQ ID NO: 15993 - DNA, 20 bp, synthetic construct
  misc_feature 1..20: note = Description of Artificial Sequence: Synthetic oligonucleotide
  misc_feature 1..20: note = Target: SCN10A; (-) strand; PAM type: NRG; PAM sequence: CAG
  source 1..20: mol_type = other DNA
gcacctgtctgccccagctg

SEQ ID NO: 15994 - DNA, 20 bp, synthetic construct
  misc_feature 1..20: note = Description of Artificial Sequence: Synthetic oligonucleotide
  misc_feature 1..20: note = Target: SCN10A; (-) strand; PAM type: NRG; PAM sequence: CAG
  source 1..20: mol_type = other DNA
ggcacagcacctgtctgccc

SEQ ID NO: 15995 - DNA, 20 bp, synthetic construct
  misc_feature 1..20: note = Description of Artificial Sequence: Synthetic oligonucleotide
  misc_feature 1..20: note = Target: SCN10A; (-) strand; PAM type: NRG; PAM sequence: CAG
  source 1..20: mol_type = other DNA
cagactttgctggagaggca

SEQ ID NO: 15996 - DNA, 20 bp, synthetic construct
  misc_feature 1..20: note = Description of Artificial Sequence: Synthetic oligonucleotide
  misc_feature 1..20: note = Target: SCN10A; (-) strand; PAM type: NRG; PAM sequence: AGG
  source 1..20: mol_type = other DNA
gtggacagactttgctggag

SEQ ID NO: 15997 - DNA, 20 bp, synthetic construct
  misc_feature 1..20: note = Description of Artificial Sequence: Synthetic oligonucleotide
  misc_feature 1..20: note = Target: SCN10A; (-) strand; PAM type: NRG; PAM sequence: GAG
  source 1..20: mol_type = other DNA
ggtggacagactttgctgga

SEQ ID NO: 15998 - DNA, 20 bp, synthetic construct
  misc_feature 1..20: note = Description of Artificial Sequence: Synthetic oligonucleotide
  misc_feature 1..20: note = Target: SCN10A; (-) strand; PAM type: NRG; PAM sequence: GAG
  source 1..20: mol_type = other DNA
tgggtggacagactttgctg

SEQ ID NO: 15999 - DNA, 20 bp, synthetic construct
  misc_feature 1..20: note = Description of Artificial Sequence: Synthetic oligonucleotide
  misc_feature 1..20: note = Target: SCN10A; (-) strand; PAM type: NRG; PAM sequence: TGG
  source 1..20: mol_type = other DNA
cttgggtggacagactttgc

SEQ ID NO: 16000 - DNA, 20 bp, synthetic construct
  misc_feature 1..20: note = Description of Artificial Sequence: Synthetic oligonucleotide
  misc_feature 1..20: note = Target: SCN10A; (-) strand; PAM type: NRG; PAM sequence: CAG
  source 1..20: mol_type = other DNA
tggaggtgggcttgggtgga

SEQ ID NO: 16001 - DNA, 20 bp, synthetic construct
  misc_feature 1..20: note = Description of Artificial Sequence: Synthetic oligonucleotide
  misc_feature 1..20: note = Target: SCN10A; (-) strand; PAM type: NRG; PAM sequence: TGG
  source 1..20: mol_type = other DNA
ggaatggaggtgggcttggg

SEQ ID NO: 16002 - DNA, 20 bp, synthetic construct
  misc_feature 1..20: note = Description of Artificial Sequence: Synthetic oligonucleotide
  misc_feature 1..20: note = Target: SCN10A; (-) strand; PAM type: NRG; PAM sequence: GGG
  source 1..20: mol_type = other DNA
gtgggaatggaggtgggctt

SEQ ID NO: 16003 - DNA, 20 bp, synthetic construct
  misc_feature 1..20: note = Description of Artificial Sequence: Synthetic oligonucleotide
  misc_feature 1..20: note = Target: SCN10A; (-) strand; PAM type: NRG; PAM sequence: TGG
  source 1..20: mol_type = other DNA
agtgggaatggaggtgggct

SEQ ID NO: 16004 - DNA, 20 bp, synthetic construct
  misc_feature 1..20: note = Description of Artificial Sequence: Synthetic oligonucleotide
  misc_feature 1..20: note = Target: SCN10A; (-) strand; PAM type: NRG; PAM sequence: GGG
  source 1..20: mol_type = other DNA
tgagcagtgggaatggaggt

SEQ ID NO: 16005 - DNA, 20 bp, synthetic construct
  misc_feature 1..20: note = Description of Artificial Sequence: Synthetic oligonucleotide
  misc_feature 1..20: note = Target: SCN10A; (-) strand; PAM type: NRG; PAM sequence: TGG
  source 1..20: mol_type = other DNA
ctgagcagtgggaatggagg

SEQ ID NO: 16006 - DNA, 20 bp, synthetic construct
  misc_feature 1..20: note = Description of Artificial Sequence: Synthetic oligonucleotide
  misc_feature 1..20: note = Target: SCN10A; (-) strand; PAM type: NRG; PAM sequence: AGG
  source 1..20: mol_type = other DNA
gggctgagcagtgggaatgg

SEQ ID NO: 16007 - DNA, 20 bp, synthetic construct
  misc_feature 1..20: note = Description of Artificial Sequence: Synthetic oligonucleotide
  misc_feature 1..20: note = Target: SCN10A; (-) strand; PAM type: NRG; PAM sequence: GAG
  source 1..20: mol_type = other DNA
tgggctgagcagtgggaatg

SEQ ID NO: 16008 - DNA, 20 bp, synthetic construct
  misc_feature 1..20: note = Description of Artificial Sequence: Synthetic oligonucleotide
  misc_feature 1..20: note = Target: SCN10A; (-) strand; PAM type: NRG; PAM sequence: TGG
  source 1..20: mol_type = other DNA
agtgggctgagcagtgggaa

SEQ ID NO: 16009 - DNA, 20 bp, synthetic construct
  misc_feature 1..20: note = Description of Artificial Sequence: Synthetic oligonucleotide
  misc_feature 1..20: note = Target: SCN10A; (-) strand; PAM type: NRG; PAM sequence: GGG
  source 1..20: mol_type = other DNA
aggctagtgggctgagcagt

SEQ ID NO: 16010 - DNA, 20 bp, synthetic construct
  misc_feature 1..20: note = Description of Artificial Sequence: Synthetic oligonucleotide
  misc_feature 1..20: note = Target: SCN10A; (-) strand; PAM type: NRG; PAM sequence: TGG
  source 1..20: mol_type = other DNA
gaggctagtgggctgagcag

SEQ ID NO: 16011 - DNA, 20 bp, synthetic construct
  misc_feature 1..20: note = Description of Artificial Sequence: Synthetic oligonucleotide
  misc_feature 1..20: note = Target: SCN10A; (-) strand; PAM type: NRG; PAM sequence: CAG
  source 1..20: mol_type = other DNA
tgggaggctagtgggctgag

SEQ ID NO: 16012 - DNA, 20 bp, synthetic construct
  misc_feature 1..20: note = Description of Artificial Sequence: Synthetic oligonucleotide
  misc_feature 1..20: note = Target: SCN10A; (-) strand; PAM type: NRG; PAM sequence: GAG
  source 1..20: mol_type = other DNA
acttgggaggctagtgggct

SEQ ID NO: 16013 - DNA, 20 bp, synthetic construct
  misc_feature 1..20: note = Description of Artificial Sequence: Synthetic oligonucleotide
  misc_feature 1..20: note = Target: SCN10A; (-) strand; PAM type: NRG; PAM sequence: GGG
  source 1..20: mol_type = other DNA
agactacttgggaggctagt

SEQ ID NO: 16014 - DNA, 20 bp, synthetic construct
  misc_feature 1..20: note = Description of Artificial Sequence: Synthetic oligonucleotide
  misc_feature 1..20: note = Target: SCN10A; (-) strand; PAM type: NRG; PAM sequence: TGG
  source 1..20: mol_type = other DNA
gagactacttgggaggctag

SEQ ID NO: 16015 - DNA, 20 bp, synthetic construct
  misc_feature 1..20: note = Description of Artificial Sequence: Synthetic oligonucleotide
  misc_feature 1..20: note = Target: SCN10A; (-) strand; PAM type: NRG; PAM sequence: TAG
  source 1..20: mol_type = other DNA
ctggagactacttgggaggc

SEQ ID NO: 16016 - DNA, 20 bp, synthetic construct
  misc_feature 1..20: note = Description of Artificial Sequence: Synthetic oligonucleotide
  misc_feature 1..20: note = Target: SCN10A; (-) strand; PAM type: NRG; PAM sequence: AGG
  source 1..20: mol_type = other DNA
gggcctggagactacttggg

SEQ ID NO: 16017 - DNA, 20 bp, synthetic construct
  misc_feature 1..20: note = Description of Artificial Sequence: Synthetic oligonucleotide
  misc_feature 1..20: note = Target: SCN10A; (-) strand; PAM type: NRG; PAM sequence: GAG
  source 1..20: mol_type = other DNA
agggcctggagactacttgg

SEQ ID NO: 16018 - DNA, 20 bp, synthetic construct
  misc_feature 1..20: note = Description of Artificial Sequence: Synthetic oligonucleotide
  misc_feature 1..20: note = Target: SCN10A; (-) strand; PAM type: NRG; PAM sequence: GGG
  source 1..20: mol_type = other DNA
ctagggcctggagactactt

SEQ ID NO: 16019 - DNA, 20 bp, synthetic construct
  misc_feature 1..20: note = Description of Artificial Sequence: Synthetic oligonucleotide
  misc_feature 1..20: note = Target: SCN10A; (-) strand; PAM type: NRG; PAM sequence: TGG
  source 1..20: mol_type = other DNA
actagggcctggagactact

SEQ ID NO: 16020 - DNA, 20 bp, synthetic construct
  misc_feature 1..20: note = Description of Artificial Sequence: Synthetic oligonucleotide
  misc_feature 1..20: note = Target: SCN10A; (-) strand; PAM type: NRG; PAM sequence: GAG
  source 1..20: mol_type = other DNA
tggtgcagtactagggcctg

SEQ ID NO: 16021 - DNA, 20 bp, synthetic construct
  misc_feature 1..20: note = Description of Artificial Sequence: Synthetic oligonucleotide
  misc_feature 1..20: note = Target: SCN10A; (-) strand; PAM type: NRG; PAM sequence: TGG
  source 1..20: mol_type = other DNA
catggtgcagtactagggcc

SEQ ID NO: 16022 - DNA, 20 bp, synthetic construct
  misc_feature 1..20: note = Description of Artificial Sequence: Synthetic oligonucleotide
  misc_feature 1..20: note = Target: SCN10A; (-) strand; PAM type: NRG; PAM sequence: GGG
  source 1..20: mol_type = other DNA
agatgcatggtgcagtacta

SEQ ID NO: 16023 - DNA, 20 bp, synthetic construct
  misc_feature 1..20: note = Description of Artificial Sequence: Synthetic oligonucleotide
  misc_feature 1..20: note = Target: SCN10A; (-) strand; PAM type: NRG; PAM sequence: AGG
  source 1..20: mol_type = other DNA
tagatgcatggtgcagtact

SEQ ID NO: 16024 - DNA, 20 bp, synthetic construct
  misc_feature 1..20: note = Description of Artificial Sequence: Synthetic oligonucleotide
  misc_feature 1..20: note = Target: SCN10A; (-) strand; PAM type: NRG; PAM sequence: TAG
  source 1..20: mol_type = other DNA
atagatgcatggtgcagtac

SEQ ID NO: 16025 - DNA, 20 bp, synthetic construct
  misc_feature 1..20: note = Description of Artificial Sequence: Synthetic oligonucleotide
  misc_feature 1..20: note = Target: SCN10A; (-) strand; PAM type: NRG; PAM sequence: CAG
  source 1..20: mol_type = other DNA
tggagaatagatgcatggtg

SEQ ID NO: 16026 - DNA, 20 bp, synthetic construct
  misc_feature 1..20: note = Description of Artificial Sequence: Synthetic oligonucleotide
  misc_feature 1..20: note = Target: SCN10A; (-) strand; PAM type: NRG; PAM sequence: TGG
  source 1..20: mol_type = other DNA
tgcagtggagaatagatgca

SEQ ID NO: 16027 - DNA, 20 bp, synthetic construct
  misc_feature 1..20: note = Description of Artificial Sequence: Synthetic oligonucleotide
  misc_feature 1..20: note = Target: SCN10A; (-) strand; PAM type: NRG; PAM sequence: TAG
  source 1..20: mol_type = other DNA
atcagatttgcagtggagaa

SEQ ID NO: 16028 - DNA, 20 bp, synthetic construct
  misc_feature 1..20: note = Description of Artificial Sequence: Synthetic oligonucleotide
  misc_feature 1..20: note = Target: SCN10A; (-) strand; PAM type: NRG; PAM sequence: GAG
  source 1..20: mol_type = other DNA
tcataatcagatttgcagtg

SEQ ID NO: 16029 - DNA, 20 bp, synthetic construct
  misc_feature 1..20: note = Description of Artificial Sequence: Synthetic oligonucleotide
  misc_feature 1..20: note = Target: SCN10A; (-) strand; PAM type: NRG; PAM sequence: TGG
  source 1..20: mol_type = other DNA
gatcataatcagatttgcag

SEQ ID NO: 16030 - DNA, 20 bp, synthetic construct
  misc_feature 1..20: note = Description of Artificial Sequence: Synthetic oligonucleotide
  misc_feature 1..20: note = Target: SCN10A; (-) strand; PAM type: NRG; PAM sequence: CAG
  source 1..20: mol_type = other DNA
catgatcataatcagatttg

SEQ ID NO: 16031 - DNA, 20 bp, synthetic construct
  misc_feature 1..20: note = Description of Artificial Sequence: Synthetic oligonucleotide
  misc_feature 1..20: note = Target: SCN10A; (-) strand; PAM type: NRG; PAM sequence: CAG
  source 1..20: mol_type = other DNA
gagaaagacatgatcataat

SEQ ID NO: 16032 - DNA, 20 bp, synthetic construct
  misc_feature 1..20: note = Description of Artificial Sequence: Synthetic oligonucleotide
  misc_feature 1..20: note = Target: SCN10A; (-) strand; PAM type: NRG; PAM sequence: AAG
  source 1..20: mol_type = other DNA
tgatgtttgggagtaagaga

SEQ ID NO: 16033 - DNA, 20 bp, synthetic construct
  misc_feature 1..20: note = Description of Artificial Sequence: Synthetic oligonucleotide
  misc_feature 1..20: note = Target: SCN10A; (-) strand; PAM type: NRG; PAM sequence: GAG
  source 1..20: mol_type = other DNA
ccagtgatgtttgggagtaa

SEQ ID NO: 16034 - DNA, 20 bp, synthetic construct
  misc_feature 1..20: note = Description of Artificial Sequence: Synthetic oligonucleotide
  misc_feature 1..20: note = Target: SCN10A; (-) strand; PAM type: NRG; PAM sequence: AAG
  source 1..20: mol_type = other DNA
taccagtgatgtttgggagt

SEQ ID NO: 16035 - DNA, 20 bp, synthetic construct
  misc_feature 1..20: note = Description of Artificial Sequence: Synthetic oligonucleotide
  misc_feature 1..20: note = Target: SCN10A; (-) strand; PAM type: NRG; PAM sequence: GAG
  source 1..20: mol_type = other DNA
aaagtaccagtgatgtttgg

SEQ ID NO: 16036 - DNA, 20 bp, synthetic construct
  misc_feature 1..20: note = Description of Artificial Sequence: Synthetic oligonucleotide
  misc_feature 1..20: note = Target: SCN10A; (-) strand; PAM type: NRG; PAM sequence: GGG
  source 1..20: mol_type = other DNA
ataaagtaccagtgatgttt

SEQ ID NO: 16037 - DNA, 20 bp, synthetic construct
  misc_feature 1..20: note = Description of Artificial Sequence: Synthetic oligonucleotide
  misc_feature 1..20: note = Target: SCN10A; (-) strand; PAM type: NRG; PAM sequence: TGG
  source 1..20: mol_type = other DNA
gataaagtaccagtgatgtt

SEQ ID NO: 16038 - DNA, 20 bp, synthetic construct
  misc_feature 1..20: note = Description of Artificial Sequence: Synthetic oligonucleotide
  misc_feature 1..20: note = Target: SCN10A; (-) strand; PAM type: NRG; PAM sequence: CAG
  source 1..20: mol_type = other DNA
tcctgagggtgataaagtac

SEQ ID NO: 16039 - DNA, 20 bp, synthetic construct
  misc_feature 1..20: note = Description of Artificial Sequence: Synthetic oligonucleotide
  misc_feature 1..20: note = Target: SCN10A; (-) strand; PAM type: NRG; PAM sequence: AAG
  source 1..20: mol_type = other DNA
agtttatcctgagggtgata

SEQ ID NO: 16040 - DNA, 20 bp, synthetic construct
  misc_feature 1..20: note = Description of Artificial Sequence: Synthetic oligonucleotide
  misc_feature 1..20: note = Target: SCN10A; (-) strand; PAM type: NRG; PAM sequence: GGG
  source 1..20: mol_type = other DNA
gagtatggagtttatcctga

SEQ ID NO: 16041 - DNA, 20 bp, synthetic construct
  misc_feature 1..20: note = Description of Artificial Sequence: Synthetic oligonucleotide
  misc_feature 1..20: note = Target: SCN10A; (-) strand; PAM type: NRG; PAM sequence: AGG
  source 1..20: mol_type = other DNA
agagtatggagtttatcctg

SEQ ID NO: 16042 - DNA, 20 bp, synthetic construct
  misc_feature 1..20: note = Description of Artificial Sequence: Synthetic oligonucleotide
  misc_feature 1..20: note = Target: SCN10A; (-) strand; PAM type: NRG; PAM sequence: GAG
  source 1..20: mol_type = other DNA
cagagtatggagtttatcct

SEQ ID NO: 16043 - DNA, 20 bp, synthetic construct
  misc_feature 1..20: note = Description of Artificial Sequence: Synthetic oligonucleotide
  misc_feature 1..20: note = Target: SCN10A; (-) strand; PAM type: NRG; PAM sequence: GAG
  source 1..20: mol_type = other DNA
gacacaggctacagagtatg

SEQ ID NO: 16044 - DNA, 20 bp, synthetic construct
  misc_feature 1..20: note = Description of Artificial Sequence: Synthetic oligonucleotide
  misc_feature 1..20: note = Target: SCN10A; (-) strand; PAM type: NRG; PAM sequence: TGG
  source 1..20: mol_type = other DNA
atgacacaggctacagagta

SEQ ID NO: 16045 - DNA, 20 bp, synthetic construct
  misc_feature 1..20: note = Description of Artificial Sequence: Synthetic oligonucleotide
  misc_feature 1..20: note = Target: SCN10A; (-) strand; PAM type: NRG; PAM sequence: GAG
  source 1..20: mol_type = other DNA
accatatgacacaggctaca

SEQ ID NO: 16046 - DNA, 20 bp, synthetic construct
  misc_feature 1..20: note = Description of Artificial Sequence: Synthetic oligonucleotide
  misc_feature 1..20: note = Target: SCN10A; (-) strand; PAM type: NRG; PAM sequence: CAG
  source 1..20: mol_type = other DNA
tgaccatatgacacaggcta

SEQ ID NO: 16047 - DNA, 20 bp, synthetic construct
  misc_feature 1..20: note = Description of Artificial Sequence: Synthetic oligonucleotide
  misc_feature 1..20: note = Target: SCN10A; (-) strand; PAM type: NRG; PAM sequence: AGG
  source 1..20: mol_type = other DNA
aggttgtgaccatatgacac

SEQ ID NO: 16048 - DNA, 20 bp, synthetic construct
  misc_feature 1..20: note = Description of Artificial Sequence: Synthetic oligonucleotide
  misc_feature 1..20: note = Target: SCN10A; (-) strand; PAM type: NRG; PAM sequence: CAG
  source 1..20: mol_type = other DNA
taggttgtgaccatatgaca

SEQ ID NO: 16049 - DNA, 20 bp, synthetic construct
  misc_feature 1..20: note = Description of Artificial Sequence: Synthetic oligonucleotide
  misc_feature 1..20: note = Target: SCN10A; (-) strand; PAM type: NRG; PAM sequence: AGG
  source 1..20: mol_type = other DNA
tgaaatatgactggaaaagt

SEQ ID NO: 16050 - DNA, 20 bp, synthetic construct
  misc_feature 1..20: note = Description of Artificial Sequence: Synthetic oligonucleotide
  misc_feature 1..20: note = Target: SCN10A; (-) strand; PAM type: NRG; PAM sequence: TAG
  source 1..20: mol_type = other DNA
gtgaaatatgactggaaaag

SEQ ID NO: 16051 - DNA, 20 bp, synthetic construct
  misc_feature 1..20: note = Description of Artificial Sequence: Synthetic oligonucleotide
  misc_feature 1..20: note = Target: SCN10A; (-) strand; PAM type: NRG; PAM sequence: AAG
  source 1..20: mol_type = other DNA
tgggtgaaatatgactggaa

SEQ ID NO: 16052 - DNA, 20 bp, synthetic construct
  misc_feature 1..20: note = Description of Artificial Sequence: Synthetic oligonucleotide
  misc_feature 1..20: note = Target: SCN10A; (-) strand; PAM type: NRG; PAM sequence: TGG
  source 1..20: mol_type = other DNA
atgtgtgggtgaaatatgac

SEQ ID NO: 16053 - DNA, 20 bp, synthetic construct
  misc_feature 1..20: note = Description of Artificial Sequence: Synthetic oligonucleotide
  misc_feature 1..20: note = Target: SCN10A; (-) strand; PAM type: NRG; PAM sequence: GGG
  source 1..20: mol_type = other DNA
ttgatttgggtagaatgtgt

SEQ ID NO: 16054 - DNA, 20 bp, synthetic construct
  misc_feature 1..20: note = Description of Artificial Sequence: Synthetic oligonucleotide
  misc_feature 1..20: note = Target: SCN10A; (-) strand; PAM type: NRG; PAM sequence: TGG
  source 1..20: mol_type = other DNA
tttgatttgggtagaatgtg

SEQ ID NO: 16055 - DNA, 20 bp, synthetic construct
  misc_feature 1..20: note = Description of Artificial Sequence: Synthetic oligonucleotide
  misc_feature 1..20: note = Target: SCN10A; (-) strand; PAM type: NRG; PAM sequence: TAG
  source 1..20: mol_type = other DNA
agggaacaatttgatttggg

SEQ ID NO: 16056 - DNA, 20 bp, synthetic construct
  misc_feature 1..20: note = Description of Artificial Sequence: Synthetic oligonucleotide
  misc_feature 1..20: note = Target: SCN10A; (-) strand; PAM type: NRG; PAM sequence: GGG
  source 1..20: mol_type = other DNA
ctcagggaacaatttgattt

SEQ ID NO: 16057 - DNA, 20 bp, synthetic construct
  misc_feature 1..20: note = Description of Artificial Sequence: Synthetic oligonucleotide
  misc_feature 1..20: note = Target: SCN10A; (-) strand; PAM type: NRG; PAM sequence: TGG
  source 1..20: mol_type = other DNA
gctcagggaacaatttgatt

SEQ ID NO: 16058 - DNA, 20 bp, synthetic construct
  misc_feature 1..20: note = Description of Artificial Sequence: Synthetic oligonucleotide
  misc_feature 1..20: note = Target: SCN10A; (-) strand; PAM type: NRG; PAM sequence: GGG
  source 1..20: mol_type = other DNA
cacagacacaagtatgctca

SEQ ID NO: 16059 - DNA, 20 bp, synthetic construct
  misc_feature 1..20: note = Description of Artificial Sequence: Synthetic oligonucleotide
  misc_feature 1..20: note = Target: SCN10A; (-) strand; PAM type: NRG; PAM sequence: AGG
  source 1..20: mol_type = other DNA
gcacagacacaagtatgctc

SEQ ID NO: 16060 - DNA, 20 bp, synthetic construct
  misc_feature 1..20: note = Description of Artificial Sequence: Synthetic oligonucleotide
  misc_feature 1..20: note = Target: SCN10A; (-) strand; PAM type: NRG; PAM sequence: CAG
  source 1..20: mol_type = other DNA
ggcacagacacaagtatgct

SEQ ID NO: 16061 - DNA, 20 bp, synthetic construct
  misc_feature 1..20: note = Description of Artificial Sequence: Synthetic oligonucleotide
  misc_feature 1..20: note = Target: SCN10A; (-) strand; PAM type: NRG; PAM sequence: AAG
  source 1..20: mol_type = other DNA
ttgaacaaaggcacagacac

SEQ ID NO: 16062 - DNA, 20 bp, synthetic construct
  misc_feature 1..20: note = Description of Artificial Sequence: Synthetic oligonucleotide
  misc_feature 1..20: note = Target: SCN10A; (-) strand; PAM type: NRG; PAM sequence: CAG
  source 1..20: mol_type = other DNA
gctgaccttgaacaaaggca

SEQ ID NO: 16063 - DNA, 20 bp, synthetic construct
  misc_feature 1..20: note = Description of Artificial Sequence: Synthetic oligonucleotide
  misc_feature 1..20: note = Target: SCN10A; (-) strand; PAM type: NRG; PAM sequence: AGG
  source 1..20: mol_type = other DNA
taaaggctgaccttgaacaa

SEQ ID NO: 16064 - DNA, 20 bp, synthetic construct
  misc_feature 1..20: note = Description of Artificial Sequence: Synthetic oligonucleotide
  misc_feature 1..20: note = Target: SCN10A; (-) strand; PAM type: NRG; PAM sequence: AAG
  source 1..20: mol_type = other DNA
ctaaaggctgaccttgaaca

SEQ ID NO: 16065 - DNA, 20 bp, synthetic construct
  misc_feature 1..20: note = Description of Artificial Sequence: Synthetic oligonucleotide
  misc_feature 1..20: note = Target: SCN10A; (-) strand; PAM type: NRG; PAM sequence: AGG
  source 1..20: mol_type = other DNA
ggaaggcccgtcttagctaa

SEQ ID NO: 16066 - DNA, 20 bp, synthetic construct
  misc_feature 1..20: note = Description of Artificial Sequence: Synthetic oligonucleotide
  misc_feature 1..20: note = Target: SCN10A; (-) strand; PAM type: NRG; PAM sequence: AAG
  source 1..20: mol_type = other DNA
gggaaggcccgtcttagcta

SEQ ID NO: 16067 - DNA, 20 bp, synthetic construct
  misc_feature 1..20: note = Description of Artificial Sequence: Synthetic oligonucleotide
  misc_feature 1..20: note = Target: SCN10A; (-) strand; PAM type: NRG; PAM sequence: TAG
  source 1..20: mol_type = other DNA
ggactggggaaggcccgtct

SEQ ID NO: 16068 - DNA, 20 bp, synthetic construct
  misc_feature 1..20: note = Description of Artificial Sequence: Synthetic oligonucleotide
  misc_feature 1..20: note = Target: SCN10A; (-) strand; PAM type: NRG; PAM sequence: AGG
  source 1..20: mol_type = other DNA
agctgcgagaggactgggga

SEQ ID NO: 16069 - DNA, 20 bp, synthetic construct
  misc_feature 1..20: note = Description of Artificial Sequence: Synthetic oligonucleotide
  misc_feature 1..20: note = Target: SCN10A; (-) strand; PAM type: NRG; PAM sequence: AAG
  source 1..20: mol_type = other DNA
gagctgcgagaggactgggg

SEQ ID NO: 16070 - DNA, 20 bp, synthetic construct
  misc_feature 1..20: note = Description of Artificial Sequence: Synthetic oligonucleotide
  misc_feature 1..20: note = Target: SCN10A; (-) strand; PAM type: NRG; PAM sequence: GGG
  source 1..20: mol_type = other DNA
aaggagctgcgagaggactg

SEQ ID NO: 16071 - DNA, 20 bp, synthetic construct
  misc_feature 1..20: note = Description of Artificial Sequence: Synthetic oligonucleotide
  misc_feature 1..20: note = Target: SCN10A; (-) strand; PAM type: NRG; PAM sequence: GGG
  source 1..20: mol_type = other DNA
caaggagctgcgagaggact

SEQ ID NO: 16072 - DNA, 20 bp, synthetic construct
  misc_feature 1..20: note = Description of Artificial Sequence: Synthetic oligonucleotide
  misc_feature 1..20: note = Target: SCN10A; (-) strand; PAM type: NRG; PAM sequence: TGG
  source 1..20: mol_type = other DNA
ccaaggagctgcgagaggac

SEQ ID NO: 16073 - DNA, 20 bp, synthetic construct
  misc_feature 1..20: note = Description of Artificial Sequence: Synthetic oligonucleotide
  misc_feature 1..20: note = Target: SCN10A; (-) strand; PAM type: NRG; PAM sequence: AGG
  source 1..20: mol_type = other DNA
caggaccaaggagctgcgag

SEQ ID NO: 16074 - DNA, 20 bp, synthetic construct
  misc_feature 1..20: note = Description of Artificial Sequence: Synthetic oligonucleotide
  misc_feature 1..20: note = Target: SCN10A; (-) strand; PAM type: NRG; PAM sequence: GAG
  source 1..20: mol_type = other DNA
gcaggaccaaggagctgcga

SEQ ID NO: 16075 - DNA, 20 bp, synthetic construct
  misc_feature 1..20: note = Description of Artificial Sequence: Synthetic oligonucleotide
  misc_feature 1..20: note = Target: SCN10A; (-) strand; PAM type: NRG; PAM sequence: GAG
  source 1..20: mol_type = other DNA
gagcaggaccaaggagctgc

SEQ ID NO: 16076 - DNA, 20 bp, synthetic construct
  misc_feature 1..20: note = Description of Artificial Sequence: Synthetic oligonucleotide
  misc_feature 1..20: note = Target: SCN10A; (-) strand; PAM type: NRG; PAM sequence: GAG
  source 1..20: mol_type = other DNA
tagaaatgagcaggaccaag

SEQ ID NO: 16077 - DNA, 20 bp, synthetic construct
  misc_feature 1..20: note = Description of Artificial Sequence: Synthetic oligonucleotide
  misc_feature 1..20: note = Target: SCN10A; (-) strand; PAM type: NRG; PAM sequence: AGG
  source 1..20: mol_type = other DNA
catagaaatgagcaggacca

SEQ ID NO: 16078 - DNA, 20 bp, synthetic construct
  misc_feature 1..20: note = Description of Artificial Sequence: Synthetic oligonucleotide
  misc_feature 1..20: note = Target: SCN10A; (-) strand; PAM type: NRG; PAM sequence: AAG
  source 1..20: mol_type = other DNA
gcatagaaatgagcaggacc

SEQ ID NO: 16079 - DNA, 20 bp, synthetic construct
  misc_feature 1..20: note = Description of Artificial Sequence: Synthetic oligonucleotide
  misc_feature 1..20: note = Target: SCN10A; (-) strand; PAM type: NRG; PAM sequence: AGG
  source 1..20: mol_type = other DNA
tgtggggcatagaaatgagc

SEQ ID NO: 16080 - DNA, 20 bp, synthetic construct
  misc_feature 1..20: note = Description of Artificial Sequence: Synthetic oligonucleotide
  misc_feature 1..20: note = Target: SCN10A; (-) strand; PAM type: NRG; PAM sequence: CAG
  source 1..20: mol_type = other DNA
atgtggggcatagaaatgag

SEQ ID NO: 16081 - DNA, 20 bp, synthetic construct
  misc_feature 1..20: note = Description of Artificial Sequence: Synthetic oligonucleotide
  misc_feature 1..20: note = Target: SCN10A; (-) strand; PAM type: NRG; PAM sequence: GAG
  source 1..20: mol_type = other DNA
tagatgtggggcatagaaat

SEQ ID NO: 16082 - DNA, 20 bp, synthetic construct
  misc_feature 1..20: note = Description of Artificial Sequence: Synthetic oligonucleotide
  misc_feature 1..20: note = Target: SCN10A; (-) strand; PAM type: NRG; PAM sequence: TAG
  source 1..20: mol_type = other DNA
gtggcattagatgtggggca

SEQ ID NO: 16083 - DNA, 20 bp, synthetic construct
  misc_feature 1..20: note = Description of Artificial Sequence: Synthetic oligonucleotide
  misc_feature 1..20: note = Target: SCN10A; (-) strand; PAM type: NRG; PAM sequence: GGG
  source 1..20: mol_type = other DNA
gggaggtggcattagatgtg

SEQ ID NO: 16084 - DNA, 20 bp, synthetic construct
  misc_feature 1..20: note = Description of Artificial Sequence: Synthetic oligonucleotide
  misc_feature 1..20: note = Target: SCN10A; (-) strand; PAM type: NRG; PAM sequence: GGG
  source 1..20: mol_type = other DNA
tgggaggtggcattagatgt

SEQ ID NO: 16085 - DNA, 20 bp, synthetic construct
  misc_feature 1..20: note = Description of Artificial Sequence: Synthetic oligonucleotide
  misc_feature 1..20: note = Target: SCN10A; (-) strand; PAM type: NRG; PAM sequence: TGG
  source 1..20: mol_type = other DNA
atgggaggtggcattagatg

SEQ ID NO: 16086 - DNA, 20 bp, synthetic construct
  misc_feature 1..20: note = Description of Artificial Sequence: Synthetic oligonucleotide
  misc_feature 1..20: note = Target: SCN10A; (-) strand; PAM type: NRG; PAM sequence: TAG
  source 1..20: mol_type = other DNA
cttcctatgggaggtggcat

SEQ ID NO: 16087 - DNA, 20 bp, synthetic construct
  misc_feature 1..20: note = Description of Artificial Sequence: Synthetic oligonucleotide
  misc_feature 1..20: note = Target: SCN10A; (-) strand; PAM type: NRG; PAM sequence: TGG
  source 1..20: mol_type = other DNA
agaattcttcctatgggagg

SEQ ID NO: 16088 - DNA, 20 bp, synthetic construct
  misc_feature 1..20: note = Description of Artificial Sequence: Synthetic oligonucleotide
  misc_feature 1..20: note = Target: SCN10A; (-) strand; PAM type: NRG; PAM sequence: AGG
  source 1..20: mol_type = other DNA
ttgagaattcttcctatggg

SEQ ID NO: 16089 - DNA, 20 bp, synthetic construct
  misc_feature 1..20: note = Description of Artificial Sequence: Synthetic oligonucleotide
  misc_feature 1..20: note = Target: SCN10A; (-) strand; PAM type: NRG; PAM sequence: GAG
  source 1..20: mol_type = other DNA
gttgagaattcttcctatgg

SEQ ID NO: 16090 - DNA, 20 bp, synthetic construct
  misc_feature 1..20: note = Description of Artificial Sequence: Synthetic oligonucleotide
  misc_feature 1..20: note = Target: SCN10A; (-) strand; PAM type: NRG; PAM sequence: GGG
  source 1..20: mol_type = other DNA
tggttgagaattcttcctat

SEQ ID NO: 16091 - DNA, 20 bp, synthetic construct
  misc_feature 1..20: note = Description of Artificial Sequence: Synthetic oligonucleotide
  misc_feature 1..20: note = Target: SCN10A; (-) strand; PAM type: NRG; PAM sequence: TGG
  source 1..20: mol_type = other DNA
gtggttgagaattcttccta

SEQ ID NO: 16092 - DNA, 20 bp, synthetic construct
  misc_feature 1..20: note = Description of Artificial Sequence: Synthetic oligonucleotide
  misc_feature 1..20: note = Target: SCN10A; (-) strand; PAM type: NRG; PAM sequence: GAG
  source 1..20: mol_type = other DNA
actcttggggtggggtggtt

SEQ ID NO: 16093 - DNA, 20 bp, synthetic construct
  misc_feature 1..20: note = Description of Artificial Sequence: Synthetic oligonucleotide
  misc_feature 1..20: note = Target: SCN10A; (-) strand; PAM type: NRG; PAM sequence: TGG
  source 1..20: mol_type = other DNA
cttccactcttggggtgggg

SEQ ID NO: 16094 - DNA, 20 bp, synthetic construct
  misc_feature 1..20: note = Description of Artificial Sequence: Synthetic oligonucleotide
  misc_feature 1..20: note = Target: SCN10A; (-) strand; PAM type: NRG; PAM sequence: GGG
  source 1..20: mol_type = other DNA
cttcttccactcttggggtg

SEQ ID NO: 16095 - DNA, 20 bp, synthetic construct
  misc_feature 1..20: note = Description of Artificial Sequence: Synthetic oligonucleotide
  misc_feature 1..20: note = Target: SCN10A; (-) strand; PAM type: NRG; PAM sequence: GGG
  source 1..20: mol_type = other DNA
ccttcttccactcttggggt

SEQ ID NO: 16096 - DNA, 20 bp, synthetic construct
  misc_feature 1..20: note = Description of Artificial Sequence: Synthetic oligonucleotide
  misc_feature 1..20: note = Target: SCN10A; (-) strand; PAM type: NRG; PAM sequence: TGG
  source 1..20: mol_type = other DNA
gccttcttccactcttgggg

SEQ ID NO: 16097 - DNA, 20 bp, synthetic construct
  misc_feature 1..20: note = Description of Artificial Sequence: Synthetic oligonucleotide
  misc_feature 1..20: note = Target: SCN10A; (-) strand; PAM type: NRG; PAM sequence: GGG
  source 1..20: mol_type = other DNA
tgagccttcttccactcttg

SEQ ID NO: 16098 - DNA, 20 bp, synthetic construct
  misc_feature 1..20: note = Description of Artificial Sequence: Synthetic oligonucleotide
  misc_feature 1..20: note = Target: SCN10A; (-) strand; PAM type: NRG; PAM sequence: GGG
  source 1..20: mol_type = other DNA
atgagccttcttccactctt

SEQ ID NO: 16099 - DNA, 20 bp, synthetic construct
  misc_feature 1..20: note = Description of Artificial Sequence: Synthetic oligonucleotide
  misc_feature 1..20: note = Target: SCN10A; (-) strand; PAM type: NRG; PAM sequence: TGG
  source 1..20: mol_type = other DNA
catgagccttcttccactct

SEQ ID NO: 16100 - DNA, 20 bp, synthetic construct
  misc_feature 1..20: note = Description of Artificial Sequence: Synthetic oligonucleotide
  misc_feature 1..20: note = Target: SCN10A; (-) strand; PAM type: NRG; PAM sequence: GAG
  source 1..20: mol_type = other DNA
tcttggagacacagagacat

SEQ ID NO: 16101 - DNA, 20 bp, synthetic construct
  misc_feature 1..20: note = Description of Artificial Sequence: Synthetic oligonucleotide
  misc_feature 1..20: note = Target: SCN10A; (-) strand; PAM type: NRG; PAM sequence: GAG
  source 1..20: mol_type = other DNA
attagtatcttggagacaca

SEQ ID NO: 16102 - DNA, 20 bp, synthetic construct
  misc_feature 1..20: note = Description of Artificial Sequence: Synthetic oligonucleotide
  misc_feature 1..20: note = Target: SCN10A; (-) strand; PAM type: NRG; PAM sequence: CAG
  source 1..20: mol_type = other DNA
caattagtatcttggagaca

SEQ ID NO: 16103 - DNA, 20 bp, synthetic construct
  misc_feature 1..20: note = Description of Artificial Sequence: Synthetic oligonucleotide
  misc_feature 1..20: note = Target: SCN10A; (-) strand; PAM type: NRG; PAM sequence: GAG
  source 1..20: mol_type = other DNA
tgggggcaattagtatcttg

SEQ ID NO: 16104 - DNA, 20 bp, synthetic construct
  misc_feature 1..20: note = Description of Artificial Sequence: Synthetic oligonucleotide
  misc_feature 1..20: note = Target: SCN10A; (-) strand; PAM type: NRG; PAM sequence: TGG
  source 1..20: mol_type = other DNA
gctgggggcaattagtatct

SEQ ID NO: 16105 - DNA, 20 bp, synthetic construct
  misc_feature 1..20: note = Description of Artificial Sequence: Synthetic oligonucleotide
  misc_feature 1..20: note = Target: SCN10A; (-) strand; PAM type: NRG; PAM sequence: TAG
  source 1..20: mol_type = other DNA
tgagcactgctgggggcaat

SEQ ID NO: 16106 - DNA, 20 bp, synthetic construct
  misc_feature 1..20: note = Description of Artificial Sequence: Synthetic oligonucleotide
  misc_feature 1..20: note = Target: SCN10A; (-) strand; PAM type: NRG; PAM sequence: GGG
  source 1..20: mol_type = other DNA
aatgtgttgagcactgctgg

SEQ ID NO: 16107 - DNA, 20 bp, synthetic construct
  misc_feature 1..20: note = Description of Artificial Sequence: Synthetic oligonucleotide
  misc_feature 1..20: note = Target: SCN10A; (-) strand; PAM type: NRG; PAM sequence: GGG
  source 1..20: mol_type = other DNA
gaatgtgttgagcactgctg

SEQ ID NO: 16108 - DNA, 20 bp, synthetic construct
  misc_feature 1..20: note = Description of Artificial Sequence: Synthetic oligonucleotide
  misc_feature 1..20: note = Target: SCN10A; (-) strand; PAM type: NRG; PAM sequence: GGG
  source 1..20: mol_type = other DNA
tgaatgtgttgagcactgct

SEQ ID NO: 16109 - DNA, 20 bp, synthetic construct
  misc_feature 1..20: note = Description of Artificial Sequence: Synthetic oligonucleotide
  misc_feature 1..20: note = Target: SCN10A; (-) strand; PAM type: NRG; PAM sequence: TGG
  source 1..20: mol_type = other DNA
gtgaatgtgttgagcactgc

SEQ ID NO: 16110 - DNA, 20 bp, synthetic construct
  misc_feature 1..20: note = Description of Artificial Sequence: Synthetic oligonucleotide
  misc_feature 1..20: note = Target: SCN10A; (-) strand; PAM type: NRG; PAM sequence: GAG
  source 1..20: mol_type = other DNA
attataagggtgaatgtgtt

SEQ ID NO: 16111 - DNA, 20 bp, synthetic construct
  misc_feature 1..20: note = Description of Artificial Sequence: Synthetic oligonucleotide
  misc_feature 1..20: note = Target: SCN10A; (-) strand; PAM type: NRG; PAM sequence: GGG
  source 1..20: mol_type = other DNA
tggaaataaatgtattataa

SEQ ID NO: 16112 - DNA, 20 bp, synthetic construct
  misc_feature 1..20: note = Description of Artificial Sequence: Synthetic oligonucleotide
  misc_feature 1..20: note = Target: SCN10A; (-) strand; PAM type: NRG; PAM sequence: AGG
  source 1..20: mol_type = other DNA
atggaaataaatgtattata

SEQ ID NO: 16113 - DNA, 20 bp, synthetic construct
  misc_feature 1..20: note = Description of Artificial Sequence: Synthetic oligonucleotide
  misc_feature 1..20: note = Target: SCN10A; (-) strand; PAM type: NRG; PAM sequence: AAG
  source 1..20: mol_type = other DNA
catggaaataaatgtattat

SEQ ID NO: 16114 - DNA, 20 bp, synthetic construct
  misc_feature 1..20: note = Description of Artificial Sequence: Synthetic oligonucleotide
  misc_feature 1..20: note = Target: SCN10A; (-) strand; PAM type: NRG; PAM sequence: TGG
  source 1..20: mol_type = other DNA
ttcagcagacaagacacaca

SEQ ID NO: 16115 - DNA, 20 bp, synthetic construct
  misc_feature 1..20: note = Description of Artificial Sequence: Synthetic oligonucleotide
  misc_feature 1..20: note = Target: SCN10A; (-) strand; PAM type: NRG; PAM sequence: AAG
  source 1..20: mol_type = other DNA
actttagtctttcagcagac

SEQ ID NO: 16116 - DNA, 20 bp, synthetic construct
  misc_feature 1..20: note = Description of Artificial Sequence: Synthetic oligonucleotide
  misc_feature 1..20: note = Target: SCN10A; (-) strand; PAM type: NRG; PAM sequence: CAG
  source 1..20: mol_type = other DNA
cttacactttagtctttcag

SEQ ID NO: 16117 - DNA, 20 bp, synthetic construct
  misc_feature 1..20: note = Description of Artificial Sequence: Synthetic oligonucleotide
  misc_feature 1..20: note = Target: SCN10A; (-) strand; PAM type: NRG; PAM sequence: CAG
  source 1..20: mol_type = other DNA
gatcttacactttagtcttt

SEQ ID NO: 16118 - DNA, 20 bp, synthetic construct
  misc_feature 1..20: note = Description of Artificial Sequence: Synthetic oligonucleotide
  misc_feature 1..20: note = Target: SCN10A; (-) strand; PAM type: NRG; PAM sequence: TAG
  source 1..20: mol_type = other DNA
atctccaggatcttacactt

SEQ ID NO: 16119 - DNA, 20 bp, synthetic construct
  misc_feature 1..20: note = Description of Artificial Sequence: Synthetic oligonucleotide
  misc_feature 1..20: note = Target: SCN10A; (-) strand; PAM type: NRG; PAM sequence: AGG
  source 1..20: mol_type = other DNA
aataaatactcactatctcc

SEQ ID NO: 16120 - DNA, 20 bp, synthetic construct
  misc_feature 1..20: note = Description of Artificial Sequence: Synthetic oligonucleotide
  misc_feature 1..20: note = Target: SCN10A; (-) strand; PAM type: NRG; PAM sequence: CAG
  source 1..20: mol_type = other DNA
gaataaatactcactatctc

SEQ ID NO: 16121 - DNA, 20 bp, synthetic construct
  misc_feature 1..20: note = Description of Artificial Sequence: Synthetic oligonucleotide
  misc_feature 1..20: note = Target: SCN10A; (-) strand; PAM type: NRG; PAM sequence: CAG
  source 1..20: mol_type = other DNA
ctttgtaagaaacagaagca

SEQ ID NO: 16122 - DNA, 20 bp, synthetic construct
  misc_feature 1..20: note = Description of Artificial Sequence: Synthetic oligonucleotide
  misc_feature 1..20: note = Target: SCN10A; (-) strand; PAM type: NRG; PAM sequence: AAG
  source 1..20: mol_type = other DNA
aagtgctttgtaagaaacag

SEQ ID NO: 16123 - DNA, 20 bp, synthetic construct
  misc_feature 1..20: note = Description of Artificial Sequence: Synthetic oligonucleotide
  misc_feature 1..20: note = Target: SCN10A; (-) strand; PAM type: NRG; PAM sequence: CAG
  source 1..20: mol_type = other DNA
atgaagtgctttgtaagaaa

SEQ ID NO: 16124 - DNA, 20 bp, synthetic construct
  misc_feature 1..20: note = Description of Artificial Sequence: Synthetic oligonucleotide
  misc_feature 1..20: note = Target: SCN10A; (-) strand; PAM type: NRG; PAM sequence: AAG
  source 1..20: mol_type = other DNA
tgtcttatgaagtgctttgt

SEQ ID NO: 16125 - DNA, 20 bp, synthetic construct
  misc_feature 1..20: note = Description of Artificial Sequence: Synthetic oligonucleotide
  misc_feature 1..20: note = Target: SCN10A; (-) strand; PAM type: NRG; PAM sequence: AAG
  source 1..20: mol_type = other DNA
gaatacaggattgtcttatg

SEQ ID NO: 16126 - DNA, 20 bp, synthetic construct
  misc_feature 1..20: note = Description of Artificial Sequence: Synthetic oligonucleotide
  misc_feature 1..20: note = Target: SCN10A; (-) strand; PAM type: NRG; PAM sequence: AGG
  source 1..20: mol_type = other DNA
tacatctaactattgaatac

SEQ ID NO: 16127 - DNA, 20 bp, synthetic construct
  misc_feature 1..20: note = Description of Artificial Sequence: Synthetic oligonucleotide
  misc_feature 1..20: note = Target: SCN10A; (-) strand; PAM type: NRG; PAM sequence: CAG
  source 1..20: mol_type = other DNA
atacatctaactattgaata

SEQ ID NO: 16128 - DNA, 20 bp, synthetic construct
  misc_feature 1..20: note = Description of Artificial Sequence: Synthetic oligonucleotide
  misc_feature 1..20: note = Target: SCN10A; (-) strand; PAM type: NRG; PAM sequence: TAG
  source 1..20: mol_type = other DNA
cttctttctttctttccttc

SEQ ID NO: 16129 - DNA, 20 bp, synthetic construct
  misc_feature 1..20: note = Description of Artificial Sequence: Synthetic oligonucleotide
  misc_feature 1..20: note = Target: SCN10A; (-) strand; PAM type: NRG; PAM sequence: CAG
  source 1..20: mol_type = other DNA
tcacccttcaacttttcatc

SEQ ID NO: 16130 - DNA, 20 bp, synthetic construct
  misc_feature 1..20: note = Description of Artificial Sequence: Synthetic oligonucleotide
  misc_feature 1..20: note = Target: SCN10A; (-) strand; PAM type: NRG; PAM sequence: TAG
  source 1..20: mol_type = other DNA
caatatgctattattaacta

SEQ ID NO: 16131 - DNA, 20 bp, synthetic construct
  misc_feature 1..20: note = Description of Artificial Sequence: Synthetic oligonucleotide
  misc_feature 1..20: note = Target: SCN10A; (-) strand; PAM type: NRG; PAM sequence: GAG
  source 1..20: mol_type = other DNA
agcagctataattactcagc

SEQ ID NO: 16132 - DNA, 20 bp, synthetic construct
  misc_feature 1..20: note = Description of Artificial Sequence: Synthetic oligonucleotide
  misc_feature 1..20: note = Target: SCN10A; (-) strand; PAM type: NRG; PAM sequence: CAG
  source 1..20: mol_type = other DNA
caagagcagctataattact

SEQ ID NO: 16133 - DNA, 20 bp, synthetic construct
  misc_feature 1..20: note = Description of Artificial Sequence: Synthetic oligonucleotide
  misc_feature 1..20: note = Target: SCN10A; (-) strand; PAM type: NRG; PAM sequence: CAG
  source 1..20: mol_type = other DNA
ttctccccctgtggcaagag

SEQ ID NO: 16134 - DNA, 20 bp, synthetic construct
  misc_feature 1..20: note = Description of Artificial Sequence: Synthetic oligonucleotide
  misc_feature 1..20: note = Target: SCN10A; (-) strand; PAM type: NRG; PAM sequence: GAG
  source 1..20: mol_type = other DNA
catttctccccctgtggcaa

SEQ ID NO: 16135 - DNA, 20 bp, synthetic construct
  misc_feature 1..20: note = Description of Artificial Sequence: Synthetic oligonucleotide
  misc_feature 1..20: note = Target: SCN10A; (-) strand; PAM type: NRG; PAM sequence: AAG
  source 1..20: mol_type = other DNA
cccatttctccccctgtggc

SEQ ID NO: 16136 - DNA, 20 bp, synthetic construct
  misc_feature 1..20: note = Description of Artificial Sequence: Synthetic oligonucleotide
  misc_feature 1..20: note = Target: SCN10A; (-) strand; PAM type: NRG; PAM sequence: TGG
  source 1..20: mol_type = other DNA
gttacccatttctccccctg

SEQ ID NO: 16137 - DNA, 20 bp, synthetic construct
  misc_feature 1..20: note = Description of Artificial Sequence: Synthetic oligonucleotide
  misc_feature 1..20: note = Target: SCN10A; (-) strand; PAM type: NRG; PAM sequence: TAG
  source 1..20: mol_type = other DNA
aacatatccatcatctcaca

SEQ ID NO: 16138 - DNA, 20 bp, synthetic construct
  misc_feature 1..20: note = Description of Artificial Sequence: Synthetic oligonucleotide
  misc_feature 1..20: note = Target: SCN10A; (-) strand; PAM type: NRG; PAM sequence: TGG
  source 1..20: mol_type = other DNA
tatataaatgattactatag

SEQ ID NO: 16139 - DNA, 20 bp, synthetic construct
  misc_feature 1..20: note = Description of Artificial Sequence: Synthetic oligonucleotide
  misc_feature 1..20: note = Target: SCN10A; (-) strand; PAM type: NRG; PAM sequence: TAG
  source 1..20: mol_type = other DNA
atatatataaatgattacta

SEQ ID NO: 16140 - DNA, 20 bp, synthetic construct
  misc_feature 1..20: note = Description of Artificial Sequence: Synthetic oligonucleotide
  misc_feature 1..20: note = Target: SCN10A; (-) strand; PAM type: NRG; PAM sequence: AAG
  source 1..20: mol_type = other DNA
gggatacaaaatgatgttat

SEQ ID NO: 16141 - DNA, 20 bp, synthetic construct
  misc_feature 1..20: note = Description of Artificial Sequence: Synthetic oligonucleotide
  misc_feature 1..20: note = Target: SCN10A; (-) strand; PAM type: NRG; PAM sequence: GGG
  source 1..20: mol_type = other DNA
caaaccatatcaatttttaa

SEQ ID NO: 16142 - DNA, 20 bp, synthetic construct
  misc_feature 1..20: note = Description of Artificial Sequence: Synthetic oligonucleotide
  misc_feature 1..20: note = Target: SCN10A; (-) strand; PAM type: NRG; PAM sequence: AGG
  source 1..20: mol_type = other DNA
ccaaaccatatcaattttta

SEQ ID NO: 16143 - DNA, 20 bp, synthetic construct
  misc_feature 1..20: note = Description of Artificial Sequence: Synthetic oligonucleotide
  misc_feature 1..20: note = Target: SCN10A; (-) strand; PAM type: NRG; PAM sequence: AAG
  source 1..20: mol_type = other DNA
gccaaaccatatcaattttt

SEQ ID NO: 16144 - DNA, 20 bp, synthetic construct
  misc_feature 1..20: note = Description of Artificial Sequence: Synthetic oligonucleotide
  misc_feature 1..20: note = Target: SCN10A; (-) strand; PAM type: NRG; PAM sequence: CAG
  source 1..20: mol_type = other DNA
ataagatttgggtggggaca

SEQ ID NO: 16145 - DNA, 20 bp, synthetic construct
  misc_feature 1..20: note = Description of Artificial Sequence: Synthetic oligonucleotide
  misc_feature 1..20: note = Target: SCN10A; (-) strand; PAM type: NRG; PAM sequence: GGG
  source 1..20: mol_type = other DNA
ttcaagataagatttgggtg

SEQ ID NO: 16146 - DNA, 20 bp, synthetic construct
  misc_feature 1..20: note = Description of Artificial Sequence: Synthetic oligonucleotide
  misc_feature 1..20: note = Target: SCN10A; (-) strand; PAM type: NRG; PAM sequence: GGG
  source 1..20: mol_type = other DNA
attcaagataagatttgggt

SEQ ID NO: 16147 - DNA, 20 bp, synthetic construct
  misc_feature 1..20: note = Description of Artificial Sequence: Synthetic oligonucleotide
  misc_feature 1..20: note = Target: SCN10A; (-) strand; PAM type: NRG; PAM sequence: TGG
  source 1..20: mol_type = other DNA
aattcaagataagatttggg

SEQ ID NO: 16148 - DNA, 20 bp, synthetic construct
  misc_feature 1..20: note = Description of Artificial Sequence: Synthetic oligonucleotide
  misc_feature 1..20: note = Target: SCN10A; (-) strand; PAM type: NRG; PAM sequence: GGG
  source 1..20: mol_type = other DNA
gggaattcaagataagattt

SEQ ID NO: 16149 - DNA, 20 bp, synthetic construct
  misc_feature 1..20: note = Description of Artificial Sequence: Synthetic oligonucleotide
  misc_feature 1..20: note = Target: SCN10A; (-) strand; PAM type: NRG; PAM sequence: TGG
  source 1..20: mol_type = other DNA
tgggaattcaagataagatt

SEQ ID NO: 16150 - DNA, 20 bp, synthetic construct
  misc_feature 1..20: note = Description of Artificial Sequence: Synthetic oligonucleotide
  misc_feature 1..20: note = Target: SCN10A; (-) strand; PAM type: NRG; PAM sequence: AAG
  source 1..20: mol_type = other DNA
aacacatgggaattcaagat

SEQ ID NO: 16151 - DNA, 20 bp, synthetic construct
  misc_feature 1..20: note = Description of Artificial Sequence: Synthetic oligonucleotide
  misc_feature 1..20: note = Target: SCN10A; (-) strand; PAM type: NRG; PAM sequence: AAG
  source 1..20: mol_type = other DNA
cccacaacacatgggaattc

SEQ ID NO: 16152 - DNA, 20 bp, synthetic construct
  misc_feature 1..20: note = Description of Artificial Sequence: Synthetic oligonucleotide
  misc_feature 1..20: note = Target: SCN10A; (-) strand; PAM type: NRG; PAM sequence: GGG
  source 1..20: mol_type = other DNA
cctcccctcccacaacacat

SEQ ID NO: 16153 - DNA, 20 bp, synthetic construct
  misc_feature 1..20: note = Description of Artificial Sequence: Synthetic oligonucleotide
  misc_feature 1..20: note = Target: SCN10A; (-) strand; PAM type: NRG; PAM sequence: TGG
  source 1..20: mol_type = other DNA
ccctcccctcccacaacaca

SEQ ID NO: 16154 - DNA, 20 bp, synthetic construct
  misc_feature 1..20: note = Description of Artificial Sequence: Synthetic oligonucleotide
  misc_feature 1..20: note = Target: SCN10A; (-) strand; PAM type: NRG; PAM sequence: GGG
  source 1..20: mol_type = other DNA
tgattcacttacctcccaca

SEQ ID NO: 16155 - DNA, 20 bp, synthetic construct
  misc_feature 1..20: note = Description of Artificial Sequence: Synthetic oligonucleotide
  misc_feature 1..20: note = Target: SCN10A; (-) strand; PAM type: NRG; PAM sequence: AGG
  source 1..20: mol_type = other DNA
atgattcacttacctcccac

SEQ ID NO: 16156 - DNA, 20 bp, synthetic construct
  misc_feature 1..20: note = Description of Artificial Sequence: Synthetic oligonucleotide
  misc_feature 1..20: note = Target: SCN10A; (-) strand; PAM type: NRG; PAM sequence: CAG
  source 1..20: mol_type = other DNA
catgattcacttacctccca

SEQ ID NO: 16157 - DNA, 20 bp, synthetic construct
  misc_feature 1..20: note = Description of Artificial Sequence: Synthetic oligonucleotide
  misc_feature 1..20: note = Target: SCN10A; (-) strand; PAM type: NRG; PAM sequence: AAG
  source 1..20: mol_type = other DNA
atcatgagaacagcatggga

SEQ ID NO: 16158 - DNA, 20 bp, synthetic construct
  misc_feature 1..20: note = Description of Artificial Sequence: Synthetic oligonucleotide
  misc_feature 1..20: note = Target: SCN10A; (-) strand; PAM type: NRG; PAM sequence: GGG
  source 1..20: mol_type = other DNA
cactatcatgagaacagcat

SEQ ID NO: 16159 - DNA, 20 bp, synthetic construct
  misc_feature 1..20: note = Description of Artificial Sequence: Synthetic oligonucleotide
  misc_feature 1..20: note = Target: SCN10A; (-) strand; PAM type: NRG; PAM sequence: TGG
  source 1..20: mol_type = other DNA
tcactatcatgagaacagca

SEQ ID NO: 16160 - DNA, 20 bp, synthetic construct
  misc_feature 1..20: note = Description of Artificial Sequence: Synthetic oligonucleotide
  misc_feature 1..20: note = Target: SCN10A; (-) strand; PAM type: NRG; PAM sequence: CAG
  source 1..20: mol_type = other DNA
cttattcactatcatgagaa

SEQ ID NO: 16161 - DNA, 20 bp, synthetic construct
  misc_feature 1..20: note = Description of Artificial Sequence: Synthetic oligonucleotide
  misc_feature 1..20: note = Target: SCN10A; (-) strand; PAM type: NRG; PAM sequence: GAG
  source 1..20: mol_type = other DNA
tgaaacttattcactatcat

SEQ ID NO: 16162 - DNA, 20 bp, synthetic construct
  misc_feature 1..20: note = Description of Artificial Sequence: Synthetic oligonucleotide
  misc_feature 1..20: note = Target: SCN10A; (-) strand; PAM type: NRG; PAM sequence: GGG
  source 1..20: mol_type = other DNA
gcaaagagagaggttgggca

SEQ ID NO: 16163 - DNA, 20 bp, synthetic construct
  misc_feature 1..20: note = Description of Artificial Sequence: Synthetic oligonucleotide
  misc_feature 1..20: note = Target: SCN10A; (-) strand; PAM type: NRG; PAM sequence: AGG
  source 1..20: mol_type = other DNA
ggcaaagagagaggttgggc

SEQ ID NO: 16164 - DNA, 20 bp, synthetic construct
  misc_feature 1..20: note = Description of Artificial Sequence: Synthetic oligonucleotide
  misc_feature 1..20: note = Target: SCN10A; (-) strand; PAM type: NRG; PAM sequence: CAG
  source 1..20: mol_type = other DNA
aggcaaagagagaggttggg

SEQ ID NO: 16165 - DNA, 20 bp, synthetic construct
  misc_feature 1..20: note = Description of Artificial Sequence: Synthetic oligonucleotide
  misc_feature 1..20: note = Target: SCN10A; (-) strand; PAM type: NRG; PAM sequence: GGG
  source 1..20: mol_type = other DNA
agcaggcaaagagagaggtt

SEQ ID NO: 16166 - DNA, 20 bp, synthetic construct
  misc_feature 1..20: note = Description of Artificial Sequence: Synthetic oligonucleotide
  misc_feature 1..20: note = Target: SCN10A; (-) strand; PAM type: NRG; PAM sequence: TGG
  source 1..20: mol_type = other DNA
cagcaggcaaagagagaggt

SEQ ID NO: 16167 - DNA, 20 bp, synthetic construct
  misc_feature 1..20: note = Description of Artificial Sequence: Synthetic oligonucleotide
  misc_feature 1..20: note = Target: SCN10A; (-) strand; PAM type: NRG; PAM sequence: AGG
  source 1..20: mol_type = other DNA
atggcagcaggcaaagagag

SEQ ID NO: 16168 - DNA, 20 bp, synthetic construct
  misc_feature 1..20: note = Description of Artificial Sequence: Synthetic oligonucleotide
  misc_feature 1..20: note = Target: SCN10A; (-) strand; PAM type: NRG; PAM sequence: GAG
  source 1..20: mol_type = other DNA
gatggcagcaggcaaagaga

SEQ ID NO: 16169 - DNA, 20 bp, synthetic construct
  misc_feature 1..20: note = Description of Artificial Sequence: Synthetic oligonucleotide
  misc_feature 1..20: note = Target: SCN10A; (-) strand; PAM type: NRG; PAM sequence: GAG
  source 1..20: mol_type = other DNA
tggatggcagcaggcaaaga

SEQ ID NO: 16170 - DNA, 20 bp, synthetic construct
  misc_feature 1..20: note = Description of Artificial Sequence: Synthetic oligonucleotide
  misc_feature 1..20: note = Target: SCN10A; (-) strand; PAM type: NRG; PAM sequence: GAG
  source 1..20: mol_type = other DNA
tgtggatggcagcaggcaaa

SEQ ID NO: 16171 - DNA, 20 bp, synthetic construct
  misc_feature 1..20: note = Description of Artificial Sequence: Synthetic oligonucleotide
  misc_feature 1..20: note = Target: SCN10A; (-) strand; PAM type: NRG; PAM sequence: AAG
  source 1..20: mol_type = other DNA
tatgtggatggcagcaggca

SEQ ID NO: 16172 - DNA, 20 bp, synthetic construct
  misc_feature 1..20: note = Description of Artificial Sequence: Synthetic oligonucleotide
  misc_feature 1..20: note = Target: SCN10A; (-) strand; PAM type: NRG; PAM sequence: AGG
  source 1..20: mol_type = other DNA
cgtcttatgtggatggcagc

SEQ ID NO: 16173 - DNA, 20 bp, synthetic construct
  misc_feature 1..20: note = Description of Artificial Sequence: Synthetic oligonucleotide
  misc_feature 1..20: note = Target: SCN10A; (-) strand; PAM type: NRG; PAM sequence: CAG
  source 1..20: mol_type = other DNA
acgtcttatgtggatggcag

SEQ ID NO: 16174 - DNA, 20 bp, synthetic construct
  misc_feature 1..20: note = Description of Artificial Sequence: Synthetic oligonucleotide
  misc_feature 1..20: note = Target: SCN10A; (-) strand; PAM type: NRG; PAM sequence: CAG
  source 1..20: mol_type = other DNA
gtcacgtcttatgtggatgg

SEQ ID NO: 16175 - DNA, 20 bp, synthetic construct
  misc_feature 1..20: note = Description of Artificial Sequence: Synthetic oligonucleotide
  misc_feature 1..20: note = Target: SCN10A; (-) strand; PAM type: NRG; PAM sequence: TGG
  source 1..20: mol_type = other DNA
cgagtcacgtcttatgtgga

SEQ ID NO: 16176 - DNA, 20 bp, synthetic construct
  misc_feature 1..20: note = Description of Artificial Sequence: Synthetic oligonucleotide
  misc_feature 1..20: note = Target: SCN10A; (-) strand; PAM type: NRG; PAM sequence: TGG
  source 1..20: mol_type = other DNA
ggtgcgagtcacgtcttatg

SEQ ID NO: 16177 - DNA, 20 bp, synthetic construct
  misc_feature 1..20: note = Description of Artificial Sequence: Synthetic oligonucleotide
  misc_feature 1..20: note = Target: SCN10A; (-) strand; PAM type: NRG; PAM sequence: GAG
  source 1..20: mol_type = other DNA
ggcaaaaggaaaggaggtgc

SEQ ID NO: 16178 - DNA, 20 bp, synthetic construct
  misc_feature 1..20: note = Description of Artificial Sequence: Synthetic oligonucleotide
  misc_feature 1..20: note = Target: SCN10A; (-) strand; PAM type: NRG; PAM sequence: AGG
  source 1..20: mol_type = other DNA
aatcatggcaaaaggaaagg

SEQ ID NO: 16179 - DNA, 20 bp, synthetic construct
  misc_feature 1..20: note = Description of Artificial Sequence: Synthetic oligonucleotide
  misc_feature 1..20: note = Target: SCN10A; (-) strand; PAM type: NRG; PAM sequence: GAG
  source 1..20: mol_type = other DNA
caatcatggcaaaaggaaag

SEQ ID NO: 16180 - DNA, 20 bp, synthetic construct
  misc_feature 1..20: note = Description of Artificial Sequence: Synthetic oligonucleotide
  misc_feature 1..20: note = Target: SCN10A; (-) strand; PAM type: NRG; PAM sequence: AGG
  source 1..20: mol_type = other DNA
tacaatcatggcaaaaggaa

SEQ ID NO: 16181 - DNA, 20 bp, synthetic construct
  misc_feature 1..20: note = Description of Artificial Sequence: Synthetic oligonucleotide
  misc_feature 1..20: note = Target: SCN10A; (-) strand; PAM type: NRG; PAM sequence: AAG
  source 1..20: mol_type = other DNA
ttacaatcatggcaaaagga

SEQ ID NO: 16182 - DNA, 20 bp, synthetic construct
  misc_feature 1..20: note = Description of Artificial Sequence: Synthetic oligonucleotide
  misc_feature 1..20: note = Target: SCN10A; (-) strand; PAM type: NRG; PAM sequence: AGG
  source 1..20: mol_type = other DNA
agccttacaatcatggcaaa

SEQ ID NO: 16183 - DNA, 20 bp, synthetic construct
  misc_feature 1..20: note = Description of Artificial Sequence: Synthetic oligonucleotide
  misc_feature 1..20: note = Target: SCN10A; (-) strand; PAM type: NRG; PAM sequence: AAG
  source 1..20: mol_type = other DNA
aagccttacaatcatggcaa

SEQ ID NO: 16184 - DNA, 20 bp, synthetic construct
  misc_feature 1..20: note = Description of Artificial Sequence: Synthetic oligonucleotide
  misc_feature 1..20: note = Target: SCN10A; (-) strand; PAM type: NRG; PAM sequence: TGG
  source 1..20: mol_type = other DNA
ctggggaagccttacaatca

SEQ ID NO: 16185 - DNA, 20 bp, synthetic construct
  misc_feature 1..20: note = Description of Artificial Sequence: Synthetic oligonucleotide
  misc_feature 1..20: note = Target: SCN10A; (-) strand; PAM type: NRG; PAM sequence: AAG
  source 1..20: mol_type = other DNA
acagcttcacatggctgggg

SEQ ID NO: 16186 - DNA, 20 bp, synthetic construct
  misc_feature 1..20: note = Description of Artificial Sequence: Synthetic oligonucleotide
  misc_feature 1..20: note = Target: SCN10A; (-) strand; PAM type: NRG; PAM sequence: GGG
  source 1..20: mol_type = other DNA
cttacagcttcacatggctg

SEQ ID NO: 16187 - DNA, 20 bp, synthetic construct
  misc_feature 1..20: note = Description of Artificial Sequence: Synthetic oligonucleotide
  misc_feature 1..20: note = Target: SCN10A; (-) strand; PAM type: NRG; PAM sequence: GGG
  source 1..20: mol_type = other DNA
acttacagcttcacatggct

SEQ ID NO: 16188 - DNA, 20 bp, synthetic construct
  misc_feature 1..20: note = Description of Artificial Sequence: Synthetic oligonucleotide
  misc_feature 1..20: note = Target: SCN10A; (-) strand; PAM type: NRG; PAM sequence: TGG
  source 1..20: mol_type = other DNA
gacttacagcttcacatggc

SEQ ID NO: 16189 - DNA, 20 bp, synthetic construct
  misc_feature 1..20: note = Description of Artificial Sequence: Synthetic oligonucleotide
  misc_feature 1..20: note = Target: SCN10A; (-) strand; PAM type: NRG; PAM sequence: TGG
  source 1..20: mol_type = other DNA
attggacttacagcttcaca

SEQ ID NO: 16190 - DNA, 20 bp, synthetic construct
  misc_feature 1..20: note = Description of Artificial Sequence: Synthetic oligonucleotide
  misc_feature 1..20: note = Target: SCN10A; (-) strand; PAM type: NRG; PAM sequence: CAG
  source 1..20: mol_type = other DNA
aagaggtttaattggactta

SEQ ID NO: 16191 - DNA, 20 bp, synthetic construct
  misc_feature 1..20: note = Description of Artificial Sequence: Synthetic oligonucleotide
  misc_feature 1..20: note = Target: SCN10A; (-) strand; PAM type: NRG; PAM sequence: TGG
  source 1..20: mol_type = other DNA
ataaaagaaagaggtttaat

SEQ ID NO: 16192 - DNA, 20 bp, synthetic construct
  misc_feature 1..20: note = Description of Artificial Sequence: Synthetic oligonucleotide
  misc_feature 1..20: note = Target: SCN10A; (-) strand; PAM type: NRG; PAM sequence: AGG
  source 1..20: mol_type = other DNA
gggcaatttataaaagaaag

SEQ ID NO: 16193 - DNA, 20 bp, synthetic construct
  misc_feature 1..20: note = Description of Artificial Sequence: Synthetic oligonucleotide
  misc_feature 1..20: note = Target: SCN10A; (-) strand; PAM type: NRG; PAM sequence: GAG
  source 1..20: mol_type = other DNA
tgggcaatttataaaagaaa

SEQ ID NO: 16194 - DNA, 20 bp, synthetic construct
  misc_feature 1..20: note = Description of Artificial Sequence: Synthetic oligonucleotide
  misc_feature 1..20: note = Target: SCN10A; (-) strand; PAM type: NRG; PAM sequence: AAG
  source 1..20: mol_type = other DNA
actgggcaatttataaaaga

SEQ ID NO: 16195 - DNA, 20 bp, synthetic construct
  misc_feature 1..20: note = Description of Artificial Sequence: Synthetic oligonucleotide
  misc_feature 1..20: note = Target: SCN10A; (-) strand; PAM type: NRG; PAM sequence: AAG
  source 1..20: mol_type = other DNA
taagactgggcaatttataa

SEQ ID NO: 16196 - DNA, 20 bp, synthetic construct
  misc_feature 1..20: note = Description of Artificial Sequence: Synthetic oligonucleotide
  misc_feature 1..20: note = Target: SCN10A; (-) strand; PAM type: NRG; PAM sequence: GGG
  source 1..20: mol_type = other DNA
ataaagacatacctaagact

SEQ ID NO: 16197 - DNA, 20 bp, synthetic construct
  misc_feature 1..20: note = Description of Artificial Sequence: Synthetic oligonucleotide
  misc_feature 1..20: note = Target: SCN10A; (-) strand; PAM type: NRG; PAM sequence: TGG
  source 1..20: mol_type = other DNA
gataaagacatacctaagac

SEQ ID NO: 16198 - DNA, 20 bp, synthetic construct
  misc_feature 1..20: note = Description of Artificial Sequence: Synthetic oligonucleotide
  misc_feature 1..20: note = Target: SCN10A; (-) strand; PAM type: NRG; PAM sequence: AAG
  source 1..20: mol_type = other DNA
ctgctgataaagacatacct

SEQ ID NO: 16199 - DNA, 20 bp, synthetic construct
  misc_feature 1..20: note = Description of Artificial Sequence: Synthetic oligonucleotide
  misc_feature 1..20: note = Target: SCN10A; (-) strand; PAM type: NRG; PAM sequence: AAG
  source 1..20: mol_type = other DNA
ctattttcatgctgctgata

SEQ ID NO: 16200 - DNA, 20 bp, synthetic construct
  misc_feature 1..20: note = Description of Artificial Sequence: Synthetic oligonucleotide
  misc_feature 1..20: note = Target: SCN10A; (-) strand; PAM type: NRG; PAM sequence: TAG
  source 1..20: mol_type = other DNA
tttattgtatatatttgtat

SEQ ID NO: 16201 - DNA, 20 bp, synthetic construct
  misc_feature 1..20: note = Description of Artificial Sequence: Synthetic oligonucleotide
  misc_feature 1..20: note = Target: SCN10A; (-) strand; PAM type: NRG; PAM sequence: CAG
  source 1..20: mol_type = other DNA
catgcattagtcattttacc

SEQ ID NO: 16202 - DNA, 20 bp, synthetic construct
  misc_feature 1..20: note = Description of Artificial Sequence: Synthetic oligonucleotide
  misc_feature 1..20: note = Target: SCN10A; (-) strand; PAM type: NRG; PAM sequence: TAG
  source 1..20: mol_type = other DNA
ccatctttccattcatgcat

SEQ ID NO: 16203 - DNA, 20 bp, synthetic construct
  misc_feature 1..20: note = Description of Artificial Sequence: Synthetic oligonucleotide
  misc_feature 1..20: note = Target: SCN10A; (-) strand; PAM type: NRG; PAM sequence: CAG
  source 1..20: mol_type = other DNA
ttccattcatctattctgtc

SEQ ID NO: 16204 - DNA, 20 bp, synthetic construct
  misc_feature 1..20: note = Description of Artificial Sequence: Synthetic oligonucleotide
  misc_feature 1..20: note = Target: SCN10A; (-) strand; PAM type: NRG; PAM sequence: CAG
  source 1..20: mol_type = other DNA
catccatcctatcaaccttc

SEQ ID NO: 16205 - DNA, 20 bp, synthetic construct
  misc_feature 1..20: note = Description of Artificial Sequence: Synthetic oligonucleotide
  misc_feature 1..20: note = Target: SCN10A; (-) strand; PAM type: NRG; PAM sequence: AAG
  source 1..20: mol_type = other DNA
cattcacgcatcttccatcc

SEQ ID NO: 16206 - DNA, 20 bp, synthetic construct
  misc_feature 1..20: note = Description of Artificial Sequence: Synthetic oligonucleotide
  misc_feature 1..20: note = Target: SCN10A; (-) strand; PAM type: NRG; PAM sequence: CAG
  source 1..20: mol_type = other DNA
ttccagctgtacatcttcat

SEQ ID NO: 16207 - DNA, 20 bp, synthetic construct
  misc_feature 1..20: note = Description of Artificial Sequence: Synthetic oligonucleotide
  misc_feature 1..20: note = Target: SCN10A; (-) strand; PAM type: NRG; PAM sequence: CAG
  source 1..20: mol_type = other DNA
ccatccatctttatttcttc

SEQ ID NO: 16208 - DNA, 20 bp, synthetic construct
  misc_feature 1..20: note = Description of Artificial Sequence: Synthetic oligonucleotide
  misc_feature 1..20: note = Target: SCN10A; (-) strand; PAM type: NRG; PAM sequence: CAG
  source 1..20: mol_type = other DNA
accttttgtatccaaccatt

SEQ ID NO: 16209 - DNA, 20 bp, synthetic construct
  misc_feature 1..20: note = Description of Artificial Sequence: Synthetic oligonucleotide
  misc_feature 1..20: note = Target: SCN10A; (-) strand; PAM type: NRG; PAM sequence: CGG
  source 1..20: mol_type = other DNA
tcagtcctaatcaccttaaa

SEQ ID NO: 16210 - DNA, 20 bp, synthetic construct
  misc_feature 1..20: note = Description of Artificial Sequence: Synthetic oligonucleotide
  misc_feature 1..20: note = Target: SCN10A; (-) strand; PAM type: NRG; PAM sequence: CAG
  source 1..20: mol_type = other DNA
tatgttgatctcaccagtct

SEQ ID NO: 16211 - DNA, 20 bp, synthetic construct
  misc_feature 1..20: note = Description of Artificial Sequence: Synthetic oligonucleotide
  misc_feature 1..20: note = Target: SCN10A; (-) strand; PAM type: NRG; PAM sequence: CAG
  source 1..20: mol_type = other DNA
cctgcttatgttgatctcac

SEQ ID NO: 16212 - DNA, 20 bp, synthetic construct
  misc_feature 1..20: note = Description of Artificial Sequence: Synthetic oligonucleotide
  misc_feature 1..20: note = Target: SCN10A; (-) strand; PAM type: NRG; PAM sequence: CAG
  source 1..20: mol_type = other DNA
gtcccacccctttgggggca

SEQ ID NO: 16213 - DNA, 20 bp, synthetic construct
  misc_feature 1..20: note = Description of Artificial Sequence: Synthetic oligonucleotide
  misc_feature 1..20: note = Target: SCN10A; (-) strand; PAM type: NRG; PAM sequence: GGG
  source 1..20: mol_type = other DNA
ccggtgtcccacccctttgg

SEQ ID NO: 16214 - DNA, 20 bp, synthetic construct
  misc_feature 1..20: note = Description of Artificial Sequence: Synthetic oligonucleotide
  misc_feature 1..20: note = Target: SCN10A; (-) strand; PAM type: NRG; PAM sequence: GGG
  source 1..20: mol_type = other DNA
tccggtgtcccacccctttg

SEQ ID NO: 16215 - DNA, 20 bp, synthetic construct
  misc_feature 1..20: note = Description of Artificial Sequence: Synthetic oligonucleotide
  misc_feature 1..20: note = Target: SCN10A; (-) strand; PAM type: NRG; PAM sequence: GGG
  source 1..20: mol_type = other DNA
ttccggtgtcccaccccttt

SEQ ID NO: 16216 - DNA, 20 bp, synthetic construct
  misc_feature 1..20: note = Description of Artificial Sequence: Synthetic oligonucleotide
  misc_feature 1..20: note = Target: SCN10A; (-) strand; PAM type: NRG; PAM sequence: TGG
  source 1..20: mol_type = other DNA
attccggtgtcccacccctt

SEQ ID NO: 16217 - DNA, 20 bp, synthetic construct
  misc_feature 1..20: note = Description of Artificial Sequence: Synthetic oligonucleotide
  misc_feature 1..20: note = Target: SCN10A; (-) strand; PAM type: NRG; PAM sequence: CGG
  source 1..20: mol_type = other DNA
gaaaggaaaattatttattc

SEQ ID NO: 16218 - DNA, 20 bp, synthetic construct
  misc_feature 1..20: note = Description of Artificial Sequence: Synthetic oligonucleotide
  misc_feature 1..20: note = Target: SCN10A; (-) strand; PAM type: NRG; PAM sequence: AGG
  source 1..20: mol_type = other DNA
aataattattcataaatgaa

SEQ ID NO: 16219 - DNA, 20 bp, synthetic construct
  misc_feature 1..20: note = Description of Artificial Sequence: Synthetic oligonucleotide
  misc_feature 1..20: note = Target: SCN10A; (-) strand; PAM type: NRG; PAM sequence: AAG
  source 1..20: mol_type = other DNA
aaataattattcataaatga

SEQ ID NO: 16220 - DNA, 20 bp, synthetic construct
  misc_feature 1..20: note = Description of Artificial Sequence: Synthetic oligonucleotide
  misc_feature 1..20: note = Target: SCN10A; (-) strand; PAM type: NRG; PAM sequence: GGG
  source 1..20: mol_type = other DNA
aggcctgaaatctgagtcat

SEQ ID NO: 16221 - DNA, 20 bp, synthetic construct
  misc_feature 1..20: note = Description of Artificial Sequence: Synthetic oligonucleotide
  misc_feature 1..20: note = Target: SCN10A; (-) strand; PAM type: NRG; PAM sequence: TGG
  source 1..20: mol_type = other DNA
gaggcctgaaatctgagtca

SEQ ID NO: 16222 - DNA, 20 bp, synthetic construct
  misc_feature 1..20: note = Description of Artificial Sequence: Synthetic oligonucleotide
  misc_feature 1..20: note = Target: SCN10A; (-) strand; PAM type: NRG; PAM sequence: GAG
  source 1..20: mol_type = other DNA
agctgtgaggcctgaaatct

SEQ ID NO: 16223 - DNA, 20 bp, synthetic construct
  misc_feature 1..20: note = Description of Artificial Sequence: Synthetic oligonucleotide
  misc_feature 1..20: note = Target: SCN10A; (-) strand; PAM type: NRG; PAM sequence: AGG
  source 1..20: mol_type = other DNA
taccacaaggattagctgtg

SEQ ID NO: 16224 - DNA, 20 bp, synthetic construct
  misc_feature 1..20: note = Description of Artificial Sequence: Synthetic oligonucleotide
  misc_feature 1..20: note = Target: SCN10A; (-) strand; PAM type: NRG; PAM sequence: GAG
  source 1..20: mol_type = other DNA
gtaccacaaggattagctgt

SEQ ID NO: 16225 - DNA, 20 bp, synthetic construct
  misc_feature 1..20: note = Description of Artificial Sequence: Synthetic oligonucleotide
  misc_feature 1..20: note = Target: SCN10A; (-) strand; PAM type: NRG; PAM sequence: TAG
  source 1..20: mol_type = other DNA
ggccactgtaccacaaggat

SEQ ID NO: 16226 - DNA, 20 bp, synthetic construct
  misc_feature 1..20: note = Description of Artificial Sequence: Synthetic oligonucleotide
  misc_feature 1..20: note = Target: SCN10A; (-) strand; PAM type: NRG; PAM sequence: AGG
  source 1..20: mol_type = other DNA
cttcaggccactgtaccaca

SEQ ID NO: 16227 - DNA, 20 bp, synthetic construct
  misc_feature 1..20: note = Description of Artificial Sequence: Synthetic oligonucleotide
  misc_feature 1..20: note = Target: SCN10A; (-) strand; PAM type: NRG; PAM sequence: AAG
  source 1..20: mol_type = other DNA
gcttcaggccactgtaccac

SEQ ID NO: 16228 - DNA, 20 bp, synthetic construct
  misc_feature 1..20: note = Description of Artificial Sequence: Synthetic oligonucleotide
  misc_feature 1..20: note = Target: SCN10A; (-) strand; PAM type: NRG; PAM sequence: AGG
  source 1..20: mol_type = other DNA
gccaatgcactagcagcttc

SEQ ID NO: 16229 - DNA, 20 bp, synthetic construct
  misc_feature 1..20: note = Description of Artificial Sequence: Synthetic oligonucleotide
  misc_feature 1..20: note = Target: SCN10A; (-) strand; PAM type: NRG; PAM sequence: CAG
  source 1..20: mol_type = other DNA
tgccaatgcactagcagctt

SEQ ID NO: 16230 - DNA, 20 bp, synthetic construct
  misc_feature 1..20: note = Description of Artificial Sequence: Synthetic oligonucleotide
  misc_feature 1..20: note = Target: SCN10A; (-) strand; PAM type: NRG; PAM sequence: CAG
  source 1..20: mol_type = other DNA
ccctgatgccaatgcactag

SEQ ID NO: 16231 - DNA, 20 bp, synthetic construct
  misc_feature 1..20: note = Description of Artificial Sequence: Synthetic oligonucleotide
  misc_feature 1..20: note = Target: SCN10A; (-) strand; PAM type: NRG; PAM sequence: TAG
  source 1..20: mol_type = other DNA
cttccctgatgccaatgcac

SEQ ID NO: 16232 - DNA, 20 bp, synthetic construct
  misc_feature 1..20: note = Description of Artificial Sequence: Synthetic oligonucleotide
  misc_feature 1..20: note = Target: SCN10A; (-) strand; PAM type: NRG; PAM sequence: AGG
  source 1..20: mol_type = other DNA
gctggcaggtcctccatagc

SEQ ID NO: 16233 - DNA, 20 bp, synthetic construct
  misc_feature 1..20: note = Description of Artificial Sequence: Synthetic oligonucleotide
  misc_feature 1..20: note = Target: SCN10A; (-) strand; PAM type: NRG; PAM sequence: CAG
  source 1..20: mol_type = other DNA
tgctggcaggtcctccatag

SEQ ID NO: 16234 - DNA, 20 bp, synthetic construct
  misc_feature 1..20: note = Description of Artificial Sequence: Synthetic oligonucleotide
  misc_feature 1..20: note = Target: SCN10A; (-) strand; PAM type: NRG; PAM sequence: TAG
  source 1..20: mol_type = other DNA
ctgtgctggcaggtcctcca

SEQ ID NO: 16235 - DNA, 20 bp, synthetic construct
  misc_feature 1..20: note = Description of Artificial Sequence: Synthetic oligonucleotide
  misc_feature 1..20: note = Target: SCN10A; (-) strand; PAM type: NRG; PAM sequence: AGG
  source 1..20: mol_type = other DNA
gtccagcctcctgtgctggc

SEQ ID NO: 16236 - DNA, 20 bp, synthetic construct
  misc_feature 1..20: note = Description of Artificial Sequence: Synthetic oligonucleotide
  misc_feature 1..20: note = Target: SCN10A; (-) strand; PAM type: NRG; PAM sequence: CAG
  source 1..20: mol_type = other DNA
tgtccagcctcctgtgctgg

SEQ ID NO: 16237 - DNA, 20 bp, synthetic construct
  misc_feature 1..20: note = Description of Artificial Sequence: Synthetic oligonucleotide
  misc_feature 1..20: note = Target: SCN10A; (-) strand; PAM type: NRG; PAM sequence: TGG
  source 1..20: mol_type = other DNA
ttctgtccagcctcctgtgc

SEQ ID NO: 16238 - DNA, 20 bp, synthetic construct
  misc_feature 1..20: note = Description of Artificial Sequence: Synthetic oligonucleotide
  misc_feature 1..20: note = Target: SCN10A; (-) strand; PAM type: NRG; PAM sequence: CAG
  source 1..20: mol_type = other DNA
tcagcacagaacattctgtc

SEQ ID NO: 16239 - DNA, 20 bp, synthetic construct
  misc_feature 1..20: note = Description of Artificial Sequence: Synthetic oligonucleotide
  misc_feature 1..20: note = Target: SCN10A; (-) strand; PAM type: NRG; PAM sequence: CAG
  source 1..20: mol_type = other DNA
aagctggatgaggttcagca

SEQ ID NO: 16240 - DNA, 20 bp, synthetic construct
  misc_feature 1..20: note = Description of Artificial Sequence: Synthetic oligonucleotide
  misc_feature 1..20: note = Target: SCN10A; (-) strand; PAM type: NRG; PAM sequence: CAG
  source 1..20: mol_type = other DNA
tcctgaagctggatgaggtt

SEQ ID NO: 16241 - DNA, 20 bp, synthetic construct
  misc_feature 1..20: note = Description of Artificial Sequence: Synthetic oligonucleotide
  misc_feature 1..20: note = Target: SCN10A; (-) strand; PAM type: NRG; PAM sequence: AGG
  source 1..20: mol_type = other DNA
ttgcctcctgaagctggatg

SEQ ID NO: 16242 - DNA, 20 bp, synthetic construct
  misc_feature 1..20: note = Description of Artificial Sequence: Synthetic oligonucleotide
  misc_feature 1..20: note = Target: SCN10A; (-) strand; PAM type: NRG; PAM sequence: GAG
  source 1..20: mol_type = other DNA
cttgcctcctgaagctggat

SEQ ID NO: 16243 - DNA, 20 bp, synthetic construct
  misc_feature 1..20: note = Description of Artificial Sequence: Synthetic oligonucleotide
  misc_feature 1..20: note = Target: SCN10A; (-) strand; PAM type: NRG; PAM sequence: TGG
  source 1..20: mol_type = other DNA
tggtgcttgcctcctgaagc

SEQ ID NO: 16244 - DNA, 20 bp, synthetic construct
  misc_feature 1..20: note = Description of Artificial Sequence: Synthetic oligonucleotide
  misc_feature 1..20: note = Target: SCN10A; (-) strand; PAM type: NRG; PAM sequence: AAG
  source 1..20: mol_type = other DNA
tatttggtgcttgcctcctg

SEQ ID NO: 16245 - DNA, 20 bp, synthetic construct
  misc_feature 1..20: note = Description of Artificial Sequence: Synthetic oligonucleotide
  misc_feature 1..20: note = Target: SCN10A; (-) strand; PAM type: NRG; PAM sequence: TGG
  source 1..20: mol_type = other DNA
tcaggaaatgtgtctgtatt

SEQ ID NO: 16246 - DNA, 20 bp, synthetic construct
  misc_feature 1..20: note = Description of Artificial Sequence: Synthetic oligonucleotide
  misc_feature 1..20: note = Target: SCN10A; (-) strand; PAM type: NRG; PAM sequence: AGG
  source 1..20: mol_type = other DNA
gtctgcccagcagaggtgtc

SEQ ID NO: 16247 - DNA, 20 bp, synthetic construct
  misc_feature 1..20: note = Description of Artificial Sequence: Synthetic oligonucleotide
  misc_feature 1..20: note = Target: SCN10A; (-) strand; PAM type: NRG; PAM sequence: CAG
  source 1..20: mol_type = other DNA
ggtctgcccagcagaggtgt

SEQ ID NO: 16248 - DNA, 20 bp, synthetic construct
  misc_feature 1..20: note = Description of Artificial Sequence: Synthetic oligonucleotide
  misc_feature 1..20: note = Target: SCN10A; (-) strand; PAM type: NRG; PAM sequence: AGG
  source 1..20: mol_type = other DNA
cagcaaggtctgcccagcag

SEQ ID NO: 16249 - DNA, 20 bp, synthetic construct
  misc_feature 1..20: note = Description of Artificial Sequence: Synthetic oligonucleotide
  misc_feature 1..20: note = Target: SCN10A; (-) strand; PAM type: NRG; PAM sequence: GAG
  source 1..20: mol_type = other DNA
gcagcaaggtctgcccagca

SEQ ID NO: 16250 - DNA, 20 bp, synthetic construct
  misc_feature 1..20: note = Description of Artificial Sequence: Synthetic oligonucleotide
  misc_feature 1..20: note = Target: SCN10A; (-) strand; PAM type: NRG; PAM sequence: CAG
  source 1..20: mol_type = other DNA
cagcagcaaggtctgcccag

SEQ ID NO: 16251 - DNA, 20 bp, synthetic construct
  misc_feature 1..20: note = Description of Artificial Sequence: Synthetic oligonucleotide
  misc_feature 1..20: note = Target: SCN10A; (-) strand; PAM type: NRG; PAM sequence: CAG
  source 1..20: mol_type = other DNA
tgccagcagcaaggtctgcc

SEQ ID NO: 16252 - DNA, 20 bp, synthetic construct
  misc_feature 1..20: note = Description of Artificial Sequence: Synthetic oligonucleotide
  misc_feature 1..20: note = Target: SCN10A; (-) strand; PAM type: NRG; PAM sequence: AGG
  source 1..20: mol_type = other DNA
tcaagcagctgccagcagca

SEQ ID NO: 16253 - DNA, 20 bp, synthetic construct
  misc_feature 1..20: note = Description of Artificial Sequence: Synthetic oligonucleotide
  misc_feature 1..20: note = Target: SCN10A; (-) strand; PAM type: NRG; PAM sequence: AAG
  source 1..20: mol_type = other DNA
ctcaagcagctgccagcagc

SEQ ID NO: 16254 - DNA, 20 bp, synthetic construct
  misc_feature 1..20: note = Description of Artificial Sequence: Synthetic oligonucleotide
  misc_feature 1..20: note = Target: SCN10A; (-) strand; PAM type: NRG; PAM sequence: CAG
  source 1..20: mol_type = other DNA
cccactcaagcagctgccag

SEQ ID NO: 16255 - DNA, 20 bp, synthetic construct
  misc_feature 1..20: note = Description of Artificial Sequence: Synthetic oligonucleotide
  misc_feature 1..20: note = Target: SCN10A; (-) strand; PAM type: NRG; PAM sequence: CAG
  source 1..20: mol_type = other DNA
tgccccactcaagcagctgc

SEQ ID NO: 16256 - DNA, 20 bp, synthetic construct
  misc_feature 1..20: note = Description of Artificial Sequence: Synthetic oligonucleotide
  misc_feature 1..20: note = Target: SCN10A; (-) strand; PAM type: NRG; PAM sequence: CAG
  source 1..20: mol_type = other DNA
ctctgcctgccccactcaag

SEQ ID NO: 16257 - DNA, 20 bp, synthetic construct
  misc_feature 1..20: note = Description of Artificial Sequence: Synthetic oligonucleotide
  misc_feature 1..20: note = Target: SCN10A; (-) strand; PAM type: NRG; PAM sequence: AAG
  source 1..20: mol_type = other DNA
ggtctctgcctgccccactc

SEQ ID NO: 16258 - DNA, 20 bp, synthetic construct
  misc_feature 1..20: note = Description of Artificial Sequence: Synthetic oligonucleotide
  misc_feature 1..20: note = Target: SCN10A; (-) strand; PAM type: NRG; PAM sequence: TGG
  source 1..20: mol_type = other DNA
gggtgaggcatgtgctgtgt

SEQ ID NO: 16259 - DNA, 20 bp, synthetic construct
  misc_feature 1..20: note = Description of Artificial Sequence: Synthetic oligonucleotide
  misc_feature 1..20: note = Target: SCN10A; (-) strand; PAM type: NRG; PAM sequence: AGG
  source 1..20: mol_type = other DNA
gggtttctgcaagcagggtg

SEQ ID NO: 16260 - DNA, 20 bp, synthetic construct
  misc_feature 1..20: note = Description of Artificial Sequence: Synthetic oligonucleotide
  misc_feature 1..20: note = Target: SCN10A; (-) strand; PAM type: NRG; PAM sequence: GAG
  source 1..20: mol_type = other DNA
agggtttctgcaagcagggt

SEQ ID NO: 16261 - DNA, 20 bp, synthetic construct
  misc_feature 1..20: note = Description of Artificial Sequence: Synthetic oligonucleotide
  misc_feature 1..20: note = Target: SCN10A; (-) strand; PAM type: NRG; PAM sequence: GGG
  source 1..20: mol_type = other DNA
gctgagggtttctgcaagca

SEQ ID NO: 16262 - DNA, 20 bp, synthetic construct
  misc_feature 1..20: note = Description of Artificial Sequence: Synthetic oligonucleotide
  misc_feature 1..20: note = Target: SCN10A; (-) strand; PAM type: NRG; PAM sequence: AGG
  source 1..20: mol_type = other DNA
agctgagggtttctgcaagc

SEQ ID NO: 16263 - DNA, 20 bp, synthetic construct
  misc_feature 1..20: note = Description of Artificial Sequence: Synthetic oligonucleotide
  misc_feature 1..20: note = Target: SCN10A; (-) strand; PAM type: NRG; PAM sequence: CAG
  source 1..20: mol_type = other DNA
tagctgagggtttctgcaag

SEQ ID NO: 16264 - DNA, 20 bp, synthetic construct
  misc_feature 1..20: note = Description of Artificial Sequence: Synthetic oligonucleotide
  misc_feature 1..20: note = Target: SCN10A; (-) strand; PAM type: NRG; PAM sequence: AAG
  source 1..20: mol_type = other DNA
gcatagctgagggtttctgc

SEQ ID NO: 16265 - DNA, 20 bp, synthetic construct
  misc_feature 1..20: note = Description of Artificial Sequence: Synthetic oligonucleotide
  misc_feature 1..20: note = Target: SCN10A; (-) strand; PAM type: NRG; PAM sequence: GGG
  source 1..20: mol_type = other DNA
gttcactgccgcatagctga

SEQ ID NO: 16266 - DNA, 20 bp, synthetic construct
  misc_feature 1..20: note = Description of Artificial Sequence: Synthetic oligonucleotide
  misc_feature 1..20: note = Target: SCN10A; (-) strand; PAM type: NRG; PAM sequence: AGG
  source 1..20: mol_type = other DNA
tgttcactgccgcatagctg

SEQ ID NO: 16267 - DNA, 20 bp, synthetic construct
  misc_feature 1..20: note = Description of Artificial Sequence: Synthetic oligonucleotide
  misc_feature 1..20: note = Target: SCN10A; (-) strand; PAM type: NRG; PAM sequence: GAG
  source 1..20: mol_type = other DNA
ctgttcactgccgcatagct

SEQ ID NO: 16268 - DNA, 20 bp, synthetic construct
  misc_feature 1..20: note = Description of Artificial Sequence: Synthetic oligonucleotide
  misc_feature 1..20: note = Target: SCN10A; (-) strand; PAM type: NRG; PAM sequence: TAG
  source 1..20: mol_type = other DNA
gttatctgttcactgccgca

SEQ ID NO: 16269 - DNA, 20 bp, synthetic construct
  misc_feature 1..20: note = Description of Artificial Sequence: Synthetic oligonucleotide
  misc_feature 1..20: note = Target: SCN10A; (-) strand; PAM type: NRG; PAM sequence: GAG
  source 1..20: mol_type = other DNA
gctttgcagcatggttaact

SEQ ID NO: 16270 - DNA, 20 bp, synthetic construct
  misc_feature 1..20: note = Description of Artificial Sequence: Synthetic oligonucleotide
  misc_feature 1..20: note = Target: SCN10A; (-) strand; PAM type: NRG; PAM sequence: TGG
  source 1..20: mol_type = other DNA
accttctttgctttgcagca

SEQ ID NO: 16271 - DNA, 20 bp, synthetic construct
  misc_feature 1..20: note = Description of Artificial Sequence: Synthetic oligonucleotide
  misc_feature 1..20: note = Target: SCN10A; (-) strand; PAM type: NRG; PAM sequence: CAG
  source 1..20: mol_type = other DNA
ccactaccttctttgctttg

SEQ ID NO: 16272 - DNA, 20 bp, synthetic construct
  misc_feature 1..20: note = Description of Artificial Sequence: Synthetic oligonucleotide
  misc_feature 1..20: note = Target: SCN10A; (-) strand; PAM type: NRG; PAM sequence: AGG
  source 1..20: mol_type = other DNA
acattgcactatcactgtct

SEQ ID NO: 16273 - DNA, 20 bp, synthetic construct
  misc_feature 1..20: note = Description of Artificial Sequence: Synthetic oligonucleotide
  misc_feature 1..20: note = Target: SCN10A; (-) strand; PAM type: NRG; PAM sequence: TAG
  source 1..20: mol_type = other DNA
cacattgcactatcactgtc

SEQ ID NO: 16274 - DNA, 20 bp, synthetic construct
  misc_feature 1..20: note = Description of Artificial Sequence: Synthetic oligonucleotide
  misc_feature 1..20: note = Target: SCN10A; (-) strand; PAM type: NRG; PAM sequence: CAG
  source 1..20: mol_type = other DNA
acatcagacatgtgattcct

SEQ ID NO: 16275 - DNA, 20 bp, synthetic construct
  misc_feature 1..20: note = Description of Artificial Sequence: Synthetic oligonucleotide
  misc_feature 1..20: note = Target: SCN10A; (-) strand; PAM type: NRG; PAM sequence: CAG
  source 1..20: mol_type = other DNA
actgtgtgcttctcacacat

SEQ ID NO: 16276 - DNA, 20 bp, synthetic construct
  misc_feature 1..20: note = Description of Artificial Sequence: Synthetic oligonucleotide
  misc_feature 1..20: note = Target: SCN10A; (-) strand; PAM type: NRG; PAM sequence: GAG
  source 1..20: mol_type = other DNA
ggccagtaatccctgcatta

SEQ ID NO: 16277 - DNA, 20 bp, synthetic construct
  misc_feature 1..20: note = Description of Artificial Sequence: Synthetic oligonucleotide
  misc_feature 1..20: note = Target: SCN10A; (-) strand; PAM type: NRG; PAM sequence: TAG
  source 1..20: mol_type = other DNA
gtggccagtaatccctgcat

SEQ ID NO: 16278 - DNA, 20 bp, synthetic construct
  misc_feature 1..20: note = Description of Artificial Sequence: Synthetic oligonucleotide
  misc_feature 1..20: note = Target: SCN10A; (-) strand; PAM type: NRG; PAM sequence: CAG
  source 1..20: mol_type = other DNA
cactcatggtaacctgtggc

SEQ ID NO: 16279 - DNA, 20 bp, synthetic construct
  misc_feature 1..20: note = Description of Artificial Sequence: Synthetic oligonucleotide
  misc_feature 1..20: note = Target: SCN10A; (-) strand; PAM type: NRG; PAM sequence: TGG
  source 1..20: mol_type = other DNA
ttcacactcatggtaacctg

SEQ ID NO: 16280 - DNA, 20 bp, synthetic construct
  misc_feature 1..20: note = Description of Artificial Sequence: Synthetic oligonucleotide
  misc_feature 1..20: note = Target: SCN10A; (-) strand; PAM type: NRG; PAM sequence: TGG
  source 1..20: mol_type = other DNA
agttcatgtgttcacactca

SEQ ID NO: 16281 - DNA, 20 bp, synthetic construct
  misc_feature 1..20: note = Description of Artificial Sequence: Synthetic oligonucleotide
  misc_feature 1..20: note = Target: SCN10A; (-) strand; PAM type: NRG; PAM sequence: GAG
  source 1..20: mol_type = other DNA
tttggagaggtaatgagctg

SEQ ID NO: 16282 - DNA, 20 bp, synthetic construct
  misc_feature 1..20: note = Description of Artificial Sequence: Synthetic oligonucleotide
  misc_feature 1..20: note = Target: SCN10A; (-) strand; PAM type: NRG; PAM sequence: TGG
  source 1..20: mol_type = other DNA
catttggagaggtaatgagc

SEQ ID NO: 16283 - DNA, 20 bp, synthetic construct
  misc_feature 1..20: note = Description of Artificial Sequence: Synthetic oligonucleotide
  misc_feature 1..20: note = Target: SCN10A; (-) strand; PAM type: NRG; PAM sequence: GAG
  source 1..20: mol_type = other DNA
ggcgcatttggagaggtaat

SEQ ID NO: 16284 - DNA, 20 bp, synthetic construct
  misc_feature 1..20: note = Description of Artificial Sequence: Synthetic oligonucleotide
  misc_feature 1..20: note = Target: SCN10A; (-) strand; PAM type: NRG; PAM sequence: AGG
  source 1..20: mol_type = other DNA
aacagagggcgcatttggag

SEQ ID NO: 16285 - DNA, 20 bp, synthetic construct
  misc_feature 1..20: note = Description of Artificial Sequence: Synthetic oligonucleotide
  misc_feature 1..20: note = Target: SCN10A; (-) strand; PAM type: NRG; PAM sequence: GAG
  source 1..20: mol_type = other DNA
gaacagagggcgcatttgga

SEQ ID NO: 16286 - DNA, 20 bp, synthetic construct
  misc_feature 1..20: note = Description of Artificial Sequence: Synthetic oligonucleotide
  misc_feature 1..20: note = Target: SCN10A; (-) strand; PAM type: NRG; PAM sequence: GAG
  source 1..20: mol_type = other DNA
aagaacagagggcgcatttg

SEQ ID NO: 16287 - DNA, 20 bp, synthetic construct
  misc_feature 1..20: note = Description of Artificial Sequence: Synthetic oligonucleotide
  misc_feature 1..20: note = Target: SCN10A; (-) strand; PAM type: NRG; PAM sequence: TGG
  source 1..20: mol_type = other DNA
aaaagaacagagggcgcatt

SEQ ID NO: 16288 - DNA, 20 bp, synthetic construct
  misc_feature 1..20: note = Description of Artificial Sequence: Synthetic oligonucleotide
  misc_feature 1..20: note = Target: SCN10A; (-) strand; PAM type: NRG; PAM sequence: GGG
  source 1..20: mol_type = other DNA
gtggcattgaaaagaacaga

SEQ ID NO: 16289 - DNA, 20 bp, synthetic construct
  misc_feature 1..20: note = Description of Artificial Sequence: Synthetic oligonucleotide
  misc_feature 1..20: note = Target: SCN10A; (-) strand; PAM type: NRG; PAM sequence: AGG
  source 1..20: mol_type = other DNA
agtggcattgaaaagaacag

SEQ ID NO: 16290 - DNA, 20 bp, synthetic construct
  misc_feature 1..20: note = Description of Artificial Sequence: Synthetic oligonucleotide
  misc_feature 1..20: note = Target: SCN10A; (-) strand; PAM type: NRG; PAM sequence: GAG
  source 1..20: mol_type = other DNA
cagtggcattgaaaagaaca

SEQ ID NO: 16291 - DNA, 20 bp, synthetic construct
  misc_feature 1..20: note = Description of Artificial Sequence: Synthetic oligonucleotide
  misc_feature 1..20: note = Target: SCN10A; (-) strand; PAM type: NRG; PAM sequence: CAG
  source 1..20: mol_type = other DNA
cccagtggcattgaaaagaa

SEQ ID NO: 16292 - DNA, 20 bp, synthetic construct
  misc_feature 1..20: note = Description of Artificial Sequence: Synthetic oligonucleotide
  misc_feature 1..20: note = Target: SCN10A; (-) strand; PAM type: NRG; PAM sequence: AAG
  source 1..20: mol_type = other DNA
tcctccccagtggcattgaa

SEQ ID NO: 16293 - DNA, 20 bp, synthetic construct
  misc_feature 1..20: note = Description of Artificial Sequence: Synthetic oligonucleotide
  misc_feature 1..20: note = Target: SCN10A; (-) strand; PAM type: NRG; PAM sequence: TGG
  source 1..20: mol_type = other DNA
tactgctgcctcctccccag

SEQ ID NO: 16294 - DNA, 20 bp, synthetic construct
  misc_feature 1..20: note = Description of Artificial Sequence: Synthetic oligonucleotide
  misc_feature 1..20: note = Target: SCN10A; (-) strand; PAM type: NRG; PAM sequence: CAG
  source 1..20: mol_type = other DNA
ttatactgctgcctcctccc

SEQ ID NO: 16295 - DNA, 20 bp, synthetic construct
  misc_feature 1..20: note = Description of Artificial Sequence: Synthetic oligonucleotide
  misc_feature 1..20: note = Target: SCN10A; (-) strand; PAM type: NRG; PAM sequence: GAG
  source 1..20: mol_type = other DNA
agccatggcttagaaccact

SEQ ID NO: 16296 - DNA, 20 bp, synthetic construct
  misc_feature 1..20: note = Description of Artificial Sequence: Synthetic oligonucleotide
  misc_feature 1..20: note = Target: SCN10A; (-) strand; PAM type: NRG; PAM sequence: TAG
  source 1..20: mol_type = other DNA
tccaaggtgcagccatggct

SEQ ID NO: 16297 - DNA, 20 bp, synthetic construct
  misc_feature 1..20: note = Description of Artificial Sequence: Synthetic oligonucleotide
  misc_feature 1..20: note = Target: SCN10A; (-) strand; PAM type: NRG; PAM sequence: TGG
  source 1..20: mol_type = other DNA
gcatttccaaggtgcagcca

SEQ ID NO: 16298 - DNA, 20 bp, synthetic construct
  misc_feature 1..20: note = Description of Artificial Sequence: Synthetic oligonucleotide
  misc_feature 1..20: note = Target: SCN10A; (-) strand; PAM type: NRG; PAM sequence: CAG
  source 1..20: mol_type = other DNA
tcccaggcatttccaaggtg

SEQ ID NO: 16299 - DNA, 20 bp, synthetic construct
  misc_feature 1..20: note = Description of Artificial Sequence: Synthetic oligonucleotide
  misc_feature 1..20: note = Target: SCN10A; (-) strand; PAM type: NRG; PAM sequence: AGG
  source 1..20: mol_type = other DNA
aatgctcccaggcatttcca

SEQ ID NO: 16300 - DNA, 20 bp, synthetic construct
  misc_feature 1..20: note = Description of Artificial Sequence: Synthetic oligonucleotide
  misc_feature 1..20: note = Target: SCN10A; (-) strand; PAM type: NRG; PAM sequence: AAG
  source 1..20: mol_type = other DNA
aaatgctcccaggcatttcc

SEQ ID NO: 16301 - DNA, 20 bp, synthetic construct
  misc_feature 1..20: note = Description of Artificial Sequence: Synthetic oligonucleotide
  misc_feature 1..20: note = Target: SCN10A; (-) strand; PAM type: NRG; PAM sequence: AGG
  source 1..20: mol_type = other DNA
tgtattttataaatgctccc

SEQ ID NO: 16302 - DNA, 20 bp, synthetic construct
  misc_feature 1..20: note = Description of Artificial Sequence: Synthetic oligonucleotide
  misc_feature 1..20: note = Target: SCN10A; (-) strand; PAM type: NRG; PAM sequence: CAG
  source 1..20: mol_type = other DNA
ctgtattttataaatgctcc

SEQ ID NO: 16303 - DNA, 20 bp, synthetic construct
  misc_feature 1..20: note = Description of Artificial Sequence: Synthetic oligonucleotide
  misc_feature 1..20: note = Target: SCN10A; (-) strand; PAM type: NRG; PAM sequence: AGG
  source 1..20: mol_type = other DNA
attggtcttgggtggtgccc

SEQ ID NO: 16304 - DNA, 20 bp, synthetic construct
  misc_feature 1..20: note = Description of Artificial Sequence: Synthetic oligonucleotide
  misc_feature 1..20: note = Target: SCN10A; (-) strand; PAM type: NRG; PAM sequence: CAG
  source 1..20: mol_type = other DNA
tattggtcttgggtggtgcc

SEQ ID NO: 16305 - DNA, 20 bp, synthetic construct
  misc_feature 1..20: note = Description of Artificial Sequence: Synthetic oligonucleotide
  misc_feature 1..20: note = Target: SCN10A; (-) strand; PAM type: NRG; PAM sequence: TGG
  source 1..20: mol_type = other DNA
ctgatcttattggtcttggg

SEQ ID NO: 16306 - DNA, 20 bp, synthetic construct
  misc_feature 1..20: note = Description of Artificial Sequence: Synthetic oligonucleotide
  misc_feature 1..20: note = Target: SCN10A; (-) strand; PAM type: NRG; PAM sequence: GGG
  source 1..20: mol_type = other DNA
attctgatcttattggtctt

SEQ ID NO: 16307 - DNA, 20 bp, synthetic construct
  misc_feature 1..20: note = Description of Artificial Sequence: Synthetic oligonucleotide
  misc_feature 1..20: note = Target: SCN10A; (-) strand; PAM type: NRG; PAM sequence: TGG
  source 1..20: mol_type = other DNA
gattctgatcttattggtct

SEQ ID NO: 16308 - DNA, 20 bp, synthetic construct
  misc_feature 1..20: note = Description of Artificial Sequence: Synthetic oligonucleotide
  misc_feature 1..20: note = Target: SCN10A; (-) strand; PAM type: NRG; PAM sequence: TGG
  source 1..20: mol_type = other DNA
cccagagattctgatcttat

SEQ ID NO: 16309 - DNA, 20 bp, synthetic construct
  misc_feature 1..20: note = Description of Artificial Sequence: Synthetic oligonucleotide
  misc_feature 1..20: note = Target: SCN10A; (-) strand; PAM type: NRG; PAM sequence: GAG
  source 1..20: mol_type = other DNA
gaccgaccaccactacccca

SEQ ID NO: 16310 - DNA, 20 bp, synthetic construct
  misc_feature 1..20: note = Description of Artificial Sequence: Synthetic oligonucleotide
  misc_feature 1..20: note = Target: SCN10A; (-) strand; PAM type: NRG; PAM sequence: CAG
  source 1..20: mol_type = other DNA
gtgaccgaccaccactaccc

SEQ ID NO: 16311 - DNA, 20 bp, synthetic construct
  misc_feature 1..20: note = Description of Artificial Sequence: Synthetic oligonucleotide
  misc_feature 1..20: note = Target: SCN10A; (-) strand; PAM type: NRG; PAM sequence: CAG
  source 1..20: mol_type = other DNA
ctggggagctatgaaatatg

SEQ ID NO: 16312 - DNA, 20 bp, synthetic construct
  misc_feature 1..20: note = Description of Artificial Sequence: Synthetic oligonucleotide
  misc_feature 1..20: note = Target: SCN10A; (-) strand; PAM type: NRG; PAM sequence: GAG
  source 1..20: mol_type = other DNA
gcacttgagaatcacctggg

SEQ ID NO: 16313 - DNA, 20 bp, synthetic construct
  misc_feature 1..20: note = Description of Artificial Sequence: Synthetic oligonucleotide
  misc_feature 1..20: note = Target: SCN10A; (-) strand; PAM type: NRG; PAM sequence: GGG
  source 1..20: mol_type = other DNA
ctgcacttgagaatcacctg

SEQ ID NO: 16314 - DNA, 20 bp, synthetic construct
  misc_feature 1..20: note = Description of Artificial Sequence: Synthetic oligonucleotide
  misc_feature 1..20: note = Target: SCN10A; (-) strand; PAM type: NRG; PAM sequence: GGG
  source 1..20: mol_type = other DNA
gctgcacttgagaatcacct

SEQ ID NO: 16315 - DNA, 20 bp, synthetic construct
  misc_feature 1..20: note = Description of Artificial Sequence: Synthetic oligonucleotide
  misc_feature 1..20: note = Target: SCN10A; (-) strand; PAM type: NRG; PAM sequence: TGG
  source 1..20: mol_type = other DNA
ggctgcacttgagaatcacc

SEQ ID NO: 16316 - DNA, 20 bp, synthetic construct
  misc_feature 1..20: note = Description of Artificial Sequence: Synthetic oligonucleotide
  misc_feature 1..20: note = Target: SCN10A; (-) strand; PAM type: NRG; PAM sequence: GAG
  source 1..20: mol_type = other DNA
cctcacacctggctgcactt

SEQ ID NO: 16317 - DNA, 20 bp, synthetic construct
  misc_feature 1..20: note = Description of Artificial Sequence: Synthetic oligonucleotide
  misc_feature 1..20: note = Target: SCN10A; (-) strand; PAM type: NRG; PAM sequence: TGG
  source 1..20: mol_type = other DNA
ggttctgtggtcctcacacc

SEQ ID NO: 16318 - DNA, 20 bp, synthetic construct
  misc_feature 1..20: note = Description of Artificial Sequence: Synthetic oligonucleotide
  misc_feature 1..20: note = Target: SCN10A; (-) strand; PAM type: NRG; PAM sequence: TGG
  source 1..20: mol_type = other DNA
tcttcccacctgcggttctg

SEQ ID NO: 16319 - DNA, 20 bp, synthetic construct
  misc_feature 1..20: note = Description of Artificial Sequence: Synthetic oligonucleotide
  misc_feature 1..20: note = Target: SCN10A; (-) strand; PAM type: NRG; PAM sequence: CGG
  source 1..20: mol_type = other DNA
acagagaatcttcccacctg

SEQ ID NO: 16320 - DNA, 20 bp, synthetic construct
  misc_feature 1..20: note = Description of Artificial Sequence: Synthetic oligonucleotide
  misc_feature 1..20: note = Target: SCN10A; (-) strand; PAM type: NRG; PAM sequence: GAG
  source 1..20: mol_type = other DNA
agccatgaactgtgagcaca

SEQ ID NO: 16321 - DNA, 20 bp, synthetic construct
  misc_feature 1..20: note = Description of Artificial Sequence: Synthetic oligonucleotide
  misc_feature 1..20: note = Target: SCN10A; (-) strand; PAM type: NRG; PAM sequence: CAG
  source 1..20: mol_type = other DNA
ggagccatgaactgtgagca

SEQ ID NO: 16322 - DNA, 20 bp, synthetic construct
  misc_feature 1..20: note = Description of Artificial Sequence: Synthetic oligonucleotide
  misc_feature 1..20: note = Target: SCN10A; (-) strand; PAM type: NRG; PAM sequence: GAG
  source 1..20: mol_type = other DNA
cttggggagccatgaactgt

SEQ ID NO: 16323 - DNA, 20 bp, synthetic construct
  misc_feature 1..20: note = Description of Artificial Sequence: Synthetic oligonucleotide
  misc_feature 1..20: note = Target: SCN10A; (-) strand; PAM type: NRG; PAM sequence: GAG
  source 1..20: mol_type = other DNA
tgggtcttctggaccttggg

SEQ ID NO: 16324 - DNA, 20 bp, synthetic construct
  misc_feature 1..20: note = Description of Artificial Sequence: Synthetic oligonucleotide
  misc_feature 1..20: note = Target: SCN10A; (-) strand; PAM type: NRG; PAM sequence: GGG
  source 1..20: mol_type = other DNA
gatgggtcttctggaccttg

SEQ ID NO: 16325 - DNA, 20 bp, synthetic construct
  misc_feature 1..20: note = Description of Artificial Sequence: Synthetic oligonucleotide
  misc_feature 1..20: note = Target: SCN10A; (-) strand; PAM type: NRG; PAM sequence: GGG
  source 1..20: mol_type = other DNA
agatgggtcttctggacctt

SEQ ID NO: 16326 - DNA, 20 bp, synthetic construct
  misc_feature 1..20: note = Description of Artificial Sequence: Synthetic oligonucleotide
  misc_feature 1..20: note = Target: SCN10A; (-) strand; PAM type: NRG; PAM sequence: TGG
  source 1..20: mol_type = other DNA
tagatgggtcttctggacct

SEQ ID NO: 16327 - DNA, 20 bp, synthetic construct
  misc_feature 1..20: note = Description of Artificial Sequence: Synthetic oligonucleotide
  misc_feature 1..20: note = Target: SCN10A; (-) strand; PAM type: NRG; PAM sequence: TGG
  source 1..20: mol_type = other DNA
gcatccatagatgggtcttc

SEQ ID NO: 16328 - DNA, 20 bp, synthetic construct
  misc_feature 1..20: note = Description of Artificial Sequence: Synthetic oligonucleotide
  misc_feature 1..20: note = Target: SCN10A; (-) strand; PAM type: NRG; PAM sequence: GGG
  source 1..20: mol_type = other DNA
atggccctgcatccatagat

SEQ ID NO: 16329 - DNA, 20 bp, synthetic construct
  misc_feature 1..20: note = Description of Artificial Sequence: Synthetic oligonucleotide
  misc_feature 1..20: note = Target: SCN10A; (-) strand; PAM type: NRG; PAM sequence: TGG
  source 1..20: mol_type = other DNA
tatggccctgcatccataga

SEQ ID NO: 16330 - DNA, 20 bp, synthetic construct
  misc_feature 1..20: note = Description of Artificial Sequence: Synthetic oligonucleotide
  misc_feature 1..20: note = Target: SCN10A; (-) strand; PAM type: NRG; PAM sequence: TAG
  source 1..20: mol_type = other DNA
gtcttatggccctgcatcca

SEQ ID NO: 16331 - DNA, 20 bp, synthetic construct
  misc_feature 1..20: note = Description of Artificial Sequence: Synthetic oligonucleotide
  misc_feature 1..20: note = Target: SCN10A; (-) strand; PAM type: NRG; PAM sequence: TGG
  source 1..20: mol_type = other DNA
tgcagctctcagaggtctta

SEQ ID NO: 16332 - DNA, 20 bp, synthetic construct
  misc_feature 1..20: note = Description of Artificial Sequence: Synthetic oligonucleotide
  misc_feature 1..20: note = Target: SCN10A; (-) strand; PAM type: NRG; PAM sequence: AGG
  source 1..20: mol_type = other DNA
atgacacatgcagctctcag

SEQ ID NO: 16333 - DNA, 20 bp, synthetic construct
  misc_feature 1..20: note = Description of Artificial Sequence: Synthetic oligonucleotide
  misc_feature 1..20: note = Target: SCN10A; (-) strand; PAM type: NRG; PAM sequence: GAG
  source 1..20: mol_type = other DNA
gatgacacatgcagctctca

SEQ ID NO: 16334 - DNA, 20 bp, synthetic construct
  misc_feature 1..20: note = Description of Artificial Sequence: Synthetic oligonucleotide
  misc_feature 1..20: note = Target: SCN10A; (-) strand; PAM type: NRG; PAM sequence: CAG
  source 1..20: mol_type = other DNA
gagatgacacatgcagctct

SEQ ID NO: 16335 - DNA, 20 bp, synthetic construct
  misc_feature 1..20: note = Description of Artificial Sequence: Synthetic oligonucleotide
  misc_feature 1..20: note = Target: SCN10A; (-) strand; PAM type: NRG; PAM sequence: CAG
  source 1..20: mol_type = other DNA
ccaaagtgagatgacacatg

SEQ ID NO: 16336 - DNA, 20 bp, synthetic construct
  misc_feature 1..20: note = Description of Artificial Sequence: Synthetic oligonucleotide
  misc_feature 1..20: note = Target: SCN10A; (-) strand; PAM type: NRG; PAM sequence: GAG
  source 1..20: mol_type = other DNA
tgcatttttacatccaaagt

SEQ ID NO: 16337 - DNA, 20 bp, synthetic construct
  misc_feature 1..20: note = Description of Artificial Sequence: Synthetic oligonucleotide
  misc_feature 1..20: note = Target: SCN10A; (-) strand; PAM type: NRG; PAM sequence: AAG
  source 1..20: mol_type = other DNA
cctctgcatttttacatcca

SEQ ID NO: 16338 - DNA, 20 bp, synthetic construct
  misc_feature 1..20: note = Description of Artificial Sequence: Synthetic oligonucleotide
  misc_feature 1..20: note = Target: SCN10A; (-) strand; PAM type: NRG; PAM sequence: AAG
  source 1..20: mol_type = other DNA
ttattaggtctccattcaga

SEQ ID NO: 16339 - DNA, 20 bp, synthetic construct
  misc_feature 1..20: note = Description of Artificial Sequence: Synthetic oligonucleotide
  misc_feature 1..20: note = Target: SCN10A; (-) strand; PAM type: NRG; PAM sequence: CAG
  source 1..20: mol_type = other DNA
tgagttattaggtctccatt

SEQ ID NO: 16340 - DNA, 20 bp, synthetic construct
  misc_feature 1..20: note = Description of Artificial Sequence: Synthetic oligonucleotide
  misc_feature 1..20: note = Target: SCN10A; (-) strand; PAM type: NRG; PAM sequence: AGG
  source 1..20: mol_type = other DNA
tgactgttaggtgagttatt

SEQ ID NO: 16341 - DNA, 20 bp, synthetic construct
  misc_feature 1..20: note = Description of Artificial Sequence: Synthetic oligonucleotide
  misc_feature 1..20: note = Target: SCN10A; (-) strand; PAM type: NRG; PAM sequence: TAG
  source 1..20: mol_type = other DNA
gtgactgttaggtgagttat

SEQ ID NO: 16342 - DNA, 20 bp, synthetic construct
  misc_feature 1..20: note = Description of Artificial Sequence: Synthetic oligonucleotide
  misc_feature 1..20: note = Target: SCN10A; (-) strand; PAM type: NRG; PAM sequence: GAG
  source 1..20: mol_type = other DNA
cacaatagtgactgttaggt

SEQ ID NO: 16343 - DNA, 20 bp, synthetic construct
  misc_feature 1..20: note = Description of Artificial Sequence: Synthetic oligonucleotide
  misc_feature 1..20: note = Target: SCN10A; (-) strand; PAM type: NRG; PAM sequence: AGG
  source 1..20: mol_type = other DNA
gtgacacaatagtgactgtt

SEQ ID NO: 16344 - DNA, 20 bp, synthetic construct
  misc_feature 1..20: note = Description of Artificial Sequence: Synthetic oligonucleotide
  misc_feature 1..20: note = Target: SCN10A; (-) strand; PAM type: NRG; PAM sequence: TAG
  source 1..20: mol_type = other DNA
tgtgacacaatagtgactgt

SEQ ID NO: 16345 - DNA, 20 bp, synthetic construct
  misc_feature 1..20: note = Description of Artificial Sequence: Synthetic oligonucleotide
  misc_feature 1..20: note = Target: SCN10A; (-) strand; PAM type: NRG; PAM sequence: TAG
  source 1..20: mol_type = other DNA
agtatgtgactgtgacacaa

SEQ ID NO: 16346 - DNA, 20 bp, synthetic construct
  misc_feature 1..20: note = Description of Artificial Sequence: Synthetic oligonucleotide
  misc_feature 1..20: note = Target: SCN10A; (-) strand; PAM type: NRG; PAM sequence: CAG
  source 1..20: mol_type = other DNA
catgagtggtaaagtccagg

SEQ ID NO: 16347 - DNA, 20 bp, synthetic construct
  misc_feature 1..20: note = Description of Artificial Sequence: Synthetic oligonucleotide
  misc_feature 1..20: note = Target: SCN10A; (-) strand; PAM type: NRG; PAM sequence: AGG
  source 1..20: mol_type = other DNA
acccatgagtggtaaagtcc

SEQ ID NO: 16348 - DNA, 20 bp, synthetic construct
  misc_feature 1..20: note = Description of Artificial Sequence: Synthetic oligonucleotide
  misc_feature 1..20: note = Target: SCN10A; (-) strand; PAM type: NRG; PAM sequence: CAG
  source 1..20: mol_type = other DNA
cacccatgagtggtaaagtc

SEQ ID NO: 16349 - DNA, 20 bp, synthetic construct
  misc_feature 1..20: note = Description of Artificial Sequence: Synthetic oligonucleotide
  misc_feature 1..20: note = Target: SCN10A; (-) strand; PAM type: NRG; PAM sequence: AAG
  source 1..20: mol_type = other DNA
cctgacacccatgagtggta

SEQ ID NO: 16350 - DNA, 20 bp, synthetic construct
  misc_feature 1..20: note = Description of Artificial Sequence: Synthetic oligonucleotide
  misc_feature 1..20: note = Target: SCN10A; (-) strand; PAM type: NRG; PAM sequence: TGG
  source 1..20: mol_type = other DNA
atagccctgacacccatgag

SEQ ID NO: 16351 - DNA, 20 bp, synthetic construct
  misc_feature 1..20: note = Description of Artificial Sequence: Synthetic oligonucleotide
  misc_feature 1..20: note = Target: SCN10A; (-) strand; PAM type: NRG; PAM sequence: GAG
  source 1..20: mol_type = other DNA
agaatagccctgacacccat

SEQ ID NO: 16352 - DNA, 20 bp, synthetic construct
  misc_feature 1..20: note = Description of Artificial Sequence: Synthetic oligonucleotide
  misc_feature 1..20: note = Target: SCN10A; (-) strand; PAM type: NRG; PAM sequence: TAG
  source 1..20: mol_type = other DNA
tttagtgaggagtctgagaa

SEQ ID NO: 16353 - DNA, 20 bp, synthetic construct
  misc_feature 1..20: note = Description of Artificial Sequence: Synthetic oligonucleotide
  misc_feature 1..20: note = Target: SCN10A; (-) strand; PAM type: NRG; PAM sequence: GAG
  source 1..20: mol_type = other DNA
gagcatttagtgaggagtct

SEQ ID NO: 16354 - DNA, 20 bp, synthetic construct
  misc_feature 1..20: note = Description of Artificial Sequence: Synthetic oligonucleotide
  misc_feature 1..20: note = Target: SCN10A; (-) strand; PAM type: NRG; PAM sequence: GAG
  source 1..20: mol_type = other DNA
agttttgagcatttagtgag

SEQ ID NO: 16355 - DNA, 20 bp, synthetic construct
  misc_feature 1..20: note = Description of Artificial Sequence: Synthetic oligonucleotide
  misc_feature 1..20: note = Target: SCN10A; (-) strand; PAM type: NRG; PAM sequence: AGG
  source 1..20: mol_type = other DNA
aaagttttgagcatttagtg

SEQ ID NO: 16356 - DNA, 20 bp, synthetic construct
  misc_feature 1..20: note = Description of Artificial Sequence: Synthetic oligonucleotide
  misc_feature 1..20: note = Target: SCN10A; (-) strand; PAM type: NRG; PAM sequence: GAG
  source 1..20: mol_type = other DNA
aaaagttttgagcatttagt

SEQ ID NO: 16357 - DNA, 20 bp, synthetic construct
  misc_feature 1..20: note = Description of Artificial Sequence: Synthetic oligonucleotide
  misc_feature 1..20: note = Target: SCN10A; (-) strand; PAM type: NRG; PAM sequence: TAG
  source 1..20: mol_type = other DNA
aaagaaaagttttgagcatt

SEQ ID NO: 16358 - DNA, 20 bp, synthetic construct
  misc_feature 1..20: note = Description of Artificial Sequence: Synthetic oligonucleotide
  misc_feature 1..20: note = Target: SCN10A; (-) strand; PAM type: NRG; PAM sequence: GAG
  source 1..20: mol_type = other DNA
ctactccaaagaaaagtttt

SEQ ID NO: 16359 - DNA, 20 bp, synthetic construct
  misc_feature 1..20: note = Description of Artificial Sequence: Synthetic oligonucleotide
  misc_feature 1..20: note = Target: SCN10A; (-) strand; PAM type: NRG; PAM sequence: AAG
  source 1..20: mol_type = other DNA
tcaagggctactccaaagaa

SEQ ID NO: 16360 - DNA, 20 bp, synthetic construct
  misc_feature 1..20: note = Description of Artificial Sequence: Synthetic oligonucleotide
  misc_feature 1..20: note = Target: SCN10A; (-) strand; PAM type: NRG; PAM sequence: AAG
  source 1..20: mol_type = other DNA
ggccctcaagggctactcca

SEQ ID NO: 16361 - DNA, 20 bp, synthetic construct
  misc_feature 1..20: note = Description of Artificial Sequence: Synthetic oligonucleotide
  misc_feature 1..20: note = Target: SCN10A; (-) strand; PAM type: NRG; PAM sequence: GGG
  source 1..20: mol_type = other DNA
ctcagagacctggccctcaa

SEQ ID NO: 16362 - DNA, 20 bp, synthetic construct
  misc_feature 1..20: note = Description of Artificial Sequence: Synthetic oligonucleotide
  misc_feature 1..20: note = Target: SCN10A; (-) strand; PAM type: NRG; PAM sequence: AGG
  source 1..20: mol_type = other DNA
gctcagagacctggccctca

SEQ ID NO: 16363 - DNA, 20 bp, synthetic construct
  misc_feature 1..20: note = Description of Artificial Sequence: Synthetic oligonucleotide
  misc_feature 1..20: note = Target: SCN10A; (-) strand; PAM type: NRG; PAM sequence: AAG
  source 1..20: mol_type = other DNA
agctcagagacctggccctc

SEQ ID NO: 16364 - DNA, 20 bp, synthetic construct
  misc_feature 1..20: note = Description of Artificial Sequence: Synthetic oligonucleotide
  misc_feature 1..20: note = Target: SCN10A; (-) strand; PAM type: NRG; PAM sequence: TGG
  source 1..20: mol_type = other DNA
gcaaaggaagctcagagacc

SEQ ID NO: 16365 - DNA, 20 bp, synthetic construct
  misc_feature 1..20: note = Description of Artificial Sequence: Synthetic oligonucleotide
  misc_feature 1..20: note = Target: SCN10A; (-) strand; PAM type: NRG; PAM sequence: GAG
  source 1..20: mol_type = other DNA
gctagggcaaaggaagctca

SEQ ID NO: 16366 - DNA, 20 bp, synthetic construct
  misc_feature 1..20: note = Description of Artificial Sequence: Synthetic oligonucleotide
  misc_feature 1..20: note = Target: SCN10A; (-) strand; PAM type: NRG; PAM sequence: CAG
  source 1..20: mol_type = other DNA
cagctagggcaaaggaagct

SEQ ID NO: 16367 - DNA, 20 bp, synthetic construct
  misc_feature 1..20: note = Description of Artificial Sequence: Synthetic oligonucleotide
  misc_feature 1..20: note = Target: SCN10A; (-) strand; PAM type: NRG; PAM sequence: AAG
  source 1..20: mol_type = other DNA
ggctacagctagggcaaagg

SEQ ID NO: 16368 - DNA, 20 bp, synthetic construct
  misc_feature 1..20: note = Description of Artificial Sequence: Synthetic oligonucleotide
  misc_feature 1..20: note = Target: SCN10A; (-) strand; PAM type: NRG; PAM sequence: AGG
  source 1..20: mol_type = other DNA
cctggctacagctagggcaa

SEQ ID NO: 16369 - DNA, 20 bp, synthetic construct
  misc_feature 1..20: note = Description of Artificial Sequence: Synthetic oligonucleotide
  misc_feature 1..20: note = Target: SCN10A; (-) strand; PAM type: NRG; PAM sequence: AAG
  source 1..20: mol_type = other DNA
tcctggctacagctagggca

SEQ ID NO: 16370 - DNA, 20 bp, synthetic construct
  misc_feature 1..20: note = Description of Artificial Sequence: Synthetic oligonucleotide
  misc_feature 1..20: note = Target: SCN10A; (-) strand; PAM type: NRG; PAM sequence: GGG
  source 1..20: mol_type = other DNA
ctgactcctggctacagcta

SEQ ID NO: 16371 - DNA, 20 bp, synthetic construct
  misc_feature 1..20: note = Description of Artificial Sequence: Synthetic oligonucleotide
  misc_feature 1..20: note = Target: SCN10A; (-) strand; PAM type: NRG; PAM sequence: AGG
  source 1..20: mol_type = other DNA
tctgactcctggctacagct

SEQ ID NO: 16372 - DNA, 20 bp, synthetic construct
  misc_feature 1..20: note = Description of Artificial Sequence: Synthetic oligonucleotide
  misc_feature 1..20: note = Target: SCN10A; (-) strand; PAM type: NRG; PAM sequence: TAG
  source 1..20: mol_type = other DNA
ctctgactcctggctacagc

SEQ ID NO: 16373 - DNA, 20 bp, synthetic construct
  misc_feature 1..20: note = Description of Artificial Sequence: Synthetic oligonucleotide
  misc_feature 1..20: note = Target: SCN10A; (-) strand; PAM type: NRG; PAM sequence: CAG
  source 1..20: mol_type = other DNA
tcccctctgactcctggcta

SEQ ID NO: 16374 - DNA, 20 bp, synthetic construct
  misc_feature 1..20: note = Description of Artificial Sequence: Synthetic oligonucleotide
  misc_feature 1..20: note = Target: SCN10A; (-) strand; PAM type: NRG; PAM sequence: TGG
  source 1..20: mol_type = other DNA
gggtcctcccctctgactcc

SEQ ID NO: 16375 - DNA, 20 bp, synthetic construct
  misc_feature 1..20: note = Description of Artificial Sequence: Synthetic oligonucleotide
  misc_feature 1..20: note = Target: SCN10A; (-) strand; PAM type: NRG; PAM sequence: GGG
  source 1..20: mol_type = other DNA
gtgggaacacgtggggtttg

SEQ ID NO: 16376 - DNA, 20 bp, synthetic construct
  misc_feature 1..20: note = Description of Artificial Sequence: Synthetic oligonucleotide
  misc_feature 1..20: note = Target: SCN10A; (-) strand; PAM type: NRG; PAM sequence: GGG
  source 1..20: mol_type = other DNA
agtgggaacacgtggggttt

SEQ ID NO: 16377 - DNA, 20 bp, synthetic construct
  misc_feature 1..20: note = Description of Artificial Sequence: Synthetic oligonucleotide
  misc_feature 1..20: note = Target: SCN10A; (-) strand; PAM type: NRG; PAM sequence: TGG
  source 1..20: mol_type = other DNA
cagtgggaacacgtggggtt

SEQ ID NO: 16378 - DNA, 20 bp, synthetic construct
  misc_feature 1..20: note = Description of Artificial Sequence: Synthetic oligonucleotide
  misc_feature 1..20: note = Target: SCN10A; (-) strand; PAM type: NRG; PAM sequence: GGG
  source 1..20: mol_type = other DNA
tggctcagtgggaacacgtg

SEQ ID NO: 16379 - DNA, 20 bp, synthetic construct
  misc_feature 1..20: note = Description of Artificial Sequence: Synthetic oligonucleotide
  misc_feature 1..20: note = Target: SCN10A; (-) strand; PAM type: NRG; PAM sequence: GGG
  source 1..20: mol_type = other DNA
gtggctcagtgggaacacgt

SEQ ID NO: 16380 - DNA, 20 bp, synthetic construct
  misc_feature 1..20: note = Description of Artificial Sequence: Synthetic oligonucleotide
  misc_feature 1..20: note = Target: SCN10A; (-) strand; PAM type: NRG; PAM sequence: TGG
  source 1..20: mol_type = other DNA
agtggctcagtgggaacacg

SEQ ID NO: 16381 - DNA, 20 bp, synthetic construct
  misc_feature 1..20: note = Description of Artificial Sequence: Synthetic oligonucleotide
  misc_feature 1..20: note = Target: SCN10A; (-) strand; PAM type: NRG; PAM sequence: GGG
  source 1..20: mol_type = other DNA
gtgaatgtgagtggctcagt

SEQ ID NO: 16382 - DNA, 20 bp, synthetic construct
  misc_feature 1..20: note = Description of Artificial Sequence: Synthetic oligonucleotide
  misc_feature 1..20: note = Target: SCN10A; (-) strand; PAM type: NRG; PAM sequence: TGG
  source 1..20: mol_type = other DNA
tgtgaatgtgagtggctcag

SEQ ID NO: 16383 - DNA, 20 bp, synthetic construct
  misc_feature 1..20: note = Description of Artificial Sequence: Synthetic oligonucleotide
  misc_feature 1..20: note = Target: SCN10A; (-) strand; PAM type: NRG; PAM sequence: CAG
  source 1..20: mol_type = other DNA
cattgtgaatgtgagtggct

SEQ ID NO: 16384 - DNA, 20 bp, synthetic construct
  misc_feature 1..20: note = Description of Artificial Sequence: Synthetic oligonucleotide
  misc_feature 1..20: note = Target: SCN10A; (-) strand; PAM type: NRG; PAM sequence: TGG
  source 1..20: mol_type = other DNA
ttcctcattgtgaatgtgag

SEQ ID NO: 16385 - DNA, 20 bp, synthetic construct
  misc_feature 1..20: note = Description of Artificial Sequence: Synthetic oligonucleotide
  misc_feature 1..20: note = Target: SCN10A; (-) strand; PAM type: NRG; PAM sequence: GAG
  source 1..20: mol_type = other DNA
gacttcctcattgtgaatgt

SEQ ID NO: 16386 - DNA, 20 bp, synthetic construct
  misc_feature 1..20: note = Description of Artificial Sequence: Synthetic oligonucleotide
  misc_feature 1..20: note = Target: SCN10A; (-) strand; PAM type: NRG; PAM sequence: TGG
  source 1..20: mol_type = other DNA
caccaatgcctggtgctggc

SEQ ID NO: 16387 - DNA, 20 bp, synthetic construct
  misc_feature 1..20: note = Description of Artificial Sequence: Synthetic oligonucleotide
  misc_feature 1..20: note = Target: SCN10A; (-) strand; PAM type: NRG; PAM sequence: TGG
  source 1..20: mol_type = other DNA
acttcaccaatgcctggtgc

SEQ ID NO: 16388 - DNA, 20 bp, synthetic construct
  misc_feature 1..20: note = Description of Artificial Sequence: Synthetic oligonucleotide
  misc_feature 1..20: note = Target: SCN10A; (-) strand; PAM type: NRG; PAM sequence: TGG
  source 1..20: mol_type = other DNA
aaaagtacttcaccaatgcc

SEQ ID NO: 16389 - DNA, 20 bp, synthetic construct
  misc_feature 1..20: note = Description of Artificial Sequence: Synthetic oligonucleotide
  misc_feature 1..20: note = Target: SCN10A; (-) strand; PAM type: NRG; PAM sequence: AAG
  source 1..20: mol_type = other DNA
gggtggcctatggcttcaaa

SEQ ID NO: 16390 - DNA, 20 bp, synthetic construct
  misc_feature 1..20: note = Description of Artificial Sequence: Synthetic oligonucleotide
  misc_feature 1..20: note = Target: SCN10A; (-) strand; PAM type: NRG; PAM sequence: TGG
  source 1..20: mol_type = other DNA
ctgcttaagtgggtggccta

SEQ ID NO: 16391 - DNA, 20 bp, synthetic construct
  misc_feature 1..20: note = Description of Artificial Sequence: Synthetic oligonucleotide
  misc_feature 1..20: note = Target: SCN10A; (-) strand; PAM type: NRG; PAM sequence: TGG
  source 1..20: mol_type = other DNA
cgagatgctgcttaagtggg

SEQ ID NO: 16392 - DNA, 20 bp, synthetic construct
  misc_feature 1..20: note = Description of Artificial Sequence: Synthetic oligonucleotide
  misc_feature 1..20: note = Target: SCN10A; (-) strand; PAM type: NRG; PAM sequence: GGG
  source 1..20: mol_type = other DNA
gttcgagatgctgcttaagt

SEQ ID NO: 16393 - DNA, 20 bp, synthetic construct
  misc_feature 1..20: note = Description of Artificial Sequence: Synthetic oligonucleotide
  misc_feature 1..20: note = Target: SCN10A; (-) strand; PAM type: NRG; PAM sequence: TGG
  source 1..20: mol_type = other DNA
tgttcgagatgctgcttaag

SEQ ID NO: 16394 - DNA, 20 bp, synthetic construct
  misc_feature 1..20: note = Description of Artificial Sequence: Synthetic oligonucleotide
  misc_feature 1..20: note = Target: SCN10A; (-) strand; PAM type: NRG; PAM sequence: AAG
  source 1..20: mol_type = other DNA
ttgtgttcgagatgctgctt

SEQ ID NO: 16395 - DNA, 20 bp, synthetic construct
  misc_feature 1..20: note = Description of Artificial Sequence: Synthetic oligonucleotide
  misc_feature 1..20: note = Target: SCN10A; (-) strand; PAM type: NRG; PAM sequence: GAG
  source 1..20: mol_type = other DNA
tcacctttatctttgtgttc

SEQ ID NO: 16396 - DNA, 20 bp, synthetic construct
  misc_feature 1..20: note = Description of Artificial Sequence: Synthetic oligonucleotide
  misc_feature 1..20: note = Target: SCN10A; (-) strand; PAM type: NRG; PAM sequence: GGG
  source 1..20: mol_type = other DNA
tttgctggagtacactgaca

SEQ ID NO: 16397 - DNA, 20 bp, synthetic construct
  misc_feature 1..20: note = Description of Artificial Sequence: Synthetic oligonucleotide
  misc_feature 1..20: note = Target: SCN10A; (-) strand; PAM type: NRG; PAM sequence: AGG
  source 1..20: mol_type = other DNA
ctttgctggagtacactgac

SEQ ID NO: 16398 - DNA, 20 bp, synthetic construct
  misc_feature 1..20: note = Description of Artificial Sequence: Synthetic oligonucleotide
  misc_feature 1..20: note = Target: SCN10A; (-) strand; PAM type: NRG; PAM sequence: CAG
  source 1..20: mol_type = other DNA
gctttgctggagtacactga

SEQ ID NO: 16399 - DNA, 20 bp, synthetic construct
  misc_feature 1..20: note = Description of Artificial Sequence: Synthetic oligonucleotide
  misc_feature 1..20: note = Target: SCN10A; (-) strand; PAM type: NRG; PAM sequence: GAG
  source 1..20: mol_type = other DNA
ccacggtgaaagctttgctg

SEQ ID NO: 16400 - DNA, 20 bp, synthetic construct
  misc_feature 1..20: note = Description of Artificial Sequence: Synthetic oligonucleotide
  misc_feature 1..20: note = Target: SCN10A; (-) strand; PAM type: NRG; PAM sequence: TGG
  source 1..20: mol_type = other DNA
gcccacggtgaaagctttgc

SEQ ID NO: 16401 - DNA, 20 bp, synthetic construct
  misc_feature 1..20: note = Description of Artificial Sequence: Synthetic oligonucleotide
  misc_feature 1..20: note = Target: SCN10A; (-) strand; PAM type: NRG; PAM sequence: AAG
  source 1..20: mol_type = other DNA
ggaccagaagcccacggtga

SEQ ID NO: 16402 - DNA, 20 bp, synthetic construct
  misc_feature 1..20: note = Description of Artificial Sequence: Synthetic oligonucleotide
  misc_feature 1..20: note = Target: SCN10A; (-) strand; PAM type: NRG; PAM sequence: CGG
  source 1..20: mol_type = other DNA
ttacctggaccagaagccca

SEQ ID NO: 16403 - DNA, 20 bp, synthetic construct
  misc_feature 1..20: note = Description of Artificial Sequence: Synthetic oligonucleotide
  misc_feature 1..20: note = Target: SCN10A; (-) strand; PAM type: NRG; PAM sequence: AAG
  source 1..20: mol_type = other DNA
aagactattacctggaccag

SEQ ID NO: 16404 - DNA, 20 bp, synthetic construct
  misc_feature 1..20: note = Description of Artificial Sequence: Synthetic oligonucleotide
  misc_feature 1..20: note = Target: SCN10A; (-) strand; PAM type: NRG; PAM sequence: CAG
  source 1..20: mol_type = other DNA
ttgaagactattacctggac

SEQ ID NO: 16405 - DNA, 20 bp, synthetic construct
  misc_feature 1..20: note = Description of Artificial Sequence: Synthetic oligonucleotide
  misc_feature 1..20: note = Target: SCN10A; (-) strand; PAM type: NRG; PAM sequence: TGG
  source 1..20: mol_type = other DNA
ggcctttgaagactattacc

SEQ ID NO: 16406 - DNA, 20 bp, synthetic construct
  misc_feature 1..20: note = Description of Artificial Sequence: Synthetic oligonucleotide
  misc_feature 1..20: note = Target: SCN10A; (-) strand; PAM type: NRG; PAM sequence: AAG
  source 1..20: mol_type = other DNA
ttcttccttccaggcctttg

SEQ ID NO: 16407 - DNA, 20 bp, synthetic construct
  misc_feature 1..20: note = Description of Artificial Sequence: Synthetic oligonucleotide
  misc_feature 1..20: note = Target: SCN10A; (-) strand; PAM type: NRG; PAM sequence: AGG
  source 1..20: mol_type = other DNA
ctgcatcctttcttccttcc

SEQ ID NO: 16408 - DNA, 20 bp, synthetic construct
  misc_feature 1..20: note = Description of Artificial Sequence: Synthetic oligonucleotide
  misc_feature 1..20: note = Target: SCN10A; (-) strand; PAM type: NRG; PAM sequence: CAG
  source 1..20: mol_type = other DNA
tctgcatcctttcttccttc

SEQ ID NO: 16409 - DNA, 20 bp, synthetic construct
  misc_feature 1..20: note = Description of Artificial Sequence: Synthetic oligonucleotide
  misc_feature 1..20: note = Target: SCN10A; (-) strand; PAM type: NRG; PAM sequence: CAG
  source 1..20: mol_type = other DNA
cccagtgctgtgggtccagg

SEQ ID NO: 16410 - DNA, 20 bp, synthetic construct
  misc_feature 1..20: note = Description of Artificial Sequence: Synthetic oligonucleotide
  misc_feature 1..20: note = Target: SCN10A; (-) strand; PAM type: NRG; PAM sequence: AGG
  source 1..20: mol_type = other DNA
ggccccagtgctgtgggtcc

SEQ ID NO: 16411 - DNA, 20 bp, synthetic construct
  misc_feature 1..20: note = Description of Artificial Sequence: Synthetic oligonucleotide
  misc_feature 1..20: note = Target: SCN10A; (-) strand; PAM type: NRG; PAM sequence: CAG
  source 1..20: mol_type = other DNA
gggccccagtgctgtgggtc

SEQ ID NO: 16412 - DNA, 20 bp, synthetic construct
  misc_feature 1..20: note = Description of Artificial Sequence: Synthetic oligonucleotide
  misc_feature 1..20: note = Target: SCN10A; (-) strand; PAM type: NRG; PAM sequence: GGG
  source 1..20: mol_type = other DNA
agtctgggccccagtgctgt

SEQ ID NO: 16413 - DNA, 20 bp, synthetic construct
  misc_feature 1..20: note = Description of Artificial Sequence: Synthetic oligonucleotide
  misc_feature 1..20: note = Target: SCN10A; (-) strand; PAM type: NRG; PAM sequence: TGG
  source 1..20: mol_type = other DNA
cagtctgggccccagtgctg

SEQ ID NO: 16414 - DNA, 20 bp, synthetic construct
  misc_feature 1..20: note = Description of Artificial Sequence: Synthetic oligonucleotide
  misc_feature 1..20: note = Target: SCN10A; (-) strand; PAM type: NRG; PAM sequence: CAG
  source 1..20: mol_type = other DNA
ttccctatcagtctgggccc

SEQ ID NO: 16415 - DNA, 20 bp, synthetic construct
  misc_feature 1..20: note = Description of Artificial Sequence: Synthetic oligonucleotide
  misc_feature 1..20: note = Target: SCN10A; (-) strand; PAM type: NRG; PAM sequence: GGG
  source 1..20: mol_type = other DNA
gggtccttccctatcagtct

SEQ ID NO: 16416 - DNA, 20 bp, synthetic construct
  misc_feature 1..20: note = Description of Artificial Sequence: Synthetic oligonucleotide
  misc_feature 1..20: note = Target: SCN10A; (-) strand; PAM type: NRG; PAM sequence: TGG
  source 1..20: mol_type = other DNA
tgggtccttccctatcagtc

SEQ ID NO: 16417 - DNA, 20 bp, synthetic construct
  misc_feature 1..20: note = Description of Artificial Sequence: Synthetic oligonucleotide
  misc_feature 1..20: note = Target: SCN10A; (-) strand; PAM type: NRG; PAM sequence: CAG
  source 1..20: mol_type = other DNA
ctggctgggtccttccctat

SEQ ID NO: 16418 - DNA, 20 bp, synthetic construct
  misc_feature 1..20: note = Description of Artificial Sequence: Synthetic oligonucleotide
  misc_feature 1..20: note = Target: SCN10A; (-) strand; PAM type: NRG; PAM sequence: GGG
  source 1..20: mol_type = other DNA
gactgtggtcagggctggct

SEQ ID NO: 16419 - DNA, 20 bp, synthetic construct
  misc_feature 1..20: note = Description of Artificial Sequence: Synthetic oligonucleotide
  misc_feature 1..20: note = Target: SCN10A; (-) strand; PAM type: NRG; PAM sequence: TGG
  source 1..20: mol_type = other DNA
ggactgtggtcagggctggc

SEQ ID NO: 16420 - DNA, 20 bp, synthetic construct
  misc_feature 1..20: note = Description of Artificial Sequence: Synthetic oligonucleotide
  misc_feature 1..20: note = Target: SCN10A; (-) strand; PAM type: NRG; PAM sequence: TGG
  source 1..20: mol_type = other DNA
ccagggactgtggtcagggc

SEQ ID NO: 16421 - DNA, 20 bp, synthetic construct
  misc_feature 1..20: note = Description of Artificial Sequence: Synthetic oligonucleotide
  misc_feature 1..20: note = Target: SCN10A; (-) strand; PAM type: NRG; PAM sequence: GGG
  source 1..20: mol_type = other DNA
ccttccagggactgtggtca

SEQ ID NO: 16422 - DNA, 20 bp, synthetic construct
  misc_feature 1..20: note = Description of Artificial Sequence: Synthetic oligonucleotide
  misc_feature 1..20: note = Target: SCN10A; (-) strand; PAM type: NRG; PAM sequence: AGG
  source 1..20: mol_type = other DNA
cccttccagggactgtggtc

SEQ ID NO: 16423 - DNA, 20 bp, synthetic construct
  misc_feature 1..20: note = Description of Artificial Sequence: Synthetic oligonucleotide
  misc_feature 1..20: note = Target: SCN10A; (-) strand; PAM type: NRG; PAM sequence: CAG
  source 1..20: mol_type = other DNA
ccccttccagggactgtggt

SEQ ID NO: 16424 - DNA, 20 bp, synthetic construct
  misc_feature 1..20: note = Description of Artificial Sequence: Synthetic oligonucleotide
  misc_feature 1..20: note = Target: SCN10A; (-) strand; PAM type: NRG; PAM sequence: TGG
  source 1..20: mol_type = other DNA
aaatccccttccagggactg

SEQ ID NO: 16425 - DNA, 20 bp, synthetic construct
  misc_feature 1..20: note = Description of Artificial Sequence: Synthetic oligonucleotide
  misc_feature 1..20: note = Target: SCN10A; (-) strand; PAM type: NRG; PAM sequence: GGG
  source 1..20: mol_type = other DNA
gactaccaaatccccttcca

SEQ ID NO: 16426 - DNA, 20 bp, synthetic construct
  misc_feature 1..20: note = Description of Artificial Sequence: Synthetic oligonucleotide
  misc_feature 1..20: note = Target: SCN10A; (-) strand; PAM type: NRG; PAM sequence: AGG
  source 1..20: mol_type = other DNA
tgactaccaaatccccttcc

SEQ ID NO: 16427 - DNA, 20 bp, synthetic construct
  misc_feature 1..20: note = Description of Artificial Sequence: Synthetic oligonucleotide
  misc_feature 1..20: note = Target: SCN10A; (-) strand; PAM type: NRG; PAM sequence: CAG
  source 1..20: mol_type = other DNA
ctgactaccaaatccccttc

SEQ ID NO: 16428 - DNA, 20 bp, synthetic construct
  misc_feature 1..20: note = Description of Artificial Sequence: Synthetic oligonucleotide
  misc_feature 1..20: note = Target: SCN10A; (-) strand; PAM type: NRG; PAM sequence: AAG
  source 1..20: mol_type = other DNA
gcaaacaaaatgctactggc

SEQ ID NO: 16429 - DNA, 20 bp, synthetic construct
  misc_feature 1..20: note = Description of Artificial Sequence: Synthetic oligonucleotide
  misc_feature 1..20: note = Target: SCN10A; (-) strand; PAM type: NRG; PAM sequence: TGG
  source 1..20: mol_type = other DNA
cacagcaaacaaaatgctac

SEQ ID NO: 16430 - DNA, 20 bp, synthetic construct
  misc_feature 1..20: note = Description of Artificial Sequence: Synthetic oligonucleotide
  misc_feature 1..20: note = Target: SCN10A; (-) strand; PAM type: NRG; PAM sequence: CAG
  source 1..20: mol_type = other DNA
tatcccactttacctcccca

SEQ ID NO: 16431 - DNA, 20 bp, synthetic construct
  misc_feature 1..20: note = Description of Artificial Sequence: Synthetic oligonucleotide
  misc_feature 1..20: note = Target: SCN10A; (-) strand; PAM type: NRG; PAM sequence: CAG
  source 1..20: mol_type = other DNA
aagtcatgctttggatctca

SEQ ID NO: 16432 - DNA, 20 bp, synthetic construct
  misc_feature 1..20: note = Description of Artificial Sequence: Synthetic oligonucleotide
  misc_feature 1..20: note = Target: SCN10A; (-) strand; PAM type: NRG; PAM sequence: TGG
  source 1..20: mol_type = other DNA
gccctgaagaagtcatgctt

SEQ ID NO: 16433 - DNA, 20 bp, synthetic construct
  misc_feature 1..20: note = Description of Artificial Sequence: Synthetic oligonucleotide
  misc_feature 1..20: note = Target: SCN10A; (-) strand; PAM type: NRG; PAM sequence: AAG
  source 1..20: mol_type = other DNA
tgtccccattggccctgaag

SEQ ID NO: 16434 - DNA, 20 bp, synthetic construct
  misc_feature 1..20: note = Description of Artificial Sequence: Synthetic oligonucleotide
  misc_feature 1..20: note = Target: SCN10A; (-) strand; PAM type: NRG; PAM sequence: AAG
  source 1..20: mol_type = other DNA
gtttgtccccattggccctg

SEQ ID NO: 16435 - DNA, 20 bp, synthetic construct
  misc_feature 1..20: note = Description of Artificial Sequence: Synthetic oligonucleotide
  misc_feature 1..20: note = Target: SCN10A; (-) strand; PAM type: NRG; PAM sequence: TGG
  source 1..20: mol_type = other DNA
gcagggctgtttgtccccat

SEQ ID NO: 16436 - DNA, 20 bp, synthetic construct
  misc_feature 1..20: note = Description of Artificial Sequence: Synthetic oligonucleotide
  misc_feature 1..20: note = Target: SCN10A; (-) strand; PAM type: NRG; PAM sequence: GGG
  source 1..20: mol_type = other DNA
catccctgcaagtatcagca

SEQ ID NO: 16437 - DNA, 20 bp, synthetic construct
  misc_feature 1..20: note = Description of Artificial Sequence: Synthetic oligonucleotide
  misc_feature 1..20: note = Target: SCN10A; (-) strand; PAM type: NRG; PAM sequence: AGG
  source 1..20: mol_type = other DNA
gcatccctgcaagtatcagc

SEQ ID NO: 16438 - DNA, 20 bp, synthetic construct
  misc_feature 1..20: note = Description of Artificial Sequence: Synthetic oligonucleotide
  misc_feature 1..20: note = Target: SCN10A; (-) strand; PAM type: NRG; PAM sequence: CAG
  source 1..20: mol_type = other DNA
agcatccctgcaagtatcag

SEQ ID NO: 16439 - DNA, 20 bp, synthetic construct
  misc_feature 1..20: note = Description of Artificial Sequence: Synthetic oligonucleotide
  misc_feature 1..20: note = Target: SCN10A; (-) strand; PAM type: NRG; PAM sequence: CAG
  source 1..20: mol_type = other DNA
ttcagcatccctgcaagtat

SEQ ID NO: 16440 - DNA, 20 bp, synthetic construct
  misc_feature 1..20: note = Description of Artificial Sequence: Synthetic oligonucleotide
  misc_feature 1..20: note = Target: SCN10A; (-) strand; PAM type: NRG; PAM sequence: AAG
  source 1..20: mol_type = other DNA
cttgcattcagcatccctgc

SEQ ID NO: 16441 - DNA, 20 bp, synthetic construct
  misc_feature 1..20: note = Description of Artificial Sequence: Synthetic oligonucleotide
  misc_feature 1..20: note = Target: SCN10A; (-) strand; PAM type: NRG; PAM sequence: CAG
  source 1..20: mol_type = other DNA
ttttctttctcccttgcatt

SEQ ID NO: 16442 - DNA, 20 bp, synthetic construct
  misc_feature 1..20: note = Description of Artificial Sequence: Synthetic oligonucleotide
  misc_feature 1..20: note = Target: SCN10A; (-) strand; PAM type: NRG; PAM sequence: AGG
  source 1..20: mol_type = other DNA
ttccaaaatccaatttgaga

SEQ ID NO: 16443 - DNA, 20 bp, synthetic construct
  misc_feature 1..20: note = Description of Artificial Sequence: Synthetic oligonucleotide
  misc_feature 1..20: note = Target: SCN10A; (-) strand; PAM type: NRG; PAM sequence: AAG
  source 1..20: mol_type = other DNA
cttccaaaatccaatttgag

SEQ ID NO: 16444 - DNA, 20 bp, synthetic construct
  misc_feature 1..20: note = Description of Artificial Sequence: Synthetic oligonucleotide
  misc_feature 1..20: note = Target: SCN10A; (-) strand; PAM type: NRG; PAM sequence: GAG
  source 1..20: mol_type = other DNA
tcacttccaaaatccaattt

SEQ ID NO: 16445 - DNA, 20 bp, synthetic construct
  misc_feature 1..20: note = Description of Artificial Sequence: Synthetic oligonucleotide
  misc_feature 1..20: note = Target: SCN10A; (-) strand; PAM type: NRG; PAM sequence: TGG
  source 1..20: mol_type = other DNA
agtcactgttagcatccctt

SEQ ID NO: 16446 - DNA, 20 bp, synthetic construct
  misc_feature 1..20: note = Description of Artificial Sequence: Synthetic oligonucleotide
  misc_feature 1..20: note = Target: SCN10A; (-) strand; PAM type: NRG; PAM sequence: TAG
  source 1..20: mol_type = other DNA
tttttaaacaaagtcactgt

SEQ ID NO: 16447 - DNA, 20 bp, synthetic construct
  misc_feature 1..20: note = Description of Artificial Sequence: Synthetic oligonucleotide
  misc_feature 1..20: note = Target: SCN10A; (-) strand; PAM type: NRG; PAM sequence: AAG
  source 1..20: mol_type = other DNA
gatgcttttatttttaaaca

SEQ ID NO: 16448 - DNA, 20 bp, synthetic construct
  misc_feature 1..20: note = Description of Artificial Sequence: Synthetic oligonucleotide
  misc_feature 1..20: note = Target: SCN10A; (-) strand; PAM type: NRG; PAM sequence: TGG
  source 1..20: mol_type = other DNA
attctttttcagaggtgtgt

SEQ ID NO: 16449 - DNA, 20 bp, synthetic construct
  misc_feature 1..20: note = Description of Artificial Sequence: Synthetic oligonucleotide
  misc_feature 1..20: note = Target: SCN10A; (-) strand; PAM type: NRG; PAM sequence: AGG
  source 1..20: mol_type = other DNA
gatagaacattctttttcag

SEQ ID NO: 16450 - DNA, 20 bp, synthetic construct
  misc_feature 1..20: note = Description of Artificial Sequence: Synthetic oligonucleotide
  misc_feature 1..20: note = Target: SCN10A; (-) strand; PAM type: NRG; PAM sequence: GAG
  source 1..20: mol_type = other DNA
agatagaacattctttttca

SEQ ID NO: 16451 - DNA, 20 bp, synthetic construct
  misc_feature 1..20: note = Description of Artificial Sequence: Synthetic oligonucleotide
  misc_feature 1..20: note = Target: SCN10A; (-) strand; PAM type: NRG; PAM sequence: CAG
  source 1..20: mol_type = other DNA
tgagatagaacattcttttt

SEQ ID NO: 16452 - DNA, 20 bp, synthetic construct
  misc_feature 1..20: note = Description of Artificial Sequence: Synthetic oligonucleotide
  misc_feature 1..20: note = Target: SCN10A; (-) strand; PAM type: NRG; PAM sequence: TAG
  source 1..20: mol_type = other DNA
ttccttgattaccagtgaga

SEQ ID NO: 16453 - DNA, 20 bp, synthetic construct
  misc_feature 1..20: note = Description of Artificial Sequence: Synthetic oligonucleotide
  misc_feature 1..20: note = Target: SCN10A; (-) strand; PAM type: NRG; PAM sequence: GAG
  source 1..20: mol_type = other DNA
gaatttccttgattaccagt

SEQ ID NO: 16454 - DNA, 20 bp, synthetic construct
  misc_feature 1..20: note = Description of Artificial Sequence: Synthetic oligonucleotide
  misc_feature 1..20: note = Target: SCN10A; (-) strand; PAM type: NRG; PAM sequence: CAG
  source 1..20: mol_type = other DNA
atttgaatttccttgattac

SEQ ID NO: 16455 - DNA, 20 bp, synthetic construct
  misc_feature 1..20: note = Description of Artificial Sequence: Synthetic oligonucleotide
  misc_feature 1..20: note = Target: SCN10A; (-) strand; PAM type: NRG; PAM sequence: CAG
  source 1..20: mol_type = other DNA
ccagtctgataaaagaaaaa

SEQ ID NO: 16456 - DNA, 20 bp, synthetic construct
  misc_feature 1..20: note = Description of Artificial Sequence: Synthetic oligonucleotide
  misc_feature 1..20: note = Target: SCN10A; (-) strand; PAM type: NRG; PAM sequence: AAG
  source 1..20: mol_type = other DNA
catctccaccagtctgataa

SEQ ID NO: 16457 - DNA, 20 bp, synthetic construct
  misc_feature 1..20: note = Description of Artificial Sequence: Synthetic oligonucleotide
  misc_feature 1..20: note = Target: SCN10A; (-) strand; PAM type: NRG; PAM sequence: CAG
  source 1..20: mol_type = other DNA
ctattcttttccatctccac

SEQ ID NO: 16458 - DNA, 20 bp, synthetic construct
  misc_feature 1..20: note = Description of Artificial Sequence: Synthetic oligonucleotide
  misc_feature 1..20: note = Target: SCN10A; (-) strand; PAM type: NRG; PAM sequence: GGG
  source 1..20: mol_type = other DNA
cccacagccacagcatccta

SEQ ID NO: 16459 - DNA, 20 bp, synthetic construct
  misc_feature 1..20: note = Description of Artificial Sequence: Synthetic oligonucleotide
  misc_feature 1..20: note = Target: SCN10A; (-) strand; PAM type: NRG; PAM sequence: AGG
  source 1..20: mol_type = other DNA
ccccacagccacagcatcct

SEQ ID NO: 16460 - DNA, 20 bp, synthetic construct
  misc_feature 1..20: note = Description of Artificial Sequence: Synthetic oligonucleotide
  misc_feature 1..20: note = Target: SCN10A; (-) strand; PAM type: NRG; PAM sequence: TAG
  source 1..20: mol_type = other DNA
cccccacagccacagcatcc

SEQ ID NO: 16461 - DNA, 20 bp, synthetic construct
  misc_feature 1..20: note = Description of Artificial Sequence: Synthetic oligonucleotide
  misc_feature 1..20: note = Target: SCN10A; (-) strand; PAM type: NRG; PAM sequence: CAG
  source 1..20: mol_type = other DNA
gtggcagccccccacagcca

SEQ ID NO: 16462 - DNA, 20 bp, synthetic construct
  misc_feature 1..20: note = Description of Artificial Sequence: Synthetic oligonucleotide
  misc_feature 1..20: note = Target: SCN10A; (-) strand; PAM type: NRG; PAM sequence: CAG
  source 1..20: mol_type = other DNA
aaaagagtggcagcccccca

SEQ ID NO: 16463 - DNA, 20 bp, synthetic construct
  misc_feature 1..20: note = Description of Artificial Sequence: Synthetic oligonucleotide
  misc_feature 1..20: note = Target: SCN10A; (-) strand; PAM type: NRG; PAM sequence: CAG
  source 1..20: mol_type = other DNA
aaaaaaaaaaaaaagagtgg

SEQ ID NO: 16464 - DNA, 20 bp, synthetic construct
  misc_feature 1..20: note = Description of Artificial Sequence: Synthetic oligonucleotide
  misc_feature 1..20: note = Target: SCN10A; (-) strand; PAM type: NRG; PAM sequence: TGG
  source 1..20: mol_type = other DNA
aaaaaaaaaaaaaaaaagag

SEQ ID NO: 16465 - DNA, 20 bp, synthetic construct
  misc_feature 1..20: note = Description of Artificial Sequence: Synthetic oligonucleotide
  misc_feature 1..20: note = Target: SCN10A; (-) strand; PAM type: NRG; PAM sequence: GAG
  source 1..20: mol_type = other DNA
aaaaaaaaaaaaaaaaaaaa

SEQ ID NO: 16466 - DNA, 20 bp, synthetic construct
  misc_feature 1..20: note = Description of Artificial Sequence: Synthetic oligonucleotide
  misc_feature 1..20: note = Target: SCN10A; (-) strand; PAM type: NRG; PAM sequence: AAG
  source 1..20: mol_type = other DNA
aaaaaaaaaaaaaaaaaaaa

SEQ ID NO: 16467 - DNA, 20 bp, synthetic construct
  misc_feature 1..20: note = Description of Artificial Sequence: Synthetic oligonucleotide
  misc_feature 1..20: note = Target: SCN10A; (-) strand; PAM type: NRG; PAM sequence: GAG
  source 1..20: mol_type = other DNA
tccagcctgggcgacagagc

SEQ ID NO: 16468 - DNA, 20 bp, synthetic construct
  misc_feature 1..20: note = Description of Artificial Sequence: Synthetic oligonucleotide
  misc_feature 1..20: note = Target: SCN10A; (-) strand; PAM type: NRG; PAM sequence: GAG
  source 1..20: mol_type = other DNA
gcactccagcctgggcgaca

SEQ ID NO: 16469 - DNA, 20 bp, synthetic construct
  misc_feature 1..20: note = Description of Artificial Sequence: Synthetic oligonucleotide
  misc_feature 1..20: note = Target: SCN10A; (-) strand; PAM type: NRG; PAM sequence: CAG
  source 1..20: mol_type = other DNA
ctgcactccagcctgggcga

SEQ ID NO: 16470 - DNA, 20 bp, synthetic construct
  misc_feature 1..20: note = Description of Artificial Sequence: Synthetic oligonucleotide
  misc_feature 1..20: note = Target: SCN10A; (-) strand; PAM type: NRG; PAM sequence: GGG
  source 1..20: mol_type = other DNA
ccgctactgcactccagcct

SEQ ID NO: 16471 - DNA, 20 bp, synthetic construct
  misc_feature 1..20: note = Description of Artificial Sequence: Synthetic oligonucleotide
  misc_feature 1..20: note = Target: SCN10A; (-) strand; PAM type: NRG; PAM sequence: TGG
  source 1..20: mol_type = other DNA
cccgctactgcactccagcc

SEQ ID NO: 16472 - DNA, 20 bp, synthetic construct
  misc_feature 1..20: note = Description of Artificial Sequence: Synthetic oligonucleotide
  misc_feature 1..20: note = Target: SCN10A; (-) strand; PAM type: NRG; PAM sequence: CAG
  source 1..20: mol_type = other DNA
gagatcccgctactgcactc

SEQ ID NO: 16473 - DNA, 20 bp, synthetic construct
  misc_feature 1..20: note = Description of Artificial Sequence: Synthetic oligonucleotide
  misc_feature 1..20: note = Target: SCN10A; (-) strand; PAM type: NRG; PAM sequence: GAG
  source 1..20: mol_type = other DNA
ggcagagcttgcagtgagcc

SEQ ID NO: 16474 - DNA, 20 bp, synthetic construct
  misc_feature 1..20: note = Description of Artificial Sequence: Synthetic oligonucleotide
  misc_feature 1..20: note = Target: SCN10A; (-) strand; PAM type: NRG; PAM sequence: GAG
  source 1..20: mol_type = other DNA
tgggaggcagagcttgcagt

SEQ ID NO: 16475 - DNA, 20 bp, synthetic construct
  misc_feature 1..20: note = Description of Artificial Sequence: Synthetic oligonucleotide
  misc_feature 1..20: note = Target: SCN10A; (-) strand; PAM type: NRG; PAM sequence: CAG
  source 1..20: mol_type = other DNA
aacctgggaggcagagcttg

SEQ ID NO: 16476 - DNA, 20 bp, synthetic construct
  misc_feature 1..20: note = Description of Artificial Sequence: Synthetic oligonucleotide
  misc_feature 1..20: note = Target: SCN10A; (-) strand; PAM type: NRG; PAM sequence: GAG
  source 1..20: mol_type = other DNA
tggcgtgaacctgggaggca

SEQ ID NO: 16477 - DNA, 20 bp, synthetic construct
  misc_feature 1..20: note = Description of Artificial Sequence: Synthetic oligonucleotide
  misc_feature 1..20: note = Target: SCN10A; (-) strand; PAM type: NRG; PAM sequence: CAG
  source 1..20: mol_type = other DNA
aatggcgtgaacctgggagg

SEQ ID NO: 16478 - DNA, 20 bp, synthetic construct
  misc_feature 1..20: note = Description of Artificial Sequence: Synthetic oligonucleotide
  misc_feature 1..20: note = Target: SCN10A; (-) strand; PAM type: NRG; PAM sequence: AGG
  source 1..20: mol_type = other DNA
gagaatggcgtgaacctggg

SEQ ID NO: 16479 - DNA, 20 bp, synthetic construct
  misc_feature 1..20: note = Description of Artificial Sequence: Synthetic oligonucleotide
  misc_feature 1..20: note = Target: SCN10A; (-) strand; PAM type: NRG; PAM sequence: GAG
  source 1..20: mol_type = other DNA
ggagaatggcgtgaacctgg

SEQ ID NO: 16480 - DNA, 20 bp, synthetic construct
  misc_feature 1..20: note = Description of Artificial Sequence: Synthetic oligonucleotide
  misc_feature 1..20: note = Target: SCN10A; (-) strand; PAM type: NRG; PAM sequence: GGG
  source 1..20: mol_type = other DNA
caggagaatggcgtgaacct

SEQ ID NO: 16481 - DNA, 20 bp, synthetic construct
  misc_feature 1..20: note = Description of Artificial Sequence: Synthetic oligonucleotide
  misc_feature 1..20: note = Target: SCN10A; (-) strand; PAM type: NRG; PAM sequence: TGG
  source 1..20: mol_type = other DNA
gcaggagaatggcgtgaacc

SEQ ID NO: 16482 - DNA, 20 bp, synthetic construct
  misc_feature 1..20: note = Description of Artificial Sequence: Synthetic oligonucleotide
  misc_feature 1..20: note = Target: SCN10A; (-) strand; PAM type: NRG; PAM sequence: TGG
  source 1..20: mol_type = other DNA
gggaggctgaggcaggagaa

SEQ ID NO: 16483 - DNA, 20 bp, synthetic construct
  misc_feature 1..20: note = Description of Artificial Sequence: Synthetic oligonucleotide
  misc_feature 1..20: note = Target: SCN10A; (-) strand; PAM type: NRG; PAM sequence: GAG
  source 1..20: mol_type = other DNA
tacttgggaggctgaggcag

SEQ ID NO: 16484 - DNA, 20 bp, synthetic construct
  misc_feature 1..20: note = Description of Artificial Sequence: Synthetic oligonucleotide
  misc_feature 1..20: note = Target: SCN10A; (-) strand; PAM type: NRG; PAM sequence: AGG
  source 1..20: mol_type = other DNA
gctacttgggaggctgaggc

SEQ ID NO: 16485 - DNA, 20 bp, synthetic construct
  misc_feature 1..20: note = Description of Artificial Sequence: Synthetic oligonucleotide
  misc_feature 1..20: note = Target: SCN10A; (-) strand; PAM type: NRG; PAM sequence: CAG
  source 1..20: mol_type = other DNA
agctacttgggaggctgagg

SEQ ID NO: 16486 - DNA, 20 bp, synthetic construct
  misc_feature 1..20: note = Description of Artificial Sequence: Synthetic oligonucleotide
  misc_feature 1..20: note = Target: SCN10A; (-) strand; PAM type: NRG; PAM sequence: AGG
  source 1..20: mol_type = other DNA
cccagctacttgggaggctg

SEQ ID NO: 16487 - DNA, 20 bp, synthetic construct
  misc_feature 1..20: note = Description of Artificial Sequence: Synthetic oligonucleotide
  misc_feature 1..20: note = Target: SCN10A; (-) strand; PAM type: NRG; PAM sequence: GAG
  source 1..20: mol_type = other DNA
tcccagctacttgggaggct

SEQ ID NO: 16488 - DNA, 20 bp, synthetic construct
  misc_feature 1..20: note = Description of Artificial Sequence: Synthetic oligonucleotide
  misc_feature 1..20: note = Target: SCN10A; (-) strand; PAM type: NRG; PAM sequence: AGG
  source 1..20: mol_type = other DNA
tgtagtcccagctacttggg

SEQ ID NO: 16489 - DNA, 20 bp, synthetic construct
  misc_feature 1..20: note = Description of Artificial Sequence: Synthetic oligonucleotide
  misc_feature 1..20: note = Target: SCN10A; (-) strand; PAM type: NRG; PAM sequence: GAG
  source 1..20: mol_type = other DNA
ctgtagtcccagctacttgg

SEQ ID NO: 16490 - DNA, 20 bp, synthetic construct
  misc_feature 1..20: note = Description of Artificial Sequence: Synthetic oligonucleotide
  misc_feature 1..20: note = Target: SCN10A; (-) strand; PAM type: NRG; PAM sequence: GGG
  source 1..20: mol_type = other DNA
gcctgtagtcccagctactt

SEQ ID NO: 16491 - DNA, 20 bp, synthetic construct
  misc_feature 1..20: note = Description of Artificial Sequence: Synthetic oligonucleotide
  misc_feature 1..20: note = Target: SCN10A; (-) strand; PAM type: NRG; PAM sequence: TGG
  source 1..20: mol_type = other DNA
cgcctgtagtcccagctact

SEQ ID NO: 16492 - DNA, 20 bp, synthetic construct
  misc_feature 1..20: note = Description of Artificial Sequence: Synthetic oligonucleotide
  misc_feature 1..20: note = Target: SCN10A; (-) strand; PAM type: NRG; PAM sequence: CAG
  source 1..20: mol_type = other DNA
gtggcgggcgcctgtagtcc

SEQ ID NO: 16493 - DNA, 20 bp, synthetic construct
  misc_feature 1..20: note = Description of Artificial Sequence: Synthetic oligonucleotide
  misc_feature 1..20: note = Target: SCN10A; (-) strand; PAM type: NRG; PAM sequence: TAG
  source 1..20: mol_type = other DNA
ggcgtagtggcgggcgcctg

SEQ ID NO: 16494 - DNA, 20 bp, synthetic construct
  misc_feature 1..20: note = Description of Artificial Sequence: Synthetic oligonucleotide
  misc_feature 1..20: note = Target: SCN10A; (-) strand; PAM type: NRG; PAM sequence: GGG
  source 1..20: mol_type = other DNA
aattagccgggcgtagtggc

SEQ ID NO: 16495 - DNA, 20 bp, synthetic construct
  misc_feature 1..20: note = Description of Artificial Sequence: Synthetic oligonucleotide
  misc_feature 1..20: note = Target: SCN10A; (-) strand; PAM type: NRG; PAM sequence: CGG
  source 1..20: mol_type = other DNA
aaattagccgggcgtagtgg

SEQ ID NO: 16496 - DNA, 20 bp, synthetic construct
  misc_feature 1..20: note = Description of Artificial Sequence: Synthetic oligonucleotide
  misc_feature 1..20: note = Target: SCN10A; (-) strand; PAM type: NRG; PAM sequence: TGG
  source 1..20: mol_type = other DNA
aaaaaattagccgggcgtag

SEQ ID NO: 16497 - DNA, 20 bp, synthetic construct
  misc_feature 1..20: note = Description of Artificial Sequence: Synthetic oligonucleotide
  misc_feature 1..20: note = Target: SCN10A; (-) strand; PAM type: NRG; PAM sequence: TAG
  source 1..20: mol_type = other DNA
tacaaaaaattagccgggcg

SEQ ID NO: 16498 - DNA, 20 bp, synthetic construct
  misc_feature 1..20: note = Description of Artificial Sequence: Synthetic oligonucleotide
  misc_feature 1..20: note = Target: SCN10A; (-) strand; PAM type: NRG; PAM sequence: GGG
  source 1..20: mol_type = other DNA
aaaaatacaaaaaattagcc

SEQ ID NO: 16499 - DNA, 20 bp, synthetic construct
  misc_feature 1..20: note = Description of Artificial Sequence: Synthetic oligonucleotide
  misc_feature 1..20: note = Target: SCN10A; (-) strand; PAM type: NRG; PAM sequence: CGG
  source 1..20: mol_type = other DNA
taaaaatacaaaaaattagc

SEQ ID NO: 16500 - DNA, 20 bp, synthetic construct
  misc_feature 1..20: note = Description of Artificial Sequence: Synthetic oligonucleotide
  misc_feature 1..20: note = Target: SCN10A; (-) strand; PAM type: NRG; PAM sequence: TAG
  source 1..20: mol_type = other DNA
ctactaaaaatacaaaaaat

SEQ ID NO: 16501 - DNA, 20 bp, synthetic construct
  misc_feature 1..20: note = Description of Artificial Sequence: Synthetic oligonucleotide
  misc_feature 1..20: note = Target: SCN10A; (-) strand; PAM type: NRG; PAM sequence: CGG
  source 1..20: mol_type = other DNA
cgagaccatcccggctaaaa

SEQ ID NO: 16502 - DNA, 20 bp, synthetic construct
  misc_feature 1..20: note = Description of Artificial Sequence: Synthetic oligonucleotide
  misc_feature 1..20: note = Target: SCN10A; (-) strand; PAM type: NRG; PAM sequence: CGG
  source 1..20: mol_type = other DNA
tcaggagatcgagaccatcc

SEQ ID NO: 16503 - DNA, 20 bp, synthetic construct
  misc_feature 1..20: note = Description of Artificial Sequence: Synthetic oligonucleotide
  misc_feature 1..20: note = Target: SCN10A; (-) strand; PAM type: NRG; PAM sequence: GAG
  source 1..20: mol_type = other DNA
gatcatgaggtcaggagatc

SEQ ID NO: 16504 - DNA, 20 bp, synthetic construct
  misc_feature 1..20: note = Description of Artificial Sequence: Synthetic oligonucleotide
  misc_feature 1..20: note = Target: SCN10A; (-) strand; PAM type: NRG; PAM sequence: GAG
  source 1..20: mol_type = other DNA
cgggcggatcatgaggtcag

SEQ ID NO: 16505 - DNA, 20 bp, synthetic construct
  misc_feature 1..20: note = Description of Artificial Sequence: Synthetic oligonucleotide
  misc_feature 1..20: note = Target: SCN10A; (-) strand; PAM type: NRG; PAM sequence: AGG
  source 1..20: mol_type = other DNA
ggcgggcggatcatgaggtc

SEQ ID NO: 16506 - DNA, 20 bp, synthetic construct
  misc_feature 1..20: note = Description of Artificial Sequence: Synthetic oligonucleotide
  misc_feature 1..20: note = Target: SCN10A; (-) strand; PAM type: NRG; PAM sequence: CAG
  source 1..20: mol_type = other DNA
aggcgggcggatcatgaggt

SEQ ID NO: 16507 - DNA, 20 bp, synthetic construct
  misc_feature 1..20: note = Description of Artificial Sequence: Synthetic oligonucleotide
  misc_feature 1..20: note = Target: SCN10A; (-) strand; PAM type: NRG; PAM sequence: AGG
  source 1..20: mol_type = other DNA
gctgaggcgggcggatcatg

SEQ ID NO: 16508 - DNA, 20 bp, synthetic construct
  misc_feature 1..20: note = Description of Artificial Sequence: Synthetic oligonucleotide
  misc_feature 1..20: note = Target: SCN10A; (-) strand; PAM type: NRG; PAM sequence: GAG
  source 1..20: mol_type = other DNA
ggctgaggcgggcggatcat

SEQ ID NO: 16509 - DNA, 20 bp, synthetic construct
  misc_feature 1..20: note = Description of Artificial Sequence: Synthetic oligonucleotide
  misc_feature 1..20: note = Target: SCN10A; (-) strand; PAM type: NRG; PAM sequence: CGG
  source 1..20: mol_type = other DNA
ctttgggaggctgaggcggg

SEQ ID NO: 16510 - DNA, 20 bp, synthetic construct
  misc_feature 1..20: note = Description of Artificial Sequence: Synthetic oligonucleotide
  misc_feature 1..20: note = Target: SCN10A; (-) strand; PAM type: NRG; PAM sequence: GGG
  source 1..20: mol_type = other DNA
gcactttgggaggctgaggc

SEQ ID NO: 16511 - DNA, 20 bp, synthetic construct
  misc_feature 1..20: note = Description of Artificial Sequence: Synthetic oligonucleotide
  misc_feature 1..20: note = Target: SCN10A; (-) strand; PAM type: NRG; PAM sequence: CGG
  source 1..20: mol_type = other DNA
agcactttgggaggctgagg

SEQ ID NO: 16512 - DNA, 20 bp, synthetic construct
  misc_feature 1..20: note = Description of Artificial Sequence: Synthetic oligonucleotide
  misc_feature 1..20: note = Target: SCN10A; (-) strand; PAM type: NRG; PAM sequence: AGG
  source 1..20: mol_type = other DNA
cccagcactttgggaggctg

SEQ ID NO: 16513 - DNA, 20 bp, synthetic construct
  misc_feature 1..20: note = Description of Artificial Sequence: Synthetic oligonucleotide
  misc_feature 1..20: note = Target: SCN10A; (-) strand; PAM type: NRG; PAM sequence: GAG
  source 1..20: mol_type = other DNA
tcccagcactttgggaggct

SEQ ID NO: 16514 - DNA, 20 bp, synthetic construct
  misc_feature 1..20: note = Description of Artificial Sequence: Synthetic oligonucleotide
  misc_feature 1..20: note = Target: SCN10A; (-) strand; PAM type: NRG; PAM sequence: AGG
  source 1..20: mol_type = other DNA
tgtaatcccagcactttggg

SEQ ID NO: 16515 - DNA, 20 bp, synthetic construct
  misc_feature 1..20: note = Description of Artificial Sequence: Synthetic oligonucleotide
  misc_feature 1..20: note = Target: SCN10A; (-) strand; PAM type: NRG; PAM sequence: GAG
  source 1..20: mol_type = other DNA
ctgtaatcccagcactttgg

SEQ ID NO: 16516 - DNA, 20 bp, synthetic construct
  misc_feature 1..20: note = Description of Artificial Sequence: Synthetic oligonucleotide
  misc_feature 1..20: note = Target: SCN10A; (-) strand; PAM type: NRG; PAM sequence: GGG
  source 1..20: mol_type = other DNA
gcctgtaatcccagcacttt

SEQ ID NO: 16517 - DNA, 20 bp, synthetic construct
  misc_feature 1..20: note = Description of Artificial Sequence: Synthetic oligonucleotide
  misc_feature 1..20: note = Target: SCN10A; (-) strand; PAM type: NRG; PAM sequence: TGG
  source 1..20: mol_type = other DNA
cgcctgtaatcccagcactt

SEQ ID NO: 16518 - DNA, 20 bp, synthetic construct
  misc_feature 1..20: note = Description of Artificial Sequence: Synthetic oligonucleotide
  misc_feature 1..20: note = Target: SCN10A; (-) strand; PAM type: NRG; PAM sequence: CAG
  source 1..20: mol_type = other DNA
gtggctcacgcctgtaatcc

SEQ ID NO: 16519 - DNA, 20 bp, synthetic construct
  misc_feature 1..20: note = Description of Artificial Sequence: Synthetic oligonucleotide
  misc_feature 1..20: note = Target: SCN10A; (-) strand; PAM type: NRG; PAM sequence: TGG
  source 1..20: mol_type = other DNA
gtaagagtggccgggcgcgg

SEQ ID NO: 16520 - DNA, 20 bp, synthetic construct
  misc_feature 1..20: note = Description of Artificial Sequence: Synthetic oligonucleotide
  misc_feature 1..20: note = Target: SCN10A; (-) strand; PAM type: NRG; PAM sequence: CGG
  source 1..20: mol_type = other DNA
cttgtaagagtggccgggcg

SEQ ID NO: 16521 - DNA, 20 bp, synthetic construct
  misc_feature 1..20: note = Description of Artificial Sequence: Synthetic oligonucleotide
  misc_feature 1..20: note = Target: SCN10A; (-) strand; PAM type: NRG; PAM sequence: GGG
  source 1..20: mol_type = other DNA
agtcacttgtaagagtggcc

SEQ ID NO: 16522 - DNA, 20 bp, synthetic construct
  misc_feature 1..20: note = Description of Artificial Sequence: Synthetic oligonucleotide
  misc_feature 1..20: note = Target: SCN10A; (-) strand; PAM type: NRG; PAM sequence: CGG
  source 1..20: mol_type = other DNA
cagtcacttgtaagagtggc

SEQ ID NO: 16523 - DNA, 20 bp, synthetic construct
  misc_feature 1..20: note = Description of Artificial Sequence: Synthetic oligonucleotide
  misc_feature 1..20: note = Target: SCN10A; (-) strand; PAM type: NRG; PAM sequence: TGG
  source 1..20: mol_type = other DNA
ctgccagtcacttgtaagag

SEQ ID NO: 16524 - DNA, 20 bp, synthetic construct
  misc_feature 1..20: note = Description of Artificial Sequence: Synthetic oligonucleotide
  misc_feature 1..20: note = Target: SCN10A; (-) strand; PAM type: NRG; PAM sequence: GAG
  source 1..20: mol_type = other DNA
ctcctgccagtcacttgtaa

SEQ ID NO: 16525 - DNA, 20 bp, synthetic construct
  misc_feature 1..20: note = Description of Artificial Sequence: Synthetic oligonucleotide
  misc_feature 1..20: note = Target: SCN10A; (-) strand; PAM type: NRG; PAM sequence: AAG
  source 1..20: mol_type = other DNA
cactcctgccagtcacttgt

SEQ ID NO: 16526 - DNA, 20 bp, synthetic construct
  misc_feature 1..20: note = Description of Artificial Sequence: Synthetic oligonucleotide
  misc_feature 1..20: note = Target: SCN10A; (-) strand; PAM type: NRG; PAM sequence: CAG
  source 1..20: mol_type = other DNA
ggccaggttttcactcctgc

SEQ ID NO: 16527 - DNA, 20 bp, synthetic construct
  misc_feature 1..20: note = Description of Artificial Sequence: Synthetic oligonucleotide
  misc_feature 1..20: note = Target: SCN10A; (-) strand; PAM type: NRG; PAM sequence: AGG
  source 1..20: mol_type = other DNA
ggcttcacacaggactggcc

SEQ ID NO: 16528 - DNA, 20 bp, synthetic construct
  misc_feature 1..20: note = Description of Artificial Sequence: Synthetic oligonucleotide
  misc_feature 1..20: note = Target: SCN10A; (-) strand; PAM type: NRG; PAM sequence: CAG
  source 1..20: mol_type = other DNA
tggcttcacacaggactggc

SEQ ID NO: 16529 - DNA, 20 bp, synthetic construct
  misc_feature 1..20: note = Description of Artificial Sequence: Synthetic oligonucleotide
  misc_feature 1..20: note = Target: SCN10A; (-) strand; PAM type: NRG; PAM sequence: TGG
  source 1..20: mol_type = other DNA
aatttggcttcacacaggac

SEQ ID NO: 16530 - DNA, 20 bp, synthetic construct
  misc_feature 1..20: note = Description of Artificial Sequence: Synthetic oligonucleotide
  misc_feature 1..20: note = Target: SCN10A; (-) strand; PAM type: NRG; PAM sequence: AGG
  source 1..20: mol_type = other DNA
ttgccaatttggcttcacac

SEQ ID NO: 16531 - DNA, 20 bp, synthetic construct
  misc_feature 1..20: note = Description of Artificial Sequence: Synthetic oligonucleotide
  misc_feature 1..20: note = Target: SCN10A; (-) strand; PAM type: NRG; PAM sequence: CAG
  source 1..20: mol_type = other DNA
attgccaatttggcttcaca

SEQ ID NO: 16532 - DNA, 20 bp, synthetic construct
  misc_feature 1..20: note = Description of Artificial Sequence: Synthetic oligonucleotide
  misc_feature 1..20: note = Target: SCN10A; (-) strand; PAM type: NRG; PAM sequence: TGG
  source 1..20: mol_type = other DNA
tctgagtcacattgccaatt

SEQ ID NO: 16533 - DNA, 20 bp, synthetic construct
  misc_feature 1..20: note = Description of Artificial Sequence: Synthetic oligonucleotide
  misc_feature 1..20: note = Target: SCN10A; (-) strand; PAM type: NRG; PAM sequence: GAG
  source 1..20: mol_type = other DNA
gctaggttcctgaaacctct

SEQ ID NO: 16534 - DNA, 20 bp, synthetic construct
  misc_feature 1..20: note = Description of Artificial Sequence: Synthetic oligonucleotide
  misc_feature 1..20: note = Target: SCN10A; (-) strand; PAM type: NRG; PAM sequence: AGG
  source 1..20: mol_type = other DNA
tgcttgaaggaggaattgct

SEQ ID NO: 16535 - DNA, 20 bp, synthetic construct
  misc_feature 1..20: note = Description of Artificial Sequence: Synthetic oligonucleotide
  misc_feature 1..20: note = Target: SCN10A; (-) strand; PAM type: NRG; PAM sequence: TAG
  source 1..20: mol_type = other DNA
gtgcttgaaggaggaattgc

SEQ ID NO: 16536 - DNA, 20 bp, synthetic construct
  misc_feature 1..20: note = Description of Artificial Sequence: Synthetic oligonucleotide
  misc_feature 1..20: note = Target: SCN10A; (-) strand; PAM type: NRG; PAM sequence: AGG
  source 1..20: mol_type = other DNA
ttaggattagtgcttgaagg

SEQ ID NO: 16537 - DNA, 20 bp, synthetic construct
  misc_feature 1..20: note = Description of Artificial Sequence: Synthetic oligonucleotide
  misc_feature 1..20: note = Target: SCN10A; (-) strand; PAM type: NRG; PAM sequence: GAG
  source 1..20: mol_type = other DNA
cttaggattagtgcttgaag

SEQ ID NO: 16538 - DNA, 20 bp, synthetic construct
  misc_feature 1..20: note = Description of Artificial Sequence: Synthetic oligonucleotide
  misc_feature 1..20: note = Target: SCN10A; (-) strand; PAM type: NRG; PAM sequence: AGG
  source 1..20: mol_type = other DNA
tccttaggattagtgcttga

SEQ ID NO: 16539 - DNA, 20 bp, synthetic construct
  misc_feature 1..20: note = Description of Artificial Sequence: Synthetic oligonucleotide
  misc_feature 1..20: note = Target: SCN10A; (-) strand; PAM type: NRG; PAM sequence: AAG
  source 1..20: mol_type = other DNA
gtccttaggattagtgcttg

SEQ ID NO: 16540 - DNA, 20 bp, synthetic construct
  misc_feature 1..20: note = Description of Artificial Sequence: Synthetic oligonucleotide
  misc_feature 1..20: note = Target: SCN10A; (-) strand; PAM type: NRG; PAM sequence: TAG
  source 1..20: mol_type = other DNA
gcctccagtgtccttaggat

SEQ ID NO: 16541 - DNA, 20 bp, synthetic construct
  misc_feature 1..20: note = Description of Artificial Sequence: Synthetic oligonucleotide
  misc_feature 1..20: note = Target: SCN10A; (-) strand; PAM type: NRG; PAM sequence: AGG
  source 1..20: mol_type = other DNA
caacagcctccagtgtcctt

SEQ ID NO: 16542 - DNA, 20 bp, synthetic construct
  misc_feature 1..20: note = Description of Artificial Sequence: Synthetic oligonucleotide
  misc_feature 1..20: note = Target: SCN10A; (-) strand; PAM type: NRG; PAM sequence: TAG
  source 1..20: mol_type = other DNA
ccaacagcctccagtgtcct

SEQ ID NO: 16543 - DNA, 20 bp, synthetic construct
  misc_feature 1..20: note = Description of Artificial Sequence: Synthetic oligonucleotide
  misc_feature 1..20: note = Target: SCN10A; (-) strand; PAM type: NRG; PAM sequence: CAG
  source 1..20: mol_type = other DNA
gagtgggcaccaacagcctc

SEQ ID NO: 16544 - DNA, 20 bp, synthetic construct
  misc_feature 1..20: note = Description of Artificial Sequence: Synthetic oligonucleotide
  misc_feature 1..20: note = Target: SCN10A; (-) strand; PAM type: NRG; PAM sequence: CAG
  source 1..20: mol_type = other DNA
aggacctgagtgggcaccaa

SEQ ID NO: 16545 - DNA, 20 bp, synthetic construct
  misc_feature 1..20: note = Description of Artificial Sequence: Synthetic oligonucleotide
  misc_feature 1..20: note = Target: SCN10A; (-) strand; PAM type: NRG; PAM sequence: GGG
  source 1..20: mol_type = other DNA
cccttaaagaggacctgagt

SEQ ID NO: 16546 - DNA, 20 bp, synthetic construct
  misc_feature 1..20: note = Description of Artificial Sequence: Synthetic oligonucleotide
  misc_feature 1..20: note = Target: SCN10A; (-) strand; PAM type: NRG; PAM sequence: TGG
  source 1..20: mol_type = other DNA
ccccttaaagaggacctgag

SEQ ID NO: 16547 - DNA, 20 bp, synthetic construct
  misc_feature 1..20: note = Description of Artificial Sequence: Synthetic oligonucleotide
  misc_feature 1..20: note = Target: SCN10A; (-) strand; PAM type: NRG; PAM sequence: GAG
  source 1..20: mol_type = other DNA
tggccccttaaagaggacct

SEQ ID NO: 16548 - DNA, 20 bp, synthetic construct
  misc_feature 1..20: note = Description of Artificial Sequence: Synthetic oligonucleotide
  misc_feature 1..20: note = Target: SCN10A; (-) strand; PAM type: NRG; PAM sequence: AGG
  source 1..20: mol_type = other DNA
ggggcactggccccttaaag

SEQ ID NO: 16549 - DNA, 20 bp, synthetic construct
  misc_feature 1..20: note = Description of Artificial Sequence: Synthetic oligonucleotide
  misc_feature 1..20: note = Target: SCN10A; (-) strand; PAM type: NRG; PAM sequence: GAG
  source 1..20: mol_type = other DNA
aggggcactggccccttaaa

SEQ ID NO: 16550 - DNA, 20 bp, synthetic construct
  misc_feature 1..20: note = Description of Artificial Sequence: Synthetic oligonucleotide
  misc_feature 1..20: note = Target: SCN10A; (-) strand; PAM type: NRG; PAM sequence: AAG
  source 1..20: mol_type = other DNA
ataggggcactggcccctta

SEQ ID NO: 16551 - DNA, 20 bp, synthetic construct
  misc_feature 1..20: note = Description of Artificial Sequence: Synthetic oligonucleotide
  misc_feature 1..20: note = Target: SCN10A; (-) strand; PAM type: NRG; PAM sequence: TGG
  source 1..20: mol_type = other DNA
cagatgaaggataggggcac

SEQ ID NO: 16552 - DNA, 20 bp, synthetic construct
  misc_feature 1..20: note = Description of Artificial Sequence: Synthetic oligonucleotide
  misc_feature 1..20: note = Target: SCN10A; (-) strand; PAM type: NRG; PAM sequence: GGG
  source 1..20: mol_type = other DNA
tcccagcagatgaaggatag

SEQ ID NO: 16553 - DNA, 20 bp, synthetic construct
  misc_feature 1..20: note = Description of Artificial Sequence: Synthetic oligonucleotide
  misc_feature 1..20: note = Target: SCN10A; (-) strand; PAM type: NRG; PAM sequence: GGG
  source 1..20: mol_type = other DNA
ctcccagcagatgaaggata

SEQ ID NO: 16554 - DNA, 20 bp, synthetic construct
  misc_feature 1..20: note = Description of Artificial Sequence: Synthetic oligonucleotide
  misc_feature 1..20: note = Target: SCN10A; (-) strand; PAM type: NRG; PAM sequence: AGG
  source 1..20: mol_type = other DNA
actcccagcagatgaaggat

SEQ ID NO: 16555 - DNA, 20 bp, synthetic construct
  misc_feature 1..20: note = Description of Artificial Sequence: Synthetic oligonucleotide
  misc_feature 1..20: note = Target: SCN10A; (-) strand; PAM type: NRG; PAM sequence: TAG
  source 1..20: mol_type = other DNA
cactcccagcagatgaagga

SEQ ID NO: 16556 - DNA, 20 bp, synthetic construct
  misc_feature 1..20: note = Description of Artificial Sequence: Synthetic oligonucleotide
  misc_feature 1..20: note = Target: SCN10A; (-) strand; PAM type: NRG; PAM sequence: AGG
  source 1..20: mol_type = other DNA
ccgacactcccagcagatga

SEQ ID NO: 16557 - DNA, 20 bp, synthetic construct
  misc_feature 1..20: note = Description of Artificial Sequence: Synthetic oligonucleotide
  misc_feature 1..20: note = Target: SCN10A; (-) strand; PAM type: NRG; PAM sequence: AAG
  source 1..20: mol_type = other DNA
gccgacactcccagcagatg

SEQ ID NO: 16558 - DNA, 20 bp, synthetic construct
  misc_feature 1..20: note = Description of Artificial Sequence: Synthetic oligonucleotide
  misc_feature 1..20: note = Target: SCN10A; (-) strand; PAM type: NRG; PAM sequence: CAG
  source 1..20: mol_type = other DNA
ttagcagccgacactcccag

SEQ ID NO: 16559 - DNA, 20 bp, synthetic construct
  misc_feature 1..20: note = Description of Artificial Sequence: Synthetic oligonucleotide
  misc_feature 1..20: note = Target: SCN10A; (-) strand; PAM type: NRG; PAM sequence: CAG
  source 1..20: mol_type = other DNA
ctattagcagccgacactcc

SEQ ID NO: 16560 - DNA, 20 bp, synthetic construct
  misc_feature 1..20: note = Description of Artificial Sequence: Synthetic oligonucleotide
  misc_feature 1..20: note = Target: SCN10A; (-) strand; PAM type: NRG; PAM sequence: CAG
  source 1..20: mol_type = other DNA
ctgcatccatgaactattag

SEQ ID NO: 16561 - DNA, 20 bp, synthetic construct
  misc_feature 1..20: note = Description of Artificial Sequence: Synthetic oligonucleotide
  misc_feature 1..20: note = Target: SCN10A; (-) strand; PAM type: NRG; PAM sequence: TAG
  source 1..20: mol_type = other DNA
tgtctgcatccatgaactat

SEQ ID NO: 16562 - DNA, 20 bp, synthetic construct
  misc_feature 1..20: note = Description of Artificial Sequence: Synthetic oligonucleotide
  misc_feature 1..20: note = Target: SCN10A; (-) strand; PAM type: NRG; PAM sequence: GGG
  source 1..20: mol_type = other DNA
cagcgaagccatcaggaagg

SEQ ID NO: 16563 - DNA, 20 bp, synthetic construct
  misc_feature 1..20: note = Description of Artificial Sequence: Synthetic oligonucleotide
  misc_feature 1..20: note = Target: SCN10A; (-) strand; PAM type: NRG; PAM sequence: GGG
  source 1..20: mol_type = other DNA
ccagcgaagccatcaggaag

SEQ ID NO: 16564 - DNA, 20 bp, synthetic construct
  misc_feature 1..20: note = Description of Artificial Sequence: Synthetic oligonucleotide
  misc_feature 1..20: note = Target: SCN10A; (-) strand; PAM type: NRG; PAM sequence: GGG
  source 1..20: mol_type = other DNA
cccagcgaagccatcaggaa

SEQ ID NO: 16565 - DNA, 20 bp, synthetic construct
  misc_feature 1..20: note = Description of Artificial Sequence: Synthetic oligonucleotide
  misc_feature 1..20: note = Target: SCN10A; (-) strand; PAM type: NRG; PAM sequence: AGG
  source 1..20: mol_type = other DNA
gcccagcgaagccatcagga

SEQ ID NO: 16566 - DNA, 20 bp, synthetic construct
  misc_feature 1..20: note = Description of Artificial Sequence: Synthetic oligonucleotide
  misc_feature 1..20: note = Target: SCN10A; (-) strand; PAM type: NRG; PAM sequence: AAG
  source 1..20: mol_type = other DNA
agcccagcgaagccatcagg

SEQ ID NO: 16567 - DNA, 20 bp, synthetic construct
  misc_feature 1..20: note = Description of Artificial Sequence: Synthetic oligonucleotide
  misc_feature 1..20: note = Target: SCN10A; (-) strand; PAM type: NRG; PAM sequence: AGG
  source 1..20: mol_type = other DNA
tccagcccagcgaagccatc

SEQ ID NO: 16568 - DNA, 20 bp, synthetic construct
  misc_feature 1..20: note = Description of Artificial Sequence: Synthetic oligonucleotide
  misc_feature 1..20: note = Target: SCN10A; (-) strand; PAM type: NRG; PAM sequence: CAG
  source 1..20: mol_type = other DNA
ctccagcccagcgaagccat

SEQ ID NO: 16569 - DNA, 20 bp, synthetic construct
  misc_feature 1..20: note = Description of Artificial Sequence: Synthetic oligonucleotide
  misc_feature 1..20: note = Target: SCN10A; (-) strand; PAM type: NRG; PAM sequence: AAG
  source 1..20: mol_type = other DNA
cagtttcctccagcccagcg

SEQ ID NO: 16570 - DNA, 20 bp, synthetic construct
  misc_feature 1..20: note = Description of Artificial Sequence: Synthetic oligonucleotide
  misc_feature 1..20: note = Target: SCN10A; (-) strand; PAM type: NRG; PAM sequence: CAG
  source 1..20: mol_type = other DNA
ggacacagtttcctccagcc

SEQ ID NO: 16571 - DNA, 20 bp, synthetic construct
  misc_feature 1..20: note = Description of Artificial Sequence: Synthetic oligonucleotide
  misc_feature 1..20: note = Target: SCN10A; (-) strand; PAM type: NRG; PAM sequence: CAG
  source 1..20: mol_type = other DNA
aaggtggacacagtttcctc

SEQ ID NO: 16572 - DNA, 20 bp, synthetic construct
  misc_feature 1..20: note = Description of Artificial Sequence: Synthetic oligonucleotide
  misc_feature 1..20: note = Target: SCN10A; (-) strand; PAM type: NRG; PAM sequence: CAG
  source 1..20: mol_type = other DNA
agcatttcccaaggtggaca

SEQ ID NO: 16573 - DNA, 20 bp, synthetic construct
  misc_feature 1..20: note = Description of Artificial Sequence: Synthetic oligonucleotide
  misc_feature 1..20: note = Target: SCN10A; (-) strand; PAM type: NRG; PAM sequence: TGG
  source 1..20: mol_type = other DNA
aggataagcatttcccaagg

SEQ ID NO: 16574 - DNA, 20 bp, synthetic construct
  misc_feature 1..20: note = Description of Artificial Sequence: Synthetic oligonucleotide
  misc_feature 1..20: note = Target: SCN10A; (-) strand; PAM type: NRG; PAM sequence: AGG
  source 1..20: mol_type = other DNA
gggaggataagcatttccca

SEQ ID NO: 16575 - DNA, 20 bp, synthetic construct
  misc_feature 1..20: note = Description of Artificial Sequence: Synthetic oligonucleotide
  misc_feature 1..20: note = Target: SCN10A; (-) strand; PAM type: NRG; PAM sequence: AAG
  source 1..20: mol_type = other DNA
ggggaggataagcatttccc

SEQ ID NO: 16576 - DNA, 20 bp, synthetic construct
  misc_feature 1..20: note = Description of Artificial Sequence: Synthetic oligonucleotide
  misc_feature 1..20: note = Target: SCN10A; (-) strand; PAM type: NRG; PAM sequence: AAG
  source 1..20: mol_type = other DNA
gctgccccagcggggaggat

SEQ ID NO: 16577 - DNA, 20 bp, synthetic construct
  misc_feature 1..20: note = Description of Artificial Sequence: Synthetic oligonucleotide
  misc_feature 1..20: note = Target: SCN10A; (-) strand; PAM type: NRG; PAM sequence: AGG
  source 1..20: mol_type = other DNA
tgagggctgccccagcgggg

SEQ ID NO: 16578 - DNA, 20 bp, synthetic construct
  misc_feature 1..20: note = Description of Artificial Sequence: Synthetic oligonucleotide
  misc_feature 1..20: note = Target: SCN10A; (-) strand; PAM type: NRG; PAM sequence: GAG
  source 1..20: mol_type = other DNA
ctgagggctgccccagcggg

SEQ ID NO: 16579 - DNA, 20 bp, synthetic construct
  misc_feature 1..20: note = Description of Artificial Sequence: Synthetic oligonucleotide
  misc_feature 1..20: note = Target: SCN10A; (-) strand; PAM type: NRG; PAM sequence: GGG
  source 1..20: mol_type = other DNA
ggctgagggctgccccagcg

SEQ ID NO: 16580 - DNA, 20 bp, synthetic construct
  misc_feature 1..20: note = Description of Artificial Sequence: Synthetic oligonucleotide
  misc_feature 1..20: note = Target: SCN10A; (-) strand; PAM type: NRG; PAM sequence: GGG
  source 1..20: mol_type = other DNA
tggctgagggctgccccagc

SEQ ID NO: 16581 - DNA, 20 bp, synthetic construct
  misc_feature 1..20: note = Description of Artificial Sequence: Synthetic oligonucleotide
  misc_feature 1..20: note = Target: SCN10A; (-) strand; PAM type: NRG; PAM sequence: CGG
  source 1..20: mol_type = other DNA
ctggctgagggctgccccag

SEQ ID NO: 16582 - DNA, 20 bp, synthetic construct
  misc_feature 1..20: note = Description of Artificial Sequence: Synthetic oligonucleotide
  misc_feature 1..20: note = Target: SCN10A; (-) strand; PAM type: NRG; PAM sequence: CAG
  source 1..20: mol_type = other DNA
tccctggctgagggctgccc

SEQ ID NO: 16583 - DNA, 20 bp, synthetic construct
  misc_feature 1..20: note = Description of Artificial Sequence: Synthetic oligonucleotide
  misc_feature 1..20: note = Target: SCN10A; (-) strand; PAM type: NRG; PAM sequence: GGG
  source 1..20: mol_type = other DNA
ctgtcactgtccctggctga

SEQ ID NO: 16584 - DNA, 20 bp, synthetic construct
  misc_feature 1..20: note = Description of Artificial Sequence: Synthetic oligonucleotide
  misc_feature 1..20: note = Target: SCN10A; (-) strand; PAM type: NRG; PAM sequence: AGG
  source 1..20: mol_type = other DNA
cctgtcactgtccctggctg

SEQ ID NO: 16585 - DNA, 20 bp, synthetic construct
  misc_feature 1..20: note = Description of Artificial Sequence: Synthetic oligonucleotide
  misc_feature 1..20: note = Target: SCN10A; (-) strand; PAM type: NRG; PAM sequence: GAG
  source 1..20: mol_type = other DNA
ccctgtcactgtccctggct

SEQ ID NO: 16586 - DNA, 20 bp, synthetic construct
  misc_feature 1..20: note = Description of Artificial Sequence: Synthetic oligonucleotide
  misc_feature 1..20: note = Target: SCN10A; (-) strand; PAM type: NRG; PAM sequence: TGG
  source 1..20: mol_type = other DNA
aatccccctgtcactgtccc

SEQ ID NO: 16587 - DNA, 20 bp, synthetic construct
  misc_feature 1..20: note = Description of Artificial Sequence: Synthetic oligonucleotide
  misc_feature 1..20: note = Target: SCN10A; (-) strand; PAM type: NRG; PAM sequence: CAG
  source 1..20: mol_type = other DNA
ccaccttgaggcaaagaaga

SEQ ID NO: 16588 - DNA, 20 bp, synthetic construct
  misc_feature 1..20: note = Description of Artificial Sequence: Synthetic oligonucleotide
  misc_feature 1..20: note = Target: SCN10A; (-) strand; PAM type: NRG; PAM sequence: AAG
  source 1..20: mol_type = other DNA
tgtcccaccttgaggcaaag

SEQ ID NO: 16589 - DNA, 20 bp, synthetic construct
  misc_feature 1..20: note = Description of Artificial Sequence: Synthetic oligonucleotide
  misc_feature 1..20: note = Target: SCN10A; (-) strand; PAM type: NRG; PAM sequence: AAG
  source 1..20: mol_type = other DNA
agctgtcccaccttgaggca

SEQ ID NO: 16590 - DNA, 20 bp, synthetic construct
  misc_feature 1..20: note = Description of Artificial Sequence: Synthetic oligonucleotide
  misc_feature 1..20: note = Target: SCN10A; (-) strand; PAM type: NRG; PAM sequence: AGG
  source 1..20: mol_type = other DNA
caaagagctgtcccaccttg

SEQ ID NO: 16591 - DNA, 20 bp, synthetic construct
  misc_feature 1..20: note = Description of Artificial Sequence: Synthetic oligonucleotide
  misc_feature 1..20: note = Target: SCN10A; (-) strand; PAM type: NRG; PAM sequence: GAG
  source 1..20: mol_type = other DNA
ccaaagagctgtcccacctt

SEQ ID NO: 16592 - DNA, 20 bp, synthetic construct
  misc_feature 1..20: note = Description of Artificial Sequence: Synthetic oligonucleotide
  misc_feature 1..20: note = Target: SCN10A; (-) strand; PAM type: NRG; PAM sequence: GAG
  source 1..20: mol_type = other DNA
gaagcacaaaggacaccaaa

SEQ ID NO: 16593 - DNA, 20 bp, synthetic construct
  misc_feature 1..20: note = Description of Artificial Sequence: Synthetic oligonucleotide
  misc_feature 1..20: note = Target: SCN10A; (-) strand; PAM type: NRG; PAM sequence: AAG
  source 1..20: mol_type = other DNA
ctgaagcacaaaggacacca

SEQ ID NO: 16594 - DNA, 20 bp, synthetic construct
  misc_feature 1..20: note = Description of Artificial Sequence: Synthetic oligonucleotide
  misc_feature 1..20: note = Target: SCN10A; (-) strand; PAM type: NRG; PAM sequence: AGG
  source 1..20: mol_type = other DNA
tggaaagccctgaagcacaa

SEQ ID NO: 16595 - DNA, 20 bp, synthetic construct
  misc_feature 1..20: note = Description of Artificial Sequence: Synthetic oligonucleotide
  misc_feature 1..20: note = Target: SCN10A; (-) strand; PAM type: NRG; PAM sequence: AAG
  source 1..20: mol_type = other DNA
atggaaagccctgaagcaca

SEQ ID NO: 16596 - DNA, 20 bp, synthetic construct
  misc_feature 1..20: note = Description of Artificial Sequence: Synthetic oligonucleotide
  misc_feature 1..20: note = Target: SCN10A; (-) strand; PAM type: NRG; PAM sequence: AAG
  source 1..20: mol_type = other DNA
tgatcccatggaaagccctg

SEQ ID NO: 16597 - DNA, 20 bp, synthetic construct
  misc_feature 1..20: note = Description of Artificial Sequence: Synthetic oligonucleotide
  misc_feature 1..20: note = Target: SCN10A; (-) strand; PAM type: NRG; PAM sequence: AAG
  source 1..20: mol_type = other DNA
gcttcagctgatcccatgga

SEQ ID NO: 16598 - DNA, 20 bp, synthetic construct
  misc_feature 1..20: note = Description of Artificial Sequence: Synthetic oligonucleotide
  misc_feature 1..20: note = Target: SCN10A; (-) strand; PAM type: NRG; PAM sequence: TGG
  source 1..20: mol_type = other DNA
tccggcttcagctgatccca

SEQ ID NO: 16599 - DNA, 20 bp, synthetic construct
  misc_feature 1..20: note = Description of Artificial Sequence: Synthetic oligonucleotide
  misc_feature 1..20: note = Target: SCN10A; (-) strand; PAM type: NRG; PAM sequence: CAG
  source 1..20: mol_type = other DNA
gttcagttgaaatccggctt

SEQ ID NO: 16600 - DNA, 20 bp, synthetic construct
  misc_feature 1..20: note = Description of Artificial Sequence: Synthetic oligonucleotide
  misc_feature 1..20: note = Target: SCN10A; (-) strand; PAM type: NRG; PAM sequence: CGG
  source 1..20: mol_type = other DNA
atgtgggttcagttgaaatc

SEQ ID NO: 16601 - DNA, 20 bp, synthetic construct
  misc_feature 1..20: note = Description of Artificial Sequence: Synthetic oligonucleotide
  misc_feature 1..20: note = Target: SCN10A; (-) strand; PAM type: NRG; PAM sequence: CAG
  source 1..20: mol_type = other DNA
gctgagaaaagatgtgggtt

SEQ ID NO: 16602 - DNA, 20 bp, synthetic construct
  misc_feature 1..20: note = Description of Artificial Sequence: Synthetic oligonucleotide
  misc_feature 1..20: note = Target: SCN10A; (-) strand; PAM type: NRG; PAM sequence: GGG
  source 1..20: mol_type = other DNA
cggaagctgagaaaagatgt

SEQ ID NO: 16603 - DNA, 20 bp, synthetic construct
  misc_feature 1..20: note = Description of Artificial Sequence: Synthetic oligonucleotide
  misc_feature 1..20: note = Target: SCN10A; (-) strand; PAM type: NRG; PAM sequence: TGG
  source 1..20: mol_type = other DNA
tcggaagctgagaaaagatg

SEQ ID NO: 16604 - DNA, 20 bp, synthetic construct
  misc_feature 1..20: note = Description of Artificial Sequence: Synthetic oligonucleotide
  misc_feature 1..20: note = Target: SCN10A; (-) strand; PAM type: NRG; PAM sequence: AAG
  source 1..20: mol_type = other DNA
acagaatcggaagctgagaa

SEQ ID NO: 16605 - DNA, 20 bp, synthetic construct
  misc_feature 1..20: note = Description of Artificial Sequence: Synthetic oligonucleotide
  misc_feature 1..20: note = Target: SCN10A; (-) strand; PAM type: NRG; PAM sequence: GAG
  source 1..20: mol_type = other DNA
tagacacagaatcggaagct

SEQ ID NO: 16606 - DNA, 20 bp, synthetic construct
  misc_feature 1..20: note = Description of Artificial Sequence: Synthetic oligonucleotide
  misc_feature 1..20: note = Target: SCN10A; (-) strand; PAM type: NRG; PAM sequence: AAG
  source 1..20: mol_type = other DNA
cgtcctagacacagaatcgg

SEQ ID NO: 16607 - DNA, 20 bp, synthetic construct
  misc_feature 1..20: note = Description of Artificial Sequence: Synthetic oligonucleotide
  misc_feature 1..20: note = Target: SCN10A; (-) strand; PAM type: NRG; PAM sequence: CGG
  source 1..20: mol_type = other DNA
cctcgtcctagacacagaat

SEQ ID NO: 16608 - DNA, 20 bp, synthetic construct
  misc_feature 1..20: note = Description of Artificial Sequence: Synthetic oligonucleotide
  misc_feature 1..20: note = Target: SCN10A; (-) strand; PAM type: NRG; PAM sequence: CAG
  source 1..20: mol_type = other DNA
cttagtcctcgtcctagaca

SEQ ID NO: 16609 - DNA, 20 bp, synthetic construct
  misc_feature 1..20: note = Description of Artificial Sequence: Synthetic oligonucleotide
  misc_feature 1..20: note = Target: SCN10A; (-) strand; PAM type: NRG; PAM sequence: TAG
  source 1..20: mol_type = other DNA
tcccatcttagtcctcgtcc

SEQ ID NO: 16610 - DNA, 20 bp, synthetic construct
  misc_feature 1..20: note = Description of Artificial Sequence: Synthetic oligonucleotide
  misc_feature 1..20: note = Target: SCN10A; (-) strand; PAM type: NRG; PAM sequence: TAG
  source 1..20: mol_type = other DNA
cgttggataatctcccatct

SEQ ID NO: 16611 - DNA, 20 bp, synthetic construct
  misc_feature 1..20: note = Description of Artificial Sequence: Synthetic oligonucleotide
  misc_feature 1..20: note = Target: SCN10A; (-) strand; PAM type: NRG; PAM sequence: TGG
  source 1..20: mol_type = other DNA
gtgtactcccttagagacgt

SEQ ID NO: 16612 - DNA, 20 bp, synthetic construct
  misc_feature 1..20: note = Description of Artificial Sequence: Synthetic oligonucleotide
  misc_feature 1..20: note = Target: SCN10A; (-) strand; PAM type: NRG; PAM sequence: GAG
  source 1..20: mol_type = other DNA
tccctgtgtgtactccctta

SEQ ID NO: 16613 - DNA, 20 bp, synthetic construct
  misc_feature 1..20: note = Description of Artificial Sequence: Synthetic oligonucleotide
  misc_feature 1..20: note = Target: SCN10A; (-) strand; PAM type: NRG; PAM sequence: TAG
  source 1..20: mol_type = other DNA
attccctgtgtgtactccct

SEQ ID NO: 16614 - DNA, 20 bp, synthetic construct
  misc_feature 1..20: note = Description of Artificial Sequence: Synthetic oligonucleotide
  misc_feature 1..20: note = Target: SCN10A; (-) strand; PAM type: NRG; PAM sequence: TGG
  source 1..20: mol_type = other DNA
tctcatattatctcatttaa

SEQ ID NO: 16615 - DNA, 20 bp, synthetic construct
  misc_feature 1..20: note = Description of Artificial Sequence: Synthetic oligonucleotide
  misc_feature 1..20: note = Target: SCN10A; (-) strand; PAM type: NRG; PAM sequence: TAG
  source 1..20: mol_type = other DNA
agtacatttttctcagtaaa

SEQ ID NO: 16616 - DNA, 20 bp, synthetic construct
  misc_feature 1..20: note = Description of Artificial Sequence: Synthetic oligonucleotide
  misc_feature 1..20: note = Target: SCN10A; (-) strand; PAM type: NRG; PAM sequence: CAG
  source 1..20: mol_type = other DNA
taacctcagtacatttttct

SEQ ID NO: 16617 - DNA, 20 bp, synthetic construct
  misc_feature 1..20: note = Description of Artificial Sequence: Synthetic oligonucleotide
  misc_feature 1..20: note = Target: SCN10A; (-) strand; PAM type: NRG; PAM sequence: CAG
  source 1..20: mol_type = other DNA
atttatgcattctataacct

SEQ ID NO: 16618 - DNA, 20 bp, synthetic construct
  misc_feature 1..20: note = Description of Artificial Sequence: Synthetic oligonucleotide
  misc_feature 1..20: note = Target: SCN10A; (-) strand; PAM type: NRG; PAM sequence: TGG
  source 1..20: mol_type = other DNA
aaactcacttgaaaacatgc

SEQ ID NO: 16619 - DNA, 20 bp, synthetic construct
  misc_feature 1..20: note = Description of Artificial Sequence: Synthetic oligonucleotide
  misc_feature 1..20: note = Target: SCN10A; (-) strand; PAM type: NRG; PAM sequence: GAG
  source 1..20: mol_type = other DNA
ccatttccctatcactcaaa

SEQ ID NO: 16620 - DNA, 20 bp, synthetic construct
  misc_feature 1..20: note = Description of Artificial Sequence: Synthetic oligonucleotide
  misc_feature 1..20: note = Target: SCN10A; (-) strand; PAM type: NRG; PAM sequence: AAG
  source 1..20: mol_type = other DNA
atccatttccctatcactca

SEQ ID NO: 16621 - DNA, 20 bp, synthetic construct
  misc_feature 1..20: note = Description of Artificial Sequence: Synthetic oligonucleotide
  misc_feature 1..20: note = Target: SCN10A; (-) strand; PAM type: NRG; PAM sequence: AAG
  source 1..20: mol_type = other DNA
ggaaattatagaaaaaggta

SEQ ID NO: 16622 - DNA, 20 bp, synthetic construct
  misc_feature 1..20: note = Description of Artificial Sequence: Synthetic oligonucleotide
  misc_feature 1..20: note = Target: SCN10A; (-) strand; PAM type: NRG; PAM sequence: AGG
  source 1..20: mol_type = other DNA
tacttggaaattatagaaaa

SEQ ID NO: 16623 - DNA, 20 bp, synthetic construct
  misc_feature 1..20: note = Description of Artificial Sequence: Synthetic oligonucleotide
  misc_feature 1..20: note = Target: SCN10A; (-) strand; PAM type: NRG; PAM sequence: AAG
  source 1..20: mol_type = other DNA
atacttggaaattatagaaa

SEQ ID NO: 16624 - DNA, 20 bp, synthetic construct
  misc_feature 1..20: note = Description of Artificial Sequence: Synthetic oligonucleotide
  misc_feature 1..20: note = Target: SCN10A; (-) strand; PAM type: NRG; PAM sequence: TAG
  source 1..20: mol_type = other DNA
aaaaaaatacttggaaatta

SEQ ID NO: 16625 - DNA, 20 bp, synthetic construct
  misc_feature 1..20: note = Description of Artificial Sequence: Synthetic oligonucleotide
  misc_feature 1..20: note = Target: SCN10A; (-) strand; PAM type: NRG; PAM sequence: TGG
  source 1..20: mol_type = other DNA
taaagtaccaaaaaaatact

SEQ ID NO: 16626 - DNA, 20 bp, synthetic construct
  misc_feature 1..20: note = Description of Artificial Sequence: Synthetic oligonucleotide
  misc_feature 1..20: note = Target: SCN10A; (-) strand; PAM type: NRG; PAM sequence: AAG
  source 1..20: mol_type = other DNA
cattttcatctgacaaagta

SEQ ID NO: 16627 - DNA, 20 bp, synthetic construct
  misc_feature 1..20: note = Description of Artificial Sequence: Synthetic oligonucleotide
  misc_feature 1..20: note = Target: SCN10A; (-) strand; PAM type: NRG; PAM sequence: AAG
  source 1..20: mol_type = other DNA
acatgcattttcatctgaca

SEQ ID NO: 16628 - DNA, 20 bp, synthetic construct
  misc_feature 1..20: note = Description of Artificial Sequence: Synthetic oligonucleotide
  misc_feature 1..20: note = Target: SCN10A; (-) strand; PAM type: NRG; PAM sequence: GAG
  source 1..20: mol_type = other DNA
cttctttaggctttcacttt

SEQ ID NO: 16629 - DNA, 20 bp, synthetic construct
  misc_feature 1..20: note = Description of Artificial Sequence: Synthetic oligonucleotide
  misc_feature 1..20: note = Target: SCN10A; (-) strand; PAM type: NRG; PAM sequence: AGG
  source 1..20: mol_type = other DNA
caccaaatttagccttcttt

SEQ ID NO: 16630 - DNA, 20 bp, synthetic construct
  misc_feature 1..20: note = Description of Artificial Sequence: Synthetic oligonucleotide
  misc_feature 1..20: note = Target: SCN10A; (-) strand; PAM type: NRG; PAM sequence: TAG
  source 1..20: mol_type = other DNA
gcaccaaatttagccttctt

SEQ ID NO: 16631 - DNA, 20 bp, synthetic construct
  misc_feature 1..20: note = Description of Artificial Sequence: Synthetic oligonucleotide
  misc_feature 1..20: note = Target: SCN10A; (-) strand; PAM type: NRG; PAM sequence: TAG
  source 1..20: mol_type = other DNA
gaacaggctggcaccaaatt

SEQ ID NO: 16632 - DNA, 20 bp, synthetic construct
  misc_feature 1..20: note = Description of Artificial Sequence: Synthetic oligonucleotide
  misc_feature 1..20: note = Target: SCN10A; (-) strand; PAM type: NRG; PAM sequence: TGG
  source 1..20: mol_type = other DNA
tcccctgggactgaacaggc

SEQ ID NO: 16633 - DNA, 20 bp, synthetic construct
  misc_feature 1..20: note = Description of Artificial Sequence: Synthetic oligonucleotide
  misc_feature 1..20: note = Target: SCN10A; (-) strand; PAM type: NRG; PAM sequence: AGG
  source 1..20: mol_type = other DNA
tccttcccctgggactgaac

SEQ ID NO: 16634 - DNA, 20 bp, synthetic construct
  misc_feature 1..20: note = Description of Artificial Sequence: Synthetic oligonucleotide
  misc_feature 1..20: note = Target: SCN10A; (-) strand; PAM type: NRG; PAM sequence: CAG
  source 1..20: mol_type = other DNA
ctccttcccctgggactgaa

SEQ ID NO: 16635 - DNA, 20 bp, synthetic construct
  misc_feature 1..20: note = Description of Artificial Sequence: Synthetic oligonucleotide
  misc_feature 1..20: note = Target: SCN10A; (-) strand; PAM type: NRG; PAM sequence: GGG
  source 1..20: mol_type = other DNA
ccctcccatctccttcccct

SEQ ID NO: 16636 - DNA, 20 bp, synthetic construct
  misc_feature 1..20: note = Description of Artificial Sequence: Synthetic oligonucleotide
  misc_feature 1..20: note = Target: SCN10A; (-) strand; PAM type: NRG; PAM sequence: TGG
  source 1..20: mol_type = other DNA
tccctcccatctccttcccc

SEQ ID NO: 16637 - DNA, 20 bp, synthetic construct
  misc_feature 1..20: note = Description of Artificial Sequence: Synthetic oligonucleotide
  misc_feature 1..20: note = Target: SCN10A; (-) strand; PAM type: NRG; PAM sequence: CAG
  source 1..20: mol_type = other DNA
ccagcccagcccgccccctg

SEQ ID NO: 16638 - DNA, 20 bp, synthetic construct
  misc_feature 1..20: note = Description of Artificial Sequence: Synthetic oligonucleotide
  misc_feature 1..20: note = Target: SCN10A; (-) strand; PAM type: NRG; PAM sequence: CAG
  source 1..20: mol_type = other DNA
cctgcagcactgcgccagcc

SEQ ID NO: 16639 - DNA, 20 bp, synthetic construct
  misc_feature 1..20: note = Description of Artificial Sequence: Synthetic oligonucleotide
  misc_feature 1..20: note = Target: SCN10A; (-) strand; PAM type: NRG; PAM sequence: CAG
  source 1..20: mol_type = other DNA
tcagacctgcagcactgcgc

SEQ ID NO: 16640 - DNA, 20 bp, synthetic construct
  misc_feature 1..20: note = Description of Artificial Sequence: Synthetic oligonucleotide
  misc_feature 1..20: note = Target: SCN10A; (-) strand; PAM type: NRG; PAM sequence: CAG
  source 1..20: mol_type = other DNA
caggaggaagctcagacctg

SEQ ID NO: 16641 - DNA, 20 bp, synthetic construct
  misc_feature 1..20: note = Description of Artificial Sequence: Synthetic oligonucleotide
  misc_feature 1..20: note = Target: SCN10A; (-) strand; PAM type: NRG; PAM sequence: CAG
  source 1..20: mol_type = other DNA
cacattcccaggaggaagct

SEQ ID NO: 16642 - DNA, 20 bp, synthetic construct
  misc_feature 1..20: note = Description of Artificial Sequence: Synthetic oligonucleotide
  misc_feature 1..20: note = Target: SCN10A; (-) strand; PAM type: NRG; PAM sequence: AAG
  source 1..20: mol_type = other DNA
ccccccacattcccaggagg

SEQ ID NO: 16643 - DNA, 20 bp, synthetic construct
  misc_feature 1..20: note = Description of Artificial Sequence: Synthetic oligonucleotide
  misc_feature 1..20: note = Target: SCN10A; (-) strand; PAM type: NRG; PAM sequence: AGG
  source 1..20: mol_type = other DNA
ccaccccccacattcccagg

SEQ ID NO: 16644 - DNA, 20 bp, synthetic construct
  misc_feature 1..20: note = Description of Artificial Sequence: Synthetic oligonucleotide
  misc_feature 1..20: note = Target: SCN10A; (-) strand; PAM type: NRG; PAM sequence: GAG
  source 1..20: mol_type = other DNA
tccaccccccacattcccag

SEQ ID NO: 16645 - DNA, 20 bp, synthetic construct
  misc_feature 1..20: note = Description of Artificial Sequence: Synthetic oligonucleotide
  misc_feature 1..20: note = Target: SCN10A; (-) strand; PAM type: NRG; PAM sequence: AGG
  source 1..20: mol_type = other DNA
ggtccaccccccacattccc

SEQ ID NO: 16646 - DNA, 20 bp, synthetic construct
  misc_feature 1..20: note = Description of Artificial Sequence: Synthetic oligonucleotide
  misc_feature 1..20: note = Target: SCN10A; (-) strand; PAM type: NRG; PAM sequence: CAG
  source 1..20: mol_type = other DNA
cggtccaccccccacattcc

SEQ ID NO: 16647 - DNA, 20 bp, synthetic construct
  misc_feature 1..20: note = Description of Artificial Sequence: Synthetic oligonucleotide
  misc_feature 1..20: note = Target: SCN10A; (-) strand; PAM type: NRG; PAM sequence: CGG
  source 1..20: mol_type = other DNA
gcccccttctcttcacaccc

SEQ ID NO: 16648 - DNA, 20 bp, synthetic construct
  misc_feature 1..20: note = Description of Artificial Sequence: Synthetic oligonucleotide
  misc_feature 1..20: note = Target: SCN10A; (-) strand; PAM type: NRG; PAM sequence: TAG
  source 1..20: mol_type = other DNA
tgctccctcccttctctctc

SEQ ID NO: 16649 - DNA, 20 bp, synthetic construct
  misc_feature 1..20: note = Description of Artificial Sequence: Synthetic oligonucleotide
  misc_feature 1..20: note = Target: SCN10A; (-) strand; PAM type: NRG; PAM sequence: GGG
  source 1..20: mol_type = other DNA
tcactacgtcattggcttgt

SEQ ID NO: 16650 - DNA, 20 bp, synthetic construct
  misc_feature 1..20: note = Description of Artificial Sequence: Synthetic oligonucleotide
  misc_feature 1..20: note = Target: SCN10A; (-) strand; PAM type: NRG; PAM sequence: TGG
  source 1..20: mol_type = other DNA
ctcactacgtcattggcttg

SEQ ID NO: 16651 - DNA, 20 bp, synthetic construct
  misc_feature 1..20: note = Description of Artificial Sequence: Synthetic oligonucleotide
  misc_feature 1..20: note = Target: SCN10A; (-) strand; PAM type: NRG; PAM sequence: TGG
  source 1..20: mol_type = other DNA
tgctctcctcactacgtcat

SEQ ID NO: 16652 - DNA, 20 bp, synthetic construct
  misc_feature 1..20: note = Description of Artificial Sequence: Synthetic oligonucleotide
  misc_feature 1..20: note = Target: SCN10A; (-) strand; PAM type: NRG; PAM sequence: AGG
  source 1..20: mol_type = other DNA
aaccacatgtgctgttggcc

SEQ ID NO: 16653 - DNA, 20 bp, synthetic construct
  misc_feature 1..20: note = Description of Artificial Sequence: Synthetic oligonucleotide
  misc_feature 1..20: note = Target: SCN10A; (-) strand; PAM type: NRG; PAM sequence: CAG
  source 1..20: mol_type = other DNA
taaccacatgtgctgttggc

SEQ ID NO: 16654 - DNA, 20 bp, synthetic construct
  misc_feature 1..20: note = Description of Artificial Sequence: Synthetic oligonucleotide
  misc_feature 1..20: note = Target: SCN10A; (-) strand; PAM type: NRG; PAM sequence: TGG
  source 1..20: mol_type = other DNA
gtaataaccacatgtgctgt

SEQ ID NO: 16655 - DNA, 20 bp, synthetic construct
  misc_feature 1..20: note = Description of Artificial Sequence: Synthetic oligonucleotide
  misc_feature 1..20: note = Target: SCN10A; (-) strand; PAM type: NRG; PAM sequence: AAG
  source 1..20: mol_type = other DNA
cttccagtcctgctggatta

SEQ ID NO: 16656 - DNA, 20 bp, synthetic construct
  misc_feature 1..20: note = Description of Artificial Sequence: Synthetic oligonucleotide
  misc_feature 1..20: note = Target: SCN10A; (-) strand; PAM type: NRG; PAM sequence: TGG
  source 1..20: mol_type = other DNA
tcttctccttccagtcctgc

SEQ ID NO: 16657 - DNA, 20 bp, synthetic construct
  misc_feature 1..20: note = Description of Artificial Sequence: Synthetic oligonucleotide
  misc_feature 1..20: note = Target: SCN10A; (-) strand; PAM type: NRG; PAM sequence: CAG
  source 1..20: mol_type = other DNA
cacctatgctcttctccttc

SEQ ID NO: 16658 - DNA, 20 bp, synthetic construct
  misc_feature 1..20: note = Description of Artificial Sequence: Synthetic oligonucleotide
  misc_feature 1..20: note = Target: SCN10A; (-) strand; PAM type: NRG; PAM sequence: CAG
  source 1..20: mol_type = other DNA
aggggcaagagagggctggg

SEQ ID NO: 16659 - DNA, 20 bp, synthetic construct
  misc_feature 1..20: note = Description of Artificial Sequence: Synthetic oligonucleotide
  misc_feature 1..20: note = Target: SCN10A; (-) strand; PAM type: NRG; PAM sequence: GGG
  source 1..20: mol_type = other DNA
tgcaggggcaagagagggct

SEQ ID NO: 16660 - DNA, 20 bp, synthetic construct
  misc_feature 1..20: note = Description of Artificial Sequence: Synthetic oligonucleotide
  misc_feature 1..20: note = Target: SCN10A; (-) strand; PAM type: NRG; PAM sequence: TGG
  source 1..20: mol_type = other DNA
ttgcaggggcaagagagggc

SEQ ID NO: 16661 - DNA, 20 bp, synthetic construct
  misc_feature 1..20: note = Description of Artificial Sequence: Synthetic oligonucleotide
  misc_feature 1..20: note = Target: SCN10A; (-) strand; PAM type: NRG; PAM sequence: GGG
  source 1..20: mol_type = other DNA
caaattgcaggggcaagaga

SEQ ID NO: 16662 - DNA, 20 bp, synthetic construct
  misc_feature 1..20: note = Description of Artificial Sequence: Synthetic oligonucleotide
  misc_feature 1..20: note = Target: SCN10A; (-) strand; PAM type: NRG; PAM sequence: AGG
  source 1..20: mol_type = other DNA
ccaaattgcaggggcaagag

SEQ ID NO: 16663 - DNA, 20 bp, synthetic construct
  misc_feature 1..20: note = Description of Artificial Sequence: Synthetic oligonucleotide
  misc_feature 1..20: note = Target: SCN10A; (-) strand; PAM type: NRG; PAM sequence: GAG
  source 1..20: mol_type = other DNA
gccaaattgcaggggcaaga

SEQ ID NO: 16664 - DNA, 20 bp, synthetic construct
  misc_feature 1..20: note = Description of Artificial Sequence: Synthetic oligonucleotide
  misc_feature 1..20: note = Target: SCN10A; (-) strand; PAM type: NRG; PAM sequence: GAG
  source 1..20: mol_type = other DNA
aggccaaattgcaggggcaa

SEQ ID NO: 16665 - DNA, 20 bp, synthetic construct
  misc_feature 1..20: note = Description of Artificial Sequence: Synthetic oligonucleotide
  misc_feature 1..20: note = Target: SCN10A; (-) strand; PAM type: NRG; PAM sequence: AAG
  source 1..20: mol_type = other DNA
agaggccaaattgcaggggc

SEQ ID NO: 16666 - DNA, 20 bp, synthetic construct
  misc_feature 1..20: note = Description of Artificial Sequence: Synthetic oligonucleotide
  misc_feature 1..20: note = Target: SCN10A; (-) strand; PAM type: NRG; PAM sequence: GGG
  source 1..20: mol_type = other DNA
gtgtagaggccaaattgcag

SEQ ID NO: 16667 - DNA, 20 bp, synthetic construct
  misc_feature 1..20: note = Description of Artificial Sequence: Synthetic oligonucleotide
  misc_feature 1..20: note = Target: SCN10A; (-) strand; PAM type: NRG; PAM sequence: GGG
  source 1..20: mol_type = other DNA
agtgtagaggccaaattgca

SEQ ID NO: 16668 - DNA, 20 bp, synthetic construct
  misc_feature 1..20: note = Description of Artificial Sequence: Synthetic oligonucleotide
  misc_feature 1..20: note = Target: SCN10A; (-) strand; PAM type: NRG; PAM sequence: AGG
  source 1..20: mol_type = other DNA
cagtgtagaggccaaattgc

SEQ ID NO: 16669 - DNA, 20 bp, synthetic construct
  misc_feature 1..20: note = Description of Artificial Sequence: Synthetic oligonucleotide
  misc_feature 1..20: note = Target: SCN10A; (-) strand; PAM type: NRG; PAM sequence: CAG
  source 1..20: mol_type = other DNA
acagtgtagaggccaaattg

SEQ ID NO: 16670 - DNA, 20 bp, synthetic construct
  misc_feature 1..20: note = Description of Artificial Sequence: Synthetic oligonucleotide
  misc_feature 1..20: note = Target: SCN10A; (-) strand; PAM type: NRG; PAM sequence: AGG
  source 1..20: mol_type = other DNA
cggacctcagcacagtgtag

SEQ ID NO: 16671 - DNA, 20 bp, synthetic construct
  misc_feature 1..20: note = Description of Artificial Sequence: Synthetic oligonucleotide
  misc_feature 1..20: note = Target: SCN10A; (-) strand; PAM type: NRG; PAM sequence: GAG
  source 1..20: mol_type = other DNA
acggacctcagcacagtgta

SEQ ID NO: 16672 - DNA, 20 bp, synthetic construct
  misc_feature 1..20: note = Description of Artificial Sequence: Synthetic oligonucleotide
  misc_feature 1..20: note = Target: SCN10A; (-) strand; PAM type: NRG; PAM sequence: TAG
  source 1..20: mol_type = other DNA
acacggacctcagcacagtg

SEQ ID NO: 16673 - DNA, 20 bp, synthetic construct
  misc_feature 1..20: note = Description of Artificial Sequence: Synthetic oligonucleotide
  misc_feature 1..20: note = Target: SCN10A; (-) strand; PAM type: NRG; PAM sequence: CAG
  source 1..20: mol_type = other DNA
tgtccacacggacctcagca

SEQ ID NO: 16674 - DNA, 20 bp, synthetic construct
  misc_feature 1..20: note = Description of Artificial Sequence: Synthetic oligonucleotide
  misc_feature 1..20: note = Target: SCN10A; (-) strand; PAM type: NRG; PAM sequence: CAG
  source 1..20: mol_type = other DNA
gtgattgtccacacggacct

SEQ ID NO: 16675 - DNA, 20 bp, synthetic construct
  misc_feature 1..20: note = Description of Artificial Sequence: Synthetic oligonucleotide
  misc_feature 1..20: note = Target: SCN10A; (-) strand; PAM type: NRG; PAM sequence: CGG
  source 1..20: mol_type = other DNA
cagggcagtgattgtccaca

SEQ ID NO: 16676 - DNA, 20 bp, synthetic construct
  misc_feature 1..20: note = Description of Artificial Sequence: Synthetic oligonucleotide
  misc_feature 1..20: note = Target: SCN10A; (-) strand; PAM type: NRG; PAM sequence: CAG
  source 1..20: mol_type = other DNA
cccagtgccctggcacaggg

SEQ ID NO: 16677 - DNA, 20 bp, synthetic construct
  misc_feature 1..20: note = Description of Artificial Sequence: Synthetic oligonucleotide
  misc_feature 1..20: note = Target: SCN10A; (-) strand; PAM type: NRG; PAM sequence: GGG
  source 1..20: mol_type = other DNA
gtgcccagtgccctggcaca

SEQ ID NO: 16678 - DNA, 20 bp, synthetic construct
  misc_feature 1..20: note = Description of Artificial Sequence: Synthetic oligonucleotide
  misc_feature 1..20: note = Target: SCN10A; (-) strand; PAM type: NRG; PAM sequence: AGG
  source 1..20: mol_type = other DNA
ggtgcccagtgccctggcac

SEQ ID NO: 16679 - DNA, 20 bp, synthetic construct
  misc_feature 1..20: note = Description of Artificial Sequence: Synthetic oligonucleotide
  misc_feature 1..20: note = Target: SCN10A; (-) strand; PAM type: NRG; PAM sequence: CAG
  source 1..20: mol_type = other DNA
aggtgcccagtgccctggca

SEQ ID NO: 16680 - DNA, 20 bp, synthetic construct
  misc_feature 1..20: note = Description of Artificial Sequence: Synthetic oligonucleotide
  misc_feature 1..20: note = Target: SCN10A; (-) strand; PAM type: NRG; PAM sequence: TGG
  source 1..20: mol_type = other DNA
gctgcaggtgcccagtgccc

SEQ ID NO: 16681 - DNA, 20 bp, synthetic construct
  misc_feature 1..20: note = Description of Artificial Sequence: Synthetic oligonucleotide
  misc_feature 1..20: note = Target: SCN10A; (-) strand; PAM type: NRG; PAM sequence: CAG
  source 1..20: mol_type = other DNA
tgacagcggctgcaggtgcc

SEQ ID NO: 16682 - DNA, 20 bp, synthetic construct
  misc_feature 1..20: note = Description of Artificial Sequence: Synthetic oligonucleotide
  misc_feature 1..20: note = Target: SCN10A; (-) strand; PAM type: NRG; PAM sequence: AGG
  source 1..20: mol_type = other DNA
aactgtgtgacagcggctgc

SEQ ID NO: 16683 - DNA, 20 bp, synthetic construct
  misc_feature 1..20: note = Description of Artificial Sequence: Synthetic oligonucleotide
  misc_feature 1..20: note = Target: SCN10A; (-) strand; PAM type: NRG; PAM sequence: CAG
  source 1..20: mol_type = other DNA
gaactgtgtgacagcggctg

SEQ ID NO: 16684 - DNA, 20 bp, synthetic construct
  misc_feature 1..20: note = Description of Artificial Sequence: Synthetic oligonucleotide
  misc_feature 1..20: note = Target: SCN10A; (-) strand; PAM type: NRG; PAM sequence: CGG
  source 1..20: mol_type = other DNA
gagggggaactgtgtgacag

SEQ ID NO: 16685 - DNA, 20 bp, synthetic construct
  misc_feature 1..20: note = Description of Artificial Sequence: Synthetic oligonucleotide
  misc_feature 1..20: note = Target: SCN10A; (-) strand; PAM type: NRG; PAM sequence: CAG
  source 1..20: mol_type = other DNA
gtggagggggaactgtgtga

SEQ ID NO: 16686 - DNA, 20 bp, synthetic construct
  misc_feature 1..20: note = Description of Artificial Sequence: Synthetic oligonucleotide
  misc_feature 1..20: note = Target: SCN10A; (-) strand; PAM type: NRG; PAM sequence: GGG
  source 1..20: mol_type = other DNA
tctgccatcctgggtggagg

SEQ ID NO: 16687 - DNA, 20 bp, synthetic construct
  misc_feature 1..20: note = Description of Artificial Sequence: Synthetic oligonucleotide
  misc_feature 1..20: note = Target: SCN10A; (-) strand; PAM type: NRG; PAM sequence: GGG
  source 1..20: mol_type = other DNA
gtctgccatcctgggtggag

SEQ ID NO: 16688 - DNA, 20 bp, synthetic construct
  misc_feature 1..20: note = Description of Artificial Sequence: Synthetic oligonucleotide
  misc_feature 1..20: note = Target: SCN10A; (-) strand; PAM type: NRG; PAM sequence: GGG
  source 1..20: mol_type = other DNA
ggtctgccatcctgggtgga

SEQ ID NO: 16689 - DNA, 20 bp, synthetic construct
  misc_feature 1..20: note = Description of Artificial Sequence: Synthetic oligonucleotide
  misc_feature 1..20: note = Target: SCN10A; (-) strand; PAM type: NRG; PAM sequence: AGG
  source 1..20: mol_type = other DNA
tggtctgccatcctgggtgg

SEQ ID NO: 16690 - DNA, 20 bp, synthetic construct
  misc_feature 1..20: note = Description of Artificial Sequence: Synthetic oligonucleotide
  misc_feature 1..20: note = Target: SCN10A; (-) strand; PAM type: NRG; PAM sequence: GAG
  source 1..20: mol_type = other DNA
ctggtctgccatcctgggtg

SEQ ID NO: 16691 - DNA, 20 bp, synthetic construct
  misc_feature 1..20: note = Description of Artificial Sequence: Synthetic oligonucleotide
  misc_feature 1..20: note = Target: SCN10A; (-) strand; PAM type: NRG; PAM sequence: TGG
  source 1..20: mol_type = other DNA
gactggtctgccatcctggg

SEQ ID NO: 16692 - DNA, 20 bp, synthetic construct
  misc_feature 1..20: note = Description of Artificial Sequence: Synthetic oligonucleotide
  misc_feature 1..20: note = Target: SCN10A; (-) strand; PAM type: NRG; PAM sequence: GGG
  source 1..20: mol_type = other DNA
agggactggtctgccatcct

SEQ ID NO: 16693 - DNA, 20 bp, synthetic construct
  misc_feature 1..20: note = Description of Artificial Sequence: Synthetic oligonucleotide
  misc_feature 1..20: note = Target: SCN10A; (-) strand; PAM type: NRG; PAM sequence: TGG
  source 1..20: mol_type = other DNA
cagggactggtctgccatcc

SEQ ID NO: 16694 - DNA, 20 bp, synthetic construct
  misc_feature 1..20: note = Description of Artificial Sequence: Synthetic oligonucleotide
  misc_feature 1..20: note = Target: SCN10A; (-) strand; PAM type: NRG; PAM sequence: TGG
  source 1..20: mol_type = other DNA
gagagtttcggggcagggac

SEQ ID NO: 16695 - DNA, 20 bp, synthetic construct
  misc_feature 1..20: note = Description of Artificial Sequence: Synthetic oligonucleotide
  misc_feature 1..20: note = Target: SCN10A; (-) strand; PAM type: NRG; PAM sequence: GGG
  source 1..20: mol_type = other DNA
gagaagagagtttcggggca

SEQ ID NO: 16696 - DNA, 20 bp, synthetic construct
  misc_feature 1..20: note = Description of Artificial Sequence: Synthetic oligonucleotide
  misc_feature 1..20: note = Target: SCN10A; (-) strand; PAM type: NRG; PAM sequence: AGG
  source 1..20: mol_type = other DNA
ggagaagagagtttcggggc

SEQ ID NO: 16697 - DNA, 20 bp, synthetic construct
  misc_feature 1..20: note = Description of Artificial Sequence: Synthetic oligonucleotide
  misc_feature 1..20: note = Target: SCN10A; (-) strand; PAM type: NRG; PAM sequence: CAG
  source 1..20: mol_type = other DNA
gggagaagagagtttcgggg

SEQ ID NO: 16698 - DNA, 20 bp, synthetic construct
  misc_feature 1..20: note = Description of Artificial Sequence: Synthetic oligonucleotide
  misc_feature 1..20: note = Target: SCN10A; (-) strand; PAM type: NRG; PAM sequence: GGG
  source 1..20: mol_type = other DNA
caagggagaagagagtttcg

SEQ ID NO: 16699 - DNA, 20 bp, synthetic construct
  misc_feature 1..20: note = Description of Artificial Sequence: Synthetic oligonucleotide
  misc_feature 1..20: note = Target: SCN10A; (-) strand; PAM type: NRG; PAM sequence: GGG
  source 1..20: mol_type = other DNA
ccaagggagaagagagtttc

SEQ ID NO: 16700 - DNA, 20 bp, synthetic construct
  misc_feature 1..20: note = Description of Artificial Sequence: Synthetic oligonucleotide
  misc_feature 1..20: note = Target: SCN10A; (-) strand; PAM type: NRG; PAM sequence: CGG
  source 1..20: mol_type = other DNA
gccaagggagaagagagttt

SEQ ID NO: 16701 - DNA, 20 bp, synthetic construct
  misc_feature 1..20: note = Description of Artificial Sequence: Synthetic oligonucleotide
  misc_feature 1..20: note = Target: SCN10A; (-) strand; PAM type: NRG; PAM sequence: GAG
  source 1..20: mol_type = other DNA
cgcaaagccaagggagaaga

SEQ ID NO: 16702 - DNA, 20 bp, synthetic construct
  misc_feature 1..20: note = Description of Artificial Sequence: Synthetic oligonucleotide
  misc_feature 1..20: note = Target: SCN10A; (-) strand; PAM type: NRG; PAM sequence: GAG
  source 1..20: mol_type = other DNA
gacgcaaagccaagggagaa

SEQ ID NO: 16703 - DNA, 20 bp, synthetic construct
  misc_feature 1..20: note = Description of Artificial Sequence: Synthetic oligonucleotide
  misc_feature 1..20: note = Target: SCN10A; (-) strand; PAM type: NRG; PAM sequence: AAG
  source 1..20: mol_type = other DNA
atgacgcaaagccaagggag

SEQ ID NO: 16704 - DNA, 20 bp, synthetic construct
  misc_feature 1..20: note = Description of Artificial Sequence: Synthetic oligonucleotide
  misc_feature 1..20: note = Target: SCN10A; (-) strand; PAM type: NRG; PAM sequence: GAG
  source 1..20: mol_type = other DNA
gcaatgacgcaaagccaagg

SEQ ID NO: 16705 - DNA, 20 bp, synthetic construct
  misc_feature 1..20: note = Description of Artificial Sequence: Synthetic oligonucleotide
  misc_feature 1..20: note = Target: SCN10A; (-) strand; PAM type: NRG; PAM sequence: GGG
  source 1..20: mol_type = other DNA
tggcaatgacgcaaagccaa

SEQ ID NO: 16706 - DNA, 20 bp, synthetic construct
  misc_feature 1..20: note = Description of Artificial Sequence: Synthetic oligonucleotide
  misc_feature 1..20: note = Target: SCN10A; (-) strand; PAM type: NRG; PAM sequence: AGG
  source 1..20: mol_type = other DNA
gtggcaatgacgcaaagcca

SEQ ID NO: 16707 - DNA, 20 bp, synthetic construct
  misc_feature 1..20: note = Description of Artificial Sequence: Synthetic oligonucleotide
  misc_feature 1..20: note = Target: SCN10A; (-) strand; PAM type: NRG; PAM sequence: AAG
  source 1..20: mol_type = other DNA
ggtggcaatgacgcaaagcc

SEQ ID NO: 16708 - DNA, 20 bp, synthetic construct
  misc_feature 1..20: note = Description of Artificial Sequence: Synthetic oligonucleotide
  misc_feature 1..20: note = Target: SCN10A; (-) strand; PAM type: NRG; PAM sequence: AAG
  source 1..20: mol_type = other DNA
actagggtggcaatgacgca

SEQ ID NO: 16709 - DNA, 20 bp, synthetic construct
  misc_feature 1..20: note = Description of Artificial Sequence: Synthetic oligonucleotide
  misc_feature 1..20: note = Target: SCN10A; (-) strand; PAM type: NRG; PAM sequence: TGG
  source 1..20: mol_type = other DNA
aggtgggaggaaaactaggg

SEQ ID NO: 16710 - DNA, 20 bp, synthetic construct
  misc_feature 1..20: note = Description of Artificial Sequence: Synthetic oligonucleotide
  misc_feature 1..20: note = Target: SCN10A; (-) strand; PAM type: NRG; PAM sequence: GGG
  source 1..20: mol_type = other DNA
gagaggtgggaggaaaacta

SEQ ID NO: 16711 - DNA, 20 bp, synthetic construct
  misc_feature 1..20: note = Description of Artificial Sequence: Synthetic oligonucleotide
  misc_feature 1..20: note = Target: SCN10A; (-) strand; PAM type: NRG; PAM sequence: AGG
  source 1..20: mol_type = other DNA
tgagaggtgggaggaaaact

SEQ ID NO: 16712 - DNA, 20 bp, synthetic construct
  misc_feature 1..20: note = Description of Artificial Sequence: Synthetic oligonucleotide
  misc_feature 1..20: note = Target: SCN10A; (-) strand; PAM type: NRG; PAM sequence: TAG
  source 1..20: mol_type = other DNA
ctgagaggtgggaggaaaac

SEQ ID NO: 16713 - DNA, 20 bp, synthetic construct
  misc_feature 1..20: note = Description of Artificial Sequence: Synthetic oligonucleotide
  misc_feature 1..20: note = Target: SCN10A; (-) strand; PAM type: NRG; PAM sequence: AGG
  source 1..20: mol_type = other DNA
ggcaggatctgagaggtggg

SEQ ID NO: 16714 - DNA, 20 bp, synthetic construct
  misc_feature 1..20: note = Description of Artificial Sequence: Synthetic oligonucleotide
  misc_feature 1..20: note = Target: SCN10A; (-) strand; PAM type: NRG; PAM sequence: GAG
  source 1..20: mol_type = other DNA
aggcaggatctgagaggtgg

SEQ ID NO: 16715 - DNA, 20 bp, synthetic construct
  misc_feature 1..20: note = Description of Artificial Sequence: Synthetic oligonucleotide
  misc_feature 1..20: note = Target: SCN10A; (-) strand; PAM type: NRG; PAM sequence: GGG
  source 1..20: mol_type = other DNA
cgaggcaggatctgagaggt

SEQ ID NO: 16716 - DNA, 20 bp, synthetic construct
  misc_feature 1..20: note = Description of Artificial Sequence: Synthetic oligonucleotide
  misc_feature 1..20: note = Target: SCN10A; (-) strand; PAM type: NRG; PAM sequence: TGG
  source 1..20: mol_type = other DNA
acgaggcaggatctgagagg

SEQ ID NO: 16717 - DNA, 20 bp, synthetic construct
  misc_feature 1..20: note = Description of Artificial Sequence: Synthetic oligonucleotide
  misc_feature 1..20: note = Target: SCN10A; (-) strand; PAM type: NRG; PAM sequence: AGG
  source 1..20: mol_type = other DNA
gggacgaggcaggatctgag

SEQ ID NO: 16718 - DNA, 20 bp, synthetic construct
  misc_feature 1..20: note = Description of Artificial Sequence: Synthetic oligonucleotide
  misc_feature 1..20: note = Target: SCN10A; (-) strand; PAM type: NRG; PAM sequence: GAG
  source 1..20: mol_type = other DNA
cgggacgaggcaggatctga

SEQ ID NO: 16719 - DNA, 20 bp, synthetic construct
  misc_feature 1..20: note = Description of Artificial Sequence: Synthetic oligonucleotide
  misc_feature 1..20: note = Target: SCN10A; (-) strand; PAM type: NRG; PAM sequence: GAG
  source 1..20: mol_type = other DNA
tgcgggacgaggcaggatct

SEQ ID NO: 16720 - DNA, 20 bp, synthetic construct
  misc_feature 1..20: note = Description of Artificial Sequence: Synthetic oligonucleotide
  misc_feature 1..20: note = Target: SCN10A; (-) strand; PAM type: NRG; PAM sequence: AGG
  source 1..20: mol_type = other DNA
gcacaggtgcgggacgaggc

SEQ ID NO: 16721 - DNA, 20 bp, synthetic construct
  misc_feature 1..20: note = Description of Artificial Sequence: Synthetic oligonucleotide
  misc_feature 1..20: note = Target: SCN10A; (-) strand; PAM type: NRG; PAM sequence: CAG
  source 1..20: mol_type = other DNA
agcacaggtgcgggacgagg

SEQ ID NO: 16722 - DNA, 20 bp, synthetic construct
  misc_feature 1..20: note = Description of Artificial Sequence: Synthetic oligonucleotide
  misc_feature 1..20: note = Target: SCN10A; (-) strand; PAM type: NRG; PAM sequence: AGG
  source 1..20: mol_type = other DNA
aggagcacaggtgcgggacg

SEQ ID NO: 16723 - DNA, 20 bp, synthetic construct
  misc_feature 1..20: note = Description of Artificial Sequence: Synthetic oligonucleotide
  misc_feature 1..20: note = Target: SCN10A; (-) strand; PAM type: NRG; PAM sequence: GAG
  source 1..20: mol_type = other DNA
gaggagcacaggtgcgggac

SEQ ID NO: 16724 - DNA, 20 bp, synthetic construct
  misc_feature 1..20: note = Description of Artificial Sequence: Synthetic oligonucleotide
  misc_feature 1..20: note = Target: SCN10A; (-) strand; PAM type: NRG; PAM sequence: GGG
  source 1..20: mol_type = other DNA
ttagggaggagcacaggtgc

SEQ ID NO: 16725 - DNA, 20 bp, synthetic construct
  misc_feature 1..20: note = Description of Artificial Sequence: Synthetic oligonucleotide
  misc_feature 1..20: note = Target: SCN10A; (-) strand; PAM type: NRG; PAM sequence: CGG
  source 1..20: mol_type = other DNA
tttagggaggagcacaggtg

SEQ ID NO: 16726 - DNA, 20 bp, synthetic construct
  misc_feature 1..20: note = Description of Artificial Sequence: Synthetic oligonucleotide
  misc_feature 1..20: note = Target: SCN10A; (-) strand; PAM type: NRG; PAM sequence: AGG
  source 1..20: mol_type = other DNA
tcagctttagggaggagcac

SEQ ID NO: 16727 - DNA, 20 bp, synthetic construct
  misc_feature 1..20: note = Description of Artificial Sequence: Synthetic oligonucleotide
  misc_feature 1..20: note = Target: SCN10A; (-) strand; PAM type: NRG; PAM sequence: CAG
  source 1..20: mol_type = other DNA
ctcagctttagggaggagca

SEQ ID NO: 16728 - DNA, 20 bp, synthetic construct
  misc_feature 1..20: note = Description of Artificial Sequence: Synthetic oligonucleotide
  misc_feature 1..20: note = Target: SCN10A; (-) strand; PAM type: NRG; PAM sequence: GAG
  source 1..20: mol_type = other DNA
atggcctcagctttagggag

SEQ ID NO: 16729 - DNA, 20 bp, synthetic construct
  misc_feature 1..20: note = Description of Artificial Sequence: Synthetic oligonucleotide
  misc_feature 1..20: note = Target: SCN10A; (-) strand; PAM type: NRG; PAM sequence: AGG
  source 1..20: mol_type = other DNA
gcatggcctcagctttaggg

SEQ ID NO: 16730 - DNA, 20 bp, synthetic construct
  misc_feature 1..20: note = Description of Artificial Sequence: Synthetic oligonucleotide
  misc_feature 1..20: note = Target: SCN10A; (-) strand; PAM type: NRG; PAM sequence: GAG
  source 1..20: mol_type = other DNA
tgcatggcctcagctttagg

SEQ ID NO: 16731 - DNA, 20 bp, synthetic construct
  misc_feature 1..20: note = Description of Artificial Sequence: Synthetic oligonucleotide
  misc_feature 1..20: note = Target: SCN10A; (-) strand; PAM type: NRG; PAM sequence: GGG
  source 1..20: mol_type = other DNA
ggtgcatggcctcagcttta

SEQ ID NO: 16732 - DNA, 20 bp, synthetic construct
  misc_feature 1..20: note = Description of Artificial Sequence: Synthetic oligonucleotide
  misc_feature 1..20: note = Target: SCN10A; (-) strand; PAM type: NRG; PAM sequence: AGG
  source 1..20: mol_type = other DNA
cggtgcatggcctcagcttt

SEQ ID NO: 16733 - DNA, 20 bp, synthetic construct
  misc_feature 1..20: note = Description of Artificial Sequence: Synthetic oligonucleotide
  misc_feature 1..20: note = Target: SCN10A; (-) strand; PAM type: NRG; PAM sequence: TAG
  source 1..20: mol_type = other DNA
tcggtgcatggcctcagctt

SEQ ID NO: 16734 - DNA, 20 bp, synthetic construct
  misc_feature 1..20: note = Description of Artificial Sequence: Synthetic oligonucleotide
  misc_feature 1..20: note = Target: SCN10A; (-) strand; PAM type: NRG; PAM sequence: CAG
  source 1..20: mol_type = other DNA
aactgctcggtgcatggcct

SEQ ID NO: 16735 - DNA, 20 bp, synthetic construct
  misc_feature 1..20: note = Description of Artificial Sequence: Synthetic oligonucleotide
  misc_feature 1..20: note = Target: SCN10A; (-) strand; PAM type: NRG; PAM sequence: TGG
  source 1..20: mol_type = other DNA
tgacaaaactgctcggtgca

SEQ ID NO: 16736 - DNA, 20 bp, synthetic construct
  misc_feature 1..20: note = Description of Artificial Sequence: Synthetic oligonucleotide
  misc_feature 1..20: note = Target: SCN10A; (-) strand; PAM type: NRG; PAM sequence: CGG
  source 1..20: mol_type = other DNA
ggaagggtgacaaaactgct

SEQ ID NO: 16737 - DNA, 20 bp, synthetic construct
  misc_feature 1..20: note = Description of Artificial Sequence: Synthetic oligonucleotide
  misc_feature 1..20: note = Target: SCN10A; (-) strand; PAM type: NRG; PAM sequence: GGG
  source 1..20: mol_type = other DNA
aatgccagattgtccaggaa

SEQ ID NO: 16738 - DNA, 20 bp, synthetic construct
  misc_feature 1..20: note = Description of Artificial Sequence: Synthetic oligonucleotide
  misc_feature 1..20: note = Target: SCN10A; (-) strand; PAM type: NRG; PAM sequence: AGG
  source 1..20: mol_type = other DNA
aaatgccagattgtccagga

SEQ ID NO: 16739 - DNA, 20 bp, synthetic construct
  misc_feature 1..20: note = Description of Artificial Sequence: Synthetic oligonucleotide
  misc_feature 1..20: note = Target: SCN10A; (-) strand; PAM type: NRG; PAM sequence: AAG
  source 1..20: mol_type = other DNA
taaatgccagattgtccagg

SEQ ID NO: 16740 - DNA, 20 bp, synthetic construct
  misc_feature 1..20: note = Description of Artificial Sequence: Synthetic oligonucleotide
  misc_feature 1..20: note = Target: SCN10A; (-) strand; PAM type: NRG; PAM sequence: AGG
  source 1..20: mol_type = other DNA
atctaaatgccagattgtcc

SEQ ID NO: 16741 - DNA, 20 bp, synthetic construct
  misc_feature 1..20: note = Description of Artificial Sequence: Synthetic oligonucleotide
  misc_feature 1..20: note = Target: SCN10A; (-) strand; PAM type: NRG; PAM sequence: CAG
  source 1..20: mol_type = other DNA
catctaaatgccagattgtc

SEQ ID NO: 16742 - DNA, 20 bp, synthetic construct
  misc_feature 1..20: note = Description of Artificial Sequence: Synthetic oligonucleotide
  misc_feature 1..20: note = Target: SCN10A; (-) strand; PAM type: NRG; PAM sequence: CAG
  source 1..20: mol_type = other DNA
ctaggcctccatctaaatgc

SEQ ID NO: 16743 - DNA, 20 bp, synthetic construct
  misc_feature 1..20: note = Description of Artificial Sequence: Synthetic oligonucleotide
  misc_feature 1..20: note = Target: SCN10A; (-) strand; PAM type: NRG; PAM sequence: AGG
  source 1..20: mol_type = other DNA
aaacaacctactaaatatct

SEQ ID NO: 16744 - DNA, 20 bp, synthetic construct
  misc_feature 1..20: note = Description of Artificial Sequence: Synthetic oligonucleotide
  misc_feature 1..20: note = Target: SCN10A; (-) strand; PAM type: NRG; PAM sequence: TAG
  source 1..20: mol_type = other DNA
aaaacaacctactaaatatc

SEQ ID NO: 16745 - DNA, 20 bp, synthetic construct
  misc_feature 1..20: note = Description of Artificial Sequence: Synthetic oligonucleotide
  misc_feature 1..20: note = Target: SCN10A; (-) strand; PAM type: NRG; PAM sequence: CAG
  source 1..20: mol_type = other DNA
gctcttccgattcacggctg

SEQ ID NO: 16746 - DNA, 20 bp, synthetic construct
  misc_feature 1..20: note = Description of Artificial Sequence: Synthetic oligonucleotide
  misc_feature 1..20: note = Target: SCN10A; (-) strand; PAM type: NRG; PAM sequence: CGG
  source 1..20: mol_type = other DNA
agtcccgctcttccgattca

SEQ ID NO: 16747 - DNA, 20 bp, synthetic construct
  misc_feature 1..20: note = Description of Artificial Sequence: Synthetic oligonucleotide
  misc_feature 1..20: note = Target: SCN10A; (-) strand; PAM type: NRG; PAM sequence: CAG
  source 1..20: mol_type = other DNA
tagttgaagggctaggacta

SEQ ID NO: 16748 - DNA, 20 bp, synthetic construct
  misc_feature 1..20: note = Description of Artificial Sequence: Synthetic oligonucleotide
  misc_feature 1..20: note = Target: SCN10A; (-) strand; PAM type: NRG; PAM sequence: AGG
  source 1..20: mol_type = other DNA
agctaattagttgaagggct

SEQ ID NO: 16749 - DNA, 20 bp, synthetic construct
  misc_feature 1..20: note = Description of Artificial Sequence: Synthetic oligonucleotide
  misc_feature 1..20: note = Target: SCN10A; (-) strand; PAM type: NRG; PAM sequence: TAG
  source 1..20: mol_type = other DNA
cagctaattagttgaagggc

SEQ ID NO: 16750 - DNA, 20 bp, synthetic construct
  misc_feature 1..20: note = Description of Artificial Sequence: Synthetic oligonucleotide
  misc_feature 1..20: note = Target: SCN10A; (-) strand; PAM type: NRG; PAM sequence: GGG
  source 1..20: mol_type = other DNA
gtggcagctaattagttgaa

SEQ ID NO: 16751 - DNA, 20 bp, synthetic construct
  misc_feature 1..20: note = Description of Artificial Sequence: Synthetic oligonucleotide
  misc_feature 1..20: note = Target: SCN10A; (-) strand; PAM type: NRG; PAM sequence: AGG
  source 1..20: mol_type = other DNA
ggtggcagctaattagttga

SEQ ID NO: 16752 - DNA, 20 bp, synthetic construct
  misc_feature 1..20: note = Description of Artificial Sequence: Synthetic oligonucleotide
  misc_feature 1..20: note = Target: SCN10A; (-) strand; PAM type: NRG; PAM sequence: AAG
  source 1..20: mol_type = other DNA
gggtggcagctaattagttg

SEQ ID NO: 16753 - DNA, 20 bp, synthetic construct
  misc_feature 1..20: note = Description of Artificial Sequence: Synthetic oligonucleotide
  misc_feature 1..20: note = Target: SCN10A; (-) strand; PAM type: NRG; PAM sequence: TAG
  source 1..20: mol_type = other DNA
agttcagggtggcagctaat

SEQ ID NO: 16754 - DNA, 20 bp, synthetic construct
  misc_feature 1..20: note = Description of Artificial Sequence: Synthetic oligonucleotide
  misc_feature 1..20: note = Target: SCN10A; (-) strand; PAM type: NRG; PAM sequence: CAG
  source 1..20: mol_type = other DNA
gaatagagagttcagggtgg

SEQ ID NO: 16755 - DNA, 20 bp, synthetic construct
  misc_feature 1..20: note = Description of Artificial Sequence: Synthetic oligonucleotide
  misc_feature 1..20: note = Target: SCN10A; (-) strand; PAM type: NRG; PAM sequence: TGG
  source 1..20: mol_type = other DNA
tgggaatagagagttcaggg

SEQ ID NO: 16756 - DNA, 20 bp, synthetic construct
  misc_feature 1..20: note = Description of Artificial Sequence: Synthetic oligonucleotide
  misc_feature 1..20: note = Target: SCN10A; (-) strand; PAM type: NRG; PAM sequence: GGG
  source 1..20: mol_type = other DNA
ggctgggaatagagagttca

SEQ ID NO: 16757 - DNA, 20 bp, synthetic construct
  misc_feature 1..20: note = Description of Artificial Sequence: Synthetic oligonucleotide
  misc_feature 1..20: note = Target: SCN10A; (-) strand; PAM type: NRG; PAM sequence: AGG
  source 1..20: mol_type = other DNA
gggctgggaatagagagttc

SEQ ID NO: 16758 - DNA, 20 bp, synthetic construct
  misc_feature 1..20: note = Description of Artificial Sequence: Synthetic oligonucleotide
  misc_feature 1..20: note = Target: SCN10A; (-) strand; PAM type: NRG; PAM sequence: CAG
  source 1..20: mol_type = other DNA
agggctgggaatagagagtt

SEQ ID NO: 16759 - DNA, 20 bp, synthetic construct
  misc_feature 1..20: note = Description of Artificial Sequence: Synthetic oligonucleotide
  misc_feature 1..20: note = Target: SCN10A; (-) strand; PAM type: NRG; PAM sequence: GAG
  source 1..20: mol_type = other DNA
gttgaagggctgggaataga

SEQ ID NO: 16760 - DNA, 20 bp, synthetic construct
  misc_feature 1..20: note = Description of Artificial Sequence: Synthetic oligonucleotide
  misc_feature 1..20: note = Target: SCN10A; (-) strand; PAM type: NRG; PAM sequence: GAG
  source 1..20: mol_type = other DNA
tagttgaagggctgggaata

SEQ ID NO: 16761 - DNA, 20 bp, synthetic construct
  misc_feature 1..20: note = Description of Artificial Sequence: Synthetic oligonucleotide
  misc_feature 1..20: note = Target: SCN10A; (-) strand; PAM type: NRG; PAM sequence: TAG
  source 1..20: mol_type = other DNA
attagttgaagggctgggaa

SEQ ID NO: 16762 - DNA, 20 bp, synthetic construct
  misc_feature 1..20: note = Description of Artificial Sequence: Synthetic oligonucleotide
  misc_feature 1..20: note = Target: SCN10A; (-) strand; PAM type: NRG; PAM sequence: GGG
  source 1..20: mol_type = other DNA
aggtaattagttgaagggct

SEQ ID NO: 16763 - DNA, 20 bp, synthetic construct
  misc_feature 1..20: note = Description of Artificial Sequence: Synthetic oligonucleotide
  misc_feature 1..20: note = Target: SCN10A; (-) strand; PAM type: NRG; PAM sequence: TGG
  source 1..20: mol_type = other DNA
caggtaattagttgaagggc

SEQ ID NO: 16764 - DNA, 20 bp, synthetic construct
  misc_feature 1..20: note = Description of Artificial Sequence: Synthetic oligonucleotide
  misc_feature 1..20: note = Target: SCN10A; (-) strand; PAM type: NRG; PAM sequence: GGG
  source 1..20: mol_type = other DNA
gcttcaggtaattagttgaa

SEQ ID NO: 16765 - DNA, 20 bp, synthetic construct
  misc_feature 1..20: note = Description of Artificial Sequence: Synthetic oligonucleotide
  misc_feature 1..20: note = Target: SCN10A; (-) strand; PAM type: NRG; PAM sequence: AGG
  source 1..20: mol_type = other DNA
ggcttcaggtaattagttga

SEQ ID NO: 16766 - DNA, 20 bp, synthetic construct
  misc_feature 1..20: note = Description of Artificial Sequence: Synthetic oligonucleotide
  misc_feature 1..20: note = Target: SCN10A; (-) strand; PAM type: NRG; PAM sequence: AAG
  source 1..20: mol_type = other DNA
gggcttcaggtaattagttg

SEQ ID NO: 16767 - DNA, 20 bp, synthetic construct
  misc_feature 1..20: note = Description of Artificial Sequence: Synthetic oligonucleotide
  misc_feature 1..20: note = Target: SCN10A; (-) strand; PAM type: NRG; PAM sequence: TAG
  source 1..20: mol_type = other DNA
catgaggggcttcaggtaat

SEQ ID NO: 16768 - DNA, 20 bp, synthetic construct
  misc_feature 1..20: note = Description of Artificial Sequence: Synthetic oligonucleotide
  misc_feature 1..20: note = Target: SCN10A; (-) strand; PAM type: NRG; PAM sequence: AGG
  source 1..20: mol_type = other DNA
ccaaaggcatgaggggcttc

SEQ ID NO: 16769 - DNA, 20 bp, synthetic construct
  misc_feature 1..20: note = Description of Artificial Sequence: Synthetic oligonucleotide
  misc_feature 1..20: note = Target: SCN10A; (-) strand; PAM type: NRG; PAM sequence: CAG
  source 1..20: mol_type = other DNA
cccaaaggcatgaggggctt

SEQ ID NO: 16770 - DNA, 20 bp, synthetic construct
  misc_feature 1..20: note = Description of Artificial Sequence: Synthetic oligonucleotide
  misc_feature 1..20: note = Target: SCN10A; (-) strand; PAM type: NRG; PAM sequence: GGG
  source 1..20: mol_type = other DNA
tcaaagcccaaaggcatgag

SEQ ID NO: 16771 - DNA, 20 bp, synthetic construct
  misc_feature 1..20: note = Description of Artificial Sequence: Synthetic oligonucleotide
  misc_feature 1..20: note = Target: SCN10A; (-) strand; PAM type: NRG; PAM sequence: GGG
  source 1..20: mol_type = other DNA
gtcaaagcccaaaggcatga

SEQ ID NO: 16772 - DNA, 20 bp, synthetic construct
  misc_feature 1..20: note = Description of Artificial Sequence: Synthetic oligonucleotide
  misc_feature 1..20: note = Target: SCN10A; (-) strand; PAM type: NRG; PAM sequence: AGG
  source 1..20: mol_type = other DNA
agtcaaagcccaaaggcatg

SEQ ID NO: 16773 - DNA, 20 bp, synthetic construct
  misc_feature 1..20: note = Description of Artificial Sequence: Synthetic oligonucleotide
  misc_feature 1..20: note = Target: SCN10A; (-) strand; PAM type: NRG; PAM sequence: GAG
  source 1..20: mol_type = other DNA
aagtcaaagcccaaaggcat

SEQ ID NO: 16774 - DNA, 20 bp, synthetic construct
  misc_feature 1..20: note = Description of Artificial Sequence: Synthetic oligonucleotide
  misc_feature 1..20: note = Target: SCN10A; (-) strand; PAM type: NRG; PAM sequence: AGG
  source 1..20: mol_type = other DNA
atgaggaagtcaaagcccaa

SEQ ID NO: 16775 - DNA, 20 bp, synthetic construct
  misc_feature 1..20: note = Description of Artificial Sequence: Synthetic oligonucleotide
  misc_feature 1..20: note = Target: SCN10A; (-) strand; PAM type: NRG; PAM sequence: AAG
  source 1..20: mol_type = other DNA
aatgaggaagtcaaagccca

SEQ ID NO: 16776 - DNA, 20 bp, synthetic construct
  misc_feature 1..20: note = Description of Artificial Sequence: Synthetic oligonucleotide
  misc_feature 1..20: note = Target: SCN10A; (-) strand; PAM type: NRG; PAM sequence: AAG
  source 1..20: mol_type = other DNA
ttttctaaatgaggaagtca

SEQ ID NO: 16777 - DNA, 20 bp, synthetic construct
  misc_feature 1..20: note = Description of Artificial Sequence: Synthetic oligonucleotide
  misc_feature 1..20: note = Target: SCN10A; (-) strand; PAM type: NRG; PAM sequence: AAG
  source 1..20: mol_type = other DNA
tttgcattttctaaatgagg

SEQ ID NO: 16778 - DNA, 20 bp, synthetic construct
  misc_feature 1..20: note = Description of Artificial Sequence: Synthetic oligonucleotide
  misc_feature 1..20: note = Target: SCN10A; (-) strand; PAM type: NRG; PAM sequence: AGG
  source 1..20: mol_type = other DNA
ttgtttgcattttctaaatg

SEQ ID NO: 16779 - DNA, 20 bp, synthetic construct
  misc_feature 1..20: note = Description of Artificial Sequence: Synthetic oligonucleotide
  misc_feature 1..20: note = Target: SCN10A; (-) strand; PAM type: NRG; PAM sequence: GAG
  source 1..20: mol_type = other DNA
gttgtttgcattttctaaat

SEQ ID NO: 16780 - DNA, 20 bp, synthetic construct
  misc_feature 1..20: note = Description of Artificial Sequence: Synthetic oligonucleotide
  misc_feature 1..20: note = Target: SCN10A; (-) strand; PAM type: NRG; PAM sequence: CAG
  source 1..20: mol_type = other DNA
aggaaggaacttaacatcct

SEQ ID NO: 16781 - DNA, 20 bp, synthetic construct
  misc_feature 1..20: note = Description of Artificial Sequence: Synthetic oligonucleotide
  misc_feature 1..20: note = Target: SCN10A; (-) strand; PAM type: NRG; PAM sequence: AGG
  source 1..20: mol_type = other DNA
aggtagacatagacacagga

SEQ ID NO: 16782 - DNA, 20 bp, synthetic construct
  misc_feature 1..20: note = Description of Artificial Sequence: Synthetic oligonucleotide
  misc_feature 1..20: note = Target: SCN10A; (-) strand; PAM type: NRG; PAM sequence: AAG
  source 1..20: mol_type = other DNA
aaggtagacatagacacagg

SEQ ID NO: 16783 - DNA, 20 bp, synthetic construct
  misc_feature 1..20: note = Description of Artificial Sequence: Synthetic oligonucleotide
  misc_feature 1..20: note = Target: SCN10A; (-) strand; PAM type: NRG; PAM sequence: AGG
  source 1..20: mol_type = other DNA
accaaggtagacatagacac

SEQ ID NO: 16784 - DNA, 20 bp, synthetic construct
  misc_feature 1..20: note = Description of Artificial Sequence: Synthetic oligonucleotide
  misc_feature 1..20: note = Target: SCN10A; (-) strand; PAM type: NRG; PAM sequence: CAG
  source 1..20: mol_type = other DNA
gaccaaggtagacatagaca

SEQ ID NO: 16785 - DNA, 20 bp, synthetic construct
  misc_feature 1..20: note = Description of Artificial Sequence: Synthetic oligonucleotide
  misc_feature 1..20: note = Target: SCN10A; (-) strand; PAM type: NRG; PAM sequence: TAG
  source 1..20: mol_type = other DNA
ccaatagaccaaggtagaca

SEQ ID NO: 16786 - DNA, 20 bp, synthetic construct
  misc_feature 1..20: note = Description of Artificial Sequence: Synthetic oligonucleotide
  misc_feature 1..20: note = Target: SCN10A; (-) strand; PAM type: NRG; PAM sequence: TAG
  source 1..20: mol_type = other DNA
actccgccaatagaccaagg

SEQ ID NO: 16787 - DNA, 20 bp, synthetic construct
  misc_feature 1..20: note = Description of Artificial Sequence: Synthetic oligonucleotide
  misc_feature 1..20: note = Target: SCN10A; (-) strand; PAM type: NRG; PAM sequence: AGG
  source 1..20: mol_type = other DNA
actactccgccaatagacca

SEQ ID NO: 16788 - DNA, 20 bp, synthetic construct
  misc_feature 1..20: note = Description of Artificial Sequence: Synthetic oligonucleotide
  misc_feature 1..20: note = Target: SCN10A; (-) strand; PAM type: NRG; PAM sequence: AAG
  source 1..20: mol_type = other DNA
aactactccgccaatagacc

SEQ ID NO: 16789 - DNA, 20 bp, synthetic construct
  misc_feature 1..20: note = Description of Artificial Sequence: Synthetic oligonucleotide
  misc_feature 1..20: note = Target: SCN10A; (-) strand; PAM type: NRG; PAM sequence: TAG
  source 1..20: mol_type = other DNA
aatctcaactactccgccaa

SEQ ID NO: 16790 - DNA, 20 bp, synthetic construct
  misc_feature 1..20: note = Description of Artificial Sequence: Synthetic oligonucleotide
  misc_feature 1..20: note = Target: SCN10A; (-) strand; PAM type: NRG; PAM sequence: AAG
  source 1..20: mol_type = other DNA
ttctctctgtactgtggctt

SEQ ID NO: 16791 - DNA, 20 bp, synthetic construct
  misc_feature 1..20: note = Description of Artificial Sequence: Synthetic oligonucleotide
  misc_feature 1..20: note = Target: SCN10A; (-) strand; PAM type: NRG; PAM sequence: TGG
  source 1..20: mol_type = other DNA
ggaaggttctctctgtactg

SEQ ID NO: 16792 - DNA, 20 bp, synthetic construct
  misc_feature 1..20: note = Description of Artificial Sequence: Synthetic oligonucleotide
  misc_feature 1..20: note = Target: SCN10A; (-) strand; PAM type: NRG; PAM sequence: AGG
  source 1..20: mol_type = other DNA
ctttgtagagcaaagaagga

SEQ ID NO: 16793 - DNA, 20 bp, synthetic construct
  misc_feature 1..20: note = Description of Artificial Sequence: Synthetic oligonucleotide
  misc_feature 1..20: note = Target: SCN10A; (-) strand; PAM type: NRG; PAM sequence: AAG
  source 1..20: mol_type = other DNA
gctttgtagagcaaagaagg

SEQ ID NO: 16794 - DNA, 20 bp, synthetic construct
  misc_feature 1..20: note = Description of Artificial Sequence: Synthetic oligonucleotide
  misc_feature 1..20: note = Target: SCN10A; (-) strand; PAM type: NRG; PAM sequence: AGG
  source 1..20: mol_type = other DNA
tgggctttgtagagcaaaga

SEQ ID NO: 16795 - DNA, 20 bp, synthetic construct
  misc_feature 1..20: note = Description of Artificial Sequence: Synthetic oligonucleotide
  misc_feature 1..20: note = Target: SCN10A; (-) strand; PAM type: NRG; PAM sequence: AAG
  source 1..20: mol_type = other DNA
ctgggctttgtagagcaaag

SEQ ID NO: 16796 - DNA, 20 bp, synthetic construct
  misc_feature 1..20: note = Description of Artificial Sequence: Synthetic oligonucleotide
  misc_feature 1..20: note = Target: SCN10A; (-) strand; PAM type: NRG; PAM sequence: AAG
  source 1..20: mol_type = other DNA
atactgggctttgtagagca

SEQ ID NO: 16797 - DNA, 20 bp, synthetic construct
  misc_feature 1..20: note = Description of Artificial Sequence: Synthetic oligonucleotide
  misc_feature 1..20: note = Target: SCN10A; (-) strand; PAM type: NRG; PAM sequence: GAG
  source 1..20: mol_type = other DNA
gctgaatactgggctttgta

SEQ ID NO: 16798 - DNA, 20 bp, synthetic construct
  misc_feature 1..20: note = Description of Artificial Sequence: Synthetic oligonucleotide
  misc_feature 1..20: note = Target: SCN10A; (-) strand; PAM type: NRG; PAM sequence: TAG
  source 1..20: mol_type = other DNA
tggctgaatactgggctttg

SEQ ID NO: 16799 - DNA, 20 bp, synthetic construct
  misc_feature 1..20: note = Description of Artificial Sequence: Synthetic oligonucleotide
  misc_feature 1..20: note = Target: SCN10A; (-) strand; PAM type: NRG; PAM sequence: GGG
  source 1..20: mol_type = other DNA
taaggccctggctgaatact

SEQ ID NO: 16800 - DNA, 20 bp, synthetic construct
  misc_feature 1..20: note = Description of Artificial Sequence: Synthetic oligonucleotide
  misc_feature 1..20: note = Target: SCN10A; (-) strand; PAM type: NRG; PAM sequence: TGG
  source 1..20: mol_type = other DNA
ctaaggccctggctgaatac

SEQ ID NO: 16801 - DNA, 20 bp, synthetic construct
  misc_feature 1..20: note = Description of Artificial Sequence: Synthetic oligonucleotide
  misc_feature 1..20: note = Target: SCN10A; (-) strand; PAM type: NRG; PAM sequence: TGG
  source 1..20: mol_type = other DNA
gggagacatctctaaggccc

SEQ ID NO: 16802 - DNA, 20 bp, synthetic construct
  misc_feature 1..20: note = Description of Artificial Sequence: Synthetic oligonucleotide
  misc_feature 1..20: note = Target: SCN10A; (-) strand; PAM type: NRG; PAM sequence: AGG
  source 1..20: mol_type = other DNA
agagttgggagacatctcta

SEQ ID NO: 16803 - DNA, 20 bp, synthetic construct
  misc_feature 1..20: note = Description of Artificial Sequence: Synthetic oligonucleotide
  misc_feature 1..20: note = Target: SCN10A; (-) strand; PAM type: NRG; PAM sequence: AAG
  source 1..20: mol_type = other DNA
cagagttgggagacatctct

SEQ ID NO: 16804 - DNA, 20 bp, synthetic construct
  misc_feature 1..20: note = Description of Artificial Sequence: Synthetic oligonucleotide
  misc_feature 1..20: note = Target: SCN10A; (-) strand; PAM type: NRG; PAM sequence: GAG
  source 1..20: mol_type = other DNA
gaatagagattcagagttgg

SEQ ID NO: 16805 - DNA, 20 bp, synthetic construct
  misc_feature 1..20: note = Description of Artificial Sequence: Synthetic oligonucleotide
  misc_feature 1..20: note = Target: SCN10A; (-) strand; PAM type: NRG; PAM sequence: GGG
  source 1..20: mol_type = other DNA
gggaatagagattcagagtt

SEQ ID NO: 16806 - DNA, 20 bp, synthetic construct
  misc_feature 1..20: note = Description of Artificial Sequence: Synthetic oligonucleotide
  misc_feature 1..20: note = Target: SCN10A; (-) strand; PAM type: NRG; PAM sequence: TGG
  source 1..20: mol_type = other DNA
tgggaatagagattcagagt

SEQ ID NO: 16807 - DNA, 20 bp, synthetic construct
  misc_feature 1..20: note = Description of Artificial Sequence: Synthetic oligonucleotide
  misc_feature 1..20: note = Target: SCN10A; (-) strand; PAM type: NRG; PAM sequence: GAG
  source 1..20: mol_type = other DNA
cttatgggaatagagattca

SEQ ID NO: 16808 - DNA, 20 bp, synthetic construct
  misc_feature 1..20: note = Description of Artificial Sequence: Synthetic oligonucleotide
  misc_feature 1..20: note = Target: SCN10A; (-) strand; PAM type: NRG; PAM sequence: CAG
  source 1..20: mol_type = other DNA
gccttatgggaatagagatt

SEQ ID NO: 16809 - DNA, 20 bp, synthetic construct
  misc_feature 1..20: note = Description of Artificial Sequence: Synthetic oligonucleotide
  misc_feature 1..20: note = Target: SCN10A; (-) strand; PAM type: NRG; PAM sequence: GAG
  source 1..20: mol_type = other DNA
aacaaggccttatgggaata

SEQ ID NO: 16810 - DNA, 20 bp, synthetic construct
  misc_feature 1..20: note = Description of Artificial Sequence: Synthetic oligonucleotide
  misc_feature 1..20: note = Target: SCN10A; (-) strand; PAM type: NRG; PAM sequence: TAG
  source 1..20: mol_type = other DNA
ataacaaggccttatgggaa

SEQ ID NO: 16811 - DNA, 20 bp, synthetic construct
  misc_feature 1..20: note = Description of Artificial Sequence: Synthetic oligonucleotide
  misc_feature 1..20: note = Target: SCN10A; (-) strand; PAM type: NRG; PAM sequence: GGG
  source 1..20: mol_type = other DNA
tttgaataacaaggccttat

SEQ ID NO: 16812 - DNA, 20 bp, synthetic construct
  misc_feature 1..20: note = Description of Artificial Sequence: Synthetic oligonucleotide
  misc_feature 1..20: note = Target: SCN10A; (-) strand; PAM type: NRG; PAM sequence: TGG
  source 1..20: mol_type = other DNA
ctttgaataacaaggcctta

SEQ ID NO: 16813 - DNA, 20 bp, synthetic construct
  misc_feature 1..20: note = Description of Artificial Sequence: Synthetic oligonucleotide
  misc_feature 1..20: note = Target: SCN10A; (-) strand; PAM type: NRG; PAM sequence: AGG
  source 1..20: mol_type = other DNA
gacccacactttgaataaca

SEQ ID NO: 16814 - DNA, 20 bp, synthetic construct
  misc_feature 1..20: note = Description of Artificial Sequence: Synthetic oligonucleotide
  misc_feature 1..20: note = Target: SCN10A; (-) strand; PAM type: NRG; PAM sequence: AAG
  source 1..20: mol_type = other DNA
tgacccacactttgaataac

SEQ ID NO: 16815 - DNA, 20 bp, synthetic construct
  misc_feature 1..20: note = Description of Artificial Sequence: Synthetic oligonucleotide
  misc_feature 1..20: note = Target: SCN10A; (-) strand; PAM type: NRG; PAM sequence: CAG
  source 1..20: mol_type = other DNA
ggtgatgcttgcactgccct

SEQ ID NO: 16816 - DNA, 20 bp, synthetic construct
  misc_feature 1..20: note = Description of Artificial Sequence: Synthetic oligonucleotide
  misc_feature 1..20: note = Target: SCN10A; (-) strand; PAM type: NRG; PAM sequence: AGG
  source 1..20: mol_type = other DNA
tgcatttctaacaagctccc

SEQ ID NO: 16817 - DNA, 20 bp, synthetic construct
  misc_feature 1..20: note = Description of Artificial Sequence: Synthetic oligonucleotide
  misc_feature 1..20: note = Target: SCN10A; (-) strand; PAM type: NRG; PAM sequence: CAG
  source 1..20: mol_type = other DNA
ttgcatttctaacaagctcc

SEQ ID NO: 16818 - DNA, 20 bp, synthetic construct
  misc_feature 1..20: note = Description of Artificial Sequence: Synthetic oligonucleotide
  misc_feature 1..20: note = Target: SCN10A; (-) strand; PAM type: NRG; PAM sequence: AAG
  source 1..20: mol_type = other DNA
tgagaatttgcatttctaac

SEQ ID NO: 16819 - DNA, 20 bp, synthetic construct
  misc_feature 1..20: note = Description of Artificial Sequence: Synthetic oligonucleotide
  misc_feature 1..20: note = Target: SCN10A; (-) strand; PAM type: NRG; PAM sequence: GAG
  source 1..20: mol_type = other DNA
ataaatctgtggcagggcct

SEQ ID NO: 16820 - DNA, 20 bp, synthetic construct
  misc_feature 1..20: note = Description of Artificial Sequence: Synthetic oligonucleotide
  misc_feature 1..20: note = Target: SCN10A; (-) strand; PAM type: NRG; PAM sequence: GGG
  source 1..20: mol_type = other DNA
cattccataaatctgtggca

SEQ ID NO: 16821 - DNA, 20 bp, synthetic construct
  misc_feature 1..20: note = Description of Artificial Sequence: Synthetic oligonucleotide
  misc_feature 1..20: note = Target: SCN10A; (-) strand; PAM type: NRG; PAM sequence: AGG
  source 1..20: mol_type = other DNA
tcattccataaatctgtggc

SEQ ID NO: 16822 - DNA, 20 bp, synthetic construct
  misc_feature 1..20: note = Description of Artificial Sequence: Synthetic oligonucleotide
  misc_feature 1..20: note = Target: SCN10A; (-) strand; PAM type: NRG; PAM sequence: CAG
  source 1..20: mol_type = other DNA
ctcattccataaatctgtgg

SEQ ID NO: 16823 - DNA, 20 bp, synthetic construct
  misc_feature 1..20: note = Description of Artificial Sequence: Synthetic oligonucleotide
  misc_feature 1..20: note = Target: SCN10A; (-) strand; PAM type: NRG; PAM sequence: TGG
  source 1..20: mol_type = other DNA
attctcattccataaatctg

SEQ ID NO: 16824 - DNA, 20 bp, synthetic construct
  misc_feature 1..20: note = Description of Artificial Sequence: Synthetic oligonucleotide
  misc_feature 1..20: note = Target: SCN10A; (-) strand; PAM type: NRG; PAM sequence: CAG
  source 1..20: mol_type = other DNA
cccaggagcttgttcaaatg

SEQ ID NO: 16825 - DNA, 20 bp, synthetic construct
  misc_feature 1..20: note = Description of Artificial Sequence: Synthetic oligonucleotide
  misc_feature 1..20: note = Target: SCN10A; (-) strand; PAM type: NRG; PAM sequence: GAG
  source 1..20: mol_type = other DNA
ctcaaaatttaatctcccag

SEQ ID NO: 16826 - DNA, 20 bp, synthetic construct
  misc_feature 1..20: note = Description of Artificial Sequence: Synthetic oligonucleotide
  misc_feature 1..20: note = Target: SCN10A; (-) strand; PAM type: NRG; PAM sequence: AGG
  source 1..20: mol_type = other DNA
ttctcaaaatttaatctccc

SEQ ID NO: 16827 - DNA, 20 bp, synthetic construct
  misc_feature 1..20: note = Description of Artificial Sequence: Synthetic oligonucleotide
  misc_feature 1..20: note = Target: SCN10A; (-) strand; PAM type: NRG; PAM sequence: CAG
  source 1..20: mol_type = other DNA
cttctcaaaatttaatctcc

SEQ ID NO: 16828 - DNA, 20 bp, synthetic construct
  misc_feature 1..20: note = Description of Artificial Sequence: Synthetic oligonucleotide
  misc_feature 1..20: note = Target: SCN10A; (-) strand; PAM type: NRG; PAM sequence: TAG
  source 1..20: mol_type = other DNA
ctcacagaaaatcattacaa

SEQ ID NO: 16829 - DNA, 20 bp, synthetic construct
  misc_feature 1..20: note = Description of Artificial Sequence: Synthetic oligonucleotide
  misc_feature 1..20: note = Target: SCN10A; (-) strand; PAM type: NRG; PAM sequence: CAG
  source 1..20: mol_type = other DNA
aattactcctttaaagctca

SEQ ID NO: 16830 - DNA, 20 bp, synthetic construct
  misc_feature 1..20: note = Description of Artificial Sequence: Synthetic oligonucleotide
  misc_feature 1..20: note = Target: SCN10A; (-) strand; PAM type: NRG; PAM sequence: AAG
  source 1..20: mol_type = other DNA
tgctactaattactccttta

SEQ ID NO: 16831 - DNA, 20 bp, synthetic construct
  misc_feature 1..20: note = Description of Artificial Sequence: Synthetic oligonucleotide
  misc_feature 1..20: note = Target: SCN10A; (-) strand; PAM type: NRG; PAM sequence: AGG
  source 1..20: mol_type = other DNA
tgaaggcctacaatacaaaa

SEQ ID NO: 16832 - DNA, 20 bp, synthetic construct
  misc_feature 1..20: note = Description of Artificial Sequence: Synthetic oligonucleotide
  misc_feature 1..20: note = Target: SCN10A; (-) strand; PAM type: NRG; PAM sequence: AAG
  source 1..20: mol_type = other DNA
ctgaaggcctacaatacaaa

SEQ ID NO: 16833 - DNA, 20 bp, synthetic construct
  misc_feature 1..20: note = Description of Artificial Sequence: Synthetic oligonucleotide
  misc_feature 1..20: note = Target: SCN10A; (-) strand; PAM type: NRG; PAM sequence: AGG
  source 1..20: mol_type = other DNA
caacacacggccttctctga

SEQ ID NO: 16834 - DNA, 20 bp, synthetic construct
  misc_feature 1..20: note = Description of Artificial Sequence: Synthetic oligonucleotide
  misc_feature 1..20: note = Target: SCN10A; (-) strand; PAM type: NRG; PAM sequence: AAG
  source 1..20: mol_type = other DNA
ccaacacacggccttctctg

SEQ ID NO: 16835 - DNA, 20 bp, synthetic construct
  misc_feature 1..20: note = Description of Artificial Sequence: Synthetic oligonucleotide
  misc_feature 1..20: note = Target: SCN10A; (-) strand; PAM type: NRG; PAM sequence: CGG
  source 1..20: mol_type = other DNA
cctctgacctccccaacaca

SEQ ID NO: 16836 - DNA, 20 bp, synthetic construct
  misc_feature 1..20: note = Description of Artificial Sequence: Synthetic oligonucleotide
  misc_feature 1..20: note = Target: SCN10A; (-) strand; PAM type: NRG; PAM sequence: TGG
  source 1..20: mol_type = other DNA
ttatttaatcccgaagcccc

SEQ ID NO: 16837 - DNA, 20 bp, synthetic construct
  misc_feature 1..20: note = Description of Artificial Sequence: Synthetic oligonucleotide
  misc_feature 1..20: note = Target: SCN10A; (-) strand; PAM type: NRG; PAM sequence: AAG
  source 1..20: mol_type = other DNA
tttgcccttatttaatcccg

SEQ ID NO: 16838 - DNA, 20 bp, synthetic construct
  misc_feature 1..20: note = Description of Artificial Sequence: Synthetic oligonucleotide
  misc_feature 1..20: note = Target: SCN10A; (-) strand; PAM type: NRG; PAM sequence: CAG
  source 1..20: mol_type = other DNA
aacttgtcagtagcaaaacc

SEQ ID NO: 16839 - DNA, 20 bp, synthetic construct
  misc_feature 1..20: note = Description of Artificial Sequence: Synthetic oligonucleotide
  misc_feature 1..20: note = Target: SCN10A; (-) strand; PAM type: NRG; PAM sequence: TAG
  source 1..20: mol_type = other DNA
aaggtcacccaacttgtcag

SEQ ID NO: 16840 - DNA, 20 bp, synthetic construct
  misc_feature 1..20: note = Description of Artificial Sequence: Synthetic oligonucleotide
  misc_feature 1..20: note = Target: SCN10A; (-) strand; PAM type: NRG; PAM sequence: CAG
  source 1..20: mol_type = other DNA
tccaaggtcacccaacttgt

SEQ ID NO: 16841 - DNA, 20 bp, synthetic construct
  misc_feature 1..20: note = Description of Artificial Sequence: Synthetic oligonucleotide
  misc_feature 1..20: note = Target: SCN10A; (-) strand; PAM type: NRG; PAM sequence: AGG
  source 1..20: mol_type = other DNA
atgtttaaaaggcttgtcca

SEQ ID NO: 16842 - DNA, 20 bp, synthetic construct
  misc_feature 1..20: note = Description of Artificial Sequence: Synthetic oligonucleotide
  misc_feature 1..20: note = Target: SCN10A; (-) strand; PAM type: NRG; PAM sequence: AAG
  source 1..20: mol_type = other DNA
aatgtttaaaaggcttgtcc

SEQ ID NO: 16843 - DNA, 20 bp, synthetic construct
  misc_feature 1..20: note = Description of Artificial Sequence: Synthetic oligonucleotide
  misc_feature 1..20: note = Target: SCN10A; (-) strand; PAM type: NRG; PAM sequence: AGG
  source 1..20: mol_type = other DNA
tgacactcaaaatgtttaaa

SEQ ID NO: 16844 - DNA, 20 bp, synthetic construct
  misc_feature 1..20: note = Description of Artificial Sequence: Synthetic oligonucleotide
  misc_feature 1..20: note = Target: SCN10A; (-) strand; PAM type: NRG; PAM sequence: AAG
  source 1..20: mol_type = other DNA
ctgacactcaaaatgtttaa

SEQ ID NO: 16845 - DNA, 20 bp, synthetic construct
  misc_feature 1..20: note = Description of Artificial Sequence: Synthetic oligonucleotide
  misc_feature 1..20: note = Target: SCN10A; (-) strand; PAM type: NRG; PAM sequence: GGG
  source 1..20: mol_type = other DNA
tgcctcccactatatagatg

SEQ ID NO: 16846 - DNA, 20 bp, synthetic construct
  misc_feature 1..20: note = Description of Artificial Sequence: Synthetic oligonucleotide
  misc_feature 1..20: note = Target: SCN10A; (-) strand; PAM type: NRG; PAM sequence: GGG
  source 1..20: mol_type = other DNA
atgcctcccactatatagat

SEQ ID NO: 16847 - DNA, 20 bp, synthetic construct
  misc_feature 1..20: note = Description of Artificial Sequence: Synthetic oligonucleotide
  misc_feature 1..20: note = Target: SCN10A; (-) strand; PAM type: NRG; PAM sequence: TGG
  source 1..20: mol_type = other DNA
tatgcctcccactatataga

SEQ ID NO: 16848 - DNA, 20 bp, synthetic construct
  misc_feature 1..20: note = Description of Artificial Sequence: Synthetic oligonucleotide
  misc_feature 1..20: note = Target: SCN10A; (-) strand; PAM type: NRG; PAM sequence: TAG
  source 1..20: mol_type = other DNA
agtgtatgcctcccactata

SEQ ID NO: 16849 - DNA, 20 bp, synthetic construct
  misc_feature 1..20: note = Description of Artificial Sequence: Synthetic oligonucleotide
  misc_feature 1..20: note = Target: SCN10A; (-) strand; PAM type: NRG; PAM sequence: GAG
  source 1..20: mol_type = other DNA
ctgcaagcatttgagtgagt

SEQ ID NO: 16850 - DNA, 20 bp, synthetic construct
  misc_feature 1..20: note = Description of Artificial Sequence: Synthetic oligonucleotide
  misc_feature 1..20: note = Target: SCN10A; (-) strand; PAM type: NRG; PAM sequence: GAG
  source 1..20: mol_type = other DNA
ctggctgcaagcatttgagt

SEQ ID NO: 16851 - DNA, 20 bp, synthetic construct
  misc_feature 1..20: note = Description of Artificial Sequence: Synthetic oligonucleotide
  misc_feature 1..20: note = Target: SCN10A; (-) strand; PAM type: NRG; PAM sequence: GAG
  source 1..20: mol_type = other DNA
aaacctggctgcaagcattt

SEQ ID NO: 16852 - DNA, 20 bp, synthetic construct
  misc_feature 1..20: note = Description of Artificial Sequence: Synthetic oligonucleotide
  misc_feature 1..20: note = Target: SCN10A; (-) strand; PAM type: NRG; PAM sequence: AAG
  source 1..20: mol_type = other DNA
ggcctgccaaacctggctgc

SEQ ID NO: 16853 - DNA, 20 bp, synthetic construct
  misc_feature 1..20: note = Description of Artificial Sequence: Synthetic oligonucleotide
  misc_feature 1..20: note = Target: SCN10A; (-) strand; PAM type: NRG; PAM sequence: TGG
  source 1..20: mol_type = other DNA
gtgccatggcctgccaaacc

SEQ ID NO: 16854 - DNA, 20 bp, synthetic construct
  misc_feature 1..20: note = Description of Artificial Sequence: Synthetic oligonucleotide
  misc_feature 1..20: note = Target: SCN10A; (-) strand; PAM type: NRG; PAM sequence: TGG
  source 1..20: mol_type = other DNA
tgttcaaggtgcccgtgcca

SEQ ID NO: 16855 - DNA, 20 bp, synthetic construct
  misc_feature 1..20: note = Description of Artificial Sequence: Synthetic oligonucleotide
  misc_feature 1..20: note = Target: SCN10A; (-) strand; PAM type: NRG; PAM sequence: AGG
  source 1..20: mol_type = other DNA
cagagcatgggaggtgttca

SEQ ID NO: 16856 - DNA, 20 bp, synthetic construct
  misc_feature 1..20: note = Description of Artificial Sequence: Synthetic oligonucleotide
  misc_feature 1..20: note = Target: SCN10A; (-) strand; PAM type: NRG; PAM sequence: AAG
  source 1..20: mol_type = other DNA
gcagagcatgggaggtgttc

SEQ ID NO: 16857 - DNA, 20 bp, synthetic construct
  misc_feature 1..20: note = Description of Artificial Sequence: Synthetic oligonucleotide
  misc_feature 1..20: note = Target: SCN10A; (-) strand; PAM type: NRG; PAM sequence: AGG
  source 1..20: mol_type = other DNA
tcttagcagcagagcatggg

SEQ ID NO: 16858 - DNA, 20 bp, synthetic construct
  misc_feature 1..20: note = Description of Artificial Sequence: Synthetic oligonucleotide
  misc_feature 1..20: note = Target: SCN10A; (-) strand; PAM type: NRG; PAM sequence: GAG
  source 1..20: mol_type = other DNA
ctcttagcagcagagcatgg

SEQ ID NO: 16859 - DNA, 20 bp, synthetic construct
  misc_feature 1..20: note = Description of Artificial Sequence: Synthetic oligonucleotide
  misc_feature 1..20: note = Target: SCN10A; (-) strand; PAM type: NRG; PAM sequence: GGG
  source 1..20: mol_type = other DNA
ccctcttagcagcagagcat

SEQ ID NO: 16860 - DNA, 20 bp, synthetic construct
  misc_feature 1..20: note = Description of Artificial Sequence: Synthetic oligonucleotide
  misc_feature 1..20: note = Target: SCN10A; (-) strand; PAM type: NRG; PAM sequence: TGG
  source 1..20: mol_type = other DNA
cccctcttagcagcagagca

SEQ ID NO: 16861 - DNA, 20 bp, synthetic construct
  misc_feature 1..20: note = Description of Artificial Sequence: Synthetic oligonucleotide
  misc_feature 1..20: note = Target: SCN10A; (-) strand; PAM type: NRG; PAM sequence: GAG
  source 1..20: mol_type = other DNA
gagggcccctcttagcagca

SEQ ID NO: 16862 - DNA, 20 bp, synthetic construct
  misc_feature 1..20: note = Description of Artificial Sequence: Synthetic oligonucleotide
  misc_feature 1..20: note = Target: SCN10A; (-) strand; PAM type: NRG; PAM sequence: CAG
  source 1..20: mol_type = other DNA
gcgagggcccctcttagcag

SEQ ID NO: 16863 - DNA, 20 bp, synthetic construct
  misc_feature 1..20: note = Description of Artificial Sequence: Synthetic oligonucleotide
  misc_feature 1..20: note = Target: SCN10A; (-) strand; PAM type: NRG; PAM sequence: CAG
  source 1..20: mol_type = other DNA
agggcgagggcccctcttag

SEQ ID NO: 16864 - DNA, 20 bp, synthetic construct
  misc_feature 1..20: note = Description of Artificial Sequence: Synthetic oligonucleotide
  misc_feature 1..20: note = Target: SCN10A; (-) strand; PAM type: NRG; PAM sequence: TAG
  source 1..20: mol_type = other DNA
cccagggcgagggcccctct

SEQ ID NO: 16865 - DNA, 20 bp, synthetic construct
  misc_feature 1..20: note = Description of Artificial Sequence: Synthetic oligonucleotide
  misc_feature 1..20: note = Target: SCN10A; (-) strand; PAM type: NRG; PAM sequence: GGG
  source 1..20: mol_type = other DNA
agagctgcagcccagggcga

SEQ ID NO: 16866 - DNA, 20 bp, synthetic construct
  misc_feature 1..20: note = Description of Artificial Sequence: Synthetic oligonucleotide
  misc_feature 1..20: note = Target: SCN10A; (-) strand; PAM type: NRG; PAM sequence: AGG
  source 1..20: mol_type = other DNA
gagagctgcagcccagggcg

SEQ ID NO: 16867 - DNA, 20 bp, synthetic construct
  misc_feature 1..20: note = Description of Artificial Sequence: Synthetic oligonucleotide
  misc_feature 1..20: note = Target: SCN10A; (-) strand; PAM type: NRG; PAM sequence: GAG
  source 1..20: mol_type = other DNA
ggagagctgcagcccagggc

SEQ ID NO: 16868 - DNA, 20 bp, synthetic construct
  misc_feature 1..20: note = Description of Artificial Sequence: Synthetic oligonucleotide
  misc_feature 1..20: note = Target: SCN10A; (-) strand; PAM type: NRG; PAM sequence: GGG
  source 1..20: mol_type = other DNA
agaaggagagctgcagccca

SEQ ID NO: 16869 - DNA, 20 bp, synthetic construct
  misc_feature 1..20: note = Description of Artificial Sequence: Synthetic oligonucleotide
  misc_feature 1..20: note = Target: SCN10A; (-) strand; PAM type: NRG; PAM sequence: AGG
  source 1..20: mol_type = other DNA
tagaaggagagctgcagccc

SEQ ID NO: 16870 - DNA, 20 bp, synthetic construct
  misc_feature 1..20: note = Description of Artificial Sequence: Synthetic oligonucleotide
  misc_feature 1..20: note = Target: SCN10A; (-) strand; PAM type: NRG; PAM sequence: CAG
  source 1..20: mol_type = other DNA
ctagaaggagagctgcagcc

SEQ ID NO: 16871 - DNA, 20 bp, synthetic construct
  misc_feature 1..20: note = Description of Artificial Sequence: Synthetic oligonucleotide
  misc_feature 1..20: note = Target: SCN10A; (-) strand; PAM type: NRG; PAM sequence: CAG
  source 1..20: mol_type = other DNA
tgtcactagaaggagagctg

SEQ ID NO: 16872 - DNA, 20 bp, synthetic construct
  misc_feature 1..20: note = Description of Artificial Sequence: Synthetic oligonucleotide
  misc_feature 1..20: note = Target: SCN10A; (-) strand; PAM type: NRG; PAM sequence: GAG
  source 1..20: mol_type = other DNA
caaccttgtcactagaagga

SEQ ID NO: 16873 - DNA, 20 bp, synthetic construct
  misc_feature 1..20: note = Description of Artificial Sequence: Synthetic oligonucleotide
  misc_feature 1..20: note = Target: SCN10A; (-) strand; PAM type: NRG; PAM sequence: GAG
  source 1..20: mol_type = other DNA
cccaaccttgtcactagaag

SEQ ID NO: 16874 - DNA, 20 bp, synthetic construct
  misc_feature 1..20: note = Description of Artificial Sequence: Synthetic oligonucleotide
  misc_feature 1..20: note = Target: SCN10A; (-) strand; PAM type: NRG; PAM sequence: AGG
  source 1..20: mol_type = other DNA
tccccaaccttgtcactaga

SEQ ID NO: 16875 - DNA, 20 bp, synthetic construct
  misc_feature 1..20: note = Description of Artificial Sequence: Synthetic oligonucleotide
  misc_feature 1..20: note = Target: SCN10A; (-) strand; PAM type: NRG; PAM sequence: AAG
  source 1..20: mol_type = other DNA
gtccccaaccttgtcactag

SEQ ID NO: 16876 - DNA, 20 bp, synthetic construct
  misc_feature 1..20: note = Description of Artificial Sequence: Synthetic oligonucleotide
  misc_feature 1..20: note = Target: SCN10A; (-) strand; PAM type: NRG; PAM sequence: TAG
  source 1..20: mol_type = other DNA
aaagtccccaaccttgtcac

SEQ ID NO: 16877 - DNA, 20 bp, synthetic construct
  misc_feature 1..20: note = Description of Artificial Sequence: Synthetic oligonucleotide
  misc_feature 1..20: note = Target: SCN10A; (-) strand; PAM type: NRG; PAM sequence: AAG
  source 1..20: mol_type = other DNA
tctcctgactactgagctga

SEQ ID NO: 16878 - DNA, 20 bp, synthetic construct
  misc_feature 1..20: note = Description of Artificial Sequence: Synthetic oligonucleotide
  misc_feature 1..20: note = Target: SCN10A; (-) strand; PAM type: NRG; PAM sequence: GAG
  source 1..20: mol_type = other DNA
agtgggttctcctgactact

SEQ ID NO: 16879 - DNA, 20 bp, synthetic construct
  misc_feature 1..20: note = Description of Artificial Sequence: Synthetic oligonucleotide
  misc_feature 1..20: note = Target: SCN10A; (-) strand; PAM type: NRG; PAM sequence: GGG
  source 1..20: mol_type = other DNA
ggccctggagctgcatcagt

SEQ ID NO: 16880 - DNA, 20 bp, synthetic construct
  misc_feature 1..20: note = Description of Artificial Sequence: Synthetic oligonucleotide
  misc_feature 1..20: note = Target: SCN10A; (-) strand; PAM type: NRG; PAM sequence: TGG
  source 1..20: mol_type = other DNA
aggccctggagctgcatcag

SEQ ID NO: 16881 - DNA, 20 bp, synthetic construct
  misc_feature 1..20: note = Description of Artificial Sequence: Synthetic oligonucleotide
  misc_feature 1..20: note = Target: SCN10A; (-) strand; PAM type: NRG; PAM sequence: CAG
  source 1..20: mol_type = other DNA
caaaggccctggagctgcat

SEQ ID NO: 16882 - DNA, 20 bp, synthetic construct
  misc_feature 1..20: note = Description of Artificial Sequence: Synthetic oligonucleotide
  misc_feature 1..20: note = Target: SCN10A; (-) strand; PAM type: NRG; PAM sequence: GAG
  source 1..20: mol_type = other DNA
cctacaatccaaaggccctg

SEQ ID NO: 16883 - DNA, 20 bp, synthetic construct
  misc_feature 1..20: note = Description of Artificial Sequence: Synthetic oligonucleotide
  misc_feature 1..20: note = Target: SCN10A; (-) strand; PAM type: NRG; PAM sequence: TGG
  source 1..20: mol_type = other DNA
ctcctacaatccaaaggccc

SEQ ID NO: 16884 - DNA, 20 bp, synthetic construct
  misc_feature 1..20: note = Description of Artificial Sequence: Synthetic oligonucleotide
  misc_feature 1..20: note = Target: SCN10A; (-) strand; PAM type: NRG; PAM sequence: AGG
  source 1..20: mol_type = other DNA
aggaatctcctacaatccaa

SEQ ID NO: 16885 - DNA, 20 bp, synthetic construct
  misc_feature 1..20: note = Description of Artificial Sequence: Synthetic oligonucleotide
  misc_feature 1..20: note = Target: SCN10A; (-) strand; PAM type: NRG; PAM sequence: AAG
  source 1..20: mol_type = other DNA
taggaatctcctacaatcca

SEQ ID NO: 16886 - DNA, 20 bp, synthetic construct
  misc_feature 1..20: note = Description of Artificial Sequence: Synthetic oligonucleotide
  misc_feature 1..20: note = Target: SCN10A; (-) strand; PAM type: NRG; PAM sequence: AGG
  source 1..20: mol_type = other DNA
tgcccccaaatcctccagat

SEQ ID NO: 16887 - DNA, 20 bp, synthetic construct
  misc_feature 1..20: note = Description of Artificial Sequence: Synthetic oligonucleotide
  misc_feature 1..20: note = Target: SCN10A; (-) strand; PAM type: NRG; PAM sequence: TAG
  source 1..20: mol_type = other DNA
ctgcccccaaatcctccaga

SEQ ID NO: 16888 - DNA, 20 bp, synthetic construct
  misc_feature 1..20: note = Description of Artificial Sequence: Synthetic oligonucleotide
  misc_feature 1..20: note = Target: SCN10A; (-) strand; PAM type: NRG; PAM sequence: CAG
  source 1..20: mol_type = other DNA
gtccctgcccccaaatcctc

SEQ ID NO: 16889 - DNA, 20 bp, synthetic construct
  misc_feature 1..20: note = Description of Artificial Sequence: Synthetic oligonucleotide
  misc_feature 1..20: note = Target: SCN10A; (-) strand; PAM type: NRG; PAM sequence: TAG
  source 1..20: mol_type = other DNA
atctctggtaaggggaggca

SEQ ID NO: 16890 - DNA, 20 bp, synthetic construct
  misc_feature 1..20: note = Description of Artificial Sequence: Synthetic oligonucleotide
  misc_feature 1..20: note = Target: SCN10A; (-) strand; PAM type: NRG; PAM sequence: AGG
  source 1..20: mol_type = other DNA
agtggatctctggtaagggg

SEQ ID NO: 16891 - DNA, 20 bp, synthetic construct
  misc_feature 1..20: note = Description of Artificial Sequence: Synthetic oligonucleotide
  misc_feature 1..20: note = Target: SCN10A; (-) strand; PAM type: NRG; PAM sequence: GAG
  source 1..20: mol_type = other DNA
cagtggatctctggtaaggg

SEQ ID NO: 16892 - DNA, 20 bp, synthetic construct
  misc_feature 1..20: note = Description of Artificial Sequence: Synthetic oligonucleotide
  misc_feature 1..20: note = Target: SCN10A; (-) strand; PAM type: NRG; PAM sequence: GGG
  source 1..20: mol_type = other DNA
agcagtggatctctggtaag

SEQ ID NO: 16893 - DNA, 20 bp, synthetic construct
  misc_feature 1..20: note = Description of Artificial Sequence: Synthetic oligonucleotide
  misc_feature 1..20: note = Target: SCN10A; (-) strand; PAM type: NRG; PAM sequence: GGG
  source 1..20: mol_type = other DNA
cagcagtggatctctggtaa

SEQ ID NO: 16894 - DNA, 20 bp, synthetic construct
  misc_feature 1..20: note = Description of Artificial Sequence: Synthetic oligonucleotide
  misc_feature 1..20: note = Target: SCN10A; (-) strand; PAM type: NRG; PAM sequence: AGG
  source 1..20: mol_type = other DNA
tcagcagtggatctctggta

SEQ ID NO: 16895 - DNA, 20 bp, synthetic construct
  misc_feature 1..20: note = Description of Artificial Sequence: Synthetic oligonucleotide
  misc_feature 1..20: note = Target: SCN10A; (-) strand; PAM type: NRG; PAM sequence: AAG
  source 1..20: mol_type = other DNA
ctcagcagtggatctctggt

SEQ ID NO: 16896 - DNA, 20 bp, synthetic construct
  misc_feature 1..20: note = Description of Artificial Sequence: Synthetic oligonucleotide
  misc_feature 1..20: note = Target: SCN10A; (-) strand; PAM type: NRG; PAM sequence: TGG
  source 1..20: mol_type = other DNA
cctgctcagcagtggatctc

SEQ ID NO: 16897 - DNA, 20 bp, synthetic construct
  misc_feature 1..20: note = Description of Artificial Sequence: Synthetic oligonucleotide
  misc_feature 1..20: note = Target: SCN10A; (-) strand; PAM type: NRG; PAM sequence: TGG
  source 1..20: mol_type = other DNA
ttcatgatcctgctcagcag

SEQ ID NO: 16898 - DNA, 20 bp, synthetic construct
  misc_feature 1..20: note = Description of Artificial Sequence: Synthetic oligonucleotide
  misc_feature 1..20: note = Target: SCN10A; (-) strand; PAM type: NRG; PAM sequence: CAG
  source 1..20: mol_type = other DNA
atcttcatgatcctgctcag

SEQ ID NO: 16899 - DNA, 20 bp, synthetic construct
  misc_feature 1..20: note = Description of Artificial Sequence: Synthetic oligonucleotide
  misc_feature 1..20: note = Target: SCN10A; (-) strand; PAM type: NRG; PAM sequence: CAG
  source 1..20: mol_type = other DNA
atcatcttcatgatcctgct

SEQ ID NO: 16900 - DNA, 20 bp, synthetic construct
  misc_feature 1..20: note = Description of Artificial Sequence: Synthetic oligonucleotide
  misc_feature 1..20: note = Target: SCN10A; (-) strand; PAM type: NRG; PAM sequence: GAG
  source 1..20: mol_type = other DNA
gtggagcacagctggtttga

SEQ ID NO: 16901 - DNA, 20 bp, synthetic construct
  misc_feature 1..20: note = Description of Artificial Sequence: Synthetic oligonucleotide
  misc_feature 1..20: note = Target: SCN10A; (-) strand; PAM type: NRG; PAM sequence: GAG
  source 1..20: mol_type = other DNA
tcgtggagcacagctggttt

SEQ ID NO: 16902 - DNA, 20 bp, synthetic construct
  misc_feature 1..20: note = Description of Artificial Sequence: Synthetic oligonucleotide
  misc_feature 1..20: note = Target: SCN10A; (-) strand; PAM type: NRG; PAM sequence: TGG
  source 1..20: mol_type = other DNA
accgtatcgtggagcacagc

SEQ ID NO: 16903 - DNA, 20 bp, synthetic construct
  misc_feature 1..20: note = Description of Artificial Sequence: Synthetic oligonucleotide
  misc_feature 1..20: note = Target: SCN10A; (-) strand; PAM type: NRG; PAM sequence: CAG
  source 1..20: mol_type = other DNA
tgctaccgtatcgtggagca

SEQ ID NO: 16904 - DNA, 20 bp, synthetic construct
  misc_feature 1..20: note = Description of Artificial Sequence: Synthetic oligonucleotide
  misc_feature 1..20: note = Target: SCN10A; (-) strand; PAM type: NRG; PAM sequence: GAG
  source 1..20: mol_type = other DNA
agacttgctaccgtatcgtg

SEQ ID NO: 16905 - DNA, 20 bp, synthetic construct
  misc_feature 1..20: note = Description of Artificial Sequence: Synthetic oligonucleotide
  misc_feature 1..20: note = Target: SCN10A; (-) strand; PAM type: NRG; PAM sequence: TGG
  source 1..20: mol_type = other DNA
caagacttgctaccgtatcg

SEQ ID NO: 16906 - DNA, 20 bp, synthetic construct
  misc_feature 1..20: note = Description of Artificial Sequence: Synthetic oligonucleotide
  misc_feature 1..20: note = Target: SCN10A; (-) strand; PAM type: NRG; PAM sequence: AAG
  source 1..20: mol_type = other DNA
atgtgggctggcaggtgcgc

SEQ ID NO: 16907 - DNA, 20 bp, synthetic construct
  misc_feature 1..20: note = Description of Artificial Sequence: Synthetic oligonucleotide
  misc_feature 1..20: note = Target: SCN10A; (-) strand; PAM type: NRG; PAM sequence: AGG
  source 1..20: mol_type = other DNA
tccatgggatgtgggctggc

SEQ ID NO: 16908 - DNA, 20 bp, synthetic construct
  misc_feature 1..20: note = Description of Artificial Sequence: Synthetic oligonucleotide
  misc_feature 1..20: note = Target: SCN10A; (-) strand; PAM type: NRG; PAM sequence: CAG
  source 1..20: mol_type = other DNA
gtccatgggatgtgggctgg

SEQ ID NO: 16909 - DNA, 20 bp, synthetic construct
  misc_feature 1..20: note = Description of Artificial Sequence: Synthetic oligonucleotide
  misc_feature 1..20: note = Target: SCN10A; (-) strand; PAM type: NRG; PAM sequence: TGG
  source 1..20: mol_type = other DNA
agagtccatgggatgtgggc

SEQ ID NO: 16910 - DNA, 20 bp, synthetic construct
  misc_feature 1..20: note = Description of Artificial Sequence: Synthetic oligonucleotide
  misc_feature 1..20: note = Target: SCN10A; (-) strand; PAM type: NRG; PAM sequence: GGG
  source 1..20: mol_type = other DNA
accaagagtccatgggatgt

SEQ ID NO: 16911 - DNA, 20 bp, synthetic construct
  misc_feature 1..20: note = Description of Artificial Sequence: Synthetic oligonucleotide
  misc_feature 1..20: note = Target: SCN10A; (-) strand; PAM type: NRG; PAM sequence: TGG
  source 1..20: mol_type = other DNA
caccaagagtccatgggatg

SEQ ID NO: 16912 - DNA, 20 bp, synthetic construct
  misc_feature 1..20: note = Description of Artificial Sequence: Synthetic oligonucleotide
  misc_feature 1..20: note = Target: SCN10A; (-) strand; PAM type: NRG; PAM sequence: GGG
  source 1..20: mol_type = other DNA
ggataccaccaagagtccat

SEQ ID NO: 16913 - DNA, 20 bp, synthetic construct
  misc_feature 1..20: note = Description of Artificial Sequence: Synthetic oligonucleotide
  misc_feature 1..20: note = Target: SCN10A; (-) strand; PAM type: NRG; PAM sequence: TGG
  source 1..20: mol_type = other DNA
tggataccaccaagagtcca

SEQ ID NO: 16914 - DNA, 20 bp, synthetic construct
  misc_feature 1..20: note = Description of Artificial Sequence: Synthetic oligonucleotide
  misc_feature 1..20: note = Target: SCN10A; (-) strand; PAM type: NRG; PAM sequence: GAG
  source 1..20: mol_type = other DNA
tgcaaactggataccaccaa

SEQ ID NO: 16915 - DNA, 20 bp, synthetic construct
  misc_feature 1..20: note = Description of Artificial Sequence: Synthetic oligonucleotide
  misc_feature 1..20: note = Target: SCN10A; (-) strand; PAM type: NRG; PAM sequence: AAG
  source 1..20: mol_type = other DNA
gctgcaaactggataccacc

SEQ ID NO: 16916 - DNA, 20 bp, synthetic construct
  misc_feature 1..20: note = Description of Artificial Sequence: Synthetic oligonucleotide
  misc_feature 1..20: note = Target: SCN10A; (-) strand; PAM type: NRG; PAM sequence: TGG
  source 1..20: mol_type = other DNA
ccactgtccctgctgcaaac

SEQ ID NO: 16917 - DNA, 20 bp, synthetic construct
  misc_feature 1..20: note = Description of Artificial Sequence: Synthetic oligonucleotide
  misc_feature 1..20: note = Target: SCN10A; (-) strand; PAM type: NRG; PAM sequence: AGG
  source 1..20: mol_type = other DNA
catcagtcacctctccccac

SEQ ID NO: 16918 - DNA, 20 bp, synthetic construct
  misc_feature 1..20: note = Description of Artificial Sequence: Synthetic oligonucleotide
  misc_feature 1..20: note = Target: SCN10A; (-) strand; PAM type: NRG; PAM sequence: CAG
  source 1..20: mol_type = other DNA
ccatcagtcacctctcccca

SEQ ID NO: 16919 - DNA, 20 bp, synthetic construct
  misc_feature 1..20: note = Description of Artificial Sequence: Synthetic oligonucleotide
  misc_feature 1..20: note = Target: SCN10A; (-) strand; PAM type: NRG; PAM sequence: CAG
  source 1..20: mol_type = other DNA
cactggccatcacccaccat

SEQ ID NO: 16920 - DNA, 20 bp, synthetic construct
  misc_feature 1..20: note = Description of Artificial Sequence: Synthetic oligonucleotide
  misc_feature 1..20: note = Target: SCN10A; (-) strand; PAM type: NRG; PAM sequence: TGG
  source 1..20: mol_type = other DNA
aaattatcccctttgcccac

SEQ ID NO: 16921 - DNA, 20 bp, synthetic construct
  misc_feature 1..20: note = Description of Artificial Sequence: Synthetic oligonucleotide
  misc_feature 1..20: note = Target: SCN10A; (-) strand; PAM type: NRG; PAM sequence: CAG
  source 1..20: mol_type = other DNA
tggtttctctgcagcaggag

SEQ ID NO: 16922 - DNA, 20 bp, synthetic construct
  misc_feature 1..20: note = Description of Artificial Sequence: Synthetic oligonucleotide
  misc_feature 1..20: note = Target: SCN10A; (-) strand; PAM type: NRG; PAM sequence: GAG
  source 1..20: mol_type = other DNA
gaatggtttctctgcagcag

SEQ ID NO: 16923 - DNA, 20 bp, synthetic construct
  misc_feature 1..20: note = Description of Artificial Sequence: Synthetic oligonucleotide
  misc_feature 1..20: note = Target: SCN10A; (-) strand; PAM type: NRG; PAM sequence: AGG
  source 1..20: mol_type = other DNA
cagaatggtttctctgcagc

SEQ ID NO: 16924 - DNA, 20 bp, synthetic construct
  misc_feature 1..20: note = Description of Artificial Sequence: Synthetic oligonucleotide
  misc_feature 1..20: note = Target: SCN10A; (-) strand; PAM type: NRG; PAM sequence: CAG
  source 1..20: mol_type = other DNA
gcagaatggtttctctgcag

SEQ ID NO: 16925 - DNA, 20 bp, synthetic construct
  misc_feature 1..20: note = Description of Artificial Sequence: Synthetic oligonucleotide
  misc_feature 1..20: note = Target: SCN10A; (-) strand; PAM type: NRG; PAM sequence: CAG
  source 1..20: mol_type = other DNA
ctagcagaatggtttctctg

SEQ ID NO: 16926 - DNA, 20 bp, synthetic construct
  misc_feature 1..20: note = Description of Artificial Sequence: Synthetic oligonucleotide
  misc_feature 1..20: note = Target: SCN10A; (-) strand; PAM type: NRG; PAM sequence: TGG
  source 1..20: mol_type = other DNA
aagtgggtttcctagcagaa

SEQ ID NO: 16927 - DNA, 20 bp, synthetic construct
  misc_feature 1..20: note = Description of Artificial Sequence: Synthetic oligonucleotide
  misc_feature 1..20: note = Target: SCN10A; (-) strand; PAM type: NRG; PAM sequence: CAG
  source 1..20: mol_type = other DNA
atgacaagtgggtttcctag

SEQ ID NO: 16928 - DNA, 20 bp, synthetic construct
  misc_feature 1..20: note = Description of Artificial Sequence: Synthetic oligonucleotide
  misc_feature 1..20: note = Target: SCN10A; (-) strand; PAM type: NRG; PAM sequence: TAG
  source 1..20: mol_type = other DNA
ggcatgacaagtgggtttcc

SEQ ID NO: 16929 - DNA, 20 bp, synthetic construct
  misc_feature 1..20: note = Description of Artificial Sequence: Synthetic oligonucleotide
  misc_feature 1..20: note = Target: SCN10A; (-) strand; PAM type: NRG; PAM sequence: GGG
  source 1..20: mol_type = other DNA
tttccaagggcatgacaagt

SEQ ID NO: 16930 - DNA, 20 bp, synthetic construct
  misc_feature 1..20: note = Description of Artificial Sequence: Synthetic oligonucleotide
  misc_feature 1..20: note = Target: SCN10A; (-) strand; PAM type: NRG; PAM sequence: TGG
  source 1..20: mol_type = other DNA
ttttccaagggcatgacaag

SEQ ID NO: 16931 - DNA, 20 bp, synthetic construct
  misc_feature 1..20: note = Description of Artificial Sequence: Synthetic oligonucleotide
  misc_feature 1..20: note = Target: SCN10A; (-) strand; PAM type: NRG; PAM sequence: AAG
  source 1..20: mol_type = other DNA
tttttttccaagggcatgac

SEQ ID NO: 16932 - DNA, 20 bp, synthetic construct
  misc_feature 1..20: note = Description of Artificial Sequence: Synthetic oligonucleotide
  misc_feature 1..20: note = Target: SCN10A; (-) strand; PAM type: NRG; PAM sequence: GGG
  source 1..20: mol_type = other DNA
aggaaagaatttttttccaa

SEQ ID NO: 16933 - DNA, 20 bp, synthetic construct
  misc_feature 1..20: note = Description of Artificial Sequence: Synthetic oligonucleotide
  misc_feature 1..20: note = Target: SCN10A; (-) strand; PAM type: NRG; PAM sequence: AGG
  source 1..20: mol_type = other DNA
caggaaagaatttttttcca

SEQ ID NO: 16934 - DNA, 20 bp, synthetic construct
  misc_feature 1..20: note = Description of Artificial Sequence: Synthetic oligonucleotide
  misc_feature 1..20: note = Target: SCN10A; (-) strand; PAM type: NRG; PAM sequence: AAG
  source 1..20: mol_type = other DNA
ccaggaaagaatttttttcc

SEQ ID NO: 16935 - DNA, 20 bp, synthetic construct
  misc_feature 1..20: note = Description of Artificial Sequence: Synthetic oligonucleotide
  misc_feature 1..20: note = Target: SCN10A; (-) strand; PAM type: NRG; PAM sequence: AAG
  source 1..20: mol_type = other DNA
tcttcacccatattccagga

SEQ ID NO: 16936 - DNA, 20 bp, synthetic construct
  misc_feature 1..20: note = Description of Artificial Sequence: Synthetic oligonucleotide
  misc_feature 1..20: note = Target: SCN10A; (-) strand; PAM type: NRG; PAM sequence: AGG
  source 1..20: mol_type = other DNA
cccctcttcacccatattcc

SEQ ID NO: 16937 - DNA, 20 bp, synthetic construct
  misc_feature 1..20: note = Description of Artificial Sequence: Synthetic oligonucleotide
  misc_feature 1..20: note = Target: SCN10A; (-) strand; PAM type: NRG; PAM sequence: CAG
  source 1..20: mol_type = other DNA
acccctcttcacccatattc

SEQ ID NO: 16938 - DNA, 20 bp, synthetic construct
  misc_feature 1..20: note = Description of Artificial Sequence: Synthetic oligonucleotide
  misc_feature 1..20: note = Target: SCN10A; (-) strand; PAM type: NRG; PAM sequence: GGG
  source 1..20: mol_type = other DNA
gattgagggactccctggaa

SEQ ID NO: 16939 - DNA, 20 bp, synthetic construct
  misc_feature 1..20: note = Description of Artificial Sequence: Synthetic oligonucleotide
  misc_feature 1..20: note = Target: SCN10A; (-) strand; PAM type: NRG; PAM sequence: AGG
  source 1..20: mol_type = other DNA
ggattgagggactccctgga

SEQ ID NO: 16940 - DNA, 20 bp, synthetic construct
  misc_feature 1..20: note = Description of Artificial Sequence: Synthetic oligonucleotide
  misc_feature 1..20: note = Target: SCN10A; (-) strand; PAM type: NRG; PAM sequence: AAG
  source 1..20: mol_type = other DNA
tggattgagggactccctgg

SEQ ID NO: 16941 - DNA, 20 bp, synthetic construct
  misc_feature 1..20: note = Description of Artificial Sequence: Synthetic oligonucleotide
  misc_feature 1..20: note = Target: SCN10A; (-) strand; PAM type: NRG; PAM sequence: TGG
  source 1..20: mol_type = other DNA
gtctggattgagggactccc

SEQ ID NO: 16942 - DNA, 20 bp, synthetic construct
  misc_feature 1..20: note = Description of Artificial Sequence: Synthetic oligonucleotide
  misc_feature 1..20: note = Target: SCN10A; (-) strand; PAM type: NRG; PAM sequence: GGG
  source 1..20: mol_type = other DNA
cacctgttggtctggattga

SEQ ID NO: 16943 - DNA, 20 bp, synthetic construct
  misc_feature 1..20: note = Description of Artificial Sequence: Synthetic oligonucleotide
  misc_feature 1..20: note = Target: SCN10A; (-) strand; PAM type: NRG; PAM sequence: AGG
  source 1..20: mol_type = other DNA
acacctgttggtctggattg

SEQ ID NO: 16944 - DNA, 20 bp, synthetic construct
  misc_feature 1..20: note = Description of Artificial Sequence: Synthetic oligonucleotide
  misc_feature 1..20: note = Target: SCN10A; (-) strand; PAM type: NRG; PAM sequence: GAG
  source 1..20: mol_type = other DNA
aacacctgttggtctggatt

SEQ ID NO: 16945 - DNA, 20 bp, synthetic construct
  misc_feature 1..20: note = Description of Artificial Sequence: Synthetic oligonucleotide
  misc_feature 1..20: note = Target: SCN10A; (-) strand; PAM type: NRG; PAM sequence: TGG
  source 1..20: mol_type = other DNA
gagaggaacacctgttggtc

SEQ ID NO: 16946 - DNA, 20 bp, synthetic construct
  misc_feature 1..20: note = Description of Artificial Sequence: Synthetic oligonucleotide
  misc_feature 1..20: note = Target: SCN10A; (-) strand; PAM type: NRG; PAM sequence: TGG
  source 1..20: mol_type = other DNA
tgatggagaggaacacctgt

SEQ ID NO: 16947 - DNA, 20 bp, synthetic construct
  misc_feature 1..20: note = Description of Artificial Sequence: Synthetic oligonucleotide
  misc_feature 1..20: note = Target: SCN10A; (-) strand; PAM type: NRG; PAM sequence: AGG
  source 1..20: mol_type = other DNA
gggcaagactgatgatggag

SEQ ID NO: 16948 - DNA, 20 bp, synthetic construct
  misc_feature 1..20: note = Description of Artificial Sequence: Synthetic oligonucleotide
  misc_feature 1..20: note = Target: SCN10A; (-) strand; PAM type: NRG; PAM sequence: GAG
  source 1..20: mol_type = other DNA
tgggcaagactgatgatgga

SEQ ID NO: 16949 - DNA, 20 bp, synthetic construct
  misc_feature 1..20: note = Description of Artificial Sequence: Synthetic oligonucleotide
  misc_feature 1..20: note = Target: SCN10A; (-) strand; PAM type: NRG; PAM sequence: GAG
  source 1..20: mol_type = other DNA
agtgggcaagactgatgatg

SEQ ID NO: 16950 - DNA, 20 bp, synthetic construct
  misc_feature 1..20: note = Description of Artificial Sequence: Synthetic oligonucleotide
  misc_feature 1..20: note = Target: SCN10A; (-) strand; PAM type: NRG; PAM sequence: TGG
  source 1..20: mol_type = other DNA
agagtgggcaagactgatga

SEQ ID NO: 16951 - DNA, 20 bp, synthetic construct
  misc_feature 1..20: note = Description of Artificial Sequence: Synthetic oligonucleotide
  misc_feature 1..20: note = Target: SCN10A; (-) strand; PAM type: NRG; PAM sequence: AAG
  source 1..20: mol_type = other DNA
ggaaaaacatcagagtgggc

SEQ ID NO: 16952 - DNA, 20 bp, synthetic construct
  misc_feature 1..20: note = Description of Artificial Sequence: Synthetic oligonucleotide
  misc_feature 1..20: note = Target: SCN10A; (-) strand; PAM type: NRG; PAM sequence: GGG
  source 1..20: mol_type = other DNA
gctaggaaaaacatcagagt

SEQ ID NO: 16953 - DNA, 20 bp, synthetic construct
  misc_feature 1..20: note = Description of Artificial Sequence: Synthetic oligonucleotide
  misc_feature 1..20: note = Target: SCN10A; (-) strand; PAM type: NRG; PAM sequence: TGG
  source 1..20: mol_type = other DNA
ggctaggaaaaacatcagag

SEQ ID NO: 16954 - DNA, 20 bp, synthetic construct
  misc_feature 1..20: note = Description of Artificial Sequence: Synthetic oligonucleotide
  misc_feature 1..20: note = Target: SCN10A; (-) strand; PAM type: NRG; PAM sequence: GAG
  source 1..20: mol_type = other DNA
tatggctaggaaaaacatca

SEQ ID NO: 16955 - DNA, 20 bp, synthetic construct
  misc_feature 1..20: note = Description of Artificial Sequence: Synthetic oligonucleotide
  misc_feature 1..20: note = Target: SCN10A; (-) strand; PAM type: NRG; PAM sequence: CAG
  source 1..20: mol_type = other DNA
gatatggctaggaaaaacat

SEQ ID NO: 16956 - DNA, 20 bp, synthetic construct
  misc_feature 1..20: note = Description of Artificial Sequence: Synthetic oligonucleotide
  misc_feature 1..20: note = Target: SCN10A; (-) strand; PAM type: NRG; PAM sequence: AGG
  source 1..20: mol_type = other DNA
tctgtaagaaggatatggct

SEQ ID NO: 16957 - DNA, 20 bp, synthetic construct
  misc_feature 1..20: note = Description of Artificial Sequence: Synthetic oligonucleotide
  misc_feature 1..20: note = Target: SCN10A; (-) strand; PAM type: NRG; PAM sequence: TAG
  source 1..20: mol_type = other DNA
atctgtaagaaggatatggc

SEQ ID NO: 16958 - DNA, 20 bp, synthetic construct
  misc_feature 1..20: note = Description of Artificial Sequence: Synthetic oligonucleotide
  misc_feature 1..20: note = Target: SCN10A; (-) strand; PAM type: NRG; PAM sequence: TGG
  source 1..20: mol_type = other DNA
tgtcatctgtaagaaggata

SEQ ID NO: 16959 - DNA, 20 bp, synthetic construct
  misc_feature 1..20: note = Description of Artificial Sequence: Synthetic oligonucleotide
  misc_feature 1..20: note = Target: SCN10A; (-) strand; PAM type: NRG; PAM sequence: AGG
  source 1..20: mol_type = other DNA
cactggtgtcatctgtaaga

SEQ ID NO: 16960 - DNA, 20 bp, synthetic construct
  misc_feature 1..20: note = Description of Artificial Sequence: Synthetic oligonucleotide
  misc_feature 1..20: note = Target: SCN10A; (-) strand; PAM type: NRG; PAM sequence: AAG
  source 1..20: mol_type = other DNA
ccactggtgtcatctgtaag

SEQ ID NO: 16961 - DNA, 20 bp, synthetic construct
  misc_feature 1..20: note = Description of Artificial Sequence: Synthetic oligonucleotide
  misc_feature 1..20: note = Target: SCN10A; (-) strand; PAM type: NRG; PAM sequence: AAG
  source 1..20: mol_type = other DNA
ggaccactggtgtcatctgt

SEQ ID NO: 16962 - DNA, 20 bp, synthetic construct
  misc_feature 1..20: note = Description of Artificial Sequence: Synthetic oligonucleotide
  misc_feature 1..20: note = Target: SCN10A; (-) strand; PAM type: NRG; PAM sequence: TGG
  source 1..20: mol_type = other DNA
ggcagaaggacagggaccac

SEQ ID NO: 16963 - DNA, 20 bp, synthetic construct
  misc_feature 1..20: note = Description of Artificial Sequence: Synthetic oligonucleotide
  misc_feature 1..20: note = Target: SCN10A; (-) strand; PAM type: NRG; PAM sequence: GGG
  source 1..20: mol_type = other DNA
tataggtgggcagaaggaca

SEQ ID NO: 16964 - DNA, 20 bp, synthetic construct
  misc_feature 1..20: note = Description of Artificial Sequence: Synthetic oligonucleotide
  misc_feature 1..20: note = Target: SCN10A; (-) strand; PAM type: NRG; PAM sequence: AGG
  source 1..20: mol_type = other DNA
gtataggtgggcagaaggac

SEQ ID NO: 16965 - DNA, 20 bp, synthetic construct
  misc_feature 1..20: note = Description of Artificial Sequence: Synthetic oligonucleotide
  misc_feature 1..20: note = Target: SCN10A; (-) strand; PAM type: NRG; PAM sequence: CAG
  source 1..20: mol_type = other DNA
ggtataggtgggcagaagga

SEQ ID NO: 16966 - DNA, 20 bp, synthetic construct
  misc_feature 1..20: note = Description of Artificial Sequence: Synthetic oligonucleotide
  misc_feature 1..20: note = Target: SCN10A; (-) strand; PAM type: NRG; PAM sequence: AGG
  source 1..20: mol_type = other DNA
tccaggtataggtgggcaga

SEQ ID NO: 16967 - DNA, 20 bp, synthetic construct
  misc_feature 1..20: note = Description of Artificial Sequence: Synthetic oligonucleotide
  misc_feature 1..20: note = Target: SCN10A; (-) strand; PAM type: NRG; PAM sequence: AAG
  source 1..20: mol_type = other DNA
ttccaggtataggtgggcag

SEQ ID NO: 16968 - DNA, 20 bp, synthetic construct
  misc_feature 1..20: note = Description of Artificial Sequence: Synthetic oligonucleotide
  misc_feature 1..20: note = Target: SCN10A; (-) strand; PAM type: NRG; PAM sequence: CAG
  source 1..20: mol_type = other DNA
gttttccaggtataggtggg

SEQ ID NO: 16969 - DNA, 20 bp, synthetic construct
  misc_feature 1..20: note = Description of Artificial Sequence: Synthetic oligonucleotide
  misc_feature 1..20: note = Target: SCN10A; (-) strand; PAM type: NRG; PAM sequence: GGG
  source 1..20: mol_type = other DNA
tctgttttccaggtataggt

SEQ ID NO: 16970 - DNA, 20 bp, synthetic construct
  misc_feature 1..20: note = Description of Artificial Sequence: Synthetic oligonucleotide
  misc_feature 1..20: note = Target: SCN10A; (-) strand; PAM type: NRG; PAM sequence: TGG
  source 1..20: mol_type = other DNA
gtctgttttccaggtatagg

SEQ ID NO: 16971 - DNA, 20 bp, synthetic construct
  misc_feature 1..20: note = Description of Artificial Sequence: Synthetic oligonucleotide
  misc_feature 1..20: note = Target: SCN10A; (-) strand; PAM type: NRG; PAM sequence: AGG
  source 1..20: mol_type = other DNA
cttgtctgttttccaggtat

SEQ ID NO: 16972 - DNA, 20 bp, synthetic construct
  misc_feature 1..20: note = Description of Artificial Sequence: Synthetic oligonucleotide
  misc_feature 1..20: note = Target: SCN10A; (-) strand; PAM type: NRG; PAM sequence: TAG
  source 1..20: mol_type = other DNA
gcttgtctgttttccaggta

SEQ ID NO: 16973 - DNA, 20 bp, synthetic construct
  misc_feature 1..20: note = Description of Artificial Sequence: Synthetic oligonucleotide
  misc_feature 1..20: note = Target: SCN10A; (-) strand; PAM type: NRG; PAM sequence: AGG
  source 1..20: mol_type = other DNA
ccgtagcttgtctgttttcc

SEQ ID NO: 16974 - DNA, 20 bp, synthetic construct
  misc_feature 1..20: note = Description of Artificial Sequence: Synthetic oligonucleotide
  misc_feature 1..20: note = Target: SCN10A; (-) strand; PAM type: NRG; PAM sequence: CAG
  source 1..20: mol_type = other DNA
gccgtagcttgtctgttttc

SEQ ID NO: 16975 - DNA, 20 bp, synthetic construct
  misc_feature 1..20: note = Description of Artificial Sequence: Synthetic oligonucleotide
  misc_feature 1..20: note = Target: SCN10A; (-) strand; PAM type: NRG; PAM sequence: TAG
  source 1..20: mol_type = other DNA
acccccaggctcatacgccg

SEQ ID NO: 16976 - DNA, 20 bp, synthetic construct
  misc_feature 1..20: note = Description of Artificial Sequence: Synthetic oligonucleotide
  misc_feature 1..20: note = Target: SCN10A; (-) strand; PAM type: NRG; PAM sequence: AGG
  source 1..20: mol_type = other DNA
tatccccctcaggcaccccc

SEQ ID NO: 16977 - DNA, 20 bp, synthetic construct
  misc_feature 1..20: note = Description of Artificial Sequence: Synthetic oligonucleotide
  misc_feature 1..20: note = Target: SCN10A; (-) strand; PAM type: NRG; PAM sequence: CAG
  source 1..20: mol_type = other DNA
atatccccctcaggcacccc

SEQ ID NO: 16978 - DNA, 20 bp, synthetic construct
  misc_feature 1..20: note = Description of Artificial Sequence: Synthetic oligonucleotide
  misc_feature 1..20: note = Target: SCN10A; (-) strand; PAM type: NRG; PAM sequence: AGG
  source 1..20: mol_type = other DNA
gcttggagcatatccccctc

SEQ ID NO: 16979 - DNA, 20 bp, synthetic construct
  misc_feature 1..20: note = Description of Artificial Sequence: Synthetic oligonucleotide
  misc_feature 1..20: note = Target: SCN10A; (-) strand; PAM type: NRG; PAM sequence: CAG
  source 1..20: mol_type = other DNA
ggcttggagcatatccccct

SEQ ID NO: 16980 - DNA, 20 bp, synthetic construct
  misc_feature 1..20: note = Description of Artificial Sequence: Synthetic oligonucleotide
  misc_feature 1..20: note = Target: SCN10A; (-) strand; PAM type: NRG; PAM sequence: GAG
  source 1..20: mol_type = other DNA
ctcagttcagcttgggcttg

SEQ ID NO: 16981 - DNA, 20 bp, synthetic construct
  misc_feature 1..20: note = Description of Artificial Sequence: Synthetic oligonucleotide
  misc_feature 1..20: note = Target: SCN10A; (-) strand; PAM type: NRG; PAM sequence: TGG
  source 1..20: mol_type = other DNA
ccctcagttcagcttgggct

SEQ ID NO: 16982 - DNA, 20 bp, synthetic construct
  misc_feature 1..20: note = Description of Artificial Sequence: Synthetic oligonucleotide
  misc_feature 1..20: note = Target: SCN10A; (-) strand; PAM type: NRG; PAM sequence: GGG
  source 1..20: mol_type = other DNA
cgtggccctcagttcagctt

SEQ ID NO: 16983 - DNA, 20 bp, synthetic construct
  misc_feature 1..20: note = Description of Artificial Sequence: Synthetic oligonucleotide
  misc_feature 1..20: note = Target: SCN10A; (-) strand; PAM type: NRG; PAM sequence: TGG
  source 1..20: mol_type = other DNA
tcgtggccctcagttcagct

SEQ ID NO: 16984 - DNA, 20 bp, synthetic construct
  misc_feature 1..20: note = Description of Artificial Sequence: Synthetic oligonucleotide
  misc_feature 1..20: note = Target: SCN10A; (-) strand; PAM type: NRG; PAM sequence: CAG
  source 1..20: mol_type = other DNA
ccacgtcgtggccctcagtt

SEQ ID NO: 16985 - DNA, 20 bp, synthetic construct
  misc_feature 1..20: note = Description of Artificial Sequence: Synthetic oligonucleotide
  misc_feature 1..20: note = Target: SCN10A; (-) strand; PAM type: NRG; PAM sequence: CAG
  source 1..20: mol_type = other DNA
cccagccacgtcgtggccct

SEQ ID NO: 16986 - DNA, 20 bp, synthetic construct
  misc_feature 1..20: note = Description of Artificial Sequence: Synthetic oligonucleotide
  misc_feature 1..20: note = Target: SCN10A; (-) strand; PAM type: NRG; PAM sequence: TGG
  source 1..20: mol_type = other DNA
tccccatcccagccacgtcg

SEQ ID NO: 16987 - DNA, 20 bp, synthetic construct
  misc_feature 1..20: note = Description of Artificial Sequence: Synthetic oligonucleotide
  misc_feature 1..20: note = Target: SCN10A; (-) strand; PAM type: NRG; PAM sequence: CAG
  source 1..20: mol_type = other DNA
gctggacccaatccccatcc

SEQ ID NO: 16988 - DNA, 20 bp, synthetic construct
  misc_feature 1..20: note = Description of Artificial Sequence: Synthetic oligonucleotide
  misc_feature 1..20: note = Target: SCN10A; (-) strand; PAM type: NRG; PAM sequence: TGG
  source 1..20: mol_type = other DNA
tgggctgggctgagctgggc

SEQ ID NO: 16989 - DNA, 20 bp, synthetic construct
  misc_feature 1..20: note = Description of Artificial Sequence: Synthetic oligonucleotide
  misc_feature 1..20: note = Target: SCN10A; (-) strand; PAM type: NRG; PAM sequence: GGG
  source 1..20: mol_type = other DNA
accctgggctgggctgagct

SEQ ID NO: 16990 - DNA, 20 bp, synthetic construct
  misc_feature 1..20: note = Description of Artificial Sequence: Synthetic oligonucleotide
  misc_feature 1..20: note = Target: SCN10A; (-) strand; PAM type: NRG; PAM sequence: TGG
  source 1..20: mol_type = other DNA
gaccctgggctgggctgagc

SEQ ID NO: 16991 - DNA, 20 bp, synthetic construct
  misc_feature 1..20: note = Description of Artificial Sequence: Synthetic oligonucleotide
  misc_feature 1..20: note = Target: SCN10A; (-) strand; PAM type: NRG; PAM sequence: GAG
  source 1..20: mol_type = other DNA
atttgaccctgggctgggct

SEQ ID NO: 16992 - DNA, 20 bp, synthetic construct
  misc_feature 1..20: note = Description of Artificial Sequence: Synthetic oligonucleotide
  misc_feature 1..20: note = Target: SCN10A; (-) strand; PAM type: NRG; PAM sequence: GGG
  source 1..20: mol_type = other DNA
gttttatttgaccctgggct

SEQ ID NO: 16993 - DNA, 20 bp, synthetic construct
  misc_feature 1..20: note = Description of Artificial Sequence: Synthetic oligonucleotide
  misc_feature 1..20: note = Target: SCN10A; (-) strand; PAM type: NRG; PAM sequence: TGG
  source 1..20: mol_type = other DNA
agttttatttgaccctgggc

SEQ ID NO: 16994 - DNA, 20 bp, synthetic construct
  misc_feature 1..20: note = Description of Artificial Sequence: Synthetic oligonucleotide
  misc_feature 1..20: note = Target: SCN10A; (-) strand; PAM type: NRG; PAM sequence: GGG
  source 1..20: mol_type = other DNA
taatagttttatttgaccct

SEQ ID NO: 16995 - DNA, 20 bp, synthetic construct
  misc_feature 1..20: note = Description of Artificial Sequence: Synthetic oligonucleotide
  misc_feature 1..20: note = Target: SCN10A; (-) strand; PAM type: NRG; PAM sequence: TGG
  source 1..20: mol_type = other DNA
ttaatagttttatttgaccc

SEQ ID NO: 16996 - DNA, 20 bp, synthetic construct
  misc_feature 1..20: note = Description of Artificial Sequence: Synthetic oligonucleotide
  misc_feature 1..20: note = Target: SCN10A; (-) strand; PAM type: NRG; PAM sequence: TAG
  source 1..20: mol_type = other DNA
aatacttgagtttttattaa

SEQ ID NO: 16997 - DNA, 20 bp, synthetic construct
  misc_feature 1..20: note = Description of Artificial Sequence: Synthetic oligonucleotide
  misc_feature 1..20: note = Target: SCN10A; (-) strand; PAM type: NRG; PAM sequence: GAG
  source 1..20: mol_type = other DNA
gaaaaattttttaaatactt

SEQ ID NO: 16998 - DNA, 20 bp, synthetic construct
  misc_feature 1..20: note = Description of Artificial Sequence: Synthetic oligonucleotide
  misc_feature 1..20: note = Target: SCN10A; (-) strand; PAM type: NRG; PAM sequence: AAG
  source 1..20: mol_type = other DNA
caatgctttctaaaaataca

SEQ ID NO: 16999 - DNA, 20 bp, synthetic construct
  misc_feature 1..20: note = Description of Artificial Sequence: Synthetic oligonucleotide
  misc_feature 1..20: note = Target: SCN10A; (-) strand; PAM type: NRG; PAM sequence: TGG
  source 1..20: mol_type = other DNA
ccattctataaagggaattg

SEQ ID NO: 17000 - DNA, 20 bp, synthetic construct
  misc_feature 1..20: note = Description of Artificial Sequence: Synthetic oligonucleotide
  misc_feature 1..20: note = Target: SCN10A; (-) strand; PAM type: NRG; PAM sequence: GGG
  source 1..20: mol_type = other DNA
tcaagagtccattctataaa

SEQ ID NO: 17001 - DNA, 20 bp, synthetic construct
  misc_feature 1..20: note = Description of Artificial Sequence: Synthetic oligonucleotide
  misc_feature 1..20: note = Target: SCN10A; (-) strand; PAM type: NRG; PAM sequence: AGG
  source 1..20: mol_type = other DNA
atcaagagtccattctataa

SEQ ID NO: 17002 - DNA, 20 bp, synthetic construct
  misc_feature 1..20: note = Description of Artificial Sequence: Synthetic oligonucleotide
  misc_feature 1..20: note = Target: SCN10A; (-) strand; PAM type: NRG; PAM sequence: AAG
  source 1..20: mol_type = other DNA
aatcaagagtccattctata

SEQ ID NO: 17003 - DNA, 20 bp, synthetic construct
  misc_feature 1..20: note = Description of Artificial Sequence: Synthetic oligonucleotide
  misc_feature 1..20: note = Target: SCN10A; (-) strand; PAM type: NRG; PAM sequence: GAG
  source 1..20: mol_type = other DNA
ttgtgcaatgaatgaatcaa

SEQ ID NO: 17004 - DNA, 20 bp, synthetic construct
  misc_feature 1..20: note = Description of Artificial Sequence: Synthetic oligonucleotide
  misc_feature 1..20: note = Target: SCN10A; (-) strand; PAM type: NRG; PAM sequence: AAG
  source 1..20: mol_type = other DNA
atttgtgcaatgaatgaatc

SEQ ID NO: 17005 - DNA, 20 bp, synthetic construct
  misc_feature 1..20: note = Description of Artificial Sequence: Synthetic oligonucleotide
  misc_feature 1..20: note = Target: SCN10A; (-) strand; PAM type: NRG; PAM sequence: AGG
  source 1..20: mol_type = other DNA
tctcagtgtttagaacagtg

SEQ ID NO: 17006 - DNA, 20 bp, synthetic construct
  misc_feature 1..20: note = Description of Artificial Sequence: Synthetic oligonucleotide
  misc_feature 1..20: note = Target: SCN10A; (-) strand; PAM type: NRG; PAM sequence: GAG
  source 1..20: mol_type = other DNA
ctctcagtgtttagaacagt

SEQ ID NO: 17007 - DNA, 20 bp, synthetic construct
  misc_feature 1..20: note = Description of Artificial Sequence: Synthetic oligonucleotide
  misc_feature 1..20: note = Target: SCN10A; (-) strand; PAM type: NRG; PAM sequence: CAG
  source 1..20: mol_type = other DNA
tttcctctcagtgtttagaa

SEQ ID NO: 17008 - DNA, 20 bp, synthetic construct
  misc_feature 1..20: note = Description of Artificial Sequence: Synthetic oligonucleotide
  misc_feature 1..20: note = Target: SCN10A; (-) strand; PAM type: NRG; PAM sequence: TAG
  source 1..20: mol_type = other DNA
tcatctttcctctcagtgtt

SEQ ID NO: 17009 - DNA, 20 bp, synthetic construct
  misc_feature 1..20: note = Description of Artificial Sequence: Synthetic oligonucleotide
  misc_feature 1..20: note = Target: SCN10A; (-) strand; PAM type: NRG; PAM sequence: CAG
  source 1..20: mol_type = other DNA
gtcttagtcatctttcctct

SEQ ID NO: 17010 - DNA, 20 bp, synthetic construct
  misc_feature 1..20: note = Description of Artificial Sequence: Synthetic oligonucleotide
  misc_feature 1..20: note = Target: SCN10A; (-) strand; PAM type: NRG; PAM sequence: TAG
  source 1..20: mol_type = other DNA
caaaagcagaacctgtgtct

SEQ ID NO: 17011 - DNA, 20 bp, synthetic construct
  misc_feature 1..20: note = Description of Artificial Sequence: Synthetic oligonucleotide
  misc_feature 1..20: note = Target: SCN10A; (-) strand; PAM type: NRG; PAM sequence: CAG
  source 1..20: mol_type = other DNA
ttttgtttagctctcaaaag

SEQ ID NO: 17012 - DNA, 20 bp, synthetic construct
  misc_feature 1..20: note = Description of Artificial Sequence: Synthetic oligonucleotide
  misc_feature 1..20: note = Target: SCN10A; (-) strand; PAM type: NRG; PAM sequence: AAG
  source 1..20: mol_type = other DNA
atcttttgtttagctctcaa

SEQ ID NO: 17013 - DNA, 20 bp, synthetic construct
  misc_feature 1..20: note = Description of Artificial Sequence: Synthetic oligonucleotide
  misc_feature 1..20: note = Target: SCN10A; (-) strand; PAM type: NRG; PAM sequence: TAG
  source 1..20: mol_type = other DNA
gcttccctcaatcttttgtt

SEQ ID NO: 17014 - DNA, 20 bp, synthetic construct
  misc_feature 1..20: note = Description of Artificial Sequence: Synthetic oligonucleotide
  misc_feature 1..20: note = Target: SCN10A; (-) strand; PAM type: NRG; PAM sequence: AGG
  source 1..20: mol_type = other DNA
accatgaaggacccagagga

SEQ ID NO: 17015 - DNA, 20 bp, synthetic construct
  misc_feature 1..20: note = Description of Artificial Sequence: Synthetic oligonucleotide
  misc_feature 1..20: note = Target: SCN10A; (-) strand; PAM type: NRG; PAM sequence: AAG
  source 1..20: mol_type = other DNA
gaccatgaaggacccagagg

SEQ ID NO: 17016 - DNA, 20 bp, synthetic construct
  misc_feature 1..20: note = Description of Artificial Sequence: Synthetic oligonucleotide
  misc_feature 1..20: note = Target: SCN10A; (-) strand; PAM type: NRG; PAM sequence: AGG
  source 1..20: mol_type = other DNA
ttggaccatgaaggacccag

SEQ ID NO: 17017 - DNA, 20 bp, synthetic construct
  misc_feature 1..20: note = Description of Artificial Sequence: Synthetic oligonucleotide
  misc_feature 1..20: note = Target: SCN10A; (-) strand; PAM type: NRG; PAM sequence: GAG
  source 1..20: mol_type = other DNA
tttggaccatgaaggaccca

SEQ ID NO: 17018 - DNA, 20 bp, synthetic construct
  misc_feature 1..20: note = Description of Artificial Sequence: Synthetic oligonucleotide
  misc_feature 1..20: note = Target: SCN10A; (-) strand; PAM type: NRG; PAM sequence: CAG
  source 1..20: mol_type = other DNA
gatttggaccatgaaggacc

SEQ ID NO: 17019 - DNA, 20 bp, synthetic construct
  misc_feature 1..20: note = Description of Artificial Sequence: Synthetic oligonucleotide
  misc_feature 1..20: note = Target: SCN10A; (-) strand; PAM type: NRG; PAM sequence: AGG
  source 1..20: mol_type = other DNA
actcttgatttggaccatga

SEQ ID NO: 17020 - DNA, 20 bp, synthetic construct
  misc_feature 1..20: note = Description of Artificial Sequence: Synthetic oligonucleotide
  misc_feature 1..20: note = Target: SCN10A; (-) strand; PAM type: NRG; PAM sequence: AAG
  source 1..20: mol_type = other DNA
aactcttgatttggaccatg

SEQ ID NO: 17021 - DNA, 20 bp, synthetic construct
  misc_feature 1..20: note = Description of Artificial Sequence: Synthetic oligonucleotide
  misc_feature 1..20: note = Target: SCN10A; (-) strand; PAM type: NRG; PAM sequence: TGG
  source 1..20: mol_type = other DNA
accactgaaaactcttgatt

SEQ ID NO: 17022 - DNA, 20 bp, synthetic construct
  misc_feature 1..20: note = Description of Artificial Sequence: Synthetic oligonucleotide
  misc_feature 1..20: note = Target: SCN10A; (-) strand; PAM type: NRG; PAM sequence: TAG
  source 1..20: mol_type = other DNA
tgagttgaaagggggaaacg

SEQ ID NO: 17023 - DNA, 20 bp, synthetic construct
  misc_feature 1..20: note = Description of Artificial Sequence: Synthetic oligonucleotide
  misc_feature 1..20: note = Target: SCN10A; (-) strand; PAM type: NRG; PAM sequence: GGG
  source 1..20: mol_type = other DNA
agccctcttgagttgaaagg

SEQ ID NO: 17024 - DNA, 20 bp, synthetic construct
  misc_feature 1..20: note = Description of Artificial Sequence: Synthetic oligonucleotide
  misc_feature 1..20: note = Target: SCN10A; (-) strand; PAM type: NRG; PAM sequence: GGG
  source 1..20: mol_type = other DNA
cagccctcttgagttgaaag

SEQ ID NO: 17025 - DNA, 20 bp, synthetic construct
  misc_feature 1..20: note = Description of Artificial Sequence: Synthetic oligonucleotide
  misc_feature 1..20: note = Target: SCN10A; (-) strand; PAM type: NRG; PAM sequence: GGG
  source 1..20: mol_type = other DNA
ccagccctcttgagttgaaa

SEQ ID NO: 17026 - DNA, 20 bp, synthetic construct
  misc_feature 1..20: note = Description of Artificial Sequence: Synthetic oligonucleotide
  misc_feature 1..20: note = Target: SCN10A; (-) strand; PAM type: NRG; PAM sequence: AGG
  source 1..20: mol_type = other DNA
accagccctcttgagttgaa

SEQ ID NO: 17027 - DNA, 20 bp, synthetic construct
  misc_feature 1..20: note = Description of Artificial Sequence: Synthetic oligonucleotide
  misc_feature 1..20: note = Target: SCN10A; (-) strand; PAM type: NRG; PAM sequence: AAG
  source 1..20: mol_type = other DNA
aaccagccctcttgagttga

SEQ ID NO: 17028 - DNA, 20 bp, synthetic construct
  misc_feature 1..20: note = Description of Artificial Sequence: Synthetic oligonucleotide
  misc_feature 1..20: note = Target: SCN10A; (-) strand; PAM type: NRG; PAM sequence: GAG
  source 1..20: mol_type = other DNA
agttctaaaccagccctctt

SEQ ID NO: 17029 - DNA, 20 bp, synthetic construct
  misc_feature 1..20: note = Description of Artificial Sequence: Synthetic oligonucleotide
  misc_feature 1..20: note = Target: SCN10A; (-) strand; PAM type: NRG; PAM sequence: CAG
  source 1..20: mol_type = other DNA
cccctccgtgagttctaaac

SEQ ID NO: 17030 - DNA, 20 bp, synthetic construct
  misc_feature 1..20: note = Description of Artificial Sequence: Synthetic oligonucleotide
  misc_feature 1..20: note = Target: SCN10A; (-) strand; PAM type: NRG; PAM sequence: GAG
  source 1..20: mol_type = other DNA
accctcaaaaacccctccgt

SEQ ID NO: 17031 - DNA, 20 bp, synthetic construct
  misc_feature 1..20: note = Description of Artificial Sequence: Synthetic oligonucleotide
  misc_feature 1..20: note = Target: SCN10A; (-) strand; PAM type: NRG; PAM sequence: GGG
  source 1..20: mol_type = other DNA
cagacactacggagagacgt

SEQ ID NO: 17032 - DNA, 20 bp, synthetic construct
  misc_feature 1..20: note = Description of Artificial Sequence: Synthetic oligonucleotide
  misc_feature 1..20: note = Target: SCN10A; (-) strand; PAM type: NRG; PAM sequence: TGG
  source 1..20: mol_type = other DNA
tcagacactacggagagacg

SEQ ID NO: 17033 - DNA, 20 bp, synthetic construct
  misc_feature 1..20: note = Description of Artificial Sequence: Synthetic oligonucleotide
  misc_feature 1..20: note = Target: SCN10A; (-) strand; PAM type: NRG; PAM sequence: GAG
  source 1..20: mol_type = other DNA
gccctatcagacactacgga

SEQ ID NO: 17034 - DNA, 20 bp, synthetic construct
  misc_feature 1..20: note = Description of Artificial Sequence: Synthetic oligonucleotide
  misc_feature 1..20: note = Target: SCN10A; (-) strand; PAM type: NRG; PAM sequence: GAG
  source 1..20: mol_type = other DNA
atgccctatcagacactacg

SEQ ID NO: 17035 - DNA, 20 bp, synthetic construct
  misc_feature 1..20: note = Description of Artificial Sequence: Synthetic oligonucleotide
  misc_feature 1..20: note = Target: SCN10A; (-) strand; PAM type: NRG; PAM sequence: CGG
  source 1..20: mol_type = other DNA
tcatgccctatcagacacta

SEQ ID NO: 17036 - DNA, 20 bp, synthetic construct
  misc_feature 1..20: note = Description of Artificial Sequence: Synthetic oligonucleotide
  misc_feature 1..20: note = Target: SCN10A; (-) strand; PAM type: NRG; PAM sequence: CAG
  source 1..20: mol_type = other DNA
atctgcatctcatgccctat

SEQ ID NO: 17037 - DNA, 20 bp, synthetic construct
  misc_feature 1..20: note = Description of Artificial Sequence: Synthetic oligonucleotide
  misc_feature 1..20: note = Target: SCN10A; (-) strand; PAM type: NRG; PAM sequence: TGG
  source 1..20: mol_type = other DNA
aggtggcagcagcctggccg

SEQ ID NO: 17038 - DNA, 20 bp, synthetic construct
  misc_feature 1..20: note = Description of Artificial Sequence: Synthetic oligonucleotide
  misc_feature 1..20: note = Target: SCN10A; (-) strand; PAM type: NRG; PAM sequence: TGG
  source 1..20: mol_type = other DNA
tgccccaggtggcagcagcc

SEQ ID NO: 17039 - DNA, 20 bp, synthetic construct
  misc_feature 1..20: note = Description of Artificial Sequence: Synthetic oligonucleotide
  misc_feature 1..20: note = Target: SCN10A; (-) strand; PAM type: NRG; PAM sequence: CAG
  source 1..20: mol_type = other DNA
acacatgccccaggtggcag

SEQ ID NO: 17040 - DNA, 20 bp, synthetic construct
  misc_feature 1..20: note = Description of Artificial Sequence: Synthetic oligonucleotide
  misc_feature 1..20: note = Target: SCN10A; (-) strand; PAM type: NRG; PAM sequence: CAG
  source 1..20: mol_type = other DNA
gacacacatgccccaggtgg

SEQ ID NO: 17041 - DNA, 20 bp, synthetic construct
  misc_feature 1..20: note = Description of Artificial Sequence: Synthetic oligonucleotide
  misc_feature 1..20: note = Target: SCN10A; (-) strand; PAM type: NRG; PAM sequence: TGG
  source 1..20: mol_type = other DNA
tcagacacacatgccccagg

SEQ ID NO: 17042 - DNA, 20 bp, synthetic construct
  misc_feature 1..20: note = Description of Artificial Sequence: Synthetic oligonucleotide
  misc_feature 1..20: note = Target: SCN10A; (-) strand; PAM type: NRG; PAM sequence: AGG
  source 1..20: mol_type = other DNA
gcatcagacacacatgcccc

SEQ ID NO: 17043 - DNA, 20 bp, synthetic construct
  misc_feature 1..20: note = Description of Artificial Sequence: Synthetic oligonucleotide
  misc_feature 1..20: note = Target: SCN10A; (-) strand; PAM type: NRG; PAM sequence: CAG
  source 1..20: mol_type = other DNA
cgcatcagacacacatgccc

SEQ ID NO: 17044 - DNA, 20 bp, synthetic construct
  misc_feature 1..20: note = Description of Artificial Sequence: Synthetic oligonucleotide
  misc_feature 1..20: note = Target: SCN10A; (-) strand; PAM type: NRG; PAM sequence: CAG
  source 1..20: mol_type = other DNA
aggcttgagggcgcccgcat

SEQ ID NO: 17045 - DNA, 20 bp, synthetic construct
  misc_feature 1..20: note = Description of Artificial Sequence: Synthetic oligonucleotide
  misc_feature 1..20: note = Target: SCN10A; (-) strand; PAM type: NRG; PAM sequence: GGG
  source 1..20: mol_type = other DNA
tgcctcactcccaggcttga

SEQ ID NO: 17046 - DNA, 20 bp, synthetic construct
  misc_feature 1..20: note = Description of Artificial Sequence: Synthetic oligonucleotide
  misc_feature 1..20: note = Target: SCN10A; (-) strand; PAM type: NRG; PAM sequence: AGG
  source 1..20: mol_type = other DNA
ctgcctcactcccaggcttg

SEQ ID NO: 17047 - DNA, 20 bp, synthetic construct
  misc_feature 1..20: note = Description of Artificial Sequence: Synthetic oligonucleotide
  misc_feature 1..20: note = Target: SCN10A; (-) strand; PAM type: NRG; PAM sequence: GAG
  source 1..20: mol_type = other DNA
gctgcctcactcccaggctt

SEQ ID NO: 17048 - DNA, 20 bp, synthetic construct
  misc_feature 1..20: note = Description of Artificial Sequence: Synthetic oligonucleotide
  misc_feature 1..20: note = Target: SCN10A; (-) strand; PAM type: NRG; PAM sequence: AGG
  source 1..20: mol_type = other DNA
ccacttgctgcctcactccc

SEQ ID NO: 17049 - DNA, 20 bp, synthetic construct
  misc_feature 1..20: note = Description of Artificial Sequence: Synthetic oligonucleotide
  misc_feature 1..20: note = Target: SCN10A; (-) strand; PAM type: NRG; PAM sequence: CAG
  source 1..20: mol_type = other DNA
cccacttgctgcctcactcc

SEQ ID NO: 17050 - DNA, 20 bp, synthetic construct
  misc_feature 1..20: note = Description of Artificial Sequence: Synthetic oligonucleotide
  misc_feature 1..20: note = Target: SCN10A; (-) strand; PAM type: NRG; PAM sequence: AAG
  source 1..20: mol_type = other DNA
gggatccacagaagacaaac

SEQ ID NO: 17051 - DNA, 20 bp, synthetic construct
  misc_feature 1..20: note = Description of Artificial Sequence: Synthetic oligonucleotide
  misc_feature 1..20: note = Target: SCN10A; (-) strand; PAM type: NRG; PAM sequence: AAG
  source 1..20: mol_type = other DNA
cactcacctgggatccacag

SEQ ID NO: 17052 - DNA, 20 bp, synthetic construct
  misc_feature 1..20: note = Description of Artificial Sequence: Synthetic oligonucleotide
  misc_feature 1..20: note = Target: SCN10A; (-) strand; PAM type: NRG; PAM sequence: CAG
  source 1..20: mol_type = other DNA
gaacactcacctgggatcca

SEQ ID NO: 17053 - DNA, 20 bp, synthetic construct
  misc_feature 1..20: note = Description of Artificial Sequence: Synthetic oligonucleotide
  misc_feature 1..20: note = Target: SCN10A; (-) strand; PAM type: NRG; PAM sequence: GGG
  source 1..20: mol_type = other DNA
agttgagcgaacactcacct

SEQ ID NO: 17054 - DNA, 20 bp, synthetic construct
  misc_feature 1..20: note = Description of Artificial Sequence: Synthetic oligonucleotide
  misc_feature 1..20: note = Target: SCN10A; (-) strand; PAM type: NRG; PAM sequence: TGG
  source 1..20: mol_type = other DNA
cagttgagcgaacactcacc

SEQ ID NO: 17055 - DNA, 20 bp, synthetic construct
  misc_feature 1..20: note = Description of Artificial Sequence: Synthetic oligonucleotide
  misc_feature 1..20: note = Target: SCN10A; (-) strand; PAM type: NRG; PAM sequence: GAG
  source 1..20: mol_type = other DNA
attagggccagaatccagtt

SEQ ID NO: 17056 - DNA, 20 bp, synthetic construct
  misc_feature 1..20: note = Description of Artificial Sequence: Synthetic oligonucleotide
  misc_feature 1..20: note = Target: SCN10A; (-) strand; PAM type: NRG; PAM sequence: CAG
  source 1..20: mol_type = other DNA
tgttaattagggccagaatc

SEQ ID NO: 17057 - DNA, 20 bp, synthetic construct
  misc_feature 1..20: note = Description of Artificial Sequence: Synthetic oligonucleotide
  misc_feature 1..20: note = Target: SCN10A; (-) strand; PAM type: NRG; PAM sequence: CAG
  source 1..20: mol_type = other DNA
acactgatgttaattagggc

SEQ ID NO: 17058 - DNA, 20 bp, synthetic construct
  misc_feature 1..20: note = Description of Artificial Sequence: Synthetic oligonucleotide
  misc_feature 1..20: note = Target: SCN10A; (-) strand; PAM type: NRG; PAM sequence: GGG
  source 1..20: mol_type = other DNA
cctcacactgatgttaatta

SEQ ID NO: 17059 - DNA, 20 bp, synthetic construct
  misc_feature 1..20: note = Description of Artificial Sequence: Synthetic oligonucleotide
  misc_feature 1..20: note = Target: SCN10A; (-) strand; PAM type: NRG; PAM sequence: AGG
  source 1..20: mol_type = other DNA
ccctcacactgatgttaatt

SEQ ID NO: 17060 - DNA, 20 bp, synthetic construct
  misc_feature 1..20: note = Description of Artificial Sequence: Synthetic oligonucleotide
  misc_feature 1..20: note = Target: SCN10A; (-) strand; PAM type: NRG; PAM sequence: TAG
  source 1..20: mol_type = other DNA
cccctcacactgatgttaat

SEQ ID NO: 17061 - DNA, 20 bp, synthetic construct
  misc_feature 1..20: note = Description of Artificial Sequence: Synthetic oligonucleotide
  misc_feature 1..20: note = Target: SCN10A; (-) strand; PAM type: NRG; PAM sequence: AGG
  source 1..20: mol_type = other DNA
gaaggtgaagggacagccac

SEQ ID NO: 17062 - DNA, 20 bp, synthetic construct
  misc_feature 1..20: note = Description of Artificial Sequence: Synthetic oligonucleotide
  misc_feature 1..20: note = Target: SCN10A; (-) strand; PAM type: NRG; PAM sequence: CAG
  source 1..20: mol_type = other DNA
agaaggtgaagggacagcca

SEQ ID NO: 17063 - DNA, 20 bp, synthetic construct
  misc_feature 1..20: note = Description of Artificial Sequence: Synthetic oligonucleotide
  misc_feature 1..20: note = Target: SCN10A; (-) strand; PAM type: NRG; PAM sequence: CAG
  source 1..20: mol_type = other DNA
cttcacagaaggtgaaggga

SEQ ID NO: 17064 - DNA, 20 bp, synthetic construct
  misc_feature 1..20: note = Description of Artificial Sequence: Synthetic oligonucleotide
  misc_feature 1..20: note = Target: SCN10A; (-) strand; PAM type: NRG; PAM sequence: GGG
  source 1..20: mol_type = other DNA
actgcttcacagaaggtgaa

SEQ ID NO: 17065 - DNA, 20 bp, synthetic construct
  misc_feature 1..20: note = Description of Artificial Sequence: Synthetic oligonucleotide
  misc_feature 1..20: note = Target: SCN10A; (-) strand; PAM type: NRG; PAM sequence: AGG
  source 1..20: mol_type = other DNA
gactgcttcacagaaggtga

SEQ ID NO: 17066 - DNA, 20 bp, synthetic construct
  misc_feature 1..20: note = Description of Artificial Sequence: Synthetic oligonucleotide
  misc_feature 1..20: note = Target: SCN10A; (-) strand; PAM type: NRG; PAM sequence: AAG
  source 1..20: mol_type = other DNA
tgactgcttcacagaaggtg

SEQ ID NO: 17067 - DNA, 20 bp, synthetic construct
  misc_feature 1..20: note = Description of Artificial Sequence: Synthetic oligonucleotide
  misc_feature 1..20: note = Target: SCN10A; (-) strand; PAM type: NRG; PAM sequence: AGG
  source 1..20: mol_type = other DNA
ccagatgactgcttcacaga

SEQ ID NO: 17068 - DNA, 20 bp, synthetic construct
  misc_feature 1..20: note = Description of Artificial Sequence: Synthetic oligonucleotide
  misc_feature 1..20: note = Target: SCN10A; (-) strand; PAM type: NRG; PAM sequence: AAG
  source 1..20: mol_type = other DNA
accagatgactgcttcacag

SEQ ID NO: 17069 - DNA, 20 bp, synthetic construct
  misc_feature 1..20: note = Description of Artificial Sequence: Synthetic oligonucleotide
  misc_feature 1..20: note = Target: SCN10A; (-) strand; PAM type: NRG; PAM sequence: CAG
  source 1..20: mol_type = other DNA
agaaccagatgactgcttca

SEQ ID NO: 17070 - DNA, 20 bp, synthetic construct
  misc_feature 1..20: note = Description of Artificial Sequence: Synthetic oligonucleotide
  misc_feature 1..20: note = Target: SCN10A; (-) strand; PAM type: NRG; PAM sequence: CAG
  source 1..20: mol_type = other DNA
ggcagatgacctggaagaac

SEQ ID NO: 17071 - DNA, 20 bp, synthetic construct
  misc_feature 1..20: note = Description of Artificial Sequence: Synthetic oligonucleotide
  misc_feature 1..20: note = Target: SCN10A; (-) strand; PAM type: NRG; PAM sequence: AAG
  source 1..20: mol_type = other DNA
tgagctggcagatgacctgg

SEQ ID NO: 17072 - DNA, 20 bp, synthetic construct
  misc_feature 1..20: note = Description of Artificial Sequence: Synthetic oligonucleotide
  misc_feature 1..20: note = Target: SCN10A; (-) strand; PAM type: NRG; PAM sequence: TGG
  source 1..20: mol_type = other DNA
ccctgagctggcagatgacc

SEQ ID NO: 17073 - DNA, 20 bp, synthetic construct
  misc_feature 1..20: note = Description of Artificial Sequence: Synthetic oligonucleotide
  misc_feature 1..20: note = Target: SCN10A; (-) strand; PAM type: NRG; PAM sequence: CAG
  source 1..20: mol_type = other DNA
gaggaagatccctgagctgg

SEQ ID NO: 17074 - DNA, 20 bp, synthetic construct
  misc_feature 1..20: note = Description of Artificial Sequence: Synthetic oligonucleotide
  misc_feature 1..20: note = Target: SCN10A; (-) strand; PAM type: NRG; PAM sequence: TGG
  source 1..20: mol_type = other DNA
cctgaggaagatccctgagc

SEQ ID NO: 17075 - DNA, 20 bp, synthetic construct
  misc_feature 1..20: note = Description of Artificial Sequence: Synthetic oligonucleotide
  misc_feature 1..20: note = Target: SCN10A; (-) strand; PAM type: NRG; PAM sequence: GAG
  source 1..20: mol_type = other DNA
aaatcctgaggaagatccct

SEQ ID NO: 17076 - DNA, 20 bp, synthetic construct
  misc_feature 1..20: note = Description of Artificial Sequence: Synthetic oligonucleotide
  misc_feature 1..20: note = Target: SCN10A; (-) strand; PAM type: NRG; PAM sequence: AAG
  source 1..20: mol_type = other DNA
atcctgaggaaatcctgagg

SEQ ID NO: 17077 - DNA, 20 bp, synthetic construct
  misc_feature 1..20: note = Description of Artificial Sequence: Synthetic oligonucleotide
  misc_feature 1..20: note = Target: SCN10A; (-) strand; PAM type: NRG; PAM sequence: AGG
  source 1..20: mol_type = other DNA
tagatcctgaggaaatcctg

SEQ ID NO: 17078 - DNA, 20 bp, synthetic construct
  misc_feature 1..20: note = Description of Artificial Sequence: Synthetic oligonucleotide
  misc_feature 1..20: note = Target: SCN10A; (-) strand; PAM type: NRG; PAM sequence: GAG
  source 1..20: mol_type = other DNA
ctagatcctgaggaaatcct

SEQ ID NO: 17079 - DNA, 20 bp, synthetic construct
  misc_feature 1..20: note = Description of Artificial Sequence: Synthetic oligonucleotide
  misc_feature 1..20: note = Target: SCN10A; (-) strand; PAM type: NRG; PAM sequence: AGG
  source 1..20: mol_type = other DNA
ggtggactgcctagatcctg

SEQ ID NO: 17080 - DNA, 20 bp, synthetic construct
  misc_feature 1..20: note = Description of Artificial Sequence: Synthetic oligonucleotide
  misc_feature 1..20: note = Target: SCN10A; (-) strand; PAM type: NRG; PAM sequence: GAG
  source 1..20: mol_type = other DNA
cggtggactgcctagatcct

SEQ ID NO: 17081 - DNA, 20 bp, synthetic construct
  misc_feature 1..20: note = Description of Artificial Sequence: Synthetic oligonucleotide
  misc_feature 1..20: note = Target: SCN10A; (-) strand; PAM type: NRG; PAM sequence: TAG
  source 1..20: mol_type = other DNA
gggcagcacggtggactgcc

SEQ ID NO: 17082 - DNA, 20 bp, synthetic construct
  misc_feature 1..20: note = Description of Artificial Sequence: Synthetic oligonucleotide
  misc_feature 1..20: note = Target: SCN10A; (-) strand; PAM type: NRG; PAM sequence: TGG
  source 1..20: mol_type = other DNA
ctcctctgagggcagcacgg

SEQ ID NO: 17083 - DNA, 20 bp, synthetic construct
  misc_feature 1..20: note = Description of Artificial Sequence: Synthetic oligonucleotide
  misc_feature 1..20: note = Target: SCN10A; (-) strand; PAM type: NRG; PAM sequence: CGG
  source 1..20: mol_type = other DNA
aagctcctctgagggcagca

SEQ ID NO: 17084 - DNA, 20 bp, synthetic construct
  misc_feature 1..20: note = Description of Artificial Sequence: Synthetic oligonucleotide
  misc_feature 1..20: note = Target: SCN10A; (-) strand; PAM type: NRG; PAM sequence: CAG
  source 1..20: mol_type = other DNA
gacacaagctcctctgaggg

SEQ ID NO: 17085 - DNA, 20 bp, synthetic construct
  misc_feature 1..20: note = Description of Artificial Sequence: Synthetic oligonucleotide
  misc_feature 1..20: note = Target: SCN10A; (-) strand; PAM type: NRG; PAM sequence: GGG
  source 1..20: mol_type = other DNA
gacgacacaagctcctctga

SEQ ID NO: 17086 - DNA, 20 bp, synthetic construct
  misc_feature 1..20: note = Description of Artificial Sequence: Synthetic oligonucleotide
  misc_feature 1..20: note = Target: SCN10A; (-) strand; PAM type: NRG; PAM sequence: AGG
  source 1..20: mol_type = other DNA
ggacgacacaagctcctctg

SEQ ID NO: 17087 - DNA, 20 bp, synthetic construct
  misc_feature 1..20: note = Description of Artificial Sequence: Synthetic oligonucleotide
  misc_feature 1..20: note = Target: SCN10A; (-) strand; PAM type: NRG; PAM sequence: GAG
  source 1..20: mol_type = other DNA
tggacgacacaagctcctct

SEQ ID NO: 17088 - DNA, 20 bp, synthetic construct
  misc_feature 1..20: note = Description of Artificial Sequence: Synthetic oligonucleotide
  misc_feature 1..20: note = Target: SCN10A; (-) strand; PAM type: NRG; PAM sequence: AAG
  source 1..20: mol_type = other DNA
ctgcagggagtggacgacac

SEQ ID NO: 17089 - DNA, 20 bp, synthetic construct
  misc_feature 1..20: note = Description of Artificial Sequence: Synthetic oligonucleotide
  misc_feature 1..20: note = Target: SCN10A; (-) strand; PAM type: NRG; PAM sequence: TGG
  source 1..20: mol_type = other DNA
ggcttctcccctgcagggag

SEQ ID NO: 17090 - DNA, 20 bp, synthetic construct
  misc_feature 1..20: note = Description of Artificial Sequence: Synthetic oligonucleotide
  misc_feature 1..20: note = Target: SCN10A; (-) strand; PAM type: NRG; PAM sequence: GAG
  source 1..20: mol_type = other DNA
ctgggcttctcccctgcagg

SEQ ID NO: 17091 - DNA, 20 bp, synthetic construct
  misc_feature 1..20: note = Description of Artificial Sequence: Synthetic oligonucleotide
  misc_feature 1..20: note = Target: SCN10A; (-) strand; PAM type: NRG; PAM sequence: GGG
  source 1..20: mol_type = other DNA
ccctgggcttctcccctgca

SEQ ID NO: 17092 - DNA, 20 bp, synthetic construct
  misc_feature 1..20: note = Description of Artificial Sequence: Synthetic oligonucleotide
  misc_feature 1..20: note = Target: SCN10A; (-) strand; PAM type: NRG; PAM sequence: AGG
  source 1..20: mol_type = other DNA
gccctgggcttctcccctgc

SEQ ID NO: 17093 - DNA, 20 bp, synthetic construct
  misc_feature 1..20: note = Description of Artificial Sequence: Synthetic oligonucleotide
  misc_feature 1..20: note = Target: SCN10A; (-) strand; PAM type: NRG; PAM sequence: CAG
  source 1..20: mol_type = other DNA
tgccctgggcttctcccctg

SEQ ID NO: 17094 - DNA, 20 bp, synthetic construct
  misc_feature 1..20: note = Description of Artificial Sequence: Synthetic oligonucleotide
  misc_feature 1..20: note = Target: SCN10A; (-) strand; PAM type: NRG; PAM sequence: GGG
  source 1..20: mol_type = other DNA
agagacgagttcactgccct

SEQ ID NO: 17095 - DNA, 20 bp, synthetic construct
  misc_feature 1..20: note = Description of Artificial Sequence: Synthetic oligonucleotide
  misc_feature 1..20: note = Target: SCN10A; (-) strand; PAM type: NRG; PAM sequence: TGG
  source 1..20: mol_type = other DNA
gagagacgagttcactgccc

SEQ ID NO: 17096 - DNA, 20 bp, synthetic construct
  misc_feature 1..20: note = Description of Artificial Sequence: Synthetic oligonucleotide
  misc_feature 1..20: note = Target: SCN10A; (-) strand; PAM type: NRG; PAM sequence: GAG
  source 1..20: mol_type = other DNA
cccgggccccgcggagagac

SEQ ID NO: 17097 - DNA, 20 bp, synthetic construct
  misc_feature 1..20: note = Description of Artificial Sequence: Synthetic oligonucleotide
  misc_feature 1..20: note = Target: SCN10A; (-) strand; PAM type: NRG; PAM sequence: GAG
  source 1..20: mol_type = other DNA
aattccccgggccccgcgga

SEQ ID NO: 17098 - DNA, 20 bp, synthetic construct
  misc_feature 1..20: note = Description of Artificial Sequence: Synthetic oligonucleotide
  misc_feature 1..20: note = Target: SCN10A; (-) strand; PAM type: NRG; PAM sequence: GAG
  source 1..20: mol_type = other DNA
gcaattccccgggccccgcg

SEQ ID NO: 17099 - DNA, 20 bp, synthetic construct
  misc_feature 1..20: note = Description of Artificial Sequence: Synthetic oligonucleotide
  misc_feature 1..20: note = Target: SCN10A; (-) strand; PAM type: NRG; PAM sequence: CGG
  source 1..20: mol_type = other DNA
gtgcaattccccgggccccg

SEQ ID NO: 17100 - DNA, 20 bp, synthetic construct
  misc_feature 1..20: note = Description of Artificial Sequence: Synthetic oligonucleotide
  misc_feature 1..20: note = Target: SCN10A; (-) strand; PAM type: NRG; PAM sequence: GGG
  source 1..20: mol_type = other DNA
gtgaccgtgtgcaattcccc

SEQ ID NO: 17101 - DNA, 20 bp, synthetic construct
  misc_feature 1..20: note = Description of Artificial Sequence: Synthetic oligonucleotide
  misc_feature 1..20: note = Target: SCN10A; (-) strand; PAM type: NRG; PAM sequence: CGG
  source 1..20: mol_type = other DNA
agtgaccgtgtgcaattccc

SEQ ID NO: 17102 - DNA, 20 bp, synthetic construct
  misc_feature 1..20: note = Description of Artificial Sequence: Synthetic oligonucleotide
  misc_feature 1..20: note = Target: SCN10A; (-) strand; PAM type: NRG; PAM sequence: CAG
  source 1..20: mol_type = other DNA
catgggtgcagttgaacctg

SEQ ID NO: 17103 - DNA, 20 bp, synthetic construct
  misc_feature 1..20: note = Description of Artificial Sequence: Synthetic oligonucleotide
  misc_feature 1..20: note = Target: SCN10A; (-) strand; PAM type: NRG; PAM sequence: CAG
  source 1..20: mol_type = other DNA
cgaggcaccaaacatgggtg

SEQ ID NO: 17104 - DNA, 20 bp, synthetic construct
  misc_feature 1..20: note = Description of Artificial Sequence: Synthetic oligonucleotide
  misc_feature 1..20: note = Target: SCN10A; (-) strand; PAM type: NRG; PAM sequence: GGG
  source 1..20: mol_type = other DNA
gctggcgaggcaccaaacat

SEQ ID NO: 17105 - DNA, 20 bp, synthetic construct
  misc_feature 1..20: note = Description of Artificial Sequence: Synthetic oligonucleotide
  misc_feature 1..20: note = Target: SCN10A; (-) strand; PAM type: NRG; PAM sequence: TGG
  source 1..20: mol_type = other DNA
agctggcgaggcaccaaaca

SEQ ID NO: 17106 - DNA, 20 bp, synthetic construct
  misc_feature 1..20: note = Description of Artificial Sequence: Synthetic oligonucleotide
  misc_feature 1..20: note = Target: SCN10A; (-) strand; PAM type: NRG; PAM sequence: AGG
  source 1..20: mol_type = other DNA
gttccaggcctcagctggcg

SEQ ID NO: 17107 - DNA, 20 bp, synthetic construct
  misc_feature 1..20: note = Description of Artificial Sequence: Synthetic oligonucleotide
  misc_feature 1..20: note = Target: SCN10A; (-) strand; PAM type: NRG; PAM sequence: GAG
  source 1..20: mol_type = other DNA
tgttccaggcctcagctggc

SEQ ID NO: 17108 - DNA, 20 bp, synthetic construct
  misc_feature 1..20: note = Description of Artificial Sequence: Synthetic oligonucleotide
  misc_feature 1..20: note = Target: SCN10A; (-) strand; PAM type: NRG; PAM sequence: TGG
  source 1..20: mol_type = other DNA
gcagtgttccaggcctcagc

SEQ ID NO: 17109 - DNA, 20 bp, synthetic construct
  misc_feature 1..20: note = Description of Artificial Sequence: Synthetic oligonucleotide
  misc_feature 1..20: note = Target: SCN10A; (-) strand; PAM type: NRG; PAM sequence: CAG
  source 1..20: mol_type = other DNA
aagagcagtgttccaggcct

SEQ ID NO: 17110 - DNA, 20 bp, synthetic construct
  misc_feature 1..20: note = Description of Artificial Sequence: Synthetic oligonucleotide
  misc_feature 1..20: note = Target: SCN10A; (-) strand; PAM type: NRG; PAM sequence: AGG
  source 1..20: mol_type = other DNA
agggagaagagcagtgttcc

SEQ ID NO: 17111 - DNA, 20 bp, synthetic construct
  misc_feature 1..20: note = Description of Artificial Sequence: Synthetic oligonucleotide
  misc_feature 1..20: note = Target: SCN10A; (-) strand; PAM type: NRG; PAM sequence: CAG
  source 1..20: mol_type = other DNA
cagggagaagagcagtgttc

SEQ ID NO: 17112 - DNA, 20 bp, synthetic construct
  misc_feature 1..20: note = Description of Artificial Sequence: Synthetic oligonucleotide
  misc_feature 1..20: note = Target: SCN10A; (-) strand; PAM type: NRG; PAM sequence: CAG
  source 1..20: mol_type = other DNA
tggggctccagggagaagag

SEQ ID NO: 17113 - DNA, 20 bp, synthetic construct
  misc_feature 1..20: note = Description of Artificial Sequence: Synthetic oligonucleotide
  misc_feature 1..20: note = Target: SCN10A; (-) strand; PAM type: NRG; PAM sequence: GAG
  source 1..20: mol_type = other DNA
ctctggggctccagggagaa

SEQ ID NO: 17114 - DNA, 20 bp, synthetic construct
  misc_feature 1..20: note = Description of Artificial Sequence: Synthetic oligonucleotide
  misc_feature 1..20: note = Target: SCN10A; (-) strand; PAM type: NRG; PAM sequence: AAG
  source 1..20: mol_type = other DNA
gcctctggggctccagggag

SEQ ID NO: 17115 - DNA, 20 bp, synthetic construct
  misc_feature 1..20: note = Description of Artificial Sequence: Synthetic oligonucleotide
  misc_feature 1..20: note = Target: SCN10A; (-) strand; PAM type: NRG; PAM sequence: GAG
  source 1..20: mol_type = other DNA
taagcctctggggctccagg

SEQ ID NO: 17116 - DNA, 20 bp, synthetic construct
  misc_feature 1..20: note = Description of Artificial Sequence: Synthetic oligonucleotide
  misc_feature 1..20: note = Target: SCN10A; (-) strand; PAM type: NRG; PAM sequence: GGG
  source 1..20: mol_type = other DNA
gctaagcctctggggctcca

SEQ ID NO: 17117 - DNA, 20 bp, synthetic construct
  misc_feature 1..20: note = Description of Artificial Sequence: Synthetic oligonucleotide
  misc_feature 1..20: note = Target: SCN10A; (-) strand; PAM type: NRG; PAM sequence: AGG
  source 1..20: mol_type = other DNA
agctaagcctctggggctcc

SEQ ID NO: 17118 - DNA, 20 bp, synthetic construct
  misc_feature 1..20: note = Description of Artificial Sequence: Synthetic oligonucleotide
  misc_feature 1..20: note = Target: SCN10A; (-) strand; PAM type: NRG; PAM sequence: CAG
  source 1..20: mol_type = other DNA
cagctaagcctctggggctc

SEQ ID NO: 17119 - DNA, 20 bp, synthetic construct
  misc_feature 1..20: note = Description of Artificial Sequence: Synthetic oligonucleotide
  misc_feature 1..20: note = Target: SCN10A; (-) strand; PAM type: NRG; PAM sequence: GGG
  source 1..20: mol_type = other DNA
ctcacacagctaagcctctg

SEQ ID NO: 17120 - DNA, 20 bp, synthetic construct
  misc_feature 1..20: note = Description of Artificial Sequence: Synthetic oligonucleotide
  misc_feature 1..20: note = Target: SCN10A; (-) strand; PAM type: NRG; PAM sequence: GGG
  source 1..20: mol_type = other DNA
tctcacacagctaagcctct

SEQ ID NO: 17121 - DNA, 20 bp, synthetic construct
  misc_feature 1..20: note = Description of Artificial Sequence: Synthetic oligonucleotide
  misc_feature 1..20: note = Target: SCN10A; (-) strand; PAM type: NRG; PAM sequence: TGG
  source 1..20: mol_type = other DNA
gtctcacacagctaagcctc

SEQ ID NO: 17122 - DNA, 20 bp, synthetic construct
  misc_feature 1..20: note = Description of Artificial Sequence: Synthetic oligonucleotide
  misc_feature 1..20: note = Target: SCN10A; (-) strand; PAM type: NRG; PAM sequence: AAG
  source 1..20: mol_type = other DNA
gtttacagtctcacacagct

SEQ ID NO: 17123 - DNA, 20 bp, synthetic construct
  misc_feature 1..20: note = Description of Artificial Sequence: Synthetic oligonucleotide
  misc_feature 1..20: note = Target: SCN10A; (-) strand; PAM type: NRG; PAM sequence: CAG
  source 1..20: mol_type = other DNA
cgaaggtttacagtctcaca

SEQ ID NO: 17124 - DNA, 20 bp, synthetic construct
  misc_feature 1..20: note = Description of Artificial Sequence: Synthetic oligonucleotide
  misc_feature 1..20: note = Target: SCN10A; (-) strand; PAM type: NRG; PAM sequence: CAG
  source 1..20: mol_type = other DNA
tcaggggccccgaaggttta

SEQ ID NO: 17125 - DNA, 20 bp, synthetic construct
  misc_feature 1..20: note = Description of Artificial Sequence: Synthetic oligonucleotide
  misc_feature 1..20: note = Target: SCN10A; (-) strand; PAM type: NRG; PAM sequence: AGG
  source 1..20: mol_type = other DNA
cactccatcaggggccccga

SEQ ID NO: 17126 - DNA, 20 bp, synthetic construct
  misc_feature 1..20: note = Description of Artificial Sequence: Synthetic oligonucleotide
  misc_feature 1..20: note = Target: SCN10A; (-) strand; PAM type: NRG; PAM sequence: AAG
  source 1..20: mol_type = other DNA
gcactccatcaggggccccg

SEQ ID NO: 17127 - DNA, 20 bp, synthetic construct
  misc_feature 1..20: note = Description of Artificial Sequence: Synthetic oligonucleotide
  misc_feature 1..20: note = Target: SCN10A; (-) strand; PAM type: NRG; PAM sequence: GGG
  source 1..20: mol_type = other DNA
cattgccagcactccatcag

SEQ ID NO: 17128 - DNA, 20 bp, synthetic construct
  misc_feature 1..20: note = Description of Artificial Sequence: Synthetic oligonucleotide
  misc_feature 1..20: note = Target: SCN10A; (-) strand; PAM type: NRG; PAM sequence: GGG
  source 1..20: mol_type = other DNA
ccattgccagcactccatca

SEQ ID NO: 17129 - DNA, 20 bp, synthetic construct
  misc_feature 1..20: note = Description of Artificial Sequence: Synthetic oligonucleotide
  misc_feature 1..20: note = Target: SCN10A; (-) strand; PAM type: NRG; PAM sequence: AGG
  source 1..20: mol_type = other DNA
gccattgccagcactccatc

SEQ ID NO: 17130 - DNA, 20 bp, synthetic construct
  misc_feature 1..20: note = Description of Artificial Sequence: Synthetic oligonucleotide
  misc_feature 1..20: note = Target: SCN10A; (-) strand; PAM type: NRG; PAM sequence: CAG
  source 1..20: mol_type = other DNA
ggccattgccagcactccat

SEQ ID NO: 17131 - DNA, 20 bp, synthetic construct
  misc_feature 1..20: note = Description of Artificial Sequence: Synthetic oligonucleotide
  misc_feature 1..20: note = Target: SCN10A; (-) strand; PAM type: NRG; PAM sequence: CAG
  source 1..20: mol_type = other DNA
acggtgtctcgggccattgc

SEQ ID NO: 17132 - DNA, 20 bp, synthetic construct
  misc_feature 1..20: note = Description of Artificial Sequence: Synthetic oligonucleotide
  misc_feature 1..20: note = Target: SCN10A; (-) strand; PAM type: NRG; PAM sequence: GGG
  source 1..20: mol_type = other DNA
gggtgtaattacggtgtctc

SEQ ID NO: 17133 - DNA, 20 bp, synthetic construct
  misc_feature 1..20: note = Description of Artificial Sequence: Synthetic oligonucleotide
  misc_feature 1..20: note = Target: SCN10A; (-) strand; PAM type: NRG; PAM sequence: CGG
  source 1..20: mol_type = other DNA
tgggtgtaattacggtgtct

SEQ ID NO: 17134 - DNA, 20 bp, synthetic construct
  misc_feature 1..20: note = Description of Artificial Sequence: Synthetic oligonucleotide
  misc_feature 1..20: note = Target: SCN10A; (-) strand; PAM type: NRG; PAM sequence: CGG
  source 1..20: mol_type = other DNA
agtcgttatgggtgtaatta

SEQ ID NO: 17135 - DNA, 20 bp, synthetic construct
  misc_feature 1..20: note = Description of Artificial Sequence: Synthetic oligonucleotide
  misc_feature 1..20: note = Target: SCN10A; (-) strand; PAM type: NRG; PAM sequence: GGG
  source 1..20: mol_type = other DNA
tgaatgctgagagtcgttat

SEQ ID NO: 17136 - DNA, 20 bp, synthetic construct
  misc_feature 1..20: note = Description of Artificial Sequence: Synthetic oligonucleotide
  misc_feature 1..20: note = Target: SCN10A; (-) strand; PAM type: NRG; PAM sequence: TGG
  source 1..20: mol_type = other DNA
gtgaatgctgagagtcgtta

SEQ ID NO: 17137 - DNA, 20 bp, synthetic construct
  misc_feature 1..20: note = Description of Artificial Sequence: Synthetic oligonucleotide
  misc_feature 1..20: note = Target: SCN10A; (-) strand; PAM type: NRG; PAM sequence: GAG
  source 1..20: mol_type = other DNA
tcaagcccagtgaatgctga

SEQ ID NO: 17138 - DNA, 20 bp, synthetic construct
  misc_feature 1..20: note = Description of Artificial Sequence: Synthetic oligonucleotide
  misc_feature 1..20: note = Target: SCN10A; (-) strand; PAM type: NRG; PAM sequence: GAG
  source 1..20: mol_type = other DNA
attcaagcccagtgaatgct

SEQ ID NO: 17139 - DNA, 20 bp, synthetic construct
  misc_feature 1..20: note = Description of Artificial Sequence: Synthetic oligonucleotide
  misc_feature 1..20: note = Target: SCN10A; (-) strand; PAM type: NRG; PAM sequence: CAG
  source 1..20: mol_type = other DNA
catgattaaatattcaagcc

SEQ ID NO: 17140 - DNA, 20 bp, synthetic construct
  misc_feature 1..20: note = Description of Artificial Sequence: Synthetic oligonucleotide
  misc_feature 1..20: note = Target: SCN10A; (-) strand; PAM type: NRG; PAM sequence: AAG
  source 1..20: mol_type = other DNA
tactccatgattaaatattc

SEQ ID NO: 17141 - DNA, 20 bp, synthetic construct
  misc_feature 1..20: note = Description of Artificial Sequence: Synthetic oligonucleotide
  misc_feature 1..20: note = Target: SCN10A; (-) strand; PAM type: NRG; PAM sequence: CAG
  source 1..20: mol_type = other DNA
aggagggcagcaggcccctg

SEQ ID NO: 17142 - DNA, 20 bp, synthetic construct
  misc_feature 1..20: note = Description of Artificial Sequence: Synthetic oligonucleotide
  misc_feature 1..20: note = Target: SCN10A; (-) strand; PAM type: NRG; PAM sequence: AGG
  source 1..20: mol_type = other DNA
ggagctgccaggagggcagc

SEQ ID NO: 17143 - DNA, 20 bp, synthetic construct
  misc_feature 1..20: note = Description of Artificial Sequence: Synthetic oligonucleotide
  misc_feature 1..20: note = Target: SCN10A; (-) strand; PAM type: NRG; PAM sequence: CAG
  source 1..20: mol_type = other DNA
tggagctgccaggagggcag

SEQ ID NO: 17144 - DNA, 20 bp, synthetic construct
  misc_feature 1..20: note = Description of Artificial Sequence: Synthetic oligonucleotide
  misc_feature 1..20: note = Target: SCN10A; (-) strand; PAM type: NRG; PAM sequence: CAG
  source 1..20: mol_type = other DNA
ggctggagctgccaggaggg

SEQ ID NO: 17145 - DNA, 20 bp, synthetic construct
  misc_feature 1..20: note = Description of Artificial Sequence: Synthetic oligonucleotide
  misc_feature 1..20: note = Target: SCN10A; (-) strand; PAM type: NRG; PAM sequence: GGG
  source 1..20: mol_type = other DNA
tagggctggagctgccagga

SEQ ID NO: 17146 - DNA, 20 bp, synthetic construct
  misc_feature 1..20: note = Description of Artificial Sequence: Synthetic oligonucleotide
  misc_feature 1..20: note = Target: SCN10A; (-) strand; PAM type: NRG; PAM sequence: AGG
  source 1..20: mol_type = other DNA
atagggctggagctgccagg

SEQ ID NO: 17147 - DNA, 20 bp, synthetic construct
  misc_feature 1..20: note = Description of Artificial Sequence: Synthetic oligonucleotide
  misc_feature 1..20: note = Target: SCN10A; (-) strand; PAM type: NRG; PAM sequence: GAG
  source 1..20: mol_type = other DNA
tatagggctggagctgccag

SEQ ID NO: 17148 - DNA, 20 bp, synthetic construct
  misc_feature 1..20: note = Description of Artificial Sequence: Synthetic oligonucleotide
  misc_feature 1..20: note = Target: SCN10A; (-) strand; PAM type: NRG; PAM sequence: AGG
  source 1..20: mol_type = other DNA
attatagggctggagctgcc

SEQ ID NO: 17149 - DNA, 20 bp, synthetic construct
  misc_feature 1..20: note = Description of Artificial Sequence: Synthetic oligonucleotide
  misc_feature 1..20: note = Target: SCN10A; (-) strand; PAM type: NRG; PAM sequence: CAG
  source 1..20: mol_type = other DNA
cattatagggctggagctgc

SEQ ID NO: 17150 - DNA, 20 bp, synthetic construct
  misc_feature 1..20: note = Description of Artificial Sequence: Synthetic oligonucleotide
  misc_feature 1..20: note = Target: SCN10A; (-) strand; PAM type: NRG; PAM sequence: GAG
  source 1..20: mol_type = other DNA
ctggagacattatagggctg

SEQ ID NO: 17151 - DNA, 20 bp, synthetic construct
  misc_feature 1..20: note = Description of Artificial Sequence: Synthetic oligonucleotide
  misc_feature 1..20: note = Target: SCN10A; (-) strand; PAM type: NRG; PAM sequence: TGG
  source 1..20: mol_type = other DNA
atctggagacattatagggc

SEQ ID NO: 17152 - DNA, 20 bp, synthetic construct
  misc_feature 1..20: note = Description of Artificial Sequence: Synthetic oligonucleotide
  misc_feature 1..20: note = Target: SCN10A; (-) strand; PAM type: NRG; PAM sequence: GGG
  source 1..20: mol_type = other DNA
attcatctggagacattata

SEQ ID NO: 17153 - DNA, 20 bp, synthetic construct
  misc_feature 1..20: note = Description of Artificial Sequence: Synthetic oligonucleotide
  misc_feature 1..20: note = Target: SCN10A; (-) strand; PAM type: NRG; PAM sequence: AGG
  source 1..20: mol_type = other DNA
aattcatctggagacattat

SEQ ID NO: 17154 - DNA, 20 bp, synthetic construct
  misc_feature 1..20: note = Description of Artificial Sequence: Synthetic oligonucleotide
  misc_feature 1..20: note = Target: SCN10A; (-) strand; PAM type: NRG; PAM sequence: TAG
  source 1..20: mol_type = other DNA
gaattcatctggagacatta

SEQ ID NO: 17155 - DNA, 20 bp, synthetic construct
  misc_feature 1..20: note = Description of Artificial Sequence: Synthetic oligonucleotide
  misc_feature 1..20: note = Target: SCN10A; (-) strand; PAM type: NRG; PAM sequence: GAG
  source 1..20: mol_type = other DNA
cccctaattgaattcatctg

SEQ ID NO: 17156 - DNA, 20 bp, synthetic construct
  misc_feature 1..20: note = Description of Artificial Sequence: Synthetic oligonucleotide
  misc_feature 1..20: note = Target: SCN10A; (-) strand; PAM type: NRG; PAM sequence: TGG
  source 1..20: mol_type = other DNA
aacccctaattgaattcatc

SEQ ID NO: 17157 - DNA, 20 bp, synthetic construct
  misc_feature 1..20: note = Description of Artificial Sequence: Synthetic oligonucleotide
  misc_feature 1..20: note = Target: SCN10A; (-) strand; PAM type: NRG; PAM sequence: GAG
  source 1..20: mol_type = other DNA
tatcaggtttactaatatga

SEQ ID NO: 17158 - DNA, 20 bp, synthetic construct
  misc_feature 1..20: note = Description of Artificial Sequence: Synthetic oligonucleotide
  misc_feature 1..20: note = Target: SCN10A; (-) strand; PAM type: NRG; PAM sequence: GAG
  source 1..20: mol_type = other DNA
gctatcaggtttactaatat

SEQ ID NO: 17159 - DNA, 20 bp, synthetic construct
  misc_feature 1..20: note = Description of Artificial Sequence: Synthetic oligonucleotide
  misc_feature 1..20: note = Target: SCN10A; (-) strand; PAM type: NRG; PAM sequence: AGG
  source 1..20: mol_type = other DNA
ggtccattagcaaagctatc

SEQ ID NO: 17160 - DNA, 20 bp, synthetic construct
  misc_feature 1..20: note = Description of Artificial Sequence: Synthetic oligonucleotide
  misc_feature 1..20: note = Target: SCN10A; (-) strand; PAM type: NRG; PAM sequence: CAG
  source 1..20: mol_type = other DNA
gggtccattagcaaagctat

SEQ ID NO: 17161 - DNA, 20 bp, synthetic construct
  misc_feature 1..20: note = Description of Artificial Sequence: Synthetic oligonucleotide
  misc_feature 1..20: note = Target: SCN10A; (-) strand; PAM type: NRG; PAM sequence: AAG
  source 1..20: mol_type = other DNA
accatttgggtccattagca

SEQ ID NO: 17162 - DNA, 20 bp, synthetic construct
  misc_feature 1..20: note = Description of Artificial Sequence: Synthetic oligonucleotide
  misc_feature 1..20: note = Target: SCN10A; (-) strand; PAM type: NRG; PAM sequence: TAG
  source 1..20: mol_type = other DNA
gccccaccatttgggtccat

SEQ ID NO: 17163 - DNA, 20 bp, synthetic construct
  misc_feature 1..20: note = Description of Artificial Sequence: Synthetic oligonucleotide
  misc_feature 1..20: note = Target: SCN10A; (-) strand; PAM type: NRG; PAM sequence: GGG
  source 1..20: mol_type = other DNA
ggggacccgccccaccattt

SEQ ID NO: 17164 - DNA, 20 bp, synthetic construct
  misc_feature 1..20: note = Description of Artificial Sequence: Synthetic oligonucleotide
  misc_feature 1..20: note = Target: SCN10A; (-) strand; PAM type: NRG; PAM sequence: TGG
  source 1..20: mol_type = other DNA
tggggacccgccccaccatt

SEQ ID NO: 17165 - DNA, 20 bp, synthetic construct
  misc_feature 1..20: note = Description of Artificial Sequence: Synthetic oligonucleotide
  misc_feature 1..20: note = Target: SCN10A; (-) strand; PAM type: NRG; PAM sequence: GGG
  source 1..20: mol_type = other DNA
gggcctgacagcgacaaatg

SEQ ID NO: 17166 - DNA, 20 bp, synthetic construct
  misc_feature 1..20: note = Description of Artificial Sequence: Synthetic oligonucleotide
  misc_feature 1..20: note = Target: SCN10A; (-) strand; PAM type: NRG; PAM sequence: GGG
  source 1..20: mol_type = other DNA
ggggcctgacagcgacaaat

SEQ ID NO: 17167 - DNA, 20 bp, synthetic construct
  misc_feature 1..20: note = Description of Artificial Sequence: Synthetic oligonucleotide
  misc_feature 1..20: note = Target: SCN10A; (-) strand; PAM type: NRG; PAM sequence: TGG
  source 1..20: mol_type = other DNA
aggggcctgacagcgacaaa

SEQ ID NO: 17168 - DNA, 20 bp, synthetic construct
  misc_feature 1..20: note = Description of Artificial Sequence: Synthetic oligonucleotide
  misc_feature 1..20: note = Target: SCN10A; (-) strand; PAM type: NRG; PAM sequence: CAG
  source 1..20: mol_type = other DNA
gctaggcaggaggggcctga

SEQ ID NO: 17169 - DNA, 20 bp, synthetic construct
  misc_feature 1..20: note = Description of Artificial Sequence: Synthetic oligonucleotide
  misc_feature 1..20: note = Target: SCN10A; (-) strand; PAM type: NRG; PAM sequence: GGG
  source 1..20: mol_type = other DNA
tgaccccggctaggcaggag

SEQ ID NO: 17170 - DNA, 20 bp, synthetic construct
  misc_feature 1..20: note = Description of Artificial Sequence: Synthetic oligonucleotide
  misc_feature 1..20: note = Target: SCN10A; (-) strand; PAM type: NRG; PAM sequence: GGG
  source 1..20: mol_type = other DNA
atgaccccggctaggcagga

SEQ ID NO: 17171 - DNA, 20 bp, synthetic construct
  misc_feature 1..20: note = Description of Artificial Sequence: Synthetic oligonucleotide
  misc_feature 1..20: note = Target: SCN10A; (-) strand; PAM type: NRG; PAM sequence: AGG
  source 1..20: mol_type = other DNA
catgaccccggctaggcagg

SEQ ID NO: 17172 - DNA, 20 bp, synthetic construct
  misc_feature 1..20: note = Description of Artificial Sequence: Synthetic oligonucleotide
  misc_feature 1..20: note = Target: SCN10A; (-) strand; PAM type: NRG; PAM sequence: GAG
  source 1..20: mol_type = other DNA
ccatgaccccggctaggcag

SEQ ID NO: 17173 - DNA, 20 bp, synthetic construct
  misc_feature 1..20: note = Description of Artificial Sequence: Synthetic oligonucleotide
  misc_feature 1..20: note = Target: SCN10A; (-) strand; PAM type: NRG; PAM sequence: AGG
  source 1..20: mol_type = other DNA
gtccatgaccccggctaggc

SEQ ID NO: 17174 - DNA, 20 bp, synthetic construct
  misc_feature 1..20: note = Description of Artificial Sequence: Synthetic oligonucleotide
  misc_feature 1..20: note = Target: SCN10A; (-) strand; PAM type: NRG; PAM sequence: CAG
  source 1..20: mol_type = other DNA
tgtccatgaccccggctagg

SEQ ID NO: 17175 - DNA, 20 bp, synthetic construct
  misc_feature 1..20: note = Description of Artificial Sequence: Synthetic oligonucleotide
  misc_feature 1..20: note = Target: SCN10A; (-) strand; PAM type: NRG; PAM sequence: AGG
  source 1..20: mol_type = other DNA
tcttgtccatgaccccggct

SEQ ID NO: 17176 - DNA, 20 bp, synthetic construct
  misc_feature 1..20: note = Description of Artificial Sequence: Synthetic oligonucleotide
  misc_feature 1..20: note = Target: SCN10A; (-) strand; PAM type: NRG; PAM sequence: TAG
  source 1..20: mol_type = other DNA
ttcttgtccatgaccccggc

SEQ ID NO: 17177 - DNA, 20 bp, synthetic construct
  misc_feature 1..20: note = Description of Artificial Sequence: Synthetic oligonucleotide
  misc_feature 1..20: note = Target: SCN10A; (-) strand; PAM type: NRG; PAM sequence: CGG
  source 1..20: mol_type = other DNA
tgttttcttgtccatgaccc

SEQ ID NO: 17178 - DNA, 20 bp, synthetic construct
  misc_feature 1..20: note = Description of Artificial Sequence: Synthetic oligonucleotide
  misc_feature 1..20: note = Target: SCN10A; (-) strand; PAM type: NRG; PAM sequence: TGG
  source 1..20: mol_type = other DNA
agtacacaacttctgggtgt

SEQ ID NO: 17179 - DNA, 20 bp, synthetic construct
  misc_feature 1..20: note = Description of Artificial Sequence: Synthetic oligonucleotide
  misc_feature 1..20: note = Target: SCN10A; (-) strand; PAM type: NRG; PAM sequence: GGG
  source 1..20: mol_type = other DNA
gttttcagtacacaacttct

SEQ ID NO: 17180 - DNA, 20 bp, synthetic construct
  misc_feature 1..20: note = Description of Artificial Sequence: Synthetic oligonucleotide
  misc_feature 1..20: note = Target: SCN10A; (-) strand; PAM type: NRG; PAM sequence: TGG
  source 1..20: mol_type = other DNA
tgttttcagtacacaacttc

SEQ ID NO: 17181 - DNA, 20 bp, synthetic construct
  misc_feature 1..20: note = Description of Artificial Sequence: Synthetic oligonucleotide
  misc_feature 1..20: note = Target: SCN10A; (-) strand; PAM type: NRG; PAM sequence: CAG
  source 1..20: mol_type = other DNA
ttgtccctactcaatgtttt

SEQ ID NO: 17182 - DNA, 20 bp, synthetic construct
  misc_feature 1..20: note = Description of Artificial Sequence: Synthetic oligonucleotide
  misc_feature 1..20: note = Target: SCN10A; (-) strand; PAM type: NRG; PAM sequence: TAG
  source 1..20: mol_type = other DNA
gttccaaggactcccctggc

SEQ ID NO: 17183 - DNA, 20 bp, synthetic construct
  misc_feature 1..20: note = Description of Artificial Sequence: Synthetic oligonucleotide
  misc_feature 1..20: note = Target: SCN10A; (-) strand; PAM type: NRG; PAM sequence: TGG
  source 1..20: mol_type = other DNA
aaatgttccaaggactcccc

SEQ ID NO: 17184 - DNA, 20 bp, synthetic construct
  misc_feature 1..20: note = Description of Artificial Sequence: Synthetic oligonucleotide
  misc_feature 1..20: note = Target: SCN10A; (-) strand; PAM type: NRG; PAM sequence: AGG
  source 1..20: mol_type = other DNA
gcttcttcccaaatgttcca

SEQ ID NO: 17185 - DNA, 20 bp, synthetic construct
  misc_feature 1..20: note = Description of Artificial Sequence: Synthetic oligonucleotide
  misc_feature 1..20: note = Target: SCN10A; (-) strand; PAM type: NRG; PAM sequence: AAG
  source 1..20: mol_type = other DNA
tgcttcttcccaaatgttcc

SEQ ID NO: 17186 - DNA, 20 bp, synthetic construct
  misc_feature 1..20: note = Description of Artificial Sequence: Synthetic oligonucleotide
  misc_feature 1..20: note = Target: SCN10A; (-) strand; PAM type: NRG; PAM sequence: TGG
  source 1..20: mol_type = other DNA
gggctgtcacattctgcacg

SEQ ID NO: 17187 - DNA, 20 bp, synthetic construct
  misc_feature 1..20: note = Description of Artificial Sequence: Synthetic oligonucleotide
  misc_feature 1..20: note = Target: SCN10A; (-) strand; PAM type: NRG; PAM sequence: GGG
  source 1..20: mol_type = other DNA
gcttggttcccactgggtga

SEQ ID NO: 17188 - DNA, 20 bp, synthetic construct
  misc_feature 1..20: note = Description of Artificial Sequence: Synthetic oligonucleotide
  misc_feature 1..20: note = Target: SCN10A; (-) strand; PAM type: NRG; PAM sequence: AGG
  source 1..20: mol_type = other DNA
cgcttggttcccactgggtg

SEQ ID NO: 17189 - DNA, 20 bp, synthetic construct
  misc_feature 1..20: note = Description of Artificial Sequence: Synthetic oligonucleotide
  misc_feature 1..20: note = Target: SCN10A; (-) strand; PAM type: NRG; PAM sequence: GAG
  source 1..20: mol_type = other DNA
ccgcttggttcccactgggt

SEQ ID NO: 17190 - DNA, 20 bp, synthetic construct
  misc_feature 1..20: note = Description of Artificial Sequence: Synthetic oligonucleotide
  misc_feature 1..20: note = Target: SCN10A; (-) strand; PAM type: NRG; PAM sequence: GGG
  source 1..20: mol_type = other DNA
gaagccgcttggttcccact

SEQ ID NO: 17191 - DNA, 20 bp, synthetic construct
  misc_feature 1..20: note = Description of Artificial Sequence: Synthetic oligonucleotide
  misc_feature 1..20: note = Target: SCN10A; (-) strand; PAM type: NRG; PAM sequence: TGG
  source 1..20: mol_type = other DNA
agaagccgcttggttcccac

SEQ ID NO: 17192 - DNA, 20 bp, synthetic construct
  misc_feature 1..20: note = Description of Artificial Sequence: Synthetic oligonucleotide
  misc_feature 1..20: note = Target: SCN10A; (-) strand; PAM type: NRG; PAM sequence: TGG
  source 1..20: mol_type = other DNA
gtgggtgaacagaagccgct

SEQ ID NO: 17193 - DNA, 20 bp, synthetic construct
  misc_feature 1..20: note = Description of Artificial Sequence: Synthetic oligonucleotide
  misc_feature 1..20: note = Target: SCN10A; (-) strand; PAM type: NRG; PAM sequence: AAG
  source 1..20: mol_type = other DNA
tgggggctgtgggtgaacag

SEQ ID NO: 17194 - DNA, 20 bp, synthetic construct
  misc_feature 1..20: note = Description of Artificial Sequence: Synthetic oligonucleotide
  misc_feature 1..20: note = Target: SCN10A; (-) strand; PAM type: NRG; PAM sequence: CAG
  source 1..20: mol_type = other DNA
atttgggggctgtgggtgaa

SEQ ID NO: 17195 - DNA, 20 bp, synthetic construct
  misc_feature 1..20: note = Description of Artificial Sequence: Synthetic oligonucleotide
  misc_feature 1..20: note = Target: SCN10A; (-) strand; PAM type: NRG; PAM sequence: GGG
  source 1..20: mol_type = other DNA
ggacgggatttgggggctgt

SEQ ID NO: 17196 - DNA, 20 bp, synthetic construct
  misc_feature 1..20: note = Description of Artificial Sequence: Synthetic oligonucleotide
  misc_feature 1..20: note = Target: SCN10A; (-) strand; PAM type: NRG; PAM sequence: TGG
  source 1..20: mol_type = other DNA
gggacgggatttgggggctg

SEQ ID NO: 17197 - DNA, 20 bp, synthetic construct
  misc_feature 1..20: note = Description of Artificial Sequence: Synthetic oligonucleotide
  misc_feature 1..20: note = Target: SCN10A; (-) strand; PAM type: NRG; PAM sequence: GGG
  source 1..20: mol_type = other DNA
agggctgggacgggatttgg

SEQ ID NO: 17198 - DNA, 20 bp, synthetic construct
  misc_feature 1..20: note = Description of Artificial Sequence: Synthetic oligonucleotide
  misc_feature 1..20: note = Target: SCN10A; (-) strand; PAM type: NRG; PAM sequence: GGG
  source 1..20: mol_type = other DNA
gagggctgggacgggatttg

SEQ ID NO: 17199 - DNA, 20 bp, synthetic construct
  misc_feature 1..20: note = Description of Artificial Sequence: Synthetic oligonucleotide
  misc_feature 1..20: note = Target: SCN10A; (-) strand; PAM type: NRG; PAM sequence: GGG
  source 1..20: mol_type = other DNA
ggagggctgggacgggattt

SEQ ID NO: 17200 - DNA, 20 bp, synthetic construct
  misc_feature 1..20: note = Description of Artificial Sequence: Synthetic oligonucleotide
  misc_feature 1..20: note = Target: SCN10A; (-) strand; PAM type: NRG; PAM sequence: TGG
  source 1..20: mol_type = other DNA
gggagggctgggacgggatt

SEQ ID NO: 17201 - DNA, 20 bp, synthetic construct
  misc_feature 1..20: note = Description of Artificial Sequence: Synthetic oligonucleotide
  misc_feature 1..20: note = Target: SCN10A; (-) strand; PAM type: NRG; PAM sequence: GGG
  source 1..20: mol_type = other DNA
ataagagggagggctgggac

SEQ ID NO: 17202 - DNA, 20 bp, synthetic construct
  misc_feature 1..20: note = Description of Artificial Sequence: Synthetic oligonucleotide
  misc_feature 1..20: note = Target: SCN10A; (-) strand; PAM type: NRG; PAM sequence: CGG
  source 1..20: mol_type = other DNA
gataagagggagggctggga

SEQ ID NO: 17203 - DNA, 20 bp, synthetic construct
  misc_feature 1..20: note = Description of Artificial Sequence: Synthetic oligonucleotide
  misc_feature 1..20: note = Target: SCN10A; (-) strand; PAM type: NRG; PAM sequence: GGG
  source 1..20: mol_type = other DNA
gtaagataagagggagggct

SEQ ID NO: 17204 - DNA, 20 bp, synthetic construct
  misc_feature 1..20: note = Description of Artificial Sequence: Synthetic oligonucleotide
  misc_feature 1..20: note = Target: SCN10A; (-) strand; PAM type: NRG; PAM sequence: TGG
  source 1..20: mol_type = other DNA
ggtaagataagagggagggc

SEQ ID NO: 17205 - DNA, 20 bp, synthetic construct
  misc_feature 1..20: note = Description of Artificial Sequence: Synthetic oligonucleotide
  misc_feature 1..20: note = Target: SCN10A; (-) strand; PAM type: NRG; PAM sequence: GGG
  source 1..20: mol_type = other DNA
gcagggtaagataagaggga

SEQ ID NO: 17206 - DNA, 20 bp, synthetic construct
  misc_feature 1..20: note = Description of Artificial Sequence: Synthetic oligonucleotide
  misc_feature 1..20: note = Target: SCN10A; (-) strand; PAM type: NRG; PAM sequence: AGG
  source 1..20: mol_type = other DNA
agcagggtaagataagaggg

SEQ ID NO: 17207 - DNA, 20 bp, synthetic construct
  misc_feature 1..20: note = Description of Artificial Sequence: Synthetic oligonucleotide
  misc_feature 1..20: note = Target: SCN10A; (-) strand; PAM type: NRG; PAM sequence: GAG
  source 1..20: mol_type = other DNA
cagcagggtaagataagagg

SEQ ID NO: 17208 - DNA, 20 bp, synthetic construct
  misc_feature 1..20: note = Description of Artificial Sequence: Synthetic oligonucleotide
  misc_feature 1..20: note = Target: SCN10A; (-) strand; PAM type: NRG; PAM sequence: GGG
  source 1..20: mol_type = other DNA
cacagcagggtaagataaga

SEQ ID NO: 17209 - DNA, 20 bp, synthetic construct
  misc_feature 1..20: note = Description of Artificial Sequence: Synthetic oligonucleotide
  misc_feature 1..20: note = Target: SCN10A; (-) strand; PAM type: NRG; PAM sequence: AGG
  source 1..20: mol_type = other DNA
ccacagcagggtaagataag

SEQ ID NO: 17210 - DNA, 20 bp, synthetic construct
  misc_feature 1..20: note = Description of Artificial Sequence: Synthetic oligonucleotide
  misc_feature 1..20: note = Target: SCN10A; (-) strand; PAM type: NRG; PAM sequence: GAG
  source 1..20: mol_type = other DNA
accacagcagggtaagataa

SEQ ID NO: 17211 - DNA, 20 bp, synthetic construct
  misc_feature 1..20: note = Description of Artificial Sequence: Synthetic oligonucleotide
  misc_feature 1..20: note = Target: SCN10A; (-) strand; PAM type: NRG; PAM sequence: AAG
  source 1..20: mol_type = other DNA
tgaccacagcagggtaagat

SEQ ID NO: 17212 - DNA, 20 bp, synthetic construct
  misc_feature 1..20: note = Description of Artificial Sequence: Synthetic oligonucleotide
  misc_feature 1..20: note = Target: SCN10A; (-) strand; PAM type: NRG; PAM sequence: AAG
  source 1..20: mol_type = other DNA
aaggctgaccacagcagggt

SEQ ID NO: 17213 - DNA, 20 bp, synthetic construct
  misc_feature 1..20: note = Description of Artificial Sequence: Synthetic oligonucleotide
  misc_feature 1..20: note = Target: SCN10A; (-) strand; PAM type: NRG; PAM sequence: GGG
  source 1..20: mol_type = other DNA
aggcaaggctgaccacagca

SEQ ID NO: 17214 - DNA, 20 bp, synthetic construct
  misc_feature 1..20: note = Description of Artificial Sequence: Synthetic oligonucleotide
  misc_feature 1..20: note = Target: SCN10A; (-) strand; PAM type: NRG; PAM sequence: AGG
  source 1..20: mol_type = other DNA
taggcaaggctgaccacagc

SEQ ID NO: 17215 - DNA, 20 bp, synthetic construct
  misc_feature 1..20: note = Description of Artificial Sequence: Synthetic oligonucleotide
  misc_feature 1..20: note = Target: SCN10A; (-) strand; PAM type: NRG; PAM sequence: CAG
  source 1..20: mol_type = other DNA
ctaggcaaggctgaccacag

SEQ ID NO: 17216 - DNA, 20 bp, synthetic construct
  misc_feature 1..20: note = Description of Artificial Sequence: Synthetic oligonucleotide
  misc_feature 1..20: note = Target: SCN10A; (-) strand; PAM type: NRG; PAM sequence: CAG
  source 1..20: mol_type = other DNA
gccctaggcaaggctgacca

SEQ ID NO: 17217 - DNA, 20 bp, synthetic construct
  misc_feature 1..20: note = Description of Artificial Sequence: Synthetic oligonucleotide
  misc_feature 1..20: note = Target: SCN10A; (-) strand; PAM type: NRG; PAM sequence: AGG
  source 1..20: mol_type = other DNA
ctggctgtgtgccctaggca

SEQ ID NO: 17218 - DNA, 20 bp, synthetic construct
  misc_feature 1..20: note = Description of Artificial Sequence: Synthetic oligonucleotide
  misc_feature 1..20: note = Target: SCN10A; (-) strand; PAM type: NRG; PAM sequence: AAG
  source 1..20: mol_type = other DNA
actggctgtgtgccctaggc

SEQ ID NO: 17219 - DNA, 20 bp, synthetic construct
  misc_feature 1..20: note = Description of Artificial Sequence: Synthetic oligonucleotide
  misc_feature 1..20: note = Target: SCN10A; (-) strand; PAM type: NRG; PAM sequence: AGG
  source 1..20: mol_type = other DNA
agctactggctgtgtgccct

SEQ ID NO: 17220 - DNA, 20 bp, synthetic construct
  misc_feature 1..20: note = Description of Artificial Sequence: Synthetic oligonucleotide
  misc_feature 1..20: note = Target: SCN10A; (-) strand; PAM type: NRG; PAM sequence: TAG
  source 1..20: mol_type = other DNA
cagctactggctgtgtgccc

SEQ ID NO: 17221 - DNA, 20 bp, synthetic construct
  misc_feature 1..20: note = Description of Artificial Sequence: Synthetic oligonucleotide
  misc_feature 1..20: note = Target: SCN10A; (-) strand; PAM type: NRG; PAM sequence: TGG
  source 1..20: mol_type = other DNA
gcttgaagaatgtcagctac

SEQ ID NO: 17222 - DNA, 20 bp, synthetic construct
  misc_feature 1..20: note = Description of Artificial Sequence: Synthetic oligonucleotide
  misc_feature 1..20: note = Target: SCN10A; (-) strand; PAM type: NRG; PAM sequence: CAG
  source 1..20: mol_type = other DNA
cccttcagcttgaagaatgt

SEQ ID NO: 17223 - DNA, 20 bp, synthetic construct
  misc_feature 1..20: note = Description of Artificial Sequence: Synthetic oligonucleotide
  misc_feature 1..20: note = Target: SCN10A; (-) strand; PAM type: NRG; PAM sequence: AAG
  source 1..20: mol_type = other DNA
ttatcaagcccttcagcttg

SEQ ID NO: 17224 - DNA, 20 bp, synthetic construct
  misc_feature 1..20: note = Description of Artificial Sequence: Synthetic oligonucleotide
  misc_feature 1..20: note = Target: SCN10A; (-) strand; PAM type: NRG; PAM sequence: CAG
  source 1..20: mol_type = other DNA
cccaaagttatcaagccctt

SEQ ID NO: 17225 - DNA, 20 bp, synthetic construct
  misc_feature 1..20: note = Description of Artificial Sequence: Synthetic oligonucleotide
  misc_feature 1..20: note = Target: SCN10A; (-) strand; PAM type: NRG; PAM sequence: AAG
  source 1..20: mol_type = other DNA
aattcatccccaaagttatc

SEQ ID NO: 17226 - DNA, 20 bp, synthetic construct
  misc_feature 1..20: note = Description of Artificial Sequence: Synthetic oligonucleotide
  misc_feature 1..20: note = Target: SCN10A; (-) strand; PAM type: NRG; PAM sequence: AAG
  source 1..20: mol_type = other DNA
gaagtcataattcatcccca

SEQ ID NO: 17227 - DNA, 20 bp, synthetic construct
  misc_feature 1..20: note = Description of Artificial Sequence: Synthetic oligonucleotide
  misc_feature 1..20: note = Target: SCN10A; (-) strand; PAM type: NRG; PAM sequence: AAG
  source 1..20: mol_type = other DNA
tgggctcaacagagataagg

SEQ ID NO: 17228 - DNA, 20 bp, synthetic construct
  misc_feature 1..20: note = Description of Artificial Sequence: Synthetic oligonucleotide
  misc_feature 1..20: note = Target: SCN10A; (-) strand; PAM type: NRG; PAM sequence: AGG
  source 1..20: mol_type = other DNA
cactgggctcaacagagata

SEQ ID NO: 17229 - DNA, 20 bp, synthetic construct
  misc_feature 1..20: note = Description of Artificial Sequence: Synthetic oligonucleotide
  misc_feature 1..20: note = Target: SCN10A; (-) strand; PAM type: NRG; PAM sequence: AAG
  source 1..20: mol_type = other DNA
gcactgggctcaacagagat

SEQ ID NO: 17230 - DNA, 20 bp, synthetic construct
  misc_feature 1..20: note = Description of Artificial Sequence: Synthetic oligonucleotide
  misc_feature 1..20: note = Target: SCN10A; (-) strand; PAM type: NRG; PAM sequence: GAG
  source 1..20: mol_type = other DNA
gacaggcactgggctcaaca

SEQ ID NO: 17231 - DNA, 20 bp, synthetic construct
  misc_feature 1..20: note = Description of Artificial Sequence: Synthetic oligonucleotide
  misc_feature 1..20: note = Target: SCN10A; (-) strand; PAM type: NRG; PAM sequence: CAG
  source 1..20: mol_type = other DNA
gtgacaggcactgggctcaa

SEQ ID NO: 17232 - DNA, 20 bp, synthetic construct
  misc_feature 1..20: note = Description of Artificial Sequence: Synthetic oligonucleotide
  misc_feature 1..20: note = Target: SCN10A; (-) strand; PAM type: NRG; PAM sequence: GGG
  source 1..20: mol_type = other DNA
ctgactttgtgacaggcact

SEQ ID NO: 17233 - DNA, 20 bp, synthetic construct
  misc_feature 1..20: note = Description of Artificial Sequence: Synthetic oligonucleotide
  misc_feature 1..20: note = Target: SCN10A; (-) strand; PAM type: NRG; PAM sequence: TGG
  source 1..20: mol_type = other DNA
gctgactttgtgacaggcac

SEQ ID NO: 17234 - DNA, 20 bp, synthetic construct
  misc_feature 1..20: note = Description of Artificial Sequence: Synthetic oligonucleotide
  misc_feature 1..20: note = Target: SCN10A; (-) strand; PAM type: NRG; PAM sequence: AGG
  source 1..20: mol_type = other DNA
ctgagtgctgactttgtgac

SEQ ID NO: 17235 - DNA, 20 bp, synthetic construct
  misc_feature 1..20: note = Description of Artificial Sequence: Synthetic oligonucleotide
  misc_feature 1..20: note = Target: SCN10A; (-) strand; PAM type: NRG; PAM sequence: CAG
  source 1..20: mol_type = other DNA
actgagtgctgactttgtga

SEQ ID NO: 17236 - DNA, 20 bp, synthetic construct
  misc_feature 1..20: note = Description of Artificial Sequence: Synthetic oligonucleotide
  misc_feature 1..20: note = Target: SCN10A; (-) strand; PAM type: NRG; PAM sequence: GAG
  source 1..20: mol_type = other DNA
taatttgacacctagccact

SEQ ID NO: 17237 - DNA, 20 bp, synthetic construct
  misc_feature 1..20: note = Description of Artificial Sequence: Synthetic oligonucleotide
  misc_feature 1..20: note = Target: SCN10A; (-) strand; PAM type: NRG; PAM sequence: TAG
  source 1..20: mol_type = other DNA
caagaatttaatttgacacc

SEQ ID NO: 17238 - DNA, 20 bp, synthetic construct
  misc_feature 1..20: note = Description of Artificial Sequence: Synthetic oligonucleotide
  misc_feature 1..20: note = Target: SCN10A; (-) strand; PAM type: NRG; PAM sequence: AAG
  source 1..20: mol_type = other DNA
aataacactgccttcaattc

SEQ ID NO: 17239 - DNA, 20 bp, synthetic construct
  misc_feature 1..20: note = Description of Artificial Sequence: Synthetic oligonucleotide
  misc_feature 1..20: note = Target: SCN10A; (-) strand; PAM type: NRG; PAM sequence: TAG
  source 1..20: mol_type = other DNA
aagaggcatctataaaagtt

SEQ ID NO: 17240 - DNA, 20 bp, synthetic construct
  misc_feature 1..20: note = Description of Artificial Sequence: Synthetic oligonucleotide
  misc_feature 1..20: note = Target: SCN10A; (-) strand; PAM type: NRG; PAM sequence: AAG
  source 1..20: mol_type = other DNA
agggaaagaggcatctataa

SEQ ID NO: 17241 - DNA, 20 bp, synthetic construct
  misc_feature 1..20: note = Description of Artificial Sequence: Synthetic oligonucleotide
  misc_feature 1..20: note = Target: SCN10A; (-) strand; PAM type: NRG; PAM sequence: AGG
  source 1..20: mol_type = other DNA
gaaacaagctatagggaaag

SEQ ID NO: 17242 - DNA, 20 bp, synthetic construct
  misc_feature 1..20: note = Description of Artificial Sequence: Synthetic oligonucleotide
  misc_feature 1..20: note = Target: SCN10A; (-) strand; PAM type: NRG; PAM sequence: GAG
  source 1..20: mol_type = other DNA
ggaaacaagctatagggaaa

SEQ ID NO: 17243 - DNA, 20 bp, synthetic construct
  misc_feature 1..20: note = Description of Artificial Sequence: Synthetic oligonucleotide
  misc_feature 1..20: note = Target: SCN10A; (-) strand; PAM type: NRG; PAM sequence: AAG
  source 1..20: mol_type = other DNA
aaggaaacaagctataggga

SEQ ID NO: 17244 - DNA, 20 bp, synthetic construct
  misc_feature 1..20: note = Description of Artificial Sequence: Synthetic oligonucleotide
  misc_feature 1..20: note = Target: SCN10A; (-) strand; PAM type: NRG; PAM sequence: GGG
  source 1..20: mol_type = other DNA
cttgaaggaaacaagctata

SEQ ID NO: 17245 - DNA, 20 bp, synthetic construct
  misc_feature 1..20: note = Description of Artificial Sequence: Synthetic oligonucleotide
  misc_feature 1..20: note = Target: SCN10A; (-) strand; PAM type: NRG; PAM sequence: AGG
  source 1..20: mol_type = other DNA
tcttgaaggaaacaagctat

SEQ ID NO: 17246 - DNA, 20 bp, synthetic construct
  misc_feature 1..20: note = Description of Artificial Sequence: Synthetic oligonucleotide
  misc_feature 1..20: note = Target: SCN10A; (-) strand; PAM type: NRG; PAM sequence: TAG
  source 1..20: mol_type = other DNA
atcttgaaggaaacaagcta

SEQ ID NO: 17247 - DNA, 20 bp, synthetic construct
  misc_feature 1..20: note = Description of Artificial Sequence: Synthetic oligonucleotide
  misc_feature 1..20: note = Target: SCN10A; (-) strand; PAM type: NRG; PAM sequence: AAG
  source 1..20: mol_type = other DNA
ttacaaatcttgaaggaaac

SEQ ID NO: 17248 - DNA, 20 bp, synthetic construct
  misc_feature 1..20: note = Description of Artificial Sequence: Synthetic oligonucleotide
  misc_feature 1..20: note = Target: SCN10A; (-) strand; PAM type: NRG; PAM sequence: AGG
  source 1..20: mol_type = other DNA
gtttcacttacaaatcttga

SEQ ID NO: 17249 - DNA, 20 bp, synthetic construct
  misc_feature 1..20: note = Description of Artificial Sequence: Synthetic oligonucleotide
  misc_feature 1..20: note = Target: SCN10A; (-) strand; PAM type: NRG; PAM sequence: AAG
  source 1..20: mol_type = other DNA
ggtttcacttacaaatcttg

SEQ ID NO: 17250 - DNA, 20 bp, synthetic construct
  misc_feature 1..20: note = Description of Artificial Sequence: Synthetic oligonucleotide
  misc_feature 1..20: note = Target: SCN10A; (-) strand; PAM type: NRG; PAM sequence: TGG
  source 1..20: mol_type = other DNA
atacaaggtaaaaataaatg

SEQ ID NO: 17251 - DNA, 20 bp, synthetic construct
  misc_feature 1..20: note = Description of Artificial Sequence: Synthetic oligonucleotide
  misc_feature 1..20: note = Target: SCN10A; (-) strand; PAM type: NRG; PAM sequence: AGG
  source 1..20: mol_type = other DNA
gtttaggattgtcttataca

SEQ ID NO: 17252 - DNA, 20 bp, synthetic construct
  misc_feature 1..20: note = Description of Artificial Sequence: Synthetic oligonucleotide
  misc_feature 1..20: note = Target: SCN10A; (-) strand; PAM type: NRG; PAM sequence: AAG
  source 1..20: mol_type = other DNA
ggtttaggattgtcttatac

SEQ ID NO: 17253 - DNA, 20 bp, synthetic construct
  misc_feature 1..20: note = Description of Artificial Sequence: Synthetic oligonucleotide
  misc_feature 1..20: note = Target: SCN10A; (-) strand; PAM type: NRG; PAM sequence: AGG
  source 1..20: mol_type = other DNA
agctggaagattagaggttt

SEQ ID NO: 17254 - DNA, 20 bp, synthetic construct
  misc_feature 1..20: note = Description of Artificial Sequence: Synthetic oligonucleotide
  misc_feature 1..20: note = Target: SCN10A; (-) strand; PAM type: NRG; PAM sequence: TAG
  source 1..20: mol_type = other DNA
gagctggaagattagaggtt

SEQ ID NO: 17255 - DNA, 20 bp, synthetic construct
  misc_feature 1..20: note = Description of Artificial Sequence: Synthetic oligonucleotide
  misc_feature 1..20: note = Target: SCN10A; (-) strand; PAM type: NRG; PAM sequence: AGG
  source 1..20: mol_type = other DNA
agactgagctggaagattag

SEQ ID NO: 17256 - DNA, 20 bp, synthetic construct
  misc_feature 1..20: note = Description of Artificial Sequence: Synthetic oligonucleotide
  misc_feature 1..20: note = Target: SCN10A; (-) strand; PAM type: NRG; PAM sequence: GAG
  source 1..20: mol_type = other DNA
gagactgagctggaagatta

SEQ ID NO: 17257 - DNA, 20 bp, synthetic construct
  misc_feature 1..20: note = Description of Artificial Sequence: Synthetic oligonucleotide
  misc_feature 1..20: note = Target: SCN10A; (-) strand; PAM type: NRG; PAM sequence: TAG
  source 1..20: mol_type = other DNA
cagagactgagctggaagat

SEQ ID NO: 17258 - DNA, 20 bp, synthetic construct
  misc_feature 1..20: note = Description of Artificial Sequence: Synthetic oligonucleotide
  misc_feature 1..20: note = Target: SCN10A; (-) strand; PAM type: NRG; PAM sequence: AAG
  source 1..20: mol_type = other DNA
cctcacagagactgagctgg

SEQ ID NO: 17259 - DNA, 20 bp, synthetic construct
  misc_feature 1..20: note = Description of Artificial Sequence: Synthetic oligonucleotide
  misc_feature 1..20: note = Target: SCN10A; (-) strand; PAM type: NRG; PAM sequence: TGG
  source 1..20: mol_type = other DNA
cagcctcacagagactgagc

SEQ ID NO: 17260 - DNA, 20 bp, synthetic construct
  misc_feature 1..20: note = Description of Artificial Sequence: Synthetic oligonucleotide
  misc_feature 1..20: note = Target: SCN10A; (-) strand; PAM type: NRG; PAM sequence: GAG
  source 1..20: mol_type = other DNA
gtgacagcctcacagagact

SEQ ID NO: 17261 - DNA, 20 bp, synthetic construct
  misc_feature 1..20: note = Description of Artificial Sequence: Synthetic oligonucleotide
  misc_feature 1..20: note = Target: SCN10A; (-) strand; PAM type: NRG; PAM sequence: GAG
  source 1..20: mol_type = other DNA
agtgaagtgacagcctcaca

SEQ ID NO: 17262 - DNA, 20 bp, synthetic construct
  misc_feature 1..20: note = Description of Artificial Sequence: Synthetic oligonucleotide
  misc_feature 1..20: note = Target: SCN10A; (-) strand; PAM type: NRG; PAM sequence: CAG
  source 1..20: mol_type = other DNA
gtagtgaagtgacagcctca

SEQ ID NO: 17263 - DNA, 20 bp, synthetic construct
  misc_feature 1..20: note = Description of Artificial Sequence: Synthetic oligonucleotide
  misc_feature 1..20: note = Target: SCN10A; (-) strand; PAM type: NRG; PAM sequence: CAG
  source 1..20: mol_type = other DNA
ataggtgagtagtgaagtga

SEQ ID NO: 17264 - DNA, 20 bp, synthetic construct
  misc_feature 1..20: note = Description of Artificial Sequence: Synthetic oligonucleotide
  misc_feature 1..20: note = Target: SCN10A; (-) strand; PAM type: NRG; PAM sequence: AAG
  source 1..20: mol_type = other DNA
ctctctataggtgagtagtg

SEQ ID NO: 17265 - DNA, 20 bp, synthetic construct
  misc_feature 1..20: note = Description of Artificial Sequence: Synthetic oligonucleotide
  misc_feature 1..20: note = Target: SCN10A; (-) strand; PAM type: NRG; PAM sequence: TAG
  source 1..20: mol_type = other DNA
agaggctctctataggtgag

SEQ ID NO: 17266 - DNA, 20 bp, synthetic construct
  misc_feature 1..20: note = Description of Artificial Sequence: Synthetic oligonucleotide
  misc_feature 1..20: note = Target: SCN10A; (-) strand; PAM type: NRG; PAM sequence: GAG
  source 1..20: mol_type = other DNA
gggagaggctctctataggt

SEQ ID NO: 17267 - DNA, 20 bp, synthetic construct
  misc_feature 1..20: note = Description of Artificial Sequence: Synthetic oligonucleotide
  misc_feature 1..20: note = Target: SCN10A; (-) strand; PAM type: NRG; PAM sequence: AGG
  source 1..20: mol_type = other DNA
gctagggagaggctctctat

SEQ ID NO: 17268 - DNA, 20 bp, synthetic construct
  misc_feature 1..20: note = Description of Artificial Sequence: Synthetic oligonucleotide
  misc_feature 1..20: note = Target: SCN10A; (-) strand; PAM type: NRG; PAM sequence: TAG
  source 1..20: mol_type = other DNA
ggctagggagaggctctcta

SEQ ID NO: 17269 - DNA, 20 bp, synthetic construct
  misc_feature 1..20: note = Description of Artificial Sequence: Synthetic oligonucleotide
  misc_feature 1..20: note = Target: SCN10A; (-) strand; PAM type: NRG; PAM sequence: AGG
  source 1..20: mol_type = other DNA
agtagcctggggctagggag

SEQ ID NO: 17270 - DNA, 20 bp, synthetic construct
  misc_feature 1..20: note = Description of Artificial Sequence: Synthetic oligonucleotide
  misc_feature 1..20: note = Target: SCN10A; (-) strand; PAM type: NRG; PAM sequence: GAG
  source 1..20: mol_type = other DNA
aagtagcctggggctaggga

SEQ ID NO: 17271 - DNA, 20 bp, synthetic construct
  misc_feature 1..20: note = Description of Artificial Sequence: Synthetic oligonucleotide
  misc_feature 1..20: note = Target: SCN10A; (-) strand; PAM type: NRG; PAM sequence: GAG
  source 1..20: mol_type = other DNA
aaaagtagcctggggctagg

SEQ ID NO: 17272 - DNA, 20 bp, synthetic construct
  misc_feature 1..20: note = Description of Artificial Sequence: Synthetic oligonucleotide
  misc_feature 1..20: note = Target: SCN10A; (-) strand; PAM type: NRG; PAM sequence: GGG
  source 1..20: mol_type = other DNA
gcaaaagtagcctggggcta

SEQ ID NO: 17273 - DNA, 20 bp, synthetic construct
  misc_feature 1..20: note = Description of Artificial Sequence: Synthetic oligonucleotide
  misc_feature 1..20: note = Target: SCN10A; (-) strand; PAM type: NRG; PAM sequence: AGG
  source 1..20: mol_type = other DNA
ggcaaaagtagcctggggct

SEQ ID NO: 17274 - DNA, 20 bp, synthetic construct
  misc_feature 1..20: note = Description of Artificial Sequence: Synthetic oligonucleotide
  misc_feature 1..20: note = Target: SCN10A; (-) strand; PAM type: NRG; PAM sequence: TAG
  source 1..20: mol_type = other DNA
aggcaaaagtagcctggggc

SEQ ID NO: 17275 - DNA, 20 bp, synthetic construct
  misc_feature 1..20: note = Description of Artificial Sequence: Synthetic oligonucleotide
  misc_feature 1..20: note = Target: SCN10A; (-) strand; PAM type: NRG; PAM sequence: GGG
  source 1..20: mol_type = other DNA
ctctaggcaaaagtagcctg

SEQ ID NO: 17276 - DNA, 20 bp, synthetic construct
  misc_feature 1..20: note = Description of Artificial Sequence: Synthetic oligonucleotide
  misc_feature 1..20: note = Target: SCN10A; (-) strand; PAM type: NRG; PAM sequence: GGG
  source 1..20: mol_type = other DNA
tctctaggcaaaagtagcct

SEQ ID NO: 17277 - DNA, 20 bp, synthetic construct
  misc_feature 1..20: note = Description of Artificial Sequence: Synthetic oligonucleotide
  misc_feature 1..20: note = Target: SCN10A; (-) strand; PAM type: NRG; PAM sequence: TGG
  source 1..20: mol_type = other DNA
ttctctaggcaaaagtagcc

SEQ ID NO: 17278 - DNA, 20 bp, synthetic construct
  misc_feature 1..20: note = Description of Artificial Sequence: Synthetic oligonucleotide
  misc_feature 1..20: note = Target: SCN10A; (-) strand; PAM type: NRG; PAM sequence: TAG
  source 1..20: mol_type = other DNA
tcattttctctaggcaaaag

SEQ ID NO: 17279 - DNA, 20 bp, synthetic construct
  misc_feature 1..20: note = Description of Artificial Sequence: Synthetic oligonucleotide
  misc_feature 1..20: note = Target: SCN10A; (-) strand; PAM type: NRG; PAM sequence: AAG
  source 1..20: mol_type = other DNA
acatcattttctctaggcaa

SEQ ID NO: 17280 - DNA, 20 bp, synthetic construct
  misc_feature 1..20: note = Description of Artificial Sequence: Synthetic oligonucleotide
  misc_feature 1..20: note = Target: SCN10A; (-) strand; PAM type: NRG; PAM sequence: AGG
  source 1..20: mol_type = other DNA
ttgtccacatcattttctct

SEQ ID NO: 17281 - DNA, 20 bp, synthetic construct
  misc_feature 1..20: note = Description of Artificial Sequence: Synthetic oligonucleotide
  misc_feature 1..20: note = Target: SCN10A; (-) strand; PAM type: NRG; PAM sequence: TAG
  source 1..20: mol_type = other DNA
tttgtccacatcattttctc

SEQ ID NO: 17282 - DNA, 20 bp, synthetic construct
  misc_feature 1..20: note = Description of Artificial Sequence: Synthetic oligonucleotide
  misc_feature 1..20: note = Target: SCN10A; (-) strand; PAM type: NRG; PAM sequence: AAG
  source 1..20: mol_type = other DNA
ggaggtgctcacagatgaag

SEQ ID NO: 17283 - DNA, 20 bp, synthetic construct
  misc_feature 1..20: note = Description of Artificial Sequence: Synthetic oligonucleotide
  misc_feature 1..20: note = Target: SCN10A; (-) strand; PAM type: NRG; PAM sequence: AAG
  source 1..20: mol_type = other DNA
gttggaggtgctcacagatg

SEQ ID NO: 17284 - DNA, 20 bp, synthetic construct
  misc_feature 1..20: note = Description of Artificial Sequence: Synthetic oligonucleotide
  misc_feature 1..20: note = Target: SCN10A; (-) strand; PAM type: NRG; PAM sequence: CAG
  source 1..20: mol_type = other DNA
ataagagttggaggtgctca

SEQ ID NO: 17285 - DNA, 20 bp, synthetic construct
  misc_feature 1..20: note = Description of Artificial Sequence: Synthetic oligonucleotide
  misc_feature 1..20: note = Target: SCN10A; (-) strand; PAM type: NRG; PAM sequence: AGG
  source 1..20: mol_type = other DNA
agccagcaaataagagttgg

SEQ ID NO: 17286 - DNA, 20 bp, synthetic construct
  misc_feature 1..20: note = Description of Artificial Sequence: Synthetic oligonucleotide
  misc_feature 1..20: note = Target: SCN10A; (-) strand; PAM type: NRG; PAM sequence: GAG
  source 1..20: mol_type = other DNA
gagccagcaaataagagttg

SEQ ID NO: 17287 - DNA, 20 bp, synthetic construct
  misc_feature 1..20: note = Description of Artificial Sequence: Synthetic oligonucleotide
  misc_feature 1..20: note = Target: SCN10A; (-) strand; PAM type: NRG; PAM sequence: TGG
  source 1..20: mol_type = other DNA
cagagccagcaaataagagt

SEQ ID NO: 17288 - DNA, 20 bp, synthetic construct
  misc_feature 1..20: note = Description of Artificial Sequence: Synthetic oligonucleotide
  misc_feature 1..20: note = Target: SCN10A; (-) strand; PAM type: NRG; PAM sequence: GAG
  source 1..20: mol_type = other DNA
ctttcagagccagcaaataa

SEQ ID NO: 17289 - DNA, 20 bp, synthetic construct
  misc_feature 1..20: note = Description of Artificial Sequence: Synthetic oligonucleotide
  misc_feature 1..20: note = Target: SCN10A; (-) strand; PAM type: NRG; PAM sequence: AAG
  source 1..20: mol_type = other DNA
atctttcagagccagcaaat

SEQ ID NO: 17290 - DNA, 20 bp, synthetic construct
  misc_feature 1..20: note = Description of Artificial Sequence: Synthetic oligonucleotide
  misc_feature 1..20: note = Target: SCN10A; (-) strand; PAM type: NRG; PAM sequence: CAG
  source 1..20: mol_type = other DNA
agtcaaatatctttcagagc

SEQ ID NO: 17291 - DNA, 20 bp, synthetic construct
  misc_feature 1..20: note = Description of Artificial Sequence: Synthetic oligonucleotide
  misc_feature 1..20: note = Target: SCN10A; (-) strand; PAM type: NRG; PAM sequence: GAG
  source 1..20: mol_type = other DNA
agaaagtcaaatatctttca

SEQ ID NO: 17292 - DNA, 20 bp, synthetic construct
  misc_feature 1..20: note = Description of Artificial Sequence: Synthetic oligonucleotide
  misc_feature 1..20: note = Target: SCN10A; (-) strand; PAM type: NRG; PAM sequence: CAG
  source 1..20: mol_type = other DNA
aaagaaagtcaaatatcttt

SEQ ID NO: 17293 - DNA, 20 bp, synthetic construct
  misc_feature 1..20: note = Description of Artificial Sequence: Synthetic oligonucleotide
  misc_feature 1..20: note = Target: SCN10A; (-) strand; PAM type: NRG; PAM sequence: AAG
  source 1..20: mol_type = other DNA
cgaaagacaacgcacaaaga

SEQ ID NO: 17294 - DNA, 20 bp, synthetic construct
  misc_feature 1..20: note = Description of Artificial Sequence: Synthetic oligonucleotide
  misc_feature 1..20: note = Target: SCN10A; (-) strand; PAM type: NRG; PAM sequence: AAG
  source 1..20: mol_type = other DNA
gaaacgaaagacaacgcaca

SEQ ID NO: 17295 - DNA, 20 bp, synthetic construct
  misc_feature 1..20: note = Description of Artificial Sequence: Synthetic oligonucleotide
  misc_feature 1..20: note = Target: SCN10A; (-) strand; PAM type: NRG; PAM sequence: AAG
  source 1..20: mol_type = other DNA
gccaagaaaaaaggaaacga

SEQ ID NO: 17296 - DNA, 20 bp, synthetic construct
  misc_feature 1..20: note = Description of Artificial Sequence: Synthetic oligonucleotide
  misc_feature 1..20: note = Target: SCN10A; (-) strand; PAM type: NRG; PAM sequence: AGG
  source 1..20: mol_type = other DNA
gaaatgacagccaagaaaaa

SEQ ID NO: 17297 - DNA, 20 bp, synthetic construct
  misc_feature 1..20: note = Description of Artificial Sequence: Synthetic oligonucleotide
  misc_feature 1..20: note = Target: SCN10A; (-) strand; PAM type: NRG; PAM sequence: AAG
  source 1..20: mol_type = other DNA
ggaaatgacagccaagaaaa

SEQ ID NO: 17298 - DNA, 20 bp, synthetic construct
  misc_feature 1..20: note = Description of Artificial Sequence: Synthetic oligonucleotide
  misc_feature 1..20: note = Target: SCN10A; (-) strand; PAM type: NRG; PAM sequence: AAG
  source 1..20: mol_type = other DNA
gtgcccaggaaatgacagcc

SEQ ID NO: 17299 - DNA, 20 bp, synthetic construct
  misc_feature 1..20: note = Description of Artificial Sequence: Synthetic oligonucleotide
  misc_feature 1..20: note = Target: SCN10A; (-) strand; PAM type: NRG; PAM sequence: CAG
  source 1..20: mol_type = other DNA
agtaagtgcccaggaaatga

SEQ ID NO: 17300 - DNA, 20 bp, synthetic construct
  misc_feature 1..20: note = Description of Artificial Sequence: Synthetic oligonucleotide
  misc_feature 1..20: note = Target: SCN10A; (-) strand; PAM type: NRG; PAM sequence: AGG
  source 1..20: mol_type = other DNA
ctgagacaaagtaagtgccc

SEQ ID NO: 17301 - DNA, 20 bp, synthetic construct
  misc_feature 1..20: note = Description of Artificial Sequence: Synthetic oligonucleotide
  misc_feature 1..20: note = Target: SCN10A; (-) strand; PAM type: NRG; PAM sequence: CAG
  source 1..20: mol_type = other DNA
cctgagacaaagtaagtgcc

SEQ ID NO: 17302 - DNA, 20 bp, synthetic construct
  misc_feature 1..20: note = Description of Artificial Sequence: Synthetic oligonucleotide
  misc_feature 1..20: note = Target: SCN10A; (-) strand; PAM type: NRG; PAM sequence: AAG
  source 1..20: mol_type = other DNA
ggtcctgcctgagacaaagt

SEQ ID NO: 17303 - DNA, 20 bp, synthetic construct
  misc_feature 1..20: note = Description of Artificial Sequence: Synthetic oligonucleotide
  misc_feature 1..20: note = Target: SCN10A; (-) strand; PAM type: NRG; PAM sequence: AAG
  source 1..20: mol_type = other DNA
tttaggtcctgcctgagaca

SEQ ID NO: 17304 - DNA, 20 bp, synthetic construct
  misc_feature 1..20: note = Description of Artificial Sequence: Synthetic oligonucleotide
  misc_feature 1..20: note = Target: SCN10A; (-) strand; PAM type: NRG; PAM sequence: GAG
  source 1..20: mol_type = other DNA
caaatgtttaggtcctgcct

SEQ ID NO: 17305 - DNA, 20 bp, synthetic construct
  misc_feature 1..20: note = Description of Artificial Sequence: Synthetic oligonucleotide
  misc_feature 1..20: note = Target: SCN10A; (-) strand; PAM type: NRG; PAM sequence: AGG
  source 1..20: mol_type = other DNA
atgctgcttgtcaaatgttt

SEQ ID NO: 17306 - DNA, 20 bp, synthetic construct
  misc_feature 1..20: note = Description of Artificial Sequence: Synthetic oligonucleotide
  misc_feature 1..20: note = Target: SCN10A; (-) strand; PAM type: NRG; PAM sequence: TAG
  source 1..20: mol_type = other DNA
gatgctgcttgtcaaatgtt

SEQ ID NO: 17307 - DNA, 20 bp, synthetic construct
  misc_feature 1..20: note = Description of Artificial Sequence: Synthetic oligonucleotide
  misc_feature 1..20: note = Target: SCN10A; (-) strand; PAM type: NRG; PAM sequence: GAG
  source 1..20: mol_type = other DNA
gattattttgaagcttaaat

SEQ ID NO: 17308 - DNA, 20 bp, synthetic construct
  misc_feature 1..20: note = Description of Artificial Sequence: Synthetic oligonucleotide
  misc_feature 1..20: note = Target: SCN10A; (-) strand; PAM type: NRG; PAM sequence: AAG
  source 1..20: mol_type = other DNA
tacttggtaggattattttg

SEQ ID NO: 17309 - DNA, 20 bp, synthetic construct
  misc_feature 1..20: note = Description of Artificial Sequence: Synthetic oligonucleotide
  misc_feature 1..20: note = Target: SCN10A; (-) strand; PAM type: NRG; PAM sequence: AGG
  source 1..20: mol_type = other DNA
aatggtaatgcctacttggt

SEQ ID NO: 17310 - DNA, 20 bp, synthetic construct
  misc_feature 1..20: note = Description of Artificial Sequence: Synthetic oligonucleotide
  misc_feature 1..20: note = Target: SCN10A; (-) strand; PAM type: NRG; PAM sequence: TAG
  source 1..20: mol_type = other DNA
gaatggtaatgcctacttgg

SEQ ID NO: 17311 - DNA, 20 bp, synthetic construct
  misc_feature 1..20: note = Description of Artificial Sequence: Synthetic oligonucleotide
  misc_feature 1..20: note = Target: SCN10A; (-) strand; PAM type: NRG; PAM sequence: TGG
  source 1..20: mol_type = other DNA
actgaatggtaatgcctact

SEQ ID NO: 17312 - DNA, 20 bp, synthetic construct
  misc_feature 1..20: note = Description of Artificial Sequence: Synthetic oligonucleotide
  misc_feature 1..20: note = Target: SCN10A; (-) strand; PAM type: NRG; PAM sequence: TGG
  source 1..20: mol_type = other DNA
tattcatctatgaaactgaa

SEQ ID NO: 17313 - DNA, 20 bp, synthetic construct
  misc_feature 1..20: note = Description of Artificial Sequence: Synthetic oligonucleotide
  misc_feature 1..20: note = Target: SCN10A; (-) strand; PAM type: NRG; PAM sequence: GAG
  source 1..20: mol_type = other DNA
atcagttcccaaacctctct

SEQ ID NO: 17314 - DNA, 20 bp, synthetic construct
  misc_feature 1..20: note = Description of Artificial Sequence: Synthetic oligonucleotide
  misc_feature 1..20: note = Target: SCN10A; (-) strand; PAM type: NRG; PAM sequence: CAG
  source 1..20: mol_type = other DNA
caagctgtgggacctaagat

SEQ ID NO: 17315 - DNA, 20 bp, synthetic construct
  misc_feature 1..20: note = Description of Artificial Sequence: Synthetic oligonucleotide
  misc_feature 1..20: note = Target: SCN10A; (-) strand; PAM type: NRG; PAM sequence: AAG
  source 1..20: mol_type = other DNA
ctccacaagctgtgggacct

SEQ ID NO: 17316 - DNA, 20 bp, synthetic construct
  misc_feature 1..20: note = Description of Artificial Sequence: Synthetic oligonucleotide
  misc_feature 1..20: note = Target: SCN10A; (-) strand; PAM type: NRG; PAM sequence: GGG
  source 1..20: mol_type = other DNA
agtgagactccacaagctgt

SEQ ID NO: 17317 - DNA, 20 bp, synthetic construct
  misc_feature 1..20: note = Description of Artificial Sequence: Synthetic oligonucleotide
  misc_feature 1..20: note = Target: SCN10A; (-) strand; PAM type: NRG; PAM sequence: TGG
  source 1..20: mol_type = other DNA
gagtgagactccacaagctg

SEQ ID NO: 17318 - DNA, 20 bp, synthetic construct
  misc_feature 1..20: note = Description of Artificial Sequence: Synthetic oligonucleotide
  misc_feature 1..20: note = Target: SCN10A; (-) strand; PAM type: NRG; PAM sequence: AAG
  source 1..20: mol_type = other DNA
aagaaagagtgagactccac

SEQ ID NO: 17319 - DNA, 20 bp, synthetic construct
  misc_feature 1..20: note = Description of Artificial Sequence: Synthetic oligonucleotide
  misc_feature 1..20: note = Target: SCN10A; (-) strand; PAM type: NRG; PAM sequence: GAG
  source 1..20: mol_type = other DNA
taggtatagaaagaaagagt

SEQ ID NO: 17320 - DNA, 20 bp, synthetic construct
  misc_feature 1..20: note = Description of Artificial Sequence: Synthetic oligonucleotide
  misc_feature 1..20: note = Target: SCN10A; (-) strand; PAM type: NRG; PAM sequence: GAG
  source 1..20: mol_type = other DNA
gttctaggtatagaaagaaa

SEQ ID NO: 17321 - DNA, 20 bp, synthetic construct
  misc_feature 1..20: note = Description of Artificial Sequence: Synthetic oligonucleotide
  misc_feature 1..20: note = Target: SCN10A; (-) strand; PAM type: NRG; PAM sequence: AAG
  source 1..20: mol_type = other DNA
tggttctaggtatagaaaga

SEQ ID NO: 17322 - DNA, 20 bp, synthetic construct
  misc_feature 1..20: note = Description of Artificial Sequence: Synthetic oligonucleotide
  misc_feature 1..20: note = Target: SCN10A; (-) strand; PAM type: NRG; PAM sequence: AAG
  source 1..20: mol_type = other DNA
agggtggttctaggtataga

SEQ ID NO: 17323 - DNA, 20 bp, synthetic construct
  misc_feature 1..20: note = Description of Artificial Sequence: Synthetic oligonucleotide
  misc_feature 1..20: note = Target: SCN10A; (-) strand; PAM type: NRG; PAM sequence: TAG
  source 1..20: mol_type = other DNA
ctccagggtggttctaggta

SEQ ID NO: 17324 - DNA, 20 bp, synthetic construct
  misc_feature 1..20: note = Description of Artificial Sequence: Synthetic oligonucleotide
  misc_feature 1..20: note = Target: SCN10A; (-) strand; PAM type: NRG; PAM sequence: AGG
  source 1..20: mol_type = other DNA
tctcactccagggtggttct

SEQ ID NO: 17325 - DNA, 20 bp, synthetic construct
  misc_feature 1..20: note = Description of Artificial Sequence: Synthetic oligonucleotide
  misc_feature 1..20: note = Target: SCN10A; (-) strand; PAM type: NRG; PAM sequence: TAG
  source 1..20: mol_type = other DNA
atctcactccagggtggttc

SEQ ID NO: 17326 - DNA, 20 bp, synthetic construct
  misc_feature 1..20: note = Description of Artificial Sequence: Synthetic oligonucleotide
  misc_feature 1..20: note = Target: SCN10A; (-) strand; PAM type: NRG; PAM sequence: TGG
  source 1..20: mol_type = other DNA
gccacaatctcactccaggg

SEQ ID NO: 17327 - DNA, 20 bp, synthetic construct
  misc_feature 1..20: note = Description of Artificial Sequence: Synthetic oligonucleotide
  misc_feature 1..20: note = Target: SCN10A; (-) strand; PAM type: NRG; PAM sequence: GGG
  source 1..20: mol_type = other DNA
attgccacaatctcactcca

SEQ ID NO: 17328 - DNA, 20 bp, synthetic construct
  misc_feature 1..20: note = Description of Artificial Sequence: Synthetic oligonucleotide
  misc_feature 1..20: note = Target: SCN10A; (-) strand; PAM type: NRG; PAM sequence: AGG
  source 1..20: mol_type = other DNA
cattgccacaatctcactcc

SEQ ID NO: 17329 - DNA, 20 bp, synthetic construct
  misc_feature 1..20: note = Description of Artificial Sequence: Synthetic oligonucleotide
  misc_feature 1..20: note = Target: SCN10A; (-) strand; PAM type: NRG; PAM sequence: CAG
  source 1..20: mol_type = other DNA
ccattgccacaatctcactc

SEQ ID NO: 17330 - DNA, 20 bp, synthetic construct
  misc_feature 1..20: note = Description of Artificial Sequence: Synthetic oligonucleotide
  misc_feature 1..20: note = Target: SCN10A; (-) strand; PAM type: NRG; PAM sequence: CGG
  source 1..20: mol_type = other DNA
ttaaagtccctcccaacctc

SEQ ID NO: 17331 - DNA, 20 bp, synthetic construct
  misc_feature 1..20: note = Description of Artificial Sequence: Synthetic oligonucleotide
  misc_feature 1..20: note = Target: SCN10A; (-) strand; PAM type: NRG; PAM sequence: AAG
  source 1..20: mol_type = other DNA
tcttatcctgggaattttta

SEQ ID NO: 17332 - DNA, 20 bp, synthetic construct
  misc_feature 1..20: note = Description of Artificial Sequence: Synthetic oligonucleotide
  misc_feature 1..20: note = Target: SCN10A; (-) strand; PAM type: NRG; PAM sequence: GGG
  source 1..20: mol_type = other DNA
ataacctcatttcttatcct

SEQ ID NO: 17333 - DNA, 20 bp, synthetic construct
  misc_feature 1..20: note = Description of Artificial Sequence: Synthetic oligonucleotide
  misc_feature 1..20: note = Target: SCN10A; (-) strand; PAM type: NRG; PAM sequence: TGG
  source 1..20: mol_type = other DNA
cataacctcatttcttatcc

SEQ ID NO: 17334 - DNA, 20 bp, synthetic construct
  misc_feature 1..20: note = Description of Artificial Sequence: Synthetic oligonucleotide
  misc_feature 1..20: note = Target: SCN10A; (-) strand; PAM type: NRG; PAM sequence: CAG
  source 1..20: mol_type = other DNA
gcggtgaaggtggggtattc

SEQ ID NO: 17335 - DNA, 20 bp, synthetic construct
  misc_feature 1..20: note = Description of Artificial Sequence: Synthetic oligonucleotide
  misc_feature 1..20: note = Target: SCN10A; (-) strand; PAM type: NRG; PAM sequence: GGG
  source 1..20: mol_type = other DNA
ggagggtggcggtgaaggtg

SEQ ID NO: 17336 - DNA, 20 bp, synthetic construct
  misc_feature 1..20: note = Description of Artificial Sequence: Synthetic oligonucleotide
  misc_feature 1..20: note = Target: SCN10A; (-) strand; PAM type: NRG; PAM sequence: GGG
  source 1..20: mol_type = other DNA
tggagggtggcggtgaaggt

SEQ ID NO: 17337 - DNA, 20 bp, synthetic construct
  misc_feature 1..20: note = Description of Artificial Sequence: Synthetic oligonucleotide
  misc_feature 1..20: note = Target: SCN10A; (-) strand; PAM type: NRG; PAM sequence: TGG
  source 1..20: mol_type = other DNA
ctggagggtggcggtgaagg

SEQ ID NO: 17338 - DNA, 20 bp, synthetic construct
  misc_feature 1..20: note = Description of Artificial Sequence: Synthetic oligonucleotide
  misc_feature 1..20: note = Target: SCN10A; (-) strand; PAM type: NRG; PAM sequence: AGG
  source 1..20: mol_type = other DNA
aggctggagggtggcggtga

SEQ ID NO: 17339 - DNA, 20 bp, synthetic construct
  misc_feature 1..20: note = Description of Artificial Sequence: Synthetic oligonucleotide
  misc_feature 1..20: note = Target: SCN10A; (-) strand; PAM type: NRG; PAM sequence: AAG
  source 1..20: mol_type = other DNA
gaggctggagggtggcggtg

SEQ ID NO: 17340 - DNA, 20 bp, synthetic construct
  misc_feature 1..20: note = Description of Artificial Sequence: Synthetic oligonucleotide
  misc_feature 1..20: note = Target: SCN10A; (-) strand; PAM type: NRG; PAM sequence: CGG
  source 1..20: mol_type = other DNA
tggtagaggctggagggtgg

SEQ ID NO: 17341 - DNA, 20 bp, synthetic construct
  misc_feature 1..20: note = Description of Artificial Sequence: Synthetic oligonucleotide
  misc_feature 1..20: note = Target: SCN10A; (-) strand; PAM type: NRG; PAM sequence: TGG
  source 1..20: mol_type = other DNA
ggctggtagaggctggaggg

SEQ ID NO: 17342 - DNA, 20 bp, synthetic construct
  misc_feature 1..20: note = Description of Artificial Sequence: Synthetic oligonucleotide
  misc_feature 1..20: note = Target: SCN10A; (-) strand; PAM type: NRG; PAM sequence: GGG
  source 1..20: mol_type = other DNA
gtgggctggtagaggctgga

SEQ ID NO: 17343 - DNA, 20 bp, synthetic construct
  misc_feature 1..20: note = Description of Artificial Sequence: Synthetic oligonucleotide
  misc_feature 1..20: note = Target: SCN10A; (-) strand; PAM type: NRG; PAM sequence: AGG
  source 1..20: mol_type = other DNA
agtgggctggtagaggctgg

SEQ ID NO: 17344 - DNA, 20 bp, synthetic construct
  misc_feature 1..20: note = Description of Artificial Sequence: Synthetic oligonucleotide
  misc_feature 1..20: note = Target: SCN10A; (-) strand; PAM type: NRG; PAM sequence: GAG
  source 1..20: mol_type = other DNA
cagtgggctggtagaggctg

SEQ ID NO: 17345 - DNA, 20 bp, synthetic construct
  misc_feature 1..20: note = Description of Artificial Sequence: Synthetic oligonucleotide
  misc_feature 1..20: note = Target: SCN10A; (-) strand; PAM type: NRG; PAM sequence: TGG
  source 1..20: mol_type = other DNA
agcagtgggctggtagaggc

SEQ ID NO: 17346 - DNA, 20 bp, synthetic construct
  misc_feature 1..20: note = Description of Artificial Sequence: Synthetic oligonucleotide
  misc_feature 1..20: note = Target: SCN10A; (-) strand; PAM type: NRG; PAM sequence: AGG
  source 1..20: mol_type = other DNA
actgagcagtgggctggtag

SEQ ID NO: 17347 - DNA, 20 bp, synthetic construct
  misc_feature 1..20: note = Description of Artificial Sequence: Synthetic oligonucleotide
  misc_feature 1..20: note = Target: SCN10A; (-) strand; PAM type: NRG; PAM sequence: GAG
  source 1..20: mol_type = other DNA
cactgagcagtgggctggta

SEQ ID NO: 17348 - DNA, 20 bp, synthetic construct
  misc_feature 1..20: note = Description of Artificial Sequence: Synthetic oligonucleotide
  misc_feature 1..20: note = Target: SCN10A; (-) strand; PAM type: NRG; PAM sequence: TAG
  source 1..20: mol_type = other DNA
gacactgagcagtgggctgg

SEQ ID NO: 17349 - DNA, 20 bp, synthetic construct
  misc_feature 1..20: note = Description of Artificial Sequence: Synthetic oligonucleotide
  misc_feature 1..20: note = Target: SCN10A; (-) strand; PAM type: NRG; PAM sequence: TGG
  source 1..20: mol_type = other DNA
ccagacactgagcagtgggc

SEQ ID NO: 17350 - DNA, 20 bp, synthetic construct
  misc_feature 1..20: note = Description of Artificial Sequence: Synthetic oligonucleotide
  misc_feature 1..20: note = Target: SCN10A; (-) strand; PAM type: NRG; PAM sequence: GGG
  source 1..20: mol_type = other DNA
ccagccagacactgagcagt

SEQ ID NO: 17351 - DNA, 20 bp, synthetic construct
  misc_feature 1..20: note = Description of Artificial Sequence: Synthetic oligonucleotide
  misc_feature 1..20: note = Target: SCN10A; (-) strand; PAM type: NRG; PAM sequence: TGG
  source 1..20: mol_type = other DNA
gccagccagacactgagcag

SEQ ID NO: 17352 - DNA, 20 bp, synthetic construct
  misc_feature 1..20: note = Description of Artificial Sequence: Synthetic oligonucleotide
  misc_feature 1..20: note = Target: SCN10A; (-) strand; PAM type: NRG; PAM sequence: CAG
  source 1..20: mol_type = other DNA
acagccagccagacactgag

SEQ ID NO: 17353 - DNA, 20 bp, synthetic construct
  misc_feature 1..20: note = Description of Artificial Sequence: Synthetic oligonucleotide
  misc_feature 1..20: note = Target: SCN10A; (-) strand; PAM type: NRG; PAM sequence: GAG
  source 1..20: mol_type = other DNA
tggacagccagccagacact

SEQ ID NO: 17354 - DNA, 20 bp, synthetic construct
  misc_feature 1..20: note = Description of Artificial Sequence: Synthetic oligonucleotide
  misc_feature 1..20: note = Target: SCN10A; (-) strand; PAM type: NRG; PAM sequence: CAG
  source 1..20: mol_type = other DNA
ggagaggttggacagccagc

SEQ ID NO: 17355 - DNA, 20 bp, synthetic construct
  misc_feature 1..20: note = Description of Artificial Sequence: Synthetic oligonucleotide
  misc_feature 1..20: note = Target: SCN10A; (-) strand; PAM type: NRG; PAM sequence: CAG
  source 1..20: mol_type = other DNA
tcctggagaggttggacagc

SEQ ID NO: 17356 - DNA, 20 bp, synthetic construct
  misc_feature 1..20: note = Description of Artificial Sequence: Synthetic oligonucleotide
  misc_feature 1..20: note = Target: SCN10A; (-) strand; PAM type: NRG; PAM sequence: CAG
  source 1..20: mol_type = other DNA
agcttcctggagaggttgga

SEQ ID NO: 17357 - DNA, 20 bp, synthetic construct
  misc_feature 1..20: note = Description of Artificial Sequence: Synthetic oligonucleotide
  misc_feature 1..20: note = Target: SCN10A; (-) strand; PAM type: NRG; PAM sequence: TGG
  source 1..20: mol_type = other DNA
tgtcagcttcctggagaggt

SEQ ID NO: 17358 - DNA, 20 bp, synthetic construct
  misc_feature 1..20: note = Description of Artificial Sequence: Synthetic oligonucleotide
  misc_feature 1..20: note = Target: SCN10A; (-) strand; PAM type: NRG; PAM sequence: AGG
  source 1..20: mol_type = other DNA
ggtatgtcagcttcctggag

SEQ ID NO: 17359 - DNA, 20 bp, synthetic construct
  misc_feature 1..20: note = Description of Artificial Sequence: Synthetic oligonucleotide
  misc_feature 1..20: note = Target: SCN10A; (-) strand; PAM type: NRG; PAM sequence: GAG
  source 1..20: mol_type = other DNA
aggtatgtcagcttcctgga

SEQ ID NO: 17360 - DNA, 20 bp, synthetic construct
  misc_feature 1..20: note = Description of Artificial Sequence: Synthetic oligonucleotide
  misc_feature 1..20: note = Target: SCN10A; (-) strand; PAM type: NRG; PAM sequence: GAG
  source 1..20: mol_type = other DNA
gtaggtatgtcagcttcctg

SEQ ID NO: 17361 - DNA, 20 bp, synthetic construct
  misc_feature 1..20: note = Description of Artificial Sequence: Synthetic oligonucleotide
  misc_feature 1..20: note = Target: SCN10A; (-) strand; PAM type: NRG; PAM sequence: TGG
  source 1..20: mol_type = other DNA
aggtaggtatgtcagcttcc

SEQ ID NO: 17362 - DNA, 20 bp, synthetic construct
  misc_feature 1..20: note = Description of Artificial Sequence: Synthetic oligonucleotide
  misc_feature 1..20: note = Target: SCN10A; (-) strand; PAM type: NRG; PAM sequence: CAG
  source 1..20: mol_type = other DNA
ccctgctgaggtaggtatgt

SEQ ID NO: 17363 - DNA, 20 bp, synthetic construct
  misc_feature 1..20: note = Description of Artificial Sequence: Synthetic oligonucleotide
  misc_feature 1..20: note = Target: SCN10A; (-) strand; PAM type: NRG; PAM sequence: AGG
  source 1..20: mol_type = other DNA
cctcaggtccctgctgaggt

SEQ ID NO: 17364 - DNA, 20 bp, synthetic construct
  misc_feature 1..20: note = Description of Artificial Sequence: Synthetic oligonucleotide
  misc_feature 1..20: note = Target: SCN10A; (-) strand; PAM type: NRG; PAM sequence: TAG
  source 1..20: mol_type = other DNA
tcctcaggtccctgctgagg

SEQ ID NO: 17365 - DNA, 20 bp, synthetic construct
  misc_feature 1..20: note = Description of Artificial Sequence: Synthetic oligonucleotide
  misc_feature 1..20: note = Target: SCN10A; (-) strand; PAM type: NRG; PAM sequence: AGG
  source 1..20: mol_type = other DNA
tgttcctcaggtccctgctg

SEQ ID NO: 17366 - DNA, 20 bp, synthetic construct
  misc_feature 1..20: note = Description of Artificial Sequence: Synthetic oligonucleotide
  misc_feature 1..20: note = Target: SCN10A; (-) strand; PAM type: NRG; PAM sequence: GAG
  source 1..20: mol_type = other DNA
ctgttcctcaggtccctgct

SEQ ID NO: 17367 - DNA, 20 bp, synthetic construct
  misc_feature 1..20: note = Description of Artificial Sequence: Synthetic oligonucleotide
  misc_feature 1..20: note = Target: SCN10A; (-) strand; PAM type: NRG; PAM sequence: AGG
  source 1..20: mol_type = other DNA
gaaagatgagtctgttcctc

SEQ ID NO: 17368 - DNA, 20 bp, synthetic construct
  misc_feature 1..20: note = Description of Artificial Sequence: Synthetic oligonucleotide
  misc_feature 1..20: note = Target: SCN10A; (-) strand; PAM type: NRG; PAM sequence: CAG
  source 1..20: mol_type = other DNA
ggaaagatgagtctgttcct

SEQ ID NO: 17369 - DNA, 20 bp, synthetic construct
  misc_feature 1..20: note = Description of Artificial Sequence: Synthetic oligonucleotide
  misc_feature 1..20: note = Target: SCN10A; (-) strand; PAM type: NRG; PAM sequence: GAG
  source 1..20: mol_type = other DNA
tgggtgagacgtggaaagat

SEQ ID NO: 17370 - DNA, 20 bp, synthetic construct
  misc_feature 1..20: note = Description of Artificial Sequence: Synthetic oligonucleotide
  misc_feature 1..20: note = Target: SCN10A; (-) strand; PAM type: NRG; PAM sequence: AAG
  source 1..20: mol_type = other DNA
atccctgggtgagacgtgga

SEQ ID NO: 17371 - DNA, 20 bp, synthetic construct
  misc_feature 1..20: note = Description of Artificial Sequence: Synthetic oligonucleotide
  misc_feature 1..20: note = Target: SCN10A; (-) strand; PAM type: NRG; PAM sequence: TGG
  source 1..20: mol_type = other DNA
ctccatccctgggtgagacg

SEQ ID NO: 17372 - DNA, 20 bp, synthetic construct
  misc_feature 1..20: note = Description of Artificial Sequence: Synthetic oligonucleotide
  misc_feature 1..20: note = Target: SCN10A; (-) strand; PAM type: NRG; PAM sequence: GAG
  source 1..20: mol_type = other DNA
acctggctccatccctgggt

SEQ ID NO: 17373 - DNA, 20 bp, synthetic construct
  misc_feature 1..20: note = Description of Artificial Sequence: Synthetic oligonucleotide
  misc_feature 1..20: note = Target: SCN10A; (-) strand; PAM type: NRG; PAM sequence: GGG
  source 1..20: mol_type = other DNA
gaggacctggctccatccct

SEQ ID NO: 17374 - DNA, 20 bp, synthetic construct
  misc_feature 1..20: note = Description of Artificial Sequence: Synthetic oligonucleotide
  misc_feature 1..20: note = Target: SCN10A; (-) strand; PAM type: NRG; PAM sequence: TGG
  source 1..20: mol_type = other DNA
tgaggacctggctccatccc

SEQ ID NO: 17375 - DNA, 20 bp, synthetic construct
  misc_feature 1..20: note = Description of Artificial Sequence: Synthetic oligonucleotide
  misc_feature 1..20: note = Target: SCN10A; (-) strand; PAM type: NRG; PAM sequence: TGG
  source 1..20: mol_type = other DNA
tggaacatcttctgaggacc

SEQ ID NO: 17376 - DNA, 20 bp, synthetic construct
  misc_feature 1..20: note = Description of Artificial Sequence: Synthetic oligonucleotide
  misc_feature 1..20: note = Target: SCN10A; (-) strand; PAM type: NRG; PAM sequence: AGG
  source 1..20: mol_type = other DNA
aggcactggaacatcttctg

SEQ ID NO: 17377 - DNA, 20 bp, synthetic construct
  misc_feature 1..20: note = Description of Artificial Sequence: Synthetic oligonucleotide
  misc_feature 1..20: note = Target: SCN10A; (-) strand; PAM type: NRG; PAM sequence: GAG
  source 1..20: mol_type = other DNA
caggcactggaacatcttct

SEQ ID NO: 17378 - DNA, 20 bp, synthetic construct
  misc_feature 1..20: note = Description of Artificial Sequence: Synthetic oligonucleotide
  misc_feature 1..20: note = Target: SCN10A; (-) strand; PAM type: NRG; PAM sequence: TGG
  source 1..20: mol_type = other DNA
acacccaggagcccaggcac

SEQ ID NO: 17379 - DNA, 20 bp, synthetic construct
  misc_feature 1..20: note = Description of Artificial Sequence: Synthetic oligonucleotide
  misc_feature 1..20: note = Target: SCN10A; (-) strand; PAM type: NRG; PAM sequence: AGG
  source 1..20: mol_type = other DNA
cacctgacacccaggagccc

SEQ ID NO: 17380 - DNA, 20 bp, synthetic construct
  misc_feature 1..20: note = Description of Artificial Sequence: Synthetic oligonucleotide
  misc_feature 1..20: note = Target: SCN10A; (-) strand; PAM type: NRG; PAM sequence: CAG
  source 1..20: mol_type = other DNA
ccacctgacacccaggagcc

SEQ ID NO: 17381 - DNA, 20 bp, synthetic construct
  misc_feature 1..20: note = Description of Artificial Sequence: Synthetic oligonucleotide
  misc_feature 1..20: note = Target: SCN10A; (-) strand; PAM type: NRG; PAM sequence: GAG
  source 1..20: mol_type = other DNA
ggggaccacctgacacccag

SEQ ID NO: 17382 - DNA, 20 bp, synthetic construct
  misc_feature 1..20: note = Description of Artificial Sequence: Synthetic oligonucleotide
  misc_feature 1..20: note = Target: SCN10A; (-) strand; PAM type: NRG; PAM sequence: AGG
  source 1..20: mol_type = other DNA
gtggggaccacctgacaccc

SEQ ID NO: 17383 - DNA, 20 bp, synthetic construct
  misc_feature 1..20: note = Description of Artificial Sequence: Synthetic oligonucleotide
  misc_feature 1..20: note = Target: SCN10A; (-) strand; PAM type: NRG; PAM sequence: CAG
  source 1..20: mol_type = other DNA
tgtggggaccacctgacacc

SEQ ID NO: 17384 - DNA, 20 bp, synthetic construct
  misc_feature 1..20: note = Description of Artificial Sequence: Synthetic oligonucleotide
  misc_feature 1..20: note = Target: SCN10A; (-) strand; PAM type: NRG; PAM sequence: GGG
  source 1..20: mol_type = other DNA
gcagcaagtcgagaggtgtg

SEQ ID NO: 17385 - DNA, 20 bp, synthetic construct
  misc_feature 1..20: note = Description of Artificial Sequence: Synthetic oligonucleotide
  misc_feature 1..20: note = Target: SCN10A; (-) strand; PAM type: NRG; PAM sequence: GGG
  source 1..20: mol_type = other DNA
tgcagcaagtcgagaggtgt

SEQ ID NO: 17386 - DNA, 20 bp, synthetic construct
  misc_feature 1..20: note = Description of Artificial Sequence: Synthetic oligonucleotide
  misc_feature 1..20: note = Target: SCN10A; (-) strand; PAM type: NRG; PAM sequence: TGG
  source 1..20: mol_type = other DNA
ctgcagcaagtcgagaggtg

SEQ ID NO: 17387 - DNA, 20 bp, synthetic construct
  misc_feature 1..20: note = Description of Artificial Sequence: Synthetic oligonucleotide
  misc_feature 1..20: note = Target: SCN10A; (-) strand; PAM type: NRG; PAM sequence: AGG
  source 1..20: mol_type = other DNA
agcagctgcagcaagtcgag

SEQ ID NO: 17388 - DNA, 20 bp, synthetic construct
  misc_feature 1..20: note = Description of Artificial Sequence: Synthetic oligonucleotide
  misc_feature 1..20: note = Target: SCN10A; (-) strand; PAM type: NRG; PAM sequence: GAG
  source 1..20: mol_type = other DNA
gagcagctgcagcaagtcga

SEQ ID NO: 17389 - DNA, 20 bp, synthetic construct
  misc_feature 1..20: note = Description of Artificial Sequence: Synthetic oligonucleotide
  misc_feature 1..20: note = Target: SCN10A; (-) strand; PAM type: NRG; PAM sequence: GAG
  source 1..20: mol_type = other DNA
aggagcagctgcagcaagtc

SEQ ID NO: 17390 - DNA, 20 bp, synthetic construct
  misc_feature 1..20: note = Description of Artificial Sequence: Synthetic oligonucleotide
  misc_feature 1..20: note = Target: SCN10A; (-) strand; PAM type: NRG; PAM sequence: AAG
  source 1..20: mol_type = other DNA
ctagcaggagcagctgcagc

SEQ ID NO: 17391 - DNA, 20 bp, synthetic construct
  misc_feature 1..20: note = Description of Artificial Sequence: Synthetic oligonucleotide
  misc_feature 1..20: note = Target: SCN10A; (-) strand; PAM type: NRG; PAM sequence: CAG
  source 1..20: mol_type = other DNA
ctcactagcaggagcagctg

SEQ ID NO: 17392 - DNA, 20 bp, synthetic construct
  misc_feature 1..20: note = Description of Artificial Sequence: Synthetic oligonucleotide
  misc_feature 1..20: note = Target: SCN10A; (-) strand; PAM type: NRG; PAM sequence: CAG
  source 1..20: mol_type = other DNA
ccctctctcactagcaggag

SEQ ID NO: 17393 - DNA, 20 bp, synthetic construct
  misc_feature 1..20: note = Description of Artificial Sequence: Synthetic oligonucleotide
  misc_feature 1..20: note = Target: SCN10A; (-) strand; PAM type: NRG; PAM sequence: GAG
  source 1..20: mol_type = other DNA
ggaccctctctcactagcag

SEQ ID NO: 17394 - DNA, 20 bp, synthetic construct
  misc_feature 1..20: note = Description of Artificial Sequence: Synthetic oligonucleotide
  misc_feature 1..20: note = Target: SCN10A; (-) strand; PAM type: NRG; PAM sequence: AGG
  source 1..20: mol_type = other DNA
tgggaccctctctcactagc

SEQ ID NO: 17395 - DNA, 20 bp, synthetic construct
  misc_feature 1..20: note = Description of Artificial Sequence: Synthetic oligonucleotide
  misc_feature 1..20: note = Target: SCN10A; (-) strand; PAM type: NRG; PAM sequence: CAG
  source 1..20: mol_type = other DNA
ttgggaccctctctcactag

SEQ ID NO: 17396 - DNA, 20 bp, synthetic construct
  misc_feature 1..20: note = Description of Artificial Sequence: Synthetic oligonucleotide
  misc_feature 1..20: note = Target: SCN10A; (-) strand; PAM type: NRG; PAM sequence: TAG
  source 1..20: mol_type = other DNA
cagttgggaccctctctcac

SEQ ID NO: 17397 - DNA, 20 bp, synthetic construct
  misc_feature 1..20: note = Description of Artificial Sequence: Synthetic oligonucleotide
  misc_feature 1..20: note = Target: SCN10A; (-) strand; PAM type: NRG; PAM sequence: GGG
  source 1..20: mol_type = other DNA
gtggggccaggcacccagtt

SEQ ID NO: 17398 - DNA, 20 bp, synthetic construct
  misc_feature 1..20: note = Description of Artificial Sequence: Synthetic oligonucleotide
  misc_feature 1..20: note = Target: SCN10A; (-) strand; PAM type: NRG; PAM sequence: TGG
  source 1..20: mol_type = other DNA
ggtggggccaggcacccagt

SEQ ID NO: 17399 - DNA, 20 bp, synthetic construct
  misc_feature 1..20: note = Description of Artificial Sequence: Synthetic oligonucleotide
  misc_feature 1..20: note = Target: SCN10A; (-) strand; PAM type: NRG; PAM sequence: CAG
  source 1..20: mol_type = other DNA
taagggtggggccaggcacc

SEQ ID NO: 17400 - DNA, 20 bp, synthetic construct
  misc_feature 1..20: note = Description of Artificial Sequence: Synthetic oligonucleotide
  misc_feature 1..20: note = Target: SCN10A; (-) strand; PAM type: NRG; PAM sequence: AGG
  source 1..20: mol_type = other DNA
ggtcatctaagggtggggcc

SEQ ID NO: 17401 - DNA, 20 bp, synthetic construct
  misc_feature 1..20: note = Description of Artificial Sequence: Synthetic oligonucleotide
  misc_feature 1..20: note = Target: SCN10A; (-) strand; PAM type: NRG; PAM sequence: CAG
  source 1..20: mol_type = other DNA
tggtcatctaagggtggggc

SEQ ID NO: 17402 - DNA, 20 bp, synthetic construct
  misc_feature 1..20: note = Description of Artificial Sequence: Synthetic oligonucleotide
  misc_feature 1..20: note = Target: SCN10A; (-) strand; PAM type: NRG; PAM sequence: GGG
  source 1..20: mol_type = other DNA
gaactggtcatctaagggtg

SEQ ID NO: 17403 - DNA, 20 bp, synthetic construct
  misc_feature 1..20: note = Description of Artificial Sequence: Synthetic oligonucleotide
  misc_feature 1..20: note = Target: SCN10A; (-) strand; PAM type: NRG; PAM sequence: GGG
  source 1..20: mol_type = other DNA
agaactggtcatctaagggt

SEQ ID NO: 17404 - DNA, 20 bp, synthetic construct
  misc_feature 1..20: note = Description of Artificial Sequence: Synthetic oligonucleotide
  misc_feature 1..20: note = Target: SCN10A; (-) strand; PAM type: NRG; PAM sequence: TGG
  source 1..20: mol_type = other DNA
tagaactggtcatctaaggg

SEQ ID NO: 17405 - DNA, 20 bp, synthetic construct
  misc_feature 1..20: note = Description of Artificial Sequence: Synthetic oligonucleotide
  misc_feature 1..20: note = Target: SCN10A; (-) strand; PAM type: NRG; PAM sequence: GGG
  source 1..20: mol_type = other DNA
atttagaactggtcatctaa

SEQ ID NO: 17406 - DNA, 20 bp, synthetic construct
  misc_feature 1..20: note = Description of Artificial Sequence: Synthetic oligonucleotide
  misc_feature 1..20: note = Target: SCN10A; (-) strand; PAM type: NRG; PAM sequence: AGG
  source 1..20: mol_type = other DNA
aatttagaactggtcatcta

SEQ ID NO: 17407 - DNA, 20 bp, synthetic construct
  misc_feature 1..20: note = Description of Artificial Sequence: Synthetic oligonucleotide
  misc_feature 1..20: note = Target: SCN10A; (-) strand; PAM type: NRG; PAM sequence: AAG
  source 1..20: mol_type = other DNA
aaatttagaactggtcatct

SEQ ID NO: 17408 - DNA, 20 bp, synthetic construct
  misc_feature 1..20: note = Description of Artificial Sequence: Synthetic oligonucleotide
  misc_feature 1..20: note = Target: SCN10A; (-) strand; PAM type: NRG; PAM sequence: TGG
  source 1..20: mol_type = other DNA
gatcccttcaaatttagaac

SEQ ID NO: 17409 - DNA, 20 bp, synthetic construct
  misc_feature 1..20: note = Description of Artificial Sequence: Synthetic oligonucleotide
  misc_feature 1..20: note = Target: SCN10A; (-) strand; PAM type: NRG; PAM sequence: TAG
  source 1..20: mol_type = other DNA
gtgcaagatcccttcaaatt

SEQ ID NO: 17410 - DNA, 20 bp, synthetic construct
  misc_feature 1..20: note = Description of Artificial Sequence: Synthetic oligonucleotide
  misc_feature 1..20: note = Target: SCN10A; (-) strand; PAM type: NRG; PAM sequence: AAG
  source 1..20: mol_type = other DNA
tctggcagcctgtgatgtgc

SEQ ID NO: 17411 - DNA, 20 bp, synthetic construct
  misc_feature 1..20: note = Description of Artificial Sequence: Synthetic oligonucleotide
  misc_feature 1..20: note = Target: SCN10A; (-) strand; PAM type: NRG; PAM sequence: CAG
  source 1..20: mol_type = other DNA
tatgaaactcttggctctgg

SEQ ID NO: 17412 - DNA, 20 bp, synthetic construct
  misc_feature 1..20: note = Description of Artificial Sequence: Synthetic oligonucleotide
  misc_feature 1..20: note = Target: SCN10A; (-) strand; PAM type: NRG; PAM sequence: TGG
  source 1..20: mol_type = other DNA
atatatgaaactcttggctc

SEQ ID NO: 17413 - DNA, 20 bp, synthetic construct
  misc_feature 1..20: note = Description of Artificial Sequence: Synthetic oligonucleotide
  misc_feature 1..20: note = Target: SCN10A; (-) strand; PAM type: NRG; PAM sequence: TGG
  source 1..20: mol_type = other DNA
agttgcatatatgaaactct

SEQ ID NO: 17414 - DNA, 20 bp, synthetic construct
  misc_feature 1..20: note = Description of Artificial Sequence: Synthetic oligonucleotide
  misc_feature 1..20: note = Target: SCN10A; (-) strand; PAM type: NRG; PAM sequence: GAG
  source 1..20: mol_type = other DNA
atgtatatatgtatgtacat

SEQ ID NO: 17415 - DNA, 20 bp, synthetic construct
  misc_feature 1..20: note = Description of Artificial Sequence: Synthetic oligonucleotide
  misc_feature 1..20: note = Target: SCN10A; (-) strand; PAM type: NRG; PAM sequence: TAG
  source 1..20: mol_type = other DNA
aacataggtctatctagcta

SEQ ID NO: 17416 - DNA, 20 bp, synthetic construct
  misc_feature 1..20: note = Description of Artificial Sequence: Synthetic oligonucleotide
  misc_feature 1..20: note = Target: SCN10A; (-) strand; PAM type: NRG; PAM sequence: TAG
  source 1..20: mol_type = other DNA
ggataaaacataggtctatc

SEQ ID NO: 17417 - DNA, 20 bp, synthetic construct
  misc_feature 1..20: note = Description of Artificial Sequence: Synthetic oligonucleotide
  misc_feature 1..20: note = Target: SCN10A; (-) strand; PAM type: NRG; PAM sequence: AGG
  source 1..20: mol_type = other DNA
ggagcccaaggataaaacat

SEQ ID NO: 17418 - DNA, 20 bp, synthetic construct
  misc_feature 1..20: note = Description of Artificial Sequence: Synthetic oligonucleotide
  misc_feature 1..20: note = Target: SCN10A; (-) strand; PAM type: NRG; PAM sequence: TAG
  source 1..20: mol_type = other DNA
tggagcccaaggataaaaca

SEQ ID NO: 17419 - DNA, 20 bp, synthetic construct
  misc_feature 1..20: note = Description of Artificial Sequence: Synthetic oligonucleotide
  misc_feature 1..20: note = Target: SCN10A; (-) strand; PAM type: NRG; PAM sequence: AGG
  source 1..20: mol_type = other DNA
cttataattaatggagccca

SEQ ID NO: 17420 - DNA, 20 bp, synthetic construct
  misc_feature 1..20: note = Description of Artificial Sequence: Synthetic oligonucleotide
  misc_feature 1..20: note = Target: SCN10A; (-) strand; PAM type: NRG; PAM sequence: AAG
  source 1..20: mol_type = other DNA
tcttataattaatggagccc

SEQ ID NO: 17421 - DNA, 20 bp, synthetic construct
  misc_feature 1..20: note = Description of Artificial Sequence: Synthetic oligonucleotide
  misc_feature 1..20: note = Target: SCN10A; (-) strand; PAM type: NRG; PAM sequence: GAG
  source 1..20: mol_type = other DNA
cacacatcttataattaatg

SEQ ID NO: 17422 - DNA, 20 bp, synthetic construct
  misc_feature 1..20: note = Description of Artificial Sequence: Synthetic oligonucleotide
  misc_feature 1..20: note = Target: SCN10A; (-) strand; PAM type: NRG; PAM sequence: TGG
  source 1..20: mol_type = other DNA
gtcacacatcttataattaa

SEQ ID NO: 17423 - DNA, 20 bp, synthetic construct
  misc_feature 1..20: note = Description of Artificial Sequence: Synthetic oligonucleotide
  misc_feature 1..20: note = Target: SCN10A; (-) strand; PAM type: NRG; PAM sequence: AGG
  source 1..20: mol_type = other DNA
gaggttaaacaacttgccta

SEQ ID NO: 17424 - DNA, 20 bp, synthetic construct
  misc_feature 1..20: note = Description of Artificial Sequence: Synthetic oligonucleotide
  misc_feature 1..20: note = Target: SCN10A; (-) strand; PAM type: NRG; PAM sequence: AAG
  source 1..20: mol_type = other DNA
agaggttaaacaacttgcct

SEQ ID NO: 17425 - DNA, 20 bp, synthetic construct
  misc_feature 1..20: note = Description of Artificial Sequence: Synthetic oligonucleotide
  misc_feature 1..20: note = Target: SCN10A; (-) strand; PAM type: NRG; PAM sequence: AGG
  source 1..20: mol_type = other DNA
gggaaaaatgaagattagag

SEQ ID NO: 17426 - DNA, 20 bp, synthetic construct
  misc_feature 1..20: note = Description of Artificial Sequence: Synthetic oligonucleotide
  misc_feature 1..20: note = Target: SCN10A; (-) strand; PAM type: NRG; PAM sequence: GAG
  source 1..20: mol_type = other DNA
tgggaaaaatgaagattaga

SEQ ID NO: 17427 - DNA, 20 bp, synthetic construct
  misc_feature 1..20: note = Description of Artificial Sequence: Synthetic oligonucleotide
  misc_feature 1..20: note = Target: SCN10A; (-) strand; PAM type: NRG; PAM sequence: GAG
  source 1..20: mol_type = other DNA
gctgggaaaaatgaagatta

SEQ ID NO: 17428 - DNA, 20 bp, synthetic construct
  misc_feature 1..20: note = Description of Artificial Sequence: Synthetic oligonucleotide
  misc_feature 1..20: note = Target: SCN10A; (-) strand; PAM type: NRG; PAM sequence: TAG
  source 1..20: mol_type = other DNA
aagctgggaaaaatgaagat

SEQ ID NO: 17429 - DNA, 20 bp, synthetic construct
  misc_feature 1..20: note = Description of Artificial Sequence: Synthetic oligonucleotide
  misc_feature 1..20: note = Target: SCN10A; (-) strand; PAM type: NRG; PAM sequence: AAG
  source 1..20: mol_type = other DNA
ttttgaagctgggaaaaatg

SEQ ID NO: 17430 - DNA, 20 bp, synthetic construct
  misc_feature 1..20: note = Description of Artificial Sequence: Synthetic oligonucleotide
  misc_feature 1..20: note = Target: SCN10A; (-) strand; PAM type: NRG; PAM sequence: GGG
  source 1..20: mol_type = other DNA
gccttttcaattttgaagct

SEQ ID NO: 17431 - DNA, 20 bp, synthetic construct
  misc_feature 1..20: note = Description of Artificial Sequence: Synthetic oligonucleotide
  misc_feature 1..20: note = Target: SCN10A; (-) strand; PAM type: NRG; PAM sequence: TGG
  source 1..20: mol_type = other DNA
agccttttcaattttgaagc

SEQ ID NO: 17432 - DNA, 20 bp, synthetic construct
  misc_feature 1..20: note = Description of Artificial Sequence: Synthetic oligonucleotide
  misc_feature 1..20: note = Target: SCN10A; (-) strand; PAM type: NRG; PAM sequence: AAG
  source 1..20: mol_type = other DNA
atctagccttttcaattttg

SEQ ID NO: 17433 - DNA, 20 bp, synthetic construct
  misc_feature 1..20: note = Description of Artificial Sequence: Synthetic oligonucleotide
  misc_feature 1..20: note = Target: SCN10A; (-) strand; PAM type: NRG; PAM sequence: TAG
  source 1..20: mol_type = other DNA
acagctgaatgatgcagatc

SEQ ID NO: 17434 - DNA, 20 bp, synthetic construct
  misc_feature 1..20: note = Description of Artificial Sequence: Synthetic oligonucleotide
  misc_feature 1..20: note = Target: SCN10A; (-) strand; PAM type: NRG; PAM sequence: CAG
  source 1..20: mol_type = other DNA
atcaaaacagctgaatgatg

SEQ ID NO: 17435 - DNA, 20 bp, synthetic construct
  misc_feature 1..20: note = Description of Artificial Sequence: Synthetic oligonucleotide
  misc_feature 1..20: note = Target: SCN10A; (-) strand; PAM type: NRG; PAM sequence: CAG
  source 1..20: mol_type = other DNA
aacatatttagtcatcaaaa

SEQ ID NO: 17436 - DNA, 20 bp, synthetic construct
  misc_feature 1..20: note = Description of Artificial Sequence: Synthetic oligonucleotide
  misc_feature 1..20: note = Target: SCN10A; (-) strand; PAM type: NRG; PAM sequence: TAG
  source 1..20: mol_type = other DNA
tttacaagcgctaacatatt

SEQ ID NO: 17437 - DNA, 20 bp, synthetic construct
  misc_feature 1..20: note = Description of Artificial Sequence: Synthetic oligonucleotide
  misc_feature 1..20: note = Target: SCN10A; (-) strand; PAM type: NRG; PAM sequence: AAG
  source 1..20: mol_type = other DNA
cttcgtgcaaagtgttttac

SEQ ID NO: 17438 - DNA, 20 bp, synthetic construct
  misc_feature 1..20: note = Description of Artificial Sequence: Synthetic oligonucleotide
  misc_feature 1..20: note = Target: SCN10A; (-) strand; PAM type: NRG; PAM sequence: AAG
  source 1..20: mol_type = other DNA
tgagccaagcacttcgtgca

SEQ ID NO: 17439 - DNA, 20 bp, synthetic construct
  misc_feature 1..20: note = Description of Artificial Sequence: Synthetic oligonucleotide
  misc_feature 1..20: note = Target: SCN10A; (-) strand; PAM type: NRG; PAM sequence: AAG
  source 1..20: mol_type = other DNA
tggctaaaatctattgagcc

SEQ ID NO: 17440 - DNA, 20 bp, synthetic construct
  misc_feature 1..20: note = Description of Artificial Sequence: Synthetic oligonucleotide
  misc_feature 1..20: note = Target: SCN10A; (-) strand; PAM type: NRG; PAM sequence: GAG
  source 1..20: mol_type = other DNA
ggtcatggctaaaatctatt

SEQ ID NO: 17441 - DNA, 20 bp, synthetic construct
  misc_feature 1..20: note = Description of Artificial Sequence: Synthetic oligonucleotide
  misc_feature 1..20: note = Target: SCN10A; (-) strand; PAM type: NRG; PAM sequence: TGG
  source 1..20: mol_type = other DNA
tggacaaataacaatggtca

SEQ ID NO: 17442 - DNA, 20 bp, synthetic construct
  misc_feature 1..20: note = Description of Artificial Sequence: Synthetic oligonucleotide
  misc_feature 1..20: note = Target: SCN10A; (-) strand; PAM type: NRG; PAM sequence: TGG
  source 1..20: mol_type = other DNA
gacctctggacaaataacaa

SEQ ID NO: 17443 - DNA, 20 bp, synthetic construct
  misc_feature 1..20: note = Description of Artificial Sequence: Synthetic oligonucleotide
  misc_feature 1..20: note = Target: SCN10A; (-) strand; PAM type: NRG; PAM sequence: TGG
  source 1..20: mol_type = other DNA
ttccctacaattttgacctc

SEQ ID NO: 17444 - DNA, 20 bp, synthetic construct
  misc_feature 1..20: note = Description of Artificial Sequence: Synthetic oligonucleotide
  misc_feature 1..20: note = Target: SCN10A; (-) strand; PAM type: NRG; PAM sequence: AAG
  source 1..20: mol_type = other DNA
ttagggagctccaggtggcc

SEQ ID NO: 17445 - DNA, 20 bp, synthetic construct
  misc_feature 1..20: note = Description of Artificial Sequence: Synthetic oligonucleotide
  misc_feature 1..20: note = Target: SCN10A; (-) strand; PAM type: NRG; PAM sequence: TGG
  source 1..20: mol_type = other DNA
ggctcttagggagctccagg

SEQ ID NO: 17446 - DNA, 20 bp, synthetic construct
  misc_feature 1..20: note = Description of Artificial Sequence: Synthetic oligonucleotide
  misc_feature 1..20: note = Target: SCN10A; (-) strand; PAM type: NRG; PAM sequence: AGG
  source 1..20: mol_type = other DNA
tggggctcttagggagctcc

SEQ ID NO: 17447 - DNA, 20 bp, synthetic construct
  misc_feature 1..20: note = Description of Artificial Sequence: Synthetic oligonucleotide
  misc_feature 1..20: note = Target: SCN10A; (-) strand; PAM type: NRG; PAM sequence: CAG
  source 1..20: mol_type = other DNA
ttggggctcttagggagctc

SEQ ID NO: 17448 - DNA, 20 bp, synthetic construct
  misc_feature 1..20: note = Description of Artificial Sequence: Synthetic oligonucleotide
  misc_feature 1..20: note = Target: SCN10A; (-) strand; PAM type: NRG; PAM sequence: GAG
  source 1..20: mol_type = other DNA
gttactttggggctcttagg

SEQ ID NO: 17449 - DNA, 20 bp, synthetic construct
  misc_feature 1..20: note = Description of Artificial Sequence: Synthetic oligonucleotide
  misc_feature 1..20: note = Target: SCN10A; (-) strand; PAM type: NRG; PAM sequence: GGG
  source 1..20: mol_type = other DNA
cagttactttggggctctta

SEQ ID NO: 17450 - DNA, 20 bp, synthetic construct
  misc_feature 1..20: note = Description of Artificial Sequence: Synthetic oligonucleotide
  misc_feature 1..20: note = Target: SCN10A; (-) strand; PAM type: NRG; PAM sequence: AGG
  source 1..20: mol_type = other DNA
tcagttactttggggctctt

SEQ ID NO: 17451 - DNA, 20 bp, synthetic construct
  misc_feature 1..20: note = Description of Artificial Sequence: Synthetic oligonucleotide
  misc_feature 1..20: note = Target: SCN10A; (-) strand; PAM type: NRG; PAM sequence: TAG
  source 1..20: mol_type = other DNA
ttcagttactttggggctct

SEQ ID NO: 17452 - DNA, 20 bp, synthetic construct
  misc_feature 1..20: note = Description of Artificial Sequence: Synthetic oligonucleotide
  misc_feature 1..20: note = Target: SCN10A; (-) strand; PAM type: NRG; PAM sequence: GGG
  source 1..20: mol_type = other DNA
aagcattttcagttactttg

SEQ ID NO: 17453 - DNA, 20 bp, synthetic construct
  misc_feature 1..20: note = Description of Artificial Sequence: Synthetic oligonucleotide
  misc_feature 1..20: note = Target: SCN10A; (-) strand; PAM type: NRG; PAM sequence: GGG
  source 1..20: mol_type = other DNA
gaagcattttcagttacttt

SEQ ID NO: 17454 - DNA, 20 bp, synthetic construct
  misc_feature 1..20: note = Description of Artificial Sequence: Synthetic oligonucleotide
  misc_feature 1..20: note = Target: SCN10A; (-) strand; PAM type: NRG; PAM sequence: TGG
  source 1..20: mol_type = other DNA
agaagcattttcagttactt

SEQ ID NO: 17455 - DNA, 20 bp, synthetic construct
  misc_feature 1..20: note = Description of Artificial Sequence: Synthetic oligonucleotide
  misc_feature 1..20: note = Target: SCN10A; (-) strand; PAM type: NRG; PAM sequence: CAG
  source 1..20: mol_type = other DNA
ctgccactcagaagcatttt

SEQ ID NO: 17456 - DNA, 20 bp, synthetic construct
  misc_feature 1..20: note = Description of Artificial Sequence: Synthetic oligonucleotide
  misc_feature 1..20: note = Target: SCN10A; (-) strand; PAM type: NRG; PAM sequence: AAG
  source 1..20: mol_type = other DNA
gacagctgtctgccactcag

SEQ ID NO: 17457 - DNA, 20 bp, synthetic construct
  misc_feature 1..20: note = Description of Artificial Sequence: Synthetic oligonucleotide
  misc_feature 1..20: note = Target: SCN10A; (-) strand; PAM type: NRG; PAM sequence: CAG
  source 1..20: mol_type = other DNA
tgtgacagctgtctgccact

SEQ ID NO: 17458 - DNA, 20 bp, synthetic construct
  misc_feature 1..20: note = Description of Artificial Sequence: Synthetic oligonucleotide
  misc_feature 1..20: note = Target: SCN10A; (-) strand; PAM type: NRG; PAM sequence: CAG
  source 1..20: mol_type = other DNA
agagagcatgaactctgtga

SEQ ID NO: 17459 - DNA, 20 bp, synthetic construct
  misc_feature 1..20: note = Description of Artificial Sequence: Synthetic oligonucleotide
  misc_feature 1..20: note = Target: SCN10A; (-) strand; PAM type: NRG; PAM sequence: GAG
  source 1..20: mol_type = other DNA
tttgtctaggtaacagcaga

SEQ ID NO: 17460 - DNA, 20 bp, synthetic construct
  misc_feature 1..20: note = Description of Artificial Sequence: Synthetic oligonucleotide
  misc_feature 1..20: note = Target: SCN10A; (-) strand; PAM type: NRG; PAM sequence: GAG
  source 1..20: mol_type = other DNA
cctttgtctaggtaacagca

SEQ ID NO: 17461 - DNA, 20 bp, synthetic construct
  misc_feature 1..20: note = Description of Artificial Sequence: Synthetic oligonucleotide
  misc_feature 1..20: note = Target: SCN10A; (-) strand; PAM type: NRG; PAM sequence: CAG
  source 1..20: mol_type = other DNA
tgcctttgtctaggtaacag

SEQ ID NO: 17462 - DNA, 20 bp, synthetic construct
  misc_feature 1..20: note = Description of Artificial Sequence: Synthetic oligonucleotide
  misc_feature 1..20: note = Target: SCN10A; (-) strand; PAM type: NRG; PAM sequence: CAG
  source 1..20: mol_type = other DNA
acatgcctttgtctaggtaa

SEQ ID NO: 17463 - DNA, 20 bp, synthetic construct
  misc_feature 1..20: note = Description of Artificial Sequence: Synthetic oligonucleotide
  misc_feature 1..20: note = Target: SCN10A; (-) strand; PAM type: NRG; PAM sequence: AGG
  source 1..20: mol_type = other DNA
tattttacatgcctttgtct

SEQ ID NO: 17464 - DNA, 20 bp, synthetic construct
  misc_feature 1..20: note = Description of Artificial Sequence: Synthetic oligonucleotide
  misc_feature 1..20: note = Target: SCN10A; (-) strand; PAM type: NRG; PAM sequence: TAG
  source 1..20: mol_type = other DNA
atattttacatgcctttgtc

SEQ ID NO: 17465 - DNA, 20 bp, synthetic construct
  misc_feature 1..20: note = Description of Artificial Sequence: Synthetic oligonucleotide
  misc_feature 1..20: note = Target: SCN10A; (-) strand; PAM type: NRG; PAM sequence: CAG
  source 1..20: mol_type = other DNA
gttccagcagctgctgttat

SEQ ID NO: 17466 - DNA, 20 bp, synthetic construct
  misc_feature 1..20: note = Description of Artificial Sequence: Synthetic oligonucleotide
  misc_feature 1..20: note = Target: SCN10A; (-) strand; PAM type: NRG; PAM sequence: CAG
  source 1..20: mol_type = other DNA
agtcgtcacttgtgttccag

SEQ ID NO: 17467 - DNA, 20 bp, synthetic construct
  misc_feature 1..20: note = Description of Artificial Sequence: Synthetic oligonucleotide
  misc_feature 1..20: note = Target: SCN10A; (-) strand; PAM type: NRG; PAM sequence: CAG
  source 1..20: mol_type = other DNA
tgcagtcgtcacttgtgttc

SEQ ID NO: 17468 - DNA, 20 bp, synthetic construct
  misc_feature 1..20: note = Description of Artificial Sequence: Synthetic oligonucleotide
  misc_feature 1..20: note = Target: SCN10A; (-) strand; PAM type: NRG; PAM sequence: CAG
  source 1..20: mol_type = other DNA
tcccatagccttcttccctg

SEQ ID NO: 17469 - DNA, 20 bp, synthetic construct
  misc_feature 1..20: note = Description of Artificial Sequence: Synthetic oligonucleotide
  misc_feature 1..20: note = Target: SCN10A; (-) strand; PAM type: NRG; PAM sequence: TAG
  source 1..20: mol_type = other DNA
ttgagtctgtagctctccca

SEQ ID NO: 17470 - DNA, 20 bp, synthetic construct
  misc_feature 1..20: note = Description of Artificial Sequence: Synthetic oligonucleotide
  misc_feature 1..20: note = Target: SCN10A; (-) strand; PAM type: NRG; PAM sequence: TAG
  source 1..20: mol_type = other DNA
aaagctgtgctttgagtctg

SEQ ID NO: 17471 - DNA, 20 bp, synthetic construct
  misc_feature 1..20: note = Description of Artificial Sequence: Synthetic oligonucleotide
  misc_feature 1..20: note = Target: SCN10A; (-) strand; PAM type: NRG; PAM sequence: GAG
  source 1..20: mol_type = other DNA
gtccagaaaagctgtgcttt

SEQ ID NO: 17472 - DNA, 20 bp, synthetic construct
  misc_feature 1..20: note = Description of Artificial Sequence: Synthetic oligonucleotide
  misc_feature 1..20: note = Target: SCN10A; (-) strand; PAM type: NRG; PAM sequence: AAG
  source 1..20: mol_type = other DNA
ggttactaagtggtccagaa

SEQ ID NO: 17473 - DNA, 20 bp, synthetic construct
  misc_feature 1..20: note = Description of Artificial Sequence: Synthetic oligonucleotide
  misc_feature 1..20: note = Target: SCN10A; (-) strand; PAM type: NRG; PAM sequence: CAG
  source 1..20: mol_type = other DNA
ggccaggttactaagtggtc

SEQ ID NO: 17474 - DNA, 20 bp, synthetic construct
  misc_feature 1..20: note = Description of Artificial Sequence: Synthetic oligonucleotide
  misc_feature 1..20: note = Target: SCN10A; (-) strand; PAM type: NRG; PAM sequence: TGG
  source 1..20: mol_type = other DNA
ctgctggccaggttactaag

SEQ ID NO: 17475 - DNA, 20 bp, synthetic construct
  misc_feature 1..20: note = Description of Artificial Sequence: Synthetic oligonucleotide
  misc_feature 1..20: note = Target: SCN10A; (-) strand; PAM type: NRG; PAM sequence: AAG
  source 1..20: mol_type = other DNA
gggctgctggccaggttact

SEQ ID NO: 17476 - DNA, 20 bp, synthetic construct
  misc_feature 1..20: note = Description of Artificial Sequence: Synthetic oligonucleotide
  misc_feature 1..20: note = Target: SCN10A; (-) strand; PAM type: NRG; PAM sequence: AGG
  source 1..20: mol_type = other DNA
aacatgcagggctgctggcc

SEQ ID NO: 17477 - DNA, 20 bp, synthetic construct
  misc_feature 1..20: note = Description of Artificial Sequence: Synthetic oligonucleotide
  misc_feature 1..20: note = Target: SCN10A; (-) strand; PAM type: NRG; PAM sequence: CAG
  source 1..20: mol_type = other DNA
gaacatgcagggctgctggc

SEQ ID NO: 17478 - DNA, 20 bp, synthetic construct
  misc_feature 1..20: note = Description of Artificial Sequence: Synthetic oligonucleotide
  misc_feature 1..20: note = Target: SCN10A; (-) strand; PAM type: NRG; PAM sequence: TGG
  source 1..20: mol_type = other DNA
tcaggaacatgcagggctgc

SEQ ID NO: 17479 - DNA, 20 bp, synthetic construct
  misc_feature 1..20: note = Description of Artificial Sequence: Synthetic oligonucleotide
  misc_feature 1..20: note = Target: SCN10A; (-) strand; PAM type: NRG; PAM sequence: GGG
  source 1..20: mol_type = other DNA
tgaggcctcaggaacatgca

SEQ ID NO: 17480 - DNA, 20 bp, synthetic construct
  misc_feature 1..20: note = Description of Artificial Sequence: Synthetic oligonucleotide
  misc_feature 1..20: note = Target: SCN10A; (-) strand; PAM type: NRG; PAM sequence: AGG
  source 1..20: mol_type = other DNA
gtgaggcctcaggaacatgc

SEQ ID NO: 17481 - DNA, 20 bp, synthetic construct
  misc_feature 1..20: note = Description of Artificial Sequence: Synthetic oligonucleotide
  misc_feature 1..20: note = Target: SCN10A; (-) strand; PAM type: NRG; PAM sequence: CAG
  source 1..20: mol_type = other DNA
tgtgaggcctcaggaacatg

SEQ ID NO: 17482 - DNA, 20 bp, synthetic construct
  misc_feature 1..20: note = Description of Artificial Sequence: Synthetic oligonucleotide
  misc_feature 1..20: note = Target: SCN10A; (-) strand; PAM type: NRG; PAM sequence: AGG
  source 1..20: mol_type = other DNA
agggaaccctgtgaggcctc

SEQ ID NO: 17483 - DNA, 20 bp, synthetic construct
  misc_feature 1..20: note = Description of Artificial Sequence: Synthetic oligonucleotide
  misc_feature 1..20: note = Target: SCN10A; (-) strand; PAM type: NRG; PAM sequence: CAG
  source 1..20: mol_type = other DNA
cagggaaccctgtgaggcct

SEQ ID NO: 17484 - DNA, 20 bp, synthetic construct
  misc_feature 1..20: note = Description of Artificial Sequence: Synthetic oligonucleotide
  misc_feature 1..20: note = Target: SCN10A; (-) strand; PAM type: NRG; PAM sequence: AGG
  source 1..20: mol_type = other DNA
ggaaggcagggaaccctgtg

SEQ ID NO: 17485 - DNA, 20 bp, synthetic construct
  misc_feature 1..20: note = Description of Artificial Sequence: Synthetic oligonucleotide
  misc_feature 1..20: note = Target: SCN10A; (-) strand; PAM type: NRG; PAM sequence: GAG
  source 1..20: mol_type = other DNA
gggaaggcagggaaccctgt

SEQ ID NO: 17486 - DNA, 20 bp, synthetic construct
  misc_feature 1..20: note = Description of Artificial Sequence: Synthetic oligonucleotide
  misc_feature 1..20: note = Target: SCN10A; (-) strand; PAM type: NRG; PAM sequence: GGG
  source 1..20: mol_type = other DNA
ctgcccaacgtgggaaggca

SEQ ID NO: 17487 - DNA, 20 bp, synthetic construct
  misc_feature 1..20: note = Description of Artificial Sequence: Synthetic oligonucleotide
  misc_feature 1..20: note = Target: SCN10A; (-) strand; PAM type: NRG; PAM sequence: AGG
  source 1..20: mol_type = other DNA
tctgcccaacgtgggaaggc

SEQ ID NO: 17488 - DNA, 20 bp, synthetic construct
  misc_feature 1..20: note = Description of Artificial Sequence: Synthetic oligonucleotide
  misc_feature 1..20: note = Target: SCN10A; (-) strand; PAM type: NRG; PAM sequence: CAG
  source 1..20: mol_type = other DNA
ctctgcccaacgtgggaagg

SEQ ID NO: 17489 - DNA, 20 bp, synthetic construct
  misc_feature 1..20: note = Description of Artificial Sequence: Synthetic oligonucleotide
  misc_feature 1..20: note = Target: SCN10A; (-) strand; PAM type: NRG; PAM sequence: AGG
  source 1..20: mol_type = other DNA
cacctctgcccaacgtggga

SEQ ID NO: 17490 - DNA, 20 bp, synthetic construct
  misc_feature 1..20: note = Description of Artificial Sequence: Synthetic oligonucleotide
  misc_feature 1..20: note = Target: SCN10A; (-) strand; PAM type: NRG; PAM sequence: AAG
  source 1..20: mol_type = other DNA
tcacctctgcccaacgtggg

SEQ ID NO: 17491 - DNA, 20 bp, synthetic construct
  misc_feature 1..20: note = Description of Artificial Sequence: Synthetic oligonucleotide
  misc_feature 1..20: note = Target: SCN10A; (-) strand; PAM type: NRG; PAM sequence: GGG
  source 1..20: mol_type = other DNA
cattcacctctgcccaacgt

SEQ ID NO: 17492 - DNA, 20 bp, synthetic construct
  misc_feature 1..20: note = Description of Artificial Sequence: Synthetic oligonucleotide
  misc_feature 1..20: note = Target: SCN10A; (-) strand; PAM type: NRG; PAM sequence: TGG
  source 1..20: mol_type = other DNA
gcattcacctctgcccaacg

SEQ ID NO: 17493 - DNA, 20 bp, synthetic construct
  misc_feature 1..20: note = Description of Artificial Sequence: Synthetic oligonucleotide
  misc_feature 1..20: note = Target: SCN10A; (-) strand; PAM type: NRG; PAM sequence: GGG
  source 1..20: mol_type = other DNA
aacctcttctcagtaactca

SEQ ID NO: 17494 - DNA, 20 bp, synthetic construct
  misc_feature 1..20: note = Description of Artificial Sequence: Synthetic oligonucleotide
  misc_feature 1..20: note = Target: SCN10A; (-) strand; PAM type: NRG; PAM sequence: AGG
  source 1..20: mol_type = other DNA
taacctcttctcagtaactc

SEQ ID NO: 17495 - DNA, 20 bp, synthetic construct
  misc_feature 1..20: note = Description of Artificial Sequence: Synthetic oligonucleotide
  misc_feature 1..20: note = Target: SCN10A; (-) strand; PAM type: NRG; PAM sequence: CAG
  source 1..20: mol_type = other DNA
ctaacctcttctcagtaact

SEQ ID NO: 17496 - DNA, 20 bp, synthetic construct
  misc_feature 1..20: note = Description of Artificial Sequence: Synthetic oligonucleotide
  misc_feature 1..20: note = Target: SCN10A; (-) strand; PAM type: NRG; PAM sequence: CAG
  source 1..20: mol_type = other DNA
aaccctcgctaacctcttct

SEQ ID NO: 17497 - DNA, 20 bp, synthetic construct
  misc_feature 1..20: note = Description of Artificial Sequence: Synthetic oligonucleotide
  misc_feature 1..20: note = Target: SCN10A; (-) strand; PAM type: NRG; PAM sequence: TGG
  source 1..20: mol_type = other DNA
tattccttactaccttaagc

SEQ ID NO: 17498 - DNA, 20 bp, synthetic construct
  misc_feature 1..20: note = Description of Artificial Sequence: Synthetic oligonucleotide
  misc_feature 1..20: note = Target: SCN10A; (-) strand; PAM type: NRG; PAM sequence: AAG
  source 1..20: mol_type = other DNA
gcactattccttactacctt

SEQ ID NO: 17499 - DNA, 20 bp, synthetic construct
  misc_feature 1..20: note = Description of Artificial Sequence: Synthetic oligonucleotide
  misc_feature 1..20: note = Target: SCN10A; (-) strand; PAM type: NRG; PAM sequence: TGG
  source 1..20: mol_type = other DNA
aatatatatttttaaatact

SEQ ID NO: 17500 - DNA, 20 bp, synthetic construct
  misc_feature 1..20: note = Description of Artificial Sequence: Synthetic oligonucleotide
  misc_feature 1..20: note = Target: SCN10A; (-) strand; PAM type: NRG; PAM sequence: GAG
  source 1..20: mol_type = other DNA
aactaatttaaagcacattt

SEQ ID NO: 17501 - DNA, 20 bp, synthetic construct
  misc_feature 1..20: note = Description of Artificial Sequence: Synthetic oligonucleotide
  misc_feature 1..20: note = Target: SCN10A; (-) strand; PAM type: NRG; PAM sequence: AAG
  source 1..20: mol_type = other DNA
ttttggcaccaactaattta

SEQ ID NO: 17502 - DNA, 20 bp, synthetic construct
  misc_feature 1..20: note = Description of Artificial Sequence: Synthetic oligonucleotide
  misc_feature 1..20: note = Target: SCN10A; (-) strand; PAM type: NRG; PAM sequence: TGG
  source 1..20: mol_type = other DNA
gggaaatgacacgctccttt

SEQ ID NO: 17503 - DNA, 20 bp, synthetic construct
  misc_feature 1..20: note = Description of Artificial Sequence: Synthetic oligonucleotide
  misc_feature 1..20: note = Target: SCN10A; (-) strand; PAM type: NRG; PAM sequence: GGG
  source 1..20: mol_type = other DNA
tccccacaagtggtatcaca

SEQ ID NO: 17504 - DNA, 20 bp, synthetic construct
  misc_feature 1..20: note = Description of Artificial Sequence: Synthetic oligonucleotide
  misc_feature 1..20: note = Target: SCN10A; (-) strand; PAM type: NRG; PAM sequence: AGG
  source 1..20: mol_type = other DNA
ttccccacaagtggtatcac

SEQ ID NO: 17505 - DNA, 20 bp, synthetic construct
  misc_feature 1..20: note = Description of Artificial Sequence: Synthetic oligonucleotide
  misc_feature 1..20: note = Target: SCN10A; (-) strand; PAM type: NRG; PAM sequence: CAG
  source 1..20: mol_type = other DNA
tttccccacaagtggtatca

SEQ ID NO: 17506 - DNA, 20 bp, synthetic construct
  misc_feature 1..20: note = Description of Artificial Sequence: Synthetic oligonucleotide
  misc_feature 1..20: note = Target: SCN10A; (-) strand; PAM type: NRG; PAM sequence: TGG
  source 1..20: mol_type = other DNA
agccagcttttccccacaag

SEQ ID NO: 17507 - DNA, 20 bp, synthetic construct
  misc_feature 1..20: note = Description of Artificial Sequence: Synthetic oligonucleotide
  misc_feature 1..20: note = Target: SCN10A; (-) strand; PAM type: NRG; PAM sequence: AAG
  source 1..20: mol_type = other DNA
tttagccagcttttccccac

SEQ ID NO: 17508 - DNA, 20 bp, synthetic construct
  misc_feature 1..20: note = Description of Artificial Sequence: Synthetic oligonucleotide
  misc_feature 1..20: note = Target: SCN10A; (-) strand; PAM type: NRG; PAM sequence: CAG
  source 1..20: mol_type = other DNA
tcttatgtgactcatttagc

SEQ ID NO: 17509 - DNA, 20 bp, synthetic construct
  misc_feature 1..20: note = Description of Artificial Sequence: Synthetic oligonucleotide
  misc_feature 1..20: note = Target: SCN10A; (-) strand; PAM type: NRG; PAM sequence: TAG
  source 1..20: mol_type = other DNA
tgattcttatgtgactcatt

SEQ ID NO: 17510 - DNA, 20 bp, synthetic construct
  misc_feature 1..20: note = Description of Artificial Sequence: Synthetic oligonucleotide
  misc_feature 1..20: note = Target: SCN10A; (-) strand; PAM type: NRG; PAM sequence: AAG
  source 1..20: mol_type = other DNA
atctttaccagcatcctaag

SEQ ID NO: 17511 - DNA, 20 bp, synthetic construct
  misc_feature 1..20: note = Description of Artificial Sequence: Synthetic oligonucleotide
  misc_feature 1..20: note = Target: SCN10A; (-) strand; PAM type: NRG; PAM sequence: AAG
  source 1..20: mol_type = other DNA
ctaatctttaccagcatcct

SEQ ID NO: 17512 - DNA, 20 bp, synthetic construct
  misc_feature 1..20: note = Description of Artificial Sequence: Synthetic oligonucleotide
  misc_feature 1..20: note = Target: SCN10A; (-) strand; PAM type: NRG; PAM sequence: CAG
  source 1..20: mol_type = other DNA
aaggctcatctaatctttac

SEQ ID NO: 17513 - DNA, 20 bp, synthetic construct
  misc_feature 1..20: note = Description of Artificial Sequence: Synthetic oligonucleotide
  misc_feature 1..20: note = Target: SCN10A; (-) strand; PAM type: NRG; PAM sequence: AGG
  source 1..20: mol_type = other DNA
caggatgttgtccaagagca

SEQ ID NO: 17514 - DNA, 20 bp, synthetic construct
  misc_feature 1..20: note = Description of Artificial Sequence: Synthetic oligonucleotide
  misc_feature 1..20: note = Target: SCN10A; (-) strand; PAM type: NRG; PAM sequence: AAG
  source 1..20: mol_type = other DNA
acaggatgttgtccaagagc

SEQ ID NO: 17515 - DNA, 20 bp, synthetic construct
  misc_feature 1..20: note = Description of Artificial Sequence: Synthetic oligonucleotide
  misc_feature 1..20: note = Target: SCN10A; (-) strand; PAM type: NRG; PAM sequence: GAG
  source 1..20: mol_type = other DNA
aagaacaggatgttgtccaa

SEQ ID NO: 17516 - DNA, 20 bp, synthetic construct
  misc_feature 1..20: note = Description of Artificial Sequence: Synthetic oligonucleotide
  misc_feature 1..20: note = Target: SCN10A; (-) strand; PAM type: NRG; PAM sequence: AAG
  source 1..20: mol_type = other DNA
ctaagaacaggatgttgtcc

SEQ ID NO: 17517 - DNA, 20 bp, synthetic construct
  misc_feature 1..20: note = Description of Artificial Sequence: Synthetic oligonucleotide
  misc_feature 1..20: note = Target: SCN10A; (-) strand; PAM type: NRG; PAM sequence: AGG
  source 1..20: mol_type = other DNA
aatgagatttctctaagaac

SEQ ID NO: 17518 - DNA, 20 bp, synthetic construct
  misc_feature 1..20: note = Description of Artificial Sequence: Synthetic oligonucleotide
  misc_feature 1..20: note = Target: SCN10A; (-) strand; PAM type: NRG; PAM sequence: CAG
  source 1..20: mol_type = other DNA
taatgagatttctctaagaa

SEQ ID NO: 17519 - DNA, 20 bp, synthetic construct
  misc_feature 1..20: note = Description of Artificial Sequence: Synthetic oligonucleotide
  misc_feature 1..20: note = Target: SCN10A; (-) strand; PAM type: NRG; PAM sequence: AAG
  source 1..20: mol_type = other DNA
gatgctaatgagatttctct

SEQ ID NO: 17520 - DNA, 20 bp, synthetic construct
  misc_feature 1..20: note = Description of Artificial Sequence: Synthetic oligonucleotide
  misc_feature 1..20: note = Target: SCN10A; (-) strand; PAM type: NRG; PAM sequence: GAG
  source 1..20: mol_type = other DNA
tctgtgcatgagatgctaat

SEQ ID NO: 17521 - DNA, 20 bp, synthetic construct
  misc_feature 1..20: note = Description of Artificial Sequence: Synthetic oligonucleotide
  misc_feature 1..20: note = Target: SCN10A; (-) strand; PAM type: NRG; PAM sequence: GAG
  source 1..20: mol_type = other DNA
ccaacccaggctctgtgcat

SEQ ID NO: 17522 - DNA, 20 bp, synthetic construct
  misc_feature 1..20: note = Description of Artificial Sequence: Synthetic oligonucleotide
  misc_feature 1..20: note = Target: SCN10A; (-) strand; PAM type: NRG; PAM sequence: AGG
  source 1..20: mol_type = other DNA
ccatgcgctctgcccaaccc

SEQ ID NO: 17523 - DNA, 20 bp, synthetic construct
  misc_feature 1..20: note = Description of Artificial Sequence: Synthetic oligonucleotide
  misc_feature 1..20: note = Target: SCN10A; (-) strand; PAM type: NRG; PAM sequence: CAG
  source 1..20: mol_type = other DNA
cccatgcgctctgcccaacc

SEQ ID NO: 17524 - DNA, 20 bp, synthetic construct
  misc_feature 1..20: note = Description of Artificial Sequence: Synthetic oligonucleotide
  misc_feature 1..20: note = Target: SCN10A; (-) strand; PAM type: NRG; PAM sequence: CAG
  source 1..20: mol_type = other DNA
cttggggattgtctttcaca

SEQ ID NO: 17525 - DNA, 20 bp, synthetic construct
  misc_feature 1..20: note = Description of Artificial Sequence: Synthetic oligonucleotide
  misc_feature 1..20: note = Target: SCN10A; (-) strand; PAM type: NRG; PAM sequence: GGG
  source 1..20: mol_type = other DNA
aggccaccttgaggtgcttg

SEQ ID NO: 17526 - DNA, 20 bp, synthetic construct
  misc_feature 1..20: note = Description of Artificial Sequence: Synthetic oligonucleotide
  misc_feature 1..20: note = Target: SCN10A; (-) strand; PAM type: NRG; PAM sequence: GGG
  source 1..20: mol_type = other DNA
aaggccaccttgaggtgctt

SEQ ID NO: 17527 - DNA, 20 bp, synthetic construct
  misc_feature 1..20: note = Description of Artificial Sequence: Synthetic oligonucleotide
  misc_feature 1..20: note = Target: SCN10A; (-) strand; PAM type: NRG; PAM sequence: TGG
  source 1..20: mol_type = other DNA
aaaggccaccttgaggtgct

SEQ ID NO: 17528 - DNA, 20 bp, synthetic construct
  misc_feature 1..20: note = Description of Artificial Sequence: Synthetic oligonucleotide
  misc_feature 1..20: note = Target: SCN10A; (-) strand; PAM type: NRG; PAM sequence: AGG
  source 1..20: mol_type = other DNA
gtgagcaaaaggccaccttg

SEQ ID NO: 17529 - DNA, 20 bp, synthetic construct
  misc_feature 1..20: note = Description of Artificial Sequence: Synthetic oligonucleotide
  misc_feature 1..20: note = Target: SCN10A; (-) strand; PAM type: NRG; PAM sequence: GAG
  source 1..20: mol_type = other DNA
ggtgagcaaaaggccacctt

SEQ ID NO: 17530 - DNA, 20 bp, synthetic construct
  misc_feature 1..20: note = Description of Artificial Sequence: Synthetic oligonucleotide
  misc_feature 1..20: note = Target: SCN10A; (-) strand; PAM type: NRG; PAM sequence: AGG
  source 1..20: mol_type = other DNA
gggggcagcaggtgagcaaa

SEQ ID NO: 17531 - DNA, 20 bp, synthetic construct
  misc_feature 1..20: note = Description of Artificial Sequence: Synthetic oligonucleotide
  misc_feature 1..20: note = Target: SCN10A; (-) strand; PAM type: NRG; PAM sequence: AAG
  source 1..20: mol_type = other DNA
ggggggcagcaggtgagcaa

SEQ ID NO: 17532 - DNA, 20 bp, synthetic construct
  misc_feature 1..20: note = Description of Artificial Sequence: Synthetic oligonucleotide
  misc_feature 1..20: note = Target: SCN10A; (-) strand; PAM type: NRG; PAM sequence: GAG
  source 1..20: mol_type = other DNA
gggagtggggggcagcaggt

SEQ ID NO: 17533 - DNA, 20 bp, synthetic construct
  misc_feature 1..20: note = Description of Artificial Sequence: Synthetic oligonucleotide
  misc_feature 1..20: note = Target: SCN10A; (-) strand; PAM type: NRG; PAM sequence: AGG
  source 1..20: mol_type = other DNA
aacagggagtggggggcagc

SEQ ID NO: 17534 - DNA, 20 bp, synthetic construct
  misc_feature 1..20: note = Description of Artificial Sequence: Synthetic oligonucleotide
  misc_feature 1..20: note = Target: SCN10A; (-) strand; PAM type: NRG; PAM sequence: CAG
  source 1..20: mol_type = other DNA
aaacagggagtggggggcag

SEQ ID NO: 17535 - DNA, 20 bp, synthetic construct
  misc_feature 1..20: note = Description of Artificial Sequence: Synthetic oligonucleotide
  misc_feature 1..20: note = Target: SCN10A; (-) strand; PAM type: NRG; PAM sequence: CAG
  source 1..20: mol_type = other DNA
gacaaacagggagtgggggg

SEQ ID NO: 17536 - DNA, 20 bp, synthetic construct
  misc_feature 1..20: note = Description of Artificial Sequence: Synthetic oligonucleotide
  misc_feature 1..20: note = Target: SCN10A; (-) strand; PAM type: NRG; PAM sequence: GGG
  source 1..20: mol_type = other DNA
gcagacaaacagggagtggg

SEQ ID NO: 17537 - DNA, 20 bp, synthetic construct
  misc_feature 1..20: note = Description of Artificial Sequence: Synthetic oligonucleotide
  misc_feature 1..20: note = Target: SCN10A; (-) strand; PAM type: NRG; PAM sequence: GGG
  source 1..20: mol_type = other DNA
ggcagacaaacagggagtgg

SEQ ID NO: 17538 - DNA, 20 bp, synthetic construct
  misc_feature 1..20: note = Description of Artificial Sequence: Synthetic oligonucleotide
  misc_feature 1..20: note = Target: SCN10A; (-) strand; PAM type: NRG; PAM sequence: GGG
  source 1..20: mol_type = other DNA
aggcagacaaacagggagtg

SEQ ID NO: 17539 - DNA, 20 bp, synthetic construct
  misc_feature 1..20: note = Description of Artificial Sequence: Synthetic oligonucleotide
  misc_feature 1..20: note = Target: SCN10A; (-) strand; PAM type: NRG; PAM sequence: GGG
  source 1..20: mol_type = other DNA
caggcagacaaacagggagt

SEQ ID NO: 17540 - DNA, 20 bp, synthetic construct
  misc_feature 1..20: note = Description of Artificial Sequence: Synthetic oligonucleotide
  misc_feature 1..20: note = Target: SCN10A; (-) strand; PAM type: NRG; PAM sequence: TGG
  source 1..20: mol_type = other DNA
ccaggcagacaaacagggag

SEQ ID NO: 17541 - DNA, 20 bp, synthetic construct
  misc_feature 1..20: note = Description of Artificial Sequence: Synthetic oligonucleotide
  misc_feature 1..20: note = Target: SCN10A; (-) strand; PAM type: NRG; PAM sequence: GAG
  source 1..20: mol_type = other DNA
tccccaggcagacaaacagg

SEQ ID NO: 17542 - DNA, 20 bp, synthetic construct
  misc_feature 1..20: note = Description of Artificial Sequence: Synthetic oligonucleotide
  misc_feature 1..20: note = Target: SCN10A; (-) strand; PAM type: NRG; PAM sequence: GGG
  source 1..20: mol_type = other DNA
attccccaggcagacaaaca

SEQ ID NO: 17543 - DNA, 20 bp, synthetic construct
  misc_feature 1..20: note = Description of Artificial Sequence: Synthetic oligonucleotide
  misc_feature 1..20: note = Target: SCN10A; (-) strand; PAM type: NRG; PAM sequence: AGG
  source 1..20: mol_type = other DNA
aattccccaggcagacaaac

SEQ ID NO: 17544 - DNA, 20 bp, synthetic construct
  misc_feature 1..20: note = Description of Artificial Sequence: Synthetic oligonucleotide
  misc_feature 1..20: note = Target: SCN10A; (-) strand; PAM type: NRG; PAM sequence: CAG
  source 1..20: mol_type = other DNA
gaattccccaggcagacaaa

SEQ ID NO: 17545 - DNA, 20 bp, synthetic construct
  misc_feature 1..20: note = Description of Artificial Sequence: Synthetic oligonucleotide
  misc_feature 1..20: note = Target: SCN10A; (-) strand; PAM type: NRG; PAM sequence: CAG
  source 1..20: mol_type = other DNA
aaaagtcagaattccccagg

SEQ ID NO: 17546 - DNA, 20 bp, synthetic construct
  misc_feature 1..20: note = Description of Artificial Sequence: Synthetic oligonucleotide
  misc_feature 1..20: note = Target: SCN10A; (-) strand; PAM type: NRG; PAM sequence: AGG
  source 1..20: mol_type = other DNA
agaaaaagtcagaattcccc

SEQ ID NO: 17547 - DNA, 20 bp, synthetic construct
  misc_feature 1..20: note = Description of Artificial Sequence: Synthetic oligonucleotide
  misc_feature 1..20: note = Target: SCN10A; (-) strand; PAM type: NRG; PAM sequence: CAG
  source 1..20: mol_type = other DNA
aagaaaaagtcagaattccc

SEQ ID NO: 17548 - DNA, 20 bp, synthetic construct
  misc_feature 1..20: note = Description of Artificial Sequence: Synthetic oligonucleotide
  misc_feature 1..20: note = Target: SCN10A; (-) strand; PAM type: NRG; PAM sequence: CAG
  source 1..20: mol_type = other DNA
cagggcctggaagaaaaagt

SEQ ID NO: 17549 - DNA, 20 bp, synthetic construct
  misc_feature 1..20: note = Description of Artificial Sequence: Synthetic oligonucleotide
  misc_feature 1..20: note = Target: SCN10A; (-) strand; PAM type: NRG; PAM sequence: AAG
  source 1..20: mol_type = other DNA
tgagcagggcctggaagaaa

SEQ ID NO: 17550 - DNA, 20 bp, synthetic construct
  misc_feature 1..20: note = Description of Artificial Sequence: Synthetic oligonucleotide
  misc_feature 1..20: note = Target: SCN10A; (-) strand; PAM type: NRG; PAM sequence: AAG
  source 1..20: mol_type = other DNA
ggcgtttgagcagggcctgg

SEQ ID NO: 17551 - DNA, 20 bp, synthetic construct
  misc_feature 1..20: note = Description of Artificial Sequence: Synthetic oligonucleotide
  misc_feature 1..20: note = Target: SCN10A; (-) strand; PAM type: NRG; PAM sequence: TGG
  source 1..20: mol_type = other DNA
gttggcgtttgagcagggcc

SEQ ID NO: 17552 - DNA, 20 bp, synthetic construct
  misc_feature 1..20: note = Description of Artificial Sequence: Synthetic oligonucleotide
  misc_feature 1..20: note = Target: SCN10A; (-) strand; PAM type: NRG; PAM sequence: GGG
  source 1..20: mol_type = other DNA
gaggagttggcgtttgagca

SEQ ID NO: 17553 - DNA, 20 bp, synthetic construct
  misc_feature 1..20: note = Description of Artificial Sequence: Synthetic oligonucleotide
  misc_feature 1..20: note = Target: SCN10A; (-) strand; PAM type: NRG; PAM sequence: AGG
  source 1..20: mol_type = other DNA
agaggagttggcgtttgagc

SEQ ID NO: 17554 - DNA, 20 bp, synthetic construct
  misc_feature 1..20: note = Description of Artificial Sequence: Synthetic oligonucleotide
  misc_feature 1..20: note = Target: SCN10A; (-) strand; PAM type: NRG; PAM sequence: CAG
  source 1..20: mol_type = other DNA
cagaggagttggcgtttgag

SEQ ID NO: 17555 - DNA, 20 bp, synthetic construct
  misc_feature 1..20: note = Description of Artificial Sequence: Synthetic oligonucleotide
  misc_feature 1..20: note = Target: SCN10A; (-) strand; PAM type: NRG; PAM sequence: GAG
  source 1..20: mol_type = other DNA
ttccagaggagttggcgttt

SEQ ID NO: 17556 - DNA, 20 bp, synthetic construct
  misc_feature 1..20: note = Description of Artificial Sequence: Synthetic oligonucleotide
  misc_feature 1..20: note = Target: SCN10A; (-) strand; PAM type: NRG; PAM sequence: TGG
  source 1..20: mol_type = other DNA
gccaagctttccagaggagt

SEQ ID NO: 17557 - DNA, 20 bp, synthetic construct
  misc_feature 1..20: note = Description of Artificial Sequence: Synthetic oligonucleotide
  misc_feature 1..20: note = Target: SCN10A; (-) strand; PAM type: NRG; PAM sequence: GAG
  source 1..20: mol_type = other DNA
ccatgccaagctttccagag

SEQ ID NO: 17558 - DNA, 20 bp, synthetic construct
  misc_feature 1..20: note = Description of Artificial Sequence: Synthetic oligonucleotide
  misc_feature 1..20: note = Target: SCN10A; (-) strand; PAM type: NRG; PAM sequence: AGG
  source 1..20: mol_type = other DNA
aaccatgccaagctttccag

SEQ ID NO: 17559 - DNA, 20 bp, synthetic construct
  misc_feature 1..20: note = Description of Artificial Sequence: Synthetic oligonucleotide
  misc_feature 1..20: note = Target: SCN10A; (-) strand; PAM type: NRG; PAM sequence: GAG
  source 1..20: mol_type = other DNA
aaaccatgccaagctttcca

SEQ ID NO: 17560 - DNA, 20 bp, synthetic construct
  misc_feature 1..20: note = Description of Artificial Sequence: Synthetic oligonucleotide
  misc_feature 1..20: note = Target: SCN10A; (-) strand; PAM type: NRG; PAM sequence: CAG
  source 1..20: mol_type = other DNA
ttaaaccatgccaagctttc

SEQ ID NO: 17561 - DNA, 20 bp, synthetic construct
  misc_feature 1..20: note = Description of Artificial Sequence: Synthetic oligonucleotide
  misc_feature 1..20: note = Target: SCN10A; (-) strand; PAM type: NRG; PAM sequence: AAG
  source 1..20: mol_type = other DNA
aaagaagtttaaaccatgcc

SEQ ID NO: 17562 - DNA, 20 bp, synthetic construct
  misc_feature 1..20: note = Description of Artificial Sequence: Synthetic oligonucleotide
  misc_feature 1..20: note = Target: SCN10A; (-) strand; PAM type: NRG; PAM sequence: AAG
  source 1..20: mol_type = other DNA
gaggagaccttgacataaag

SEQ ID NO: 17563 - DNA, 20 bp, synthetic construct
  misc_feature 1..20: note = Description of Artificial Sequence: Synthetic oligonucleotide
  misc_feature 1..20: note = Target: SCN10A; (-) strand; PAM type: NRG; PAM sequence: AAG
  source 1..20: mol_type = other DNA
gcagaggagaccttgacata

SEQ ID NO: 17564 - DNA, 20 bp, synthetic construct
  misc_feature 1..20: note = Description of Artificial Sequence: Synthetic oligonucleotide
  misc_feature 1..20: note = Target: SCN10A; (-) strand; PAM type: NRG; PAM sequence: GAG
  source 1..20: mol_type = other DNA
ggcaaaagggaaatgcagag

SEQ ID NO: 17565 - DNA, 20 bp, synthetic construct
  misc_feature 1..20: note = Description of Artificial Sequence: Synthetic oligonucleotide
  misc_feature 1..20: note = Target: SCN10A; (-) strand; PAM type: NRG; PAM sequence: AGG
  source 1..20: mol_type = other DNA
agggcaaaagggaaatgcag

SEQ ID NO: 17566 - DNA, 20 bp, synthetic construct
  misc_feature 1..20: note = Description of Artificial Sequence: Synthetic oligonucleotide
  misc_feature 1..20: note = Target: SCN10A; (-) strand; PAM type: NRG; PAM sequence: GAG
  source 1..20: mol_type = other DNA
aagggcaaaagggaaatgca

SEQ ID NO: 17567 - DNA, 20 bp, synthetic construct
  misc_feature 1..20: note = Description of Artificial Sequence: Synthetic oligonucleotide
  misc_feature 1..20: note = Target: SCN10A; (-) strand; PAM type: NRG; PAM sequence: CAG
  source 1..20: mol_type = other DNA
caaagggcaaaagggaaatg

SEQ ID NO: 17568 - DNA, 20 bp, synthetic construct
  misc_feature 1..20: note = Description of Artificial Sequence: Synthetic oligonucleotide
  misc_feature 1..20: note = Target: SCN10A; (-) strand; PAM type: NRG; PAM sequence: GGG
  source 1..20: mol_type = other DNA
ttgagtgacaaagggcaaaa

SEQ ID NO: 17569 - DNA, 20 bp, synthetic construct
  misc_feature 1..20: note = Description of Artificial Sequence: Synthetic oligonucleotide
  misc_feature 1..20: note = Target: SCN10A; (-) strand; PAM type: NRG; PAM sequence: AGG
  source 1..20: mol_type = other DNA
cttgagtgacaaagggcaaa

SEQ ID NO: 17570 - DNA, 20 bp, synthetic construct
  misc_feature 1..20: note = Description of Artificial Sequence: Synthetic oligonucleotide
  misc_feature 1..20: note = Target: SCN10A; (-) strand; PAM type: NRG; PAM sequence: AAG
  source 1..20: mol_type = other DNA
gcttgagtgacaaagggcaa

SEQ ID NO: 17571 - DNA, 20 bp, synthetic construct
  misc_feature 1..20: note = Description of Artificial Sequence: Synthetic oligonucleotide
  misc_feature 1..20: note = Target: SCN10A; (-) strand; PAM type: NRG; PAM sequence: GGG
  source 1..20: mol_type = other DNA
ttcagggcttgagtgacaaa

SEQ ID NO: 17572 - DNA, 20 bp, synthetic construct
  misc_feature 1..20: note = Description of Artificial Sequence: Synthetic oligonucleotide
  misc_feature 1..20: note = Target: SCN10A; (-) strand; PAM type: NRG; PAM sequence: AGG
  source 1..20: mol_type = other DNA
cttcagggcttgagtgacaa

SEQ ID NO: 17573 - DNA, 20 bp, synthetic construct
  misc_feature 1..20: note = Description of Artificial Sequence: Synthetic oligonucleotide
  misc_feature 1..20: note = Target: SCN10A; (-) strand; PAM type: NRG; PAM sequence: AAG
  source 1..20: mol_type = other DNA
gcttcagggcttgagtgaca

SEQ ID NO: 17574 - DNA, 20 bp, synthetic construct
  misc_feature 1..20: note = Description of Artificial Sequence: Synthetic oligonucleotide
  misc_feature 1..20: note = Target: SCN10A; (-) strand; PAM type: NRG; PAM sequence: GAG
  source 1..20: mol_type = other DNA
ggggaggggcttcagggctt

SEQ ID NO: 17575 - DNA, 20 bp, synthetic construct
  misc_feature 1..20: note = Description of Artificial Sequence: Synthetic oligonucleotide
  misc_feature 1..20: note = Target: SCN10A; (-) strand; PAM type: NRG; PAM sequence: GGG
  source 1..20: mol_type = other DNA
ggcagtggggaggggcttca

SEQ ID NO: 17576 - DNA, 20 bp, synthetic construct
  misc_feature 1..20: note = Description of Artificial Sequence: Synthetic oligonucleotide
  misc_feature 1..20: note = Target: SCN10A; (-) strand; PAM type: NRG; PAM sequence: AGG
  source 1..20: mol_type = other DNA
aggcagtggggaggggcttc

SEQ ID NO: 17577 - DNA, 20 bp, synthetic construct
  misc_feature 1..20: note = Description of Artificial Sequence: Synthetic oligonucleotide
  misc_feature 1..20: note = Target: SCN10A; (-) strand; PAM type: NRG; PAM sequence: CAG
  source 1..20: mol_type = other DNA
caggcagtggggaggggctt

SEQ ID NO: 17578 - DNA, 20 bp, synthetic construct
  misc_feature 1..20: note = Description of Artificial Sequence: Synthetic oligonucleotide
  misc_feature 1..20: note = Target: SCN10A; (-) strand; PAM type: NRG; PAM sequence: GGG
  source 1..20: mol_type = other DNA
cagccacaggcagtggggag

SEQ ID NO: 17579 - DNA, 20 bp, synthetic construct
  misc_feature 1..20: note = Description of Artificial Sequence: Synthetic oligonucleotide
  misc_feature 1..20: note = Target: SCN10A; (-) strand; PAM type: NRG; PAM sequence: GGG
  source 1..20: mol_type = other DNA
acagccacaggcagtgggga

SEQ ID NO: 17580 - DNA, 20 bp, synthetic construct
  misc_feature 1..20: note = Description of Artificial Sequence: Synthetic oligonucleotide
  misc_feature 1..20: note = Target: SCN10A; (-) strand; PAM type: NRG; PAM sequence: AGG
  source 1..20: mol_type = other DNA
gacagccacaggcagtgggg

SEQ ID NO: 17581 - DNA, 20 bp, synthetic construct
  misc_feature 1..20: note = Description of Artificial Sequence: Synthetic oligonucleotide
  misc_feature 1..20: note = Target: SCN10A; (-) strand; PAM type: NRG; PAM sequence: GAG
  source 1..20: mol_type = other DNA
ggacagccacaggcagtggg

SEQ ID NO: 17582 - DNA, 20 bp, synthetic construct
  misc_feature 1..20: note = Description of Artificial Sequence: Synthetic oligonucleotide
  misc_feature 1..20: note = Target: SCN10A; (-) strand; PAM type: NRG; PAM sequence: GGG
  source 1..20: mol_type = other DNA
agggacagccacaggcagtg

SEQ ID NO: 17583 - DNA, 20 bp, synthetic construct
  misc_feature 1..20: note = Description of Artificial Sequence: Synthetic oligonucleotide
  misc_feature 1..20: note = Target: SCN10A; (-) strand; PAM type: NRG; PAM sequence: GGG
  source 1..20: mol_type = other DNA
aagggacagccacaggcagt

SEQ ID NO: 17584 - DNA, 20 bp, synthetic construct
  misc_feature 1..20: note = Description of Artificial Sequence: Synthetic oligonucleotide
  misc_feature 1..20: note = Target: SCN10A; (-) strand; PAM type: NRG; PAM sequence: TGG
  source 1..20: mol_type = other DNA
caagggacagccacaggcag

SEQ ID NO: 17585 - DNA, 20 bp, synthetic construct
  misc_feature 1..20: note = Description of Artificial Sequence: Synthetic oligonucleotide
  misc_feature 1..20: note = Target: SCN10A; (-) strand; PAM type: NRG; PAM sequence: CAG
  source 1..20: mol_type = other DNA
ccccaagggacagccacagg

SEQ ID NO: 17586 - DNA, 20 bp, synthetic construct
  misc_feature 1..20: note = Description of Artificial Sequence: Synthetic oligonucleotide
  misc_feature 1..20: note = Target: SCN10A; (-) strand; PAM type: NRG; PAM sequence: AGG
  source 1..20: mol_type = other DNA
tatccccaagggacagccac

SEQ ID NO: 17587 - DNA, 20 bp, synthetic construct
  misc_feature 1..20: note = Description of Artificial Sequence: Synthetic oligonucleotide
  misc_feature 1..20: note = Target: SCN10A; (-) strand; PAM type: NRG; PAM sequence: CAG
  source 1..20: mol_type = other DNA
ttatccccaagggacagcca

SEQ ID NO: 17588 - DNA, 20 bp, synthetic construct
  misc_feature 1..20: note = Description of Artificial Sequence: Synthetic oligonucleotide
  misc_feature 1..20: note = Target: SCN10A; (-) strand; PAM type: NRG; PAM sequence: CAG
  source 1..20: mol_type = other DNA
taagagttatccccaaggga

SEQ ID NO: 17589 - DNA, 20 bp, synthetic construct
  misc_feature 1..20: note = Description of Artificial Sequence: Synthetic oligonucleotide
  misc_feature 1..20: note = Target: SCN10A; (-) strand; PAM type: NRG; PAM sequence: GGG
  source 1..20: mol_type = other DNA
caggtaagagttatccccaa

SEQ ID NO: 17590 - DNA, 20 bp, synthetic construct
  misc_feature 1..20: note = Description of Artificial Sequence: Synthetic oligonucleotide
  misc_feature 1..20: note = Target: SCN10A; (-) strand; PAM type: NRG; PAM sequence: AGG
  source 1..20: mol_type = other DNA
acaggtaagagttatcccca

SEQ ID NO: 17591 - DNA, 20 bp, synthetic construct
  misc_feature 1..20: note = Description of Artificial Sequence: Synthetic oligonucleotide
  misc_feature 1..20: note = Target: SCN10A; (-) strand; PAM type: NRG; PAM sequence: AAG
  source 1..20: mol_type = other DNA
gacaggtaagagttatcccc

SEQ ID NO: 17592 - DNA, 20 bp, synthetic construct
  misc_feature 1..20: note = Description of Artificial Sequence: Synthetic oligonucleotide
  misc_feature 1..20: note = Target: SCN10A; (-) strand; PAM type: NRG; PAM sequence: GAG
  source 1..20: mol_type = other DNA
gatccccaaaggacaggtaa

SEQ ID NO: 17593 - DNA, 20 bp, synthetic construct
  misc_feature 1..20: note = Description of Artificial Sequence: Synthetic oligonucleotide
  misc_feature 1..20: note = Target: SCN10A; (-) strand; PAM type: NRG; PAM sequence: AAG
  source 1..20: mol_type = other DNA
gtgatccccaaaggacaggt

SEQ ID NO: 17594 - DNA, 20 bp, synthetic construct
  misc_feature 1..20: note = Description of Artificial Sequence: Synthetic oligonucleotide
  misc_feature 1..20: note = Target: SCN10A; (-) strand; PAM type: NRG; PAM sequence: AGG
  source 1..20: mol_type = other DNA
ggaagtgatccccaaaggac

SEQ ID NO: 17595 - DNA, 20 bp, synthetic construct
  misc_feature 1..20: note = Description of Artificial Sequence: Synthetic oligonucleotide
  misc_feature 1..20: note = Target: SCN10A; (-) strand; PAM type: NRG; PAM sequence: CAG
  source 1..20: mol_type = other DNA
aggaagtgatccccaaagga

SEQ ID NO: 17596 - DNA, 20 bp, synthetic construct
  misc_feature 1..20: note = Description of Artificial Sequence: Synthetic oligonucleotide
  misc_feature 1..20: note = Target: SCN10A; (-) strand; PAM type: NRG; PAM sequence: AGG
  source 1..20: mol_type = other DNA
cagcaggaagtgatccccaa

SEQ ID NO: 17597 - DNA, 20 bp, synthetic construct
  misc_feature 1..20: note = Description of Artificial Sequence: Synthetic oligonucleotide
  misc_feature 1..20: note = Target: SCN10A; (-) strand; PAM type: NRG; PAM sequence: AAG
  source 1..20: mol_type = other DNA
ccagcaggaagtgatcccca

SEQ ID NO: 17598 - DNA, 20 bp, synthetic construct
  misc_feature 1..20: note = Description of Artificial Sequence: Synthetic oligonucleotide
  misc_feature 1..20: note = Target: SCN10A; (-) strand; PAM type: NRG; PAM sequence: AAG
  source 1..20: mol_type = other DNA
tgctcagagcttccagcagg

SEQ ID NO: 17599 - DNA, 20 bp, synthetic construct
  misc_feature 1..20: note = Description of Artificial Sequence: Synthetic oligonucleotide
  misc_feature 1..20: note = Target: SCN10A; (-) strand; PAM type: NRG; PAM sequence: AGG
  source 1..20: mol_type = other DNA
agatgctcagagcttccagc

SEQ ID NO: 17600 - DNA, 20 bp, synthetic construct
  misc_feature 1..20: note = Description of Artificial Sequence: Synthetic oligonucleotide
  misc_feature 1..20: note = Target: SCN10A; (-) strand; PAM type: NRG; PAM sequence: CAG
  source 1..20: mol_type = other DNA
aagatgctcagagcttccag

SEQ ID NO: 17601 - DNA, 20 bp, synthetic construct
  misc_feature 1..20: note = Description of Artificial Sequence: Synthetic oligonucleotide
  misc_feature 1..20: note = Target: SCN10A; (-) strand; PAM type: NRG; PAM sequence: CAG
  source 1..20: mol_type = other DNA
gggaagatgctcagagcttc

SEQ ID NO: 17602 - DNA, 20 bp, synthetic construct
  misc_feature 1..20: note = Description of Artificial Sequence: Synthetic oligonucleotide
  misc_feature 1..20: note = Target: SCN10A; (-) strand; PAM type: NRG; PAM sequence: GAG
  source 1..20: mol_type = other DNA
gatggtggggaagatgctca

SEQ ID NO: 17603 - DNA, 20 bp, synthetic construct
  misc_feature 1..20: note = Description of Artificial Sequence: Synthetic oligonucleotide
  misc_feature 1..20: note = Target: SCN10A; (-) strand; PAM type: NRG; PAM sequence: CAG
  source 1..20: mol_type = other DNA
atgatggtggggaagatgct

SEQ ID NO: 17604 - DNA, 20 bp, synthetic construct
  misc_feature 1..20: note = Description of Artificial Sequence: Synthetic oligonucleotide
  misc_feature 1..20: note = Target: SCN10A; (-) strand; PAM type: NRG; PAM sequence: AAG
  source 1..20: mol_type = other DNA
cttggaggatgatggtgggg

SEQ ID NO: 17605 - DNA, 20 bp, synthetic construct
  misc_feature 1..20: note = Description of Artificial Sequence: Synthetic oligonucleotide
  misc_feature 1..20: note = Target: SCN10A; (-) strand; PAM type: NRG; PAM sequence: GGG
  source 1..20: mol_type = other DNA
tgacttggaggatgatggtg

SEQ ID NO: 17606 - DNA, 20 bp, synthetic construct
  misc_feature 1..20: note = Description of Artificial Sequence: Synthetic oligonucleotide
  misc_feature 1..20: note = Target: SCN10A; (-) strand; PAM type: NRG; PAM sequence: GGG
  source 1..20: mol_type = other DNA
atgacttggaggatgatggt

SEQ ID NO: 17607 - DNA, 20 bp, synthetic construct
  misc_feature 1..20: note = Description of Artificial Sequence: Synthetic oligonucleotide
  misc_feature 1..20: note = Target: SCN10A; (-) strand; PAM type: NRG; PAM sequence: TGG
  source 1..20: mol_type = other DNA
gatgacttggaggatgatgg

SEQ ID NO: 17608 - DNA, 20 bp, synthetic construct
  misc_feature 1..20: note = Description of Artificial Sequence: Synthetic oligonucleotide
  misc_feature 1..20: note = Target: SCN10A; (-) strand; PAM type: NRG; PAM sequence: TGG
  source 1..20: mol_type = other DNA
cttgatgacttggaggatga

SEQ ID NO: 17609 - DNA, 20 bp, synthetic construct
  misc_feature 1..20: note = Description of Artificial Sequence: Synthetic oligonucleotide
  misc_feature 1..20: note = Target: SCN10A; (-) strand; PAM type: NRG; PAM sequence: AGG
  source 1..20: mol_type = other DNA
atctgatcttgatgacttgg

SEQ ID NO: 17610 - DNA, 20 bp, synthetic construct
  misc_feature 1..20: note = Description of Artificial Sequence: Synthetic oligonucleotide
  misc_feature 1..20: note = Target: SCN10A; (-) strand; PAM type: NRG; PAM sequence: GAG
  source 1..20: mol_type = other DNA
aatctgatcttgatgacttg

SEQ ID NO: 17611 - DNA, 20 bp, synthetic construct
  misc_feature 1..20: note = Description of Artificial Sequence: Synthetic oligonucleotide
  misc_feature 1..20: note = Target: SCN10A; (-) strand; PAM type: NRG; PAM sequence: TGG
  source 1..20: mol_type = other DNA
tgaatctgatcttgatgact

SEQ ID NO: 17612 - DNA, 20 bp, synthetic construct
  misc_feature 1..20: note = Description of Artificial Sequence: Synthetic oligonucleotide
  misc_feature 1..20: note = Target: SCN10A; (-) strand; PAM type: NRG; PAM sequence: GGG
  source 1..20: mol_type = other DNA
gtctctgtgcccattgctga

SEQ ID NO: 17613 - DNA, 20 bp, synthetic construct
  misc_feature 1..20: note = Description of Artificial Sequence: Synthetic oligonucleotide
  misc_feature 1..20: note = Target: SCN10A; (-) strand; PAM type: NRG; PAM sequence: AGG
  source 1..20: mol_type = other DNA
ggtctctgtgcccattgctg

SEQ ID NO: 17614 - DNA, 20 bp, synthetic construct
  misc_feature 1..20: note = Description of Artificial Sequence: Synthetic oligonucleotide
  misc_feature 1..20: note = Target: SCN10A; (-) strand; PAM type: NRG; PAM sequence: GAG
  source 1..20: mol_type = other DNA
gggtctctgtgcccattgct

SEQ ID NO: 17615 - DNA, 20 bp, synthetic construct
  misc_feature 1..20: note = Description of Artificial Sequence: Synthetic oligonucleotide
  misc_feature 1..20: note = Target: SCN10A; (-) strand; PAM type: NRG; PAM sequence: GGG
  source 1..20: mol_type = other DNA
catcgctaatccgactgtgt

SEQ ID NO: 17616 - DNA, 20 bp, synthetic construct
  misc_feature 1..20: note = Description of Artificial Sequence: Synthetic oligonucleotide
  misc_feature 1..20: note = Target: SCN10A; (-) strand; PAM type: NRG; PAM sequence: TGG
  source 1..20: mol_type = other DNA
tcatcgctaatccgactgtg

SEQ ID NO: 17617 - DNA, 20 bp, synthetic construct
  misc_feature 1..20: note = Description of Artificial Sequence: Synthetic oligonucleotide
  misc_feature 1..20: note = Target: SCN10A; (-) strand; PAM type: NRG; PAM sequence: CAG
  source 1..20: mol_type = other DNA
agaggccccagggatgagca

SEQ ID NO: 17618 - DNA, 20 bp, synthetic construct
  misc_feature 1..20: note = Description of Artificial Sequence: Synthetic oligonucleotide
  misc_feature 1..20: note = Target: SCN10A; (-) strand; PAM type: NRG; PAM sequence: GAG
  source 1..20: mol_type = other DNA
ctcccagaggccccagggat

SEQ ID NO: 17619 - DNA, 20 bp, synthetic construct
  misc_feature 1..20: note = Description of Artificial Sequence: Synthetic oligonucleotide
  misc_feature 1..20: note = Target: SCN10A; (-) strand; PAM type: NRG; PAM sequence: GGG
  source 1..20: mol_type = other DNA
ccaagctcccagaggcccca

SEQ ID NO: 17620 - DNA, 20 bp, synthetic construct
  misc_feature 1..20: note = Description of Artificial Sequence: Synthetic oligonucleotide
  misc_feature 1..20: note = Target: SCN10A; (-) strand; PAM type: NRG; PAM sequence: AGG
  source 1..20: mol_type = other DNA
tccaagctcccagaggcccc

SEQ ID NO: 17621 - DNA, 20 bp, synthetic construct
  misc_feature 1..20: note = Description of Artificial Sequence: Synthetic oligonucleotide
  misc_feature 1..20: note = Target: SCN10A; (-) strand; PAM type: NRG; PAM sequence: CAG
  source 1..20: mol_type = other DNA
ctccaagctcccagaggccc

SEQ ID NO: 17622 - DNA, 20 bp, synthetic construct
  misc_feature 1..20: note = Description of Artificial Sequence: Synthetic oligonucleotide
  misc_feature 1..20: note = Target: SCN10A; (-) strand; PAM type: NRG; PAM sequence: AGG
  source 1..20: mol_type = other DNA
ggagggctccaagctcccag

SEQ ID NO: 17623 - DNA, 20 bp, synthetic construct
  misc_feature 1..20: note = Description of Artificial Sequence: Synthetic oligonucleotide
  misc_feature 1..20: note = Target: SCN10A; (-) strand; PAM type: NRG; PAM sequence: GAG
  source 1..20: mol_type = other DNA
tggagggctccaagctccca

SEQ ID NO: 17624 - DNA, 20 bp, synthetic construct
  misc_feature 1..20: note = Description of Artificial Sequence: Synthetic oligonucleotide
  misc_feature 1..20: note = Target: SCN10A; (-) strand; PAM type: NRG; PAM sequence: CAG
  source 1..20: mol_type = other DNA
tctggagggctccaagctcc

SEQ ID NO: 17625 - DNA, 20 bp, synthetic construct
  misc_feature 1..20: note = Description of Artificial Sequence: Synthetic oligonucleotide
  misc_feature 1..20: note = Target: SCN10A; (-) strand; PAM type: NRG; PAM sequence: AAG
  source 1..20: mol_type = other DNA
ggggagctctggagggctcc

SEQ ID NO: 17626 - DNA, 20 bp, synthetic construct
  misc_feature 1..20: note = Description of Artificial Sequence: Synthetic oligonucleotide
  misc_feature 1..20: note = Target: SCN10A; (-) strand; PAM type: NRG; PAM sequence: GGG
  source 1..20: mol_type = other DNA
ctgccagggggagctctgga

SEQ ID NO: 17627 - DNA, 20 bp, synthetic construct
  misc_feature 1..20: note = Description of Artificial Sequence: Synthetic oligonucleotide
  misc_feature 1..20: note = Target: SCN10A; (-) strand; PAM type: NRG; PAM sequence: AGG
  source 1..20: mol_type = other DNA
actgccagggggagctctgg

SEQ ID NO: 17628 - DNA, 20 bp, synthetic construct
  misc_feature 1..20: note = Description of Artificial Sequence: Synthetic oligonucleotide
  misc_feature 1..20: note = Target: SCN10A; (-) strand; PAM type: NRG; PAM sequence: GAG
  source 1..20: mol_type = other DNA
cactgccagggggagctctg

SEQ ID NO: 17629 - DNA, 20 bp, synthetic construct
  misc_feature 1..20: note = Description of Artificial Sequence: Synthetic oligonucleotide
  misc_feature 1..20: note = Target: SCN10A; (-) strand; PAM type: NRG; PAM sequence: TGG
  source 1..20: mol_type = other DNA
aacactgccagggggagctc

SEQ ID NO: 17630 - DNA, 20 bp, synthetic construct
  misc_feature 1..20: note = Description of Artificial Sequence: Synthetic oligonucleotide
  misc_feature 1..20: note = Target: SCN10A; (-) strand; PAM type: NRG; PAM sequence: GAG
  source 1..20: mol_type = other DNA
gctgccaacactgccagggg

SEQ ID NO: 17631 - DNA, 20 bp, synthetic construct
  misc_feature 1..20: note = Description of Artificial Sequence: Synthetic oligonucleotide
  misc_feature 1..20: note = Target: SCN10A; (-) strand; PAM type: NRG; PAM sequence: GGG
  source 1..20: mol_type = other DNA
ttgctgccaacactgccagg

SEQ ID NO: 17632 - DNA, 20 bp, synthetic construct
  misc_feature 1..20: note = Description of Artificial Sequence: Synthetic oligonucleotide
  misc_feature 1..20: note = Target: SCN10A; (-) strand; PAM type: NRG; PAM sequence: GGG
  source 1..20: mol_type = other DNA
attgctgccaacactgccag

SEQ ID NO: 17633 - DNA, 20 bp, synthetic construct
  misc_feature 1..20: note = Description of Artificial Sequence: Synthetic oligonucleotide
  misc_feature 1..20: note = Target: SCN10A; (-) strand; PAM type: NRG; PAM sequence: GGG
  source 1..20: mol_type = other DNA
cattgctgccaacactgcca

SEQ ID NO: 17634 - DNA, 20 bp, synthetic construct
  misc_feature 1..20: note = Description of Artificial Sequence: Synthetic oligonucleotide
  misc_feature 1..20: note = Target: SCN10A; (-) strand; PAM type: NRG; PAM sequence: AGG
  source 1..20: mol_type = other DNA
acattgctgccaacactgcc

SEQ ID NO: 17635 - DNA, 20 bp, synthetic construct
  misc_feature 1..20: note = Description of Artificial Sequence: Synthetic oligonucleotide
  misc_feature 1..20: note = Target: SCN10A; (-) strand; PAM type: NRG; PAM sequence: CAG
  source 1..20: mol_type = other DNA
cacattgctgccaacactgc

SEQ ID NO: 17636 - DNA, 20 bp, synthetic construct
  misc_feature 1..20: note = Description of Artificial Sequence: Synthetic oligonucleotide
  misc_feature 1..20: note = Target: SCN10A; (-) strand; PAM type: NRG; PAM sequence: GAG
  source 1..20: mol_type = other DNA
cactctccagctccaaggct

SEQ ID NO: 17637 - DNA, 20 bp, synthetic construct
  misc_feature 1..20: note = Description of Artificial Sequence: Synthetic oligonucleotide
  misc_feature 1..20: note = Target: SCN10A; (-) strand; PAM type: NRG; PAM sequence: AGG
  source 1..20: mol_type = other DNA
actcccactctccagctcca

SEQ ID NO: 17638 - DNA, 20 bp, synthetic construct
  misc_feature 1..20: note = Description of Artificial Sequence: Synthetic oligonucleotide
  misc_feature 1..20: note = Target: SCN10A; (-) strand; PAM type: NRG; PAM sequence: AAG
  source 1..20: mol_type = other DNA
aactcccactctccagctcc

SEQ ID NO: 17639 - DNA, 20 bp, synthetic construct
  misc_feature 1..20: note = Description of Artificial Sequence: Synthetic oligonucleotide
  misc_feature 1..20: note = Target: SCN10A; (-) strand; PAM type: NRG; PAM sequence: CAG
  source 1..20: mol_type = other DNA
gtggtgaaactcccactctc

SEQ ID NO: 17640 - DNA, 20 bp, synthetic construct
  misc_feature 1..20: note = Description of Artificial Sequence: Synthetic oligonucleotide
  misc_feature 1..20: note = Target: SCN10A; (-) strand; PAM type: NRG; PAM sequence: TGG
  source 1..20: mol_type = other DNA
caaggcagagcctgagctgg

SEQ ID NO: 17641 - DNA, 20 bp, synthetic construct
  misc_feature 1..20: note = Description of Artificial Sequence: Synthetic oligonucleotide
  misc_feature 1..20: note = Target: SCN10A; (-) strand; PAM type: NRG; PAM sequence: TGG
  source 1..20: mol_type = other DNA
gcccaaggcagagcctgagc

SEQ ID NO: 17642 - DNA, 20 bp, synthetic construct
  misc_feature 1..20: note = Description of Artificial Sequence: Synthetic oligonucleotide
  misc_feature 1..20: note = Target: SCN10A; (-) strand; PAM type: NRG; PAM sequence: GAG
  source 1..20: mol_type = other DNA
cccagcccaaggcagagcct

SEQ ID NO: 17643 - DNA, 20 bp, synthetic construct
  misc_feature 1..20: note = Description of Artificial Sequence: Synthetic oligonucleotide
  misc_feature 1..20: note = Target: SCN10A; (-) strand; PAM type: NRG; PAM sequence: GAG
  source 1..20: mol_type = other DNA
cattcccccagcccaaggca

SEQ ID NO: 17644 - DNA, 20 bp, synthetic construct
  misc_feature 1..20: note = Description of Artificial Sequence: Synthetic oligonucleotide
  misc_feature 1..20: note = Target: SCN10A; (-) strand; PAM type: NRG; PAM sequence: CAG
  source 1..20: mol_type = other DNA
cccattcccccagcccaagg

SEQ ID NO: 17645 - DNA, 20 bp, synthetic construct
  misc_feature 1..20: note = Description of Artificial Sequence: Synthetic oligonucleotide
  misc_feature 1..20: note = Target: SCN10A; (-) strand; PAM type: NRG; PAM sequence: AGG
  source 1..20: mol_type = other DNA
ctgcccattcccccagccca

SEQ ID NO: 17646 - DNA, 20 bp, synthetic construct
  misc_feature 1..20: note = Description of Artificial Sequence: Synthetic oligonucleotide
  misc_feature 1..20: note = Target: SCN10A; (-) strand; PAM type: NRG; PAM sequence: AAG
  source 1..20: mol_type = other DNA
cctgcccattcccccagccc

SEQ ID NO: 17647 - DNA, 20 bp, synthetic construct
  misc_feature 1..20: note = Description of Artificial Sequence: Synthetic oligonucleotide
  misc_feature 1..20: note = Target: SCN10A; (-) strand; PAM type: NRG; PAM sequence: CAG
  source 1..20: mol_type = other DNA
gcaggtcctgcccattcccc

SEQ ID NO: 17648 - DNA, 20 bp, synthetic construct
  misc_feature 1..20: note = Description of Artificial Sequence: Synthetic oligonucleotide
  misc_feature 1..20: note = Target: SCN10A; (-) strand; PAM type: NRG; PAM sequence: AGG
  source 1..20: mol_type = other DNA
ctctttgcagcttcttcagc

SEQ ID NO: 17649 - DNA, 20 bp, synthetic construct
  misc_feature 1..20: note = Description of Artificial Sequence: Synthetic oligonucleotide
  misc_feature 1..20: note = Target: SCN10A; (-) strand; PAM type: NRG; PAM sequence: CAG
  source 1..20: mol_type = other DNA
gctctttgcagcttcttcag

SEQ ID NO: 17650 - DNA, 20 bp, synthetic construct
  misc_feature 1..20: note = Description of Artificial Sequence: Synthetic oligonucleotide
  misc_feature 1..20: note = Target: SCN10A; (-) strand; PAM type: NRG; PAM sequence: CAG
  source 1..20: mol_type = other DNA
caggctctttgcagcttctt

SEQ ID NO: 17651 - DNA, 20 bp, synthetic construct
  misc_feature 1..20: note = Description of Artificial Sequence: Synthetic oligonucleotide
  misc_feature 1..20: note = Target: SCN10A; (-) strand; PAM type: NRG; PAM sequence: CAG
  source 1..20: mol_type = other DNA
cgtaccaaacaggctctttg

SEQ ID NO: 17652 - DNA, 20 bp, synthetic construct
  misc_feature 1..20: note = Description of Artificial Sequence: Synthetic oligonucleotide
  misc_feature 1..20: note = Target: SCN10A; (-) strand; PAM type: NRG; PAM sequence: AGG
  source 1..20: mol_type = other DNA
ctttggccatcgtaccaaac

SEQ ID NO: 17653 - DNA, 20 bp, synthetic construct
  misc_feature 1..20: note = Description of Artificial Sequence: Synthetic oligonucleotide
  misc_feature 1..20: note = Target: SCN10A; (-) strand; PAM type: NRG; PAM sequence: CAG
  source 1..20: mol_type = other DNA
tctttggccatcgtaccaaa

SEQ ID NO: 17654 - DNA, 20 bp, synthetic construct
  misc_feature 1..20: note = Description of Artificial Sequence: Synthetic oligonucleotide
  misc_feature 1..20: note = Target: SCN10A; (-) strand; PAM type: NRG; PAM sequence: TGG
  source 1..20: mol_type = other DNA
ctggcacggatccaggtctt

SEQ ID NO: 17655 - DNA, 20 bp, synthetic construct
  misc_feature 1..20: note = Description of Artificial Sequence: Synthetic oligonucleotide
  misc_feature 1..20: note = Target: SCN10A; (-) strand; PAM type: NRG; PAM sequence: AGG
  source 1..20: mol_type = other DNA
ggtggccctggcacggatcc

SEQ ID NO: 17656 - DNA, 20 bp, synthetic construct
  misc_feature 1..20: note = Description of Artificial Sequence: Synthetic oligonucleotide
  misc_feature 1..20: note = Target: SCN10A; (-) strand; PAM type: NRG; PAM sequence: CAG
  source 1..20: mol_type = other DNA
aggtggccctggcacggatc

SEQ ID NO: 17657 - DNA, 20 bp, synthetic construct
  misc_feature 1..20: note = Description of Artificial Sequence: Synthetic oligonucleotide
  misc_feature 1..20: note = Target: SCN10A; (-) strand; PAM type: NRG; PAM sequence: CGG
  source 1..20: mol_type = other DNA
acctgcaggtggccctggca

SEQ ID NO: 17658 - DNA, 20 bp, synthetic construct
  misc_feature 1..20: note = Description of Artificial Sequence: Synthetic oligonucleotide
  misc_feature 1..20: note = Target: SCN10A; (-) strand; PAM type: NRG; PAM sequence: TGG
  source 1..20: mol_type = other DNA
gaacaacctgcaggtggccc

SEQ ID NO: 17659 - DNA, 20 bp, synthetic construct
  misc_feature 1..20: note = Description of Artificial Sequence: Synthetic oligonucleotide
  misc_feature 1..20: note = Target: SCN10A; (-) strand; PAM type: NRG; PAM sequence: TGG
  source 1..20: mol_type = other DNA
ggaggtgaacaacctgcagg

SEQ ID NO: 17660 - DNA, 20 bp, synthetic construct
  misc_feature 1..20: note = Description of Artificial Sequence: Synthetic oligonucleotide
  misc_feature 1..20: note = Target: SCN10A; (-) strand; PAM type: NRG; PAM sequence: AGG
  source 1..20: mol_type = other DNA
tggggaggtgaacaacctgc

SEQ ID NO: 17661 - DNA, 20 bp, synthetic construct
  misc_feature 1..20: note = Description of Artificial Sequence: Synthetic oligonucleotide
  misc_feature 1..20: note = Target: SCN10A; (-) strand; PAM type: NRG; PAM sequence: CAG
  source 1..20: mol_type = other DNA
atggggaggtgaacaacctg

SEQ ID NO: 17662 - DNA, 20 bp, synthetic construct
  misc_feature 1..20: note = Description of Artificial Sequence: Synthetic oligonucleotide
  misc_feature 1..20: note = Target: SCN10A; (-) strand; PAM type: NRG; PAM sequence: AGG
  source 1..20: mol_type = other DNA
agccccggaggacgatgggg

SEQ ID NO: 17663 - DNA, 20 bp, synthetic construct
  misc_feature 1..20: note = Description of Artificial Sequence: Synthetic oligonucleotide
  misc_feature 1..20: note = Target: SCN10A; (-) strand; PAM type: NRG; PAM sequence: GAG
  source 1..20: mol_type = other DNA
cagccccggaggacgatggg

SEQ ID NO: 17664 - DNA, 20 bp, synthetic construct
  misc_feature 1..20: note = Description of Artificial Sequence: Synthetic oligonucleotide
  misc_feature 1..20: note = Target: SCN10A; (-) strand; PAM type: NRG; PAM sequence: GGG
  source 1..20: mol_type = other DNA
cacagccccggaggacgatg

SEQ ID NO: 17665 - DNA, 20 bp, synthetic construct
  misc_feature 1..20: note = Description of Artificial Sequence: Synthetic oligonucleotide
  misc_feature 1..20: note = Target: SCN10A; (-) strand; PAM type: NRG; PAM sequence: GGG
  source 1..20: mol_type = other DNA
tcacagccccggaggacgat

SEQ ID NO: 17666 - DNA, 20 bp, synthetic construct
  misc_feature 1..20: note = Description of Artificial Sequence: Synthetic oligonucleotide
  misc_feature 1..20: note = Target: SCN10A; (-) strand; PAM type: NRG; PAM sequence: TGG
  source 1..20: mol_type = other DNA
ctcacagccccggaggacga

SEQ ID NO: 17667 - DNA, 20 bp, synthetic construct
  misc_feature 1..20: note = Description of Artificial Sequence: Synthetic oligonucleotide
  misc_feature 1..20: note = Target: SCN10A; (-) strand; PAM type: NRG; PAM sequence: AGG
  source 1..20: mol_type = other DNA
tgacaacctcacagccccgg

SEQ ID NO: 17668 - DNA, 20 bp, synthetic construct
  misc_feature 1..20: note = Description of Artificial Sequence: Synthetic oligonucleotide
  misc_feature 1..20: note = Target: SCN10A; (-) strand; PAM type: NRG; PAM sequence: GAG
  source 1..20: mol_type = other DNA
ctgacaacctcacagccccg

SEQ ID NO: 17669 - DNA, 20 bp, synthetic construct
  misc_feature 1..20: note = Description of Artificial Sequence: Synthetic oligonucleotide
  misc_feature 1..20: note = Target: SCN10A; (-) strand; PAM type: NRG; PAM sequence: CGG
  source 1..20: mol_type = other DNA
tgctgacaacctcacagccc

SEQ ID NO: 17670 - DNA, 20 bp, synthetic construct
  misc_feature 1..20: note = Description of Artificial Sequence: Synthetic oligonucleotide
  misc_feature 1..20: note = Target: SCN10A; (-) strand; PAM type: NRG; PAM sequence: CAG
  source 1..20: mol_type = other DNA
tttcagtgctgacaacctca

SEQ ID NO: 17671 - DNA, 20 bp, synthetic construct
  misc_feature 1..20: note = Description of Artificial Sequence: Synthetic oligonucleotide
  misc_feature 1..20: note = Target: SCN10A; (-) strand; PAM type: NRG; PAM sequence: CAG
  source 1..20: mol_type = other DNA
gccctgctattgaactcttt

SEQ ID NO: 17672 - DNA, 20 bp, synthetic construct
  misc_feature 1..20: note = Description of Artificial Sequence: Synthetic oligonucleotide
  misc_feature 1..20: note = Target: SCN10A; (-) strand; PAM type: NRG; PAM sequence: AGG
  source 1..20: mol_type = other DNA
cccttccattccttctcttc

SEQ ID NO: 17673 - DNA, 20 bp, synthetic construct
  misc_feature 1..20: note = Description of Artificial Sequence: Synthetic oligonucleotide
  misc_feature 1..20: note = Target: SCN10A; (-) strand; PAM type: NRG; PAM sequence: CAG
  source 1..20: mol_type = other DNA
tcccttccattccttctctt

SEQ ID NO: 17674 - DNA, 20 bp, synthetic construct
  misc_feature 1..20: note = Description of Artificial Sequence: Synthetic oligonucleotide
  misc_feature 1..20: note = Target: SCN10A; (-) strand; PAM type: NRG; PAM sequence: GAG
  source 1..20: mol_type = other DNA
ccaatgtggggctcagctta

SEQ ID NO: 17675 - DNA, 20 bp, synthetic construct
  misc_feature 1..20: note = Description of Artificial Sequence: Synthetic oligonucleotide
  misc_feature 1..20: note = Target: SCN10A; (-) strand; PAM type: NRG; PAM sequence: TAG
  source 1..20: mol_type = other DNA
ggccaatgtggggctcagct

SEQ ID NO: 17676 - DNA, 20 bp, synthetic construct
  misc_feature 1..20: note = Description of Artificial Sequence: Synthetic oligonucleotide
  misc_feature 1..20: note = Target: SCN10A; (-) strand; PAM type: NRG; PAM sequence: CAG
  source 1..20: mol_type = other DNA
cggtaggccaatgtggggct

SEQ ID NO: 17677 - DNA, 20 bp, synthetic construct
  misc_feature 1..20: note = Description of Artificial Sequence: Synthetic oligonucleotide
  misc_feature 1..20: note = Target: SCN10A; (-) strand; PAM type: NRG; PAM sequence: GGG
  source 1..20: mol_type = other DNA
taacccggtaggccaatgtg

SEQ ID NO: 17678 - DNA, 20 bp, synthetic construct
  misc_feature 1..20: note = Description of Artificial Sequence: Synthetic oligonucleotide
  misc_feature 1..20: note = Target: SCN10A; (-) strand; PAM type: NRG; PAM sequence: GGG
  source 1..20: mol_type = other DNA
ctaacccggtaggccaatgt

SEQ ID NO: 17679 - DNA, 20 bp, synthetic construct
  misc_feature 1..20: note = Description of Artificial Sequence: Synthetic oligonucleotide
  misc_feature 1..20: note = Target: SCN10A; (-) strand; PAM type: NRG; PAM sequence: TGG
  source 1..20: mol_type = other DNA
gctaacccggtaggccaatg

SEQ ID NO: 17680 - DNA, 20 bp, synthetic construct
  misc_feature 1..20: note = Description of Artificial Sequence: Synthetic oligonucleotide
  misc_feature 1..20: note = Target: SCN10A; (-) strand; PAM type: NRG; PAM sequence: AGG
  source 1..20: mol_type = other DNA
cagccagctgctaacccggt

SEQ ID NO: 17681 - DNA, 20 bp, synthetic construct
  misc_feature 1..20: note = Description of Artificial Sequence: Synthetic oligonucleotide
  misc_feature 1..20: note = Target: SCN10A; (-) strand; PAM type: NRG; PAM sequence: TAG
  source 1..20: mol_type = other DNA
ccagccagctgctaacccgg

SEQ ID NO: 17682 - DNA, 20 bp, synthetic construct
  misc_feature 1..20: note = Description of Artificial Sequence: Synthetic oligonucleotide
  misc_feature 1..20: note = Target: SCN10A; (-) strand; PAM type: NRG; PAM sequence: CGG
  source 1..20: mol_type = other DNA
ttgccagccagctgctaacc

SEQ ID NO: 17683 - DNA, 20 bp, synthetic construct
  misc_feature 1..20: note = Description of Artificial Sequence: Synthetic oligonucleotide
  misc_feature 1..20: note = Target: SCN10A; (-) strand; PAM type: NRG; PAM sequence: CAG
  source 1..20: mol_type = other DNA
gccgtggctgtcttgccagc

SEQ ID NO: 17684 - DNA, 20 bp, synthetic construct
  misc_feature 1..20: note = Description of Artificial Sequence: Synthetic oligonucleotide
  misc_feature 1..20: note = Target: SCN10A; (-) strand; PAM type: NRG; PAM sequence: CAG
  source 1..20: mol_type = other DNA
ccaggccgtggctgtcttgc

SEQ ID NO: 17685 - DNA, 20 bp, synthetic construct
  misc_feature 1..20: note = Description of Artificial Sequence: Synthetic oligonucleotide
  misc_feature 1..20: note = Target: SCN10A; (-) strand; PAM type: NRG; PAM sequence: TGG
  source 1..20: mol_type = other DNA
gcaggaagaggcccaggccg

SEQ ID NO: 17686 - DNA, 20 bp, synthetic construct
  misc_feature 1..20: note = Description of Artificial Sequence: Synthetic oligonucleotide
  misc_feature 1..20: note = Target: SCN10A; (-) strand; PAM type: NRG; PAM sequence: AGG
  source 1..20: mol_type = other DNA
gggtgggcaggaagaggccc

SEQ ID NO: 17687 - DNA, 20 bp, synthetic construct
  misc_feature 1..20: note = Description of Artificial Sequence: Synthetic oligonucleotide
  misc_feature 1..20: note = Target: SCN10A; (-) strand; PAM type: NRG; PAM sequence: CAG
  source 1..20: mol_type = other DNA
cgggtgggcaggaagaggcc

SEQ ID NO: 17688 - DNA, 20 bp, synthetic construct
  misc_feature 1..20: note = Description of Artificial Sequence: Synthetic oligonucleotide
  misc_feature 1..20: note = Target: SCN10A; (-) strand; PAM type: NRG; PAM sequence: AGG
  source 1..20: mol_type = other DNA
catcccgggtgggcaggaag

SEQ ID NO: 17689 - DNA, 20 bp, synthetic construct
  misc_feature 1..20: note = Description of Artificial Sequence: Synthetic oligonucleotide
  misc_feature 1..20: note = Target: SCN10A; (-) strand; PAM type: NRG; PAM sequence: GAG
  source 1..20: mol_type = other DNA
gcatcccgggtgggcaggaa

SEQ ID NO: 17690 - DNA, 20 bp, synthetic construct
  misc_feature 1..20: note = Description of Artificial Sequence: Synthetic oligonucleotide
  misc_feature 1..20: note = Target: SCN10A; (-) strand; PAM type: NRG; PAM sequence: AAG
  source 1..20: mol_type = other DNA
cagcatcccgggtgggcagg

SEQ ID NO: 17691 - DNA, 20 bp, synthetic construct
  misc_feature 1..20: note = Description of Artificial Sequence: Synthetic oligonucleotide
  misc_feature 1..20: note = Target: SCN10A; (-) strand; PAM type: NRG; PAM sequence: AGG
  source 1..20: mol_type = other DNA
ggacagcatcccgggtgggc

SEQ ID NO: 17692 - DNA, 20 bp, synthetic construct
  misc_feature 1..20: note = Description of Artificial Sequence: Synthetic oligonucleotide
  misc_feature 1..20: note = Target: SCN10A; (-) strand; PAM type: NRG; PAM sequence: CAG
  source 1..20: mol_type = other DNA
gggacagcatcccgggtggg

SEQ ID NO: 17693 - DNA, 20 bp, synthetic construct
  misc_feature 1..20: note = Description of Artificial Sequence: Synthetic oligonucleotide
  misc_feature 1..20: note = Target: SCN10A; (-) strand; PAM type: NRG; PAM sequence: GGG
  source 1..20: mol_type = other DNA
aaagggacagcatcccgggt

SEQ ID NO: 17694 - DNA, 20 bp, synthetic construct
  misc_feature 1..20: note = Description of Artificial Sequence: Synthetic oligonucleotide
  misc_feature 1..20: note = Target: SCN10A; (-) strand; PAM type: NRG; PAM sequence: TGG
  source 1..20: mol_type = other DNA
aaaagggacagcatcccggg

SEQ ID NO: 17695 - DNA, 20 bp, synthetic construct
  misc_feature 1..20: note = Description of Artificial Sequence: Synthetic oligonucleotide
  misc_feature 1..20: note = Target: SCN10A; (-) strand; PAM type: NRG; PAM sequence: GGG
  source 1..20: mol_type = other DNA
cccaaaagggacagcatccc

SEQ ID NO: 17696 - DNA, 20 bp, synthetic construct
  misc_feature 1..20: note = Description of Artificial Sequence: Synthetic oligonucleotide
  misc_feature 1..20: note = Target: SCN10A; (-) strand; PAM type: NRG; PAM sequence: CGG
  source 1..20: mol_type = other DNA
ccccaaaagggacagcatcc

SEQ ID NO: 17697 - DNA, 20 bp, synthetic construct
  misc_feature 1..20: note = Description of Artificial Sequence: Synthetic oligonucleotide
  misc_feature 1..20: note = Target: SCN10A; (-) strand; PAM type: NRG; PAM sequence: CAG
  source 1..20: mol_type = other DNA
gtccattcccccaaaaggga

SEQ ID NO: 17698 - DNA, 20 bp, synthetic construct
  misc_feature 1..20: note = Description of Artificial Sequence: Synthetic oligonucleotide
  misc_feature 1..20: note = Target: SCN10A; (-) strand; PAM type: NRG; PAM sequence: GGG
  source 1..20: mol_type = other DNA
gaaagtccattcccccaaaa

SEQ ID NO: 17699 - DNA, 20 bp, synthetic construct
  misc_feature 1..20: note = Description of Artificial Sequence: Synthetic oligonucleotide
  misc_feature 1..20: note = Target: SCN10A; (-) strand; PAM type: NRG; PAM sequence: AGG
  source 1..20: mol_type = other DNA
agaaagtccattcccccaaa

SEQ ID NO: 17700 - DNA, 20 bp, synthetic construct
  misc_feature 1..20: note = Description of Artificial Sequence: Synthetic oligonucleotide
  misc_feature 1..20: note = Target: SCN10A; (-) strand; PAM type: NRG; PAM sequence: AAG
  source 1..20: mol_type = other DNA
cagaaagtccattcccccaa

SEQ ID NO: 17701 - DNA, 20 bp, synthetic construct
  misc_feature 1..20: note = Description of Artificial Sequence: Synthetic oligonucleotide
  misc_feature 1..20: note = Target: SCN10A; (-) strand; PAM type: NRG; PAM sequence: AAG
  source 1..20: mol_type = other DNA
ttccctcaactgctctcaga

SEQ ID NO: 17702 - DNA, 20 bp, synthetic construct
  misc_feature 1..20: note = Description of Artificial Sequence: Synthetic oligonucleotide
  misc_feature 1..20: note = Target: SCN10A; (-) strand; PAM type: NRG; PAM sequence: CAG
  source 1..20: mol_type = other DNA
aactttccctcaactgctct

SEQ ID NO: 17703 - DNA, 20 bp, synthetic construct
  misc_feature 1..20: note = Description of Artificial Sequence: Synthetic oligonucleotide
  misc_feature 1..20: note = Target: SCN10A; (-) strand; PAM type: NRG; PAM sequence: AGG
  source 1..20: mol_type = other DNA
ccactgaggcgggtcactcc

SEQ ID NO: 17704 - DNA, 20 bp, synthetic construct
  misc_feature 1..20: note = Description of Artificial Sequence: Synthetic oligonucleotide
  misc_feature 1..20: note = Target: SCN10A; (-) strand; PAM type: NRG; PAM sequence: CAG
  source 1..20: mol_type = other DNA
tccactgaggcgggtcactc

SEQ ID NO: 17705 - DNA, 20 bp, synthetic construct
  misc_feature 1..20: note = Description of Artificial Sequence: Synthetic oligonucleotide
  misc_feature 1..20: note = Target: SCN10A; (-) strand; PAM type: NRG; PAM sequence: GGG
  source 1..20: mol_type = other DNA
caagcctcgtccactgaggc

SEQ ID NO: 17706 - DNA, 20 bp, synthetic construct
  misc_feature 1..20: note = Description of Artificial Sequence: Synthetic oligonucleotide
  misc_feature 1..20: note = Target: SCN10A; (-) strand; PAM type: NRG; PAM sequence: CGG
  source 1..20: mol_type = other DNA
ccaagcctcgtccactgagg

SEQ ID NO: 17707 - DNA, 20 bp, synthetic construct
  misc_feature 1..20: note = Description of Artificial Sequence: Synthetic oligonucleotide
  misc_feature 1..20: note = Target: SCN10A; (-) strand; PAM type: NRG; PAM sequence: AGG
  source 1..20: mol_type = other DNA
cttccaagcctcgtccactg

SEQ ID NO: 17708 - DNA, 20 bp, synthetic construct
  misc_feature 1..20: note = Description of Artificial Sequence: Synthetic oligonucleotide
  misc_feature 1..20: note = Target: SCN10A; (-) strand; PAM type: NRG; PAM sequence: GAG
  source 1..20: mol_type = other DNA
gcttccaagcctcgtccact

SEQ ID NO: 17709 - DNA, 20 bp, synthetic construct
  misc_feature 1..20: note = Description of Artificial Sequence: Synthetic oligonucleotide
  misc_feature 1..20: note = Target: SCN10A; (-) strand; PAM type: NRG; PAM sequence: AAG
  source 1..20: mol_type = other DNA
atggtggaaaatatgcttcc

SEQ ID NO: 17710 - DNA, 20 bp, synthetic construct
  misc_feature 1..20: note = Description of Artificial Sequence: Synthetic oligonucleotide
  misc_feature 1..20: note = Target: SCN10A; (-) strand; PAM type: NRG; PAM sequence: TGG
  source 1..20: mol_type = other DNA
ggggggctcctcctttatgg

SEQ ID NO: 17711 - DNA, 20 bp, synthetic construct
  misc_feature 1..20: note = Description of Artificial Sequence: Synthetic oligonucleotide
  misc_feature 1..20: note = Target: SCN10A; (-) strand; PAM type: NRG; PAM sequence: TGG
  source 1..20: mol_type = other DNA
agcggggggctcctccttta

SEQ ID NO: 17712 - DNA, 20 bp, synthetic construct
  misc_feature 1..20: note = Description of Artificial Sequence: Synthetic oligonucleotide
  misc_feature 1..20: note = Target: SCN10A; (-) strand; PAM type: NRG; PAM sequence: GGG
  source 1..20: mol_type = other DNA
atgtccctctgctcagcggg

SEQ ID NO: 17713 - DNA, 20 bp, synthetic construct
  misc_feature 1..20: note = Description of Artificial Sequence: Synthetic oligonucleotide
  misc_feature 1..20: note = Target: SCN10A; (-) strand; PAM type: NRG; PAM sequence: GGG
  source 1..20: mol_type = other DNA
aatgtccctctgctcagcgg

SEQ ID NO: 17714 - DNA, 20 bp, synthetic construct
  misc_feature 1..20: note = Description of Artificial Sequence: Synthetic oligonucleotide
  misc_feature 1..20: note = Target: SCN10A; (-) strand; PAM type: NRG; PAM sequence: GGG
  source 1..20: mol_type = other DNA
aaatgtccctctgctcagcg

SEQ ID NO: 17715 - DNA, 20 bp, synthetic construct
  misc_feature 1..20: note = Description of Artificial Sequence: Synthetic oligonucleotide
  misc_feature 1..20: note = Target: SCN10A; (-) strand; PAM type: NRG; PAM sequence: GGG
  source 1..20: mol_type = other DNA
taaatgtccctctgctcagc

SEQ ID NO: 17716 - DNA, 20 bp, synthetic construct
  misc_feature 1..20: note = Description of Artificial Sequence: Synthetic oligonucleotide
  misc_feature 1..20: note = Target: SCN10A; (-) strand; PAM type: NRG; PAM sequence: CGG
  source 1..20: mol_type = other DNA
ctaaatgtccctctgctcag

SEQ ID NO: 17717 - DNA, 20 bp, synthetic construct
  misc_feature 1..20: note = Description of Artificial Sequence: Synthetic oligonucleotide
  misc_feature 1..20: note = Target: SCN10A; (-) strand; PAM type: NRG; PAM sequence: CAG
  source 1..20: mol_type = other DNA
tccctaaatgtccctctgct

SEQ ID NO: 17718 - DNA, 20 bp, synthetic construct
  misc_feature 1..20: note = Description of Artificial Sequence: Synthetic oligonucleotide
  misc_feature 1..20: note = Target: SCN10A; (-) strand; PAM type: NRG; PAM sequence: TGG
  source 1..20: mol_type = other DNA
agggtggttgcaggaagggc

SEQ ID NO: 17719 - DNA, 20 bp, synthetic construct
  misc_feature 1..20: note = Description of Artificial Sequence: Synthetic oligonucleotide
  misc_feature 1..20: note = Target: SCN10A; (-) strand; PAM type: NRG; PAM sequence: GGG
  source 1..20: mol_type = other DNA
catgagggtggttgcaggaa

SEQ ID NO: 17720 - DNA, 20 bp, synthetic construct
  misc_feature 1..20: note = Description of Artificial Sequence: Synthetic oligonucleotide
  misc_feature 1..20: note = Target: SCN10A; (-) strand; PAM type: NRG; PAM sequence: AGG
  source 1..20: mol_type = other DNA
acatgagggtggttgcagga

SEQ ID NO: 17721 - DNA, 20 bp, synthetic construct
  misc_feature 1..20: note = Description of Artificial Sequence: Synthetic oligonucleotide
  misc_feature 1..20: note = Target: SCN10A; (-) strand; PAM type: NRG; PAM sequence: AAG
  source 1..20: mol_type = other DNA
cacatgagggtggttgcagg

SEQ ID NO: 17722 - DNA, 20 bp, synthetic construct
  misc_feature 1..20: note = Description of Artificial Sequence: Synthetic oligonucleotide
  misc_feature 1..20: note = Target: SCN10A; (-) strand; PAM type: NRG; PAM sequence: AGG
  source 1..20: mol_type = other DNA
tggcacatgagggtggttgc

SEQ ID NO: 17723 - DNA, 20 bp, synthetic construct
  misc_feature 1..20: note = Description of Artificial Sequence: Synthetic oligonucleotide
  misc_feature 1..20: note = Target: SCN10A; (-) strand; PAM type: NRG; PAM sequence: CAG
  source 1..20: mol_type = other DNA
ttggcacatgagggtggttg

SEQ ID NO: 17724 - DNA, 20 bp, synthetic construct
  misc_feature 1..20: note = Description of Artificial Sequence: Synthetic oligonucleotide
  misc_feature 1..20: note = Target: SCN10A; (-) strand; PAM type: NRG; PAM sequence: TGG
  source 1..20: mol_type = other DNA
agggctttggcacatgaggg

SEQ ID NO: 17725 - DNA, 20 bp, synthetic construct
  misc_feature 1..20: note = Description of Artificial Sequence: Synthetic oligonucleotide
  misc_feature 1..20: note = Target: SCN10A; (-) strand; PAM type: NRG; PAM sequence: GGG
  source 1..20: mol_type = other DNA
cccagggctttggcacatga

SEQ ID NO: 17726 - DNA, 20 bp, synthetic construct
  misc_feature 1..20: note = Description of Artificial Sequence: Synthetic oligonucleotide
  misc_feature 1..20: note = Target: SCN10A; (-) strand; PAM type: NRG; PAM sequence: AGG
  source 1..20: mol_type = other DNA
gcccagggctttggcacatg

SEQ ID NO: 17727 - DNA, 20 bp, synthetic construct
  misc_feature 1..20: note = Description of Artificial Sequence: Synthetic oligonucleotide
  misc_feature 1..20: note = Target: SCN10A; (-) strand; PAM type: NRG; PAM sequence: GAG
  source 1..20: mol_type = other DNA
agcccagggctttggcacat

SEQ ID NO: 17728 - DNA, 20 bp, synthetic construct
  misc_feature 1..20: note = Description of Artificial Sequence: Synthetic oligonucleotide
  misc_feature 1..20: note = Target: SCN10A; (-) strand; PAM type: NRG; PAM sequence: TGG
  source 1..20: mol_type = other DNA
aggaacagagcccagggctt

SEQ ID NO: 17729 - DNA, 20 bp, synthetic construct
  misc_feature 1..20: note = Description of Artificial Sequence: Synthetic oligonucleotide
  misc_feature 1..20: note = Target: SCN10A; (-) strand; PAM type: NRG; PAM sequence: GGG
  source 1..20: mol_type = other DNA
agagtcaggaacagagccca

SEQ ID NO: 17730 - DNA, 20 bp, synthetic construct
  misc_feature 1..20: note = Description of Artificial Sequence: Synthetic oligonucleotide
  misc_feature 1..20: note = Target: SCN10A; (-) strand; PAM type: NRG; PAM sequence: AGG
  source 1..20: mol_type = other DNA
cagagtcaggaacagagccc

SEQ ID NO: 17731 - DNA, 20 bp, synthetic construct
  misc_feature 1..20: note = Description of Artificial Sequence: Synthetic oligonucleotide
  misc_feature 1..20: note = Target: SCN10A; (-) strand; PAM type: NRG; PAM sequence: CAG
  source 1..20: mol_type = other DNA
ccagagtcaggaacagagcc

SEQ ID NO: 17732 - DNA, 20 bp, synthetic construct
  misc_feature 1..20: note = Description of Artificial Sequence: Synthetic oligonucleotide
  misc_feature 1..20: note = Target: SCN10A; (-) strand; PAM type: NRG; PAM sequence: GAG
  source 1..20: mol_type = other DNA
ggattccagagtcaggaaca

SEQ ID NO: 17733 - DNA, 20 bp, synthetic construct
  misc_feature 1..20: note = Description of Artificial Sequence: Synthetic oligonucleotide
  misc_feature 1..20: note = Target: SCN10A; (-) strand; PAM type: NRG; PAM sequence: CAG
  source 1..20: mol_type = other DNA
caggattccagagtcaggaa

SEQ ID NO: 17734 - DNA, 20 bp, synthetic construct
  misc_feature 1..20: note = Description of Artificial Sequence: Synthetic oligonucleotide
  misc_feature 1..20: note = Target: SCN10A; (-) strand; PAM type: NRG; PAM sequence: AGG
  source 1..20: mol_type = other DNA
gtgcccaggattccagagtc

SEQ ID NO: 17735 - DNA, 20 bp, synthetic construct
  misc_feature 1..20: note = Description of Artificial Sequence: Synthetic oligonucleotide
  misc_feature 1..20: note = Target: SCN10A; (-) strand; PAM type: NRG; PAM sequence: CAG
  source 1..20: mol_type = other DNA
tgtgcccaggattccagagt

SEQ ID NO: 17736 - DNA, 20 bp, synthetic construct
  misc_feature 1..20: note = Description of Artificial Sequence: Synthetic oligonucleotide
  misc_feature 1..20: note = Target: SCN10A; (-) strand; PAM type: NRG; PAM sequence: GAG
  source 1..20: mol_type = other DNA
aagatgtgcccaggattcca

SEQ ID NO: 17737 - DNA, 20 bp, synthetic construct
  misc_feature 1..20: note = Description of Artificial Sequence: Synthetic oligonucleotide
  misc_feature 1..20: note = Target: SCN10A; (-) strand; PAM type: NRG; PAM sequence: CAG
  source 1..20: mol_type = other DNA
gcaagatgtgcccaggattc

SEQ ID NO: 17738 - DNA, 20 bp, synthetic construct
  misc_feature 1..20: note = Description of Artificial Sequence: Synthetic oligonucleotide
  misc_feature 1..20: note = Target: SCN10A; (-) strand; PAM type: NRG; PAM sequence: AGG
  source 1..20: mol_type = other DNA
ggaagcagcaagatgtgccc

SEQ ID NO: 17739 - DNA, 20 bp, synthetic construct
  misc_feature 1..20: note = Description of Artificial Sequence: Synthetic oligonucleotide
  misc_feature 1..20: note = Target: SCN10A; (-) strand; PAM type: NRG; PAM sequence: CAG
  source 1..20: mol_type = other DNA
tggaagcagcaagatgtgcc

SEQ ID NO: 17740 - DNA, 20 bp, synthetic construct
  misc_feature 1..20: note = Description of Artificial Sequence: Synthetic oligonucleotide
  misc_feature 1..20: note = Target: SCN10A; (-) strand; PAM type: NRG; PAM sequence: AAG
  source 1..20: mol_type = other DNA
agtgaagaactggaagcagc

SEQ ID NO: 17741 - DNA, 20 bp, synthetic construct
  misc_feature 1..20: note = Description of Artificial Sequence: Synthetic oligonucleotide
  misc_feature 1..20: note = Target: SCN10A; (-) strand; PAM type: NRG; PAM sequence: CAG
  source 1..20: mol_type = other DNA
ctcaagtgaagaactggaag

SEQ ID NO: 17742 - DNA, 20 bp, synthetic construct
  misc_feature 1..20: note = Description of Artificial Sequence: Synthetic oligonucleotide
  misc_feature 1..20: note = Target: SCN10A; (-) strand; PAM type: NRG; PAM sequence: AAG
  source 1..20: mol_type = other DNA
gctctcaagtgaagaactgg

SEQ ID NO: 17743 - DNA, 20 bp, synthetic construct
  misc_feature 1..20: note = Description of Artificial Sequence: Synthetic oligonucleotide
  misc_feature 1..20: note = Target: SCN10A; (-) strand; PAM type: NRG; PAM sequence: TGG
  source 1..20: mol_type = other DNA
tctgctctcaagtgaagaac

SEQ ID NO: 17744 - DNA, 20 bp, synthetic construct
  misc_feature 1..20: note = Description of Artificial Sequence: Synthetic oligonucleotide
  misc_feature 1..20: note = Target: SCN10A; (-) strand; PAM type: NRG; PAM sequence: AAG
  source 1..20: mol_type = other DNA
tcttcatctgctctcaagtg

SEQ ID NO: 17745 - DNA, 20 bp, synthetic construct
  misc_feature 1..20: note = Description of Artificial Sequence: Synthetic oligonucleotide
  misc_feature 1..20: note = Target: SCN10A; (-) strand; PAM type: NRG; PAM sequence: AAG
  source 1..20: mol_type = other DNA
accgctcttcatctgctctc

SEQ ID NO: 17746 - DNA, 20 bp, synthetic construct
  misc_feature 1..20: note = Description of Artificial Sequence: Synthetic oligonucleotide
  misc_feature 1..20: note = Target: SCN10A; (-) strand; PAM type: NRG; PAM sequence: GAG
  source 1..20: mol_type = other DNA
gacaggaagtttacccctct

SEQ ID NO: 17747 - DNA, 20 bp, synthetic construct
  misc_feature 1..20: note = Description of Artificial Sequence: Synthetic oligonucleotide
  misc_feature 1..20: note = Target: SCN10A; (-) strand; PAM type: NRG; PAM sequence: AAG
  source 1..20: mol_type = other DNA
gcccctcaccctcagacagg

SEQ ID NO: 17748 - DNA, 20 bp, synthetic construct
  misc_feature 1..20: note = Description of Artificial Sequence: Synthetic oligonucleotide
  misc_feature 1..20: note = Target: SCN10A; (-) strand; PAM type: NRG; PAM sequence: AGG
  source 1..20: mol_type = other DNA
gatgcccctcaccctcagac

SEQ ID NO: 17749 - DNA, 20 bp, synthetic construct
  misc_feature 1..20: note = Description of Artificial Sequence: Synthetic oligonucleotide
  misc_feature 1..20: note = Target: SCN10A; (-) strand; PAM type: NRG; PAM sequence: CAG
  source 1..20: mol_type = other DNA
agatgcccctcaccctcaga

SEQ ID NO: 17750 - DNA, 20 bp, synthetic construct
  misc_feature 1..20: note = Description of Artificial Sequence: Synthetic oligonucleotide
  misc_feature 1..20: note = Target: SCN10A; (-) strand; PAM type: NRG; PAM sequence: CAG
  source 1..20: mol_type = other DNA
ccacagatgcccctcaccct

SEQ ID NO: 17751 - DNA, 20 bp, synthetic construct
  misc_feature 1..20: note = Description of Artificial Sequence: Synthetic oligonucleotide
  misc_feature 1..20: note = Target: SCN10A; (-) strand; PAM type: NRG; PAM sequence: CAG
  source 1..20: mol_type = other DNA
ccaccatccctgcagagcca

SEQ ID NO: 17752 - DNA, 20 bp, synthetic construct
  misc_feature 1..20: note = Description of Artificial Sequence: Synthetic oligonucleotide
  misc_feature 1..20: note = Target: SCN10A; (-) strand; PAM type: NRG; PAM sequence: GAG
  source 1..20: mol_type = other DNA
ctgagcccaccatccctgca

SEQ ID NO: 17753 - DNA, 20 bp, synthetic construct
  misc_feature 1..20: note = Description of Artificial Sequence: Synthetic oligonucleotide
  misc_feature 1..20: note = Target: SCN10A; (-) strand; PAM type: NRG; PAM sequence: CAG
  source 1..20: mol_type = other DNA
ggctgagcccaccatccctg

SEQ ID NO: 17754 - DNA, 20 bp, synthetic construct
  misc_feature 1..20: note = Description of Artificial Sequence: Synthetic oligonucleotide
  misc_feature 1..20: note = Target: SCN10A; (-) strand; PAM type: NRG; PAM sequence: GAG
  source 1..20: mol_type = other DNA
aaactctgttcttccaggct

SEQ ID NO: 17755 - DNA, 20 bp, synthetic construct
  misc_feature 1..20: note = Description of Artificial Sequence: Synthetic oligonucleotide
  misc_feature 1..20: note = Target: SCN10A; (-) strand; PAM type: NRG; PAM sequence: AGG
  source 1..20: mol_type = other DNA
cccagaaactctgttcttcc

SEQ ID NO: 17756 - DNA, 20 bp, synthetic construct
  misc_feature 1..20: note = Description of Artificial Sequence: Synthetic oligonucleotide
  misc_feature 1..20: note = Target: SCN10A; (-) strand; PAM type: NRG; PAM sequence: CAG
  source 1..20: mol_type = other DNA
tcccagaaactctgttcttc

SEQ ID NO: 17757 - DNA, 20 bp, synthetic construct
  misc_feature 1..20: note = Description of Artificial Sequence: Synthetic oligonucleotide
  misc_feature 1..20: note = Target: SCN10A; (-) strand; PAM type: NRG; PAM sequence: CAG
  source 1..20: mol_type = other DNA
ggatgcctctgcctgcatcc

SEQ ID NO: 17758 - DNA, 20 bp, synthetic construct
  misc_feature 1..20: note = Description of Artificial Sequence: Synthetic oligonucleotide
  misc_feature 1..20: note = Target: SCN10A; (-) strand; PAM type: NRG; PAM sequence: GGG
  source 1..20: mol_type = other DNA
ccaccctggtgcctgagcca

SEQ ID NO: 17759 - DNA, 20 bp, synthetic construct
  misc_feature 1..20: note = Description of Artificial Sequence: Synthetic oligonucleotide
  misc_feature 1..20: note = Target: SCN10A; (-) strand; PAM type: NRG; PAM sequence: AGG
  source 1..20: mol_type = other DNA
tccaccctggtgcctgagcc

SEQ ID NO: 17760 - DNA, 20 bp, synthetic construct
  misc_feature 1..20: note = Description of Artificial Sequence: Synthetic oligonucleotide
  misc_feature 1..20: note = Target: SCN10A; (-) strand; PAM type: NRG; PAM sequence: CAG
  source 1..20: mol_type = other DNA
ttccaccctggtgcctgagc

SEQ ID NO: 17761 - DNA, 20 bp, synthetic construct
  misc_feature 1..20: note = Description of Artificial Sequence: Synthetic oligonucleotide
  misc_feature 1..20: note = Target: SCN10A; (-) strand; PAM type: NRG; PAM sequence: GAG
  source 1..20: mol_type = other DNA
tcttttccaccctggtgcct

SEQ ID NO: 17762 - DNA, 20 bp, synthetic construct
  misc_feature 1..20: note = Description of Artificial Sequence: Synthetic oligonucleotide
  misc_feature 1..20: note = Target: SCN10A; (-) strand; PAM type: NRG; PAM sequence: TGG
  source 1..20: mol_type = other DNA
ctctttagtcttttccaccc

SEQ ID NO: 17763 - DNA, 20 bp, synthetic construct
  misc_feature 1..20: note = Description of Artificial Sequence: Synthetic oligonucleotide
  misc_feature 1..20: note = Target: SCN10A; (-) strand; PAM type: NRG; PAM sequence: TAG
  source 1..20: mol_type = other DNA
aacaacaaatccagactctt

SEQ ID NO: 17764 - DNA, 20 bp, synthetic construct
  misc_feature 1..20: note = Description of Artificial Sequence: Synthetic oligonucleotide
  misc_feature 1..20: note = Target: SCN10A; (-) strand; PAM type: NRG; PAM sequence: CAG
  source 1..20: mol_type = other DNA
aagggaagcaacaacaaatc

SEQ ID NO: 17765 - DNA, 20 bp, synthetic construct
  misc_feature 1..20: note = Description of Artificial Sequence: Synthetic oligonucleotide
  misc_feature 1..20: note = Target: SCN10A; (-) strand; PAM type: NRG; PAM sequence: AAG
  source 1..20: mol_type = other DNA
aagctaaaccaagaaaaggg

SEQ ID NO: 17766 - DNA, 20 bp, synthetic construct
  misc_feature 1..20: note = Description of Artificial Sequence: Synthetic oligonucleotide
  misc_feature 1..20: note = Target: SCN10A; (-) strand; PAM type: NRG; PAM sequence: GGG
  source 1..20: mol_type = other DNA
agaaagctaaaccaagaaaa

SEQ ID NO: 17767 - DNA, 20 bp, synthetic construct
  misc_feature 1..20: note = Description of Artificial Sequence: Synthetic oligonucleotide
  misc_feature 1..20: note = Target: SCN10A; (-) strand; PAM type: NRG; PAM sequence: AGG
  source 1..20: mol_type = other DNA
aagaaagctaaaccaagaaa

SEQ ID NO: 17768 - DNA, 20 bp, synthetic construct
  misc_feature 1..20: note = Description of Artificial Sequence: Synthetic oligonucleotide
  misc_feature 1..20: note = Target: SCN10A; (-) strand; PAM type: NRG; PAM sequence: AAG
  source 1..20: mol_type = other DNA
gaagaaagctaaaccaagaa

SEQ ID NO: 17769 - DNA, 20 bp, synthetic construct
  misc_feature 1..20: note = Description of Artificial Sequence: Synthetic oligonucleotide
  misc_feature 1..20: note = Target: SCN10A; (-) strand; PAM type: NRG; PAM sequence: AAG
  source 1..20: mol_type = other DNA
agacagaagaaagctaaacc

SEQ ID NO: 17770 - DNA, 20 bp, synthetic construct
  misc_feature 1..20: note = Description of Artificial Sequence: Synthetic oligonucleotide
  misc_feature 1..20: note = Target: SCN10A; (-) strand; PAM type: NRG; PAM sequence: AAG
  source 1..20: mol_type = other DNA
tgagttttatagacagaaga

SEQ ID NO: 17771 - DNA, 20 bp, synthetic construct
  misc_feature 1..20: note = Description of Artificial Sequence: Synthetic oligonucleotide
  misc_feature 1..20: note = Target: SCN10A; (-) strand; PAM type: NRG; PAM sequence: AAG
  source 1..20: mol_type = other DNA
ctcatgagttttatagacag

SEQ ID NO: 17772 - DNA, 20 bp, synthetic construct
  misc_feature 1..20: note = Description of Artificial Sequence: Synthetic oligonucleotide
  misc_feature 1..20: note = Target: SCN10A; (-) strand; PAM type: NRG; PAM sequence: CAG
  source 1..20: mol_type = other DNA
ttcctcatgagttttataga

SEQ ID NO: 17773 - DNA, 20 bp, synthetic construct
  misc_feature 1..20: note = Description of Artificial Sequence: Synthetic oligonucleotide
  misc_feature 1..20: note = Target: SCN10A; (-) strand; PAM type: NRG; PAM sequence: TAG
  source 1..20: mol_type = other DNA
ttctttcctcatgagtttta

SEQ ID NO: 17774 - DNA, 20 bp, synthetic construct
  misc_feature 1..20: note = Description of Artificial Sequence: Synthetic oligonucleotide
  misc_feature 1..20: note = Target: SCN10A; (-) strand; PAM type: NRG; PAM sequence: GAG
  source 1..20: mol_type = other DNA
aacttgggttctttcctcat

SEQ ID NO: 17775 - DNA, 20 bp, synthetic construct
  misc_feature 1..20: note = Description of Artificial Sequence: Synthetic oligonucleotide
  misc_feature 1..20: note = Target: SCN10A; (-) strand; PAM type: NRG; PAM sequence: GGG
  source 1..20: mol_type = other DNA
ccctggacatcaaccaactt

SEQ ID NO: 17776 - DNA, 20 bp, synthetic construct
  misc_feature 1..20: note = Description of Artificial Sequence: Synthetic oligonucleotide
  misc_feature 1..20: note = Target: SCN10A; (-) strand; PAM type: NRG; PAM sequence: TGG
  source 1..20: mol_type = other DNA
gccctggacatcaaccaact

SEQ ID NO: 17777 - DNA, 20 bp, synthetic construct
  misc_feature 1..20: note = Description of Artificial Sequence: Synthetic oligonucleotide
  misc_feature 1..20: note = Target: SCN10A; (-) strand; PAM type: NRG; PAM sequence: TGG
  source 1..20: mol_type = other DNA
aagcccctttcttattgccc

SEQ ID NO: 17778 - DNA, 20 bp, synthetic construct
  misc_feature 1..20: note = Description of Artificial Sequence: Synthetic oligonucleotide
  misc_feature 1..20: note = Target: SCN10A; (-) strand; PAM type: NRG; PAM sequence: AAG
  source 1..20: mol_type = other DNA
gggaggatgcagtcttccag

SEQ ID NO: 17779 - DNA, 20 bp, synthetic construct
  misc_feature 1..20: note = Description of Artificial Sequence: Synthetic oligonucleotide
  misc_feature 1..20: note = Target: SCN10A; (-) strand; PAM type: NRG; PAM sequence: CAG
  source 1..20: mol_type = other DNA
tgtgggaggatgcagtcttc

SEQ ID NO: 17780 - DNA, 20 bp, synthetic construct
  misc_feature 1..20: note = Description of Artificial Sequence: Synthetic oligonucleotide
  misc_feature 1..20: note = Target: SCN10A; (-) strand; PAM type: NRG; PAM sequence: CAG
  source 1..20: mol_type = other DNA
actggttgtgtgggaggatg

SEQ ID NO: 17781 - DNA, 20 bp, synthetic construct
  misc_feature 1..20: note = Description of Artificial Sequence: Synthetic oligonucleotide
  misc_feature 1..20: note = Target: SCN10A; (-) strand; PAM type: NRG; PAM sequence: AGG
  source 1..20: mol_type = other DNA
ggactgactggttgtgtggg

SEQ ID NO: 17782 - DNA, 20 bp, synthetic construct
  misc_feature 1..20: note = Description of Artificial Sequence: Synthetic oligonucleotide
  misc_feature 1..20: note = Target: SCN10A; (-) strand; PAM type: NRG; PAM sequence: GAG
  source 1..20: mol_type = other DNA
gggactgactggttgtgtgg

SEQ ID NO: 17783 - DNA, 20 bp, synthetic construct
  misc_feature 1..20: note = Description of Artificial Sequence: Synthetic oligonucleotide
  misc_feature 1..20: note = Target: SCN10A; (-) strand; PAM type: NRG; PAM sequence: GGG
  source 1..20: mol_type = other DNA
ctgggactgactggttgtgt

SEQ ID NO: 17784 - DNA, 20 bp, synthetic construct
  misc_feature 1..20: note = Description of Artificial Sequence: Synthetic oligonucleotide
  misc_feature 1..20: note = Target: SCN10A; (-) strand; PAM type: NRG; PAM sequence: TGG
  source 1..20: mol_type = other DNA
cctgggactgactggttgtg

SEQ ID NO: 17785 - DNA, 20 bp, synthetic construct
  misc_feature 1..20: note = Description of Artificial Sequence: Synthetic oligonucleotide
  misc_feature 1..20: note = Target: SCN10A; (-) strand; PAM type: NRG; PAM sequence: TGG
  source 1..20: mol_type = other DNA
cttgccctcctgggactgac

SEQ ID NO: 17786 - DNA, 20 bp, synthetic construct
  misc_feature 1..20: note = Description of Artificial Sequence: Synthetic oligonucleotide
  misc_feature 1..20: note = Target: SCN10A; (-) strand; PAM type: NRG; PAM sequence: GGG
  source 1..20: mol_type = other DNA
ggtggggtccttgccctcct

SEQ ID NO: 17787 - DNA, 20 bp, synthetic construct
  misc_feature 1..20: note = Description of Artificial Sequence: Synthetic oligonucleotide
  misc_feature 1..20: note = Target: SCN10A; (-) strand; PAM type: NRG; PAM sequence: TGG
  source 1..20: mol_type = other DNA
tggtggggtccttgccctcc

SEQ ID NO: 17788 - DNA, 20 bp, synthetic construct
  misc_feature 1..20: note = Description of Artificial Sequence: Synthetic oligonucleotide
  misc_feature 1..20: note = Target: SCN10A; (-) strand; PAM type: NRG; PAM sequence: GGG
  source 1..20: mol_type = other DNA
cacccactctggtcatggtg

SEQ ID NO: 17789 - DNA, 20 bp, synthetic construct
  misc_feature 1..20: note = Description of Artificial Sequence: Synthetic oligonucleotide
  misc_feature 1..20: note = Target: SCN10A; (-) strand; PAM type: NRG; PAM sequence: GGG
  source 1..20: mol_type = other DNA
ccacccactctggtcatggt

SEQ ID NO: 17790 - DNA, 20 bp, synthetic construct
  misc_feature 1..20: note = Description of Artificial Sequence: Synthetic oligonucleotide
  misc_feature 1..20: note = Target: SCN10A; (-) strand; PAM type: NRG; PAM sequence: TGG
  source 1..20: mol_type = other DNA
tccacccactctggtcatgg

SEQ ID NO: 17791 - DNA, 20 bp, synthetic construct
  misc_feature 1..20: note = Description of Artificial Sequence: Synthetic oligonucleotide
  misc_feature 1..20: note = Target: SCN10A; (-) strand; PAM type: NRG; PAM sequence: TGG
  source 1..20: mol_type = other DNA
gtctccacccactctggtca

SEQ ID NO: 17792 - DNA, 20 bp, synthetic construct
  misc_feature 1..20: note = Description of Artificial Sequence: Synthetic oligonucleotide
  misc_feature 1..20: note = Target: SCN10A; (-) strand; PAM type: NRG; PAM sequence: TGG
  source 1..20: mol_type = other DNA
cagcttgtctccacccactc

SEQ ID NO: 17793 - DNA, 20 bp, synthetic construct
  misc_feature 1..20: note = Description of Artificial Sequence: Synthetic oligonucleotide
  misc_feature 1..20: note = Target: SCN10A; (-) strand; PAM type: NRG; PAM sequence: CAG
  source 1..20: mol_type = other DNA
ccagcctggccccctgccct

SEQ ID NO: 17794 - DNA, 20 bp, synthetic construct
  misc_feature 1..20: note = Description of Artificial Sequence: Synthetic oligonucleotide
  misc_feature 1..20: note = Target: SCN10A; (-) strand; PAM type: NRG; PAM sequence: TGG
  source 1..20: mol_type = other DNA
accccttctccgccccagcc

SEQ ID NO: 17795 - DNA, 20 bp, synthetic construct
  misc_feature 1..20: note = Description of Artificial Sequence: Synthetic oligonucleotide
  misc_feature 1..20: note = Target: SCN10A; (-) strand; PAM type: NRG; PAM sequence: CAG
  source 1..20: mol_type = other DNA
ccaataccccttctccgccc

SEQ ID NO: 17796 - DNA, 20 bp, synthetic construct
  misc_feature 1..20: note = Description of Artificial Sequence: Synthetic oligonucleotide
  misc_feature 1..20: note = Target: SCN10A; (-) strand; PAM type: NRG; PAM sequence: AAG
  source 1..20: mol_type = other DNA
ctggagactcacttgccaat

SEQ ID NO: 17797 - DNA, 20 bp, synthetic construct
  misc_feature 1..20: note = Description of Artificial Sequence: Synthetic oligonucleotide
  misc_feature 1..20: note = Target: SCN10A; (-) strand; PAM type: NRG; PAM sequence: GAG
  source 1..20: mol_type = other DNA
gtttggaggaagcccctctg

SEQ ID NO: 17798 - DNA, 20 bp, synthetic construct
  misc_feature 1..20: note = Description of Artificial Sequence: Synthetic oligonucleotide
  misc_feature 1..20: note = Target: SCN10A; (-) strand; PAM type: NRG; PAM sequence: TGG
  source 1..20: mol_type = other DNA
atgtttggaggaagcccctc

SEQ ID NO: 17799 - DNA, 20 bp, synthetic construct
  misc_feature 1..20: note = Description of Artificial Sequence: Synthetic oligonucleotide
  misc_feature 1..20: note = Target: SCN10A; (-) strand; PAM type: NRG; PAM sequence: AAG
  source 1..20: mol_type = other DNA
atctactccatgtttggagg

SEQ ID NO: 17800 - DNA, 20 bp, synthetic construct
  misc_feature 1..20: note = Description of Artificial Sequence: Synthetic oligonucleotide
  misc_feature 1..20: note = Target: SCN10A; (-) strand; PAM type: NRG; PAM sequence: AGG
  source 1..20: mol_type = other DNA
aaaatctactccatgtttgg

SEQ ID NO: 17801 - DNA, 20 bp, synthetic construct
  misc_feature 1..20: note = Description of Artificial Sequence: Synthetic oligonucleotide
  misc_feature 1..20: note = Target: SCN10A; (-) strand; PAM type: NRG; PAM sequence: GAG
  source 1..20: mol_type = other DNA
caaaatctactccatgtttg

SEQ ID NO: 17802 - DNA, 20 bp, synthetic construct
  misc_feature 1..20: note = Description of Artificial Sequence: Synthetic oligonucleotide
  misc_feature 1..20: note = Target: SCN10A; (-) strand; PAM type: NRG; PAM sequence: TGG
  source 1..20: mol_type = other DNA
aacaaaatctactccatgtt

SEQ ID NO: 17803 - DNA, 20 bp, synthetic construct
  misc_feature 1..20: note = Description of Artificial Sequence: Synthetic oligonucleotide
  misc_feature 1..20: note = Target: SCN10A; (-) strand; PAM type: NRG; PAM sequence: CAG
  source 1..20: mol_type = other DNA
acggacaacatccaaggcca

SEQ ID NO: 17804 - DNA, 20 bp, synthetic construct
  misc_feature 1..20: note = Description of Artificial Sequence: Synthetic oligonucleotide
  misc_feature 1..20: note = Target: SCN10A; (-) strand; PAM type: NRG; PAM sequence: AGG
  source 1..20: mol_type = other DNA
tgggtcacggacaacatcca

SEQ ID NO: 17805 - DNA, 20 bp, synthetic construct
  misc_feature 1..20: note = Description of Artificial Sequence: Synthetic oligonucleotide
  misc_feature 1..20: note = Target: SCN10A; (-) strand; PAM type: NRG; PAM sequence: AAG
  source 1..20: mol_type = other DNA
atgggtcacggacaacatcc

SEQ ID NO: 17806 - DNA, 20 bp, synthetic construct
  misc_feature 1..20: note = Description of Artificial Sequence: Synthetic oligonucleotide
  misc_feature 1..20: note = Target: SCN10A; (-) strand; PAM type: NRG; PAM sequence: CGG
  source 1..20: mol_type = other DNA
ggagggggcacaatgggtca

SEQ ID NO: 17807 - DNA, 20 bp, synthetic construct
  misc_feature 1..20: note = Description of Artificial Sequence: Synthetic oligonucleotide
  misc_feature 1..20: note = Target: SCN10A; (-) strand; PAM type: NRG; PAM sequence: GGG
  source 1..20: mol_type = other DNA
ctgcagggagggggcacaat

SEQ ID NO: 17808 - DNA, 20 bp, synthetic construct
  misc_feature 1..20: note = Description of Artificial Sequence: Synthetic oligonucleotide
  misc_feature 1..20: note = Target: SCN10A; (-) strand; PAM type: NRG; PAM sequence: TGG
  source 1..20: mol_type = other DNA
gctgcagggagggggcacaa

SEQ ID NO: 17809 - DNA, 20 bp, synthetic construct
  misc_feature 1..20: note = Description of Artificial Sequence: Synthetic oligonucleotide
  misc_feature 1..20: note = Target: SCN10A; (-) strand; PAM type: NRG; PAM sequence: GGG
  source 1..20: mol_type = other DNA
ggggagaggctgcagggagg

SEQ ID NO: 17810 - DNA, 20 bp, synthetic construct
  misc_feature 1..20: note = Description of Artificial Sequence: Synthetic oligonucleotide
  misc_feature 1..20: note = Target: SCN10A; (-) strand; PAM type: NRG; PAM sequence: GGG
  source 1..20: mol_type = other DNA
gggggagaggctgcagggag

SEQ ID NO: 17811 - DNA, 20 bp, synthetic construct
  misc_feature 1..20: note = Description of Artificial Sequence: Synthetic oligonucleotide
  misc_feature 1..20: note = Target: SCN10A; (-) strand; PAM type: NRG; PAM sequence: GGG
  source 1..20: mol_type = other DNA
agggggagaggctgcaggga

SEQ ID NO: 17812 - DNA, 20 bp, synthetic construct
  misc_feature 1..20: note = Description of Artificial Sequence: Synthetic oligonucleotide
  misc_feature 1..20: note = Target: SCN10A; (-) strand; PAM type: NRG; PAM sequence: AGG
  source 1..20: mol_type = other DNA
cagggggagaggctgcaggg

SEQ ID NO: 17813 - DNA, 20 bp, synthetic construct
  misc_feature 1..20: note = Description of Artificial Sequence: Synthetic oligonucleotide
  misc_feature 1..20: note = Target: SCN10A; (-) strand; PAM type: NRG; PAM sequence: GAG
  source 1..20: mol_type = other DNA
gcagggggagaggctgcagg

SEQ ID NO: 17814 - DNA, 20 bp, synthetic construct
  misc_feature 1..20: note = Description of Artificial Sequence: Synthetic oligonucleotide
  misc_feature 1..20: note = Target: SCN10A; (-) strand; PAM type: NRG; PAM sequence: GGG
  source 1..20: mol_type = other DNA
gagcagggggagaggctgca

SEQ ID NO: 17815 - DNA, 20 bp, synthetic construct
  misc_feature 1..20: note = Description of Artificial Sequence: Synthetic oligonucleotide
  misc_feature 1..20: note = Target: SCN10A; (-) strand; PAM type: NRG; PAM sequence: AGG
  source 1..20: mol_type = other DNA
ggagcagggggagaggctgc

SEQ ID NO: 17816 - DNA, 20 bp, synthetic construct
  misc_feature 1..20: note = Description of Artificial Sequence: Synthetic oligonucleotide
  misc_feature 1..20: note = Target: SCN10A; (-) strand; PAM type: NRG; PAM sequence: CAG
  source 1..20: mol_type = other DNA
gggagcagggggagaggctg

SEQ ID NO: 17817 - DNA, 20 bp, synthetic construct
  misc_feature 1..20: note = Description of Artificial Sequence: Synthetic oligonucleotide
  misc_feature 1..20: note = Target: SCN10A; (-) strand; PAM type: NRG; PAM sequence: AGG
  source 1..20: mol_type = other DNA
ctagctgggagcagggggag

SEQ ID NO: 17818 - DNA, 20 bp, synthetic construct
  misc_feature 1..20: note = Description of Artificial Sequence: Synthetic oligonucleotide
  misc_feature 1..20: note = Target: SCN10A; (-) strand; PAM type: NRG; PAM sequence: GAG
  source 1..20: mol_type = other DNA
cctagctgggagcaggggga

SEQ ID NO: 17819 - DNA, 20 bp, synthetic construct
  misc_feature 1..20: note = Description of Artificial Sequence: Synthetic oligonucleotide
  misc_feature 1..20: note = Target: SCN10A; (-) strand; PAM type: NRG; PAM sequence: GAG
  source 1..20: mol_type = other DNA
gtcctagctgggagcagggg

SEQ ID NO: 17820 - DNA, 20 bp, synthetic construct
  misc_feature 1..20: note = Description of Artificial Sequence: Synthetic oligonucleotide
  misc_feature 1..20: note = Target: SCN10A; (-) strand; PAM type: NRG; PAM sequence: GGG
  source 1..20: mol_type = other DNA
aggtcctagctgggagcagg

SEQ ID NO: 17821 - DNA, 20 bp, synthetic construct
  misc_feature 1..20: note = Description of Artificial Sequence: Synthetic oligonucleotide
  misc_feature 1..20: note = Target: SCN10A; (-) strand; PAM type: NRG; PAM sequence: GGG
  source 1..20: mol_type = other DNA
caggtcctagctgggagcag

SEQ ID NO: 17822 - DNA, 20 bp, synthetic construct
  misc_feature 1..20: note = Description of Artificial Sequence: Synthetic oligonucleotide
  misc_feature 1..20: note = Target: SCN10A; (-) strand; PAM type: NRG; PAM sequence: GGG
  source 1..20: mol_type = other DNA
acaggtcctagctgggagca

SEQ ID NO: 17823 - DNA, 20 bp, synthetic construct
  misc_feature 1..20: note = Description of Artificial Sequence: Synthetic oligonucleotide
  misc_feature 1..20: note = Target: SCN10A; (-) strand; PAM type: NRG; PAM sequence: AGG
  source 1..20: mol_type = other DNA
cacaggtcctagctgggagc

SEQ ID NO: 17824 - DNA, 20 bp, synthetic construct
  misc_feature 1..20: note = Description of Artificial Sequence: Synthetic oligonucleotide
  misc_feature 1..20: note = Target: SCN10A; (-) strand; PAM type: NRG; PAM sequence: CAG
  source 1..20: mol_type = other DNA
gcacaggtcctagctgggag

SEQ ID NO: 17825 - DNA, 20 bp, synthetic construct
  misc_feature 1..20: note = Description of Artificial Sequence: Synthetic oligonucleotide
  misc_feature 1..20: note = Target: SCN10A; (-) strand; PAM type: NRG; PAM sequence: GAG
  source 1..20: mol_type = other DNA
gctgcacaggtcctagctgg

SEQ ID NO: 17826 - DNA, 20 bp, synthetic construct
  misc_feature 1..20: note = Description of Artificial Sequence: Synthetic oligonucleotide
  misc_feature 1..20: note = Target: SCN10A; (-) strand; PAM type: NRG; PAM sequence: GGG
  source 1..20: mol_type = other DNA
aagctgcacaggtcctagct

SEQ ID NO: 17827 - DNA, 20 bp, synthetic construct
  misc_feature 1..20: note = Description of Artificial Sequence: Synthetic oligonucleotide
  misc_feature 1..20: note = Target: SCN10A; (-) strand; PAM type: NRG; PAM sequence: TGG
  source 1..20: mol_type = other DNA
caagctgcacaggtcctagc

SEQ ID NO: 17828 - DNA, 20 bp, synthetic construct
  misc_feature 1..20: note = Description of Artificial Sequence: Synthetic oligonucleotide
  misc_feature 1..20: note = Target: SCN10A; (-) strand; PAM type: NRG; PAM sequence: TAG
  source 1..20: mol_type = other DNA
tctccaagctgcacaggtcc

SEQ ID NO: 17829 - DNA, 20 bp, synthetic construct
  misc_feature 1..20: note = Description of Artificial Sequence: Synthetic oligonucleotide
  misc_feature 1..20: note = Target: SCN10A; (-) strand; PAM type: NRG; PAM sequence: AGG
  source 1..20: mol_type = other DNA
ctgatttctccaagctgcac

SEQ ID NO: 17830 - DNA, 20 bp, synthetic construct
  misc_feature 1..20: note = Description of Artificial Sequence: Synthetic oligonucleotide
  misc_feature 1..20: note = Target: SCN10A; (-) strand; PAM type: NRG; PAM sequence: CAG
  source 1..20: mol_type = other DNA
actgatttctccaagctgca

SEQ ID NO: 17831 - DNA, 20 bp, synthetic construct
  misc_feature 1..20: note = Description of Artificial Sequence: Synthetic oligonucleotide
  misc_feature 1..20: note = Target: SCN10A; (-) strand; PAM type: NRG; PAM sequence: AAG
  source 1..20: mol_type = other DNA
aagagctgactgatttctcc

SEQ ID NO: 17832 - DNA, 20 bp, synthetic construct
  misc_feature 1..20: note = Description of Artificial Sequence: Synthetic oligonucleotide
  misc_feature 1..20: note = Target: SCN10A; (-) strand; PAM type: NRG; PAM sequence: GAG
  source 1..20: mol_type = other DNA
atttttattcagggaagtaa

SEQ ID NO: 17833 - DNA, 20 bp, synthetic construct
  misc_feature 1..20: note = Description of Artificial Sequence: Synthetic oligonucleotide
  misc_feature 1..20: note = Target: SCN10A; (-) strand; PAM type: NRG; PAM sequence: AAG
  source 1..20: mol_type = other DNA
acatttttattcagggaagt

SEQ ID NO: 17834 - DNA, 20 bp, synthetic construct
  misc_feature 1..20: note = Description of Artificial Sequence: Synthetic oligonucleotide
  misc_feature 1..20: note = Target: SCN10A; (-) strand; PAM type: NRG; PAM sequence: AAG
  source 1..20: mol_type = other DNA
gaaaacatttttattcaggg

SEQ ID NO: 17835 - DNA, 20 bp, synthetic construct
  misc_feature 1..20: note = Description of Artificial Sequence: Synthetic oligonucleotide
  misc_feature 1..20: note = Target: SCN10A; (-) strand; PAM type: NRG; PAM sequence: GGG
  source 1..20: mol_type = other DNA
tcagaaaacatttttattca

SEQ ID NO: 17836 - DNA, 20 bp, synthetic construct
  misc_feature 1..20: note = Description of Artificial Sequence: Synthetic oligonucleotide
  misc_feature 1..20: note = Target: SCN10A; (-) strand; PAM type: NRG; PAM sequence: AGG
  source 1..20: mol_type = other DNA
ctcagaaaacatttttattc

SEQ ID NO: 17837 - DNA, 20 bp, synthetic construct
  misc_feature 1..20: note = Description of Artificial Sequence: Synthetic oligonucleotide
  misc_feature 1..20: note = Target: SCN10A; (-) strand; PAM type: NRG; PAM sequence: CAG
  source 1..20: mol_type = other DNA
gctcagaaaacatttttatt

SEQ ID NO: 17838 - DNA, 20 bp, synthetic construct
  misc_feature 1..20: note = Description of Artificial Sequence: Synthetic oligonucleotide
  misc_feature 1..20: note = Target: SCN10A; (-) strand; PAM type: NRG; PAM sequence: CAG
  source 1..20: mol_type = other DNA
ttccccaatctgagggggct

SEQ ID NO: 17839 - DNA, 20 bp, synthetic construct
  misc_feature 1..20: note = Description of Artificial Sequence: Synthetic oligonucleotide
  misc_feature 1..20: note = Target: SCN10A; (-) strand; PAM type: NRG; PAM sequence: GGG
  source 1..20: mol_type = other DNA
tgtccttccccaatctgagg

SEQ ID NO: 17840 - DNA, 20 bp, synthetic construct
  misc_feature 1..20: note = Description of Artificial Sequence: Synthetic oligonucleotide
  misc_feature 1..20: note = Target: SCN10A; (-) strand; PAM type: NRG; PAM sequence: GGG
  source 1..20: mol_type = other DNA
atgtccttccccaatctgag

SEQ ID NO: 17841 - DNA, 20 bp, synthetic construct
  misc_feature 1..20: note = Description of Artificial Sequence: Synthetic oligonucleotide
  misc_feature 1..20: note = Target: SCN10A; (-) strand; PAM type: NRG; PAM sequence: GGG
  source 1..20: mol_type = other DNA
aatgtccttccccaatctga

SEQ ID NO: 17842 - DNA, 20 bp, synthetic construct
  misc_feature 1..20: note = Description of Artificial Sequence: Synthetic oligonucleotide
  misc_feature 1..20: note = Target: SCN10A; (-) strand; PAM type: NRG; PAM sequence: AGG
  source 1..20: mol_type = other DNA
aaatgtccttccccaatctg

SEQ ID NO: 17843 - DNA, 20 bp, synthetic construct
  misc_feature 1..20: note = Description of Artificial Sequence: Synthetic oligonucleotide
  misc_feature 1..20: note = Target: SCN10A; (-) strand; PAM type: NRG; PAM sequence: GAG
  source 1..20: mol_type = other DNA
aaaatgtccttccccaatct

SEQ ID NO: 17844 - DNA, 20 bp, synthetic construct
  misc_feature 1..20: note = Description of Artificial Sequence: Synthetic oligonucleotide
  misc_feature 1..20: note = Target: SCN10A; (-) strand; PAM type: NRG; PAM sequence: AGG
  source 1..20: mol_type = other DNA
cggtgtctattagctgttaa

SEQ ID NO: 17845 - DNA, 20 bp, synthetic construct
  misc_feature 1..20: note = Description of Artificial Sequence: Synthetic oligonucleotide
  misc_feature 1..20: note = Target: SCN10A; (-) strand; PAM type: NRG; PAM sequence: AAG
  source 1..20: mol_type = other DNA
acggtgtctattagctgtta

SEQ ID NO: 17846 - DNA, 20 bp, synthetic construct
  misc_feature 1..20: note = Description of Artificial Sequence: Synthetic oligonucleotide
  misc_feature 1..20: note = Target: SCN10A; (-) strand; PAM type: NRG; PAM sequence: TAG
  source 1..20: mol_type = other DNA
actcaataaacggtgtctat

SEQ ID NO: 17847 - DNA, 20 bp, synthetic construct
  misc_feature 1..20: note = Description of Artificial Sequence: Synthetic oligonucleotide
  misc_feature 1..20: note = Target: SCN10A; (-) strand; PAM type: NRG; PAM sequence: CGG
  source 1..20: mol_type = other DNA
tgaggcaggaactcaataaa

SEQ ID NO: 17848 - DNA, 20 bp, synthetic construct
  misc_feature 1..20: note = Description of Artificial Sequence: Synthetic oligonucleotide
  misc_feature 1..20: note = Target: SCN10A; (-) strand; PAM type: NRG; PAM sequence: AGG
  source 1..20: mol_type = other DNA
tgcaatgtctgggctgaggc

SEQ ID NO: 17849 - DNA, 20 bp, synthetic construct
  misc_feature 1..20: note = Description of Artificial Sequence: Synthetic oligonucleotide
  misc_feature 1..20: note = Target: SCN10A; (-) strand; PAM type: NRG; PAM sequence: CAG
  source 1..20: mol_type = other DNA
atgcaatgtctgggctgagg

SEQ ID NO: 17850 - DNA, 20 bp, synthetic construct
  misc_feature 1..20: note = Description of Artificial Sequence: Synthetic oligonucleotide
  misc_feature 1..20: note = Target: SCN10A; (-) strand; PAM type: NRG; PAM sequence: AGG
  source 1..20: mol_type = other DNA
ctaatgcaatgtctgggctg

SEQ ID NO: 17851 - DNA, 20 bp, synthetic construct
  misc_feature 1..20: note = Description of Artificial Sequence: Synthetic oligonucleotide
  misc_feature 1..20: note = Target: SCN10A; (-) strand; PAM type: NRG; PAM sequence: GAG
  source 1..20: mol_type = other DNA
cctaatgcaatgtctgggct

SEQ ID NO: 17852 - DNA, 20 bp, synthetic construct
  misc_feature 1..20: note = Description of Artificial Sequence: Synthetic oligonucleotide
  misc_feature 1..20: note = Target: SCN10A; (-) strand; PAM type: NRG; PAM sequence: GGG
  source 1..20: mol_type = other DNA
aattgcctaatgcaatgtct

SEQ ID NO: 17853 - DNA, 20 bp, synthetic construct
  misc_feature 1..20: note = Description of Artificial Sequence: Synthetic oligonucleotide
  misc_feature 1..20: note = Target: SCN10A; (-) strand; PAM type: NRG; PAM sequence: TGG
  source 1..20: mol_type = other DNA
aaattgcctaatgcaatgtc

SEQ ID NO: 17854 - DNA, 20 bp, synthetic construct
  misc_feature 1..20: note = Description of Artificial Sequence: Synthetic oligonucleotide
  misc_feature 1..20: note = Target: SCN10A; (-) strand; PAM type: NRG; PAM sequence: GAG
  source 1..20: mol_type = other DNA
ctgggagaattaaatgacag

SEQ ID NO: 17855 - DNA, 20 bp, synthetic construct
  misc_feature 1..20: note = Description of Artificial Sequence: Synthetic oligonucleotide
  misc_feature 1..20: note = Target: SCN10A; (-) strand; PAM type: NRG; PAM sequence: AGG
  source 1..20: mol_type = other DNA
tactgggagaattaaatgac

SEQ ID NO: 17856 - DNA, 20 bp, synthetic construct
  misc_feature 1..20: note = Description of Artificial Sequence: Synthetic oligonucleotide
  misc_feature 1..20: note = Target: SCN10A; (-) strand; PAM type: NRG; PAM sequence: CAG
  source 1..20: mol_type = other DNA
ttactgggagaattaaatga

SEQ ID NO: 17857 - DNA, 20 bp, synthetic construct
  misc_feature 1..20: note = Description of Artificial Sequence: Synthetic oligonucleotide
  misc_feature 1..20: note = Target: SCN10A; (-) strand; PAM type: NRG; PAM sequence: GAG
  source 1..20: mol_type = other DNA
cttactcatgggtttactgg

SEQ ID NO: 17858 - DNA, 20 bp, synthetic construct
  misc_feature 1..20: note = Description of Artificial Sequence: Synthetic oligonucleotide
  misc_feature 1..20: note = Target: SCN10A; (-) strand; PAM type: NRG; PAM sequence: GGG
  source 1..20: mol_type = other DNA
tgcttactcatgggtttact

SEQ ID NO: 17859 - DNA, 20 bp, synthetic construct
  misc_feature 1..20: note = Description of Artificial Sequence: Synthetic oligonucleotide
  misc_feature 1..20: note = Target: SCN10A; (-) strand; PAM type: NRG; PAM sequence: TGG
  source 1..20: mol_type = other DNA
atgcttactcatgggtttac

SEQ ID NO: 17860 - DNA, 20 bp, synthetic construct
  misc_feature 1..20: note = Description of Artificial Sequence: Synthetic oligonucleotide
  misc_feature 1..20: note = Target: SCN10A; (-) strand; PAM type: NRG; PAM sequence: GGG
  source 1..20: mol_type = other DNA
agaaaataatgcttactcat

SEQ ID NO: 17861 - DNA, 20 bp, synthetic construct
  misc_feature 1..20: note = Description of Artificial Sequence: Synthetic oligonucleotide
  misc_feature 1..20: note = Target: SCN10A; (-) strand; PAM type: NRG; PAM sequence: TGG
  source 1..20: mol_type = other DNA
aagaaaataatgcttactca

SEQ ID NO: 17862 - DNA, 20 bp, synthetic construct
  misc_feature 1..20: note = Description of Artificial Sequence: Synthetic oligonucleotide
  misc_feature 1..20: note = Target: SCN10A; (-) strand; PAM type: NRG; PAM sequence: AAG
  source 1..20: mol_type = other DNA
gatctaatttccttaaaatc

SEQ ID NO: 17863 - DNA, 20 bp, synthetic construct
  misc_feature 1..20: note = Description of Artificial Sequence: Synthetic oligonucleotide
  misc_feature 1..20: note = Target: SCN10A; (-) strand; PAM type: NRG; PAM sequence: AAG
  source 1..20: mol_type = other DNA
gcaagagacttaatctcctc

SEQ ID NO: 17864 - DNA, 20 bp, synthetic construct
  misc_feature 1..20: note = Description of Artificial Sequence: Synthetic oligonucleotide
  misc_feature 1..20: note = Target: SCN10A; (-) strand; PAM type: NRG; PAM sequence: GAG
  source 1..20: mol_type = other DNA
aggtgggtgaccccaggcaa

SEQ ID NO: 17865 - DNA, 20 bp, synthetic construct
  misc_feature 1..20: note = Description of Artificial Sequence: Synthetic oligonucleotide
  misc_feature 1..20: note = Target: SCN10A; (-) strand; PAM type: NRG; PAM sequence: AAG
  source 1..20: mol_type = other DNA
ctaggtgggtgaccccaggc

SEQ ID NO: 17866 - DNA, 20 bp, synthetic construct
  misc_feature 1..20: note = Description of Artificial Sequence: Synthetic oligonucleotide
  misc_feature 1..20: note = Target: SCN10A; (-) strand; PAM type: NRG; PAM sequence: AGG
  source 1..20: mol_type = other DNA
tttactaggtgggtgacccc

SEQ ID NO: 17867 - DNA, 20 bp, synthetic construct
  misc_feature 1..20: note = Description of Artificial Sequence: Synthetic oligonucleotide
  misc_feature 1..20: note = Target: SCN10A; (-) strand; PAM type: NRG; PAM sequence: CAG
  source 1..20: mol_type = other DNA
atttactaggtgggtgaccc

SEQ ID NO: 17868 - DNA, 20 bp, synthetic construct
  misc_feature 1..20: note = Description of Artificial Sequence: Synthetic oligonucleotide
  misc_feature 1..20: note = Target: SCN10A; (-) strand; PAM type: NRG; PAM sequence: GGG
  source 1..20: mol_type = other DNA
tgctccaccatttactaggt

SEQ ID NO: 17869 - DNA, 20 bp, synthetic construct
  misc_feature 1..20: note = Description of Artificial Sequence: Synthetic oligonucleotide
  misc_feature 1..20: note = Target: SCN10A; (-) strand; PAM type: NRG; PAM sequence: TGG
  source 1..20: mol_type = other DNA
ctgctccaccatttactagg

SEQ ID NO: 17870 - DNA, 20 bp, synthetic construct
  misc_feature 1..20: note = Description of Artificial Sequence: Synthetic oligonucleotide
  misc_feature 1..20: note = Target: SCN10A; (-) strand; PAM type: NRG; PAM sequence: AGG
  source 1..20: mol_type = other DNA
tctctgctccaccatttact

SEQ ID NO: 17871 - DNA, 20 bp, synthetic construct
  misc_feature 1..20: note = Description of Artificial Sequence: Synthetic oligonucleotide
  misc_feature 1..20: note = Target: SCN10A; (-) strand; PAM type: NRG; PAM sequence: TAG
  source 1..20: mol_type = other DNA
atctctgctccaccatttac

SEQ ID NO: 17872 - DNA, 20 bp, synthetic construct
  misc_feature 1..20: note = Description of Artificial Sequence: Synthetic oligonucleotide
  misc_feature 1..20: note = Target: SCN10A; (-) strand; PAM type: NRG; PAM sequence: TAG
  source 1..20: mol_type = other DNA
tagaaaagaaagacctggtg

SEQ ID NO: 17873 - DNA, 20 bp, synthetic construct
  misc_feature 1..20: note = Description of Artificial Sequence: Synthetic oligonucleotide
  misc_feature 1..20: note = Target: SCN10A; (-) strand; PAM type: NRG; PAM sequence: TGG
  source 1..20: mol_type = other DNA
atgattagaaaagaaagacc

SEQ ID NO: 17874 - DNA, 20 bp, synthetic construct
  misc_feature 1..20: note = Description of Artificial Sequence: Synthetic oligonucleotide
  misc_feature 1..20: note = Target: SCN10A; (-) strand; PAM type: NRG; PAM sequence: AAG
  source 1..20: mol_type = other DNA
gaacatatgattagaaaaga

SEQ ID NO: 17875 - DNA, 20 bp, synthetic construct
  misc_feature 1..20: note = Description of Artificial Sequence: Synthetic oligonucleotide
  misc_feature 1..20: note = Target: SCN10A; (-) strand; PAM type: NRG; PAM sequence: AAG
  source 1..20: mol_type = other DNA
atgagaacatatgattagaa

SEQ ID NO: 17876 - DNA, 20 bp, synthetic construct
  misc_feature 1..20: note = Description of Artificial Sequence: Synthetic oligonucleotide
  misc_feature 1..20: note = Target: SCN10A; (-) strand; PAM type: NRG; PAM sequence: TAG
  source 1..20: mol_type = other DNA
caggaatgagaacatatgat

SEQ ID NO: 17877 - DNA, 20 bp, synthetic construct
  misc_feature 1..20: note = Description of Artificial Sequence: Synthetic oligonucleotide
  misc_feature 1..20: note = Target: SCN10A; (-) strand; PAM type: NRG; PAM sequence: GAG
  source 1..20: mol_type = other DNA
gcagtctgacttgcaggaat

SEQ ID NO: 17878 - DNA, 20 bp, synthetic construct
  misc_feature 1..20: note = Description of Artificial Sequence: Synthetic oligonucleotide
  misc_feature 1..20: note = Target: SCN10A; (-) strand; PAM type: NRG; PAM sequence: AGG
  source 1..20: mol_type = other DNA
tgggaggcagtctgacttgc

SEQ ID NO: 17879 - DNA, 20 bp, synthetic construct
  misc_feature 1..20: note = Description of Artificial Sequence: Synthetic oligonucleotide
  misc_feature 1..20: note = Target: SCN10A; (-) strand; PAM type: NRG; PAM sequence: CAG
  source 1..20: mol_type = other DNA
ttgggaggcagtctgacttg

SEQ ID NO: 17880 - DNA, 20 bp, synthetic construct
  misc_feature 1..20: note = Description of Artificial Sequence: Synthetic oligonucleotide
  misc_feature 1..20: note = Target: SCN10A; (-) strand; PAM type: NRG; PAM sequence: CAG
  source 1..20: mol_type = other DNA
aagaagtgtgccttgggagg

SEQ ID NO: 17881 - DNA, 20 bp, synthetic construct
  misc_feature 1..20: note = Description of Artificial Sequence: Synthetic oligonucleotide
  misc_feature 1..20: note = Target: SCN10A; (-) strand; PAM type: NRG; PAM sequence: AGG
  source 1..20: mol_type = other DNA
tacaagaagtgtgccttggg

SEQ ID NO: 17882 - DNA, 20 bp, synthetic construct
  misc_feature 1..20: note = Description of Artificial Sequence: Synthetic oligonucleotide
  misc_feature 1..20: note = Target: SCN10A; (-) strand; PAM type: NRG; PAM sequence: GAG
  source 1..20: mol_type = other DNA
ttacaagaagtgtgccttgg

SEQ ID NO: 17883 - DNA, 20 bp, synthetic construct
  misc_feature 1..20: note = Description of Artificial Sequence: Synthetic oligonucleotide
  misc_feature 1..20: note = Target: SCN10A; (-) strand; PAM type: NRG; PAM sequence: GGG
  source 1..20: mol_type = other DNA
cattacaagaagtgtgcctt

SEQ ID NO: 17884 - DNA, 20 bp, synthetic construct
  misc_feature 1..20: note = Description of Artificial Sequence: Synthetic oligonucleotide
  misc_feature 1..20: note = Target: SCN10A; (-) strand; PAM type: NRG; PAM sequence: TGG
  source 1..20: mol_type = other DNA
tcattacaagaagtgtgcct

SEQ ID NO: 17885 - DNA, 20 bp, synthetic construct
  misc_feature 1..20: note = Description of Artificial Sequence: Synthetic oligonucleotide
  misc_feature 1..20: note = Target: SCN10A; (-) strand; PAM type: NRG; PAM sequence: AAG
  source 1..20: mol_type = other DNA
catgtgggattcattacaag

SEQ ID NO: 17886 - DNA, 20 bp, synthetic construct
  misc_feature 1..20: note = Description of Artificial Sequence: Synthetic oligonucleotide
  misc_feature 1..20: note = Target: SCN10A; (-) strand; PAM type: NRG; PAM sequence: AAG
  source 1..20: mol_type = other DNA
attcatgtgggattcattac

SEQ ID NO: 17887 - DNA, 20 bp, synthetic construct
  misc_feature 1..20: note = Description of Artificial Sequence: Synthetic oligonucleotide
  misc_feature 1..20: note = Target: SCN10A; (-) strand; PAM type: NRG; PAM sequence: GGG
  source 1..20: mol_type = other DNA
caaacttttcaaattcatgt

SEQ ID NO: 17888 - DNA, 20 bp, synthetic construct
  misc_feature 1..20: note = Description of Artificial Sequence: Synthetic oligonucleotide
  misc_feature 1..20: note = Target: SCN10A; (-) strand; PAM type: NRG; PAM sequence: TGG
  source 1..20: mol_type = other DNA
tcaaacttttcaaattcatg

SEQ ID NO: 17889 - DNA, 20 bp, synthetic construct
  misc_feature 1..20: note = Description of Artificial Sequence: Synthetic oligonucleotide
  misc_feature 1..20: note = Target: SCN10A; (-) strand; PAM type: NRG; PAM sequence: AAG
  source 1..20: mol_type = other DNA
attgtacttctctggttgaa

SEQ ID NO: 17890 - DNA, 20 bp, synthetic construct
  misc_feature 1..20: note = Description of Artificial Sequence: Synthetic oligonucleotide
  misc_feature 1..20: note = Target: SCN10A; (-) strand; PAM type: NRG; PAM sequence: TGG
  source 1..20: mol_type = other DNA
atgcccagattgtacttctc

SEQ ID NO: 17891 - DNA, 20 bp, synthetic construct
  misc_feature 1..20: note = Description of Artificial Sequence: Synthetic oligonucleotide
  misc_feature 1..20: note = Target: SCN10A; (-) strand; PAM type: NRG; PAM sequence: CAG
  source 1..20: mol_type = other DNA
ttgatctgcatttttatgcc

SEQ ID NO: 17892 - DNA, 20 bp, synthetic construct
  misc_feature 1..20: note = Description of Artificial Sequence: Synthetic oligonucleotide
  misc_feature 1..20: note = Target: SCN10A; (-) strand; PAM type: NRG; PAM sequence: AAG
  source 1..20: mol_type = other DNA
ggcttctgggttatctgaaa

SEQ ID NO: 17893 - DNA, 20 bp, synthetic construct
  misc_feature 1..20: note = Description of Artificial Sequence: Synthetic oligonucleotide
  misc_feature 1..20: note = Target: SCN10A; (-) strand; PAM type: NRG; PAM sequence: GGG
  source 1..20: mol_type = other DNA
ggggaaaggagaaggcttct

SEQ ID NO: 17894 - DNA, 20 bp, synthetic construct
  misc_feature 1..20: note = Description of Artificial Sequence: Synthetic oligonucleotide
  misc_feature 1..20: note = Target: SCN10A; (-) strand; PAM type: NRG; PAM sequence: TGG
  source 1..20: mol_type = other DNA
tggggaaaggagaaggcttc

SEQ ID NO: 17895 - DNA, 20 bp, synthetic construct
  misc_feature 1..20: note = Description of Artificial Sequence: Synthetic oligonucleotide
  misc_feature 1..20: note = Target: SCN10A; (-) strand; PAM type: NRG; PAM sequence: AGG
  source 1..20: mol_type = other DNA
tgtctcctggggaaaggaga

SEQ ID NO: 17896 - DNA, 20 bp, synthetic construct
  misc_feature 1..20: note = Description of Artificial Sequence: Synthetic oligonucleotide
  misc_feature 1..20: note = Target: SCN10A; (-) strand; PAM type: NRG; PAM sequence: AAG
  source 1..20: mol_type = other DNA
ctgtctcctggggaaaggag

SEQ ID NO: 17897 - DNA, 20 bp, synthetic construct
  misc_feature 1..20: note = Description of Artificial Sequence: Synthetic oligonucleotide
  misc_feature 1..20: note = Target: SCN10A; (-) strand; PAM type: NRG; PAM sequence: GAG
  source 1..20: mol_type = other DNA
gcactgtctcctggggaaag

SEQ ID NO: 17898 - DNA, 20 bp, synthetic construct
  misc_feature 1..20: note = Description of Artificial Sequence: Synthetic oligonucleotide
  misc_feature 1..20: note = Target: SCN10A; (-) strand; PAM type: NRG; PAM sequence: AGG
  source 1..20: mol_type = other DNA
gggcactgtctcctggggaa

SEQ ID NO: 17899 - DNA, 20 bp, synthetic construct
  misc_feature 1..20: note = Description of Artificial Sequence: Synthetic oligonucleotide
  misc_feature 1..20: note = Target: SCN10A; (-) strand; PAM type: NRG; PAM sequence: AAG
  source 1..20: mol_type = other DNA
ggggcactgtctcctgggga

SEQ ID NO: 17900 - DNA, 20 bp, synthetic construct
  misc_feature 1..20: note = Description of Artificial Sequence: Synthetic oligonucleotide
  misc_feature 1..20: note = Target: SCN10A; (-) strand; PAM type: NRG; PAM sequence: GGG
  source 1..20: mol_type = other DNA
gctgggggcactgtctcctg

SEQ ID NO: 17901 - DNA, 20 bp, synthetic construct
  misc_feature 1..20: note = Description of Artificial Sequence: Synthetic oligonucleotide
  misc_feature 1..20: note = Target: SCN10A; (-) strand; PAM type: NRG; PAM sequence: GGG
  source 1..20: mol_type = other DNA
tgctgggggcactgtctcct

SEQ ID NO: 17902 - DNA, 20 bp, synthetic construct
  misc_feature 1..20: note = Description of Artificial Sequence: Synthetic oligonucleotide
  misc_feature 1..20: note = Target: SCN10A; (-) strand; PAM type: NRG; PAM sequence: TGG
  source 1..20: mol_type = other DNA
ctgctgggggcactgtctcc

SEQ ID NO: 17903 - DNA, 20 bp, synthetic construct
  misc_feature 1..20: note = Description of Artificial Sequence: Synthetic oligonucleotide
  misc_feature 1..20: note = Target: SCN10A; (-) strand; PAM type: NRG; PAM sequence: GGG
  source 1..20: mol_type = other DNA
tgagtggtgaaccctgctgg

SEQ ID NO: 17904 - DNA, 20 bp, synthetic construct
  misc_feature 1..20: note = Description of Artificial Sequence: Synthetic oligonucleotide
  misc_feature 1..20: note = Target: SCN10A; (-) strand; PAM type: NRG; PAM sequence: GGG
  source 1..20: mol_type = other DNA
gtgagtggtgaaccctgctg

SEQ ID NO: 17905 - DNA, 20 bp, synthetic construct
  misc_feature 1..20: note = Description of Artificial Sequence: Synthetic oligonucleotide
  misc_feature 1..20: note = Target: SCN10A; (-) strand; PAM type: NRG; PAM sequence: GGG
  source 1..20: mol_type = other DNA
ggtgagtggtgaaccctgct

SEQ ID NO: 17906 - DNA, 20 bp, synthetic construct
  misc_feature 1..20: note = Description of Artificial Sequence: Synthetic oligonucleotide
  misc_feature 1..20: note = Target: SCN10A; (-) strand; PAM type: NRG; PAM sequence: TGG
  source 1..20: mol_type = other DNA
tggtgagtggtgaaccctgc

SEQ ID NO: 17907 - DNA, 20 bp, synthetic construct
  misc_feature 1..20: note = Description of Artificial Sequence: Synthetic oligonucleotide
  misc_feature 1..20: note = Target: SCN10A; (-) strand; PAM type: NRG; PAM sequence: TGG
  source 1..20: mol_type = other DNA
ctagggaacctggtggtgag

SEQ ID NO: 17908 - DNA, 20 bp, synthetic construct
  misc_feature 1..20: note = Description of Artificial Sequence: Synthetic oligonucleotide
  misc_feature 1..20: note = Target: SCN10A; (-) strand; PAM type: NRG; PAM sequence: GAG
  source 1..20: mol_type = other DNA
gtgctagggaacctggtggt

SEQ ID NO: 17909 - DNA, 20 bp, synthetic construct
  misc_feature 1..20: note = Description of Artificial Sequence: Synthetic oligonucleotide
  misc_feature 1..20: note = Target: SCN10A; (-) strand; PAM type: NRG; PAM sequence: TGG
  source 1..20: mol_type = other DNA
gatggtgctagggaacctgg

SEQ ID NO: 17910 - DNA, 20 bp, synthetic construct
  misc_feature 1..20: note = Description of Artificial Sequence: Synthetic oligonucleotide
  misc_feature 1..20: note = Target: SCN10A; (-) strand; PAM type: NRG; PAM sequence: TGG
  source 1..20: mol_type = other DNA
ggtgatggtgctagggaacc

SEQ ID NO: 17911 - DNA, 20 bp, synthetic construct
  misc_feature 1..20: note = Description of Artificial Sequence: Synthetic oligonucleotide
  misc_feature 1..20: note = Target: SCN10A; (-) strand; PAM type: NRG; PAM sequence: GGG
  source 1..20: mol_type = other DNA
tcttgacggtgatggtgcta

SEQ ID NO: 17912 - DNA, 20 bp, synthetic construct
  misc_feature 1..20: note = Description of Artificial Sequence: Synthetic oligonucleotide
  misc_feature 1..20: note = Target: SCN10A; (-) strand; PAM type: NRG; PAM sequence: AGG
  source 1..20: mol_type = other DNA
ttcttgacggtgatggtgct

SEQ ID NO: 17913 - DNA, 20 bp, synthetic construct
  misc_feature 1..20: note = Description of Artificial Sequence: Synthetic oligonucleotide
  misc_feature 1..20: note = Target: SCN10A; (-) strand; PAM type: NRG; PAM sequence: TAG
  source 1..20: mol_type = other DNA
tttcttgacggtgatggtgc

SEQ ID NO: 17914 - DNA, 20 bp, synthetic construct
  misc_feature 1..20: note = Description of Artificial Sequence: Synthetic oligonucleotide
  misc_feature 1..20: note = Target: SCN10A; (-) strand; PAM type: NRG; PAM sequence: TGG
  source 1..20: mol_type = other DNA
catccttttcttgacggtga

SEQ ID NO: 17915 - DNA, 20 bp, synthetic construct
  misc_feature 1..20: note = Description of Artificial Sequence: Synthetic oligonucleotide
  misc_feature 1..20: note = Target: SCN10A; (-) strand; PAM type: NRG; PAM sequence: CGG
  source 1..20: mol_type = other DNA
atgcctcatccttttcttga

SEQ ID NO: 17916 - DNA, 20 bp, synthetic construct
  misc_feature 1..20: note = Description of Artificial Sequence: Synthetic oligonucleotide
  misc_feature 1..20: note = Target: SCN10A; (-) strand; PAM type: NRG; PAM sequence: TGG
  source 1..20: mol_type = other DNA
atgtgggcctgcatggaagt

SEQ ID NO: 17917 - DNA, 20 bp, synthetic construct
  misc_feature 1..20: note = Description of Artificial Sequence: Synthetic oligonucleotide
  misc_feature 1..20: note = Target: SCN10A; (-) strand; PAM type: NRG; PAM sequence: AAG
  source 1..20: mol_type = other DNA
gaacatgtgggcctgcatgg

SEQ ID NO: 17918 - DNA, 20 bp, synthetic construct
  misc_feature 1..20: note = Description of Artificial Sequence: Synthetic oligonucleotide
  misc_feature 1..20: note = Target: SCN10A; (-) strand; PAM type: NRG; PAM sequence: TGG
  source 1..20: mol_type = other DNA
tgagaacatgtgggcctgca

SEQ ID NO: 17919 - DNA, 20 bp, synthetic construct
  misc_feature 1..20: note = Description of Artificial Sequence: Synthetic oligonucleotide
  misc_feature 1..20: note = Target: SCN10A; (-) strand; PAM type: NRG; PAM sequence: GGG
  source 1..20: mol_type = other DNA
agagtggattgagaacatgt

SEQ ID NO: 17920 - DNA, 20 bp, synthetic construct
  misc_feature 1..20: note = Description of Artificial Sequence: Synthetic oligonucleotide
  misc_feature 1..20: note = Target: SCN10A; (-) strand; PAM type: NRG; PAM sequence: TGG
  source 1..20: mol_type = other DNA
gagagtggattgagaacatg

SEQ ID NO: 17921 - DNA, 20 bp, synthetic construct
  misc_feature 1..20: note = Description of Artificial Sequence: Synthetic oligonucleotide
  misc_feature 1..20: note = Target: SCN10A; (-) strand; PAM type: NRG; PAM sequence: GAG
  source 1..20: mol_type = other DNA
tcctctgtggagagtggatt

SEQ ID NO: 17922 - DNA, 20 bp, synthetic construct
  misc_feature 1..20: note = Description of Artificial Sequence: Synthetic oligonucleotide
  misc_feature 1..20: note = Target: SCN10A; (-) strand; PAM type: NRG; PAM sequence: TGG
  source 1..20: mol_type = other DNA
tccgtatcctctgtggagag

SEQ ID NO: 17923 - DNA, 20 bp, synthetic construct
  misc_feature 1..20: note = Description of Artificial Sequence: Synthetic oligonucleotide
  misc_feature 1..20: note = Target: SCN10A; (-) strand; PAM type: NRG; PAM sequence: GAG
  source 1..20: mol_type = other DNA
tcttccgtatcctctgtgga

SEQ ID NO: 17924 - DNA, 20 bp, synthetic construct
  misc_feature 1..20: note = Description of Artificial Sequence: Synthetic oligonucleotide
  misc_feature 1..20: note = Target: SCN10A; (-) strand; PAM type: NRG; PAM sequence: GAG
  source 1..20: mol_type = other DNA
tgtcttccgtatcctctgtg

SEQ ID NO: 17925 - DNA, 20 bp, synthetic construct
  misc_feature 1..20: note = Description of Artificial Sequence: Synthetic oligonucleotide
  misc_feature 1..20: note = Target: SCN10A; (-) strand; PAM type: NRG; PAM sequence: TGG
  source 1..20: mol_type = other DNA
attgtcttccgtatcctctg

SEQ ID NO: 17926 - DNA, 20 bp, synthetic construct
  misc_feature 1..20: note = Description of Artificial Sequence: Synthetic oligonucleotide
  misc_feature 1..20: note = Target: SCN10A; (-) strand; PAM type: NRG; PAM sequence: TGG
  source 1..20: mol_type = other DNA
cccatgaagactggccccgc

SEQ ID NO: 17927 - DNA, 20 bp, synthetic construct
  misc_feature 1..20: note = Description of Artificial Sequence: Synthetic oligonucleotide
  misc_feature 1..20: note = Target: SCN10A; (-) strand; PAM type: NRG; PAM sequence: TGG
  source 1..20: mol_type = other DNA
tctccgcgccccatgaagac

SEQ ID NO: 17928 - DNA, 20 bp, synthetic construct
  misc_feature 1..20: note = Description of Artificial Sequence: Synthetic oligonucleotide
  misc_feature 1..20: note = Target: SCN10A; (-) strand; PAM type: NRG; PAM sequence: AAG
  source 1..20: mol_type = other DNA
aaatatctccgcgccccatg

SEQ ID NO: 17929 - DNA, 20 bp, synthetic construct
  misc_feature 1..20: note = Description of Artificial Sequence: Synthetic oligonucleotide
  misc_feature 1..20: note = Target: SCN10A; (-) strand; PAM type: NRG; PAM sequence: GGG
  source 1..20: mol_type = other DNA
ggttggcaagcagctcctag

SEQ ID NO: 17930 - DNA, 20 bp, synthetic construct
  misc_feature 1..20: note = Description of Artificial Sequence: Synthetic oligonucleotide
  misc_feature 1..20: note = Target: SCN10A; (-) strand; PAM type: NRG; PAM sequence: GGG
  source 1..20: mol_type = other DNA
tggttggcaagcagctccta

SEQ ID NO: 17931 - DNA, 20 bp, synthetic construct
  misc_feature 1..20: note = Description of Artificial Sequence: Synthetic oligonucleotide
  misc_feature 1..20: note = Target: SCN10A; (-) strand; PAM type: NRG; PAM sequence: AGG
  source 1..20: mol_type = other DNA
ctggttggcaagcagctcct

SEQ ID NO: 17932 - DNA, 20 bp, synthetic construct
  misc_feature 1..20: note = Description of Artificial Sequence: Synthetic oligonucleotide
  misc_feature 1..20: note = Target: SCN10A; (-) strand; PAM type: NRG; PAM sequence: TAG
  source 1..20: mol_type = other DNA
tctggttggcaagcagctcc

SEQ ID NO: 17933 - DNA, 20 bp, synthetic construct
  misc_feature 1..20: note = Description of Artificial Sequence: Synthetic oligonucleotide
  misc_feature 1..20: note = Target: SCN10A; (-) strand; PAM type: NRG; PAM sequence: CAG
  source 1..20: mol_type = other DNA
tctttgctctggttggcaag

SEQ ID NO: 17934 - DNA, 20 bp, synthetic construct
  misc_feature 1..20: note = Description of Artificial Sequence: Synthetic oligonucleotide
  misc_feature 1..20: note = Target: SCN10A; (-) strand; PAM type: NRG; PAM sequence: AAG
  source 1..20: mol_type = other DNA
ttgtctttgctctggttggc

SEQ ID NO: 17935 - DNA, 20 bp, synthetic construct
  misc_feature 1..20: note = Description of Artificial Sequence: Synthetic oligonucleotide
  misc_feature 1..20: note = Target: SCN10A; (-) strand; PAM type: NRG; PAM sequence: TGG
  source 1..20: mol_type = other DNA
gtctttgtctttgctctggt

SEQ ID NO: 17936 - DNA, 20 bp, synthetic construct
  misc_feature 1..20: note = Description of Artificial Sequence: Synthetic oligonucleotide
  misc_feature 1..20: note = Target: SCN10A; (-) strand; PAM type: NRG; PAM sequence: TGG
  source 1..20: mol_type = other DNA
cattgtctttgtctttgctc

SEQ ID NO: 17937 - DNA, 20 bp, synthetic construct
  misc_feature 1..20: note = Description of Artificial Sequence: Synthetic oligonucleotide
  misc_feature 1..20: note = Target: SCN10A; (-) strand; PAM type: NRG; PAM sequence: TGG
  source 1..20: mol_type = other DNA
ggggaacctcaccatcatcc

SEQ ID NO: 17938 - DNA, 20 bp, synthetic construct
  misc_feature 1..20: note = Description of Artificial Sequence: Synthetic oligonucleotide
  misc_feature 1..20: note = Target: SCN10A; (-) strand; PAM type: NRG; PAM sequence: GGG
  source 1..20: mol_type = other DNA
gaaactcagtgggggcactg

SEQ ID NO: 17939 - DNA, 20 bp, synthetic construct
  misc_feature 1..20: note = Description of Artificial Sequence: Synthetic oligonucleotide
  misc_feature 1..20: note = Target: SCN10A; (-) strand; PAM type: NRG; PAM sequence: GGG
  source 1..20: mol_type = other DNA
ggaaactcagtgggggcact

SEQ ID NO: 17940 - DNA, 20 bp, synthetic construct
  misc_feature 1..20: note = Description of Artificial Sequence: Synthetic oligonucleotide
  misc_feature 1..20: note = Target: SCN10A; (-) strand; PAM type: NRG; PAM sequence: TGG
  source 1..20: mol_type = other DNA
cggaaactcagtgggggcac

SEQ ID NO: 17941 - DNA, 20 bp, synthetic construct
  misc_feature 1..20: note = Description of Artificial Sequence: Synthetic oligonucleotide
  misc_feature 1..20: note = Target: SCN10A; (-) strand; PAM type: NRG; PAM sequence: GGG
  source 1..20: mol_type = other DNA
gatcatcggaaactcagtgg

SEQ ID NO: 17942 - DNA, 20 bp, synthetic construct
  misc_feature 1..20: note = Description of Artificial Sequence: Synthetic oligonucleotide
  misc_feature 1..20: note = Target: SCN10A; (-) strand; PAM type: NRG; PAM sequence: GGG
  source 1..20: mol_type = other DNA
agatcatcggaaactcagtg

SEQ ID NO: 17943 - DNA, 20 bp, synthetic construct
  misc_feature 1..20: note = Description of Artificial Sequence: Synthetic oligonucleotide
  misc_feature 1..20: note = Target: SCN10A; (-) strand; PAM type: NRG; PAM sequence: GGG
  source 1..20: mol_type = other DNA
aagatcatcggaaactcagt

SEQ ID NO: 17944 - DNA, 20 bp, synthetic construct
  misc_feature 1..20: note = Description of Artificial Sequence: Synthetic oligonucleotide
  misc_feature 1..20: note = Target: SCN10A; (-) strand; PAM type: NRG; PAM sequence: TGG
  source 1..20: mol_type = other DNA
caagatcatcggaaactcag

SEQ ID NO: 17945 - DNA, 20 bp, synthetic construct
  misc_feature 1..20: note = Description of Artificial Sequence: Synthetic oligonucleotide
  misc_feature 1..20: note = Target: SCN10A; (-) strand; PAM type: NRG; PAM sequence: CAG
  source 1..20: mol_type = other DNA
catcaagatcatcggaaact

SEQ ID NO: 17946 - DNA, 20 bp, synthetic construct
  misc_feature 1..20: note = Description of Artificial Sequence: Synthetic oligonucleotide
  misc_feature 1..20: note = Target: SCN10A; (-) strand; PAM type: NRG; PAM sequence: CGG
  source 1..20: mol_type = other DNA
aacacactcatcaagatcat

SEQ ID NO: 17947 - DNA, 20 bp, synthetic construct
  misc_feature 1..20: note = Description of Artificial Sequence: Synthetic oligonucleotide
  misc_feature 1..20: note = Target: SCN10A; (-) strand; PAM type: NRG; PAM sequence: AAG
  source 1..20: mol_type = other DNA
ccaccttaaacacactcatc

SEQ ID NO: 17948 - DNA, 20 bp, synthetic construct
  misc_feature 1..20: note = Description of Artificial Sequence: Synthetic oligonucleotide
  misc_feature 1..20: note = Target: SCN10A; (-) strand; PAM type: NRG; PAM sequence: TGG
  source 1..20: mol_type = other DNA
tattcaagctggccaaatcc

SEQ ID NO: 17949 - DNA, 20 bp, synthetic construct
  misc_feature 1..20: note = Description of Artificial Sequence: Synthetic oligonucleotide
  misc_feature 1..20: note = Target: SCN10A; (-) strand; PAM type: NRG; PAM sequence: TGG
  source 1..20: mol_type = other DNA
gcagctgcgcgtattcaagc

SEQ ID NO: 17950 - DNA, 20 bp, synthetic construct
  misc_feature 1..20: note = Description of Artificial Sequence: Synthetic oligonucleotide
  misc_feature 1..20: note = Target: SCN10A; (-) strand; PAM type: NRG; PAM sequence: AAG
  source 1..20: mol_type = other DNA
ctctgcagctgcgcgtattc

SEQ ID NO: 17951 - DNA, 20 bp, synthetic construct
  misc_feature 1..20: note = Description of Artificial Sequence: Synthetic oligonucleotide
  misc_feature 1..20: note = Target: SCN10A; (-) strand; PAM type: NRG; PAM sequence: CAG
  source 1..20: mol_type = other DNA
tgacggtctctgtttctctg

SEQ ID NO: 17952 - DNA, 20 bp, synthetic construct
  misc_feature 1..20: note = Description of Artificial Sequence: Synthetic oligonucleotide
  misc_feature 1..20: note = Target: SCN10A; (-) strand; PAM type: NRG; PAM sequence: CGG
  source 1..20: mol_type = other DNA
gcacagctaccaaaacctga

SEQ ID NO: 17953 - DNA, 20 bp, synthetic construct
  misc_feature 1..20: note = Description of Artificial Sequence: Synthetic oligonucleotide
  misc_feature 1..20: note = Target: SCN10A; (-) strand; PAM type: NRG; PAM sequence: CAG
  source 1..20: mol_type = other DNA
tagatgaaaggtaatgagca

SEQ ID NO: 17954 - DNA, 20 bp, synthetic construct
  misc_feature 1..20: note = Description of Artificial Sequence: Synthetic oligonucleotide
  misc_feature 1..20: note = Target: SCN10A; (-) strand; PAM type: NRG; PAM sequence: GAG
  source 1..20: mol_type = other DNA
aactttagatgaaaggtaat

SEQ ID NO: 17955 - DNA, 20 bp, synthetic construct
  misc_feature 1..20: note = Description of Artificial Sequence: Synthetic oligonucleotide
  misc_feature 1..20: note = Target: SCN10A; (-) strand; PAM type: NRG; PAM sequence: AGG
  source 1..20: mol_type = other DNA
caggcaaaactttagatgaa

SEQ ID NO: 17956 - DNA, 20 bp, synthetic construct
  misc_feature 1..20: note = Description of Artificial Sequence: Synthetic oligonucleotide
  misc_feature 1..20: note = Target: SCN10A; (-) strand; PAM type: NRG; PAM sequence: AAG
  source 1..20: mol_type = other DNA
ccaggcaaaactttagatga

SEQ ID NO: 17957 - DNA, 20 bp, synthetic construct
  misc_feature 1..20: note = Description of Artificial Sequence: Synthetic oligonucleotide
  misc_feature 1..20: note = Target: SCN10A; (-) strand; PAM type: NRG; PAM sequence: TAG
  source 1..20: mol_type = other DNA
ttggtttccaggcaaaactt

SEQ ID NO: 17958 - DNA, 20 bp, synthetic construct
  misc_feature 1..20: note = Description of Artificial Sequence: Synthetic oligonucleotide
  misc_feature 1..20: note = Target: SCN10A; (-) strand; PAM type: NRG; PAM sequence: AGG
  source 1..20: mol_type = other DNA
ttcccagatctttggtttcc

SEQ ID NO: 17959 - DNA, 20 bp, synthetic construct
  misc_feature 1..20: note = Description of Artificial Sequence: Synthetic oligonucleotide
  misc_feature 1..20: note = Target: SCN10A; (-) strand; PAM type: NRG; PAM sequence: CAG
  source 1..20: mol_type = other DNA
tttcccagatctttggtttc

SEQ ID NO: 17960 - DNA, 20 bp, synthetic construct
  misc_feature 1..20: note = Description of Artificial Sequence: Synthetic oligonucleotide
  misc_feature 1..20: note = Target: SCN10A; (-) strand; PAM type: NRG; PAM sequence: TGG
  source 1..20: mol_type = other DNA
ttgtgtttttcccagatctt

SEQ ID NO: 17961 - DNA, 20 bp, synthetic construct
  misc_feature 1..20: note = Description of Artificial Sequence: Synthetic oligonucleotide
  misc_feature 1..20: note = Target: SCN10A; (-) strand; PAM type: NRG; PAM sequence: CAG
  source 1..20: mol_type = other DNA
gagaggccttgtgtttttcc

SEQ ID NO: 17962 - DNA, 20 bp, synthetic construct
  misc_feature 1..20: note = Description of Artificial Sequence: Synthetic oligonucleotide
  misc_feature 1..20: note = Target: SCN10A; (-) strand; PAM type: NRG; PAM sequence: AGG
  source 1..20: mol_type = other DNA
ccctggtttaatgggatgag

SEQ ID NO: 17963 - DNA, 20 bp, synthetic construct
  misc_feature 1..20: note = Description of Artificial Sequence: Synthetic oligonucleotide
  misc_feature 1..20: note = Target: SCN10A; (-) strand; PAM type: NRG; PAM sequence: GAG
  source 1..20: mol_type = other DNA
gccctggtttaatgggatga

SEQ ID NO: 17964 - DNA, 20 bp, synthetic construct
  misc_feature 1..20: note = Description of Artificial Sequence: Synthetic oligonucleotide
  misc_feature 1..20: note = Target: SCN10A; (-) strand; PAM type: NRG; PAM sequence: GAG
  source 1..20: mol_type = other DNA
acgccctggtttaatgggat

SEQ ID NO: 17965 - DNA, 20 bp, synthetic construct
  misc_feature 1..20: note = Description of Artificial Sequence: Synthetic oligonucleotide
  misc_feature 1..20: note = Target: SCN10A; (-) strand; PAM type: NRG; PAM sequence: GGG
  source 1..20: mol_type = other DNA
agaaaacgccctggtttaat

SEQ ID NO: 17966 - DNA, 20 bp, synthetic construct
  misc_feature 1..20: note = Description of Artificial Sequence: Synthetic oligonucleotide
  misc_feature 1..20: note = Target: SCN10A; (-) strand; PAM type: NRG; PAM sequence: TGG
  source 1..20: mol_type = other DNA
cagaaaacgccctggtttaa

SEQ ID NO: 17967 - DNA, 20 bp, synthetic construct
  misc_feature 1..20: note = Description of Artificial Sequence: Synthetic oligonucleotide
  misc_feature 1..20: note = Target: SCN10A; (-) strand; PAM type: NRG; PAM sequence: TGG
  source 1..20: mol_type = other DNA
gcagtgtccagaaaacgccc

SEQ ID NO: 17968 - DNA, 20 bp, synthetic construct
  misc_feature 1..20: note = Description of Artificial Sequence: Synthetic oligonucleotide
  misc_feature 1..20: note = Target: SCN10A; (-) strand; PAM type: NRG; PAM sequence: CAG
  source 1..20: mol_type = other DNA
aggtctccaaaagcagtgtc

SEQ ID NO: 17969 - DNA, 20 bp, synthetic construct
  misc_feature 1..20: note = Description of Artificial Sequence: Synthetic oligonucleotide
  misc_feature 1..20: note = Target: SCN10A; (-) strand; PAM type: NRG; PAM sequence: CAG
  source 1..20: mol_type = other DNA
ggaagaaaggtctccaaaag

SEQ ID NO: 17970 - DNA, 20 bp, synthetic construct
  misc_feature 1..20: note = Description of Artificial Sequence: Synthetic oligonucleotide
  misc_feature 1..20: note = Target: SCN10A; (-) strand; PAM type: NRG; PAM sequence: AAG
  source 1..20: mol_type = other DNA
ataggaagaaaggtctccaa

SEQ ID NO: 17971 - DNA, 20 bp, synthetic construct
  misc_feature 1..20: note = Description of Artificial Sequence: Synthetic oligonucleotide
  misc_feature 1..20: note = Target: SCN10A; (-) strand; PAM type: NRG; PAM sequence: AGG
  source 1..20: mol_type = other DNA
aatttatagcataggaagaa

SEQ ID NO: 17972 - DNA, 20 bp, synthetic construct
  misc_feature 1..20: note = Description of Artificial Sequence: Synthetic oligonucleotide
  misc_feature 1..20: note = Target: SCN10A; (-) strand; PAM type: NRG; PAM sequence: AAG
  source 1..20: mol_type = other DNA
taatttatagcataggaaga

SEQ ID NO: 17973 - DNA, 20 bp, synthetic construct
  misc_feature 1..20: note = Description of Artificial Sequence: Synthetic oligonucleotide
  misc_feature 1..20: note = Target: SCN10A; (-) strand; PAM type: NRG; PAM sequence: AAG
  source 1..20: mol_type = other DNA
tgagtaatttatagcatagg

SEQ ID NO: 17974 - DNA, 20 bp, synthetic construct
  misc_feature 1..20: note = Description of Artificial Sequence: Synthetic oligonucleotide
  misc_feature 1..20: note = Target: SCN10A; (-) strand; PAM type: NRG; PAM sequence: AGG
  source 1..20: mol_type = other DNA
ttttgagtaatttatagcat

SEQ ID NO: 17975 - DNA, 20 bp, synthetic construct
  misc_feature 1..20: note = Description of Artificial Sequence: Synthetic oligonucleotide
  misc_feature 1..20: note = Target: SCN10A; (-) strand; PAM type: NRG; PAM sequence: TAG
  source 1..20: mol_type = other DNA
tttttgagtaatttatagca

SEQ ID NO: 17976 - DNA, 20 bp, synthetic construct
  misc_feature 1..20: note = Description of Artificial Sequence: Synthetic oligonucleotide
  misc_feature 1..20: note = Target: SCN10A; (-) strand; PAM type: NRG; PAM sequence: TAG
  source 1..20: mol_type = other DNA
tcatatttttgagtaattta

SEQ ID NO: 17977 - DNA, 20 bp, synthetic construct
  misc_feature 1..20: note = Description of Artificial Sequence: Synthetic oligonucleotide
  misc_feature 1..20: note = Target: SCN10A; (-) strand; PAM type: NRG; PAM sequence: GAG
  source 1..20: mol_type = other DNA
agaaggcagatcatattttt

SEQ ID NO: 17978 - DNA, 20 bp, synthetic construct
  misc_feature 1..20: note = Description of Artificial Sequence: Synthetic oligonucleotide
  misc_feature 1..20: note = Target: SCN10A; (-) strand; PAM type: NRG; PAM sequence: CAG
  source 1..20: mol_type = other DNA
tacttatgaaccatagaagg

SEQ ID NO: 17979 - DNA, 20 bp, synthetic construct
  misc_feature 1..20: note = Description of Artificial Sequence: Synthetic oligonucleotide
  misc_feature 1..20: note = Target: SCN10A; (-) strand; PAM type: NRG; PAM sequence: AGG
  source 1..20: mol_type = other DNA
tgatacttatgaaccataga

SEQ ID NO: 17980 - DNA, 20 bp, synthetic construct
  misc_feature 1..20: note = Description of Artificial Sequence: Synthetic oligonucleotide
  misc_feature 1..20: note = Target: SCN10A; (-) strand; PAM type: NRG; PAM sequence: AAG
  source 1..20: mol_type = other DNA
ttgatacttatgaaccatag

SEQ ID NO: 17981 - DNA, 20 bp, synthetic construct
  misc_feature 1..20: note = Description of Artificial Sequence: Synthetic oligonucleotide
  misc_feature 1..20: note = Target: SCN10A; (-) strand; PAM type: NRG; PAM sequence: TAG
  source 1..20: mol_type = other DNA
acattgatacttatgaacca

SEQ ID NO: 17982 - DNA, 20 bp, synthetic construct
  misc_feature 1..20: note = Description of Artificial Sequence: Synthetic oligonucleotide
  misc_feature 1..20: note = Target: SCN10A; (-) strand; PAM type: NRG; PAM sequence: AAG
  source 1..20: mol_type = other DNA
tgactcagccacagtcaatg

SEQ ID NO: 17983 - DNA, 20 bp, synthetic construct
  misc_feature 1..20: note = Description of Artificial Sequence: Synthetic oligonucleotide
  misc_feature 1..20: note = Target: SCN10A; (-) strand; PAM type: NRG; PAM sequence: CAG
  source 1..20: mol_type = other DNA
agaagaccctgactcagcca

SEQ ID NO: 17984 - DNA, 20 bp, synthetic construct
  misc_feature 1..20: note = Description of Artificial Sequence: Synthetic oligonucleotide
  misc_feature 1..20: note = Target: SCN10A; (-) strand; PAM type: NRG; PAM sequence: CAG
  source 1..20: mol_type = other DNA
cccagtagaagaccctgact

SEQ ID NO: 17985 - DNA, 20 bp, synthetic construct
  misc_feature 1..20: note = Description of Artificial Sequence: Synthetic oligonucleotide
  misc_feature 1..20: note = Target: SCN10A; (-) strand; PAM type: NRG; PAM sequence: AAG
  source 1..20: mol_type = other DNA
caaggccaccaccccagtag

SEQ ID NO: 17986 - DNA, 20 bp, synthetic construct
  misc_feature 1..20: note = Description of Artificial Sequence: Synthetic oligonucleotide
  misc_feature 1..20: note = Target: SCN10A; (-) strand; PAM type: NRG; PAM sequence: TAG
  source 1..20: mol_type = other DNA
tcgcaaggccaccaccccag

SEQ ID NO: 17987 - DNA, 20 bp, synthetic construct
  misc_feature 1..20: note = Description of Artificial Sequence: Synthetic oligonucleotide
  misc_feature 1..20: note = Target: SCN10A; (-) strand; PAM type: NRG; PAM sequence: CAG
  source 1..20: mol_type = other DNA
agatcgcaaggccaccaccc

SEQ ID NO: 17988 - DNA, 20 bp, synthetic construct
  misc_feature 1..20: note = Description of Artificial Sequence: Synthetic oligonucleotide
  misc_feature 1..20: note = Target: SCN10A; (-) strand; PAM type: NRG; PAM sequence: AGG
  source 1..20: mol_type = other DNA
agaacagagtacagatcgca

SEQ ID NO: 17989 - DNA, 20 bp, synthetic construct
  misc_feature 1..20: note = Description of Artificial Sequence: Synthetic oligonucleotide
  misc_feature 1..20: note = Target: SCN10A; (-) strand; PAM type: NRG; PAM sequence: AAG
  source 1..20: mol_type = other DNA
tagaacagagtacagatcgc

SEQ ID NO: 17990 - DNA, 20 bp, synthetic construct
  misc_feature 1..20: note = Description of Artificial Sequence: Synthetic oligonucleotide
  misc_feature 1..20: note = Target: SCN10A; (-) strand; PAM type: NRG; PAM sequence: CAG
  source 1..20: mol_type = other DNA
tgtggctatagaacagagta

SEQ ID NO: 17991 - DNA, 20 bp, synthetic construct
  misc_feature 1..20: note = Description of Artificial Sequence: Synthetic oligonucleotide
  misc_feature 1..20: note = Target: SCN10A; (-) strand; PAM type: NRG; PAM sequence: GAG
  source 1..20: mol_type = other DNA
aggcctgtggctatagaaca

SEQ ID NO: 17992 - DNA, 20 bp, synthetic construct
  misc_feature 1..20: note = Description of Artificial Sequence: Synthetic oligonucleotide
  misc_feature 1..20: note = Target: SCN10A; (-) strand; PAM type: NRG; PAM sequence: CAG
  source 1..20: mol_type = other DNA
tcaggcctgtggctatagaa

SEQ ID NO: 17993 - DNA, 20 bp, synthetic construct
  misc_feature 1..20: note = Description of Artificial Sequence: Synthetic oligonucleotide
  misc_feature 1..20: note = Target: SCN10A; (-) strand; PAM type: NRG; PAM sequence: TAG
  source 1..20: mol_type = other DNA
agggatcaggcctgtggcta

SEQ ID NO: 17994 - DNA, 20 bp, synthetic construct
  misc_feature 1..20: note = Description of Artificial Sequence: Synthetic oligonucleotide
  misc_feature 1..20: note = Target: SCN10A; (-) strand; PAM type: NRG; PAM sequence: TGG
  source 1..20: mol_type = other DNA
ttcaggagggatcaggcctg

SEQ ID NO: 17995 - DNA, 20 bp, synthetic construct
  misc_feature 1..20: note = Description of Artificial Sequence: Synthetic oligonucleotide
  misc_feature 1..20: note = Target: SCN10A; (-) strand; PAM type: NRG; PAM sequence: AGG
  source 1..20: mol_type = other DNA
gcccatattcaggagggatc

SEQ ID NO: 17996 - DNA, 20 bp, synthetic construct
  misc_feature 1..20: note = Description of Artificial Sequence: Synthetic oligonucleotide
  misc_feature 1..20: note = Target: SCN10A; (-) strand; PAM type: NRG; PAM sequence: CAG
  source 1..20: mol_type = other DNA
ggcccatattcaggagggat

SEQ ID NO: 17997 - DNA, 20 bp, synthetic construct
  misc_feature 1..20: note = Description of Artificial Sequence: Synthetic oligonucleotide
  misc_feature 1..20: note = Target: SCN10A; (-) strand; PAM type: NRG; PAM sequence: GGG
  source 1..20: mol_type = other DNA
gaagaggcccatattcagga

SEQ ID NO: 17998 - DNA, 20 bp, synthetic construct
  misc_feature 1..20: note = Description of Artificial Sequence: Synthetic oligonucleotide
  misc_feature 1..20: note = Target: SCN10A; (-) strand; PAM type: NRG; PAM sequence: AGG
  source 1..20: mol_type = other DNA
agaagaggcccatattcagg

SEQ ID NO: 17999 - DNA, 20 bp, synthetic construct
  misc_feature 1..20: note = Description of Artificial Sequence: Synthetic oligonucleotide
  misc_feature 1..20: note = Target: SCN10A; (-) strand; PAM type: NRG; PAM sequence: GAG
  source 1..20: mol_type = other DNA
cagaagaggcccatattcag

SEQ ID NO: 18000 - DNA, 20 bp, synthetic construct
  misc_feature 1..20: note = Description of Artificial Sequence: Synthetic oligonucleotide
  misc_feature 1..20: note = Target: SCN10A; (-) strand; PAM type: NRG; PAM sequence: AGG
  source 1..20: mol_type = other DNA
cacagaagaggcccatattc

SEQ ID NO: 18001 - DNA, 20 bp, synthetic construct
  misc_feature 1..20: note = Description of Artificial Sequence: Synthetic oligonucleotide
  misc_feature 1..20: note = Target: SCN10A; (-) strand; PAM type: NRG; PAM sequence: CAG
  source 1..20: mol_type = other DNA
ccacagaagaggcccatatt

SEQ ID NO: 18002 - DNA, 20 bp, synthetic construct
  misc_feature 1..20: note = Description of Artificial Sequence: Synthetic oligonucleotide
  misc_feature 1..20: note = Target: SCN10A; (-) strand; PAM type: NRG; PAM sequence: AGG
  source 1..20: mol_type = other DNA
ccaccccacctccacagaag

SEQ ID NO: 18003 - DNA, 20 bp, synthetic construct
  misc_feature 1..20: note = Description of Artificial Sequence: Synthetic oligonucleotide
  misc_feature 1..20: note = Target: SCN10A; (-) strand; PAM type: NRG; PAM sequence: GAG
  source 1..20: mol_type = other DNA
cccaccccacctccacagaa

SEQ ID NO: 18004 - DNA, 20 bp, synthetic construct
  misc_feature 1..20: note = Description of Artificial Sequence: Synthetic oligonucleotide
  misc_feature 1..20: note = Target: SCN10A; (-) strand; PAM type: NRG; PAM sequence: AAG
  source 1..20: mol_type = other DNA
cacccaccccacctccacag

SEQ ID NO: 18005 - DNA, 20 bp, synthetic construct
  misc_feature 1..20: note = Description of Artificial Sequence: Synthetic oligonucleotide
  misc_feature 1..20: note = Target: SCN10A; (-) strand; PAM type: NRG; PAM sequence: CAG
  source 1..20: mol_type = other DNA
tcacacccaccccacctcca

SEQ ID NO: 18006 - DNA, 20 bp, synthetic construct
  misc_feature 1..20: note = Description of Artificial Sequence: Synthetic oligonucleotide
  misc_feature 1..20: note = Target: SCN10A; (-) strand; PAM type: NRG; PAM sequence: GAG
  source 1..20: mol_type = other DNA
gcttgttctcacttatttgt

SEQ ID NO: 18007 - DNA, 20 bp, synthetic construct
  misc_feature 1..20: note = Description of Artificial Sequence: Synthetic oligonucleotide
  misc_feature 1..20: note = Target: SCN10A; (-) strand; PAM type: NRG; PAM sequence: AAG
  source 1..20: mol_type = other DNA
gtctctcttcagtcataaat

SEQ ID NO: 18008 - DNA, 20 bp, synthetic construct
  misc_feature 1..20: note = Description of Artificial Sequence: Synthetic oligonucleotide
  misc_feature 1..20: note = Target: SCN10A; (-) strand; PAM type: NRG; PAM sequence: CAG
  source 1..20: mol_type = other DNA
gaaggaggctggtctctctt

SEQ ID NO: 18009 - DNA, 20 bp, synthetic construct
  misc_feature 1..20: note = Description of Artificial Sequence: Synthetic oligonucleotide
  misc_feature 1..20: note = Target: SCN10A; (-) strand; PAM type: NRG; PAM sequence: TGG
  source 1..20: mol_type = other DNA
atcccctacccgaaggaggc

SEQ ID NO: 18010 - DNA, 20 bp, synthetic construct
  misc_feature 1..20: note = Description of Artificial Sequence: Synthetic oligonucleotide
  misc_feature 1..20: note = Target: SCN10A; (-) strand; PAM type: NRG; PAM sequence: AGG
  source 1..20: mol_type = other DNA
ggtcatcccctacccgaagg

SEQ ID NO: 18011 - DNA, 20 bp, synthetic construct
  misc_feature 1..20: note = Description of Artificial Sequence: Synthetic oligonucleotide
  misc_feature 1..20: note = Target: SCN10A; (-) strand; PAM type: NRG; PAM sequence: GAG
  source 1..20: mol_type = other DNA
gggtcatcccctacccgaag

SEQ ID NO: 18012 - DNA, 20 bp, synthetic construct
  misc_feature 1..20: note = Description of Artificial Sequence: Synthetic oligonucleotide
  misc_feature 1..20: note = Target: SCN10A; (-) strand; PAM type: NRG; PAM sequence: AGG
  source 1..20: mol_type = other DNA
gtgggtcatcccctacccga

SEQ ID NO: 18013 - DNA, 20 bp, synthetic construct
  misc_feature 1..20: note = Description of Artificial Sequence: Synthetic oligonucleotide
  misc_feature 1..20: note = Target: SCN10A; (-) strand; PAM type: NRG; PAM sequence: AAG
  source 1..20: mol_type = other DNA
agtgggtcatcccctacccg

SEQ ID NO: 18014 - DNA, 20 bp, synthetic construct
  misc_feature 1..20: note = Description of Artificial Sequence: Synthetic oligonucleotide
  misc_feature 1..20: note = Target: SCN10A; (-) strand; PAM type: NRG; PAM sequence: GGG
  source 1..20: mol_type = other DNA
caatacctatcgaatgcagt

SEQ ID NO: 18015 - DNA, 20 bp, synthetic construct
  misc_feature 1..20: note = Description of Artificial Sequence: Synthetic oligonucleotide
  misc_feature 1..20: note = Target: SCN10A; (-) strand; PAM type: NRG; PAM sequence: TGG
  source 1..20: mol_type = other DNA
ccaatacctatcgaatgcag

SEQ ID NO: 18016 - DNA, 20 bp, synthetic construct
  misc_feature 1..20: note = Description of Artificial Sequence: Synthetic oligonucleotide
  misc_feature 1..20: note = Target: SCN10A; (-) strand; PAM type: NRG; PAM sequence: CAG
  source 1..20: mol_type = other DNA
ttgccaatacctatcgaatg

SEQ ID NO: 18017 - DNA, 20 bp, synthetic construct
  misc_feature 1..20: note = Description of Artificial Sequence: Synthetic oligonucleotide
  misc_feature 1..20: note = Target: SCN10A; (-) strand; PAM type: NRG; PAM sequence: GAG
  source 1..20: mol_type = other DNA
caagatgagaaatgccctaa

SEQ ID NO: 18018 - DNA, 20 bp, synthetic construct
  misc_feature 1..20: note = Description of Artificial Sequence: Synthetic oligonucleotide
  misc_feature 1..20: note = Target: SCN10A; (-) strand; PAM type: NRG; PAM sequence: AAG
  source 1..20: mol_type = other DNA
cccaagatgagaaatgccct

SEQ ID NO: 18019 - DNA, 20 bp, synthetic construct
  misc_feature 1..20: note = Description of Artificial Sequence: Synthetic oligonucleotide
  misc_feature 1..20: note = Target: SCN10A; (-) strand; PAM type: NRG; PAM sequence: GAG
  source 1..20: mol_type = other DNA
gttgtccactgccccaagat

SEQ ID NO: 18020 - DNA, 20 bp, synthetic construct
  misc_feature 1..20: note = Description of Artificial Sequence: Synthetic oligonucleotide
  misc_feature 1..20: note = Target: SCN10A; (-) strand; PAM type: NRG; PAM sequence: AAG
  source 1..20: mol_type = other DNA
cagatgttgtccactgcccc

SEQ ID NO: 18021 - DNA, 20 bp, synthetic construct
  misc_feature 1..20: note = Description of Artificial Sequence: Synthetic oligonucleotide
  misc_feature 1..20: note = Target: SCN10A; (-) strand; PAM type: NRG; PAM sequence: CAG
  source 1..20: mol_type = other DNA
ttcaaagctggtgggagcaa

SEQ ID NO: 18022 - DNA, 20 bp, synthetic construct
  misc_feature 1..20: note = Description of Artificial Sequence: Synthetic oligonucleotide
  misc_feature 1..20: note = Target: SCN10A; (-) strand; PAM type: NRG; PAM sequence: GAG
  source 1..20: mol_type = other DNA
tgcagtttcaaagctggtgg

SEQ ID NO: 18023 - DNA, 20 bp, synthetic construct
  misc_feature 1..20: note = Description of Artificial Sequence: Synthetic oligonucleotide
  misc_feature 1..20: note = Target: SCN10A; (-) strand; PAM type: NRG; PAM sequence: GGG
  source 1..20: mol_type = other DNA
tttgcagtttcaaagctggt

SEQ ID NO: 18024 - DNA, 20 bp, synthetic construct
  misc_feature 1..20: note = Description of Artificial Sequence: Synthetic oligonucleotide
  misc_feature 1..20: note = Target: SCN10A; (-) strand; PAM type: NRG; PAM sequence: TGG
  source 1..20: mol_type = other DNA
atttgcagtttcaaagctgg

SEQ ID NO: 18025 - DNA, 20 bp, synthetic construct
  misc_feature 1..20: note = Description of Artificial Sequence: Synthetic oligonucleotide
  misc_feature 1..20: note = Target: SCN10A; (-) strand; PAM type: NRG; PAM sequence: TGG
  source 1..20: mol_type = other DNA
gacatttgcagtttcaaagc

SEQ ID NO: 18026 - DNA, 20 bp, synthetic construct
  misc_feature 1..20: note = Description of Artificial Sequence: Synthetic oligonucleotide
  misc_feature 1..20: note = Target: SCN10A; (-) strand; PAM type: NRG; PAM sequence: AAG
  source 1..20: mol_type = other DNA
catggacatttgcagtttca

SEQ ID NO: 18027 - DNA, 20 bp, synthetic construct
  misc_feature 1..20: note = Description of Artificial Sequence: Synthetic oligonucleotide
  misc_feature 1..20: note = Target: SCN10A; (-) strand; PAM type: NRG; PAM sequence: CAG
  source 1..20: mol_type = other DNA
catgaaatcatggacatttg

SEQ ID NO: 18028 - DNA, 20 bp, synthetic construct
  misc_feature 1..20: note = Description of Artificial Sequence: Synthetic oligonucleotide
  misc_feature 1..20: note = Target: SCN10A; (-) strand; PAM type: NRG; PAM sequence: TGG
  source 1..20: mol_type = other DNA
atgctgagtccatgaaatca

SEQ ID NO: 18029 - DNA, 20 bp, synthetic construct
  misc_feature 1..20: note = Description of Artificial Sequence: Synthetic oligonucleotide
  misc_feature 1..20: note = Target: SCN10A; (-) strand; PAM type: NRG; PAM sequence: GAG
  source 1..20: mol_type = other DNA
taaatcaacttatgaatgct

SEQ ID NO: 18030 - DNA, 20 bp, synthetic construct
  misc_feature 1..20: note = Description of Artificial Sequence: Synthetic oligonucleotide
  misc_feature 1..20: note = Target: SCN10A; (-) strand; PAM type: NRG; PAM sequence: TGG
  source 1..20: mol_type = other DNA
gttctggggggtaggttcgt

SEQ ID NO: 18031 - DNA, 20 bp, synthetic construct
  misc_feature 1..20: note = Description of Artificial Sequence: Synthetic oligonucleotide
  misc_feature 1..20: note = Target: SCN10A; (-) strand; PAM type: NRG; PAM sequence: AGG
  source 1..20: mol_type = other DNA
cggctggagttctggggggt

SEQ ID NO: 18032 - DNA, 20 bp, synthetic construct
  misc_feature 1..20: note = Description of Artificial Sequence: Synthetic oligonucleotide
  misc_feature 1..20: note = Target: SCN10A; (-) strand; PAM type: NRG; PAM sequence: TAG
  source 1..20: mol_type = other DNA
acggctggagttctgggggg

SEQ ID NO: 18033 - DNA, 20 bp, synthetic construct
  misc_feature 1..20: note = Description of Artificial Sequence: Synthetic oligonucleotide
  misc_feature 1..20: note = Target: SCN10A; (-) strand; PAM type: NRG; PAM sequence: GGG
  source 1..20: mol_type = other DNA
tgcacggctggagttctggg

SEQ ID NO: 18034 - DNA, 20 bp, synthetic construct
  misc_feature 1..20: note = Description of Artificial Sequence: Synthetic oligonucleotide
  misc_feature 1..20: note = Target: SCN10A; (-) strand; PAM type: NRG; PAM sequence: GGG
  source 1..20: mol_type = other DNA
ctgcacggctggagttctgg

SEQ ID NO: 18035 - DNA, 20 bp, synthetic construct
  misc_feature 1..20: note = Description of Artificial Sequence: Synthetic oligonucleotide
  misc_feature 1..20: note = Target: SCN10A; (-) strand; PAM type: NRG; PAM sequence: GGG
  source 1..20: mol_type = other DNA
cctgcacggctggagttctg

SEQ ID NO: 18036 - DNA, 20 bp, synthetic construct
  misc_feature 1..20: note = Description of Artificial Sequence: Synthetic oligonucleotide
  misc_feature 1..20: note = Target: SCN10A; (-) strand; PAM type: NRG; PAM sequence: GGG
  source 1..20: mol_type = other DNA
acctgcacggctggagttct

SEQ ID NO: 18037 - DNA, 20 bp, synthetic construct
  misc_feature 1..20: note = Description of Artificial Sequence: Synthetic oligonucleotide
  misc_feature 1..20: note = Target: SCN10A; (-) strand; PAM type: NRG; PAM sequence: TGG
  source 1..20: mol_type = other DNA
cacctgcacggctggagttc

SEQ ID NO: 18038 - DNA, 20 bp, synthetic construct
  misc_feature 1..20: note = Description of Artificial Sequence: Synthetic oligonucleotide
  misc_feature 1..20: note = Target: SCN10A; (-) strand; PAM type: NRG; PAM sequence: GAG
  source 1..20: mol_type = other DNA
gccatgcacctgcacggctg

SEQ ID NO: 18039 - DNA, 20 bp, synthetic construct
  misc_feature 1..20: note = Description of Artificial Sequence: Synthetic oligonucleotide
  misc_feature 1..20: note = Target: SCN10A; (-) strand; PAM type: NRG; PAM sequence: TGG
  source 1..20: mol_type = other DNA
ctgccatgcacctgcacggc

SEQ ID NO: 18040 - DNA, 20 bp, synthetic construct
  misc_feature 1..20: note = Description of Artificial Sequence: Synthetic oligonucleotide
  misc_feature 1..20: note = Target: SCN10A; (-) strand; PAM type: NRG; PAM sequence: CGG
  source 1..20: mol_type = other DNA
cacactgccatgcacctgca

SEQ ID NO: 18041 - DNA, 20 bp, synthetic construct
  misc_feature 1..20: note = Description of Artificial Sequence: Synthetic oligonucleotide
  misc_feature 1..20: note = Target: SCN10A; (-) strand; PAM type: NRG; PAM sequence: TAG
  source 1..20: mol_type = other DNA
tcttcatacacctcataggc

SEQ ID NO: 18042 - DNA, 20 bp, synthetic construct
  misc_feature 1..20: note = Description of Artificial Sequence: Synthetic oligonucleotide
  misc_feature 1..20: note = Target: SCN10A; (-) strand; PAM type: NRG; PAM sequence: AGG
  source 1..20: mol_type = other DNA
cctctcttcatacacctcat

SEQ ID NO: 18043 - DNA, 20 bp, synthetic construct
  misc_feature 1..20: note = Description of Artificial Sequence: Synthetic oligonucleotide
  misc_feature 1..20: note = Target: SCN10A; (-) strand; PAM type: NRG; PAM sequence: TAG
  source 1..20: mol_type = other DNA
acctctcttcatacacctca

SEQ ID NO: 18044 - DNA, 20 bp, synthetic construct
  misc_feature 1..20: note = Description of Artificial Sequence: Synthetic oligonucleotide
  misc_feature 1..20: note = Target: SCN10A; (-) strand; PAM type: NRG; PAM sequence: GAG
  source 1..20: mol_type = other DNA
cattggttccatgagagcaa

SEQ ID NO: 18045 - DNA, 20 bp, synthetic construct
  misc_feature 1..20: note = Description of Artificial Sequence: Synthetic oligonucleotide
  misc_feature 1..20: note = Target: SCN10A; (-) strand; PAM type: NRG; PAM sequence: AAG
  source 1..20: mol_type = other DNA
accattggttccatgagagc

SEQ ID NO: 18046 - DNA, 20 bp, synthetic construct
  misc_feature 1..20: note = Description of Artificial Sequence: Synthetic oligonucleotide
  misc_feature 1..20: note = Target: SCN10A; (-) strand; PAM type: NRG; PAM sequence: GAG
  source 1..20: mol_type = other DNA
ctaaaccattggttccatga

SEQ ID NO: 18047 - DNA, 20 bp, synthetic construct
  misc_feature 1..20: note = Description of Artificial Sequence: Synthetic oligonucleotide
  misc_feature 1..20: note = Target: SCN10A; (-) strand; PAM type: NRG; PAM sequence: GAG
  source 1..20: mol_type = other DNA
aactaaaccattggttccat

SEQ ID NO: 18048 - DNA, 20 bp, synthetic construct
  misc_feature 1..20: note = Description of Artificial Sequence: Synthetic oligonucleotide
  misc_feature 1..20: note = Target: SCN10A; (-) strand; PAM type: NRG; PAM sequence: TGG
  source 1..20: mol_type = other DNA
tttctcagtaactaaaccat

SEQ ID NO: 18049 - DNA, 20 bp, synthetic construct
  misc_feature 1..20: note = Description of Artificial Sequence: Synthetic oligonucleotide
  misc_feature 1..20: note = Target: SCN10A; (-) strand; PAM type: NRG; PAM sequence: CAG
  source 1..20: mol_type = other DNA
tttgagacttcatcttttct

SEQ ID NO: 18050 - DNA, 20 bp, synthetic construct
  misc_feature 1..20: note = Description of Artificial Sequence: Synthetic oligonucleotide
  misc_feature 1..20: note = Target: SCN10A; (-) strand; PAM type: NRG; PAM sequence: GAG
  source 1..20: mol_type = other DNA
agtttacagtgaagactttt

SEQ ID NO: 18051 - DNA, 20 bp, synthetic construct
  misc_feature 1..20: note = Description of Artificial Sequence: Synthetic oligonucleotide
  misc_feature 1..20: note = Target: SCN10A; (-) strand; PAM type: NRG; PAM sequence: AAG
  source 1..20: mol_type = other DNA
gcatatttgagtttacagtg

SEQ ID NO: 18052 - DNA, 20 bp, synthetic construct
  misc_feature 1..20: note = Description of Artificial Sequence: Synthetic oligonucleotide
  misc_feature 1..20: note = Target: SCN10A; (-) strand; PAM type: NRG; PAM sequence: CAG
  source 1..20: mol_type = other DNA
acttagcatatttgagttta

SEQ ID NO: 18053 - DNA, 20 bp, synthetic construct
  misc_feature 1..20: note = Description of Artificial Sequence: Synthetic oligonucleotide
  misc_feature 1..20: note = Target: SCN10A; (-) strand; PAM type: NRG; PAM sequence: GAG
  source 1..20: mol_type = other DNA
ttgtgggacttagcatattt

SEQ ID NO: 18054 - DNA, 20 bp, synthetic construct
  misc_feature 1..20: note = Description of Artificial Sequence: Synthetic oligonucleotide
  misc_feature 1..20: note = Target: SCN10A; (-) strand; PAM type: NRG; PAM sequence: TAG
  source 1..20: mol_type = other DNA
ttttgctgtcttgtgggact

SEQ ID NO: 18055 - DNA, 20 bp, synthetic construct
  misc_feature 1..20: note = Description of Artificial Sequence: Synthetic oligonucleotide
  misc_feature 1..20: note = Target: SCN10A; (-) strand; PAM type: NRG; PAM sequence: GGG
  source 1..20: mol_type = other DNA
tgatgattttgctgtcttgt

SEQ ID NO: 18056 - DNA, 20 bp, synthetic construct
  misc_feature 1..20: note = Description of Artificial Sequence: Synthetic oligonucleotide
  misc_feature 1..20: note = Target: SCN10A; (-) strand; PAM type: NRG; PAM sequence: TGG
  source 1..20: mol_type = other DNA
ttgatgattttgctgtcttg

SEQ ID NO: 18057 - DNA, 20 bp, synthetic construct
  misc_feature 1..20: note = Description of Artificial Sequence: Synthetic oligonucleotide
  misc_feature 1..20: note = Target: SCN10A; (-) strand; PAM type: NRG; PAM sequence: GAG
  source 1..20: mol_type = other DNA
ttttttttcctgacaaatta

SEQ ID NO: 18058 - DNA, 20 bp, synthetic construct
  misc_feature 1..20: note = Description of Artificial Sequence: Synthetic oligonucleotide
  misc_feature 1..20: note = Target: SCN10A; (-) strand; PAM type: NRG; PAM sequence: TAG
  source 1..20: mol_type = other DNA
gattttttttcctgacaaat

SEQ ID NO: 18059 - DNA, 20 bp, synthetic construct
  misc_feature 1..20: note = Description of Artificial Sequence: Synthetic oligonucleotide
  misc_feature 1..20: note = Target: SCN10A; (-) strand; PAM type: NRG; PAM sequence: CAG
  source 1..20: mol_type = other DNA
gacagactgacagttgagct

SEQ ID NO: 18060 - DNA, 20 bp, synthetic construct
  misc_feature 1..20: note = Description of Artificial Sequence: Synthetic oligonucleotide
  misc_feature 1..20: note = Target: SCN10A; (-) strand; PAM type: NRG; PAM sequence: GAG
  source 1..20: mol_type = other DNA
tgactgacagactgacagtt

SEQ ID NO: 18061 - DNA, 20 bp, synthetic construct
  misc_feature 1..20: note = Description of Artificial Sequence: Synthetic oligonucleotide
  misc_feature 1..20: note = Target: SCN10A; (-) strand; PAM type: NRG; PAM sequence: CAG
  source 1..20: mol_type = other DNA
caccttgactgacagactga

SEQ ID NO: 18062 - DNA, 20 bp, synthetic construct
  misc_feature 1..20: note = Description of Artificial Sequence: Synthetic oligonucleotide
  misc_feature 1..20: note = Target: SCN10A; (-) strand; PAM type: NRG; PAM sequence: CAG
  source 1..20: mol_type = other DNA
cataaacacaccttgactga

SEQ ID NO: 18063 - DNA, 20 bp, synthetic construct
  misc_feature 1..20: note = Description of Artificial Sequence: Synthetic oligonucleotide
  misc_feature 1..20: note = Target: SCN10A; (-) strand; PAM type: NRG; PAM sequence: AGG
  source 1..20: mol_type = other DNA
gccacagcctggctcttagt

SEQ ID NO: 18064 - DNA, 20 bp, synthetic construct
  misc_feature 1..20: note = Description of Artificial Sequence: Synthetic oligonucleotide
  misc_feature 1..20: note = Target: SCN10A; (-) strand; PAM type: NRG; PAM sequence: TAG
  source 1..20: mol_type = other DNA
agccacagcctggctcttag

SEQ ID NO: 18065 - DNA, 20 bp, synthetic construct
  misc_feature 1..20: note = Description of Artificial Sequence: Synthetic oligonucleotide
  misc_feature 1..20: note = Target: SCN10A; (-) strand; PAM type: NRG; PAM sequence: TAG
  source 1..20: mol_type = other DNA
ctaagccacagcctggctct

SEQ ID NO: 18066 - DNA, 20 bp, synthetic construct
  misc_feature 1..20: note = Description of Artificial Sequence: Synthetic oligonucleotide
  misc_feature 1..20: note = Target: SCN10A; (-) strand; PAM type: NRG; PAM sequence: TGG
  source 1..20: mol_type = other DNA
ctagcacctaagccacagcc

SEQ ID NO: 18067 - DNA, 20 bp, synthetic construct
  misc_feature 1..20: note = Description of Artificial Sequence: Synthetic oligonucleotide
  misc_feature 1..20: note = Target: SCN10A; (-) strand; PAM type: NRG; PAM sequence: CAG
  source 1..20: mol_type = other DNA
gcatcctagcacctaagcca

SEQ ID NO: 18068 - DNA, 20 bp, synthetic construct
  misc_feature 1..20: note = Description of Artificial Sequence: Synthetic oligonucleotide
  misc_feature 1..20: note = Target: SCN10A; (-) strand; PAM type: NRG; PAM sequence: AAG
  source 1..20: mol_type = other DNA
agcattgcatcctagcacct

SEQ ID NO: 18069 - DNA, 20 bp, synthetic construct
  misc_feature 1..20: note = Description of Artificial Sequence: Synthetic oligonucleotide
  misc_feature 1..20: note = Target: SCN10A; (-) strand; PAM type: NRG; PAM sequence: TAG
  source 1..20: mol_type = other DNA
ttgtgttcagcattgcatcc

SEQ ID NO: 18070 - DNA, 20 bp, synthetic construct
  misc_feature 1..20: note = Description of Artificial Sequence: Synthetic oligonucleotide
  misc_feature 1..20: note = Target: SCN10A; (-) strand; PAM type: NRG; PAM sequence: CAG
  source 1..20: mol_type = other DNA
tgtagctacactgttgtgtt

SEQ ID NO: 18071 - DNA, 20 bp, synthetic construct
  misc_feature 1..20: note = Description of Artificial Sequence: Synthetic oligonucleotide
  misc_feature 1..20: note = Target: SCN10A; (-) strand; PAM type: NRG; PAM sequence: TAG
  source 1..20: mol_type = other DNA
ggatatgggtgataaaattg

SEQ ID NO: 18072 - DNA, 20 bp, synthetic construct
  misc_feature 1..20: note = Description of Artificial Sequence: Synthetic oligonucleotide
  misc_feature 1..20: note = Target: SCN10A; (-) strand; PAM type: NRG; PAM sequence: GGG
  source 1..20: mol_type = other DNA
tgggatttactcacggatat

SEQ ID NO: 18073 - DNA, 20 bp, synthetic construct
  misc_feature 1..20: note = Description of Artificial Sequence: Synthetic oligonucleotide
  misc_feature 1..20: note = Target: SCN10A; (-) strand; PAM type: NRG; PAM sequence: TGG
  source 1..20: mol_type = other DNA
gtgggatttactcacggata

SEQ ID NO: 18074 - DNA, 20 bp, synthetic construct
  misc_feature 1..20: note = Description of Artificial Sequence: Synthetic oligonucleotide
  misc_feature 1..20: note = Target: SCN10A; (-) strand; PAM type: NRG; PAM sequence: CGG
  source 1..20: mol_type = other DNA
cctcccgtgggatttactca

SEQ ID NO: 18075 - DNA, 20 bp, synthetic construct
  misc_feature 1..20: note = Description of Artificial Sequence: Synthetic oligonucleotide
  misc_feature 1..20: note = Target: SCN10A; (-) strand; PAM type: NRG; PAM sequence: GGG
  source 1..20: mol_type = other DNA
aggattaaacctcctcccgt

SEQ ID NO: 18076 - DNA, 20 bp, synthetic construct
  misc_feature 1..20: note = Description of Artificial Sequence: Synthetic oligonucleotide
  misc_feature 1..20: note = Target: SCN10A; (-) strand; PAM type: NRG; PAM sequence: TGG
  source 1..20: mol_type = other DNA
caggattaaacctcctcccg

SEQ ID NO: 18077 - DNA, 20 bp, synthetic construct
  misc_feature 1..20: note = Description of Artificial Sequence: Synthetic oligonucleotide
  misc_feature 1..20: note = Target: SCN10A; (-) strand; PAM type: NRG; PAM sequence: AGG
  source 1..20: mol_type = other DNA
tacagcacttactgtataac

SEQ ID NO: 18078 - DNA, 20 bp, synthetic construct
  misc_feature 1..20: note = Description of Artificial Sequence: Synthetic oligonucleotide
  misc_feature 1..20: note = Target: SCN10A; (-) strand; PAM type: NRG; PAM sequence: CAG
  source 1..20: mol_type = other DNA
atacagcacttactgtataa

SEQ ID NO: 18079 - DNA, 20 bp, synthetic construct
  misc_feature 1..20: note = Description of Artificial Sequence: Synthetic oligonucleotide
  misc_feature 1..20: note = Target: SCN10A; (-) strand; PAM type: NRG; PAM sequence: CAG
  source 1..20: mol_type = other DNA
atcacataaagaggtgcata

SEQ ID NO: 18080 - DNA, 20 bp, synthetic construct
  misc_feature 1..20: note = Description of Artificial Sequence: Synthetic oligonucleotide
  misc_feature 1..20: note = Target: SCN10A; (-) strand; PAM type: NRG; PAM sequence: AGG
  source 1..20: mol_type = other DNA
ctctcccccatcacataaag

SEQ ID NO: 18081 - DNA, 20 bp, synthetic construct
  misc_feature 1..20: note = Description of Artificial Sequence: Synthetic oligonucleotide
  misc_feature 1..20: note = Target: SCN10A; (-) strand; PAM type: NRG; PAM sequence: GAG
  source 1..20: mol_type = other DNA
gctctcccccatcacataaa

SEQ ID NO: 18082 - DNA, 20 bp, synthetic construct
  misc_feature 1..20: note = Description of Artificial Sequence: Synthetic oligonucleotide
  misc_feature 1..20: note = Target: SCN10A; (-) strand; PAM type: NRG; PAM sequence: AAG
  source 1..20: mol_type = other DNA
ccgctctcccccatcacata

SEQ ID NO: 18083 - DNA, 20 bp, synthetic construct
  misc_feature 1..20: note = Description of Artificial Sequence: Synthetic oligonucleotide
  misc_feature 1..20: note = Target: SCN10A; (-) strand; PAM type: NRG; PAM sequence: TGG
  source 1..20: mol_type = other DNA
gattgggtgtaaggtgaacg

SEQ ID NO: 18084 - DNA, 20 bp, synthetic construct
  misc_feature 1..20: note = Description of Artificial Sequence: Synthetic oligonucleotide
  misc_feature 1..20: note = Target: SCN10A; (-) strand; PAM type: NRG; PAM sequence: AGG
  source 1..20: mol_type = other DNA
taacttccagattgggtgta

SEQ ID NO: 18085 - DNA, 20 bp, synthetic construct
  misc_feature 1..20: note = Description of Artificial Sequence: Synthetic oligonucleotide
  misc_feature 1..20: note = Target: SCN10A; (-) strand; PAM type: NRG; PAM sequence: AAG
  source 1..20: mol_type = other DNA
gtaacttccagattgggtgt

SEQ ID NO: 18086 - DNA, 20 bp, synthetic construct
  misc_feature 1..20: note = Description of Artificial Sequence: Synthetic oligonucleotide
  misc_feature 1..20: note = Target: SCN10A; (-) strand; PAM type: NRG; PAM sequence: GGG
  source 1..20: mol_type = other DNA
aggagagtaacttccagatt

SEQ ID NO: 18087 - DNA, 20 bp, synthetic construct
  misc_feature 1..20: note = Description of Artificial Sequence: Synthetic oligonucleotide
  misc_feature 1..20: note = Target: SCN10A; (-) strand; PAM type: NRG; PAM sequence: TGG
  source 1..20: mol_type = other DNA
gaggagagtaacttccagat

SEQ ID NO: 18088 - DNA, 20 bp, synthetic construct
  misc_feature 1..20: note = Description of Artificial Sequence: Synthetic oligonucleotide
  misc_feature 1..20: note = Target: SCN10A; (-) strand; PAM type: NRG; PAM sequence: CAG
  source 1..20: mol_type = other DNA
catatgaggagagtaacttc

SEQ ID NO: 18089 - DNA, 20 bp, synthetic construct
  misc_feature 1..20: note = Description of Artificial Sequence: Synthetic oligonucleotide
  misc_feature 1..20: note = Target: SCN10A; (-) strand; PAM type: NRG; PAM sequence: GAG
  source 1..20: mol_type = other DNA
ctctgcttcccatatgagga

SEQ ID NO: 18090 - DNA, 20 bp, synthetic construct
  misc_feature 1..20: note = Description of Artificial Sequence: Synthetic oligonucleotide
  misc_feature 1..20: note = Target: SCN10A; (-) strand; PAM type: NRG; PAM sequence: GAG
  source 1..20: mol_type = other DNA
agctctgcttcccatatgag

SEQ ID NO: 18091 - DNA, 20 bp, synthetic construct
  misc_feature 1..20: note = Description of Artificial Sequence: Synthetic oligonucleotide
  misc_feature 1..20: note = Target: SCN10A; (-) strand; PAM type: NRG; PAM sequence: AGG
  source 1..20: mol_type = other DNA
taagctctgcttcccatatg

SEQ ID NO: 18092 - DNA, 20 bp, synthetic construct
  misc_feature 1..20: note = Description of Artificial Sequence: Synthetic oligonucleotide
  misc_feature 1..20: note = Target: SCN10A; (-) strand; PAM type: NRG; PAM sequence: GAG
  source 1..20: mol_type = other DNA
ttaagctctgcttcccatat

SEQ ID NO: 18093 - DNA, 20 bp, synthetic construct
  misc_feature 1..20: note = Description of Artificial Sequence: Synthetic oligonucleotide
  misc_feature 1..20: note = Target: SCN10A; (-) strand; PAM type: NRG; PAM sequence: AAG
  source 1..20: mol_type = other DNA
gtccacagagttgttgtttt

SEQ ID NO: 18094 - DNA, 20 bp, synthetic construct
  misc_feature 1..20: note = Description of Artificial Sequence: Synthetic oligonucleotide
  misc_feature 1..20: note = Target: SCN10A; (-) strand; PAM type: NRG; PAM sequence: GAG
  source 1..20: mol_type = other DNA
gcctctgtgaccagtccaca

SEQ ID NO: 18095 - DNA, 20 bp, synthetic construct
  misc_feature 1..20: note = Description of Artificial Sequence: Synthetic oligonucleotide
  misc_feature 1..20: note = Target: SCN10A; (-) strand; PAM type: NRG; PAM sequence: CAG
  source 1..20: mol_type = other DNA
ctgcctctgtgaccagtcca

SEQ ID NO: 18096 - DNA, 20 bp, synthetic construct
  misc_feature 1..20: note = Description of Artificial Sequence: Synthetic oligonucleotide
  misc_feature 1..20: note = Target: SCN10A; (-) strand; PAM type: NRG; PAM sequence: CAG
  source 1..20: mol_type = other DNA
ttatcagctgcctctgtgac

SEQ ID NO: 18097 - DNA, 20 bp, synthetic construct
  misc_feature 1..20: note = Description of Artificial Sequence: Synthetic oligonucleotide
  misc_feature 1..20: note = Target: SCN10A; (-) strand; PAM type: NRG; PAM sequence: CAG
  source 1..20: mol_type = other DNA
cagtttttatttgtgtttat

SEQ ID NO: 18098 - DNA, 20 bp, synthetic construct
  misc_feature 1..20: note = Description of Artificial Sequence: Synthetic oligonucleotide
  misc_feature 1..20: note = Target: SCN10A; (-) strand; PAM type: NRG; PAM sequence: CAG
  source 1..20: mol_type = other DNA
ccatactagttactaatgct

SEQ ID NO: 18099 - DNA, 20 bp, synthetic construct
  misc_feature 1..20: note = Description of Artificial Sequence: Synthetic oligonucleotide
  misc_feature 1..20: note = Target: SCN10A; (-) strand; PAM type: NRG; PAM sequence: TAG
  source 1..20: mol_type = other DNA
acgtttcctgctccccatac

SEQ ID NO: 18100 - DNA, 20 bp, synthetic construct
  misc_feature 1..20: note = Description of Artificial Sequence: Synthetic oligonucleotide
  misc_feature 1..20: note = Target: SCN10A; (-) strand; PAM type: NRG; PAM sequence: TGG
  source 1..20: mol_type = other DNA
ttacaaccttcggcaggcca

SEQ ID NO: 18101 - DNA, 20 bp, synthetic construct
  misc_feature 1..20: note = Description of Artificial Sequence: Synthetic oligonucleotide
  misc_feature 1..20: note = Target: SCN10A; (-) strand; PAM type: NRG; PAM sequence: AGG
  source 1..20: mol_type = other DNA
ctaggcttacaaccttcggc

SEQ ID NO: 18102 - DNA, 20 bp, synthetic construct
  misc_feature 1..20: note = Description of Artificial Sequence: Synthetic oligonucleotide
  misc_feature 1..20: note = Target: SCN10A; (-) strand; PAM type: NRG; PAM sequence: CAG
  source 1..20: mol_type = other DNA
gctaggcttacaaccttcgg

SEQ ID NO: 18103 - DNA, 20 bp, synthetic construct
  misc_feature 1..20: note = Description of Artificial Sequence: Synthetic oligonucleotide
  misc_feature 1..20: note = Target: SCN10A; (-) strand; PAM type: NRG; PAM sequence: CGG
  source 1..20: mol_type = other DNA
cctgctaggcttacaacctt

SEQ ID NO: 18104 - DNA, 20 bp, synthetic construct
  misc_feature 1..20: note = Description of Artificial Sequence: Synthetic oligonucleotide
  misc_feature 1..20: note = Target: SCN10A; (-) strand; PAM type: NRG; PAM sequence: AGG
  source 1..20: mol_type = other DNA
agcagggagaaattcctgct

SEQ ID NO: 18105 - DNA, 20 bp, synthetic construct
  misc_feature 1..20: note = Description of Artificial Sequence: Synthetic oligonucleotide
  misc_feature 1..20: note = Target: SCN10A; (-) strand; PAM type: NRG; PAM sequence: TAG
  source 1..20: mol_type = other DNA
aagcagggagaaattcctgc

SEQ ID NO: 18106 - DNA, 20 bp, synthetic construct
  misc_feature 1..20: note = Description of Artificial Sequence: Synthetic oligonucleotide
  misc_feature 1..20: note = Target: SCN10A; (-) strand; PAM type: NRG; PAM sequence: GAG
  source 1..20: mol_type = other DNA
ggatctagtcttaaagcagg

SEQ ID NO: 18107 - DNA, 20 bp, synthetic construct
  misc_feature 1..20: note = Description of Artificial Sequence: Synthetic oligonucleotide
  misc_feature 1..20: note = Target: SCN10A; (-) strand; PAM type: NRG; PAM sequence: GGG
  source 1..20: mol_type = other DNA
tgggatctagtcttaaagca

SEQ ID NO: 18108 - DNA, 20 bp, synthetic construct
  misc_feature 1..20: note = Description of Artificial Sequence: Synthetic oligonucleotide
  misc_feature 1..20: note = Target: SCN10A; (-) strand; PAM type: NRG; PAM sequence: AGG
  source 1..20: mol_type = other DNA
ttgggatctagtcttaaagc

SEQ ID NO: 18109 - DNA, 20 bp, synthetic construct
  misc_feature 1..20: note = Description of Artificial Sequence: Synthetic oligonucleotide
  misc_feature 1..20: note = Target: SCN10A; (-) strand; PAM type: NRG; PAM sequence: CAG
  source 1..20: mol_type = other DNA
tttgggatctagtcttaaag

SEQ ID NO: 18110 - DNA, 20 bp, synthetic construct
  misc_feature 1..20: note = Description of Artificial Sequence: Synthetic oligonucleotide
  misc_feature 1..20: note = Target: SCN10A; (-) strand; PAM type: NRG; PAM sequence: AAG
  source 1..20: mol_type = other DNA
ctctttgggatctagtctta

SEQ ID NO: 18111 - DNA, 20 bp, synthetic construct
  misc_feature 1..20: note = Description of Artificial Sequence: Synthetic oligonucleotide
  misc_feature 1..20: note = Target: SCN10A; (-) strand; PAM type: NRG; PAM sequence: TAG
  source 1..20: mol_type = other DNA
gggtatagctctttgggatc

SEQ ID NO: 18112 - DNA, 20 bp, synthetic construct
  misc_feature 1..20: note = Description of Artificial Sequence: Synthetic oligonucleotide
  misc_feature 1..20: note = Target: SCN10A; (-) strand; PAM type: NRG; PAM sequence: GGG
  source 1..20: mol_type = other DNA
catgaagggtatagctcttt

SEQ ID NO: 18113 - DNA, 20 bp, synthetic construct
  misc_feature 1..20: note = Description of Artificial Sequence: Synthetic oligonucleotide
  misc_feature 1..20: note = Target: SCN10A; (-) strand; PAM type: NRG; PAM sequence: TGG
  source 1..20: mol_type = other DNA
acatgaagggtatagctctt

SEQ ID NO: 18114 - DNA, 20 bp, synthetic construct
  misc_feature 1..20: note = Description of Artificial Sequence: Synthetic oligonucleotide
  misc_feature 1..20: note = Target: SCN10A; (-) strand; PAM type: NRG; PAM sequence: TAG
  source 1..20: mol_type = other DNA
tcatccttacatgaagggta

SEQ ID NO: 18115 - DNA, 20 bp, synthetic construct
  misc_feature 1..20: note = Description of Artificial Sequence: Synthetic oligonucleotide
  misc_feature 1..20: note = Target: SCN10A; (-) strand; PAM type: NRG; PAM sequence: GGG
  source 1..20: mol_type = other DNA
gtggttcatccttacatgaa

SEQ ID NO: 18116 - DNA, 20 bp, synthetic construct
  misc_feature 1..20: note = Description of Artificial Sequence: Synthetic oligonucleotide
  misc_feature 1..20: note = Target: SCN10A; (-) strand; PAM type: NRG; PAM sequence: AGG
  source 1..20: mol_type = other DNA
tgtggttcatccttacatga

SEQ ID NO: 18117 - DNA, 20 bp, synthetic construct
  misc_feature 1..20: note = Description of Artificial Sequence: Synthetic oligonucleotide
  misc_feature 1..20: note = Target: SCN10A; (-) strand; PAM type: NRG; PAM sequence: AAG
  source 1..20: mol_type = other DNA
ttgtggttcatccttacatg

SEQ ID NO: 18118 - DNA, 20 bp, synthetic construct
  misc_feature 1..20: note = Description of Artificial Sequence: Synthetic oligonucleotide
  misc_feature 1..20: note = Target: SCN10A; (-) strand; PAM type: NRG; PAM sequence: TGG
  source 1..20: mol_type = other DNA
cattctcctgggattgtttg

SEQ ID NO: 18119 - DNA, 20 bp, synthetic construct
  misc_feature 1..20: note = Description of Artificial Sequence: Synthetic oligonucleotide
  misc_feature 1..20: note = Target: SCN10A; (-) strand; PAM type: NRG; PAM sequence: GGG
  source 1..20: mol_type = other DNA
aattttccttgcattctcct

SEQ ID NO: 18120 - DNA, 20 bp, synthetic construct
  misc_feature 1..20: note = Description of Artificial Sequence: Synthetic oligonucleotide
  misc_feature 1..20: note = Target: SCN10A; (-) strand; PAM type: NRG; PAM sequence: TGG
  source 1..20: mol_type = other DNA
caattttccttgcattctcc

SEQ ID NO: 18121 - DNA, 20 bp, synthetic construct
  misc_feature 1..20: note = Description of Artificial Sequence: Synthetic oligonucleotide
  misc_feature 1..20: note = Target: SCN10A; (-) strand; PAM type: NRG; PAM sequence: CAG
  source 1..20: mol_type = other DNA
ctgtagctggtacctaacac

SEQ ID NO: 18122 - DNA, 20 bp, synthetic construct
  misc_feature 1..20: note = Description of Artificial Sequence: Synthetic oligonucleotide
  misc_feature 1..20: note = Target: SCN10A; (-) strand; PAM type: NRG; PAM sequence: TGG
  source 1..20: mol_type = other DNA
gtcaattttcctcctgtagc

SEQ ID NO: 18123 - DNA, 20 bp, synthetic construct
  misc_feature 1..20: note = Description of Artificial Sequence: Synthetic oligonucleotide
  misc_feature 1..20: note = Target: SCN10A; (-) strand; PAM type: NRG; PAM sequence: TAG
  source 1..20: mol_type = other DNA
cagcgtcaattttcctcctg

SEQ ID NO: 18124 - DNA, 20 bp, synthetic construct
  misc_feature 1..20: note = Description of Artificial Sequence: Synthetic oligonucleotide
  misc_feature 1..20: note = Target: SCN10A; (-) strand; PAM type: NRG; PAM sequence: CAG
  source 1..20: mol_type = other DNA
actttgttgtttcaaatgct

SEQ ID NO: 18125 - DNA, 20 bp, synthetic construct
  misc_feature 1..20: note = Description of Artificial Sequence: Synthetic oligonucleotide
  misc_feature 1..20: note = Target: SCN10A; (-) strand; PAM type: NRG; PAM sequence: GAG
  source 1..20: mol_type = other DNA
ttccagataaaatcctatat

SEQ ID NO: 18126 - DNA, 20 bp, synthetic construct
  misc_feature 1..20: note = Description of Artificial Sequence: Synthetic oligonucleotide
  misc_feature 1..20: note = Target: SCN10A; (-) strand; PAM type: NRG; PAM sequence: CAG
  source 1..20: mol_type = other DNA
tacctaggtagtgtgaattc

SEQ ID NO: 18127 - DNA, 20 bp, synthetic construct
  misc_feature 1..20: note = Description of Artificial Sequence: Synthetic oligonucleotide
  misc_feature 1..20: note = Target: SCN10A; (-) strand; PAM type: NRG; PAM sequence: TAG
  source 1..20: mol_type = other DNA
ctcaacttaaaatacctagg

SEQ ID NO: 18128 - DNA, 20 bp, synthetic construct
  misc_feature 1..20: note = Description of Artificial Sequence: Synthetic oligonucleotide
  misc_feature 1..20: note = Target: SCN10A; (-) strand; PAM type: NRG; PAM sequence: AGG
  source 1..20: mol_type = other DNA
attctcaacttaaaatacct

SEQ ID NO: 18129 - DNA, 20 bp, synthetic construct
  misc_feature 1..20: note = Description of Artificial Sequence: Synthetic oligonucleotide
  misc_feature 1..20: note = Target: SCN10A; (-) strand; PAM type: NRG; PAM sequence: TAG
  source 1..20: mol_type = other DNA
aattctcaacttaaaatacc

SEQ ID NO: 18130 - DNA, 20 bp, synthetic construct
  misc_feature 1..20: note = Description of Artificial Sequence: Synthetic oligonucleotide
  misc_feature 1..20: note = Target: SCN10A; (-) strand; PAM type: NRG; PAM sequence: TAG
  source 1..20: mol_type = other DNA
taattctgcagagcactttg

SEQ ID NO: 18131 - DNA, 20 bp, synthetic construct
  misc_feature 1..20: note = Description of Artificial Sequence: Synthetic oligonucleotide
  misc_feature 1..20: note = Target: SCN10A; (-) strand; PAM type: NRG; PAM sequence: GAG
  source 1..20: mol_type = other DNA
tatttgcatttaattctgca

SEQ ID NO: 18132 - DNA, 20 bp, synthetic construct
  misc_feature 1..20: note = Description of Artificial Sequence: Synthetic oligonucleotide
  misc_feature 1..20: note = Target: SCN10A; (-) strand; PAM type: NRG; PAM sequence: CAG
  source 1..20: mol_type = other DNA
ggtatttgcatttaattctg

SEQ ID NO: 18133 - DNA, 20 bp, synthetic construct
  misc_feature 1..20: note = Description of Artificial Sequence: Synthetic oligonucleotide
  misc_feature 1..20: note = Target: SCN10A; (-) strand; PAM type: NRG; PAM sequence: AGG
  source 1..20: mol_type = other DNA
ataaaggcaggttcctccag

SEQ ID NO: 18134 - DNA, 20 bp, synthetic construct
  misc_feature 1..20: note = Description of Artificial Sequence: Synthetic oligonucleotide
  misc_feature 1..20: note = Target: SCN10A; (-) strand; PAM type: NRG; PAM sequence: GAG
  source 1..20: mol_type = other DNA
gataaaggcaggttcctcca

SEQ ID NO: 18135 - DNA, 20 bp, synthetic construct
  misc_feature 1..20: note = Description of Artificial Sequence: Synthetic oligonucleotide
  misc_feature 1..20: note = Target: SCN10A; (-) strand; PAM type: NRG; PAM sequence: CAG
  source 1..20: mol_type = other DNA
gagataaaggcaggttcctc

SEQ ID NO: 18136 - DNA, 20 bp, synthetic construct
  misc_feature 1..20: note = Description of Artificial Sequence: Synthetic oligonucleotide
  misc_feature 1..20: note = Target: SCN10A; (-) strand; PAM type: NRG; PAM sequence: AGG
  source 1..20: mol_type = other DNA
ttgaaacctgagataaaggc

SEQ ID NO: 18137 - DNA, 20 bp, synthetic construct
  misc_feature 1..20: note = Description of Artificial Sequence: Synthetic oligonucleotide
  misc_feature 1..20: note = Target: SCN10A; (-) strand; PAM type: NRG; PAM sequence: CAG
  source 1..20: mol_type = other DNA
tttgaaacctgagataaagg

SEQ ID NO: 18138 - DNA, 20 bp, synthetic construct
  misc_feature 1..20: note = Description of Artificial Sequence: Synthetic oligonucleotide
  misc_feature 1..20: note = Target: SCN10A; (-) strand; PAM type: NRG; PAM sequence: AGG
  source 1..20: mol_type = other DNA
tagtttgaaacctgagataa

SEQ ID NO: 18139 - DNA, 20 bp, synthetic construct
  misc_feature 1..20: note = Description of Artificial Sequence: Synthetic oligonucleotide
  misc_feature 1..20: note = Target: SCN10A; (-) strand; PAM type: NRG; PAM sequence: AAG
  source 1..20: mol_type = other DNA
atagtttgaaacctgagata

SEQ ID NO: 18140 - DNA, 20 bp, synthetic construct
  misc_feature 1..20: note = Description of Artificial Sequence: Synthetic oligonucleotide
  misc_feature 1..20: note = Target: SCN10A; (-) strand; PAM type: NRG; PAM sequence: GAG
  source 1..20: mol_type = other DNA
gagggaatagtttgaaacct

SEQ ID NO: 18141 - DNA, 20 bp, synthetic construct
  misc_feature 1..20: note = Description of Artificial Sequence: Synthetic oligonucleotide
  misc_feature 1..20: note = Target: SCN10A; (-) strand; PAM type: NRG; PAM sequence: TAG
  source 1..20: mol_type = other DNA
ttaaacaatttttgagggaa

SEQ ID NO: 18142 - DNA, 20 bp, synthetic construct
  misc_feature 1..20: note = Description of Artificial Sequence: Synthetic oligonucleotide
  misc_feature 1..20: note = Target: SCN10A; (-) strand; PAM type: NRG; PAM sequence: GGG
  source 1..20: mol_type = other DNA
aactcttaaacaatttttga

SEQ ID NO: 18143 - DNA, 20 bp, synthetic construct
  misc_feature 1..20: note = Description of Artificial Sequence: Synthetic oligonucleotide
  misc_feature 1..20: note = Target: SCN10A; (-) strand; PAM type: NRG; PAM sequence: AGG
  source 1..20: mol_type = other DNA
caactcttaaacaatttttg

SEQ ID NO: 18144 - DNA, 20 bp, synthetic construct
  misc_feature 1..20: note = Description of Artificial Sequence: Synthetic oligonucleotide
  misc_feature 1..20: note = Target: SCN10A; (-) strand; PAM type: NRG; PAM sequence: GAG
  source 1..20: mol_type = other DNA
gcaactcttaaacaattttt

SEQ ID NO: 18145 - DNA, 20 bp, synthetic construct
  misc_feature 1..20: note = Description of Artificial Sequence: Synthetic oligonucleotide
  misc_feature 1..20: note = Target: SCN10A; (-) strand; PAM type: NRG; PAM sequence: AAG
  source 1..20: mol_type = other DNA
tccacatctgtggtttcttc

SEQ ID NO: 18146 - DNA, 20 bp, synthetic construct
  misc_feature 1..20: note = Description of Artificial Sequence: Synthetic oligonucleotide
  misc_feature 1..20: note = Target: SCN10A; (-) strand; PAM type: NRG; PAM sequence: TGG
  source 1..20: mol_type = other DNA
aatgactatttccacatctg

SEQ ID NO: 18147 - DNA, 20 bp, synthetic construct
  misc_feature 1..20: note = Description of Artificial Sequence: Synthetic oligonucleotide
  misc_feature 1..20: note = Target: SCN10A; (-) strand; PAM type: NRG; PAM sequence: TGG
  source 1..20: mol_type = other DNA
aattctatcatctgaagaaa

SEQ ID NO: 18148 - DNA, 20 bp, synthetic construct
  misc_feature 1..20: note = Description of Artificial Sequence: Synthetic oligonucleotide
  misc_feature 1..20: note = Target: SCN10A; (-) strand; PAM type: NRG; PAM sequence: AAG
  source 1..20: mol_type = other DNA
actaataattctatcatctg

SEQ ID NO: 18149 - DNA, 20 bp, synthetic construct
  misc_feature 1..20: note = Description of Artificial Sequence: Synthetic oligonucleotide
  misc_feature 1..20: note = Target: SCN10A; (-) strand; PAM type: NRG; PAM sequence: AAG
  source 1..20: mol_type = other DNA
tattctctgcacatagtttc

SEQ ID NO: 18150 - DNA, 20 bp, synthetic construct
  misc_feature 1..20: note = Description of Artificial Sequence: Synthetic oligonucleotide
  misc_feature 1..20: note = Target: SCN10A; (-) strand; PAM type: NRG; PAM sequence: TAG
  source 1..20: mol_type = other DNA
gtttttttattctctgcaca

SEQ ID NO: 18151 - DNA, 20 bp, synthetic construct
  misc_feature 1..20: note = Description of Artificial Sequence: Synthetic oligonucleotide
  misc_feature 1..20: note = Target: SCN10A; (-) strand; PAM type: NRG; PAM sequence: TAG
  source 1..20: mol_type = other DNA
caacttgttattgttatcta

SEQ ID NO: 18152 - DNA, 20 bp, synthetic construct
  misc_feature 1..20: note = Description of Artificial Sequence: Synthetic oligonucleotide
  misc_feature 1..20: note = Target: SCN10A; (-) strand; PAM type: NRG; PAM sequence: GAG
  source 1..20: mol_type = other DNA
attatatttttcatttctaa

SEQ ID NO: 18153 - DNA, 20 bp, synthetic construct
  misc_feature 1..20: note = Description of Artificial Sequence: Synthetic oligonucleotide
  misc_feature 1..20: note = Target: SCN10A; (-) strand; PAM type: NRG; PAM sequence: AAG
  source 1..20: mol_type = other DNA
gtattatatttttcatttct

SEQ ID NO: 18154 - DNA, 20 bp, synthetic construct
  misc_feature 1..20: note = Description of Artificial Sequence: Synthetic oligonucleotide
  misc_feature 1..20: note = Target: SCN10A; (-) strand; PAM type: NRG; PAM sequence: AAG
  source 1..20: mol_type = other DNA
ttcataatatttttaatttt

SEQ ID NO: 18155 - DNA, 20 bp, synthetic construct
  misc_feature 1..20: note = Description of Artificial Sequence: Synthetic oligonucleotide
  misc_feature 1..20: note = Target: SCN10A; (-) strand; PAM type: NRG; PAM sequence: CAG
  source 1..20: mol_type = other DNA
aatttattctgatatatcct

SEQ ID NO: 18156 - DNA, 20 bp, synthetic construct
  misc_feature 1..20: note = Description of Artificial Sequence: Synthetic oligonucleotide
  misc_feature 1..20: note = Target: SCN10A; (-) strand; PAM type: NRG; PAM sequence: AGG
  source 1..20: mol_type = other DNA
ttttcatcttatgtctctct

SEQ ID NO: 18157 - DNA, 20 bp, synthetic construct
  misc_feature 1..20: note = Description of Artificial Sequence: Synthetic oligonucleotide
  misc_feature 1..20: note = Target: SCN10A; (-) strand; PAM type: NRG; PAM sequence: TAG
  source 1..20: mol_type = other DNA
tttttcatcttatgtctctc

SEQ ID NO: 18158 - DNA, 20 bp, synthetic construct
  misc_feature 1..20: note = Description of Artificial Sequence: Synthetic oligonucleotide
  misc_feature 1..20: note = Target: SCN10A; (-) strand; PAM type: NRG; PAM sequence: TAG
  source 1..20: mol_type = other DNA
ccttctggactttggttaga

SEQ ID NO: 18159 - DNA, 20 bp, synthetic construct
  misc_feature 1..20: note = Description of Artificial Sequence: Synthetic oligonucleotide
  misc_feature 1..20: note = Target: SCN10A; (-) strand; PAM type: NRG; PAM sequence: TAG
  source 1..20: mol_type = other DNA
ttctccttctggactttggt

SEQ ID NO: 18160 - DNA, 20 bp, synthetic construct
  misc_feature 1..20: note = Description of Artificial Sequence: Synthetic oligonucleotide
  misc_feature 1..20: note = Target: SCN10A; (-) strand; PAM type: NRG; PAM sequence: TGG
  source 1..20: mol_type = other DNA
ttttttctccttctggactt

SEQ ID NO: 18161 - DNA, 20 bp, synthetic construct
  misc_feature 1..20: note = Description of Artificial Sequence: Synthetic oligonucleotide
  misc_feature 1..20: note = Target: SCN10A; (-) strand; PAM type: NRG; PAM sequence: TGG
  source 1..20: mol_type = other DNA
cattctattttttctccttc

SEQ ID NO: 18162 - DNA, 20 bp, synthetic construct
  misc_feature 1..20: note = Description of Artificial Sequence: Synthetic oligonucleotide
  misc_feature 1..20: note = Target: SCN10A; (-) strand; PAM type: NRG; PAM sequence: TAG
  source 1..20: mol_type = other DNA
agacatgatgtgggcagtca

SEQ ID NO: 18163 - DNA, 20 bp, synthetic construct
  misc_feature 1..20: note = Description of Artificial Sequence: Synthetic oligonucleotide
  misc_feature 1..20: note = Target: SCN10A; (-) strand; PAM type: NRG; PAM sequence: CAG
  source 1..20: mol_type = other DNA
gttcccagacatgatgtggg

SEQ ID NO: 18164 - DNA, 20 bp, synthetic construct
  misc_feature 1..20: note = Description of Artificial Sequence: Synthetic oligonucleotide
  misc_feature 1..20: note = Target: SCN10A; (-) strand; PAM type: NRG; PAM sequence: GGG
  source 1..20: mol_type = other DNA
aaagttcccagacatgatgt

SEQ ID NO: 18165 - DNA, 20 bp, synthetic construct
  misc_feature 1..20: note = Description of Artificial Sequence: Synthetic oligonucleotide
  misc_feature 1..20: note = Target: SCN10A; (-) strand; PAM type: NRG; PAM sequence: TGG
  source 1..20: mol_type = other DNA
gaaagttcccagacatgatg

SEQ ID NO: 18166 - DNA, 20 bp, synthetic construct
  misc_feature 1..20: note = Description of Artificial Sequence: Synthetic oligonucleotide
  misc_feature 1..20: note = Target: SCN10A; (-) strand; PAM type: NRG; PAM sequence: CAG
  source 1..20: mol_type = other DNA
cttcaattctggaaagttcc

SEQ ID NO: 18167 - DNA, 20 bp, synthetic construct
  misc_feature 1..20: note = Description of Artificial Sequence: Synthetic oligonucleotide
  misc_feature 1..20: note = Target: SCN10A; (-) strand; PAM type: NRG; PAM sequence: AAG
  source 1..20: mol_type = other DNA
taattttcttcaattctgga

SEQ ID NO: 18168 - DNA, 20 bp, synthetic construct
  misc_feature 1..20: note = Description of Artificial Sequence: Synthetic oligonucleotide
  misc_feature 1..20: note = Target: SCN10A; (-) strand; PAM type: NRG; PAM sequence: TGG
  source 1..20: mol_type = other DNA
tttgtaattttcttcaattc

SEQ ID NO: 18169 - DNA, 20 bp, synthetic construct
  misc_feature 1..20: note = Description of Artificial Sequence: Synthetic oligonucleotide
  misc_feature 1..20: note = Target: SCN10A; (-) strand; PAM type: NRG; PAM sequence: TAG
  source 1..20: mol_type = other DNA
atactgacttcttgaatctt

SEQ ID NO: 18170 - DNA, 20 bp, synthetic construct
  misc_feature 1..20: note = Description of Artificial Sequence: Synthetic oligonucleotide
  misc_feature 1..20: note = Target: SCN10A; (-) strand; PAM type: NRG; PAM sequence: AAG
  source 1..20: mol_type = other DNA
tctttccatttataatgctt

SEQ ID NO: 18171 - DNA, 20 bp, synthetic construct
  misc_feature 1..20: note = Description of Artificial Sequence: Synthetic oligonucleotide
  misc_feature 1..20: note = Target: SCN10A; (-) strand; PAM type: NRG; PAM sequence: TGG
  source 1..20: mol_type = other DNA
cactgtaatatgtctaggtg

SEQ ID NO: 18172 - DNA, 20 bp, synthetic construct
  misc_feature 1..20: note = Description of Artificial Sequence: Synthetic oligonucleotide
  misc_feature 1..20: note = Target: SCN10A; (-) strand; PAM type: NRG; PAM sequence: AGG
  source 1..20: mol_type = other DNA
agtttcactgtaatatgtct

SEQ ID NO: 18173 - DNA, 20 bp, synthetic construct
  misc_feature 1..20: note = Description of Artificial Sequence: Synthetic oligonucleotide
  misc_feature 1..20: note = Target: SCN10A; (-) strand; PAM type: NRG; PAM sequence: TAG
  source 1..20: mol_type = other DNA
cagtttcactgtaatatgtc

SEQ ID NO: 18174 - DNA, 20 bp, synthetic construct
  misc_feature 1..20: note = Description of Artificial Sequence: Synthetic oligonucleotide
  misc_feature 1..20: note = Target: SCN10A; (-) strand; PAM type: NRG; PAM sequence: CAG
  source 1..20: mol_type = other DNA
tatccatctttggtgttctg

SEQ ID NO: 18175 - DNA, 20 bp, synthetic construct
  misc_feature 1..20: note = Description of Artificial Sequence: Synthetic oligonucleotide
  misc_feature 1..20: note = Target: SCN10A; (-) strand; PAM type: NRG; PAM sequence: TGG
  source 1..20: mol_type = other DNA
ttaaatcttctatccatctt

SEQ ID NO: 18176 - DNA, 20 bp, synthetic construct
  misc_feature 1..20: note = Description of Artificial Sequence: Synthetic oligonucleotide
  misc_feature 1..20: note = Target: SCN10A; (-) strand; PAM type: NRG; PAM sequence: TGG
  source 1..20: mol_type = other DNA
aactgttattccttcctttc

SEQ ID NO: 18177 - DNA, 20 bp, synthetic construct
  misc_feature 1..20: note = Description of Artificial Sequence: Synthetic oligonucleotide
  misc_feature 1..20: note = Target: SCN10A; (-) strand; PAM type: NRG; PAM sequence: CAG
  source 1..20: mol_type = other DNA
cattgttgctaatgagcagt

SEQ ID NO: 18178 - DNA, 20 bp, synthetic construct
  misc_feature 1..20: note = Description of Artificial Sequence: Synthetic oligonucleotide
  misc_feature 1..20: note = Target: SCN10A; (-) strand; PAM type: NRG; PAM sequence: CAG
  source 1..20: mol_type = other DNA
cctccattgttgctaatgag

SEQ ID NO: 18179 - DNA, 20 bp, synthetic construct
  misc_feature 1..20: note = Description of Artificial Sequence: Synthetic oligonucleotide
  misc_feature 1..20: note = Target: SCN10A; (-) strand; PAM type: NRG; PAM sequence: GAG
  source 1..20: mol_type = other DNA
tagcctccattgttgctaat

SEQ ID NO: 18180 - DNA, 20 bp, synthetic construct
  misc_feature 1..20: note = Description of Artificial Sequence: Synthetic oligonucleotide
  misc_feature 1..20: note = Target: SCN10A; (-) strand; PAM type: NRG; PAM sequence: TAG
  source 1..20: mol_type = other DNA
gaagatagtattccaacaat

SEQ ID NO: 18181 - DNA, 20 bp, synthetic construct
  misc_feature 1..20: note = Description of Artificial Sequence: Synthetic oligonucleotide
  misc_feature 1..20: note = Target: SCN10A; (-) strand; PAM type: NRG; PAM sequence: TAG
  source 1..20: mol_type = other DNA
ttatcttccttcagtgaaga

SEQ ID NO: 18182 - DNA, 20 bp, synthetic construct
  misc_feature 1..20: note = Description of Artificial Sequence: Synthetic oligonucleotide
  misc_feature 1..20: note = Target: SCN10A; (-) strand; PAM type: NRG; PAM sequence: AAG
  source 1..20: mol_type = other DNA
tactttatcttccttcagtg

SEQ ID NO: 18183 - DNA, 20 bp, synthetic construct
  misc_feature 1..20: note = Description of Artificial Sequence: Synthetic oligonucleotide
  misc_feature 1..20: note = Target: SCN10A; (-) strand; PAM type: NRG; PAM sequence: CAG
  source 1..20: mol_type = other DNA
gttgatactttatcttcctt

SEQ ID NO: 18184 - DNA, 20 bp, synthetic construct
  misc_feature 1..20: note = Description of Artificial Sequence: Synthetic oligonucleotide
  misc_feature 1..20: note = Target: SCN10A; (-) strand; PAM type: NRG; PAM sequence: TAG
  source 1..20: mol_type = other DNA
ttcttatgaatgtaaaattc

SEQ ID NO: 18185 - DNA, 20 bp, synthetic construct
  misc_feature 1..20: note = Description of Artificial Sequence: Synthetic oligonucleotide
  misc_feature 1..20: note = Target: SCN10A; (-) strand; PAM type: NRG; PAM sequence: GAG
  source 1..20: mol_type = other DNA
cagtttgcccgtgtctttga

SEQ ID NO: 18186 - DNA, 20 bp, synthetic construct
  misc_feature 1..20: note = Description of Artificial Sequence: Synthetic oligonucleotide
  misc_feature 1..20: note = Target: SCN10A; (-) strand; PAM type: NRG; PAM sequence: GAG
  source 1..20: mol_type = other DNA
ttcagtttgcccgtgtcttt

SEQ ID NO: 18187 - DNA, 20 bp, synthetic construct
  misc_feature 1..20: note = Description of Artificial Sequence: Synthetic oligonucleotide
  misc_feature 1..20: note = Target: SCN10A; (-) strand; PAM type: NRG; PAM sequence: CAG
  source 1..20: mol_type = other DNA
tttatctgaaatttgctctt

SEQ ID NO: 18188 - DNA, 20 bp, synthetic construct
  misc_feature 1..20: note = Description of Artificial Sequence: Synthetic oligonucleotide
  misc_feature 1..20: note = Target: SCN10A; (-) strand; PAM type: NRG; PAM sequence: TGG
  source 1..20: mol_type = other DNA
ttcttttagtaagtgccttc

SEQ ID NO: 18189 - DNA, 20 bp, synthetic construct
  misc_feature 1..20: note = Description of Artificial Sequence: Synthetic oligonucleotide
  misc_feature 1..20: note = Target: SCN10A; (-) strand; PAM type: NRG; PAM sequence: AAG
  source 1..20: mol_type = other DNA
cctttagaatttcttttagt

SEQ ID NO: 18190 - DNA, 20 bp, synthetic construct
  misc_feature 1..20: note = Description of Artificial Sequence: Synthetic oligonucleotide
  misc_feature 1..20: note = Target: SCN10A; (-) strand; PAM type: NRG; PAM sequence: TAG
  source 1..20: mol_type = other DNA
acctcctttagaatttcttt

SEQ ID NO: 18191 - DNA, 20 bp, synthetic construct
  misc_feature 1..20: note = Description of Artificial Sequence: Synthetic oligonucleotide
  misc_feature 1..20: note = Target: SCN10A; (-) strand; PAM type: NRG; PAM sequence: TAG
  source 1..20: mol_type = other DNA
tctacctgaagtacctcctt

SEQ ID NO: 18192 - DNA, 20 bp, synthetic construct
  misc_feature 1..20: note = Description of Artificial Sequence: Synthetic oligonucleotide
  misc_feature 1..20: note = Target: SCN10A; (-) strand; PAM type: NRG; PAM sequence: AAG
  source 1..20: mol_type = other DNA
gatcactttctatctacctg

SEQ ID NO: 18193 - DNA, 20 bp, synthetic construct
  misc_feature 1..20: note = Description of Artificial Sequence: Synthetic oligonucleotide
  misc_feature 1..20: note = Target: SCN10A; (-) strand; PAM type: NRG; PAM sequence: GGG
  source 1..20: mol_type = other DNA
acacattacatattacttct

SEQ ID NO: 18194 - DNA, 20 bp, synthetic construct
  misc_feature 1..20: note = Description of Artificial Sequence: Synthetic oligonucleotide
  misc_feature 1..20: note = Target: SCN10A; (-) strand; PAM type: NRG; PAM sequence: TGG
  source 1..20: mol_type = other DNA
tacacattacatattacttc

SEQ ID NO: 18195 - DNA, 20 bp, synthetic construct
  misc_feature 1..20: note = Description of Artificial Sequence: Synthetic oligonucleotide
  misc_feature 1..20: note = Target: SCN10A; (-) strand; PAM type: NRG; PAM sequence: CAG
  source 1..20: mol_type = other DNA
ttcttcaaccctttggagca

SEQ ID NO: 18196 - DNA, 20 bp, synthetic construct
  misc_feature 1..20: note = Description of Artificial Sequence: Synthetic oligonucleotide
  misc_feature 1..20: note = Target: SCN10A; (-) strand; PAM type: NRG; PAM sequence: GAG
  source 1..20: mol_type = other DNA
ttgatttcttcaaccctttg

SEQ ID NO: 18197 - DNA, 20 bp, synthetic construct
  misc_feature 1..20: note = Description of Artificial Sequence: Synthetic oligonucleotide
  misc_feature 1..20: note = Target: SCN10A; (-) strand; PAM type: NRG; PAM sequence: TGG
  source 1..20: mol_type = other DNA
tattgatttcttcaaccctt

SEQ ID NO: 18198 - DNA, 20 bp, synthetic construct
  misc_feature 1..20: note = Description of Artificial Sequence: Synthetic oligonucleotide
  misc_feature 1..20: note = Target: SCN10A; (-) strand; PAM type: NRG; PAM sequence: TAG
  source 1..20: mol_type = other DNA
atcctgtaagcctaaaaatt

SEQ ID NO: 18199 - DNA, 20 bp, synthetic construct
  misc_feature 1..20: note = Description of Artificial Sequence: Synthetic oligonucleotide
  misc_feature 1..20: note = Target: SCN10A; (-) strand; PAM type: NRG; PAM sequence: AAG
  source 1..20: mol_type = other DNA
tttcttatctggtatcctgt

SEQ ID NO: 18200 - DNA, 20 bp, synthetic construct
  misc_feature 1..20: note = Description of Artificial Sequence: Synthetic oligonucleotide
  misc_feature 1..20: note = Target: SCN10A; (-) strand; PAM type: NRG; PAM sequence: TGG
  source 1..20: mol_type = other DNA
tcagtgagttatttcttatc

SEQ ID NO: 18201 - DNA, 20 bp, synthetic construct
  misc_feature 1..20: note = Description of Artificial Sequence: Synthetic oligonucleotide
  misc_feature 1..20: note = Target: SCN10A; (-) strand; PAM type: NRG; PAM sequence: GAG
  source 1..20: mol_type = other DNA
ttgagtttcagattttcagt

SEQ ID NO: 18202 - DNA, 20 bp, synthetic construct
  misc_feature 1..20: note = Description of Artificial Sequence: Synthetic oligonucleotide
  misc_feature 1..20: note = Target: SCN10A; (-) strand; PAM type: NRG; PAM sequence: CAG
  source 1..20: mol_type = other DNA
cagtttgagtttcagatttt

SEQ ID NO: 18203 - DNA, 20 bp, synthetic construct
  misc_feature 1..20: note = Description of Artificial Sequence: Synthetic oligonucleotide
  misc_feature 1..20: note = Target: SCN10A; (-) strand; PAM type: NRG; PAM sequence: CAG
  source 1..20: mol_type = other DNA
ttggaacacagtttgagttt

SEQ ID NO: 18204 - DNA, 20 bp, synthetic construct
  misc_feature 1..20: note = Description of Artificial Sequence: Synthetic oligonucleotide
  misc_feature 1..20: note = Target: SCN10A; (-) strand; PAM type: NRG; PAM sequence: GAG
  source 1..20: mol_type = other DNA
tactctttggaacacagttt

SEQ ID NO: 18205 - DNA, 20 bp, synthetic construct
  misc_feature 1..20: note = Description of Artificial Sequence: Synthetic oligonucleotide
  misc_feature 1..20: note = Target: SCN10A; (-) strand; PAM type: NRG; PAM sequence: CAG
  source 1..20: mol_type = other DNA
atttcttactctttggaaca

SEQ ID NO: 18206 - DNA, 20 bp, synthetic construct
  misc_feature 1..20: note = Description of Artificial Sequence: Synthetic oligonucleotide
  misc_feature 1..20: note = Target: SCN10A; (-) strand; PAM type: NRG; PAM sequence: TGG
  source 1..20: mol_type = other DNA
gttactgatttcttactctt

SEQ ID NO: 18207 - DNA, 20 bp, synthetic construct
  misc_feature 1..20: note = Description of Artificial Sequence: Synthetic oligonucleotide
  misc_feature 1..20: note = Target: SCN10A; (-) strand; PAM type: NRG; PAM sequence: AAG
  source 1..20: mol_type = other DNA
aaaaactcaagaatttttgt

SEQ ID NO: 18208 - DNA, 20 bp, synthetic construct
  misc_feature 1..20: note = Description of Artificial Sequence: Synthetic oligonucleotide
  misc_feature 1..20: note = Target: SCN10A; (-) strand; PAM type: NRG; PAM sequence: AAG
  source 1..20: mol_type = other DNA
atctgctatcctaaaaactc

SEQ ID NO: 18209 - DNA, 20 bp, synthetic construct
  misc_feature 1..20: note = Description of Artificial Sequence: Synthetic oligonucleotide
  misc_feature 1..20: note = Target: SCN10A; (-) strand; PAM type: NRG; PAM sequence: AAG
  source 1..20: mol_type = other DNA
gggagtttcagtgtctcagc

SEQ ID NO: 18210 - DNA, 20 bp, synthetic construct
  misc_feature 1..20: note = Description of Artificial Sequence: Synthetic oligonucleotide
  misc_feature 1..20: note = Target: SCN10A; (-) strand; PAM type: NRG; PAM sequence: CAG
  source 1..20: mol_type = other DNA
gggagggagtttcagtgtct

SEQ ID NO: 18211 - DNA, 20 bp, synthetic construct
  misc_feature 1..20: note = Description of Artificial Sequence: Synthetic oligonucleotide
  misc_feature 1..20: note = Target: SCN10A; (-) strand; PAM type: NRG; PAM sequence: CAG
  source 1..20: mol_type = other DNA
cacacaaggggagggagttt

SEQ ID NO: 18212 - DNA, 20 bp, synthetic construct
  misc_feature 1..20: note = Description of Artificial Sequence: Synthetic oligonucleotide
  misc_feature 1..20: note = Target: SCN10A; (-) strand; PAM type: NRG; PAM sequence: GAG
  source 1..20: mol_type = other DNA
catcatcacacaaggggagg

SEQ ID NO: 18213 - DNA, 20 bp, synthetic construct
  misc_feature 1..20: note = Description of Artificial Sequence: Synthetic oligonucleotide
  misc_feature 1..20: note = Target: SCN10A; (-) strand; PAM type: NRG; PAM sequence: GGG
  source 1..20: mol_type = other DNA
ttcatcatcacacaagggga

SEQ ID NO: 18214 - DNA, 20 bp, synthetic construct
  misc_feature 1..20: note = Description of Artificial Sequence: Synthetic oligonucleotide
  misc_feature 1..20: note = Target: SCN10A; (-) strand; PAM type: NRG; PAM sequence: AGG
  source 1..20: mol_type = other DNA
tttcatcatcacacaagggg

SEQ ID NO: 18215 - DNA, 20 bp, synthetic construct
  misc_feature 1..20: note = Description of Artificial Sequence: Synthetic oligonucleotide
  misc_feature 1..20: note = Target: SCN10A; (-) strand; PAM type: NRG; PAM sequence: GAG
  source 1..20: mol_type = other DNA
ttttcatcatcacacaaggg

SEQ ID NO: 18216 - DNA, 20 bp, synthetic construct
  misc_feature 1..20: note = Description of Artificial Sequence: Synthetic oligonucleotide
  misc_feature 1..20: note = Target: SCN10A; (-) strand; PAM type: NRG; PAM sequence: GGG
  source 1..20: mol_type = other DNA
ttttttcatcatcacacaag

SEQ ID NO: 18217 - DNA, 20 bp, synthetic construct
  misc_feature 1..20: note = Description of Artificial Sequence: Synthetic oligonucleotide
  misc_feature 1..20: note = Target: SCN10A; (-) strand; PAM type: NRG; PAM sequence: GGG
  source 1..20: mol_type = other DNA
gttttttcatcatcacacaa

SEQ ID NO: 18218 - DNA, 20 bp, synthetic construct
  misc_feature 1..20: note = Description of Artificial Sequence: Synthetic oligonucleotide
  misc_feature 1..20: note = Target: SCN10A; (-) strand; PAM type: NRG; PAM sequence: AGG
  source 1..20: mol_type = other DNA
tgttttttcatcatcacaca

SEQ ID NO: 18219 - DNA, 20 bp, synthetic construct
  misc_feature 1..20: note = Description of Artificial Sequence: Synthetic oligonucleotide
  misc_feature 1..20: note = Target: SCN10A; (-) strand; PAM type: NRG; PAM sequence: AAG
  source 1..20: mol_type = other DNA
ctgttttttcatcatcacac

SEQ ID NO: 18220 - DNA, 20 bp, synthetic construct
  misc_feature 1..20: note = Description of Artificial Sequence: Synthetic oligonucleotide
  misc_feature 1..20: note = Target: SCN10A; (-) strand; PAM type: NRG; PAM sequence: CAG
  source 1..20: mol_type = other DNA
atcctggttccaattgattt

SEQ ID NO: 18221 - DNA, 20 bp, synthetic construct
  misc_feature 1..20: note = Description of Artificial Sequence: Synthetic oligonucleotide
  misc_feature 1..20: note = Target: SCN10A; (-) strand; PAM type: NRG; PAM sequence: TGG
  source 1..20: mol_type = other DNA
caaactccagtcggccatcc

SEQ ID NO: 18222 - DNA, 20 bp, synthetic construct
  misc_feature 1..20: note = Description of Artificial Sequence: Synthetic oligonucleotide
  misc_feature 1..20: note = Target: SCN10A; (-) strand; PAM type: NRG; PAM sequence: CGG
  source 1..20: mol_type = other DNA
cattctgcacaaactccagt

SEQ ID NO: 18223 - DNA, 20 bp, synthetic construct
  misc_feature 1..20: note = Description of Artificial Sequence: Synthetic oligonucleotide
  misc_feature 1..20: note = Target: SCN10A; (-) strand; PAM type: NRG; PAM sequence: CAG
  source 1..20: mol_type = other DNA
agctcattctgcacaaactc

SEQ ID NO: 18224 - DNA, 20 bp, synthetic construct
  misc_feature 1..20: note = Description of Artificial Sequence: Synthetic oligonucleotide
  misc_feature 1..20: note = Target: SCN10A; (-) strand; PAM type: NRG; PAM sequence: AAG
  source 1..20: mol_type = other DNA
attcagtccatgacgtcagc

SEQ ID NO: 18225 - DNA, 20 bp, synthetic construct
  misc_feature 1..20: note = Description of Artificial Sequence: Synthetic oligonucleotide
  misc_feature 1..20: note = Target: SCN10A; (-) strand; PAM type: NRG; PAM sequence: CAG
  source 1..20: mol_type = other DNA
ggaaattcagtccatgacgt

SEQ ID NO: 18226 - DNA, 20 bp, synthetic construct
  misc_feature 1..20: note = Description of Artificial Sequence: Synthetic oligonucleotide
  misc_feature 1..20: note = Target: SCN10A; (-) strand; PAM type: NRG; PAM sequence: CAG
  source 1..20: mol_type = other DNA
tgcaatatgaagtggaaatt

SEQ ID NO: 18227 - DNA, 20 bp, synthetic construct
  misc_feature 1..20: note = Description of Artificial Sequence: Synthetic oligonucleotide
  misc_feature 1..20: note = Target: SCN10A; (-) strand; PAM type: NRG; PAM sequence: TGG
  source 1..20: mol_type = other DNA
agttagtatgcaatatgaag

SEQ ID NO: 18228 - DNA, 20 bp, synthetic construct
  misc_feature 1..20: note = Description of Artificial Sequence: Synthetic oligonucleotide
  misc_feature 1..20: note = Target: SCN10A; (-) strand; PAM type: NRG; PAM sequence: AAG
  source 1..20: mol_type = other DNA
gggagttagtatgcaatatg

SEQ ID NO: 18229 - DNA, 20 bp, synthetic construct
  misc_feature 1..20: note = Description of Artificial Sequence: Synthetic oligonucleotide
  misc_feature 1..20: note = Target: SCN10A; (-) strand; PAM type: NRG; PAM sequence: TAG
  source 1..20: mol_type = other DNA
tatgcaaatctggggggagt

SEQ ID NO: 18230 - DNA, 20 bp, synthetic construct
  misc_feature 1..20: note = Description of Artificial Sequence: Synthetic oligonucleotide
  misc_feature 1..20: note = Target: SCN10A; (-) strand; PAM type: NRG; PAM sequence: GAG
  source 1..20: mol_type = other DNA
tgcatatgcaaatctggggg

SEQ ID NO: 18231 - DNA, 20 bp, synthetic construct
  misc_feature 1..20: note = Description of Artificial Sequence: Synthetic oligonucleotide
  misc_feature 1..20: note = Target: SCN10A; (-) strand; PAM type: NRG; PAM sequence: GGG
  source 1..20: mol_type = other DNA
gttgcatatgcaaatctggg

SEQ ID NO: 18232 - DNA, 20 bp, synthetic construct
  misc_feature 1..20: note = Description of Artificial Sequence: Synthetic oligonucleotide
  misc_feature 1..20: note = Target: SCN10A; (-) strand; PAM type: NRG; PAM sequence: GGG
  source 1..20: mol_type = other DNA
ggttgcatatgcaaatctgg

SEQ ID NO: 18233 - DNA, 20 bp, synthetic construct
  misc_feature 1..20: note = Description of Artificial Sequence: Synthetic oligonucleotide
  misc_feature 1..20: note = Target: SCN10A; (-) strand; PAM type: NRG; PAM sequence: GGG
  source 1..20: mol_type = other DNA
gggttgcatatgcaaatctg

SEQ ID NO: 18234 - DNA, 20 bp, synthetic construct
  misc_feature 1..20: note = Description of Artificial Sequence: Synthetic oligonucleotide
  misc_feature 1..20: note = Target: SCN10A; (-) strand; PAM type: NRG; PAM sequence: GGG
  source 1..20: mol_type = other DNA
tgggttgcatatgcaaatct

SEQ ID NO: 18235 - DNA, 20 bp, synthetic construct
  misc_feature 1..20: note = Description of Artificial Sequence: Synthetic oligonucleotide
  misc_feature 1..20: note = Target: SCN10A; (-) strand; PAM type: NRG; PAM sequence: TGG
  source 1..20: mol_type = other DNA
atgggttgcatatgcaaatc

SEQ ID NO: 18236 - DNA, 20 bp, synthetic construct
  misc_feature 1..20: note = Description of Artificial Sequence: Synthetic oligonucleotide
  misc_feature 1..20: note = Target: SCN10A; (-) strand; PAM type: NRG; PAM sequence: GGG
  source 1..20: mol_type = other DNA
atctcttcatgcttactcat

SEQ ID NO: 18237 - DNA, 20 bp, synthetic construct
  misc_feature 1..20: note = Description of Artificial Sequence: Synthetic oligonucleotide
  misc_feature 1..20: note = Target: SCN10A; (-) strand; PAM type: NRG; PAM sequence: TGG
  source 1..20: mol_type = other DNA
tatctcttcatgcttactca

SEQ ID NO: 18238 - DNA, 20 bp, synthetic construct
  misc_feature 1..20: note = Description of Artificial Sequence: Synthetic oligonucleotide
  misc_feature 1..20: note = Target: SCN10A; (-) strand; PAM type: NRG; PAM sequence: CAG
  source 1..20: mol_type = other DNA
ggagagtccatgggcctgca

SEQ ID NO: 18239 - DNA, 20 bp, synthetic construct
  misc_feature 1..20: note = Description of Artificial Sequence: Synthetic oligonucleotide
  misc_feature 1..20: note = Target: SCN10A; (-) strand; PAM type: NRG; PAM sequence: GGG
  source 1..20: mol_type = other DNA
gggaggtttggagagtccat

SEQ ID NO: 18240 - DNA, 20 bp, synthetic construct
  misc_feature 1..20: note = Description of Artificial Sequence: Synthetic oligonucleotide
  misc_feature 1..20: note = Target: SCN10A; (-) strand; PAM type: NRG; PAM sequence: TGG
  source 1..20: mol_type = other DNA
ggggaggtttggagagtcca

SEQ ID NO: 18241 - DNA, 20 bp, synthetic construct
  misc_feature 1..20: note = Description of Artificial Sequence: Synthetic oligonucleotide
  misc_feature 1..20: note = Target: SCN10A; (-) strand; PAM type: NRG; PAM sequence: GAG
  source 1..20: mol_type = other DNA
aaggaaaggggaggtttgga

SEQ ID NO: 18242 - DNA, 20 bp, synthetic construct
  misc_feature 1..20: note = Description of Artificial Sequence: Synthetic oligonucleotide
  misc_feature 1..20: note = Target: SCN10A; (-) strand; PAM type: NRG; PAM sequence: GAG
  source 1..20: mol_type = other DNA
ggaaggaaaggggaggtttg

SEQ ID NO: 18243 - DNA, 20 bp, synthetic construct
  misc_feature 1..20: note = Description of Artificial Sequence: Synthetic oligonucleotide
  misc_feature 1..20: note = Target: SCN10A; (-) strand; PAM type: NRG; PAM sequence: TGG
  source 1..20: mol_type = other DNA
gtggaaggaaaggggaggtt

SEQ ID NO: 18244 - DNA, 20 bp, synthetic construct
  misc_feature 1..20: note = Description of Artificial Sequence: Synthetic oligonucleotide
  misc_feature 1..20: note = Target: SCN10A; (-) strand; PAM type: NRG; PAM sequence: AGG
  source 1..20: mol_type = other DNA
gattggtggaaggaaagggg

SEQ ID NO: 18245 - DNA, 20 bp, synthetic construct
  misc_feature 1..20: note = Description of Artificial Sequence: Synthetic oligonucleotide
  misc_feature 1..20: note = Target: SCN10A; (-) strand; PAM type: NRG; PAM sequence: GAG
  source 1..20: mol_type = other DNA
tgattggtggaaggaaaggg
